United States Patent Application Publication US 2015/0376612 A1 - sequence listing, part 32

SEQ ID NO: 77660 - DNA, 2473 bp, Homo sapiens
agccgagatcgcgccactgtactccagcctgggtgacatgagtgaaactctgtctcaaaaaaaaaaaaaaaaaaccccacaaaaattagccaggcgtggtggtgggtgcctgtaatcccagctactactcggcaggctgaggtgggagaatcgcttgaactcaggaggcggaggttgtggtgagccgagattgcgtcactgcagtccagcctggtgacagagcaagactccgtctccaaaaaaaaaaaaaaaaagctccaggggcactggggagaagggagaagtacacatcctgaagtctcccttccctgtgagatgaagattctcctgggaagggggctggggagctccttgtgaagtaccctgatgatttttatgggaaactactcactgtcatttcatgaagtgcctcagaagaccttaccccaaaactgtcaggcgtggggaagcaccgagttagccaaggctgaagcagtgtgtttcagacttctcaggggcaggtcccctccaggaggtttgctggagccagaggttcccaggctggctcctgggtctctgtaccctgagctcactgtgggaatctccagtctggcaccgttcacctgaggcctcactggagccccctcatgcaggagggagacatggcaggggcaccaggtcgtcagcccagcccagttctacctgctgttgctaccttttgccaaattccttctcaaaagaagccttttcagatttcttgcctctggctgctggtttgcccggagtgtatagaaaggagctagttttgcacaagagacattcctgggaccgatctggccagatagacacttgtggcgttttcctcagcagtttacgctgcaaacccatggactcctcagcaaccattcttattagcctggggtcactctgggcgctcttggagcccaagccagaaactgggactctgggtttgttcaggcggcctgctgtgctttggcagggctgtgttgcttcctctctgcccccttgtacattcatggctcatgccagatctcagaggatcctgagaacctaccatgggggtcaggcactattgcagatgggataactaccctccaggatggctgaggggtctccatttgctagatgagggccctgagactcagggagaggccaggtgctgtgagcagcacagcttggattcaccctcagggatgggtgactcctgaaaccatgctgtttccactccgccaggttgcctttgtcttcaacacagcatccagctgccgtcgatcgatgtcaggaaaatcaaggagttctgttctttttttttttgagatggagtttcgctattgtcacccaggccggagtgcaaggtgtgatctttgttcactgcaacctccacctcagcctccccagtagctgggattacaggcacccgccatcacacccagcaaatttttgtatttttagtggagaagatggggtttcaccatgttggccaggctagtctcaaactcctgacctcaggtgatctgctcaacttggcctcacaaaatgctgggattacaagtgtgagcgaccgcgccctgcctcaaggggttcttttctgagcatcctttgtgtgcagttgttgggcccaggaggatagtgcatggtggagatggcagtgaagttggagcatgagacttgtcctgagcctctgccctcccaactgtaaggtgggtgcagtgcacccgccctagggccaaatgataggattccccctccacccaagaggccacctcacctgccctcctacccgcccaaggcagggcctggggcctctgacacatctctgctgggagctgccacccatctttttctgggggatcctccagtggtcagcttgctgcttcctgggcagggcggggcatggtagatgggtgcagagagaaccctcctgtggcagtttcactttcatttctgcctcacaccctgtttccatccaacagtcaagggctgggctgcggaggtgaggaaacatccggtctccaccctggggtacttgtcctagtgcaggttcccaggcctccccctcccctggaatgaatctggggtgggccgtggcatcttctttttaaaaaacaccccattcattcctttatgcacttacatgccacatacttactgagtgcctgctgtatgctgggcactcctgggttctggggattgatacagcagtgagcaccacagtctcctggagccccagggtcagtcttagggagagcttcagggcagttgtctcaccactgggagctcttgcccacagtgtgctgggtcacgtacctctcagggtcctgggctcgtgagtttcttcttcttcttattttttttttgagatggagacggagtcttgctctattgcccaggctggagtgcagtggtgcaatctcactgcaacctctgcctcccgggttcaagcgattctcctgcctcagcctcctgagtagct

SEQ ID NO: 77661 - DNA, 1044 bp, Homo sapiens
ctccccagcagagcctcatgggctggtttctgtaggcccatcctctggatggcccctgggagtgctcccacagccatttttagggttcggtggggtggatctgagattcgtgtcagagatcccgtggagccgtggagcgtcaagaatcactctcacaagggagctccagactccagaccccgctccgcatccccccacccctccaggcccttgagtgctgggtgccccaccctgttaattgctcatgatgttccagggcacacctgtggcagaggccacctgcagactcagctgccccagagggtgaatcgggacccacaggccaaaggccctcccagacagcttcagggagatgtcttcgttccaaacctctctcgccgtcagaatcttcactgatacttaggcccccaccactgggcctgttcttcctctctgacttgctcattgtcctgcttattttaagtctgtcttgtttttaagtagttggttctatgaaggtagagattttggcagctttatttactgctgaaaccccagtgcctataccagtgcacataggagctcaaaaaagaatctgttagtggctgggtgtgatggcttacacctgtaatcccagcactttgggaggctgaggcgggcagattgcttgaggtcaggagttcaagaccagcctgggcaacatggtgaatacctatctctactaaaaatacaaaaattagcagggcatggtggcaggtgcttgttatcccagctacttgggacgctgaggcaggagaattgcttgagctcgggaggtggagattgcagtgagccaagattgcaccattgcactccagcctgggtgacagagctggactctgtctcaaaaaaaaaaagtatgttagtggatcaataactgcctggtggtttttggaagcctttttcatgtccctatggctcagccaaagccacttgtgactctggaatgctctgggccaggaaggaaaccccaggggtgggggagatggggagagagttaggtggtaagtcccaggttccggaggg

SEQ ID NO: 77662 - DNA, 1840 bp, Homo sapiens
ggagggatgaggaaacagaggctccgggagtctataggacctgcacagccagctagagggctttcttgagtccactcctgaggcctttgcgctgagaatgtggcttcccttgtttatttgcccaggttaggctggggcttccaggaggctacagaagcacaagaatgtctgtgagtttctcatcctccagagacttggaggccagctgggctgacttggcttgcaagaaacgtgtttctggagcagtctcagaccttggtatcccaccagggacccttttgtcccaataccttagaagggactgaggagttcattaatgttcacgtttatgaccacccttggtaggtagcccaggcctgcatctgctctcatgggtctgggagtttggtgtcaacagtaaactggcttgggaggcgtgccagtgagagtgtagcatgccaccgggcctgtcccttccccttgggccctacatttgttcctttaaaatagggccatctccaaggtccttttctacagggatggcttagcattctggtctggaattctttcgggagattctctgcagggaggaaggaggatcttttccaggattaagtgatgctggtctgtgggtgggtatttttttatttgttttaatgtctggatttgccaccatttcgggggtgcagaggtgggaagaggtgctgacttaggttttctttgcagcagtgcacagggagtattcataacccagccttgcaaatgaacactttctaccagcctcctggggagcaaacagaacttcacataggaggaagcgtccgtgtgcacatggatctattgaagggactgcctcagtttcaggcctgactccacgactgactgcctatgtgccccatgaccctcgacacattccctacccctctgtgcctcactttcctcatctgtgagggtaataatttagcttagggttgcgagcatcaaatgagggaatttgctaaagggtccaggatagtgcctggaattctgtcagtggcggcggccgctgctgtcgtcgtccctgtggagtgagtgagtgggtctctgcccatggatgcctctctattcagggacctttggcctttgtagatttagtgttcttggttttggcagtttgcaagtcaccctgaaggccacgatggctgaactgatcatcttgcagggatgtgggtttgaggatttgaaactgttcagtgggcatagctaaggagggggcccaggcttgcctggtggcctttcagcatcacagcggggttctgttctccttcagcacatggcccatctgaatattacagccccccaggaggtggaggtgctgtccccacctactttatggatggggaagctgagaaatttatgttaagatgctacttgtatttttttaagtttggagattgagaagagtttgttctggatttcctgaaaatgccaagtctccactggtaatcttgttactattactagctaacatttattgttttctgtatctttttgaatatttaagacatgcacatattaaaaaaaattcagaggactcaaagtatacaatgaaacgtcagccctgttcgcttctcattgctgagttccagttccctggggcagtctgtctctataggtgtttatgcacactcaggggcgcgtgcacgtgtaggtctctccatatgtattactgttgtgctcttgcacattgcatgggactgtgtgtcttggagaaactccacatcgctgcttcatttggagaaagttttgtatcattacctctttttttttaaacagctgtgtggtccagttcttaaaaggatggaacatgtttcttccgctg

SEQ ID NO: 77663 - DNA, 2517 bp, Homo sapiens
tactgagggttgcggagggacctgggaaatcggggcatccacgctgtggggtaagggcttgagggtacttttggaccggagtgtttttcttccttcgtccccttccctttcatgaagaaagggcacccacgtttgtggaccacctactatgtgccccgcgtgtgctcggctcttgaggctgtcattgcatatcatgaggttaagcccagttgaagcgagtagcaattcttggcatgtatgtggtgatttgctgtctcattagagcctcgcagcagccctgcaaattggccagggtggtgattctgggccacctgtctgagaacggggaccgatcggcagaggagcggggtacctagcttggggtcccgcagctagggagtggctggtgcgtagaaagtgctgggtaaatgcccgtggtgtggagtggccttctgccatctgggctgtgtgcccctgctcccaccatgctggtgctccttggcggagtctccggtgtttaacagatcacgttcttaataaattacagaactactgagtcttgggtcaggtaggccttcccttgctccacaactgtagctttgcctctgagaagcagttaagcccttttctcaatgcaagcctaagagaatctagctctgaaagccttttgcaaactccaggtggaaaccttttgtgatgcagcttgttagactgatttttgaaaatgggctctacttgcatttttgtccctgtgggggccccacacatcttggagaattgaacagttgggtttccgtaacccctggtgctcctgggggcccgtggctggtctgagctggcatgcgcaggtgagcctggcagcacctctgtgtgcctcatgcctttcccaagggcctgctgctcctttgccccgtgcaagccccgcaggcgctcttcctgcagccagaggggcacagcttgtacaggatagtgcctggttctttatcccttggtctggggatggggttggctgccttctcccaggccggtttccctagaagacaggctcttcatgatcaatagggcatgcagagtggccccagcaattcatgaagaaatcaggaggagctcgaagccagagctttgaaaatgagtcttaggacccttggaacattacaaaagggtacttgaacgttgtaccgcggatacactcacttgtgggaagggcattctaagacactaaagaaatttggagcagctgctttggcatgttctcgaagtccagttctgatgtgaggcaccggagctccccctgcagtcatgtaagacttgggaaatcccagcgaatacctcgcaccctttgtactgctgtctgtatttatgtcatcttgtgtctgcaactcaagcttgaggcttgtcattgggttggcttgttttgcttggtaattaggaggctctcgcaaaatattcttcgccgagactcacaactaggtcctcgtgctggacctgcagattggcttgaccttgtagacattcttcctttaaaggggtgggaggttcagagcaagctatgctatcaacgttctggggagtagagcattactttctctgaaagagttgttgtcttcaaagtctagttgccttcctttggccaaaatattggcttcaaagaaggcagaagtcatcagggccattctagaacccgaggaagcccactttgtgttttcactagggaagctttagatattttatcacttaagcctaagaaggaaaagaaaacaccaaagagtttttccgtttcttatttattactttcagggcagtgccccctggtggccacatttctatactggctgcaaaatgctgcaactgttgagccagtgaccagggagccccgtgaggttgttttgtttggtgtgagggccaatgagactttagtggctgagagacagtgcaaaggacattatcatgttttccacattcagaatctgggggcgcagggcttctgtactgacgacgggtgatgaattgtctatgaattccctaatgaaaaagtctaaaggtatttgaaaatggccctgctttgggccgggtgccgtgtcttctgtctgtaatcccagcactttgggagtccaaggtgggtgggtcacgaggtcaggagatcgagaccatcctggctaacatggtgaaaccccatctctactaaaaatacaaaaattagccgggcatgatggcaggcgcctgtagtcccagctactcaggaggctgaggcaggagaatcacttgaacccgggaggcagaggttgcagtaagtcgagatggtgccactgcactctagcttgggtgacagagcgagactccatctcaaaaaaaaaaaaaaaaaaaatggccctgctcttaatgtttgggcaaagaatgacccgaatggtccggcccggggtgggttgtttagctgaatgtccggccttgtaaaaatctgatctcagagcaggaagagatgttggccatcatctcatctagcccctttgtcttacagatggggaaacccatcaagagagg

SEQ ID NO: 77664 - DNA, 1276 bp, Homo sapiens
cagcgctcctcagccttgccccctggtgcccgctcgcgactgtcatcgccccatcacttctcgttgcagacagtaccacaggcacctggagtaccggcatcggtcgctgtggcccccgagtgtccgtcagagcctaggggagcctgccctcccgcgcctcgtcggggcccggccaggcaccttggccgccggcgcacggacgcgggcacgagcactagatcacggtgagtggaagcgggcccgacgcggccctgcaggcccgacatccgccaggcaccagggctgggaggggtgaggggcgcgcgccgcagtgcggctgccctggcgtcgccgctgggggcagggcgcgcggggcttggggcctgcacgcttgccctggacgttggcacctttagctaacctgtctgctctgtcttgcaggctgctggacctcggcacgttgacaagatttctctggggtaccgcggaggattactttgaatttcggtggtcgcctgtggtctggcatatttagaacttaagtctattatttcgggcaccatgactttgaggcttttagaagactggtgcagggggatggacatgaaccctcggaaagcgctattgattgccggcatctcccagagctgcagtgtggcagaaatcgaggaggctctgcaggctggtttagctcccttgggggagtacagactgcttggaaggatgttcaggagggatgagaacaggaaagtagccttagtagggcttactgcggagactagtcacgccctggtccctaaggagataccgggaaaagggggtatctggagagtgatctttaagccccctgacccagataatacatttttaagcagattaaatgaatttttagcgggagagggcatgacagtgggtgagttgagcagagctcttggacatgaaaatggctccttagacccagagcagggcatgatcccggaaatgtgggcccctatgttggcacaggcattagaggctcttcagcctgccctgcaatgcttgaagtataaaaagctgagagtgttctcgggcagggagtctccagaaccaggagaagaagaatttggacgctggatgtttcatactactcagatgataaaggcgtggcaggtgccagatgtagagaagagaaggcgattgctagagagccttcgaggcccagcacttgatgttattcgtgtcctcaagataaacaatcctttaattactgtcgatgaatgtctgcaggctcttgaggaggtatttggggttacagata

SEQ ID NO: 77665 - DNA, 2619 bp, Homo sapiens
ccggcgaccgctgacgggcgctgggctcgcggcgctgcaaggcggcgaggcccgggcctggcgccgcctgcgcagccttggtcgcggcgtgccggcgctgcagcgcggcagggggcggggccggccgcccggaggcccaagtggcggggacgcctccctgccgggtcaggttctcagagcgggtctccggcggcggcgacgggggccgggccgcgcgtgacccgccgcagtcacgccgttcttaatcactagtagctggtgctccaggctggcggcgctcacctttctcctagccgggtgacccaggggatttattttatgttggctttctctgaaatgccaaagccacccgattattcagagctgagtgactctttaacgcttgccgtgggaacaggaagattttcgggaccattgtaagtgcttaggagttactgtcttaacttgggggcttgacttgtagcaccccgcgttcacgtctgaagcagtactgttatgccagaaagtgtttcacctgtcaaagtgaaatgtgctgtgagaaactagtttaattccagtttctggagggcgggtattatggacctgtttaagtaggatgcagtgatttattctgagggattcccgttaaaaagcagaactcagtatatactgaaatcaatggttttttgtttttttgtgtgtgttgttttacttgattgtaagtattacacaaaacaacctgtaagttttacatttcttaataggtgtttaatttaattattttaaatcttaagtgtgttagtgggatattttagaattctttttttttttttttaattagacagagtctcgctctgtcgcccaggctggagtgcagtggcgtgatctcggctctctgcaagctctgcctcctgggttcacgccattctcctgcctcagcctcccgagtagctgggactacaggtgcccgccaccacgcccggctattttttttgtatttttagtagagacgggatttcaccatgttagccaggatggtctctatcacctgacctcgtgatccacccgcctcagcctcccaaagtgctgggattacaggcgcgagccaccgcgcccggcctagaattcttggagataaagcaagtacatttggagtagttgccgtgacagcattactagaccctaattgtattttcttttttaatttgaaggcacagagcatggagaatgatgaacttccgtcagcggatgggatggattggagtgggattgtatctgttagccagtgcagcagcattttactatgtttttgaaatcagtgagacttacaacaggctggccttggaacacattcaacagcaccctgaggagccccttgaaggaaccacatggacacactccttgaaagctcaattactctccttgcctttttgggtgtggacagttatttttctggtaccttacttacagatgtttttgttcctatactcttgtacaagagctgatcccaaaacagtgggctactgtatcatccctatatgcttggcagttatttgcaatcgccaccaggcatttgtcaaggcttctaatcagatcagcagactacaactgattgacacgtaaaatcagtcaccgttttttccctacgattacaaaactgccagtcctatatggagtctgatcacaagactgcagtttcttcacagatctcaggaagttgtcgtggggcagaggctttttaaaaacatgtgattagggagctatctttatctgaataataacgaatttttaggtaaaacctgagatagagtactacaaaatcatgttgatgacttcagattttggaagttaaatcatgtctgttatttgcattctttagaaacttgactaagtacctgaattcatatttctattctactgtgcaacatagtgatgattcagaaatttttcctttggggaaaaaaatgaatatgaacatttccattgtgttaagtgtaaaaaggtccagacatgatcataaaatttaaattttatacaattacttggcttgctttaaaattcttcacacttaaaacaccgattcattctattgcagctaagccagctgtctagacttgctgtcagcttatgaggcattgctaaaaaattattgaggaaatggctgtcttgataagcagaatttgttcttcctcttggtaatggctaaattattattaatgcttttaatggttttattttttatatttttcttttttgtggagaatggggtctcgctatgttgcccaggcaggtctcgaactcctgggctcaagctttcctcctctctctggctccctaagtgctaggattacaggtgtgagctaccatgcccagctatttttaattaaaaaaattttttttttccatgacttgtgacacagtctcagaaggccctgagaacgtacgctccaatgctactgatttagaaaactatctgggaagaaactaagtgttaaatgttgaaaggctagaaataacttacaaatagaagatggaaacaatgtgttcaatgaaaatctagcaggttatttattatttatttaaattattattattatttttgagacggagccttgctttgtcacccaggatggagtgcag

SEQ ID NO: 77666 - DNA, 1032 bp, Homo sapiens
tagctcacacctgtaatcctagcacttagggagccagagagaggaggaaagcttgagcccaggagttcgagacctgcctgggcaacatagcgagaccccattctccacaaaaaagaaaaatataaaaaataaaaccattaaaagcattaataataatttagccattaccaagaggaagaacaaattctgcttatcaagacagccatttcctcaataattttttagcaatgcctcataagctgacagcaagtctagacagctggcttagctgcaatagaatgaatcggtgttttaagtgtgaagaattttaaagcaagccaagtaattgtataaaatttaaattttatgatcatgtctggacctttttacacttaacacaatggaaatgttcatattcatttttttccccaaaggaaaaatttctgaatcatcactatgttgcacagtagaatagaaatatgaattcaggtacttagtcaagtttctaaagaatgcaaataacagacatgatttaacttccaaaatctgaagtcatcaacatgattttgtagtactctatctcaggttttacctaaaaattcgttattattcagataaagatagctccctaatcacatgtttttaaaaagcctctgccccacgacaacttcctgagatctgtgaagaaactgcagtcttgtgatcagactccatataggactggcagttttgtaatcgtagggaaaaaacggtgactgattttacgtgtcaatcagttgtagtctgctgatctgattagaagccttgacaaatgcctggtggcgattgcaaataactgccaagcatatagggatgatacagtagcccactgttttgggatcagctcttgtacaagagtataggaacaaaaacatctgtaagtaaggtaccagaaaaataactgtccacacccaaaaaggcaaggagagtaattgagctttcaaggagtgtgtccatgtggttccttcaaggggctcctcagggtgctgttgaatgtgttccaaggccagcctg

SEQ ID NO: 77667 - DNA, 1047 bp, Homo sapiens
gcccaggagttctagacaagcctggacaacagagcaagaccttgtttcaaaaaagaaaacaagaaaaagaatgataatgcaacttccagagagtaggagagctgggctaaatatgaaataagataccataaaaaaggagccaccttggccaggcacagtggctcacacctgtaatcccagcaccttgggaggctaagaaataagatgccataaaaaaagagaagaggtatttctgaaactgatgtgcctaaccttgaaaacaatggccctatagccagtgtgttattttcaaagtataaaatgaatttcacaatgttgctataagtactccacttctcaggtgacctttgagatcagaattgctctatttaaagacatggcccaggaaactgaagttagacagtaagcttctatttaaatcttttaaaaagtagcagctgacattgggatagtaacaggccatagggtgcagttttaaatagagatttattccaatgcaaaaaattctactggggatagaagtaacttctagaaacagtagtttaaatgagtgctttatgagtccaagatattgaacaccagagtactggaattgtgtgctgtagctctaagagttgtgacacttggccaggcatggtggctcacacctgtaatcccggcaccttgggaggctgaggcagaaggattgcttgagccccaggagcttgaaaccagcctgggcaacatagcaagaccccatctcttaaaaaaaaaagagctgtgatacttgctgcatgttaggtggtttaaaaaaccattatcttcatgattgtagcttgagaatttctcagggactctaaccaccacttaaaccttatttgtgaatgtgtttttctctgcatcagtaaagaaaattggccaggcatggtggttcacatctgtaatcccagcactttgagtggccaaggtgggcagatcgcttgaacccagggctctgagaccagcctggcaacgtggtgaaaccctatctctaaaaataaaaacaaaaaataaagaaaattccaagac

SEQ ID NO: 77668 - DNA, 1004 bp, Homo sapiens
gttttcttgagaaataaatttcagaccctggaaggaaaatagaacacttcataatgtataaaatcctctaagttggcaactgaatttttatcattgttttctatttttaaaataatcattgatttgtgtgatgtctacatcttttaacttctggttctgttataaagagtacatgtcacggttcataggcagtaacatttcagagaactgacatgaacaagtagtgaaaattgggcattaaatataaaaataacagttcttcataaacagaaggaaaataaggaaatagaaataccgacgagaaaggagagtccttgaaagagacccaaggaaaccctgaattcatacccacgtcaaatatgcacatatcctgagatgatgccactttgatgaatgtgcattagtctgatttatcatgtaccttaagagagccagatggggtatgtttttgtgctgtgatatggtatttatacaggtacaaatataaggccttaagtaaacaatctgcattgattacaatttggatatttcctctcctcctgtagccatactttgattttgctttaaaaagattattgaatccttttaaaaatatatattcctaaaatatgtatgtgtgtgtgtttcttttctgctcgtcagtgggactaaggcatttttatttgctgtgcatccttcctgatttagatagcttcaatgcaaagaaatcaagtagcatgtacctagtaaaatacaaatagtcatggaattttagagttggaagtcactttacaaattatgtgatttatttcagagataaatctaaggataagtatttgccctcagattacagagctaaccattgacaaactgggttacataaatagcctttagattttttttaagctgataaaaggtgagagaagatcaactttttttttctttttttttttttttttgagacagagtttcactcttgttgcccaggccggagtgcagtggcacaatcttggctcactgcaacc

SEQ ID NO: 77669 - DNA, 1835 bp, Homo sapiens
cactgcagcaccgtctcagagctcaccgtccaagtcctcgtctggagccgccgccacccggtgctgcacttccccctgtaccagagggtcgaataattccgttaccatgtccttcatctgggccacgccagacaacaggccctggaaagggtcgccgtcacccggcgcctcacaggacacccgcagcttctgcggcttcccttcctgcccgacgtactctcccagcagctccatggtgaccgctaagcttccagaacacgacaccgggaagcgccacccggaggcggaaatcagcccgcgtccggcgcaggcgggagaagggagaggagtgacatccgtttgtcggaagtcgctcctcccccttccttcgctttttttccttgtcattggttcctggcactcgggccccacctcctccggctacgcccctcacggccgcttttcccgcctccgccggggccgagccgctgttcggctgacagttgaggatggccggagccgagggcgccgctgggcggcagtcggagctggagcccgtggtatcgttggtcgacgtccttgaggaggacgaggagctggagaatgaggcgtgcgctgtcctgggcggcagcgactccgagaagtgctcctactctcaggtgggcgcgcggcccgggcctcctctcccccggctcccgccgaacctccccttcccggcccggctgtccctattcccgccttgccgcagtcgtctccccagtggtggtccggggccgccgttagtctgccgcttcctcaccccaagctcacccttcccttttaaccccaacctcctgggcccccttcagcctgtgtccagcaggggcccccctctcccctgtctccaactctgtccggcccgccaggaagggccctggagcagctgctctgtccgtcctctccagcctcttcttggtgcaccactgcttttcacgaaaccaccccgcgacctctcagatccagacatctttgtccctgattttcccatcctaagattatttatttatttatttattagggaccgaatgggagagtcaggttaaagagattttcaaatccatagggcatttgcggtgagctccttgacagctagttcctctgcaatttagttggacaagtgctagctagtactttttctttctttctttttttggcaaaatgaagcaagtacccatgtctatctgcagtctgcccccctcccctggaaatagaccggaaacagaacagcaagtggctctggcaagggaggggagagaggagaaaaggatctgtttggcatttggaagacgttgtgagtgagcaagtgtttgagggggtgtgatgtggtgtttagtgactcaccctacacttcgaggtacaaaaatggaaaaggatgggtaggaagaagactgacaaaggatgagaattggtaggaagaagggttacctaggaagaggggtggattggaacactggggagatgaggggagagacttgtattcattatgtggtatgaactgagatcataataccagttctcgttgttgaccaaggttagtttacactgcaaagtgctagattgttgaataaacctggtatccagacatagccccaggtattttaaaacctttggtcaccactaaaacaatttttcccctgctttacttaaaaaaaaaaaaaagaaaaaagttatgtctatatgtaaactatttttgaagtgtagttacctttataaaatggattccttaatattttctttgtggtaaaaaaaaaaatacggaaatttgcacaaatcatgtacacagcttgaaaggaaagtgtgcgtgttcccacaaccca

SEQ ID NO: 77670 - DNA, 1021 bp, Homo sapiens
agacttcctatcactttaagaaagaagtgctggcttgtgtcgtggctaatgcttgtaatcccagcactttggaaggccaaggcagagaattgcttgagcccaggagtttgagaccagcctgggcaacatagcaagaccttatctctgcaaaaaataaataaggaagaaagaaaaaagtgcttgcatgaaaaaaagcactagtataaaaatgaaacttgcaacgcaactgtgttttggttgatgctctgttgtgtaaactttttagtcttaatggtttttacagaaagatcttgaccacagataatctgattttaattatttttcagttcctagtgtgggtattaggtaaaccatgctactacattaattctcttttccattttgggggctttcagggctcagtaaagagacaagcactatatgcctgtagtacctgcaccccagagggagaagaaccagcaggaatttgtttagcttgcagttatgaatgtcatggaagtcacaaactatttgagctatacacaaaaaggtaaacatagtcaagagattgttactaaatgcttttgaagtatagattctttcccatctacactttttcctaatcttgttttttcatgcaaagcagttgaacactaatgaaattaattaattaatttatttatttatttattttgagacggagtcttgctctgtcacccaggctggagtgcagtggtgtgatctaggctcactgcaagctccgtctcccgggttcacgccattctcctgcctcagcctcccgaatagctgggattaaaggctcccaccaccacgcccagctaattttttgtatttttagtagagacggtgtttcaccgagttagccaggatggtctcgatctcctgacctcgtgatccgcccgcctcagcctcccaaagtgctgggattacaggcgtgagccacctcgcccagcactaatgaaatttaatgtaattattttatataattggagagagttgtttctagagcctttaaaaacat

SEQ ID NO: 77671 - DNA, 1097 bp, Homo sapiens
aattattttttccctgtgtcctgaaaaaagtatccctttagtggtagtgagttttttttttcctactttgaaaattaaagatcagcctcttgggggaaataatgtggaaatgtattgaatgcataaattttataatgtgtgaaattatagttaaaattagaccatattattattgaaatcaatattatatttcaggacaaagcaaaggtaaattctggcaataagtacaatgacaacttttttggattgtactgcatttgcaagagaccttatcctgatcctgaagacgaggtaagagaattggaagttaaacctgggggtgtgtcccctctagccttgattcctcaactgcttgtcatatccgagcctctggctcttcaagaggcagtgtgggatggtgaaagggctctagatttatcttttcttatgaatctgggttggatctataattggtacacatctcaaccattcttttcatttttacatcataagaatgaaatattggagaggactttcccaaagccagagcttcttcccttcctctccttccctgactgcctcccccagtccccaaacactttctaagaaatgaccttcaacttcttttgtctctttacggaaaaaaatggggtatacaaacagcatcctcttaaaaacgtcaatgagaagtatatgcaaaattcaaaacgagttcttcctcacttctgcacctcttacctcccaggcataaccactgttaacacttttggtgtgtatatttttagtcctttttctgtgcacatagaagtgtttgagtgaatgtgtgtttcaatgtgtagtttcctttctattaacagaagtgaaaattctgtacactcacttctgcagctggcttttctcaccagtatatcatagacattctttcatgtcaacaaaacacacttacccccttctaactgctgcagagtatcctataatttcatatgccataagttagtcaacctgattgttcttctacagcagaatggcattgtgtaatttttcaatattataaagaaagctagagtgaacatcctcatacagtaatacaactgagtatactccaagtatttatgtag

SEQ ID NO: 77672 - DNA, 1042 bp, Homo sapiens
ttttgccattctgataaatgaagaatagtatcttttttttcattttttttttcagacggagtctcgctctgtcacccaggctggaatgcagtggcgcgatctcggctcactgcaagttccacctcccgggttcatgccattctcctgcctcagcctcctgagtagctgggactacaggtgcccgccaccacgcccagctaattttttgtaattttagtagagtcagggtttcaccgtgttagccaggatggtctcaatctcctgacctcatgatccgcctgcctcgggctcccaaagtgctgggattacaggcgtgagccaccgcgcccagccaaagaatagtatcttaaatttttttttctttccctgatgataagtgaggttatgcatcttttcataagttcattggacatccataataaccttctctctgaattgtcctttcatatcctcagtccatgttttgattggtttgggttttgtctgggtatttaccgatttgaaagagtactttttgtctttagagatattagtcttctgccttcttccttgctttctaattgcgttggaactataattattgaaccaaattatatagagggacagattgaaagtctctttgagttaacaaaaataaaaccttaaaactggattttttttttcttttttttaagacggagtttcgctctgtcacccaggctggagtacagtagtgcgatctcagctcactgcaacctctgcctcccaggtccaagcgattcttctgcctcagcctcctgagtagctgggattacaggcactcgccaccatgcccggctaatttgtgtatttttagtagagacaggatttcagcatgttggccaggctagtcttaaacttctgacctcaggcgatccacccaccttggccttccaaagtgctgggattataggcgtgagccaccacgcccagccaaaactggatattttaaggcatgtggtaaagtgttacagctcctcctgttccacaatatgtgcttttttattccctttaagaagcctac

SEQ ID NO: 77673 - DNA, 1704 bp, Homo sapiens
ctccttgtctacacagttttgtgagaatcagatattaagtaatggatgtgaaagagccttgagattgtttgtaaagtgcttatctcaatgtaagcctttggaacaccagttcatgtagaacaaatatttagtatcttattttactgtgtgccaggttatttccatgttcccgaattcaatgtaatccttaacaaactgcttttctctgttagattccagatgagatgatccagtgcgtagtctgtgaagactggttccatggaagggtaaggaaaatgttccaccttttgaaaccattgttgtcacaaaaagataaaggttatattttacattataattagtcttctaaaaataaattctaatgatatgatcagtgtattattacagtatttataaaataatgggcattttggacaatttggcaatcacaagaaaatttttggtgttctatattcacagcatcttggtgccattccccctgagagtggggattttcaggagatggtatgccaggcctgcatgaaacgttgttcttttttgtgggcttatgctgcacaattggcaggtaggtatctttgtgaagttggtgtgccacaaacttgtgcttgtgaaatttgtatgttcaattcagaatttttagcaactatttttaactgggctctgtggttataaaatagtatatgttctggccaggcatggtggctcacgcctgtaatcccagcactttgggaggccaacaagacagatggatcacctgaggtcaggagttcgagaccagcctggccaacatggcgaaaccccatctctactaaaaatatgaaaattagcctggcgtcacggcgcttgcctgtaatcccagctactccagaggctgaggcaggagaatcacttgaacccaggaggcagaggttgcagtgagccgagatcacgtcactgcagtccagcctgggcaatagaacaagactccatcctcaaaaaaaaaaaaaaaaaaaaagaatagtatgtgttctttctccacaaggtgcatagatttgttgggatactaccaaaaacaaatttatacttaaatgatatgatgcagagtattgatgagaccagagttagagaatggaggaggcagtttttgaatgggattttgaaagataaatagaactgaaataagttgttaattctaacacatggtatcagttggggaggaggtggtgtcttagtctgtctggggtgctaaaacaaaataccttaggctgggtaatttataaacaatagacagatatttctcacagttctggagactgggaagtccaaaattcaggtgcccgcagagtcagtgtttggttgagggcccattcctcatagacagatccttctacgtgtccgtacctgttaaaaggggcaaacaagctcgcttgggcctcttttataagtcagagccctcgtgaatgggattagtgcctttataaaagtggactacaggcacacactaccatgccctgctaattttgtattttctgtagagacagtgtttcaccatgttgcccaggctggtcttgaactcctgagctcaagtgatccactcatcttggcttcccagactgctgggattacaggcatgagccaccatgcccagtctatctggtgcttttattatacactaagaaattaaatcaaaacaactaattaatgaatggtcctgaggcattaact

SEQ ID NO: 77674 - DNA, 1778 bp, Homo sapiens
tcacgccattgcactccagcctgggcaacaagagcgaaactctatctcaaaaaaaaaaaaaaaatagcaaaagctattgtatgcctgatgtggtggctcacacctgtaatcccagcactttgggaggctgaggcaggcagatcacttgacatcaggagttcaagaccagcctggccaacatggcgaaaccccgtctctactaaaaatacaaaaaattagccagtcatggtggcacgcacctgtagtcccagctactcgggtggctgaggcatgagaattgcttgaacctgggagacagaggttgcagtgagtcaagaccatgccactgcactccagtgtggacgacagagtgagactctgtctgtaaaaaaaaaaaataataataatagaataagtgattttattgtctgttgggattttattgtccgttaggtcagtggatatgtgtgtatgtgtttttctttttctttgaactcacagtaaccaaaatatccactgaggatgatggattggtgcggaacattgatggaataggtgatcaggaagttatcaaacctgaaaatggagagcatcaagatagtaccctcaaagaggatgttccagaacagggaaaggatgatgtccgggaggttaaagtagagcagaacagtgaaccatgtgccggctctagttctgaatctgatctccaggtaatgtgtgaagtacgagccatcaagaaataagactgggccaggcgcggtggctcatgcccataatcccagcactttgggaggctgaggtggcggatcacctgaggtcacgggtttgagaccagccttggcaacatgggtaaacctcatctctactaaaattacaaaaactagccaggcatggtggcacatgcctgtaatcccagctactcaggaggctgaggcaggagaattgcttgaacccaggaggcggaggttacagtgatccgagatcatgccactgcactctagcctgggcaacagaatgagattccgtctcaaaaaaaaaaaagaaaactgaagtggaattaattctgtaaacttatggctttggatttcaattttatcctttgcctaaagaaatctctttacaaaatctaaactatgaaaactatggtagtttaaaaaacatgcttcaaaacttaattttatttcagacagtgtttaagaatgaaagcctcaacgcagaatcaaaatctggctgcaaacttcaggagcttaaagctaagcagcttataaagaaagacactgccacctattggcccctgaactggcgtagcaagttgtgtacctgccaagactgtatggtaaagtatctgattgtgctcagtgttagcatgttttgtgtactggtgccccaaaataagaacacctggggaaaacattcaatttttgtaccagaggaagaaaggaaaataaaaagaacacctgaacaatatatttatgaaattaatgtttaggagaccctccaaatttttacattaagcaaatttatgacatagtacttacagttggaatgtttgtggaagaaatggataattatgcagtattttaaatttacttattttaattttagtttacttatctttgttatatcaaagttgcttggaaacactggttgaaagttatagtaaattggccaggtgctttggctcacgcctgtaatcccagcactctgggaggccaagttaggtctcgatcacctgaggtcaggagttcgagaccagcctgaccaacatggtgaaatcctgtctgtactaaaaatacaaa

SEQ ID NO: 77675 - DNA, 1034 bp, Homo sapiens
gggtttgggggtattttctcctctagtggtttcctgtgaaccactgaagcaacctcaagaactgtcaaaatggtgacatgccttgctcaagaacatgacacataatgtccaaaaattgtttcaatggatggaaaatttgcattcatccatctacccttaatcagaatagcatatgttgtggtttctcaagcatgtaattattctagcatgtaactctgattcaatggtaaaagcagctgaatacccaccaatatgaaaatcaagcaatggtctaaaattcaaaattttaattctttgtattaaattaaaaatataggtgtttactgccccctttatatttttttacatagtgaaggaaatgatgaattttcacacacacacagtatttaccacaaatgagttccacttgctggactctattcatgctgctaagggtatccattaggggatcgctcctgtcagtggcctgggcaatcttccctttgttttcataagccagaactgtgtcgtattcatctgtcaggaataagacatctagatctccatacattttctttagggaaaaaaaaaaaaaaaaaagaaagaggagtttccccattagaactgtttatcattctcagaaagccaatttcctgagaatcactaaaaatgtaatttttttatattaagacctagaaaaactggagcgtctttaacacagaattgctagaaggatttattctttttgcctaaatttctttcagaaatctcccaatttcccagatgtcatatggtctatgagatctttatttaaaaaccattgatttactgttaactttttttttttttgagatggagtttcactcgttgcccaggctggagtgcaatggcatgatctcgactcattgcaacctccgccttctgggttcaagcgattctcctgccttggcctcccaaggagctgggattacaggcatgtgccaccacacccagctaattttgtatttttagtacagacaggatttcaccatgttggtcaggctggtctcgaactc

SEQ ID NO: 77676 - DNA, 1050 bp, Homo sapiens
ctgtctctactaaaaatataaaaaagtagccaggcatggtggcgcgtgcctgtagtcccagctactcgggaggcggaggttgcagtgagccgagatcgtgccactgcattccagcctgggtgacagagtgagactccatctcaaaaaataaaataaattaaattaaattaaatattcaacaagtccaaggttatttcagctaccagaattccagagaaataggaagcccttttaaaaattcttaatctttatgggattaggatatctctgctttttatgctttttaaaaaattttgctttttttttttttaatgaaaaagggtctcatatcaacatggtagacgtacagataatttgggaacgagtttctatgcagctttcacttaagaaaatttttatttagactacattattaacagactcaggtgtcaatggcaaagaatattttgtttttgaaagcaaatggtttatctaaacttaaatacttttgtggttttgatttagaatacaatgatttgaagactgaacttaaagactatctcaagagatttgctgatgaaggcacggtatgttgagttaaagaattctaatcatagccctgtaagttttgaatgaagggtttatttcctttgacgattaaaaatgactgcgactggcggggtgcggtggctcacacctgtaatcccagtactttgggaggccaatgtgggtggatcacaaggtcaggagttcaagaccagcctagccaatatggtgaaaccccatctctactaaaaatacgaaaattagccaggcgtggtgatgggcgcctgtagtcccagctactagggaggctgaggcaggagactcacttgaacccaggaggcggaggttgtagtgagccgagaacacgccactgcaccccagcctgggcgacagagcaagaccctatttcaaaaaaaaaaaaatgactgcgacttaagtgggtacttgagagttgaattcagggactgttttgagcaaattggcaggctaaggggaatgaataagaggtagtgaaacatcagagtt

SEQ ID NO: 77677 - DNA, 2650 bp, Homo sapiens
aaatttaaaaattagccaggcgtaggctgggcacggtggctcacgcctgtaatcccagcactttgggaggccgaggcaggcggatcatgaggtcaggagatcgagaccatcctggctaacacggtgaaaccccgtctctactaaaaatacaaaaaaaaattagccgggcttggtggcgggcgcctgtagtcccagctactcgggaggctgaggcaggagaatggtgttaacccgggaggcagagcttgcagtgagccgagatcgtgccactgcactccagcctgggtgacagagcgacactccatctcaaaaaaaaaaaaaaaaaaaaatagaaaatggagatgttatcattaacataattcttaacagtatcatttgacttgtttgtgaatgctatgacctcggattgcgattctgttacttagttctctttcataatctttgcttttcaaaaacaggttgttaagagagaggacattcagcagttctttgaagagtttcagtcaaaaaagagaagaagagtggatgggatgcagtattactgcagctagagtggagtatgaagctttctcattcaagccaatgaaaatgcgcttcccattcttggaataaaagaggtgtggttcacatttggccccctttccgtcctcctctgtttggagaggcctcgcgctcccttcattctctttagctgcagtagccaccgtgtggatgctgacttcacagccagcgtcctctgtgactcagctgatgcagctcattccacagacttctccagtgtactcctactccagtgcacccagggttatttgcatagtttttaagtttgattttgttttgagaaagcaaattggtgtcttgtttaatgatctgttatttcactcccagatgtgtgtgttttgccacagagctgttgccttccagaacctcctccgcaggcatcacggaaggctctcttcccgtcacctagaacctctacaggtcccctcgcccctatgatcgtggtgccttgggtcaaagcttcctcaagcctggtctgctccttctttcacgtccctgttttctgaggtttggtcatagcttagaaaggatcttggggcttgttttctctaggcccaacctccagagtagccaggactgatggttttctggtctggatgtctgtcacaggcggagagattaacagatgacagggttgaggaagcaagcctttgttatgaattttactaatacagttcaagtgaaattttcgttcatgattctattggcactagaattagaatttcagtactgtagtgctcacagggcttcctggagaacatttgcccgtatactagtcccttctctgctgcctagaaaacagaccgggtctcacccctgtgaaatcttggtggtttacgaagtcctctggatttcttgatattatcagggatattcataagcatatatcaaaaatggacctattttgatattctgttatgaaaatgttattagaaccccaataaattattatttttcccccttgaatctgctaaagaaaacagatcctgacttagcttacttgaaataagcagggcagggagccctgttttggaagagacagactgtggaagagattacaaacaaggcccgaggctgcacgaatgatgagttttgtgtatataatgttaatgtccaccgccacttccctaacgactatgagatcttttttttgaagatcctcatggaaggttgtacagagccccacatttgaggggaagtcctttcagttgatatgagatctctttaacacccctcagtctatgtaggaaatgccttgtgatacatagagaaccctcagcttctctctgcctctggaggaccaaggtctttcctgacagtcggagacacaccttgatgtatgttaataaaagcatttcaggctgtggggccaccatgtatattaatactccttatgtgtccagcatctgtgtattcattcgagtgcccaatccctggatgagatgaactaggccttataaaaagtcaaagcctcaaagaaatggcacaaccatgttcttcggcactcaggctcctaattgcagatcctcacgaagggtggtatgtggagctggaaggtcttgtggccacaggacatgctggtgagccctgagctggccttgtgcagagggctccgttcaaaggctcggggtgtctttgaggttgtttatcaagctggggaactcttccaagtctgacaatgtttcgaaccctttttgcaaggttgcactattagtataccatcatgtccggaaaacttttaatcttctcaaatatctgatgtaactaccagaaagtcccttacttcctatgaccaatcaggaccaagtcttggaggtgatgtgttacattacgtgcagcacaatagtaccgatcagttaactcagcgctgaagggcttgttttatgaaaggtactattccttctttcacattaactggaaacctctttttttacctgttgttcacaactagttttcttattgactgtattggactgtctcttcttgtagagactgattttggccaacatattaatgcatgttttatgcaaaacacaaatatgatattagttgcttttaaggagttctggcattgtatgtgcatttttgt

SEQ ID NO: 77678 - DNA, 1271 bp, Homo sapiens
gaaggcaaattggaaacacgcgccagcggcagtggggctcaaagccgacctccatgcatcattctctagagttgaaaggattgacatttctcagtaactacccggcaaaatatatattttcataatgttgaatttgccttttaggaaaacaatgtttcatgaaacacttgtaagatacttattttgaaattaattataaggcattcatatttttaggactgaattcaaagggaaatgcttctttgactttttttcattgttcggttgactttcagctttctggagtgacaaagcagcagtgatgggtgctattcctggttctgtggtggtttactttgtctactaagtgatttactttcaaacctcattacagataatcttactaaaagacttaacatgcacactgctaaaaggtgttttactgttttccattaacgctgttgtatgaacaatatttggtgacatgttgtctttttgtcctgtagattgtcatatctgttatgtagttatccttttggcaagtcctttgatttttttttcctctagaaaatcctcagactgtcaatcttccatattttgaatattataatgctgtggccatttctatagaaagattacttgcaagtgtgtgtcttgaaaataacctcttgtatttgtgtgtttatgtgagttctgtctaagagatcagataagctctggaagcttcatcatctgtacctacatgtaactgtatctgggttacatgggcaggcggtaccaagtcctgctcttcgatggggtggctgagagataaaggttcctgaactctccttgctgtgtatgcaccacatctgtacttcagagaggtggaaaatcatctacaacactgcgtttcttgtggttgtgctgttactggtataaagtcaagtgccttcaatgctaaaggctcagaaatttttcttaaactgatttcatgtcctatgcaagtgttttctacaacctgcataaccagtactttgtaaaacttgtttacgcttcaattgtacatagtgatttttaaagaaatatatagtatttttatttaggtacctccaaacttgaattcgtctgtgtgaagcattgtaaaacgatacatttctcttttgagtaccattacagttgtacagaggttttcactgcttctatttttctactgttactgataagcatgtaacactgactttatcctacatatagttggcatttcaaataaatggcttgtatagaatctgctgagttggatacagtctgtt

SEQ ID NO: 77679 - DNA, 1102 bp, Homo sapiens
gttttacaaagtactggttatgcaggttgtagaaaacacttgcataggacatgaaatcagtttaagaaaaatttctgagcctttagcattgaaggcacttgactttataccagtaacagcacaaccacaagaaacgcagtgttgtagatgattttccacctctctgaagtacagatgtggtgcatacacagcaaggagagttcaggaacctttatctctcagccaccccatcgaagagcaggacttggtaccgcctgcccatgtaacccagatacagttacatgtaggtacagatgatgaagcttccagagcttatctgatctcttagacagaactcacataaacacacaaatacaagaggttattttcaagacacacacttgcaagtaatctttctatagaaatggccacagcattataatattcaaaatatggaagattgacagtctgaggattttctagaggaaaaaaaaatcaaaggacttgccaaaaggataactacataacagatatgacaatctacaggacaaaaagacaacatgtcaccaaatattgttcatacaacagcgttaatggaaaacagtaaaacaccttttagcagtgtgcatgttaagtcttttagtaagattatctgtaatgaggtttgaaagtaaatcacttagtagacaaagtaaaccaccacagaaccaggaatagcacccatcactgctgctttgtcactccagaaagctgaaagtcaaccgaacaatgaaaaaaagtcaaagaagcatttccctttgaattcagtcctaaaaatatgaatgccttataattaatttcaaaataagtatcttacaagtgtttcatgaaacattgttttcctaaaaggcaaattcaacattatgaaaatatatattttgccgggtagttactgagaaatgtcaatcctttcaactctagagaatgatgcatggaggtcggctttgagccccactgccgctggcgcgtgtttccaatttgccttctgcatcggcaccttaatgcagatgtacaaggactaagctcattgctagaatggcaacaacaaaccaaaacaaaaatccaatgaaggatggcagatgca

SEQ ID NO: 77680 - DNA, 2134 bp, Homo sapiens
agagaagtaacttaaaggtcacactgacagaatttctggttctgagcgtcaactctccagctgtgatggcggaactgactgcttgctgcctttaattgtcttgctctctatgggaaaaaaacaaaagggcttcagtctcatggatgttatttggtgtttgtaaagatacgttttcttttaaacgattttcaaaatatgtctaaattttggtgttgtgtaatgcataatgctttctcaccaacagaaaaaaggaaaaaaattgttttcagttaaacactacatgtcctacttgaactccactgggacgctggtttggcatttactaaaccactgagcacatggggtctttcaggatcctctcccttggaagggcaatgtgtgagctaaggactgttttttttcttactctccaatgtaaatatatgagtatttgagtttttaaatcacttcaacattatttgagcatttactttgtatttttacaaacacataaacacacagccgtagcacttagaagaaaagaggctttctaagcattccttcctctgcaggatatttgggatcctcttttctatgtatgtatatatataaaaaactatgaatcactcacactcactcgaaaactatgcagggctagggagcgtttatgagctaccgggtaaatgaattacatgcactttgaagtaaataggttttctattgggtgtcaacaacgctgatttctcccaaaactatagtttctcttacggtcttttcctcctttaccctgtggatatacactcaggaataatctgacattttagaaaagccgaacagtagatagtctccaagatgggaaacatgtcgtgtgtctgcacgccccggcaaactgccgccactcgttctgctgcctgactggttagctgctgtgcgggtgcgctcggtgacactggtggtggtgcacgctcccgagctcccagagttaacactaatctgcaggtcggctgtgcatcgcattcgaggctccttttttaaagagaaaagcataggcctctgttctcatttgtaagaagtttgactcataatagaagacggtgtcttttgaagcccagtctctgtctgtcttcagaaacaaaagtgaatgccgtcatgttccttgatgtgtgtttctgccacatatgtatgttgacatgttcatgtactgcgccggtactgcaagtaagactcaacagacctaatttggatggggagaaaaactctcatccctgacccttccccccccgcaaatgttagaccagagctgttgatcccacacattcatttttctgaaaattcatgaactattctctcatatccctgaaatataaaagtaagtggccactattcctaagattatttagtttataaagtttgcttttaatcatacaatagcttacctggctaaaactttgcgtataaagggaaaacttgctttaatctgtgggattgcggaccgatgcgacttgcagaaggtaaacaggcgtgggttttgtgtgcgttaggttaggtgttagtggacttttaatgtatcttgtgaagtatggttactagggtaggttcaagagctacatgcctctggcttttgaacccatctattaaatcttttttaatgctgtactaagataaatgtgaagtctgagtaaggttgctctcagaaaaaaaaaaaaagcatatatatatataaaataaaatttaggccatgggaactggcattttacttggtataggaatttaatgagaaccaaatcacaaaaataccagatctccttttgagatcgtggacaatcaggcctttggacaatcaccgcttccagtgcccgctgtgcgttgaggttagagacctaccgtttacacgctagagccgagaggacgttcaagtttcttaaagatgctgttggtcttttttcttatgttattgttttagttttgtgattttgatgaataattgaagttcagagtcacccgtggctcctaaggaaaaaacagcatcatgaaaggcaaaaagtatttgaaacgtaattgtttcaattttccacgcccgttctcacatgccccctttagctttatttctgggaacatgtcactagacctcagctagcctgacaccgcaataacc

SEQ ID NO: 77681 - DNA, 1074 bp, Homo sapiens
ttagagtttggttttattaccagtttttgcattatcacataatctgagatgagtgacctgcttgaggagcattcgatcaagcagctttctttcatggctgtgtcctaggctgcactctgtgcctttgtactataactaaggtgatttttttcttgggcttctggcctagaaaaatatattatgctttttattcttgctgactgtggttttcttaagtacctcacttaattctctcagcctataaatttccacttatgaaatctgctaataaatgtcctttttttttttttttaatcttttttagaatcctcacaaattctttcctgatgaacgttttggggatgaaagtccactcttgacaatgagacagcctgggagatgtcgcgtaaacagtacacctcctgcagaaaccatgtttacagatctggactcttttgtggccttccatccacccttgccccctccaccacctccctaccaccccccagctaccccaatccataaccaactcaaagcaggctggaagcaaagacctcccagtcagcacccttcacgttcattttcttatccctgtaatcattcgctgttccactccagaacagctcctaaagctggccctcccccagtctacttgccgagtgtgaaagctgcaccgcctgattgtaccagcactgcaggactgggcagacagacggtggctgctgctgccgccaccaccacctcaacagcaacagcagcagcagcagcagcatctgagaagcaagtggtaagtcaacacttcagtaacttgcttcaaattcggtttatggagaattagaagcaattttcttggccccaagagccccactgggactcagcagtgcccagaagtattgctgacaagtggaaggcatagacttgaggggtatggaaaagagggaaaaacgctagtgtacttgaatgagaaaagacaggaggagagagaccaagaggtgtatatggaggagttgagtatcttcttatctttatgttcatttggcaggattaggaaggaatggggttactgagcaacataaaggaatataccagtttcat

SEQ ID NO: 77682 - DNA, 1071 bp, Homo sapiens
atttgaggtatttcaccgggcacggtggctcacgcctgtaatcccagcactttgggaggccgaggtgggcagatcacgaggtcaggagttccagaccagcctgaccaacatggtgaaaccccgtctctactaaaagtacaaaaaattagccaggcgtggtggtgagtgcctgtaatcccagctactcgggaggctgaggcaggagaatcgcttgaatccaggagacggaggttgcagtgagccaagatcacgccactgcactccagccggggcgacagtgagactctgtctcaaaaaaaaaaaaatttgaggtatttctaaatttcatatacatttctaaatttttatttaaatgataaagtttgcatatttttatttatagttataaatatttttatttatcttagtagtattatagtactacacagatttctatctaaaaaaaaaatttttttttagatgaaaagaggcttgattagtactcctccatcagatatgcttcctacaacagaaggtgggaagtcaaatgcctggttacggcaaaaaaatgctggcatctatgttcgtcctcgactcttctctccctatgtggaagaagcaaaggtaatgaaaaccatttgaagatagtagactactttattacaaaccatatgcacaaagtggttcactgtagtattacttaaatatttggaaatagcctatattttcaacaatagggaaaatgaaagtaagttctagtttgactactcaacagaatagttttctaaaacgtttaattttaattaagcatgtttttaaaacttaggttatgttaaaatgcattttatatttttctcattttagttgccttgcaaattgttaactgccttgcaaattgttaccacttactgaaaatggttgtcactattttgtgatcttgagcatgagggaaatgttctgaaagaagattgcccacttttttacttccttcctaaattaaaggaatgccacgacctcttgtaacatatttctgcaatagctgactgttgggaattatgtttagttttagaataaatgcacaaactaagaaaa

SEQ ID NO: 77683 - DNA, 1043 bp, Homo sapiens
gaaaaaaatgactcttttctacacagttaacaattttattctgaatgaatccagaaaaaaacttagcttctcaaaaacaatcaattctctctctctctctctcatacacacacacacacacacacgatttaaggaagataccagttttcctgtagaatatttgaaaaaaatccagcatttcatgaataataagatcttattctgtgttaatttttttaagaaaaaaattacagacccctagattaaagccatgattaaagatttccaaattacataatttttcttcccacctcaatagcataagcatacatgtatttcagattgttgttcactaatgcccaatgaagaaatcattctctgccttggatgatggacatatattacatgtcaaagatcaaagggtctacttttatgcagtaatgttcccatattatggaaatttgggagattttcataaaaatcttaaaaccaaataaagcacattatgctttgctgcttcaaacaccaagtgattaacatgttgttaaattactgttacacatatgtaggctaatgagcatactgataacttacagtgaccagaaatggcatatgctctacaatgaccttatactactaaacactggtcacaaaagtgagaaggctttttaaaaagcccttgataaaactagattttagtagattgtcatcttttctcttttgagttagtctatagaaaggaatcctttattctttattgcagagcagtgataaaataattttattgtactgttgataccatgctttttctttatccaagaacatccctattaaacaaacatgaaagaaaataattgatttataaccctttttaaagcagaggcacataagtctatagagtggtactgttagtgtatgtactagagaacaaaggaaacctgtctcagaacatttggatttggttggaaacttttcattttctgtctcatagagccaaacttactgagtggcactgcccatagtgtgaacaaaagaggtgtaaaaagacgggacctggacatgga

SEQ ID NO: 77684 - DNA, 1040 bp, Homo sapiens
agcctgggcaacagcgcgagactccctctcaaaaaaaaaaaaaaaaattagctgggtgtggtagcacatacctgtagtcccagctgctcaggaggctgaagcggggagaatcacttgagcccaggaggttgaggctgcagagacccatgatggcactgctgcactccagcctgggcaatagagtacgacttcatctcaaaaggaaaaattaaaatgaaaaaataaaataggaagggagcagattacagaaaaagaagatagaaatgaaatttaaaaattagttggagccaagattgaggttactggataaaatatatgtaatgcagtcttgtatatttcctgttgatggaccacagatttaacactaaaacttcaaacagccaatggaaagagtgaaacatggtaagttgcatgctgttatttcccacctacgaaaagtccttaatgaaattaaccacttatctaatttcactaaaataaatataaaccattttttattataggcaagtgaacaagatatccttaaatatctgattaaatggggagagcatcagttgatgaaaagaatagcagatagaggtaagctccgaaaattagcttgcactagttaccttgtgtaaaatttggtggttcttatatagaaatgcatgccgcacatcagtcttgaaaattgacactgttgcctggtgaaaatggaagtttttaccaccagcaaaatcctttagtggacagggtatagtttattaaaataaatatatcagaaagtcttattttgcagctttaaaaggatactttttattattatgttcttaggtgcttaataaaacatgactgattcgtggaagtactagaatgaaaaatttcatataatttcatataatgactaaagtattacaaaagcataatgttgatgaaaatttggaattagtgttgatggttgcacaacaatacaagtatagtaagagccactgaatggtacgctttaaaatgttttaaataaattttgtgttatgtgaattttaacctcagtttaaaaatac

SEQ ID NO: 77685 - DNA, 2109 bp, Homo sapiens
tatattttatctttatattttgaaatgatctttcctaaggaggagagttgagtctccttaggttttcttttcttccttgagttcttgaaatgccatagttgctttctccaggatcctggtcctcttcacttactttttcaagtttgccagaattaagctcagatgtattttgtctattttctgaaggattaaactgtcaacaatgcaaggtgctatgttttcatacaaagagtggatgtctgcatagctggcagcccacctaccttattctgaggtgtgcattctctcatcagtcaggtgtcatccacttccttcctctagccagtttccaccactgcagcctttttgcctactcttctttcccttttggtccaatgtcttcctctatactgacttactcacattattggtttgcacatagatgtttattatcttgaacttgggaggattctctgcctttttctgtagatccatctctgtaaggcagcagattttctatagatgccatagtctattgtttacccatcccaccaagtcttggtgattttcatgagattttatttatctccttgagttcttttttgctattgtgacttttaaatatcgtgcctagcacactaatgttcaataagtaatatttatgattaatctcaagaagtatttgccttctcttttaggctgtgaggatatcattgctgagagcatctcattagataccttaattgccatcctcaagtggagttctcatccatatggctctaaatgggtgcaccgacaagctttacatttcctctgtgaggaattttcccaggtcatgacttcggatgttttttatgaactcagcaaagaccatctgcttactgctatccagtctgactacctacaggtaatcatttaaacacctctcaaactctgtcattcatatgtgcgccaagaaacccatctatgctctattactcttccatctagggtagggcaggggaagagaaacaggctgtgatcaaaccacccaggactgccctcttcatagttgtacaacaaaagccttctggctcactggctcttcatgtacactgctaccatgactcaacattgaacaagcccaggtcccagccaaatgcaccaaaaagagattggggcagtaggcaaggtcagaagcacatcccaacatgattttcttgacttctattaatgtagcttctctatagtggtttcttacttttggtggagcatcacatacttagattgtaagacagtagcttcagcagcacaaagtaaaaataatattcaatttctgatctgctcacatttttatcaaaactcagtgcatgtattcttccaaagtacggtaatgttttcaactacttatttttaaccagaagtagtttttagcaaattcttgtgttcttgacttaaatgtcaatttaatttggaaatttacattaataatagattttatacattacagaaaatacttacaggcaaagtatatccaagcttaatttttgtgcattggctatatgaattttatgctaaaaactgtacaaccgttttaatgctattaaagacataaacccattgaaccacttcctatttctttgtatttgtactagaaaaataataaaatgctaccattttagtcagaaatgcagtggagagttaaataatacactcagcatctgtgcttttcctttgtatgttgctttgattgcagtacagatggcatacttgggcttgatttatggagaatctttgttcattaaccttgtctcattgtcctgatcaaaactggacgctttatgtttgtgttagaagttgttagttctcttagattattgtctttaggagctttgcattccttcttagaaagtattaaaaaaaaaaaaaacagagagcagcctagatttgctctaagattttaaataaaatacaaagaaatgagggctacattgccatttcacagattgtgcttcactaaccagtagaataccttgtagagattgtagtttcttctgccaaaacaagttgactgacttgtttttcctgtccctccaggagagagtagttactctgcctataccctatacttacactttcatttacttatct

SEQ ID NO: 77686 - DNA, 1032 bp, Homo sapiens
tgaatctggaagtcgtttatatatttcctgatggacatgagccagcggaaaagtttcccactggtattggtgaaacaaatagggtggcattgtaggaataacaagtaagggggaaacaaagatcctgacagtgtattcaggagaactgtcaacgttgaggctatttttagttaccagagggacaaacatgaagaggagaaacaaaaattgataataaaaacagaaagtgatcctatttaacatgcagcaatacagtcatttgtgttactgaatttcagattgatttgttagctctttaagtctaaaccttcagccttggtcattcattcctactggttatgtgactcaattttttgagggaaggtatttttgcttacattaaagattagaaagaaaatatcctagtaaaagagaatagaggaaaggattaaataagtaggagatggatctgtaaagtgtggttatcacacaagcaaaagaaattgtaagaagttgactttgtactacctgccagcctcccaagagcatcactgaaagtctgcctgagcggaatgtattggtgccttttatccattaaatgccttggctacaggtggaatttttctgttaccaggaaattgttaataaaagcttttttttttttttttgagacaagagtctcgctctgttgcccaggctggagtacagtggcacaacctcggctcactgcaacctctgcctcctggattcaagtgattatcctgcctcagcctcctgagtagctgggactctacagacacatgccaccacacccagctaattcttgtatttttagtagagactgggtttcgccatgttggctaggcttgtctcgaactcctgacctcgggtaatctacctgcctcagcctcttaaagtgtgggattacagatgcccaccaccacgcttggctgttaataaaagcttttggccaggcgcagtggctcacgcctgtaatcccagcactttgggaggctgaggcgggtggatcacctgaggtcaggagttcaagac

SEQ ID NO: 77687 - DNA, 1040 bp, Homo sapiens
ttcaagcaaataaaggtaacaatgggacattattggagctaaaaaagatatagcctatcaactcaaataagccccttggtatagaattagcaccatgattcctatactcatttaacaaacacttattgagctcttactgtgtgccagaacctgagattaaagtaatgaaaatgatagtccatcagtctggccaacatggtgaaaccttgtctctactaaaaatacaaaaattagctggacgtggtcatgggcacctgtaatcccagctgctcgggaggctgaggcaggagaatcgcttgaacccgggagtcggaggttgcagtgagctgggatcacgccactgcactccagcctgggcaacagagcgagactctgtctcaacgaaaaaaagaagaaaaggatagtccagtgttaagtaccaataggcagttagagtgtgagtgccctaatagaacactgggtgctgggggagtacctaggaggacgagaagccccagaccccaatatggaaggggagggcaggaggacatatcagaaacttcccagacaatgagacctggagtaggagttaagcaaagattggaggtaaaagcgagcatatcaggcagcaggaactggcctagagataaatgacagctaggcctttttggctggagatgctggggttgcaaagagaggtatggcaagaaatgaggcaacagaggcaaacacggctataagataaagaattcagtatactaaactgagacaattggctttatcctcactatcataaatcttgtggcctgattacatttgtattttctaaaagctctctttggatgtagcatgtgaagaccgtaagaaatgttctagaaatagtgagggtcttaaaagtacatacattctgctgtaagtagatgaaatctgtaaattttatatcaaaattactaattctttttaaaagttttatgctctgtgtattcatttgttcaggagaatttgtggggcacctgttctttttcaggcactgtgtcaagcactttactcacgttgtcctc

SEQ ID NO: 77688 - DNA, 1140 bp, Homo sapiens
catccttgtcataaatactgttgacctcagagcaaaataccccagaattagcaccaacatctacatgcatatttactgtagacttcaaactgcagattttgttttttcatcttgatcacaaatgcatttttcaatctttacaatatgaaatttatttataactttagttccaaaatggactctgtaatgcatttgcccatatttttagtcgtaatggatgtgattatattttattgaattaaaaatctaacagaagcaactgaaagcaatgacctcgttttttcccttagcaacttggtcactttccaagagtgtgtggcttgaaacaaatgcaaaatagcaaagacttactgtccccactcactcatccatttcaccctcttcccaacctccactgtctacatattgacactcttccctctgtctcagttctgttgagttgacagtttattttacttctgtctataattgtctcctcttcagcaaatttgaatgtacttcctagagaagaatggggccaagctaaagaccattatcaacagatcagagtagtaaatgcaggtttcaaacatgcaacataagagttaatctcagtttcatatttatatatatgtttatatataaaacataaaaagtttatatatataatattgcatcttttgttttaaaacttaagtcatttttcatagactacaaactcttcacctctgaccctctgctctcacttttcatttgtctggggggtattttgcctttgatcattaaatgtccaaattctaccctaacctttaagaccgaactcacatgcttactttccttgttttgcttagccattccaagttaaaagtattttctacatcctgagaatttctaaaacactttttattgttcttagggttttatatcttctgacttgttttgaaattacctaggtacccgtctcatttcctctgtcacctagtgtattgtatgctcccaaagttgtgtatcaaaatcttggtcatctttgaataacctgagaacctagcacactgctttattcttagtatactgtcagttacatgttttgaattatttttaatacctttgaaagctgagtaaccttttctttaaaaaaaaaaaaagtggggagtgggatag

SEQ ID NO: 77689 - DNA, 2052 bp, Homo sapiens
ataggaatcagatggtattgagattttcagtagcaacaactgaataccacaatacagtgaagtagtgtcttccaaaagctgatggaaaattattttaaacacaaaatcctatatttagccaaacagtcaatcaagtgtaaggctaaataaaggcatttttcagtcatacctcgaaaaactgcctgtgtagggatatttcccctgcttccccactcaggcagctgctgggaatgtattccaccaaatgacgaagcaaaccaagaacaaagaagtgaaggatctagaaaatgggctccaacacgggaaggaagcaaagggagatcccacgcatcagccacacagtaggtcttgtgggcattcagtctagcccagaccgggagggtgaaagtctccaaggaaagaggtgtctcggaagaaatcaattactttcaatgtttgaacattaaatagcaaatgacaaagcaattttatggctcttgtggtgcatttatgaagaattagcaataagttcttagaaaatgaagcaaatggaaaaagaagaaatgaatatttccaagataaatttaacagtacatatgaaagaataaataattttagtacacagcatggctcagcagtaagcactatttaattataaacactaaatattgatttaataaaaatagtaatatagagaggtaaatactagaagaaagagctaaagaattgagagtagttacctctggggagcagaactgaaagtggaagggatgtaggacggggtgggggggcgggggggtttagggttagcattgtgttactaccagactttttaaatgatgagcatatactactttgattacaaggttaactttttttttttttgagacagagtctcgctctgtcgcccaggctagagtgcaatggcccaatcttggctcattgcaacctctgcctcccaggttcaagcgattctcctgcctcagcctcacaagtagctgggattacaggtgcctgccaccatgcccggctaattttttgtgtttttagtagagacggggatctgctctgttggccaggctggtctcaaactcctgacctcaggtgatccacccgcctcagtgctggtattacaggcatgagccaccatgcctggcccagaattaactttttaaatgtaaagatatgacatcagtgcccataagaaccagagagaccaagagaaggccacaatcctaaagaactggagactttatcatatctttgaagtctgttaactaatgagctcatgcttataatttgaatgtacagagggctgttacttatctccattggtcatcctgtcagccgatgaatgtggtgaggctcagagattattaactagccttttcccaggtttggaagtcacgaagctgtaactcataccagctcttctgactctaggctcaggaatttgggcatggtaggagaagggagaaatactggacccaatttccagggatgagggtgggaggctgtggcctactcttaggaacaaaacagaaaactatagtgattgaaacatcaacttgtaggagcctcagctgtgagcccgatttgtggctgaacaacaaatcattacccccgacttgggttgagggtaatgtgggctcagctaggaggtttaaagctgtagggtcagggatctgagtagctcactcaaactttgcttcagagcacttagccagagaacaggggctttgtactgtttcagccattgtttcctgaataggtagcattcctatgttagtcatttgacttttctggctgcccagcattaggaccttcttcccagccttactgtgtatgtcttcataggaggcagagcccacctcccagtagaaaagccttaaaggtcatatactttcttctgcagccttctctagtcagggttagtggtacagaaaagcagggactatagagaattttttctggaagcagagtggggcagcaacatctagtggaaaaggagagaaggccatggcagtggtgccattgatgacattcactatccagggacagaatgtaggagct

SEQ ID NO: 77690 - DNA, 2217 bp, Homo sapiens
ctcccagctacttgggaagctgaggttggggagaatcccttgagcccaggagtttgaggctgcagtgagctatgatcttcccactgcactccagcttgagcaacacagtgagactccatctctaaaaattaaattgaattgaaaactaaaatgagttaattgaactttttgtcttcctttataaaaaacaaatgcaattttgagtggttcggtaatgtctgcttacagaatttttcaacatgaaaaatgttaaacgttgaaaatgaatgttaagaaaaaataaattttcatttgtttaatttttttcttagggacctcatcctattctcagcaaggctatggttgcgaatcaaagttgtatagccttgaccatggccatgagaaaccacaagacaaaaaaaagagaacctctggtcttgccaccctcaaaaagaagtttattaagcgtcggaaatctaataggtctgccgatcatgccaagcagatgcgagaactcctctctgggtgggatgttagagatgtcaatgcattagtggaggaatatgagggaacatcagcattaaaggagctttctctacaagccagtttggctagaccagaagcccggacattgcagaaagatatggctgatctttatgagtacaagtattgtactgatgtagacttaatatttcaagaaacttgttttcctgttcatcgtgccattttggcagcaaggtgtccattttttaaaacactgctttcttcctcaccagagtatggggcagagataataatggacatcaatacagctggtattgatatgcccatgttttctgctttgttacactacctttatacaggagagtttggaatggaggactcaaggtttcaaaatgtcgatatccttgttcagcttagtgaagaatttggaacaccaaattcccttgatgtagatatgcgtggactctttgattacatgtgttattatgatgtcgtccttagtttttcttcagactctgaactggttgaagcttttggtggaaatcagaactgtttagatgaagagctcaaagcccacaaggctgttatttctgcacggtccccattttttcgaaatttattacaaaggaggatacgaactggtgaagaaatcacagaccgaactttgaggactcccacaagaattatattagatgagtccattataccaaaaaaatatgcaacagtgatattacactgtatgtataccgacgtggtggacctctctgttttgcactgtagcccctctgtggggagtctcagtgaagttcaggctctcgtcgcagggaagccaaacatgaccagggcagaagaagccatggaactttaccacatagcactgttcttggaatttaacatgcttgcacaaggtatgaagttctggtttttaattctgatttatagaattatgtattgatcttccaaattgaaaacacaaccagtatattctatgatttcagtgtttgggatgttacagggtcagtttttttgaaccttcagttatgacatctgagacagattgagggtcagtattaatgtggttctttatttactagtaaaaccaagtattcagtactaatgacttcagagcattaaatgagacttgaggttctttcttccctaatgtaagacgataggtatgggaatatataattaccaacctacaccctctccacccaagctttgaaagagcccagtttcccacattttgagtctcatatttatgttcagtaccttgttgatgtttaaatgtttggataagaataaaaattcattacaaaaatgaagatagtcacatttagatacgaatttagttgaatcagaattgggcagggtttctgatttaaattttaaaatattccttatcttatttttagattcaacttgtacatcaagccacagcctacagcgtgtaaaacacagttagcgctagactcatgtgccttcttcatttaatttaaactaaaatttttttaaaattaggacggcacgttttttgtgttataggcaaacaaattcatgaaagttacattaaaagaagtatacatctgttggtaaatgttagaatcttaacatttcagagctggaaagagaccttttgtaggagagcaaagacagtttgctgttttgacagagtgcattcttagctttctgtgaccatatattaaaagaaaataagctatgtgacatgagact

SEQ ID NO: 77691 - DNA, 2077 bp, Homo sapiens
acacgatggctcacacctgtaatcccagcactttgggaggctgaggtgggcggatcacctgaggtcggcagatcacctgaggtcaggagttcaagaccagtctggccaacatggcgaaaccccatctctactaaagatacaaaaatctggtgtggtggcaggtgcctataatcccagctacttgggaggctgaggcgggagaatcgcttgtccccaagaggcggaggttgcagtgagccaagattgcgccactgcacttcagcctgggtgatagagctagactctgtctcaaaaaaaaaaaaaaaaaaaaaaaaattggagcatgctgcttctctacttaaaatacctttgttaacttcccttgtcgataaagtccagactcacaagagtttatagaatgtgttcaaccttaggtctcctgtcactccagccatgctgtttcttgttccctgtgcctctgtcttgtgtgtgtttatcccattgtttggagttcttattctttgcctattctgttagctgcccatctaatgtctacttttctcttctttcctaacagaaatctgcttttgttcatgcatgcagcagacttggagaagctgatttgtcaccacctccagtagtagagttccattagttcaaaccagtcaaatcatggcatttccctgtaaactcttatttgtaccgatcagatttgaagggaagtagacattctgtttctgggggagaagattctttcctctcttgtatgtgaacaagggaacacaaggcccctattgctaccgacagctgtcttgggatcacaagggatgaagcacttcctgaagatggcagatcagagaggtagagggtatctggatccttggtaacatcatttaaccacatattttattgggcctggagccatccccaccacaggacttctcatgacagataattttcttaatgtttcagacagttctttggagttatttgccatcaaaaatctcttttttttttttttgagacagggtctcgctctgtcacccaggctggagtgcagtgatacaatcacagctcactccaaccttgacctcttgggttcagcagtcctcctgcttcaggcttctgagaagtagccaccacacctggctactttaaaaaaattatttgtagaggcagggtctccctgtattgcccaggcgtcttgaactcctggtctcaagtgatcctcccacctcagtctcccaaagtgttgggattacaggtgtgaaccactgcacctggcccaaaatctcttgattgatacagtcctctttatttttcaagatcaagttatgatacctttaccaacagtcatacattcttttggaactttgcacaatagtcatatgttcttttagaactttacacttctattctttattgccctgtattataattgcttgtatgcctgactcctctacatgactgtatggtttgaaccaaagtgtacgggatgtcgcacagtgtctaatagtgtcacacaacaagtaataggtattcagtaagtgagttaagatgaaatagtaacatgaaagagtgctttgaaagcagttttttaaagagtttctgttctgctaattgtaagccattttttaaataaacatgacgtgtggtgttgtctttaaagtaaaaatggaaaaaccagtgagatcagacattgttttttgcttgcccctcattattacctagacattttcatttagataaaaactatgtcagtctcctggctgtagtcctttacggaaggagcaatattacatttagctctgtttcatctgggattcaattgtgaattattctttagagaaaaattctataatatgcttcatgagacctattcttgtcttcagacttgcctaaaatattttttgcttgcttaagaccagacatgagaattttcttgtaagcagaaagctttgtgacaggactggatgagtttgtagtgaatgttagtgatagctatgacagaagtctcatagcctcaattgcagagtcatagttctgtcacatgcttcaacaataatgtctgataagggaggaaggatggggaagaaga

SEQ ID NO: 77692 - DNA, 1182 bp, Homo sapiens
tttcttaggctcatgactacatatttctaaaccgaaactgtccattttcccttacccccagcccctggcacccacagttctactgtctcttttattttgactactgtaagtaccacgtataagtgaaattatacagtatttgtccttctatatctggcttatttcacttagtataatgtcatcaaggtccatccatattgtagcatgtgtcacaatttgctttctttttaaggctgaataatattccattgtatgttatttttatattttgttaagttcccctcaatgggcacttaagttgcatccacattttgactgttgtgaataaagctgctgtgaacatggatgttaaaatatctgagtctctgctttcatttattttatgaattttatatccagaaaattttacaaccccaccagcagtgcacaagggttccagtttctctacatcttcaccaatacttgttatttgctgtttgggtttttttttcctaatattcatcctgatgagtatgaagtgatatttcattgtgtttttggtttgcattttttaaaaatgattggtgatgttaagcatcttttcatgtgcttattgatcttttgtatttttttagaaaaatattcacattatttccctgttttctaattaggatttttttttgttgttgagtgtggaagttacttatgtatgctgaatatcaatcccttatcagacatgatttgcaaatgttttctcccattctgtaggctgccttttcaccctgttgatagcgtcctttgatgtacacacagtttttaattttgatgaaatccagcttacctagattttcttttgttgcttatgcttttggtgtcatagccaagaaatcattattaaatccagtgtcaggaagcttttcccctatgttttctttcttttttaaagatagataggttctgggtctgtcaccaaggctggagtacactagtgtgattatggctcacagtagccttgaactctggtctcaaacagccctcacatctcagcctcccgaacagctgggactacaggtgcgtacatccacgcctggctaagtttttaaaattttctgaggagatggggtctcactatgttgcccaggctggtctcgaacttttggactcaagtggtcctcccgcctcaacccaaggtactgggattac

SEQ ID NO: 77693 - DNA, 1659 bp, Homo sapiens
tccctaatagcatctgtttcctttagattgctgaaatgaattgctttcttcctgaaatgtggaagaaagacttgaaattgctttgcaagaatcatacgttgttaatagcaactgttattagacttgtcatggaattttggagtcagaaaaacttttagagatctaaaggtgtgaatattgttttagagccgggaaaccagacccagagaggcgagtgacttgttgtggatcctacagctggcgatggattagaccaaaactaagatgtaggcctctacaccccattaccccatttagagagctcattgttactacactgctgagctgcttacttttcattgattgcattcttcaccattcactacctacccctatccatagggttttggtgtaataaagttgaaagcgaaaatgagagcctctgtctcattctgacagctacttcaagtaactgatgaagattttttttttttcctaacctgaacttaataaaaacggagtgatatttcgtttggagttttcttaggctcatgactacattttcacccagttttagcatggctcattcttgcatgaattcagtaaaactcataggtcaatattctgtcccacaaaacctgactactgtattgttttgtgtcccaacaccagcatttaaacaaggtttttctatcagactctgattttaggatttaaagcacctgtgttgatttctaggttacactacctagtttccaggtatcatcttgagtcacagcatttttatagtgtgtctcaggtaaaccttcggaagtgcagtaatgccaaagttattctgatttcagattctagtcacggaagctcacacatccaaaattacataggtgactgttgaaggtctgctttttgttttgcattagatgaatgatgtggaagaaaggaaagaaacataatattaggttggtgcaaaagtaactgcagtttttgccattaacatatagacttttccctcaagttcttattggaaagatcaggtgtaccaacatgagtctcgaagacaatctagtgagttctactaatgcaaagaatgctgttggtatacagggtagagagagatgagtgagaccccaagagtccaaagaacttgggaaacttcggatttgagctggcctatgaaagtttagatttaccgagagattgtagcagttactttgtgaggaaaaagcaagagtgtaaagtgaagattagcttagggggagggaaatagaaggagactaggatgagctgacaactgaatttcctgaggagaatgttttcgttaggaaactttagtcagttggaaagctatttgtctgtagaagagtttgagtgctgaattgaggagatttctacttttatcctgttgtgcaaggtatagagagcctttgaaagtttggaggccagggattaatgtggtaaaccaggaaggtaaacctgttaatgatctacaggttaagttagagtgaggagagaatgtaatgaaccaaggaagacagtagctgctgtagtaacccaaataggagatcttagacccggataaagtcagtaggaaggatttggatagcagatatctgtgggcttaattgtggtaaaatccacatacaatttaccatcttaaccatttttaagtgtatagttctg

SEQ ID NO: 77694 - DNA, 1106 bp, Homo sapiens
gatggctatgataatgacaagcattgcccacttttaaatagtccatctcctctaaatagttaggaagctctcttgtgattttttttgcatgtttctgaaagttaaatctacattcaaaattaagttttgcttttacagaggtttttgaaaaaaattgggtgcattctgttttgaggaatggtaacatagtttgagtccatgtagaacctcccacttgagaatatcacatcctgatattataataaagccaagtggttttattatagtatggtttttaaaggaaaaaacaccacctgtcatttgattgtgtagttacatattacgtaagtaatttcaggctaaagccagtgagtattactgtcctcttcctgtgttttctcttccttgttacattttgaaatggactggatgctttgtcttgtctctttcctgggcaatgaataaaatctatctatggacttgattctgtagagcaattagtggacttaagtagctattttagacgtgttagtgaaacagatttttttcatctgtagaggatgaaaaggacaccatatctggagctagaacatgtggacttgagctttgtatgtccttctgattaattgtgagacacggggcaattaacttaatagttttgtgcctcagagtttccatctttaaagtaaggaattgtagtaggagctatctttgctttagtcttaagggtttggagggcaaaggaggtaaatgggagtaggctgtggaaaggttaaggatgctatggatgtttttagatatctgtatttagaatgaaggtaattaaggaatctcttttctttttctgttaatatgcactaacatgagtggattgacattttcgtgtatgttatgtacctgaaaataaagcaaaaacacaataggctgcatagttgatgttcatgaaggacaaatactttttataaaaagaacgcagattggcagcattttatccttggacttggtagaagtttagctacgtgtaaggagcaagagaaggaaaggtcagggaatttttttttttcttctactgggtgtgaagactactggataaggagagaatgggagagctcgtttctcctctgcat

SEQ ID NO: 77695 - DNA, 1019 bp, Homo sapiens
agacattgcttttctttttattattagtgttgccttttatagaatttcatgtaaatggaatcattcagtgcatactcttttctgtctgacttcttttttttttttttctcaagacggactcttgctctgtcgcccaggctagagtgcaatggcacaatctcagctcgctgcaacctccgcctcttaggttcaagcgattctcctgcctcagcctcccgagtagttgggattacaggtgcacaccaccatgcccggctaattttttgtatttttagtagagacagggtttcaccatgttgggcaggctggtctcgaactcctgacctcgtgatccacctgccttggcctcccaaagtgctgggattacaggcatgagccacggcacctggcttctgtctaacttcttttatttatcataatgttttggagagtcactcatgttgttgggttaattaatattttgtttgtttttattgctctatatagtccatggcatgtgtatattacaatttgtttatccattcaccagttgatagaaatttgggttgttttcagttttgggccattatgaatatttgcatacctggtttcatgtggacatatgtttttatttctctaggttgaatacctaggaatggaattgcttggtagtatggttaatgaatgtttaccgttataaggtatttctatactattttgcaaagtggctgtaaggttttatgttcccaccagcaatgtaggagagagtttcagttgatctgcatcttcatcaacacttggtattcacagtctatttaactttagtctttctagttggtgtgcagtggtatcttgtggttttaattagcatttctctgaggattagtgatgttgaacatctttttatgtgccaattgactatttgtatatcttcttttgggaaatttctgttccaatctttggtctatttttattggtttttttgatcttttgattgagtcttaagggttctttatatattctgaatacaagttcattgt

SEQ ID NO: 77696 - DNA, 1047 bp, Homo sapiens
tagctgtagaaacttaaagaatgattcatagttatcagccttcgtatatccccgaaattatttgattttcaccaaataattcctcagttcttcaaaaacctatgattttttaagtagagagctcagtgaaatttagtaatgagagattaaataattttctagttttcatttgctaaatccatatatctgaatttatactttcttgaaaagatcactaatgctcttgtttctctcccccacttgcagtttcaagtacaataagcacagtattcagatatcttatctcattaattagaaagtgcaagctcataagtcgctctttcagtgggataggaagtacttaaaatttggcctcagattctctgatttcaaaatcttgatctgaggaagctgcttagtaaactttgaaaaataagtctttataacctaacccagttgcatcaaaatagaatagattttcatattctgtttcaaattgttacatatccaacattcaacttgaagaaaattcactgcctgtattaatttcttcatcacatcatgaaatgaatctgactttcaaagtttctagtacaagttctcttgaccaatagtgcaatagaaactggaacagaaacctccttttttgaggaggaatagattgtttgaggggaataaattgtttttcccttttctttattgcaagtgtcccatctctgggacatgtgaagcatttccatgtttagactttttaaatctttttttttttttttgagtcagggtctcgctgtgtcacccaagctggagtgcaatggtgccatcatggctcacagcatcaatcttctgggctcaaaccaccctcccacctcagtctcccaagtagctgggactacaggtatcaccatgacacttggttattaaaaaaattttattttgttgagatggggtctcactgtgttgcccaggctagtcttgaactcctgagctcaagcaatccacttgtctcagcctcccaaagtgctgggattacaggcatgagccatcacatctggcctagacttttttcca

SEQ ID NO: 77697 - DNA, 1051 bp, Homo sapiens
ggttttgtctccaaggatcttaaagtgttgttagggaaactagatttgcacacatgaaactaatttagaaccatctagaacagtttataatcagtgaaatatttatataatgaagtgcaaaaattttggaagcagatataacatgctctgggtagtcagaaaagggagctattgataatgtccagagtcaattagaaggcttcactcaaggctgcagtgccgtggcgtgatctcagctcactgcaacctctgcctcctgggttcaagcaattctcctgcctcagcctccggaggagctgagattacaggtgggtgccaccaaaactggctaatttttgtatttttagtagagacagggtttcaccatgttggccaggctggtctcaaactcctgaccttggcctcccaaagtgctgggattacaggcatgagccactgcatccggccaatgtaactcttaagatgagccttgaagggtgaaaggggtctgatttttcaagaaagtaaagggcaggactagtgaagtaaatgttttgttttgtattttctaagaaataaataactagtctaatattctaaatagtctaatattttgtctgcttactgcagttttacttagtgaaatattggaaacaacctaaatgctgaacaatagaataggggaagtgtccatatttcatgctaaatctgtatcactgaatattattaaaccagtaaaaataattaaagaacaatgtagtctggcagaaaagcatggcttgcagcctgttaaactatcagttttatacttattagctttgtgcctttgggcaagtcacttactgtttttgaactttggtttattcaacttttttttttttttgagacggagtctcactctttcgcccaagctggactgcagtggcgctatcccggctcactgcaagctccgcctcttgggttcatgccattctcctgcctcagcctcccgagtagctgggattacaggcgcccaccaccacgcccggctaattttttgtatttttagtagagacggggtttcaccgtgtta

SEQ ID NO: 77698 - DNA, 1054 bp, Homo sapiens
agcgagactccatctaaaacaaaacaaaacaaaacaaaaaaagatttcctctatgatggtgtattagtttgctccagctgccataaaagtaccacagactgggtggctaaaacaacagaaatgtattttctcacagttctggaggcttgaagtctgagattgaggtgttggcaggtttggtttctcctgaggcctctctccttgacttgcagatggctgccttctctctctgtcctcacgtggcctttcctctgtgttcccacatttctggtatctcttatgtgtcctaatctcctcttaaaaggacagcagtcagattggattagggtccaccacggaaacggcctcattttaacttaatcacccttttaaaggccttatctctgggtacagtcacattttgaggttaaggtttcaacatatgaattctaagcgccacaaaattcagtcaataacagatggctttttaaagtataaggaaaggggtggccccggggggagttttgaagatagtataactataattgaagagtgtagaagaaggagcttactagagaaatgtagccttagggtcagttgaggttgaagatcattcatttatatctattgggcccaattattcgagcctccgcagcagcagtcaggtatatgtgtggagtaaagaggagccctgctttgatgaggctgctggatgctcacatgggcttattaaccagccaaatgaccacctctcgtgcacaaaattgaactgtaaatgagttttattcacatccttggcacaagtacaaattactatttgtcatggacctttttggctgctctcaagttgttgaaaacgtggatgttaaatctattactgctaagattttgttgcattcaccaatgcacaaattggcttgaacatttttttcaatctgttctaaaaatggtctttcatgattactcaccactctcttcctctttctctgtcccactttctttcttccttttttttctccatcttcacttatcaacaatttattgagtacctactaggtgtctggcactaaggatg

SEQ ID NO: 77699 - DNA, 1136 bp, Homo sapiens
aatattggcaataacttttcattacttatacagacatgtgacactaacctcagatgatttaagataaactctaggatatcaaactgtcaagtaaccattaattatacaaaaccagtttttaaacatgagttgtaaattttgttgctttttcatccactagtttaagattaccagacagggtttgggagacatttacctttgatcttttaaataaattgtaacatagactataaataaggtgttagttcattttttgagtacatactatttcagagtacatattagccaattcttggaaaatttattttcaaatgctctccagcatcagttttcatggaaataattgatgtgcccactgaaaagaattcttatgcattcattatgtagacagtaatttgacagtcttgctccaactggtctacccgtgggtttgaaaattgctttctcttaaataaccctacagctggttttacacacacacgttaagagtgatataaattgataatttaaatctaggtagtccaagttagtaattttgtctacagttttgatattgcaaataatccgatggtgatgctgtaaatatatcacattaacccagtgtcatagtataatgggaagaacagtaaatggggaatttggagacttgaactcaaggtctgcccctaccattgatagcttgtgtgaccttgaagaatttacctaaccacagtggttctcagttttgtcctctgtaaaatggggaaataagattaaatttgtttggctttaacaagatttgatttctaagtcatgtctgaaaagattaaattatttgtaaaagtagcagtgtgcaggtgtttttaacctcactaaacatacactactagatgaaaagagatctatttcatgatttctgaggaaactagaagccaataaaagtagacgataatttatgagccaagtgaaaatctgtttgggccaagtccagaggtcatattactaagatttaaaagattcccccttcatggctgcccttattttaaatgggctctagacctggcatggtggcttacacctgtaatcctagccttttggagggaggtcaaggcaggagggttgcttgtggccaggagttgaagaacagcctgagaaac

SEQ ID NO: 77700 - DNA, 1180 bp, Homo sapiens
tgcttttgctcacccatcttatgcacaatgcttttgttcagtaatttgcaataaaagcctatgtgtaattctgggataggagtccaattagaaaaaggtttgaattatactgcaatttatggtacttaactttagttaaggatatatcttgtatgctagaaatctcaattgttttgaagtggagtgcaaatagtccaatttgtatgtgtgaaaaacatacccagactgactgtatatggaaagtatttatgtgtaagttgaacaatacatgtagctaaagattcttcctttaatatttcctttagtttttttttaataatagtttctctaaaccacctccatcttctcttcttgttttaataattgaaaagagtaagaggaggcagtatgatgtcataaaaaagaatttttgactagttggttgagattcttggactctggccagttctgttccctcctacctatgtggaccttgcacacatcatttaaactttttgggatgttgattgtgagtaggtatattggagggctgtctcagttatctatggatgcataacaaaccatctgaaaacatagtgtctcatatggcaaccaattatttaatcacaattctgtggattggcaatttgtcctatgctcagctcagctaagcagttcttttgataaattactctaggctcactcatgtatttgcagtcagttggtgggtaagctggaattggctggccccagatggtctcactcccatatctggggctaagctgggatggctggaatggtgagatgggtggggtgtctgggcctctctttccacatgatgtctcatcgtccaggggctaggctggacttgttcacaggtggcagtcttctgagagagtgagagagcctcactcactcaaggcctctcagaagtcacacagcatcatttctgtagcattcaacaggtcaaagcaagttccaaggccggcccagattcaaagagtggagaaataggatctttgtggttattgaaggattggcaagaattttatggtcacatttaatctaccacaatctgtcctttggacataattatttaccttctttccatatgcaaaatatgctcaccattttatatgacctccacaagtcttattcatttatggcttcaggcttaaagtctagtatcttgtgatctgca

SEQ ID NO: 77701 - DNA, 1058 bp, Homo sapiens
ttattttttactatcttgaggaagttaatgtaggtgcacagctgcagaaatttaactatagcctgctattgtgatctatttaccatatcattgtttattcttgctgtaacgtttacccccagtcctagtaaactcaatttaaaaagtacattttgatgtggaatcttgtcaatatagaacttgaatggataggtaaggcatgattttgtcttgtagaaattttactgcattttctcaggtttttgtcgtgttgcttcatagcagagaaagggcagatgaaactggttcttatgtggattcatggtttttttaaaaatagatctaagtagtttttttccctaaaaagtcctttcacaaattggtgcatctctttagaattagatacatttaatatctacccaacaaatttctgttcattgtctgtccatctattcatccatccatccatccatccatccatccacccatccatccaccatgtctctattcaactgtctatctcattaatttttagggctatatctttgaaaaatactttaggagctgtgtttaattatttaattgtttaccattgtataattgtttaattaaaattgttttaacctgagaatgacttttttcaacaaggatattatggcatgggaatctgttgagatgcagtcatatttcagattttccttttgctaaactaaatgctttcagaacatatttgaagcaaaagttatattaaggtggaaactaatttttactttttttcatatttattcacagtgttctttagattccagtttaagaattatgatttgcctcttgaagatcccttctaccaatgctacaagggtatgtatgtttcagaaaaacataaccaattggttagtcagttttttttaacctaatgagataggcttgtagcaatactgaagacatagttatggcatactgaatgcttccctttcagcctccttctttttcttcatgctaggtcagtgccttgtataaagaactctatctaatacatcacaatgtcatggtttataactggtcctgctaaccctggg

SEQ ID NO: 77702 - DNA, 1075 bp, Homo sapiens
tgcaggagaaaagggaacagtttgctaccagactgagctcagtgtgtagtctctgagtgggcctgattgttcttcccatgaactgctaatgatcccctcacagaccctgcctcctctgaactcactcactcagggctttatcccagagacatcgagctggtcaccaggcaccagcccttctgactgtggctctggggaggctctgggaacatttgaaaaggcagaagcaatcaactcctgggcctatgataatgaccataagtgtccagcctggacagctaccagcaagggcagatccgggctcaaccctggcacccctgggaaccctggagggggctgggctacagccccgtggggatgagatagcggaattgtggcatggaattgggctacagagagcatgtggcttagaccaggaggatacagacactcaggctgggggccagagccctcctgaacaacttgagggagggaggaagtgagacttgagccaggcccaaaagtacactgtaatttcagaaccccagcaagtgagcaacagccttctcagagcctccctcccagccttcctgatcccttatatgcgtaggaaaaaccacttttggggttaggggccctctggaatgagcttcaaatggctcagtttaaagtgttcaggaaccactgatgtgtactaacttagtgtagatattcaccaccatcattgctaccaccgctgccattaccatcactatcatcgccaccccatcttcattaccactgtcaccatcatcaccgccatcatcacctccatcaccaccactgttaacccaaccatcacaaccattacgctaaccaccactatcatcatcattaccatcatcaccccatcatcattaccgctatcaccatcgccaccaccactgccatcaccaccaccaataccacctccaccaccatataaccaccatcactatcaccaccagcattttaaccttcaacaccaccatcacctccatcacgagtatcaccatcaccaccattgtcaaccgaaccatcaccaccaccattaccctaaccatcactatcatcacca

SEQ ID NO: 77703 - DNA, 1114 bp, Homo sapiens
agcagccctcagcctgggtggggctcattcaacttcatgacacccaagatatggaaactccaaaagaaatgtctttattcttttaactttctcaatatttacaaagaacaagaagaacaagaacaacaactgagattggctcgcagagtgggtggcaggtaaacagatgcgtctctctggcttctggggtgactgcaaggcaaggaagggcaacatcccagtacctatggtctgcacagggacagcgggacaagctgctgggccctggcctgcctggggaggggccaaccaggtccagcctcccagcttccaaggctgcaaggctgaagggtcactgcctgaggagccctgccccaatcctgccctccactcccatgcgcacacaaacggaagaggccacactgtggcccagccacctcctcacaggagagcgcctcggggacctcgacactcctgcaggccagaggtgggggctgaggccctctccgcgtggctagaggtagccaaagacattgaagatgggtgggggcacggctggcttggtggggatgggtttcagcaccacgggcctgcacaccttctgccccaggccgtccacatccttgcagaggtgcgccagctccccgggaaaggctgggctcttcctccaaaggcccaggctggggacaggactctgaggcagtgcccccagggggcccggatagatgggctgtccatggtactggaaggggcagcaactccaggcattgacgcggcccaccaaggagaccccaggcatcttgagcggctccttttcagccagggcccttggagacatggacaccagggtagtctcaggtcccaggggctccaagcccttgcaatttttcttaccctcatagggaggtccctccctggggcccagtcccccctccagccccacatggtagctgtgggtgggccttggctcttcccagaaggaagcgggcagctgtcttttcctcatgggcacctggccaggctgggcagcttctggatgctgcctctgtgggagctgctccttagcaagacattcctccctgtaggggttcctcagcaccttctccttgcagcccccacccccgccggggctgga

SEQ ID NO: 77704 - DNA, 1103 bp, Homo sapiens
tccactttgggcagcagaagcctgtgttgaggggacatggttcaggggatcctagcctgggtgtgcacagtgtctgtgcttggacacatccgctgccgtccctggccgcaggctcttgcaggtgggatgaactcacttcttggtcccggcatgttctctttcagttctgtgagttcgtatctgccccagaggtgagccgctgggcggggcccatcatcgatgtcctcctggactacgtgggcaacgtgcagctctgctcgcggctgaaggaacacatcgacagctttgaggactgggccgtcatcaaggagaaggcaggtagggacttgctgctgctgccaaggctggcagatctccctgcctgactcagagtcccaggcctcagggagtgcgactgttcctaaccctgtgagcacctgctgcttgccaggctctgtaactccttggatgaaacatgaggaatctgcctctcagagagctgtgccacctgggccaaagtcacagttagttagtggcagagctgggattaaaacccaggtttgaccaaccccagagtctctccgctacatctttccatgatgttttaaacagctacagctccctgaggggtaccgggaccttcagggtaggttgtgaatgatttggggccaccaagaggcattgtaggaggggagaggggaggatggtggtctaggatgtctcaaactaaagtgcacatgaagcacctgagtgtcctgttaaaaatgcagcttctgattccgcaggtctggggcggggccggggagtctgcatttcaacaggctcccaggtgacaccaaggctgttggtgcacagaacaccctggtgtgggagacaggcccctgaaccctggagccagccttgccagggccttgctgggtgaggcctctccccacctgaacagaggggcctgggcaggctcgttgtccagctcctttcagctggacccgcctgaactgtgccaggcacagtgaagtggagttcggccactgtccctctgatgtgtgcagagtagatggggctgcctggctaagtcaggctgaggaagccagaatccctcttaggcatttttggagctcacctgg

SEQ ID NO: 77705 - DNA, 1070 bp, Homo sapiens
ccgcgggacgggggtcggacgcgaggctcagcccccagctcgcccccgccgctttccgaccccctgaaatacggagtccggacggatactgagggccaagtcgcgcccccctgtaccccgtggatgtgcagctgaggaggtccagctcggccccgagcccccgcccccagcgtgtccgccccaggtggcccggggcgccgcctcgacggcgctgggtgggcgccctcgacggaagcagggacagggaggctgcagcactacgggtcgcctcctctttgttaagtagccccccagtcagcagtccacggccccacccacccgacggctcggccgtcaaagacctcctggcccctgccccaaccccaagggaggatctaggggttgcacggggcaccaggtcgtctgctccgtgggcgactagaccgtctccatctttggagtcaggacccacctagagaggatgcctcaagttgtgaggcgcatgagttaggggtcggggaaaagaaaatactcaggaatccctgatggagagccttgtctgcgcagaacgaggcccagagaccctctgagccaggctaaccctgggcttgggcaggtggggaaactgaggccagacagggcagggctggtactgattgtggtggacctggggcttgaacccaggctctggactctcagttcagtgctctttgtgttacatcggctcaccttccaggttgccgtggggtcaggcatcctgcaggggactgggtggcatggctgcctaagacccttcaaccctgagcagggggagcctgtggagtgagggctgggtggcttgagtcggggccacacagccccaggttcaagtctcacttccacctgttggaaagcgaagaggctttggttggtccgctctccccctcagcaccgttttgcacatctgtgtcatgggaaccatgtgatatgattagctggagcttttcctgtgacaacagagtcctggaaatgggtgtgcacagatgcctggttcttcaagcttagcctcctctctcctatgactgggcaggaaaatgggtcaccacggcagc

SEQ ID NO: 77706 - DNA, 1050 bp, Homo sapiens
gagctgctcctggaaggcagcccaggtgtttctgcatcacccaccagggagtggtggagctggggtaatgatgggcttagccacccgggagctggaggctggcatgccctctggccaccactcggcagctgagagcacagcagaggcggtagctgctctttgtgccatgcagtgaggccgctcactctgctccctatctgccctgactcaggagactggaagttagatggcagatggggtccaaagccctcacccctcaccgggggcttgggtgccttggcgaaggatgaagtggttaacccactaaaatatgacgtctgtctggtaatcacaggggtggaggccatgcagggtcttttcccttccctgcacatggcatttattgagcacctactgcatgcggggaccatactgggccctgtgctgcatggtgggtttttatgttgaacttgcattgtgtggatggtggtgacagaaggaatatccttggaaaatacagcatcttctttactttcctgtttctacatcactgggctaagcttgaggaagggcgccccgtggaagacacaaagacacttgggaaggtaggggtgagacaaggaccagacctctggcagggactgcaaatagctagggttctcgtgcactcaaggtgcatttcatgtttgacgaatgaatgagtcagacataagcaggaaaaccgcagggtcctattgtgctttgttctgttatttgtcaaacaggcccccagtgggcacctttgtcaggcctgtgctgggcactgtgacactgatgagaaagacaaggtgcctgcccgctgtaggagctcactgcctgctggccaagacagctggacacaagcagtgtctgagctacaggtcatgcctaagaggcctaaggacattgggaacacagtgagaggtcaatatgctctgagggagtgggggtgttggaaggttctgcagaggaggtcttttgagctgagttgaaggatgtatatgagtgttcaagaaggatttgggaagggcacattccttttggcgggtgcgg

SEQ ID NO: 77707 - DNA, 1975 bp, Homo sapiens
ttaaaataaatactaaaaatcctaccaagttaccatagtccatagtggataggcctcgttcccaggggctttgcccaaaaggctgcacattttcttgctacagtctaaattgcttaaaaaattgaagagccggaatgttccattcagaatgcagtcccattaggtgacaggttccactgcatggcctaaaattaatcaatgtttatcggctgcataaaggatgttgtagtgggatgttttatagagcaggtaaacggaaggggtggcggcctcagggaacacgtggtggttcagggcggtatccatctcgtccacgtactccacttgcagggcaatgctcagggcctgcgacaacgccgtgatctggatgtggtcacactccgtggccatgggctctacttcctgcaggggccaaaatgaaaacaagccagcttaggagggaggcctggcagaggacaagtgagttcagctctggctctcagggtcatggtcacagcctctgtgctgggacgtcatcttcacaacatcccatgagttgggtatggacgttctcatgccacacgggaaacagcctcattgagaggcagcatagctagaaatcgctacaattgcaagaatcgaacctgaatcttttccattctagaccttgtagttacacctgacagcaggctactaatttagagggatctggaaacggggggcagacatttttcaggttgggcatcaaagaatcttagagataaaaggcaccctgtcatccaggggtgcctttcaagcttaagtgtttacagaggctaggctggtgagtgagggtgcgagtccgggtgctgcagagacgatggaagaagcagaggcggtggcaagcaggcgtatgtcctacatagagagggcagctgctgcttagtgcctgctgagactgccctgcaagagcaaggacctgggggctgtacttcttactttccagcagaaatccaaatattcatatgaaaagtgcctaatttttaaatatcggcaactctttctggtaaataccatgcatcataaacacgtcaagcaaatgtgactcttggactatgactgtggttttgtaaacaggccagtccaaatcccttatttttcagatgggaaatctccagagaggggaagtgacttgcctcaggccacacagctcaggcagctcaggtgggacctgtctgcagcttgctgacctagctctgtttgaattgcaagggcagtcgtgacacccgagtcccttggctacggatgggtgctgaagtctgcaggacagggccacaggagcagagcccagggctggggctgagaccccaagcacctacgtgagtgcagaagtctttgatgtccatctcctcatcaatgaagtgccggaagaagtctgctcggttcctgatgaaggccgacgtgagcaggcgcaggaactgcacgatgtggtccgaggcactctggtcgttgaacaccttcagcaggctggacactgagccatccttctctaccagttccaccacactgtaaaactgcgcccgcccggccctcagctagggaggccaagcaagccccagccctccctctgcattctccctccgctccctcccttcgcgtgaagccctcacgtgcattttcatttgtagattctcaggttgagttagaaaatcagtctgagattctgcctaagctaagtaacccagggttagcaagactttgcagtttgtacactagtccagaggcatgtttgggagcggcagttgggtctccccaccatgactacctgggtttggattctcacgtgcacactcagagtggcaagcgtctgagagtcctcgatcccgccccttcactaattggatagggaggcatgaggtggagatggaatagggtgagggaatagggtgagggctccctgtgcccacacacccccacaagcaggaaggaaccctctgtccttccccagccaggagga

SEQ ID NO: 77708 - DNA, 1084 bp, Homo sapiens
gacagctatcagagaatggcagggagactctccattttccaaatgatgcagtggtggtcagtggggttagtaagcgggcttaatatcccctaatggcacctgagccgtgggagtgaagccacttgccataagccaaacatagatcccctgatgactgtccgtgtcctgccctagccatctaacagcaaattcttttccttggtggaggagctaatacgtagacaggctttaaaaggcaggagcagccttccaagcagtgctactctcgcctggtaaggtgaagttggtgggcagagcttccggagtgtcctggatctgccattaaacaaggaatatccctccccagctaatctacttaatacataagcaccacggaaaagcagagttcttggctgcatgccaggtacccagtattaagaagccaggacaaaagtagttatggaaaccattttaatgctaggagaatgtttttacttactgcctagggaagctgtagggcttggcccacatccagcagggcctggggcccctggaagccactcactgagttacagccccctccccactcctgtatctgctcagggtggtgatgtgtttgctcctagactctctctcatggttcccctgacactcctgcttgggaagccaccgagtcactgccaaggtgacatgcttccccatctgcagtgccctatgcttcctgtcaggaaggacaggttggggaatatccctttgcagagcccatacgatgagtgtgtcaggtataatagctattttcacacaaggaatctcattctgttttaaccaataatccagtgacacataggtattgttgccatttcacaaacttgggaattggggctcagggaggtgaagtgacttggccaagatcatacagctagtaagtgaatgctgaagttagaaccctggcattctggctccagagctctcatttgtgcttaaaataggaacccagtcaaaagcagggactgtgctctttctgttgctaattgttcccattgatttaaaagtttcctttggagagaaagtatcataataaacatgcagttgtaaaaacaagctc

SEQ ID NO: 77709 - DNA, 2097 bp, Homo sapiens
gcagagatgttgacacctcggtgcccaagtcagcaaattcagaggcagacttaactgctgtctgctcagcatggaagccaggagccaaaccagtgggcttgatgacagtgagctatttctggtggctcagggttggggcttgggccgaagatgtggaggccctggcttcccttcctgaggacagactgaggtggaaccttttggctctgccagcttctccatgtgcagtcacagcactggtggcaaggcataggagagctgggctacaaagaagcattcagtgtctcctggggcggcagggaggtgggggttgtaattgtgaactcaccaaaccccaggtgggcagtaagtgggtgggtcataggaagaaaagtgatcttcagtcaggagacttgggttctgggctctgtctgatgactggctctgtgatgtgagccaggtgacttctctaaccctgagttgcctcatctgtaaagataattccagtcttggaggatttttatggagtaaaaaaggacagagcggtcctgtgtatcccctgcaaatggttagacgttatccatttacagcccctgccaagccaccactagcttcttcagagaacttttgaaccctgcctccctaaagtagttctaaaacatttttcactgtgttacccatcaagggaaacaaaatgtttctacaaaccatagtaaataggatcgtttttgtattgtgtttcaaggaggaaaagctgaccagcaagaagaacgtcggagacaaaagcagatgaaggttctgaagaaggagctgcgccacctgctgtcccagccactgtttacggagagccagaaaaccaagtatcccactcagtctggcaagccgcccctgcttgtgtctgccccaagtaagagcgagtctgctttgagctgtctctccaagcagaagaagaagaagacaaagaagccgaaggagccacagccggaacagccacagccaagtacaagtgcaaattaactggtcaagtgtgtcagtgactgcacattggtttctgttctctggctatttgcaaaacctctcccacccttgtgtttcactccaccaccaaccccaggtaaaaaagtctccctctcttccactcacacccatagcgggagagacctcatgcagatttgcattgttttggagtaagaattcaatgcagcagcttaatttttctgtattgcagtgtttataggcttcttgtgtgttaaacttgatttcataaattaaaaacaatggtcagagccattgtgtcatcctgattttttttttttttttttagatagaagatgggggtggtggtgtagtttgtttcattattaacttagtgattctcctgggccagcacagtgctaagcccttgaaaggacaggaatagtgtcaggcctctggctgcaggccaagattggacagtgtgaatggagcaagaggctggaatgttcaagaggtgcatgttcctgctttacccagagcagcaccctaatagctccttagctctctccactctcctgggtattgtctgagccaccgtgggaggtgggcagggatgaggttgctgtcttcaggcttccctcacatcacagagccaacagtaacagtcgctaggtctggcgtgtgaagccctcaggatctagccccagccttgtctccactccctcctgtttgacagagcaggctcctgcccacggttccatgcaccccttctcttgtcctgagcctttgtgcagaataggcttttccctcggtctggattgccttttggccttctccatcctggagcactgccatgggtcctctagtcctgagcctctaaggggaagcagtgcttctcctggggctcccttagtgtcccgtgcttaccctcttcatagcacttgccatgctgtgttcccttagctgagctccttgggagaagaggaactcaaggcttggtcagcctggtataaatatgtgctcagggaactagggacttcctgatgctgccccagctttgtctggatcagtgtaggtgagtatccacaactcccacaaccatgggagaagcatagatgatttctgcacagctgtctggcttcc

SEQ ID NO: 77710 - DNA, 1103 bp, Homo sapiens
tcaggtgatccgcccgccttggcctcccagagtgctaggattacaggtgtgagccaccatgcccggctcaagagctttttaaaaacactacttgctgggcacggtggctcacgcctgtaatcccaacactttaggaggctgaagtggaaagattgcttgagcacaggagttcaagaccagcctagacaacacagttgagaccctgtctttacgaaaaaaaaaaaaaaaaaaaaaaaaaaaaagaaattacctaggcatggtggtgcctcccagctgcttgggaggctgaggtgggaggattgcttgatccaaggaggttgaggctgcagtgagccatgatcatgccactgctctccagcctgggcagcagagtgatacctgccttaaacacacaaacacaactcaagtgagactttgcttcccagaggcctgaactctatttcagatgaatattttctgttacttccccccaggagcgaatccgtttagctcgacagattgagaaatctgagtatcggaacttccaggcttgcctgcacaactcttggattgagcaggcagcagctgccctggagattgagctggaagaagacatgtataagggtaagcccttgggcgggatgggaattgaggaagttgaaatctctctttaacttttgctttgttggaaccatctctactactgtgggtcttgtcaaaatcagcaaggcgtccttccccctctttgctaacaggccctggtcccaggtgagcctactgccctcggtcagtctttgtttcctctgtctctgtcttgtgccctcagctgcctcctcttacatggacaggcagtggagtacagtgaggaagggagcaggctctctggccaggctgcctgtgttagaatgccggctcattgccttaactatgtgactgagtcaagttatttaacctctgttgtgttctcagctttctcctccataaaatggaagtagtcaactacctacttcatgggattgttgtgaagactgattgagttaaaaaatgttaagtgcttatagcattgcctggcaaatagaaagtattacattttaagttatttgtcattatggttcctactacac

SEQ ID NO: 77711 - DNA, 1065 bp, Homo sapiens
gggctagattgctctacaatgctgcagaagtttctacctgcctggctgggaggtaggagggtctggtttggggatgtggccctgaggagaggaccagtgtttggcagtggccatgtattgatctcccagttcttcctgtggcaggtcccacgtacctcggagatttatgtccaccgaagtggtcgaactgctcgagctaccaatgaaggcctcagtctgatgctcattgggcctgaggatgtgatcaactttaagaagatttacaaaacgctcaagaaagatgaggatatcccactgttccccgtgcagacaaaatacatggatgtggtcaaggtagaaagcagttaaaaccccagtgctaatgaagggattgtgctgctcccttgcagagcaccttgctgtgggactctggcagcataacccttgaaaactaaggaatggttctgccaacagctgaacaaggagacttgtagaaaggattgagagcaacatacctgggaaaagggagaaaaggggagtgactgaaggtgggaggcattttctccctgaaccatttcttccttctctggccctgaagtcccccctcctcaccagacagtgcagtggtcatggctgtctggatatcctgtcagagggttgtagacagtgtggttagtgtttcctgctgaggcagatgctacaggtttggcacatccctggagcaggtgccagtaaattctgtcttttgggttttaactcagcaggcattccccaggtaggtgccgcttaccatgggacactgtattagtgaccaaagtggggtgggttctccttcccagaggtttgccagctgtgaataaagttcaggtacagtggagcagtatggaattactgggcatatggttacattgggaggagaagaggttctatcccagcttcctgctggcaaagatgtggaagggtacagaggaggtggaattccaggaattgagggagcaaaaccatggcacagttcaaggaatgttggcttctctggctcaaaaggaatattagctgtgtggggaaatagggtggagataaggatgg

SEQ ID NO: 77712 - DNA, 1839 bp, Homo sapiens
aggtgacatggtgtgggcaatgccttcttctcatcgcagaatgctatggtgtggtatcatccagaccctggcctttagaaagccaagagtgcatgagggagattagttgagggcctgatggtggtggtggtagtggggtgtgtacgtgtgtgtgtgtgtgtgtttaggatgagtgtagggtgtgctatagatgattcctcttaacccgctgctgaccaatgatatgggtctctctggatctgcaggtgcctggtagtggatgaggctgaccggatggttgagaaaggccattttgctgagctctcacagctgctagagatgctcaatgactcccaatacaacccaaagagacaaacgcttgttttttctgccacactcaccctggtgcatcaggctcctgctcgaatccttcataagaagcacaccaagaaaatggataaaacagccaaacttgacctccttatgcagaaaattggcatgaggggcaagcccaaggtcattgacctcacaaggaatgaggccacggtggagacgctaacagagaccaagatccattgtgagactgatgagaaagacttctacttgtactacttcctgatgcagtatccaggccgcagcttagtgtttgccaacagtatctcctgcatcaaacgcctctctgggctcctcaaagtccttgatatcatgcccttgaccctgcatgcctgtatgcaccagaagcagaggctcagaaacctggagcagtttgcccgtctggaagagtaagttaggactgtccccagaggcttaacctctagttagttactggggtaaaaggggtcaggatggtggggaaatggtagaaaagccaccttctgtcataggggccttgtctcagtagtaggtagcctttttttttttttgcacagcatttggcaaggttactgtcatttagtgaatttggttgcagttaaatgccatacagaaacttcaatactaatgaatataggtgacaatacataatattgaatgtatagacaatagattaggtcctgtgctggcactttagattcagaatcacattcagttactctcctaacatccttaagaggaagcagaatagattcatggttaagagcacagatcctggaaccagaatgcctgaaatcaaatcctagttctgtcactccttaggtggtcaagttatttaatttctctgtactttaattttctcattatttggataataatagaacccattctagggttgttatgaagattgattgtaaattcatgcgtgtaaagtgtttagaacagtctctagcacatagtatgtatatattgctaaatgttagctttaataatttctagtccctttactacttattaccattatcactattctcatttatagatggaaaaatgaggtctagaaaagctgatcagtgtgcccaaggtttctctgcctggaagtggtagagctgggcctcagacaagcctgtcggacctcagagcccatgctatttcttattcctgatgtctttgtccatctgcctttggaccagactgatgctcagggaatggggtgcagattgtcaagatgagggcctggaaagttgaggcagactacaaagtgtcttttgccagtgttttgtcaggtcatggggtaattagtttctagaacaagtgtttgatttactggtttttaaaaattggtaagtagtatcagtggtttactgagattagcttagaacaaggcttggcaaactataggcctcgtgccaaatcttgcttgctgccctttttttttctaagatggggtcttgctatgttgcccaggttagacttgaactcacgggc

SEQ ID NO: 77713 - DNA, 1173 bp, Homo sapiens
ttaagaaaattttcttttactcctttctcaccaaagaaaagtcttgggaaagtattgtatggattactgtttcctgctcctcacagaaacaacacatacacccaaaacttgccctttctctctttattgtttcatttcttggacatttgtaattcgttactggtgacctaagacctcagtgctagcctgccatacttttcctcgggttctaatttacatgtgccttctggttccttctggggaaatctgtgtagagtggaggagctttgggtcggtcagggtggcacttggctaccttattctatgcaaaagaatgaattccagactaaagtatgttcatctgttgattcacactgtttttactttgttttgtttttttacttttaaggaagtgggaaaactcttgcctttgccatcccaatgattcatgcggtgttgcagtggcagaagaggaatgctgcccctcctccaagtaacaccgaagcaccacctggagagaccagaactgaggccggagctgagactagatcaccaggcaaggctgaagctgagtctgatgcattgcctgacgatactgtaattgagagtgaagcactgcccagtgatattgcagccgaggccagagccaagactggaggcactgtctcagaccaggcgttgctctttggtgacgatgatgctggtgaagggccttcttccctgatcagggagaaacctgttcccaaacagaatgagaatgaggaggaaaatcttgataaagagcagactggaaatctaaaacaggagttggatgacaaaagcgccacctgtaaggcatatccaaagcgtcctctgcttggactggttctgactcccactcgagagctggccgtccaggtcaaacagcacattgatgctgtggccaggtttacaggtgaggtttagttccatttaataaatattttctaggtaaatcccaaatgctcgttggtaaagatgaatgagctgtggctcctgccctctagggtaagccactctcatctataagccagacaattaagccctacagaaaattgatatagtgacattttttcagttccctcaaggataatacatggttggtgccattgtggatgcataggaaatttattggatacagtagatgctcagggcagggattagcaaactgtctgg

SEQ ID NO: 77714 - DNA, 1355 bp, Homo sapiens
cctgcccccacaagaaaaacccctgagattcttactctgccttcagaacgacttaggtgtggcaggtttcatcctccgtgctttacataattttctttatttacataaaatgtacaacttagatattgttaggtaccctcccccctttttatagatgagagcactgaagttcagagaggagtgggtggcactatccaaggtcacacaggcagtaagtgttggatttggaattcaaaccaggtctagctcatatgtctttgttccatcacatgtgtaccctgtgttccaggcaaagctgtctgttctgtggtattctttgttcttctctaggtgggagcaactgtgtgatagccatctttgtatcctcagttctttgtagggcctagttgcttagaaaatatttgttacatcagaaccctctgcttctcagacaccaacctaatagaacatgtatctccttttcagcaaccatgaagttgaaggacacaaaatcaaggccaaagcagtcaagctgtggcaaatttcagacaaagggaatcaaagttgtgggaaaatggaaggaagtgaagattgacccaaatatgtttgcagatggacagatggatgacttggtgtgctttgaggaattgacagattaccagttggtctcccctgccaagaatccctccagtctcttctcaaaggaagcacccaagagaaaggcacaagctgtttcagaagaagaggaggaggaggagggaaagtctagctcaccaaagaaaaagatcaagttgaagaaaagtaaaaatgtagcaactgaaggaaccagtacccagaaagaatttgaagtgaaagatcctgagctggaggcccagggagatgacatggtttgtgatgatccggaggctggggagatgacatcagaaaacctggtccaaactgctccaaaaaagaagaaaaataaagggaaaaaagggttggagccttctcagagcactgctgccaaggtgcccaaaaaagcgaagacatggattcctgaagttcatgatcagaaagcagatgtgtcagcttggaaggacctgtttgttcccaggccggttctccgagcactcagctttctaggcttctctgcacccacaccaatccaagccctgaccttggcacctgccatccgtgacaaactggacatccttggggctgctgagacaggtaagggcaactctggccaaagcaggattgcttctggattgagcccatagctgctaataggccagataattgggagagagaagaatgttgaagaacataaccacaaaagcaacgctgaataaaggtgtttagaagtcagcccctctggtttgaaatatgctcttctt

SEQ ID NO: 77715 - DNA, 1054 bp, Homo sapiens
ctcatgaatcttgctaatcactgaaatacagacttaggaatggtaaaacatatctccctttgttatttctgtttattgtcttcacttcatttttccctctcagattttgattttcagtgatctcatctagtcctttacaccctttattttagtggtggaatgtggcaatcagggatagggaaaatgatgaggtataatcattaaaggtatcttagaacctggcatatttcaattattcatatttaacctatttgaaagtcttttataaatatcatgattttataatgaagagggctattacactattatgttaattactaaaacctcccacatttatgatctttaatagcccagatattttatatgtccctgatcttcagtgttttaatatagaagtccctattatttaatttcaaaataatcaatgctatctctaaaaatacacagatattttgtaattttagagttcctttaccttttactagcactattcatgataaatatatttttcagttttattcaataagattcttttcagaatttgtgaaacttaaacacttgctcttttggagtaagccaatgatttatttaatgcttttctatattgtgtattttaaggagaaatatcttcctgatggatataatacaggcttgttggagacagctatttccctctctgcaaggagtgtattatgttgttttacaaaatgctttcttgcaccactcatgttaactaaagagcgaatttaaacacagacgtgtctactgcactttccttccttgaatgggtacagtttttaaaacttggaaacgtgccattaactcttaatgtctcatttcatttttgaggaattcaagttgggatgccagccgtacaatagtaatgtaagaggaatggtaactggcttaaggcatgcacttaagcaatagaggaatttacttttcagtgtcttccaaggtccatgaggatgcacacttatttatccagagagtatggatctcacatatgtttgtccagagggtgtgactctgtggaggagaacacttactggta

SEQ ID NO: 77716 - DNA, 1070 bp, Homo sapiens
aggtaggacacctagagtgatatatcatcttctatatagaaattagttaccataatttcatgtattaggtgaatggaaaataatttataccctgaaatctagatagaaatatattatttaggtttctgcagttactactgataagtttttctaattagtccagatttttgctgaagttgcttaaaatggaaaactatattataatttataaagtttgatataaactcttagttattaagatttctgtaggtaacaatattatgctggaggaagtgggattgattgaaatcattatgaaattactattaatgtttcttatatgtatggtgtgctttcccaataagactgaaagcttctggagagcaggaacagtatctttatgatttttcatattttctgcagcaactagcccagtcactggtttttagtaagttcctgctacacatttattgatttgatttattttcttctattgcttattgtgcaggacagaacttacaaaaagtgtggtgctccctgaattaatagaactttctagggatgaaggcagcagtgtacgacttgcagcttttgaaactttggttaatctgcttgatatatttgatacaggtaaatcatgtggctacatctttgcttctgaaaacagtgtttttctacatgttttatgtcactaataaggaataaaagtagatttagaatttcctatgttaagcctcccttcctctccctctttttatgattcattctgttttcgtgtcttcttggctttcacttttaccctcatggtgtcgtagtccattttgtgttgctgtaacagaatacctgagaccaggtaatttataaaggaatttattttggcccacatttctagaggctgggaagttcaagatcaggcagccccatctgacctgtttctgatgagggcctcatgccacctcgtaatctggcagagaagtggaaggtgaagcaggcctgcaaaagggagagggaacaaaagaagctgactttgtaacaacctgctctccagagaactaacccagtcccacgagagctaacccagtcacttgtga

SEQ ID NO: 77717 - DNA, 1078 bp, Homo sapiens
gcacttgagatttttggaattttataagaaactttgtacattgggtttgcaacaagaaaatggacacaatgaaaaccagattccaccccaaatcctagagcaggagaagaaatatatttcagtacggaagaactgtgcttataactttccggtaataaatatgtatttatatttactgaggatttttattataactttaaaatatgtgcatagatggcattcaaaatattgccatttttgacacttgctgcttgcattatgtctagcatacatagtatgtgcagagtaaatatttgtgaaatttatatctctacgtataaatcagaataatagacacatatttggatcttccaaatatgatttttagttaaattacaattcagagaacatgatttcaatttaagtgaaacgattataatattaggtattgatgcatgtttttctttccttcccactcatctcctcccttccacctccaccaggccatgattgtttttgttgatcctaaaaacttccacatggaactctattctacattcttctgcctttgccatgaccctgaagtaccagtcagatacactattgctatttgcttttatgaagtaagtctgaagacttgatatcactttacgtttgttgttaattctacctatgtatactagatgattttgtgcttatagattataagatatagactggatatctctttcatgttctagtcttaaatcttgtttaaaaatttccttaattttcttcttttttagtatgtttactgaatcatttccataaatacattatatttgtgtattcttttattaacccattcattcagcatatctataccaagtgtttaaaccagacattgtggtagatatgggtgatgcggattttaaagtaaaatcagtttttatatgctttataatatttacagttaactttgcacctaaacttaagcacttgagaaccaatagaaaattgagacacattaattatttttactacaaatggatggtgtttcgtgagcatggcttttagattctgctattatgactataaagtaagagcaaaaataaattga

SEQ ID NO: 77718 - DNA, 1047 bp, Homo sapiens
cctcagcacatcctgctgctggtaaaagatattcagaatccggactgggcgcggtggctcctgcctgtaatcccagcactttgggaggccaaggcaggcggatcacaagttcaggagatcgagaccatcctgtataacatggtgaaaccctgtctctactaaaaatacaaaaagaaattagccaggcatggtggcgggcacctgtagtcccagctactcgggaggctgaggcaggagaatggcatgaacctgggaggcggagcctgcagtgagccgagatcacaccactgcattccagcctgggcgacagagcaagactctgtctcaaaaaaaaaaaaaaatggtattcagaatccaactacttctcaccaccttttactgctaccactctggttcaatgtaccatcatctcttgcctgaattattgtaagagcttttcctattgtttctctttttctgttcttgactagctgcagtctaatttcaacacagtagacagatgatgcttgtaaaacattgtcagatcatttcacccctctgctgaaaacctaccaatggcttcttgtcatactcaaaataaaagacaatttccttacagtagccctcaaagcctcttatttaccactctgagctctcctgctagtctcaccttcactctgtttaggcatagtggccaatttgctcatttggaccaacagtagagacaagctctctatatttgctgtgatgctcttttccagatattcacatagctcattccctaattttctttaggtctttgcttaaatatcatcttttcagtggaaccttcaatgacaaccctctttggccacctgctttaaaactgattaatcccctgcccctggtactcccttgtctttattcttcactttatttttctccatagcatttaacactatctgacagattttacttgtttcttttctcttctctgctcccatactagaatgtaagttccaggagagcagagaattttgttggttttatttactgttgtatctcagcatccagaatgatgaatgtttg

SEQ ID NO: 77719 - DNA, 1076 bp, Homo sapiens
cagaatggaaatgtctatggatgctgtaagtatactctctttaccttattgtgttggtccattttcatgctgctgaaaaagacatacccaagactgggcaatttacaaaagaaagaggtttaattgaactcacagttccacgtggctggggaggcctcacaatcgtgacagaaggcaaggaggagcaagtcacatcttacatggatggcggcaggcaaagagagagcttgtgcagggaaactcccccttacaataccatcagatctcgagagactcattcactatcatgagaagagcataggaaagacccacccccataattcagtcatctcccacccggtccctcccacaacatgtgggaattaggggagctacaagatgaaatttggatggggacacagagtcaaaccatatcatttatattgaaaggaatattttaaacttggcagaaactcatcactaatgtttcacaatttcattttaaactttaaacagtttcagaaaaagttttatgagaaagatttgttggatcaagagaaagaaagagaagaactacttcttttggaaatggtatgttgttttcacatgcacacacatatactcttttctgattaataactgtgtttttttattaaacttaatcatttctttccatttcaccatttcacattactcttttttcttcttaaatgatagtccagttttttgaaatctgttcttttatgaactagatagaaaactatatttgagagccttttaaaaaaactactttgctgaagtataattgacaactacatatatttaaagtgtactatttaatgaattttgacatatcgatgaaaccatcaccacaatgaaaatatgaaacatttctattcctttaaagatttctgcccctttgtaatccatgtcttctactctagtccccaacaaccaatgatatagtttctgtcactgtagattagcttgcatttccataatttatataaatggaatcatatattaggtattaatactatttttggtcctgcatctttctaccaacataattactttgagattcatccatattatcg

SEQ ID NO: 77720 - DNA, 1031 bp, Homo sapiens
cacatccctgtaataccagtgagtaataattgctaatgagacatttttccttttatggaacaaaggctgtcccatttctcctcaggcaccagcctcccacatgttgtcatgcctctttcccccactttccctaaaccttctttctctcttgcactccttattccctggttcctattgatttctcatttagcacaaggaactaggtctttcttttgtggcccttttcccaatccaagcctgctgggctctccctcacccccaataacttttactcttgccaagctacttctctaaaccaaagcagggtccctcctatgagggactctgggcacttccactgctgcggaagcagggtcgagcagggcgacccttgcactcacaccttctccaactgcttgctccaccttcagccaaatgggagatgccctttgacccccaagatactcatcagtcaaggttctacttgagcaagaaaaagtgggtaatggtgcccatgatgagtttgcatcacctgactataccttacttccgggacgaggagctgtcctgcaccgtggtggagctgaagtacacaggcaatgccagcgcactcttcatcctccctgatcaagacaagatggaggaagtggaagccatgctgctcccagagaccctgaagcggtggagagactctctggagttcaggtgattcttcctggcccccaaagaccccacatctctccacgtcaaggtctcaccaatgtccagggacaagggcatggtggtgggagaactcatacagggacaggtggaatttacacttactttgccctatgctgcctacatggctttgggcttgatttttctttttcttctttaagacaatgacatcagacaggacaaggggctgaggcttcctctgactccagcatgttctaagtcatgagaaatcttctgcacagtcccaaacactcatgcatggtttctcctggtctcaatctcttgaagggagagagaaacagaaggaattgtgatcagttgagggctgcagt

SEQ ID NO: 77721 - DNA, 1050 bp, Homo sapiens
atgttgcttagaagaaaaatgctttacattgttcttgctcttcctcccaacagtagtggctgttttgggggcaaaatagactctcaactcagacacaaagggatgcatatgaggtgctccattctttacctcgatggctctgggcaaatcatactcagcatctgggtctccatttgcacatctaggcatcaggactgtgcaaaactagttggcaggggagttgggaggagcaaacattcaacagcacaaagacaggccagcactaggtgctcaatgcacattagaccccttagtggcacacaggcaggtcgctgaactcctgcgcatctgtgtttcccgtgtgtaatgttctgctgtccccacaggtggtccataaggctgtgcttgatgtatttgaggagggcacagaagcatctgctgccacagcagtcaaaatcaccctcctttctgcattagtggagacaaggaccattgtgcgtttcaacaggcccttcctgatgatcattgtccctacagacacccagaacatcttcttcatgagcaaagtcaccaatcccaagcaagcctagagcttgccatcaagcagtggggctctcagtaaggaacttggaatgcaagctggatgcctgggtctctgggcacagcctggcccctgtgcaccgagtggccatggcatgtgtggccctgtctgcttatccttggaaggtgacagcgattccctgtgtagctctcacatgcacaggggcccatggactcttcagtctggagggtcctgggcctcctgacagcaataaataatttcgttggacacgttgcttgtgcctttccatgctgactatcagactctgcgcccctgaggctacctgtgccccaaagacaagccccttgagctcccatgcaggctcagctccaccccaagatctgggctccttctgccttcagctgcagcagcctgcccaggactacctaagcttgtggccaagctcacccagacctcaggcccagggttgggaggggaccctgctgctctaaggccaattcctgcccccc

SEQ ID NO: 77722 - DNA, 1034 bp, Homo sapiens
gcaaggattcccaagtgattccttagagccacagggagctctaagcgagtttaaacacagaggtgatggaagcagctttacacactagagaaggaccctggctgctgagtagaaaagtgattcatagcccaggacaaggatgtgggttggacatcgagggggctctgtgggaactggggcaaaataggtcagagctggggagggagagcgggatgattctgttggaaggctttgaggagaatgggtgtgaatttatgattgcaggtggggtggaagggagaataactatttgggtttgggtgcctgggtgatccccagttctctgaataggaaacccagcagggacttgctggcaagggaagtcgatacattcagatttgaacctcccatgtctgaggttcctgggagacaccccaggggtttgttcaggaagcagctaggctgaggtcaggagagaaatctgggctggagggaagcattcaggatcctcccctgggatgggcaagtgagtattgagggtgtcccctcaaatgagtgccatggagtgaaaagaaaagggaaacctcaatgactggctaagaaagggcagcccaccgaggaaagtcaccagcgtggggcaggagacaagaggacaggacgaaagctgtcgccgcaggaacaagaggagatacttatccgggggagaggggagaaaacctagagacaaatgatgaatgaatggaatgaatgggtctgtgggatttagtgatctaaaaccactcggggatcacaagtgcaatgttagcagaattaagggaggaccacagtgggctggagagtgagcaggagagggagagagggaaggcaagacagcgtgtagggaaaaaagagatcagactgttactgtgtctatgtagaaaggaaagacataaaagactccattttgaaaaagacctgtactttgaacaattgctttgctgagatgttgttaatttgtagctttgccccagccactttgccccaaccttgagctcacaaaaacatgtgttgtatga

SEQ ID NO: 77723 - DNA, 1377 bp, Homo sapiens
ccattcagtggcctgagcagtgggagctgcagaccagtcttccatggcaggctgagcactcctgtcttcagtagggaactactgaataggcacagagggcacctgtacaccttcagaccagtctgcaacctcaggcttagtagcagtgaactcaggagctggagcagtccattcaccctgaaattcctccttggtcactgccttttcagtagcagcctgctcttctttttcaatctcttcaggatctctgtagaagtagagatcaggcatgacctcccataggtgttcacgagaaatggtgccacgcatgcgcagaacttcccgagccagcgtccaccacatcaaacccactgagcgagctccctggttgttgcatggaatggcaatgtccacatagcgcagaggagaatctgtgttacacagagcaatggtaggtaggttaacataagatgcctccgtgagaggctggtggtcagccctggggtcagtaaccacaagaagccttggctcccagaagtctgcctggatctggttagtgaaggttccaggagtgaagtgaccagcaattggagtggcttcagtggcagcagcaaacttcagcacagccctctggccagtattcctggaggatataacactgacatcagcagggttttcaatagcaataatagcacgagctgccagcagaagcttctcccaggtcctcttcagatttatgatatagatgccatcacttttccttttatagatgtactgttccatctggaagtcaagattggtgccacctaagtgggttcctgctacaaggaacttaaggacatcctcctccttcatttgcaggacatcaagcgctccagacattgtgaaagtttccctttaagttacgacgggaatccagaacgacgctgtatggacccctctgtaggtagcgcggaaaggctatcttttcaaaattaatgggcaatgccattttttttgtacttaaaaggagactttgcaaagatgagtcaagtttggaaggatggttgtgtgcagactcatttttgtagttctgaggagcaaaaatgcctaaatctagctgcatgcttcttttccagaacatgacaccctgcccctttatttgttgaaatggttgaagctctgcaccatcaaaaaggctgaattgcttttgccactgtaacagactgaaagcctgtgatgacggggcagtgatgtcgacttgggcagaatggagcccgtgaattattgggacgccctcggtttctcagtccagtacagtatgctcttctctgtctctatttttgtgattttttggtggcacagatcctctggaaaacattggtctatgctgaccttataatattgcaacacatgata

SEQ ID NO: 77724 - DNA, 1784 bp, Homo sapiens
aggctttcagtctgttacagtggcaaaagcaattcagcctttttgatggtgcagagcttcaaccatttcaacaaataaaggggcagggtgtcatgttctggaaaagaagcatgcagctagatttaggcatttttgctcctcagaactacaaaaatgagtctgcacacaaccatccttccaaacttgactcatctttgcaaagtctccttttaagtacaaaaaaaatggcattgcccattaattttgaaaagatagcctttccgcgctacctacagaggggtccatacagcgtcgttctggattcccgtcgtaacttaaagggaaactttcacaatgtctggagcgcttgatgtcctgcaaatgaaggaggaggatgtccttaagttccttgtagcaggaacccacttaggtggcaccaatcttgacttccagatggaacagtacatctataaaaggaaaagtgatggcatctatatcataaatctgaagaggacctgggagaagcttctgctggcagctcgtgctattattgctattgaaaaccctgctgatgtcagtgttatatcctccaggaatactggccagagggctgtgctgaagtttgctgctgccactgaagccactccaattgctggtcacttcactcctggaaccttcactaaccagatccaggcagacttctgggagccaaggcttcttgtggttactgaccccagggctgaccaccagcctctcacggaggcatcttatgttaacctacctaccattgctctgtgtaacacagattctcctctgcgctatgtggacattgccattccatgcaacaaccagggagctcgctcagtgggtttgatgtggtggacgctggctcgggaagttctgcgcatgcgtggcaccatttctcgtgaacacctatgggaggtcatgcctgatctctacttctacagagatcctgaagagattgaaaaagaagagcaggctgctactgaaaaggcagtgaccaaggaggaatttcagggtgaatggactgctccagctcctgagttcactgctactaagcctgaggttgcagactggtctgaaggtgtacaggtgccctctgtgcctattcagtagttccctactgaagacaggagtgctcagcctgccatggaagactggtctgcagctcccactgctcaggccactgaatgggtaggagcaaccactgactggtcttaagctgttcttgcataggctcttaagcaacacggaaaaatgattggcggaaaataaacatcagtttcttaaaaaaaaaaaaaaaagaaaagaaaagataacaatgtccttctttgcaaggcttctgtgaattcagtcctttctcccagtttcacaggcaaataaggacagggactcagttgaggtgactaatcctcggagccacagccccccaattccaggggcttggaaatgctgggatcacaattaaaggctttgaacttccaccagacaccaccaccagagctcactccatccgcaaatgctatgtacattcttggccacaaaaacacttccaggacaaaaaaatgtttcagagttcagaactattcaatcccacatttgttctctatgaacaaacgatgcaggaagaaatggaagaagctgaatctctctgagggcacactttattttgccctgatgagaacttagtagcacctaagtgcttcccaatctgacaaggccatgctacacactccaaggactattgctgaagttggctgttcacctgcaaaaatactcaagga

SEQ ID NO: 77725 - DNA, 1040 bp, Homo sapiens
gatatgaccagttaaaacaaagcaattcttgaattatataactgtaaaagtgtgcagttaacaaggctggatgtgaattttattctgagggtgatttgtgatcaagtttaatcacaaatctcttaatatttataaactacctgatgccaggagcttagggctttgcattgtgtctaatacattgatcccagtgttacgggattctcttgattcctggcaccaaaatcagattgttttcacagttatgattcccagtgggagaaaaatgcctcaatatatttgtaaccttaagaagagtatttttttgttaatactaagatgttcaaacttagacatgattaggtcatacattctcaggggttcaaatttccttctaccattcaaatgttttatcaacagcaaacttcagccgtttcactttttgttggagaaaaatagtagattttaatttgactcacagtttgaagcattctgtgatcccctggttactgagttaaaaaataaaaaagtacgagttagacatatgaaatggttatgaacgcttttgtgctgctgatttttaatgctgtaaagttttcctgtgtttagcttgttgaaatgttttgcatctgtcaattaaggaaaaaaaaaatcactctatgttgccccactttagagccctgtgtgccaccctgtgttcctgtgattgcaatgtgagaccgaatgtaatatggaaaacctaccagtggggtgtggttgtgccctgagcacgtgtgtaaaggactggggaggcgtgtcttgaaaaagcaactgcagaaattccttatgatgattgtgtgcaagttagttaacatgaaccttcatttgtaaattttttaaaatttcttttataatatgctttccgcagtcctaactatgctgcgttttataatagctttttcccttctgttctgttcatgtagcacagataagcattgcacttggtaccatgctttacctcatttcaagaaaatatgcttaacagagaggaaaaaaatgtggtttggccttgctgctgtttt

SEQ ID NO: 77726 - DNA, 1474 bp, Homo sapiens
ggaggaaaaaatctttcaaatataatttccctatttccctacaacagcgatttctgctccccaaagcagcatacacccgtgccagcaccagaccaattagtactattgaatgcttgccaagcagctagggagtagaactgttttaaagtatagttctttgattacgagtgaatttgaatttttttcatacttttattgactatttctaattctttgttaaggttgtttaaagttagaagtaatcttttttctttgctgggtatatagaataataaatggggtggggatattttttctttttttcttgagaagtttgaaaaacttttttaaaaatataacatttgttttactattacaatatagtaggcataccataaatggtatttccccccttactaaagaagtaacaaaagtcatatatccaagaaaagaaactacatctgtggactgcctgtaaaagtggcctttttgcttacaagtcacttttccctctgtaatagcttaggagatctgaggaggatgaagagaaagaagaggatattgaagttccaaaggccatgggggatatttttgagtcgcttgctggtgccatttacatggatagtgggatgtcactggagacagtctggcaggtgtactatcccatgatgcggccactaataggtattgttggctccctttagaaagaaaaaaacccacaaaattaaaaacaacttcagagatattattcatattattctttcattttgattgcagaaaagttttctgcaaatgtaccccgttcccctgtgcgagaattgcttgaaatggaaccagaaactgccaaatttaggtaagcaaaaaatgtacatggaaaaaacattaacttaaaaacatcaaaggggaaaagttcacaaagatattgtaaactaatgattctgaaaaatatttacactgtggtgtgctgttgtcagatttctgtttgtaatctgattgacttctcttttttccttctgtttttatgaaataatgctgtaataaagactagacggcagccctgtctgtcgggggtatgcaattgcagtaagtcgtaacgcgtgtttcctttgtgtggtgtcagcttatacatgggactcctggcctgagagtgcacactaaatgctgattgacaatgataataaatacttctgacttctaattcaagctgtttggattttttacagcccggctgagagaacttacgacgggaaggtcagagtcactgtggaagtagtaggaaaggggaaatttaaaggtgttggtcgaagttacaggattgccaaatctgcagcagcaagaagagccctccgaagcctcaaagctaatcaacctcaggttcccaatagctgaaaccgctttttaaaattcaaaacaagaaacaaaacaaaaaaaattaaggggaaaattatttaaatcggaaaggaagacttaaagttgttagtgagtggaatgaatt

SEQ ID NO: 77727 - DNA, 1028 bp, Homo sapiens
tccttcttaacaagcgttagtcttttgaccacttgaagattttatgaccccagtttatataagaaatgtacttaatttgtcattaaaatttagtttccagaggctttttagtatgatatgtcagatatcctttttgaagaatatatgtatgaaaatgattgtaaatacaaatcttcttcggatttggggatcagttgctatgtggggatagtgtaaatgcttctgcacaagcttacggttccacttcggatcccctcagattgttaccagcgcttagaattcctgggagatgcgattttggactacctcataaccaagcacctttatgaagacccgcggcagcactccccgggggtcctgacagacctgcggtctgccctggtcaacaacaccatctttgcatcgctggctgtaaagtacgactaccacaagtacttcaaagctgtctctcctgagctcttccatgtcattgatgactttgtgcagtttcagcttgagaagaatgaaatgcaaggaatggattctgaggttagtgctgttcaaaacgatgttgaaaaaagtggtctaactaggagtctctgtagtttcagagttctgacggcatagtggtctaaagggacagcaggaggtcaggggtgtgggacccagtgtgctgtgttctgtgggagcacgagtgaactgcagtttgcaggtaggcctcttgaacttgtctgcccccactgtgggctgtgtggtcattcaggtgaagagaaggaaccaggcctttcagttaggtacccttcccacgccttcatgagggcttccagcattgaggcatgccaaagaagtggcctccactgccggaccccaaggcaggtttagctttagtaaaagcccagtgtagcttatccttccttttttaaatggatcagaaatatttgctaatatctcagggaagcatcataaatatacattctgcttctacttgaagtgggaaaatctaatttaaaaaacaaacttctaaatttttgaccattggaatttgggag

SEQ ID NO: 77728 - DNA, 1044 bp, Homo sapiens
ttatcctccgcaaatatctttctcttgcccattcagtgctgcttttggtttttgatttagttgtatattctggatgtatttccacagccttttattgttcttcctggacaaaaagacccctcctttagggtctttttaaagatggatagattaaaagattaaaagcaatgatttcacaagaaggttgcgtggcccttgctgtgactctgctgtcatcttctacttctcactgtgctctgtatttgcccctcttttaatagactgtcaacccattagattagaagggagaacaagcccctcacacccaaatcagcttcaggctgtgaaacacagctgaagtttacatttcaatttctgtatcagaaaaataagtgcctgaattcagaacaccaaagcaaagtataaagtttgtagtttatataataaaagcagcgtaggttaaggtgatcagcaaaatgtaaaaaccaaaaagtgaaaaactatctgactctggactggaaagactgatgaaactaaagcctaattttcgttatggaggaaaaatgatacgtggctttcgactacattctgctggaagttccgagacctgggttctcgcctagcagtccctgcttcttaattccttgcttattctgggacaagtcaccatcggtccctgcctcagtttcctcagctggatatattattttaatcactgtgagaaaatagaggtgttgatttaacattgatcattttcacattttgacaaccagtttacctgcctttgctccctttcacaactcttctttctcaatctcttggtttgtggtaaattcatttctataatagctcaagttaagaagagggtcttcttttcctgtcatcctgtgtaacaaaaatagcccaggaatagtgaggaatggtatcacttatgcacagattccagagtgtgaatgagactttagcgatggcagcacagtgtagccacatggagaggtgtgtgcggccctggtttcacttaagtgatgatgtgtgagggagactcgagaggaaggccccagcacc

SEQ ID NO: 77729 - DNA, 1206 bp, Homo sapiens
tatgattaaataacttattttatgttaattgaaaacaaatggccatgattttaaagttgccttttagtatttgtggttgtcatttgaaattatccataacccttgcttttattgagtttcaaacccttttaaaaacagcagctatgtttcccctccttccccattccccctcgtttcagacaaaagactgcatgctggcgaatggcaaactggatgaggattacgaggaggaggatgaggaggaggagagcctgatgtggagggctccgaaggaagaggctgactatgaagatgatttcctggagtatgatcaggaacatatcagatttatagataatatgttaatggggtcaggagcttttgtaaagaaaatctctctttctcctttttcaaccactgattctgcatatgaatggaaaatgcccaaaaaatcctccttaggtagtatgccattttcatcagattttgaggattttgactacagctcttgggatgcaatgtgctatctggatcctagcaaagctgttgaagaagatgactttgtggtggggttctggaatccatcagaagaaaactgtggtgttgacacgggaaagcagtccatttcttacgacttgcacactgagcagtgtattgctgacaaaagcatagcggactgtgtggaagccctgctgggctgctatttaaccagctgtggggagagggctgctcagcttttcctctgttcactggggctgaaggtgctcccggtaattaaaaggactgatcgggaaaaggccctgtgccctactcgggagaatttcaacagccaacaaaagaacctttcagtgagctgtgctgctgcttctgtggccagttcacgctcttctgtattgaaagactcggaatatggttgtttgaagattccaccaagatgtatgtttgatcatccagatgcagataaaacactgaatcaccttatatcggggtttgaaaattttgaaaagaaaatcaactacagattcaagaataaggcttaccttctccaggcttttacacatgcctcctaccactacaatactatcactggtaaggagcccacgaccagacttcatttctgggaaaatgagactttgtgttgatctcatcgtgttggccttgtaaaagtgatctatgcatgtacagtgttcatgcttaatattcaagggatggggcggggaacaaaag

SEQ ID NO: 77730 - DNA, 1419 bp, Homo sapiens
gtgtttcttctcagtcattcataaggagtatgcatagttatatacattattttttctgctctgcatcttatattcagaaatatttacaccaaaaaagcatagaatatgtgggaatttaatattctttttataacatgaatgggtagaaaaactgtagagcccttataattaattgatgacatataattaattgattaattttaagaacatttaactgaggatatgttaatatgccttgaatgaattccagcagtgatcatttatggataagtatcctaatattttctgctaaaggtcagcaactgtaatctgtatcgccttggaaaaaagaagggactacccagccgcatggtggtgtcaatatttgatccccctgtgaattggcttcctcctggttatgtagtaaatcaagacaaaagcaacacagataaatgggaaaaagatgaaatggtaagtttgtgtgtgtgtgtgtgtgtgtgtgtgtgtgtgtgtgtgtgtaactggagggatttacttttcggtgagccaaataatttgttttattaattttttgtttcattttcttggtatgtttataatagagtagatatttgatatatttaattaattcctttaattacactgtcttttcactgaattcagaaatagtattataattttgatggaggcaaatttctatttttattatttcttttccaaaggcataagagtatgtgatgttttgactttgagttttgctcttctttaaaaaaatttcactttgctgttattacaatttatcctagatccttagctctgttcagtgaaatgacttttcagtgacctgtgatctccagtctgtctgtgaaataattaatttcagtaaaatcttgcttttgtagctcagggttttcccagtcaggactcctgtgaacttaaaaaaaaaaaatcatccataaagattgttattttctggaaataatttaaatcttgccagtgacttaagaagactccaaatatcagcaacagccacttcattttgtcttgtcttgaaggccaccagagggcacttgggagggcctccaaactgcaggaaccagcgcagtggtggttgactgggagagttctagtgcctcttccgaagttaaaggcaatgcttcagacagtttcatttcttggagatttattttgcattaaaaataaattggctcattgttacttcatttttacctcaggccaacaatgataataccgtttttttctttcaaaggttatatttttaaatatccattttctccatgtcttctttgtgatgcatgtatcctatatatctgcctttaagtatttccaggtagcatgttcagtgacactatttggatttttacctatttattgaggatgtttttaactcatgtagtatttgtcttattacagaattag

SEQ ID NO: 77731 - DNA, 1264 bp, Homo sapiens
ctcatggaatatgaagtggaaatgttcagataattgaggctgtaggattcagatacggttttgtagagtagtcgccatacggaagctctgagaatggatgagatttccaagaggtggttgcaggaagaaagtatcagaggcttggacaagtgtggcataggcaataggataggatactctgttagacaagacagaggtgactttctattacaaaactcgtccatttgtctgctcagaaaccttctactccttatttctgcagaaagaatgatcactccctcagcctgctgttcaggccctttcagccctgatgcgttttggatcctaagcaggtggaagccccttgcagctcattggacagactccacgctcagacccccagccttggggcccttgctctgtccttccttctgcagagggcttgcctccatctctacctgtccagaattttgccccatatttgagaccttacgtagctctttcttcatcctgcccaccatttctgtcaacttggaatgtgatttccctcccatgagtccacgttgtactttatcctcttcttggcgcttgtgatgctttgttctcttagcttggaaagggaagctagcatttatttcagcctgctacgtttcaggcagagagggagagtacttttggctatagtggtcacacgtaccctccttttccctgctagcctgtgtgtcacgaggactgcccctctgtcctgctgccatcgttccctcagggttgcccaatcgagtgcctctcatatggggggtgtctattaaacaatagttgagttacatgggaagagggctaatgaagtacttaataataaggaaccgagctttatgaaaatgaaaatgggattgacaattctagaccctagtttccaagtactaacttgacagaaatgcaatgatgtgagaaattaagaaggagatagaggcattaggaaaaacagaccggagtagagggtaagatagtaaagctgttccattaatgtgaataaacagaaaccttttggttcattttttttaagttgaataaaagtgtcttgaaatggctgtaaaacaaaggaataatatttgagagagcattacagttgaaatcccgtttgtggcttcgattctaggaatataacattgtttcagttttgttcggtgccagttttcactttgcagctagagctgatggcatcctccccccatttcattgaaaatattgtgacatcttgactttttctatgggttcttttctactt

SEQ ID NO: 77732 - DNA, 1751 bp, Homo sapiens
gtaagttgcccagagttactcagcgggttaaccagagtgcctgggattccaacccgtgaagctaggccccaggtcctgcaggatgcctgcaagcttcgtgaccttcttaactaccacacctagagtctagggccagggattaaagcagtagataaaaccatgtcccactttataatttacactgtaaattaaaaatttggaaacttgcttctattctaaagtttaggagtacatttttgggatctttgtttttgtttttaaattcaaattgctgttgctctcagcctagctgttttgaagaatctgatgtaaagttataaaaatgtctttgcagataccctaacttagacttcgggtggaaaaaatctattgacagcaaatctttcatctcaatttctaactcctcttcagctgaaaatgataattactgtaagcacagcacaattgtccctgaaaatgctgcacatcaaggtgctaatagaacctcctctctagaaaatcatgaccaaatgtctgtgaactgcagaacgttgctcagcgagtcccctggtaagctccacgttgaagtttcagcagatcttacagcaattaatggtctttcttacaatcaaaatctcgccaatggcagttatgatttagctaacagagacttttgccaaggaaatcagctaaattactacaagcaggaaatacccgtgcaaccaactacctcatattccattcagaatttatacagttacgagaaccagccccagcccagcgatgaatgtactctcctgagtaataaataccttgatggaaatgctaacaaatctacctcagatggaagtcctgtgatggccgtaatgcctggtacgacagacactattcaagtgctcaagggcaggatggattctgagcagagcccttctattgggtactcctcaaggactcttggccccaatcctggacttattcttcaggctttgactctgtcaaacgctagtgatggatttaacctggagcggcttgaaatgcttggcgactcctttttaaagcatgccatcaccacatatctattttgcacttaccctgatgcgcatgagggccgcctttcatatatgagaagcaaaaaggtaagagatgatttttttattttgagcagttaattattcagtgtgcctgaaagtggtttgcagtgttggataatctcagaggatgagaacgtatcatgctcagaaattgctacaccggccaagcacagctgctcccttgttctaccagggccagcgaaagcctgtggcagaactacctggcagttgatgagtattgctttacaccaatcccacactcaggttttggggcttagctgatctccacgtgccttactttttgattgaaagtcagttcaaaggaagctatgcaagtgtgtacaccccttgatcctgagggggatatgaagaaatgtgcattgtagtcagtcaaggagcttctgctttgttgagttaaacatttatttgagagggtacgtcttggcttacaaggcatacagacatgagtaagacacaagtcttgtggaggagctcatctccaaagttttggagagtggagcggagaagagtaacaagcttcacagagcttggctgctctccagtgtgaagagggtgacaccagagttctgagtaattaacgctcgatagctcagagaaagggcgggctcttaaactcagcatggactaagacttaagaaaaggaatgaaggtaagatattc

SEQ ID NO: 77733 - DNA, 1050 bp, Homo sapiens
gaggaaagccaaatgggaaagtctgcagaataaacaggtaatgagttaattgtactagcataacttagtatttgtttgagtattaaagattattaaagataagtttgaattttatcttaccaagttaaatgcatgattcgttaattttttagaagttacctaatcctcaaattttgttttgttttgttttaattagtattatgtgttgaatgttatttgaatgttctttttggtaagtattgagagttttgtttttatacttggcccattaatatatcacaaaatcattctcataaatcctttgataaatcccatttggccttagaggattatttttacaaatattttttaaaattaagttttactagcatttatgattttctttatccattagtgaaattggtctttttttttttcttttgtgtgtgcgctttgtatttatctgtccatttttccccttacttgaagatactggttccagaactctgtgctatacatccaattccagcatcactgtggagaaaagctgtttgtctccccagcatactttatcgccttcactgccttttgactgcagaggagctaagagcccagactgccagcgatgctggcgtgggagtcagatcacttcctgcggattttaggtatgcctgtgcagtcagccagaaagaacacagatcatgagatcctgtttgcaaaagaacagaattaagttaaaattgtatataaaataattcttaaaagagtaaaaagaaaataatggatatcttatgtcttgtcaagtctcagagggagatgagaatctgaggtcagaaataaccattactgcttaagccataacagttggagtgagaatgaaattgttctttgttactgcatcagcattttcagtctgttttttcttttaaaaatccaaatatatgttaaaaagcaatagccttagcatgttctttgtcttcattattttcttcccattagtaaaatctctgcattctaaagaaactgttggcttaaacactcacattagttctggttatccaattggcaata

SEQ ID NO: 77734 - DNA, 1096 bp, Homo sapiens
tatgtttaatatttaaagatcgaggtgcctcttctatttctccactagaaagcatcatttctgttctgaagttaactgtaatggaataaaatacctgttaattttgaggggtgctttacatttccttttgctaagattccacactttcctgtgtacacacgctctggagaggttaccatatccattgagttgaagaagtctggtttcatgttgtctctacaaatgcttgagttgattacaagacttcaccagtatatattctcacatattcttcggcttgaaaaacctgcactagaatttaaacctacagacgctgattcagcatactgtgttctacctcttaatgttggtaagaaaaaaatctcttactttgataactctagacacatatacaaacatacagctttggtatgaaacttatctgtatcatgttttaacaagctaaagagtcgtttttctcttctaagttaatgactccagcactttggatattgactttaaattcatggaagatattgagaagtctgaagctcgcataggcattcccagtacaaagtatacaaaagaaacaccctttgtttttaaattagaagattaccaagatgccgttatcattccaaggtaggtatttaaatggaaaggaaaatggtggtgatactttgttttaaaagatgcactaggtcgggcacggtggctcacgcctgcagtcccagcactttgggaggccaaggcgggcagatcatgaggtcaggagattgagaccatcctggccagcatggtgaaacctcgtctctactaaaaatacaaaaaattagccaggcgtggtggtgcacgcctgtagtcccagttactcgggaggctgaggcagggcaatcacttcaagctaggaggcggagattgcagtgagctgagatcgctccactgcactccagcctggagacacaccaagactctgtctcaaaaaaaaaaaaaaaattcacttattcacatgggaatataagtgggctgtgattttagcattgtaattactaataggaaatatattagtcagtcaggcatggtgatgcgtgctgtaatcacagctactcagggctga

SEQ ID NO: 77735 - DNA, 3091 bp, Homo sapiens
gcactgggctgtcccgccctctgctgatgccttccttatatgtgtgctggtagttggtgggaaatgtaagatgattaaggaaaaaacattggcagtatgttttcttactggattctgaacaatactttgtgctctattatggtaacactcgacacatgttactatttaaattcaaaattcaatttaaaataaaataaaaaatggagtttcgtagttgtacttctcacatttcaagtgctcaccagccactgccctgttgggcatcgaagatatagaacatctttgcagaagttctgttagacaacactattctgtcttattcgaagtttgaagcagtaaagtttaaatgccacatataaatacaaattcagtagaggggaagaggcacatgacaaatcaaactcgaggttataaatatcaatattttctcagttgtagattcagcctcagaatttctttttcttcacagatactgtgctagattaccaagtgatccgtttactcatctagctcctaaatgcagaacccgagagttgcctgatggtacattttattcaactctttatctgccaattaactcacctcttcgagcctccattgttgtaagtttagaagaagaaatgattgttatcttttaaaatgtgtcattagtggattttttcagcttttctaagacttgcaagttataggtaaatttgattttaaaatctactttcatgagcaggagccttgtgttgacagaccaaaaataaaaataaaaaccaaatttactttcaaaagtagatttatagattgcttttgtagtcatctacatgttcatatttgtaatagactgtctaatttacagatacttagaactggactaggtgatctctgaagtttcttctaaggtgttactaacatgcacatttttgacagaatcattcaactgtggcttagacacttagagtaatataaaacttattatagatcgttgcgttgtcctagttattttgttggtgactcaaaaatctgctttttgtaaatactgttcttggtctcagtactgatttccaagtgttccaaggtgactaatttctattgcacataaaaagctgctcaatactgttaatgttatagctatgttttgataaatctttctttttgttacatatttattgattagtaaaaataagatactttaaaatcttactgaaatttaaattcatcaaaattgtaaaatcttaattatgacttagtttttactaggcaggacttttaaagatgaatatttcaaatatggagattagaatttttaaaaacttgctggaatttttcaaaataaagaattttgttttggtaaattgaactttaaaaatgttggggcagtggtttcataggtgtttcatgtgctagaggtaatacagcgatgtgcatatataatggaaaggtttttgttattttcagggtccaccaatgagctgtgtacgattggctgaaagagttgtagctctcatttgctgtgagaaactgcacaaaattggtaaggatgtttgaaaagcatatacgaatgaaaataaattgcaaccattgtaaaaaaaaagcatatagaggactttatagatctgtaaggattttgtagagctattcacttgctgatcttaatgtgctttggtgaatataaacataagtgttagtaacttgaagatcctacattgttgtgggagctctttgttttccatagcttgactgcaaacaactgtcatttatttgctctctttaatgactccttttaagtacataaaggtcttttcgtaattgttgaatcatgcaccatgaacacttgtgttttaatatgtcagtctctcaaattagtctatactagtatagaaattaatccttttttaaaaaatgaactcagtttcttttttttttttttctcaatcctgctcctgtataagtggacccattttctatggccattttatttagcattgatatgtggtgatgtcatgtttagatgtttttgtttctgaaccttagaacagaatttgcagtccagctcatattggaatatatggatgccaaaatagactttgcctgaagtgtgaatctgattacttttaaattgtaaaaggcaaaggtgctttagtttccattacttttccaggtccttctaacatagttctgttctaaattctttactaattaatcaggcaaaatctggattgtgttaattctctctttaaatttgttaggcgaactggatgaccatttgatgccagttgggaaagagactgttaaatatgaagaggagcttgatttgcatgatgaagaagagaccagtgttccaggaagaccaggttccacgaaacgaaggcagtgctacccaaaagcagttagtattggttagaacagagtaaaaacctagcatttctgactttgttttccgctacatcaaatctcagttcctctgcttggctggcttcccacacccttacagtttggcccactctggatctcagctcctttctccgattcacagcttctctcagatcagcctctttccttcctaatgtagaatgtgtgctcttccacttcagaggttgcttttgtttttcttctcaaaaggattcttggacccatctgtcatattctatccagaatgagattatttcatttaaatagacattctttgtttcattcagtttagtggtgtgattcttgttttacttatgatttggggctaagacagaagaggatttgtgtgataaaataagcaagtgaaaagatgccctctcaagatgacaggtacactggaaggtagaagcacaaatatctgtcaggagttatgtcagattcccagtgtgggccattgggaatcgaaataagttatttccatggagtgtttccagctcaatctgtgggcatcctagcagagttcacacatgaaagcatctctaaatctaacttctagtaatagacaaacttggctgaagtatttatttttaaaatatttgttaatatttttacctcataagaaccccaagcaaaagcagaattttgctgtgtgtagtagtcccgcttacccttggagggtatgttccaagac

SEQ ID NO: 77736 - DNA, 1932 bp, Homo sapiens
gtgcatggtctagagaagggtgttgagttgagagatgagctagtagaactggtagagggatgagtcgagcttttttcattggacgtcctgtcccgaggccaagatctatgaggatccgtgtttctctctgactagctcagtctcatcctgggccacatttctattaaatcaccgtcgccaaatcagctgttggaggtaacgtgaccatttcatttgtcagtacaaaccaatcttgtatttggcgttataagtacttggtccacagatctatgtggtgaagagtgacagtgatttctgtttaagcaagttgggaaaaaaggaccaagaccgttttgttaggtatgtttgcaaaaaatgcatgtacttccattttaaaggaggctttaaaaacaaaagtttattttctttcagcaacgtttaacttccaaatgtgtataattttcttagattgataaaggaagctggcaaacaagatccagagctggcttatatcagtagcaatttcataactggacatggcattgggaagaatcagcctcgcaacaaacagatggaagcagaattcagaaaacaggaagaggtaacttaaatcaaaataagtgtacaataacagttttcgggacatatacagacaaagtgcccatagggtctcccttttttcatagtttcccagaattactattattttttgtattatagaatacttcttcatatattagaccagctgtccccatgaggtagctgtagagtgatttgtatgctcagaattagaatagctatctggcaaaccaattttgtgtcttaattgccatcaaccaacttattttctgtgattggattgatgttacacaactgcatttcatggaaagacaaagcatgtatgaccttaactcttgtacattccatatgactatgaattaacaaactgaaatcttttcctagaaagtgttttctttttttcatttaaaggcctattttgtttcaattcttaaaaaaaaaaacagcactatattttatagattttagcttaaatatttttgtgccttgtaaggtcttaatacaggaaacagcattgtaaagatgctaaaaactaataccatggtctggcttgtacacaaaaacctatttaaagtttattatttaacttaaaattagcagaataattcctgttgaaggccttttctacattgtagctttttgataatttccaaatttggagagtccaggagccagtctgatagatataactgtctgaacactagcttatgttaccatttaatttatcctgaattggagagtctcattaaatcagtttctttgtccatgtttccatgcatgctgagttttctgtgatactgtcatcttctttagcctggccttaaggatttagaatgcccaagagcatgtgtgtcagaaatgacagttgtcatttacttttactaattttttttgttcattttagaaattttcttagaagtgcttttcttggtggattttttttttcaggtacttaggaaatttcgagcacatgagaccaacctgcttattgcaacaagtattgtagaagagggtgttgatataccaaaatgcaacttggtggttcgttttgatttgcccacagaatatcgatcctatgttcaatctaaaggaagagcaagggcacccatctctaattatataatgttagcggatacagacaaaataaaaagttttgaagaagaccttaaaacctacaaagctattgaaaaggtaagatcaacatattaacatgtgccggcagattgggaaaaaaaattaatgtggcttctttgttattctttgtatccataggaacagataatgagttttatctacaggcaataatctcaaaagaggtgtactctgtgtacattgtaaggaagttgagaatgatcacaaagacccggcagtgtt

SEQ ID NO: 77737 - DNA, 1768 bp, Homo sapiens
catttgggtttttcttatgttcttggggttgtactggggtgatcggatatggaagaataccatggaggtgacctgctcttctagtcacattatatcagggggctctcatggtatcaaccacaaaacgtcactcgtcatgttcatcttcatcaatggattgtgatagtgtttgtctgctttctctactgtaaagttacactgtttcccttttcttactctatttggaaggaagtctccaagtctagcccaccctggtagggagggattaatctccacttgctggagagggatatatctatatgtatttggaattcttctgtaaggaaaacttgtctggtttatcctttttatgtaactgtctacttatatttattaattgaatcatgtatttcagttggtggtttcatgtttattttatactttgggccataatccaatactgtgttatttatttgttgctcaaattgttgcagcggtggccactgggagctcttcgagtttagcacccgtgtccctttgacataccctcatccttttgtttttgagcactttctttgtgataccacagggtgctctgggctcttgtatttctccctgcctggccctagaatcagccattttgccgaggagacttggtttcttttctgcccactttgtggatgtatattttgtgaaagttatttaacttttaaaagtttcagtatgttcattcgtaaaatggaaataatacctccctctcttactggcttgttggtaagagactttgtattaaaaatggcagttttatcaaccagcacacagtagatgctaattcttcagccgcttatgcacccatctagggagtgcaacatccgtatgctattatgtaactgtcagtgatctttttttagtgaaatcatagaggaattatatctggttttctccacattgacaagaaaatgtaaggagtaagggatactgttaaaggagttgttgataatgtatttcaataacctggcaggaatttcaaataatgtgtttatatctttgaatttcttttcctcttatggttgtctgcattagttagcatgtttattcagatcacaattttttgtaatacatctattagttttctgaacctaccatacatatttcctatttttggttatgttattttcattctaattggggagaattagatgtacatatacacacaaagtataggctatgaattggtgccagaatttacctatgtcatgagttaagtacaaagattgagaagaagcatttagaaactcttagagcagtttgacagtaattttatatctgctgaatacaataaaattgatgcttgaattttaatactttttaaatttcattttcttagtcattcacttttatgaaattctacaaaactgcctctgatggattggaaatttaaaaagaaaagctggttcttcactgcagatcgtttcagaaacactgtgcattagggaacagtatactttgctggtgaacagcttgctggtgaacagcttgtataaactgagtgtaaaaaccaaaagaaacaaataatacattgtcttattttttctgtggtgttacaaactctttaagcagtttgcactgtccattatcctctgggagttcacatgatgtgactgcctggctttgttttccctgaagcctgtagctttgtcctgggtactggttaggcatggccaagattcaccaagtagataaatacatttttctctctaagcattattagcataggtatatcccatgt

SEQ ID NO: 77738 - DNA, 1499 bp, Homo sapiens
gggttggttcatagactgcatattaaaattttgtgaatcagaagagaataagaatgttggggaaagttctaagactattagcaaaggtgatattgaatccaaattttaggccgtggattcctactctttctcccttcaatgaaagattttttttctaatttagaaccagccagggagctatacttcagatttctgtcagatggtcacttaatgtatggtccttttggtttgtagatagatactcttatttttttctgccaaaaaaggtccttattttgtacttaaatcaatttacttttctatgagatccattaattggccacagttgatccctaacttttctgcaagtagtgatctcttaggaaaaactaagctttgcttcctaaggtaatttgggatttttttttttctttttctttctttgtgtgtgtgtgcgcgcgcgcgcgcgtacacgcacgcgcacacgcgcttaactgcttctgaatgtttaggggttttaaaaacttttttgagtaacgagaaattggactcgagggtcatcatctggcagtttttagtctggtaattttcatagtcattgagcctgatccttctgatgaatacaaaggaaaataactttagggaccaaattacatttaaattagaagttgaagattggaaggggacctcactgactatctaatccaacccacttatttttgtaaaaatgagaaagagcctcaggagagagagtgatttgctgtaagttaaattgctagtcaatggcagagacaattctagaatcctaatatcctgactcctagtttccagttctttctatcatagtaatgcccctgggcatcacagaacactaaaaaccagtgctttacagcaggaagattgccaggagacggacctgggagagcgtgactaaggagggattatttcttagggcagggaaaaagcattttgggagtcaaaaaagtttaatgctggcgcagttgtaagcctagttatggacatactccccgtctccatttaggattatataaggattaaataaattttctggggcttggagagaagaaatgggggtgtattttccgccttcctcctgttttctgcatgtatttttaggtaaagatgtgccagtttttattgcaggaatattagcctgaaaaggtttatccagaatcagtcggttacttcctattgactttaaggatcagatgaattgtgatcaactttcataaaatgtgactggaatttagtgctgtatgatgaatcaagagtgctctgagggttgactttatgagcagctaattaaatatacaatagaggtcttgttccagtaagctttttaataagcttagaaaaacttcctgaaattcagattctttccttccatcagtttaatgggaggaaaaacccttctatagtgaatagtttcatgggcatataagctattgtaatatacatgcagttttctactctcctaattaaaaaaaataaatcacagc

SEQ ID NO: 77739 - DNA, 1104 bp, Homo sapiens
tttaatttctgtttgattattttattgaaaaaaggagatggttctaggcatatacatacgaaatgagcttgaaaaggctaatggcctctccccccaccttcagggacttaacctaaggctgggttacatttaaggagccatttgagaacaactgaaatcccagttaaaccccacatgaaaatgctacattattattatttggcattaggttttttcttttcttttttttgtagatactatcagactgtcgtgccgtattggtagttctgggaccctggtgtgcagataaagtagctggaatgatggtaagagaactacagaaatacatcaaacatgagcaagaggagctgcacaggaaatttttattgtttacagacactttcctaaggaaaatacatgcactatgtgaagagcacttctcacctgcctcacttgacctgaaatttgtaactcctaaagtaatcaaactgctcgaaatcttacgcaaatataaaccatatgagcgacagcagtttgaaagcgttgagtggtataataatagaaatcaggataattatgtgtcatggagtgattctgaggatgatgatgaggatgaagaaattgaagaaaaagagaagccagagacaaattttccttctccttttaccaacattttgtgcggaattatttttgtggaaagaagatacacagcagttgtcttaaacaggtaaatctgtaagttgactcctttcacatgagaacagggaggcgtcctgtgttgtgatgtgatgcgctgcagcagctgtaagagctagcatgagggttatgtaagtgtccttgacttggcgccatcattgctgatacgtcatgctgtcctgggattgacagagaggatgttttccagaaggctgcttttcatatggctgatatttttttcttaaaggatgctaatctattctaatctacctaaaatggaggacaagtatggtttttaaaaaaatcagtatacatttaagtaaagcattgttttatattcaattttagattcaattcagatatttattaatccttaactatgtgttagacattgtgttaagcatttcacaccaagtgttcccctcaggt

SEQ ID NO: 77740 - DNA, 1007 bp, Homo sapiens
cattatttaaaaatattgtgtaaaattaccttcaagctgtaaggtgtatatgaaacataaatgaatttcatgtttagacttgggtcccatcctcaagatacttcattttttatatgcaaatattccaaaatctgaaaaatattggaaatccaaaacagttcaggtcccaagcctttcagataagggcactcaacctgtgcagataaacatgagtaccactttaggaaggcatgttgtaagcctgccttttatattgattagatatacaaactgaaactaggaagcttctttttggagttagacctataaatggatcataatgctgtagtgagttttttagaaatgaaacaaaaggtgttcagggaggcagtagggtttggctgaaagagccctcagaggaaggcagtcctgagttttgtttagacagagtcatgtaatgtctttgaaccttcatttccttcgtcatcctccctgtgtgtggattcagttagaaggtatgtaaattcccagcatcatgcttggggatgcagtggatgctcatttgtattcttttctttcccctcttctccccttgccttttgaaaacatcttttaaacaacactttactggtttataaaatacattatttactgttgagaaatatggtaatatagaaaaataataattaaacacctaaaatctcaccccactgctaacattctggcatttttttttttttttagtatctattcccttttttttttttttgctttttgaaaaactttttttaaattgcattctcactactgcagtattgataccttttgtttcttatgttaaaggtatacttctcagccatgtgagattgtggtggattgtggaccatttactgacagaagtgggctttatgaaagactgctgatggaattagaagaagcacttaattttatcaatgattgtaatatatctgtacattcaaaagaaagagattctactttaatttcgaaacaggtaagcatataccaag

SEQ ID NO: 77741 - DNA, 2446 bp, Homo sapiens
tcatcttgcaatcctagaccacccctatcgagaaattatgaaggtaagttttagacctaagtcttagtaattcttggtaaactattgagtaaatgcagatttttgtttttagatttcaaaagcaataatattagttatcaatattgggagtttggctgcagtgtatgaatgaatgaatattaaattaatgttcatttaaatctataataaacttttaaacatcataataaattctatataattttcatagtgtatctaattgagcctttttgaaaaacagatcttttaaacaaactacagtaattctatgagtaattttatgttgtccttggtatagtggcatttccaccaaacaaattcttttttactatttgttagtgattttgatatgttttaatatggcgatgtctctcttgttatagccttgcaaaatgaagtctttactgtcagtatcttttattatgttagctctgtgaaaattgtccatcatgtcctcgcattttgggactaactgcttccattttaaatgggaaatgtgatccagaggaattggaagaaaagattcagaaactagagaaaattcttaagagtaatgctgaaactgcaactgacctggtggtcttagacaggtatgcacttctgattgactcagctttaatgagattagttgaaaacaatattaagtctttggtgtttttgtagtaccttgcagagagtacctatttaagtgaacaaatggcagtaaaaaggaatgggcaagagtaagaattctctataagtaccattacctgtgagttcaagaatctaacgttgtttccacagagagtagcagacaggcatttctgccttaagagattatgtgtcagctcttcctatttgctgttgttgccaaggactgggaactttgacagtaaatttgtattttttttctgtcaatatgtgtgctttgttgttctgacctgaatgtcttacatgatgctttcaaagaacattaagttatttagagaattcagcagtatactttaaaatgtttggaaatacccctttgttttgaaaatgggttgtggatttcagagaaagttgctgtttgtgatttctaggtttgactctttttgagagggttactattttgagtttcattgaaaagcgcacacacacacaaaaccttcataacttaggttggtggaagggagcctttacaaattaggaaaatggcttttcaaatgcaatgaattcgatttatgtcaaaatagccttccattcttactagatgtagtcttaaataaggctaaagattacctagtggtggttcttaggacagttacaataagtagcggagactgatttctcaagttgtggagttaagtcagacatgggtttgaatactagctccactaattgtaagctgtgtgaccttgagtgagtcacttatttccttgaacttgtaaaatggcattgacagtggtttcatgggattctttgatgatcaattacattgacacatagaaaaatctgcagtgtgcctggcatttagtaagaatttgaggaaaattttctttggagagtgagaaggaaaggtaatatttgggatctatcaaacttaggtatccaaatgccatgtgaaatataaatcttacgacctctagaacgtgctgtgtctgacttcttgagccaacactgtggtggtgaagtagaaggccgtgcttgtgcttttgtctgacctgagttagagtgcttcacttgtattgcccaaaggttttctgagaagtagaagtagtagagcgtttaagtaaaactgataagcaatctgttgaataagcattacctaattctgcaaataaggactctttggttgagtataaattctgttttgggttaagaaaaaaagaactatagtatatatgtttttgctagatttcttttattaaaattatcatatgtacttttaggatattatgtgccattctggtggtcattttttatgaaaggcataaaagacccaaggaatgatattagaaatgaatgaaagttgggggagttttccttatgaggatttaaaaatacattaaaaataaaagtgatatttgcaaatattaaaaattcacacagatatggaaatggataaattgaatgataaaactcccagtgatcagtcttcccattcttctttccgcttctgcgaagtgattgagtttcatgagtattttgaacacccttgttcctcattctgacaaatgcctaagggggcaaaagatggaagtctaaacctaaaaaacaaaagaaaacaaactaataataatgaaatctattggcaaaattatttgaatatcagcccctgtggtcatttcttgagacctaacaggcaagcgtagtacagattgagcaaccctaatctgaaaacgcgaaattcaaaatgctccaaaatctgaaaccttttgagtgctgg

SEQ ID NO: 77742 - DNA, 2771 bp, Homo sapiens
gctgggtaattggatttgatagttgtatttgtgaagtttcttttttccccctctgaaaacctcactgttccttaatattcacttggatgtgtctgtcctagtgagctgggtaggaacctagattagtttgaaaatgttcagccatgaactggcagaaccacgattactctaagtttagtcattcatgttattctaaagaagtattctgtgtatacaaaaataatgcttaaagaaagggtaaatgccatttcaacacgtatttacacaatacagctgtatatagcaggcattttattcctctgagttattctcgtataaagacgtagactgtggggttttttttgtaaatttattggaggacgattttagagaatagtgaaatttcctgatttaaaataaaatccaattttataaattttgtacttaggtaagaagtgcataacttttttttcaccatgtttctaggttgaactgcttgaagcagctctggatcataataccatcgtctgtttaaacactggctcagggaagacatttattgcagtactactcactaaagagctgtcctatcagatcaggggagacttcagcagaaatggaaaaaggacggtgttcttggtcaactctggtaataaaaaattattttatcaagttgtgcaggggaaattggatgggattttatgtttaaacagattttctgtgtttcttaagttaaattattgaagaaagtttgacagataatgtactcatttaatctcttctggcagaaattgttttgtcctatttctttttgctgtttctcttaaatgttctgcttctgtatttcttttgaatggattgcttttggaacataagtattggaacatatgtacattagaacataatctaagttgttacatttatttttttcttgatgttttagcttcaccaagtatgtcaaaaggtgcttaattatggataattaacgtttgtacttatgattttgctaatcagttgtattaataaagttacatgctgcttagaaattagatattcagttaagagtttaaaatactgatttttatatgcttggattatatataaaaataaaaaatataaaatgtgaacctaagctggtagggcactaatatattcatgtcactgctctttttttaggttgtctcagtataactatctgctttaaatacatgttagactgtcttgtttccatctgattttattgaagaaaacaggagggtggcttagaggaaatcagctatgaagaagaaaggtggtgtagggttctctgaagcgagtgacaaaaagtgaggtggcaagtctagtaggtgccatttttttggaggataaccttggaactgtggttttaaagaggctatcaaaaacattgttggttaggtctaatataataataaggatttctgtagactgttaatcattagtagtccagagagccaactaggcaagatttctcatatttacatggagtattatatttgtaattagcaaaccaggttgctcaacaagtgtcagctgtcagaactcattcagatctcaaggttggggaatactcaaacctagaagtaaatgcatcttggacaaaagagagatggaaccaagagtttactaagcaccaggtaagacttgtagagaaatttcactttataaatccctacaagttcttgacttggtttgtaagatgatctgtagccttggttgtctgatttaggtttgaaaactaatttcctatacttaatcagcctagaagctagtcctgatgtactatatcttactgtaagtcttaccttaaaaccaaataaaggccggatgcagtggctgacgtctgtaatcccagcactttgggaggctgaggtgggtggatcacctgaggtcaggagttcaagaccagcctgaccaatatggtgaaaccctgtctctactaacaataaaaaaattagccgggcgtggtggcgtagtagtcctaggtactcgggaggctgagacaggagaattgcttgaatccagaaggtggagtttgcagtgagctgagatcgcgccactgcactccagcccgggtgacagcgagactccatctcagaaaaaaacccaaaaaacaaataaattactaatttttattgctcttaactttgtagaaaagaaataggtttcagtatgatctgcttgcttgaaaaacacaaattcctatgacctatttccaacttgctgataatgcgctttcaaaaaatttagtcttgagttaaatgtcttgaaactggaaaaatttcttgcttgagctgtttaggtctttgacggagacttcctctaactgaatgtttccatgcagccagcatgtgctggaggctcctctaacttacatgtttccatgtagccagcatgtactggggcttttggtgtgttggtcattgggggatacacagtgattaagaggcgcttcctcactgaactgaaacagcccagcctactagtgtgcttcacatactgggataagtcctcattaataaagcacttaaatatccacataatgataggctacaaaaataacatttagtctgagttttcttccagaaaaccatgtcagttcaacagaaaaaaataaaaagtgtgaattgttttgtgatttgcctaaattgacagatctcatcagtcataatatggctgtggggatctaagaacctgaagtaaatttagatttgtcgtcaagacatgctttccattatcaagatattttttctctactcttttcccatgctttc

SEQ ID NO: 77743 - DNA, 1734 bp, Homo sapiens
cattgacatttttgaagaataccctccccagctttaaaaaataaaacattcctaatttatttttagactatttttctaaagttatttattgttattactaatgttatctatatgagaagaaatggtgacagttgtagggaggagggggtgctgctggttcctggacatacctggtttctggaagtaggagaagatgtgttgggtatttacatcacggccctcttttctcctttgttttatattttcatccatcatcagaacttagacttgtttcttggtaccttctaccatgtcttcaataagtctaggattagcatttgggttgggtgaaagtgaagggtcaggcttaagggtgaatagtgctagacagtatgcagtctgtagtcatgaaggagaattgtggaggtatcacgagagtggattccaggtgagaaggtcagtgatgggacccgcagatcttagccttgggccttcagagtggcctcctgatctcagacattttggtaaaatagacttccacatagggttcttggcagttgtattaagaaaaaagtttaactgatgagcctgcaagtcctgagggcttgctgaatttgggaaagtgggtactaggcttgggtactagggtaaaaggaatggctgttggggctttgattcagagagaattagcacattatttttcgtgaagaacatagttctctttgatccagggaaattatgggttaatattatctcataaagtactctgtggtacttcgcttgttcccttctggaaagatgatgagcgtgattgtgctgtcaggcccgcagacgtgctgtcttaccgggctctcagctccggcagtggggtgcccctgcactgcttacttgagatagtactttatggtagctgaatgttgaattcttgtcaacagaattaatttctcaaatcagaattcagtattgtgttgtataagagaccctacacttgagacttcttgttgaaatagttgcaacaacttaagtcatgtgttgtacttaacatgtcaggagattcaaaagttttggttgttaagtaacagagttgaattatctcttccagtttcatagagtaatagcaatgaacactccaaagcagtgcaagagaggaaattcccttctgtggggcgaggaaatcctgctgacagtaaagccagtggtaggctttcacacagatatttgaatccctgaccctctgtttgaagggtaggaattttaaagtttcagtttttatcattttacataatcaaatttatctgtgggaaaaactatatgaaatatagaaagtgcttagataccatgaaaaaatttttatttcacagagtggtgtcatttgttttaatttatctaggatatgtataattttaaagatacatatttaaatagttgtgcatttataataggttgtcaattgagaaaaaggcctgtgttcgtgagctgttgataaagtgacaattttagcaggtgtctaaatctttcgtggtgcaggcacagtgctaagtgccttccatacattatcattttatcagtaacgtcatagaatatacaaagaatgttcaaaatttatttatgtgtatatttacatattttatatatgtacatatatttaacaaggcatcatgctgtacatattttcttttaaaggtttattatggacattgttctgtgtcaggaactacagatatgtgctataatcttaatggattcaaagtattc

SEQ ID NO: 77744 - DNA, 1034 bp, Homo sapiens
tggatttgttttccctaaatagaaagtgcattactggggccagttattgtccactaaatgaatgaaaattaatttaaacattgtaaccttatggaaaatataattggaagggttaaattgttgttctttatgtccttgtacatcctctctcctgcactcatctctcagggctggtaggagtgggatagatgtgtgtttccaaaccgaatagaaatatatcttgatccatccatgattctgttctgtatattattgtgtggacattcatgagtctctaattcagtttgtcaaatatttacttaaatgtatatacagaacattgtagcaggaaatttaagaggtgcaaagaatgagactcatgtcttgttcttatggagctgtgctccagtaaaagaataacatgtatgttgtgtatgtgtgtctatgaatagctctaaaaatctgtgatagaaattatgaaaggcaaatagaagctgtttgaggttttaatgtcactcaggtggacattgttttcattctaacaacctgcagtttttgtttaccatgtcctggatgtggttctgtacagtgggtaatacaggtaagggtaagatatgcagctcctatatccaaggaaattctagtctaattggtcatattttagtgagaacagagttttaagagaaattttctaaataagaattcatataaaattacagaagtacattttatggattaagactataccccaagcctctgtagtataactgctaggatcacttggattgagcacataggattgaaatacaggattaaacactttcagttggtcagtcagggaggatgcataatatgctataggctttcagccaacagggattactcttctgttgtggaaattgctggtgaatggtgatgaggcagcaataggatagcattcttttttttttttttttatttttttatttatttttattttttttattatactctaagttttagggtacatgtgcacattgtgcaggttagttacatatgtatacatgtgccatgct

SEQ ID NO: 77745 - DNA, 1181 bp, Homo sapiens
ttaacctccatgagaatgtcttttaaaggactggaagtagtaaaaagaggccactgccaatttgtttttcctgagcttatggtagtggaggcattgcagaaggctcagacctgagcgcaaaccaagtctgatgtcagatctaacaaaatcagtatttgttgatcaaattaaactttttatatctacattttatgctttcttagtttttgatttataatctcttttagagagccaccccaaatttaaatttatgcccgacattaacattaacagtgttcttgaattattttatttataaactaattctataaaaatgtatagtgtagatgtaactgtccttttgtgtttttaatttcattttgggaaattggaattgctgatggatttcatacctgtgttaaagagttactactgggttatttggatttctcagccaagtacgtcttctggtgaccttctttatttctttcgtttatgtgaatttaggaaataatagctatttttttcatttttctataaaataccatctttagactttatttactttgatttccttatattagctttgaaatctttttttgaactttgctctagctctttatttctcccagatctctgggaattaggcatgctattgtagcttattctcttgttctttgttttagggtaagccttggtatcctaaaataatctaaatgccttttgtttaaaatttaattcaaaataatggccttttattcaactcttcatatcagtagggctctcttgtagatgtgtttctgttcagtttacaggaatcttaaacttggctatttttgcatttatttttagagcagaagcttgggcatgctgtgattttccaataaactgctatcacaatgtcaaaatgcagttcagacaagagcaacacagagatctcaaacattaaaacggtaaatctgtgattcatcatgtggaaagaggaagagagtttattcttgtctttcttgtcttttgctaaattacagtcatgcattgcttaatgactggatatcttctgagaaatgcattgttaggcgattttgtcattgtgtgaacatcatagagtgtacttaattaacataaacctacatggtatagcctattatacacctaggctatatggtatgaccttttgttcctaggctactaacctgtacacc

SEQ ID NO: 77746 - DNA, 1016 bp, Homo sapiens
tgtagctggtgaaattgacattttcagttatgtaataaagcctttgttaaaataattctgagtgcaaaatggcttcctcatctaaaattgtcaatgaattgttggtactcctttaacatgcagttacctcaatatgcattttaaataagtgactaagaagatgctacaaaacattctctgaggatgtcagtaagactgttactagaagtaagacatgacaggcttaagtttggccttagagttttttctttttgttttttaggcttataacagcattacatgttcttggttgtgttaaggtttatggaatagtaaggattagattcttcatgcatgttcattaccagacatggtgcttgacatataggagacactccgatttgttgagtgagtaagttaatttataatactttttgaagtatttagaagctaacacagttttgtggggaagaatattgcttgcatattaaggcttttaaaaagattattactattctgcttttggacaaatcatgctacttggtcctttttgctttgtgaggtacgtatgattatgtgcacagaaacattgcagactgagggaagtgttaagaatcgtgggagaaaatcgccgtcaaaattggagtttaactgtattgcagactttctccttgttggcacagactaactctgttgtgcttgttcgttctttgacagctcaatgtatgccataaagcaggggttttaacaacacatttgaacaattcttgaggattagaaaatgaggtctgttaaccagttcagaattttaagaaaacaaaccggttgtacttagagaacttgaataatgagagaagactcttagtttaaaaactgatctttgacatgatgtaggaaggttctttgattaagaagttaaatgaccctgtttgaagggaaaaagaaaggtagtagtcgtatttagtcgtatttagtcctctgagatgtttcgagattgcaggatttctgtctttcctcttttggtaacatcctgggag

SEQ ID NO: 77747 - DNA, 1505 bp, Homo sapiens
gcgcctgtccactccccggcctggcgaggcctggggctcttgacaggtcccgtcacgcgcgctaaggtggcgcgggagcagcggaggtggagacgcgcgcctgacctgccggagcaccctggggccctcctctgatggggccgctgtgccgcgcccggaggggacgaagctgggctctcggtccctcccgggagggtcctgtgtgattactgtcaggggaccagattggggccctggggggcgggcaggggccgaggccattcttttgcctctcccctcagatgtttttgtgccaaaatgcctagaccctgcggaggaccctttcttcagggtttttgattttggggaaatcagtgtatgttttaagttagcacatcagatttctgtagattgtccagaaaagctgagttgccctgatggctctgcctggaggtcagagccagcaaaccactgagtgtgtccttaggaacctgaagatccgcggaaacgtggagatgagttggagggtcctatttgtgtagtgttaactccgtgcttttgtggagagagttgtggttaaagggacacgttactggtctacacgataagtaagtgttcttaggactttcaggttttaaaaacattcatctgatgaaagaggatcacttggacgcctatgcttctgtcttcgaatattctgaatctttacaatcctgattgtcaggtgtcttcgtggtgcttgttttcaaacagtggaaaaggactcaggttaggatttaagcaactcggaaaatattgttaaaaatgtgctgttaaaacaggttagctatattgaatatgtattggtgtaaacgttaagttttctaaataaaaatatacatcctcaccaaaaaactcagtttattaaaagatgggttcgggataagccaggtcctagagaatagtaattttcaatattattgatatctttggaaattaggttctggaatagccagtttattttgcaaagtctactttaaagctacctgtggcacgtgtgtattatatgtaatatgtgctgtgtacatgcacatacatacacaattatttcaaaacttcattttagggcatattccataaaactcaatagataaaaaaacaaaaaactaaagattgcttttaacatggtcactataaacattgatcatggtaacataggtttatagatttactcacggcaccaaaatgctgttttaagaagagaacagttagtccattttaatttggggagaaaagacattttcctacaatcctttttagtaagggcctgctttactttttatgcttccatctcatgtttgaagggtaagccctgactgctctgctgtattttgcccgtggctcaatgtgtgagttgggtagctaggttgttttgctattattgagctttattgtcttggttttagaagacattgtcttttgatgtggctcatgattcttatttgacagtgattttgtcatatagtgggttgtacagtacttgtagt

SEQ ID NO: 77748 - DNA, 1762 bp, Homo sapiens
aagcctctcctggaggccacagggcatctctgctgaccactctgtggcctcccctctgcaggcatgtggttttaggatccccctccctgctcacttttccatcagttccattcctgcataaataggttgctagctcttgcttactgttctcttctgtattctgtgttcatggttgtattaatataactttcattcctctgctcctattttcatggggtttcatgagggaagaaacaggctcatgtgttcagtataccatcttgatccataaaccccatttgagttatctcacaggttgcttagggggcttgctgctctgactggtttgtgaacgtgccctgagtccagctgggactgcagcaacatccatcctgttgagctgtggtctgctaagtgattttgtgtaatgctgtgccaagtgcaggagagggatacatagcatggctaagctctgcttgaatgccatgattagttattaccttccttccttccccctggttttgctgcctattgtcagtaaatgatcttagatctcctgcctccccaaagatatagtctatgtggtggtctgggttctaggttttctttaccacccttgcttcacttaagaaacagaaaactggctaggcacagtagtggctcacacctataatcccagccctttgggaggccaaggcaggaggatcgcttgaggccaggaattcaagaccagcctgcacaacatagcaagactccatctctacaaaaagttaaatttaaattagtggtggcatacacttatagtcccagctactcaggaggatgaggcaggagaattgtttgagcccatgactttgaggttactgtgagctatgatcctgctattttactccacctgagtgacagagcgagacgctgtctcaaaaataaagaaacaagtagtccacacaggtgtttgccagcaaacaaacagcgcggattctctgttgaacgtggccaacattgcctcgtcgaagtttgtatcttgccatagttgatgatcaggtggtcggggcttcctggtcagacctgacctttgtggggagatgttctcccaccaaggctcagaagcaggacactcttgctgcccctcgggcagccacccagaacatgggcgtctccatttctgaggttcagcatagttccccccaccctcttcccatgcagtgcatgcctgctctttatcaggatggaacagagggaaggcagaggcactgggggcagcctgtgttgttgatctctgtaagtcacagactgttcgaaaacctcaggaattatgtaagcgttcagtgcctcatttaagagatgaaaaactgaagattagaaagaggaaacgactagtcgccctgctagttgatgacctccagatagccatcttcattcccagttaagtttactacaaaaccacagcctcagctgctgaagctaacctccctacccaccatcgctagggactcagaacaccatggagctcatctctccaacaaaagtcagaattagcaagtacagatgtgtcttacgaaaatgtcagaatccatcatggctgctttggtgaggagctgttctccttccgtggtcatgccattggaaggcagttgtatgacaagaatgctttcacatgagctccgattttcttaactctccagaaggacttcagaagcctctggagttttgagacacggcctctctctcccttctgcttggagacaccttcctgggggtctccactgcattccccgccggt

SEQ ID NO: 77749 - DNA, 1053 bp, Homo sapiens
agatagttctgggacaagtggttttagcctctcgtaatctccattacaccgcacgaaaccaccctaagaggcttacactgcaggcttctctacatgcagctccaagcagaggccccagccccaggcaaaaccttctgggcttccctatgatccgccaggcaaaactgaaatgacattttaacactaccacctataaaataaaagcaggaaggtaaatctgactgaaatcaaatctagtaattattttaaaggtaatattccaaagccaaaacaaaactgtggggaatgggagaggtctttgtttctttctgatagatgatttaaaatgatctgctattagggacacttcatcccttagatgacctatggggtcccctgcgttactaacaaacagcagcaagcgatcagtatctaactccgtgtcactctctgagagcactgtggcatcaagaaaggtgtcccaggagacctggcctaggcgccctctctgtcgccaagttaattgcatggccttgggcaagtcactccaccccgaaagcctcagtgtgtccatctgcagaatggggctgccacctcctctcacctgatgttatggagatgaacggagtacgtgcaaaagctcgaggggctgcctggatggcccgacgcactgccttgggccagtacacacagtgtggggcctacctggacatggtgctggggagccttcgggtcttcaggcggggagtgggggccggggagagacgggtagcactgggtggggtccactttcctgggaacctgcttggtaactgcgtttcctctgtgtttcttctgtaggaaggccaacagctcaggagaagccatgtcactggggagccacagcccgcagagtgactccctgacacagcttgtccagcagccggatatgatgtattttattctcttcctgtggctcctggtgtactgcttgctgctcttcccacaactggatgttagcaggctctgatacgtgtgtctggataataaaaaagacaggaccctgaccaggggcggggttacttcattttattt

SEQ ID NO: 77750 - DNA, 1061 bp, Homo sapiens
agcatgagcacaaacaaggtctggagacaatagttcctgttctgagtgaaccatgaacttaaaaaaaaaaaaatactgtctctctcagagcctcagtttccatgtctgtgaaatgggagcagtggtcataataggtggtgagcatcaaaagaagccatgtgggctgggcacagtggctcacgcatataatcccagaactttgggaggccatggcggcagggtcgcttgagcccaggagttccaacatcagccctggaaacagagcaagaccccatctctacaaaaaacaaacaaaattagccaggcatggtggtgtgtgcctgtaatcccagcaacttggaaggctgagtttggaggattacttgaacctgagagttcaaggctatagtgagacatgatcatgccactgcactccagcctgggcaacagaatgagatcctgtctcaaaaaaaaaaaaaaaaaaaaaaagcagcagcagccaccatgtgttatacatatgcttcaattactgctacctgttattaaacttcctcagagattctggaaacatcccgaagatgtggtaaaagtcaagaccttaaatccaccaccgtagggcttcatttatttatttaacaaatgtctattgagtttctccaagatgccaggtgctgaaagtaaaaggccctgccctcatgaccctttaggatcacagacaagtcaatcctatatggtagaaggtgatgcaagagctccaagcaggggcagctagctcagatgggggagtgcagtaaggaaaacttcctggaagaagtgacaccagagctgggttttgaaggatgagtaggagtgcgctagacctcctactcatctttcaaactaagttagacgtaacctactgtgtgtgtgaattgcctgagggtggtattgaaacagattctgattccagtagctctggggtagagcctagggttctgcatatcttacagaagtcctcatgagaggagttcactgatggagggaagggacatcgaggcagcaagggcaggatgagcagaagcaatggggcttgaaagagctca

SEQ ID NO: 77751 - DNA, 2202 bp, Homo sapiens
gtaagatgagatttgaatgtggggacatggggagagacttgaccagcactagatcaaggaccaggtggtgctagagaggacaattgacttacttggaacccagaaagaaaactggatcccagctaaaggatgttgggcaagatgtcagccagctttgctgctgagccttatcacagtctgttcagtggcccagctggttctgtttagagtcatttacacaccaggttttccttgaactaacaaagtaaaggctgacttcttgactgaagatttctgcctggtgattccccggggtggatctcaaaagagtggggatctgaagaaattgaggagatgaaattctcataaccttgaatgatggcagaagtgagcagaggcagccatgggaaccaccctcttgtccctgtgttgtgttatggtgatggcagatgataaagcggagccatccccattatgtcatttaaggctgacgtaaacctctggggcccctacttcacagatgcagactccgaggtcagaggggctccgtggctttgccctgttctcagcgagtgagcagcagatgtgaggtttcacagcacactgtgatatctccaggaatttgctgcagccccctagactcaccaggcctttctggaggccggtctacaaaggctgcttcctcttctttcatgtacacaagcgtggagctctctcttggagagctggctctctccaagagagagctggcctggcctgtgagtttaactctgatctaaaacaaaccaaacgtgttacctcccgattcaaagccaagggccttgggtgccgaaagcaggaggttgccccgggcaatggcctgtattgagttcccaggagtaccttgggcaagggccatgaagtggcacgtgattgctgacccgtaggggacagagacatcgcaatgccatgaggtcagtgagggattgtggagtgggtgaggaaaggaagaggaacagcaggaatcagataagtgctgcagtcctaggttgaggctgtgtagggtaggcactgctacacttggatttgttgttaatgatggcttgtttactgtgggtttgcccaggtagaccagaagtcctactgggtcaggtgctggagtctgccctggccacccctgtgacccaggcttagagagtgctcagtttatattgttgaatgcatgaatgtggaatcaaagggagagtgtggatgctgggtttggcagagttggatttgagcctgtttttagtattgactggctgtgggtagctgtgagcccgaccatgtctttttggtggaaagggatgataaccccaacttctcctggttgctagaacattcagtgaggtcatatgtcttcatcaatgcctgtttccccattcccttgccttttctttaaggtttgtatggaaaacagtgagaccccagcccctttccctggaggatatggcttgcattgttttttaagctgatgattttagtattttcttccatgtctctaaataacatgcatgtattgtttcatcttgattttttggttctaagctctggtttcttactgtagaaggtgaggatgtaggacccctctttacctcctttaacctcaaatctgcctcctctcaacttccccatatgttttcatcataattttgataagatccgtaactggggtttacagtgtcactagtaggtcagtgctcttcagagcttagctgtgtagtaaatgatggtcacttttccttacctgatctgctttttgttttctttggaattaaatatcgtctgctgttgctgttggtcgtggggtatgcgcttattaattcatctgaaactctcttactattctagatacctccttaagttgtttgggtgcatcaggtaaagtgtctctcttatctcttcttttttttttgtttgagatggagtctagctctgtcacccaggtgtggtcactgtctctgtgcagtggtatgatctcggctcactgcaacctctgccttttgggttcaagcaattctcctgcctcagccgccgcttcccgagtagctgggattacagacgtgcaccaccatgcccagctaatttttttgtgttttcagagagatggggtttcaccgtgtaggccaggctggtctcgaactcctgactttaagtaatctgcccacctcagcttcccaaagtgctgagattacaggcatgagc

SEQ ID NO: 77752 - DNA, 1047 bp, Homo sapiens
aagcttcatgacaatgccagaagactctggggactggtatttccaaagtaattagtcacatctaacataggagagacttaggatcaagcaccaaagatctgccacctattttgggcatgtgagtagcccaaggaatgttctagaaggaatacctggtgagagaaatcatgtttcccaaagatggccacaacagtagctcccatcccacatgctgtacctgtagtaggactgtctcattctctcattaggatgtggggtctaatttgcctcccctggaatctgggctggccttacagacttgcttgacaaatataaagtggtcattagtggtattctgggacttctagggctaggtcataagaagccttgcagtgtccactggggtctctggggttgatcttggagcactctgtgttgtaaaattctttacacagagaggccatatatggatgttcccagggacagccttagccatgctcccagttgacgaccagcaggtcatcatgctgtgtgagccatcttggacgtcctgcaacgtcaagccctcagataattccaaccccagctgaatccaactacaaacagcataagagaacctacgcaagaactggctgagtccagtcaaatcccagaaccacaggagacaataatgcatccatattttaagccatacagctgtggatggtatattataaagcaatgaataactggaatacctggagtggtttacagggctcttcatttaaagagaaactgaggctaagaaattaatcaaggcccttcctctgggctctcagaacgctcagtgtaattgctataagggtatctgagcccaaatcattggtttacttgtctgtcctacgagactgtgagctcttgggggatagagaatatattagggctctggagttgctagtaacggaaataaaactggcttacttaagcaaagcaaaattgattgggaggatttgggagagctcaaagaattagaataaaaaccagactgggttcagagaacagcagtgatccagggcaggggcacatgga

SEQ ID NO: 77753 - DNA, 1057 bp, Homo sapiens
tttcaaaaagcctgtgctatggagtcatgatcagaaaccagagtgtggagagggtcagcagcctgcctcagagcagccagctaggcggggagtggtaaatttgggacttgtacccaggcatgactggctccgagcccagtgctccactctatggaatgttccctgggcctcagttgctttcctttcctttgcaggccgcgggctgctgccactctggcagctggtgagttagctggagggcaacattccaaagcaggggcagcatgctgctttcctcctgtgcccactcctgcggggaagtccgttgactcccaccgctgaagggagctggcaacaccaggatgaggtcccaggggacgggagcaggtacccactgtctgtctaccttcccactggaaaagcacggacaggccagcccttgcgggggcaggcagaggacagagttggctttgcgcggtctctgcctgctgagcagttccaattcctctcatgggagaaacaaggaggcagtcgcttgtgcatgttccagaagttttactggggaggaggaagcggacagaggaagctgtgtgtgcatgtgaaggggtgggcagggtgggagggatgcacgcgtatgtgagcatagcatgtgtgagtactacacacatctccatgcagaagcacaactgggcagccctggcttccagctctgggcttcagcacaacagacaccagcctgtggtctctcagaagccagggagaccacatcgggctcaggacgttttacccaaagtccagagtttttatgcctctccctggcattctccataaagaagggaaggtcagatgaccccttagatctgtgtcatctgggaatttccttgggctggtttagacacgatgccctctttttctcaggatagcagataacctgctttgaaagagggcttaattctgtgggtcctaaattttctcctttctctctctctttctgtgtgtgtgtgttgggaaaatggcaagtttccaataccagctttggaggaacgattacgttttccctccaatttcaagtccgaaa

SEQ ID NO: 77754 - DNA, 1032 bp, Homo sapiens
cttgccaggtgtccactttcctatgtcacaggtgagaaagctgaggcccagaatggggaagaaactgatccatggccacacagtgagaggcagcaaggccagagcccaactggccaccatggccctcaggtggtaccctgctcattgtggtatgatccgctcatgtcagcaactacatgaaaaaaacagccactgggcatgtatgcagcctgtcacatataccacatgttggggaaggagaagctggaacatgcgggcgggggtgggaatatctacctatattttttaaattttgataatgatgccatcaagtctgtttgtttgcataactgttttttaaaaaagaattgatattttcagtattttcatataaatatacttgtaatataacgtaacagcccagttactggtgcttccaagcacaagtgcaatctcctttgcttaaaggagagccaggcaattattcttatgactttagtttccagcctctttaacagccatgcagagctttaaggtgctacttgagaaaggtggcgctgtggcgtgtgtgtgtgtgtgtgtgtgtgtgtgtgtgtgtgtgtgtgtgtgtcagagagagagagaggagggaaggagaggagggagaaaggaccaccagtgggtcggttgatgaattagttatccctgcttacctgtccctcccacccctttctttcttagcccgttctctgcatgtggaaaggcacatgcagcacccagagggtgtttaaaaagaaaagctgggagcgggagggatgggcaggtactgacagcagacgaggcgaggagaccctgggaggtgcccagtggtggcgggacagagggaacaccgacaagggagacaaagaatgtgctcgtttggtgctcgtgggtgcttgagccccttgggcggcactttgcagccttgctttatgtaattcccacatcgacacctgcccccagggtttgatactgttttacccccatgtttgagatggaaccctgaggcttaaagatataaagacccttgctcat

SEQ ID NO: 77755 - DNA, 1174 bp, Homo sapiens
ggcccccgccggccttggccacggcctttccagacagaatcccagctgggcctgaagtgtgttaaaaagctcattaaatcgaatcatctgctggctcaggctgtccagatgaccagaagttttaaagaaacactcccctgacaaaacgaatattccattacaggctctgttgggatttaagtttcactcacttaacttatttttttccccccttttcctctccttccctaaaataacagacacaaagttctccaggggagccgactggattccaaaaggtacagtgtctgccatctgctccacacggctagcaggcagggtgcctggagggttggtgggcccgtgacactggggcaagactcgtgggctttctggaaggttccaggaagaccaaagaacatttatgggggatcaactctgggctgcgctgtgctgggccccaggattcttgatttcaagaagccccaggcttggggggaggctggcagggtgtgcagagtcctccgctgggacaggcacatagcagagaggggatcttggagttcaccctcctaaatcaggacacgctggggagtggacaaagatgctaccaatgattatgctgtgacagcaggtgtgaaccgggactgtcccaggaaacctgggttgttgcgggcaaactggacggtgtggccaccctggtgatggagagtctatggggctcggtagggacaggagagggagggattgtgcctttgagttctactaggcaggtgtttccacttaccctactgagccgtgctcagagtcactcccagggtctttgcaggctgaagcaataacaataacagcagtaataacgacaacaatgagtaataggtatgattattactcgagatgctatgtattggccatccactgtgtgtgccaggaactgtgctaagttgtggttagggcctctcctgtaactctcccagtgacacctaggaggcagtataatctcaactttcagcgcgaggaaacagaaggggcaagcctgaagtgacttgttcaaggaaggcctcagcccctcagtggtctctggcctctgaatccaaaactcatgttgttaaacttccacgttgtgacttggagaagacttccctggggcctggggtgtctccccatttctggaaaagccaagtgtaaatcggtg

SEQ ID NO: 77756 - DNA, 1052 bp, Homo sapiens
cggattgaatcttggcactttcctagctgggtgaccttgggcaagtcactttacctctctgtatcttggtgtcctcatctgtcacactgggactgtaatggtacccccttatggagtggtcaggagacttcactgagctcatatatgtcaagctcttagagcagtgcccagcaccttggcgagtgctcagaatgacagtgtgatgtagtagtagtcgtgctaatgttgttgctgttgccgcacctcagtcttgaatgccattcctaggatgtggcaaacaagaaagccagctgcatagtgacagggcccagtgccaacatgctctggtctccaaagccaactctcttggcatattgtttgtaaggcagaacagagtatctgagagctctttgtgtctagagaaagggctagaggttggttgcaccccctgctaacacacacacacacacacacacacacccaggcaggctacgggctttctggcctttgggctgtctgggctggggaccctcatggctggtgattctcctcctcccacagaagcgtgtagatctgctggagcaggtggcccgggagcatgaggagtaccaggcaggtgtggacgagttccaactgtggctgaaggcggtggtggagaaggtgaatggctgcctggggcggaactgcaagctgcccatcacgcagcgcctctccacactgcaggtaatccccagctgtgtctcaaccagagggaccctagggacagtcacagagggtgggttctatgtcatagttccttttttttttttttttttgagatggagtcttgctctgttgctcaggctggagtgcagtggcgcgatctcagctcactgcaagctccacctcctgggttcacaccattctcctgcctcagcctcctgagtagctgggactacaggcacccgccaccatgcccagctaatttttttgtatttttagtagagacagggtttcaccatgttagccaggatggtctcgatctcctgaccttgtgatctgccagcctcgggctcccaaagtgctgcgattac

SEQ ID NO: 77757 - DNA, 1060 bp, Homo sapiens
agaagagttttgcctggactaactgggattttaagaaagtcacaggagaaaatctgaggctttgcagccatagcccaggggaagtcaaatggacagtccagcaaaaggggtctctggtgggtgacctatgccagcaggcaggtgttacctagggccggcatagcaagcgggttgcatctcgagcattatgttcgttttcagtggttgcgaggagtgctgcgcagaggtcagaggggagtggctcagtgggtaactttagcaggacctgcccatggacccaggttggtggagtggtggggatggcatgaacctaacacgaccatccccagcctgagaagttcatctcagggagagctcagggctggtgtcagcttggcccatgcccagaacagtgttccttaggttgaggcctctttgatccattcaaatcaagatcattatgggtccagacgtttcggactgcaggttttgacgtcctcttttggagagcgtgcaatctgaatagacagacgagaattgcctccgggcctcaagcttcgagaagaggaagcagggaacctgagaggccaaagacaaagcagttttgccaggccagagccctaggccagttttcccagaggccagacctgttttcattccctgcctaattccattcctgacaaacgtgctcacctctggccatattgcccaactgggagcaccaggggagggttggtggtgggagtgggcctgtcccaggtgtcctgccgggggtctttttgcagccccctacattcctgcctgttggccttatctgtggccctttcttcagcccctgcaggtgccatgactcagcagccccaggacgactttgacaggagcgtggaggatgcccaggcatggatgaaggctgtgcaggaccagctgcaggtcaatgacaacacgcagggaccccgcgcggccctggaggccaggctgtgggagaccgaggtatgcagaggcgtggcctcagatggccctgtggtcttggccccatcccaccccgccctcagacctcaggtttcctatctgtgaaaggcaa

SEQ ID NO: 77758 - DNA, 1068 bp, Homo sapiens
tctgggaacactgcgaaggggcaatctagtctgagggtgcactaaggctcaggggagagatgattccacctttactccttctaccaatgacttgaccgcccagtgccatggtcaaagtagcatgactttgacctaggatgaccaatttatcctgatttgacgcacaccatccaggttttaaccttgaaagtcccaaaccccaggaaacctcttagtcttgggcaaaccagggacagttggtcacaccaactttcaccctcatatccccttccaagactcccagactgtcccccactctactgaccccccacccccacccccaccttccagccactcacaggggctgggttcccagagcctgtgtcctcagagctagccagagtcacgagcagcctttcctctgggatggagagggagacttgctctgggttatggacgggacagccgcctacagcctgtgtgtcctgcctttgaggccccatcttccccggctggctcctaatcacagctgccacaggctctcagatccagtcactgtcttccttatctgagctttatctcctgaagcctccacaatccaaggacaggcttcctcccgggcctgtctttgtgcattcaggagatccactgtgggtgccccgcaagcccacgtgccaaactgaagcaacaagcaactaattacgacaccaccatctccattttgcagaaggaaaaccagcacgtacaaccggtcaggaactcacctctggcattcgtttcacaaggccctgaggattccattattccaaagcagctactcacaatcttgacatccagaaccttctagagccctttccgctagccccgcagagactcagaaaccacaggactcagaaaaacttaaagtcttccccagatgcttgtttctaggtttctaaagtagagctccatgtcgagcagcgagtttccaccaaagacattcacagaaaacagtcagagtggtgccactccaagctgctggaggtcggactcccagcttggaggccccccaaacaatgctggtctccccaagaatctaaggcacgggga

SEQ ID NO: 77759 - DNA, 1252 bp, Homo sapiens
attacaggcgtgagccaccgcccccggccgcctctgagtttccagcctcgttggccctccagccttttaacctgttgggcctaggatcaggaaaggtttgttgaatggggaactaagaagtgaattcgttcgttcgacaaacgtttcctgagcagccgctgggtgctaggcgcagtgccagcgcggaatgtccagggagacctggtgcccaaagcttggacccatcgtgagaaatgagaagcagatacaaagcagtgtgggagtgcagaggagacaaagcaagcctcatcaggcccattgcttgctctgctctcccttgtacttaccagtgcttgacaatatacagttatttactagcttggttattgacttcctacccagcactcagttttattcactgctgtatcctcagtgcctaggacgatgcttggaacgtggtaagtgctcctattggcgggaagaataaatccggaagagcaggaccagtggacttgctacataatctgtagtcttggagccgcacagggttggtggtaccctcgagcacaccagacttgcagaaaaagcatactccagaggaagctgaggcatgcctgctcgagagccagctgttccatgtgcaattttcctctgatagtttctggtcactgttgccacggtgataatgactgggctatgtcattatctatccgccaacagtaagagaagctttgcagtcgagatattgtttagcagatggagtgttttctgttgaacactaagtactgccacaagttacttttttttttttaaactttgagtatttttttacaatgttgctggaggtgatctgtttatgctttgagagtgttcgaatttaaaatcagaaaatcatgtcagtgagtgagtctttcaaataatccttcggcatgaaacctgagcctagtaaactatgaaagtaaactcggcacattacccgaaagtctcaatgtcatattttcacccccatcaatattattgatgattgctcattttctaatgtgggacctgaaatttaccaggtgcttaaagaatctttttgtttttcagattcattgattccaggtaaatcagaggaacaagcaacatgaacagaaatatgtagaaaaagctattatgcagaagcataattgttgtttcagaagtccagcatctggtgcacttaacaatagagaatatattaaactctttccaaaataacctgttgttcctacctgtgttgtaagtgttttgt

SEQ ID NO: 77760 - DNA, 1026 bp, Homo sapiens
cggcttgcgtgcggagatgagcgggtccctcggccgagctgcggcggctctgctccgctgggggcgcggcgcgggcggcggtggcctttggggtccgggcgtgcgggcggcgggctcgggcgcgggcggcggcggctcggcggagcagttggacgcgctggtgaagaaggacaaggtggtggtcttcctcaaggggacgccggagcagccccagtgcggcttcagcaacgccgtggtgcagatcctgcggctgcacggcgtccgcgattacgcggcctacaacgtgctggacgacccggagctccgacaaggtcaggccagtgtgccgggcaggcgccctccgccccgggcccaggagcatcgctgcacgaggccgaggggttccgccgcgccgggctggggagcggggctccatccgccggggtctgtctgaaggttcgagccgggttagggcgaggagtactgccctggagtagagtctgggctgagggtgtagttgatttcactgggtcttgaggatctggggctctgtactgttgccaacttgagcagtaggtaaagtcctaaaggttcacttatcctcacttcgagctaatataggcgtttcggggcgatttgtcaatgactgactcggaggagggtggcccgctgcctgactgctctgcacggttaggaaactcatagtaaggacccactgtgagataggtactttcgcggacactttggggaggttggaagccattggcctactcgtgggtaaggtctagggctgtcgatggtggggagagggctgaggttgcccttgaggctagtgaggtcggaggctgatctcgcttggctcacggctcagggtgtcaagcatcatcctctgtggttgctacaagcaaagggttgggacagctgtcggctgaccttagtcgggatctatgttgtcggggaagagtcatgacatttggctttagatactcaagcacagggctgaatttatgtgggccagggcttggagaggtttgtggggaaaagaag

SEQ ID NO: 77761 - DNA, 1035 bp, Homo sapiens
ccaaagtaaaaattatagaaagtgtgtattattttacctggcacagaaagcacccggtaaatggtagctggcttcgtattagcacttgatggttttcaaatgtattttttcccagattatctagtccttaaagactcttggggataactgatcctccatttgctgtaggtgatagtggtggtgggtgggacctagaaagcatgttgagttgaggagtcgagagggcaggttcaaattaccacgtatatgtaatattaccatgtgttattctcatgacccttttgtcttccttgtcaactagtatgccaccagttactgggctcagttttatcatgtgcaaggcaagggacctgcagtcttccttcgaagacagcttctctgcttaaaagaggagtaactattttgcagtcttttgacagagaccttgcagggagtcccctgcaaattgccaatatggcactagtaaaaaagtggtgttgttatctcgcttagtatcatgtttcgagggtctttggtttgtgaatttattttctcttgtttaatataactggaaatgagatatgctggaatatagctagtaaacggaaaataggagcaaaaatacgaatatgtactgataacattttatttttctgtcttttatccacgtctggtgtctggtttctgagcttactttcttaagttttcaaacagcagcgacaggaatttaacccttacattccttgaccactgagtttcatcagattgctattttggttaataaacgcgttgcatatatattgaatataacatacctcttttattgattagaaaagtaaagattagtaagtattaacatttggactgggcagggtggtaaaagcacgttccccaaatggggattagttcagccaggttattaagactcttcccctcttccctatacagctttatttaccaagagcaactaacgggctgtccgatgcttgcttttgccagccgaaactatgtttgtacaccagatccaaggtcatttctagtaataggaacggagct

SEQ ID NO: 77762 - DNA, 1192 bp, Homo sapiens
ctcttagtggcaagcacagtgttctcaagattgggggaagccagggagggacagtgggttgtctgctactagtgggtcaaaattacatatttagtcatgaatggttcagcttttaccatttaaataacaaataaatgttctttctccataggcattaaagactattccaactggcccaccatcccgcaagtgtacctcaatggcgagtttgtagggggctgtgacattcttctgcagatgcaccagaatggggacttggtggaagaactgaaaaagctggggatccactccgcccttttagatgaaaagaaagaccaagactccaagtgagggcggccaagtcctcgctgagcagagagggagccgttcatgtcagagactcactgccagaaaagccttacccattttggttttcactattgagaccgcaactgcttgcactgatcattttggttcgtgagcagttggtgattttagttggtctggtgttcgggctaagaatattttattgtggacttaattacaaccactgcactgtaatgattcaatgctgtattatgatattgctgtaaacaaaattcattcttatattgtcacttattctttgcctgattcagaagttaaataggagctttggaatcattattcatgacccctctgcaaatgtgtcagtctccaaagagagtatctccccccaaattttgtgtagcttcttttgttatggaaaatggtgaacaaaaaaagaaactgtgataactggggcgttgttttttaaaataaactccagcacagggatgctgtgcatgcctgagttgattccgaagtgcatatgtctgtaaggatttggagtgcctgcagtgttttatgtgtgggaagtaagggtgagtctcatattcttctattaaatttgccacaagaattgccgtcgagccctggtctactttctgggggaagcagctgtttggatggtgagtcaactgtgcagctggaggcgtgggtgggctggagggagcagaggtgggtgaggccggaggaggcggccccacctgcctatctctggagccctgtgcttggcacactgctacagttagatagggagacatcgtcaacagtccaccgagctaggggatttaatgagtattttacttcttaaaaagtggggactttctaaaagaggacataatttggaatt

SEQ ID NO: 77763 - DNA, 1065 bp, Homo sapiens
gcgcctggcctttaagttgttttttaacttttttccatgattccttagtaaagtctccttaaaatgattcttgggagagcagagggcaaggggcagtgtcagttacacctgactaagttacttcagttcaggtgcacttcgtacaaagtgtggtgggatgtccatgtcctaatccctggaatgtgtgactgtgttacctggggtaagtttaagctgtgtttaagttcaggatcttgagatagagagattgtcttggatcacctgggtgggcttaatgtaatcacaggtgtcctgggcaggagggaagcagaggttggagtgatgtactctgaagagggcggaaggggccacaggccaaagatcgcaggcagtctctagagctggaaaagccaaggaaacggattctcccctggagtctccagaaagaacacaggccatgattttagcccagtgaaagtcattttagacttctgacctcctgccctgtaagattaaaaattggtgttaagccactaagcttgtcatttgttacagcggcaaaaggagactaatacacctggctgcctggattttatggtggatgcttacttggtataagcagacagggggaagggtcaaacaattattgagcatttagatccgtaatttgtttctcaccaaagatctgcaaatgtgggatattctctcttcctttcagatgatgacacagagactgggagggggtcaggttacttgtccaaggtcactacctggtggaatttgagctgtgatcagatccatattgtagcacccttcggagggccggctcagtgagtgcagccgcttagtgcagctctggctgtggtgtccagagtgttcgccctgcagccctgagaagaactgaatttgagcttcagttgcctgttgaaagagccagggaggccaggaattttggaagttgcccctggccatccactatcaagtatgtgaaggaagcagagggtcccacctctgaggtcagacaaatggaaggtgaatgcaaatgatgcctccttgcaaatgatgccagggaaagcctcctgggcc

SEQ ID NO: 77764 - DNA, 1414 bp, Homo sapiens
ggatgttgtgtttctgttcaccttcgtttactatgcctgtgtcttctccaccacgctggggtctgggaggaatggacagacagaggatgagctctacccagggcctgcaggacctgcctgtagcccactctgctcgccttagcactaccactcctgccaaggaggattccatttggcagagcttcttccaggtgcccagctatacctgtgcctcggcttttctcagctggatgatggtcttcagcctctttctgtcccttctgtccctcacagcactagtatttcatgttgcacacccactcagctccgtgaacttgtgagaacacagccgattcacctgagcaggacctctgaaaccctggaccagtggtctcacatggtgctacgcctgcatgtaaacacgcctgcaaacgctgcctgccggtaaacacgcctgcaaacgctgcctgcccgtaaacacgcctgcaaacgctgcctgcccacacaggttcacgtgcagctcaaggaaaggcctgaaaggagcccttatctgtgctcaggactcagaagcctctgggtcagtggtccacatcccgggacgcagcaggaggccaggccggcgagccctgtggatgagccctcagaacccttggcttgcccacgtggaaaagggatagaggttgggtttccccccttttatagatggtcacgcacctgggtgttacaaagttgtatgtggcatgaatactttttgtaatgattgattaaatgcaagatagtttatctaacttcgtgcggaatcagcttctatccttgacttagattctggtggagagaagtgagaataggcagcccccaaataaaaaatattcatggatttatttattttcctttggagataagggactacaattttttccccgtgtaatccaatgcttaaaaccccagtgttcttggaggcatacgttgagaaccattggagtaagcaacctcaaaaatgttgttggcaatgcccggtattccagagccccccctgcctccatctggtcctgccctccttaccctcctcattcccatgtgccctcggccccagccagctctgcctcctccttacctgggcattcaccaggctctgtccttgcacagataacttctatcctctctgctcacaatcccagcagaagcccctcctgcctgaagctgtccctgaccactcaggccccaagcagactcccttccccacctcccatgacctgcagtcacagcagatcccaccctgtgccctgtcctcttgctcccttctcaagaccctgctgcccctcctgtacctctatagacagtagctggacctcagatattaccaggggatgccttccagagaagggaatccatcctgtgtcgaatcctggccttcccacttccctgtgtctctagt

SEQ ID NO: 77765 - DNA, 1092 bp, Homo sapiens
tcattggtctttttaagatgtggattaatgaacctcttaaagtgttgccgaatcccaaatgaaacgggcatgtcccacctttttcccagaaactcggctctcagcgggttttgtgactgtttgaaattcacaaaaccagagcaaagctttcatttttgacaggctcatagggatctgcaaaggaaaaataatgcatcttatgtagggatattaatctcccagcattgtgtgttttagcttctcatgattaactggtaaggttttgaataaaaatgaatgcagagaaacaatcttcattaagttgcttttgaaaatgctgaggtaattatgaaataacgatttttgtgtcatagatcatactactcatagccaaagctggattacatcacaaaacattactcttgttactgatatttattttttaattcattagttttctcatattttttgccttttttctccccgtgtgaaaataagccatcgagaataaattcttccttttcagtttttctttgtcttaaatccagtttttttttttctgtaagatctctaagctgaactcttccacaccatacatataatggcctcatgttaaaatatgttttaagtgccttggatttcttttgggagaacaagagggttatgtatcgtaagtaaataacagtgatgagacatttcccttgtttgcttactcttctaagtcagggcttgagaccatgccctcatgattgcagctgccacacttagcatcatggggacacagcctgagtgctgtggcatttctgcatcagtgaggatgcacacctggactgatcggagtgtgaggaaaacaacagcttccgtaggccaggaaacctggggtttattcccgactcagttgttcattggctttgtggccttgggcaaattatttccatttgctgggtctgggtttacatatatgcaatgggtgtgtacgtttgcatgtatatgtgtgtgtattggtaccagatattgccctccaaactctaagtttgaagaatcctcaaaatttgggtatagctggttattaatacctccagaatgctctgtactttaaggttacataacgtt

SEQ ID NO: 77766 - DNA, 1101 bp, Homo sapiens
tgactcaggatttgcattaaaaagatagctggtagccctgttcatgaccccctgtaccctctatattataggatagtgaagatgtgtaaaacgttcaagaagaaatactgtgtgggaatgagcatggttgtcccgggtgtaacctcaggcaccatttctctgattgcagtgtctctgcttgtctgtatctgttgtctgatcctctgggccctgctgcccagaccccaactccaccagccctgctggggctcggaaggaaagcaaggtagccgctggcttcagcaattgctgcccagccatcgtggactctagccaacaggaaatggagcgggcagtgtcccagcctgattcaccgagccatgggtctccctgtgcctctgcaaatgcattcaggctgctcctggcctaaaaacaatgctcccagacctacatccacagctgagagaatccagggcacacatttgcccgccagcttccctgagcttcccccagcagtgggctcagtgggtaggagagggggacatggtctggaatcaaggcgtgtgccactcagtgaccatttgctttgaaatcaatgtgctcagcagggccagtgacttttgcagagctggctggacaaagggaacatgaagaagggaagagtgtctcagggtcacgggtggttatactacccttgaacttcaccttcctattgctaaggaagagagagagacagaaaagcatgttccacaagccagtgggcaaattcttagctgttttctgtggagtctgggcctggcagagagccctcttcacgactggctgactgccagatggtgccaagggcacggcatcccgggcagtcagcctcctagtgaagattgccatcctctggagggttccctgccccaggacatgggcctgggaagggaatgcaattccaccctccatgggtcccatttacaggtcaacaaattgaggccaagagaagagaagtggaattgtggccgagtagcacatgaaatcactctggagtcggtcatgatccctgaggccggccaatgcccagtgcccattgctggcagcagtccacctggaaatggacagtttgtcctcacactg

SEQ ID NO: 77767 - DNA, 1047 bp, Homo sapiens
atattgttagaatctccctgtttctgaacttcccacataagtgggaacatcctttctgtggtcttttgcaacgcgcttttgcactcgatattgtatttgcaattcatccatgcgatggcacgttccagcatttcattttttcctcgacgctgtgtgtttttccagcatgagaactcacaacggtagatccaggccaccgctgatggccattgatgctgggtccagcattttgcttatgctgacattgctgtctttaaatgctcttatccatgtaccctgctgctcatttgcaggtgtactcggtgtgtatctcaaggtggcatggctgggtcactgaggtgtgagtatgtttggctttataagataatgccatcctgttttccaaagtgacagtatccactgatactcctgccataggtatctgagagtccctgctaccgtacagactctgtcagtgttcagtggtcttgtcagatgttttagttcttgccaatctgatggctgtttgatggtagctcactgtgtttcaatgggcatttctctggtactgaggtttagcttctttacggctgtttactcttttgtaaaccatgcctggacatggttttgcccagttttctactggatatttatcattttcctactcatttgagactagaatgatgtatagtgtatatcccagtttgtggcttaacttttcacttttgatgatattttatttttttgataaacagatattgaatttaaggtcatcgaatttcataattttccttatagtttgagcttttatgtcttgttaagatatccttctctaccccaaggtcatacagatattcctttatattgccttataaaagtttcgaagtgttctttttctattcttatctataattcatctggaactgatgaactactgatttgatttcatttattttttcatacagatactcaggtattccaacactgctcatcaaagacccgtttacccctgtggatcagcagtgtccatgtgtgtgtaactttgtttttgtttctttggcctatttg

SEQ ID NO: 77768 - DNA, 1002 bp, Homo sapiens
tgtttatttttaattttttaaattttattttttaagttttaatttttgtggctacatagtgggtgtatatatttatggggtacttgagatgttttgatacaggcacacagtgtgaaataacacatcatgaagaatggggtatccatcccctcaagcatctatccactgagttgcaaacattcccgttacactctctaatccattttaaaatgtgctgttattattatacttgttgcttattgtttctgttttcctttcccatctctgttattgttctggtttctaggctaatctcctggattctatgagtctcctccatcactgttcatcctccagaccctggccagacaactttttccaaagaaaacaatattctaacttctccatttaaggaagccctcagtaactcccctgggaatcaagccacactcccaacgtgttgtctacaggggaattgaagtttccaagttgatgacttaagcaacttggaaacaaacacccgaggtgcaactcttctgtgagtcggagaaggtctcttctaggtctttgtttgcttcagagtcctcggaaagtaaacacagctgacctgattattcccctccacttcctcctgagtcagagttatctcgagttaattcagggaagaggctaaattaagccttgaaaccaagcagcctccatgacaggcgctttgttttgcttgagtgactgtgatgatgggtctttggttataaaggcagcactaattgtatcttcttataccaatcctggccatctattccctggcctgtagagactgggagatgccaggttgccccagagcacccactcattcattcagcacaattttcttaagtgcctgctccatgcccggcatcacgcttggaggtggggattcaaaagtccttcctccaagggcttgcagtctttctaagacgacggatgataaaccagagactccattagagacatgactagtgcttggatagacatctgtccagg

SEQ ID NO: 77769 - DNA, 1048 bp, Homo sapiens
tggtatctcatgggtggaggccagggatgccaccgaacatcctacaatgcacagggcagccccccacaaataagaattatccagccccaaaatgccaatagtgccgaggtcaggggaccctgtgctggccatcctatctctgattctgaaactatgcatgctttccacttttccccatttgtgagtcattgagtaaattaaagctcttctgagcagcagcagtgatcatggtcactgccctgcgttcaaataatgcgagctgaggacagtgatctgcaactcccagcatgtcatgtggtctcttagaaatccatgtgactgtttccaccatcttgggcatttgtggggacccccagactggagggagaaagccctacaaagtggatgggagtgtggggctgaacttttccctacccttaactttgtgtctctgggacctccagggacctggcccctcaccaatgcatatgaagagtatgcttggggaagagcttaggaatggggtgggcatgggagtgctgggtagcagcctttgagcaaatctgcatcttctcttatttctgacctttttccacgtgcccagtcctatttctgccagttgaaggcatactaatattctttatactatttaatcttttgcagaaaccttactattataacttgctactctccagataccaattcttcatgccgagagcatcggaaatgtttttgtgtcttactgatgttttcatgatcaacttgtaaatgtaagcagttgacttcataaaaggtattttaactattcttggagtcctttgctacccaagcacctggtttcaccatgcgatcactgacttctctacagtgaagactctttcttaataaaggatttcgctgtgctcttttgattaaaaatatctaaccttaaaagacgtaaaaatgtatctgtgaaatctcactttgttagcgttgctgctgttgtcattttctattatgataactgaaaagagaaaagaagaaaacatgaactcctctgtgtctggttctcatctgtgctttatgcaaa

SEQ ID NO: 77770 - DNA, 1715 bp, Homo sapiens
cagccccccttcctctgggtgctgttcgtgctggccaccctagagaacatctttgtcctcagcgtcttctgcctgcacaagagcagctgcacggtggcagagatctacctggggaacctggccgcagcagacctgatcctggcctgcgggctgcccttctgggccatcaccatctccaacaacttcgactggctctttggggagacgctctgccgcgtggtgaatgccattatctccatgaacctgtacagcagcatctgtttcctgatgctggtgagcatcgaccgctacctggccctggtgaaaaccatgtccatgggccggatgcgcggcgtgcgctgggccaagctctacagcttggtgatctgggggtgtacgctgctcctgagctcacccatgctggtgttccggaccatgaaggagtacagcgatgagggccacaacgtcaccgcttgtgtcatcagctacccatccctcatctgggaagtgttcaccaacatgctcctgaatgtcgtgggcttcctgctgcccctgagtgtcatcaccttctgcacgatgcagatcatgcaggtgctgcggaacaacgagatgcagaagttcaaggagatccagacagagaggagggccacggtgctagtcctggttgtgctgctgctattcatcatctgctggctgcccttccagatcagcaccttcctggatacgctgcatcgcctcggcatcctctccagctgccaggacgagcgcatcatcgatgtaatcacacagatcgcctccttcatggcctacagcaacagctgcctcaacccactggtgtacgtgatcgtgggcaagcgcttccgaaagaagtcttgggaggtgtaccagggagtgtgccagaaagggggctgcaggtcagaacccattcagatggagaactccatgggcacactgcggacctccatctccgtggaacgccagattcacaaactgcaggactgggcagggagcagacagtgagcaaacgccagcagggctgctgtgaatttgtgtaaggattgagggacagttgcttttcagcatgggcccaggaatgccaaggagacatctatgcacgaccttgggaaatgagttgatgtctccggtaaaacaccggagactaattcctgccctgcccaattttgcagggagcatggctgtgaggatggggtgaactcacgcacagccaaggactccaaaatcacaacagcattactgttcttatttgctgccacacctgagccagcctgctccttcccaggagtggaggaggcctgggggcagggagaggagtgactgagcttccctcccgtgtgttctccgtccctgccccagcaagacaacttagatctccaggagaactgccatccagctttggtgcaatggctgagtgcacaagtgagttgttgccctgggtttctttaatctattcagctagaactttgaaggacaatttcttgcattaataaaggttaagccctgaggggtccctgataacaacctggagaccaggattttatggctcccctcactgatggacaaggaggtctgtgccaaagaagaatccaataagcacatattgagcacttgctgtatatgcagtattgagcactgtaggcaagagggaagaaagagaaggagccatctccatcttgaaggaactcaaagactcaagtgggaacgactgggcactgcca

SEQ ID NO: 77771 - DNA, 1025 bp, Homo sapiens
tagttatcctatccctgcaataaggacttgcagcaaacacacctcctagtttgatatcacgaaactgataactatttggaggagtatttttacttatgaagggaatatttaaaagacatacttatttttattttatttatttattttttcagacggagctttgctcttgttgcccaggctggagtacaatggagcaatcttagctcactgcagcctccacctcctgggttcaagcgattctcttgcctcagcctcctgagtagttgggattacaggcacctgccaccacgccccacaaattttttgtttttttagtagagacgaggtttcaccgtgttggccaggttaacctcagcctggtctcgaactcttgacctcagcctccaaaaatgctgggattacaggcatgagccaccgtgcctggccagacatacttatttttaagggcaatttactttaaaagattttgttgtgacagatgtgactatataacatccactttgaacaattagggaaaaaatgacaagtcacacttcacccatggctcttgttgaaaaaagggatggggacaattgtgagatgcttactgtgtgccaagtatcctactgtctttttataatttcacagcccccactcagaggcagttactagagtccctgttttccagatgaggagacaggttcagagaggtcaagaaacttgctcaccgtcacatggtttgacttccagacctcatgctcttcccaggacttcatttaagaaaagcttggagcagttacctaacttagcaaaaagtcttcactaattgggaaaccacagaattttgctagaagattgagattaaaggctcttagaatatttgagcaagaaaatgtgcttgatctcttcctggcgtctccagcccctctcccctcttctggctgtgcttagccaccccagcggttcagttctgcatgcccgtgagtaggggttagcaccacctggaagatttctttctataaatgctgcaccacaggccacagtca

SEQ ID NO: 77772 - DNA, 1060 bp, Homo sapiens
atagttgatacttgcctatagaaatgtttggtggctggtgtcaaaggtccttaaagcatttgctgccaagttagtggaaggctcacttttgttaagatgactgtaattctccttgttaccgacgagagatcattggaagctgccttctaacactttgtgtagctctgtggagttggattttcttaaggtttaaaaagaatcacagcttcggaacttttaactgaaaatgagagacagaagccacaggggaagcaaagcaaataggattttcaatataaatatcagtgtggaaaaataacctattctgttgaatttagtgttcatgcacttgagaacaacattatttccatttactccgaaaatccttctgtgggggtttgagaaagtgaatgttgcagacatgttctgttgtgttgcactttatcctgtgtttatgtgtatgtgtttttagattaattcaagttgtgtgctatatttcttgtataatttacaaagttacacaaaatataaagagcagtaaacttgtctgaaagtttttggcaaaggaaggtaacttcaatgtaatagcttcctttaagagtacaggaaaatgcattctgtaatgaagtggggcccatgtaattgtttatattttcagttttaagcaggtatagtgcaggcttgttaggaatgtgtggaagggaagattggaagtgatttttcctcttttaaaagtaaacaaaattcttcaaatatgccctagttaactatttcagcataccatttttacttggttaacagtgtacattttgataacctatcaggaatgaataaagtatttttatttaaaggtgatattgttttatgcttccatgaatattttgcttttcttagagcatattcatagatgcagtactgtgatttaccacaagataattgggaacactttctcaaaatcgattttggttaatatcaggtaaatcattacctaggagtaagagggaaattgttgtcaattcctgactttagattgatccagcagaaagaaaaggtggaactttgtatatatccactgttgaaa

SEQ ID NO: 77773 - DNA, 1055 bp, Homo sapiens
ctctctgcaagctctgcctcctggttcacgccattctcctgcctcagcctcccaagtagctgggactacaggcgcctgccaccacgcccggctagttttgtgtatttttagtagagacggggtttcactgtgttagccaggatggtcttgatctcctgacctcgtgatccgcctgcctcggcctcctaaagtgctgagattacaggtgtgagccaccgcgcccggccttctggacatcttttttattgctctgtggtattacgtttttgccagatatactgggtagataggacgctcttgttaacttgccaaaatgatggctagattctgggttagttcaaggtccttgatttccctggagaactcaaagttcctttatgctgtccccatcactgaagctgtcacaataatataataatataataataataatggaatgttgctttgagttccctagggatttctgagttagataaatggtaaagattcagaagtcatgtgaagttttaccacattggtttgacctacatgtttgtatattcagcttcaaagctcagaagtcattactagcatagagactgaataaatgaaaaagaaagcttagcaatcatcattattttattatgttgtgagaaagatggaaaatgctactaaagttttgttgagaattattaaacatgttcctgctttttgttctcagaattctctaatccaataaaatgttctattgagctttttatcttaattgaattttccatttttttcctaatacatagccagtaatttaaaacaaattaagtaatttcccagagcttagtagaattaggttgaatcaaagggaactatcaccatatttctttagtgaatatattcaagaagctttgtttgccaagtttgatttaactggagtgattaatagtaccagcaaagcccgtatttctgtcttcccaatgcgaaattttagtttacctacattttccacgcactagtgtcacaacaaaatactaagtcataattgcctctttcccttatagttagaattctgtcattaaaaa

SEQ ID NO: 77774 - DNA, 1200 bp, Homo sapiens
ttttttttttagcccagaggaagtagggttacccatttatttacgtttaaaaagtacacaagccctatacttacttaggtaaatgtttattttttccattagactatttaaaatattgagaatagcttatagattttcatttgtactctcaaaggctcctaatcagtgccatagtctaaattacacaccttacaaatgaggaaatgaatgcccagagagattagttgacttgctcaagaccacagttcgtggccaaggcacaactagaacacagattttcttatctctaatccagaaaatccagtacagtttttagtaatgtcatgagagcccccttcctccaaacatttattcattttacaaatatttactgagcacttaactgtatgccaggttttgatctaggcacaaatgaacaaagtagagaaaatatttaattgagtttacaaattgagattacaaataattaaaataaatggtttgtcctattaatatgtgccatggagaaaaaaaaagtgagaaaggagagtattggagggcactggcccgacagccaagtggagctgagtattcaggggatgggcgtgacctggggtctgaggcttctggtagtgattggtgtaaatatagcatctccattttgttgtaggcgcagtggactttggtgagatggcttaggatgtaaccaccaacattaattctgtgggaaaactgtgtttcaagttccaaacattgtttgcagccaacttttggaagccagatcattttgttagatgtgtaccatcagtgtacaaccagccctctatatctggaattctacatctgagattcaaccaaaatattaattaaaaaaggcaataaaaataatacaaattaaaaatacaaaaatgatttgcacagcatttacattgtattaatactataagtaatctagaaatgatttagagtatatgaaaggatatgtgtggcatatatgcaaatactatcccattttatataagggacttgaacatcaaggggtttggtatccataaaggccctggaagcaatccacttcagaaaccaagggacaactgtataattataatttcattctcacaccgttccctatatttgtttgtcgataattctgtttacttagaatcattagtttcaaggattctcacaaaatttaacaatgtaggtggcattttaacaatt

SEQ ID NO: 77775 - DNA, 1081 bp, Homo sapiens
tgaatatcatgttcaatgatgaaatgtattaaggcaatataatgtatgaaaagcagaagttaagtcatttggaactttgaagacacttaaaagtgtccacatggtgaaacccggtctctactgaaaataccaaaaattagctgggcatggtggcgggcgcctgtagtcccagccacttgggaggctgaggcaggagaatggcgtgaacccaggaggcagagcttgcagtgagccgagattgtgccactgcactccagcctggcgacagagcgagactccgtctcaaaaaaaaaagtgtccagcacatgattgttggtaatatcaccacaatgcagaatgagagccagggccaagagtgagagtgctccatttctaagaaaactcaaatgtactttgatttagtcctttttacttttgtaatctttaacttctgtctctcagttttcatacctataaattaatttcctcataaagttatgagaattaaaagggaagtgtgtatctgtgtgtgtgtgtgtgtgtgtgtgtggtggggggaagaataggaataatgactagcatggagaaagaattcaataaattgtagctatatttgaacaatgagtaaaatatatgagtttaagatactttgtttcatagttttagaaataggtgattcttttcttccttagttaaaattacatctcttaattttaggatgctttgttcttcctgaaggatttcttcacaagtctttctgcagaagtagagcttcaaatgactccagatccagaaggtattaaatatgtatagttgaaaagactataccaagtacttggattgattttaattgttatgaggcttttttgagaatgtacttacaatatttattcccacttacataaatgtgttctgtgtttatttttgttgattcgcgaatactgtttatataaaagtaataatttaaaaggtgaaagcaaattttctctgtaacaagaatcgtattttgattaaataaaatgtagaaaaacaaattagatcaagattgatttaaatgtttgctaagaagaagcatatctaatttttcaaacatgcacattac

SEQ ID NO: 77776 - DNA, 1813 bp, Homo sapiens
atctccaagccttagttccttcactgataaaatgggagaaatagtaatatgtgtatcataatgctttttaaaatgaagattaaataaatcagtgtgtgaaaaacattaactgggtgcctgacacactaggttagggatcagtaatgttaactgttgttatttaataataacataacatatgataattgcagaacataaatggagtttttaactaatctgctgtgaaataacaaaaccttcttgacagaaattgtgttgatatgagctcaggtttggaagtagagtatttatttgtggggtggacgttattaatttgcttaaatagtactggttgaataatgttcattagttgtttaaataaaacttgaataactaaaagctggtaacaaatatttcaagactgagcttaaataatatttataaacaaaaaataggcgctgtcttagagaaaatgtactgtgaagtacagaagcttagcatagctctacattaatgcttatagcctctgacctaggttagacttgccaatcagtactttaagtttatgttttatcattatgaaaagaagatattttgatatccatactttaactaaatttatccatatattgattggcctagtggaaatacaatgaaatatttgtgggaaaattgatctgtggcgatcaccagtgtgaacaagactttgagtaagatacatctttctggcatgactttacgaaacttagcaagcccaattttctttctttttttcttcccccgccacagtgtctcactctgtcacccaggctggagtgtagatcatggctcactgcagccttgacctcctgggctcaaactatcctcccgcctcagactcctgaacagctgggattataggcgcataccaccatgtccagctaattttctatttttatttttttgtagagacgtggtcccattatgttgcccagactggtcttgaactcctgggctcaagtaatcctcccaccttggcctcccaaagtgctgggatgataggcataagccactgtgcccaccctaattttctttaatagacttttaaatttaatattgaacacaatttcttatttagaactataaagcattatgattttaaagtggagagttattaatcttagaaccatcagggaaataaattttatgactaccttgaggaagaatgagaaataattcattaagacataaaagctaggaaaacaaagccacaccacaaatatgtaagcgttaatgaggtatatcacctgacacaaaaattcttttcagttcgcctcttttaagattgctataccatattttgggatagtaaatggtcgtctgagtagaaaatcaaatatttttgtttattttttcttgtgaaaacaaatcagttggtgaatgataatgctttgagtattatttttctaaccgagcacatccccacttattcttcttaattgaatcatgttaagtatgaaagcaacacattattctttcatgtttttgaaaaagctgcattgccattgaaggtaagtgcaactgcttccaaagctcagtgttcccttagggcaggcagtaagcattgcagatggaatgagttccatctggtggataagtggatgatggaggtcatacagctaggcagtttgagattcaaaataggaagggggccggatttcctgactctgctagcctattatccattttagttttgtactgcctggaactctgccgggaaagcgtatcaattcattcaagaccatttggtgaatgcctgccttgtcccaagttttatattaggatgctggggata

SEQ ID NO: 77777 - DNA, 1042 bp, Homo sapiens
cctatacatacatacctatgataaagtttaatttctaagttaggcatagtaagagattaacaataatgaataataaaatagaataattataacactatactaaaataaaagttatatggaaggtatttctcttggtttcaaaatactgaaatatttttggacctcagttgaccatgggtaactgaaactgtggaaagcaaaaccttggacaagcagggagcactgtagattaataaatgagtgaacaagtgaaggaatgtcatgttgttgagttttttgaaggtggaattgtaagctgaggtagaattcagaggaaaaatgagtgatattttgcattttaaagagaaaatacaatttaataaaaggaatgtaaagaactgttccgcgttcttcctccttacccgttaaggtgaagtttcagcatgaagtctacccgccatgcaaacctgattgtgattccagcctctcagaacacccagtctcccggcaggtgttcattgttcaggatcttgagattcgagatcgtttggcaacatcacaaatgaataaatttttatacctgtattgcagtaaagaaatgcctcgaaaagctcactccaacatggtaagagttaacctcatcgttgtgttatgttagttttggaaacgtgtttttattatatctaacttcaggagagttaaagtagggaaaattactagatatcttttctcattttaatgtgaaaagtcccttttgaatgtattgcttaaagttttatgtttaaaaaattattttgcatgtcacttctagggtccattaactctaattgctaataaattgatatctgaggaaaagtagaagtccctagtgatcagtacaaaataggtagtattgctgaaggtgttccagatttctaacactctttacattttagtaaggtagaaatgattctttcaggactttggaggtccctcacagaatttgattttggcatatggacctatggttagcttcagggtttcagtaaactgttactaagtacaacattatccatttgcaatt

SEQ ID NO: 77778 - DNA, 1167 bp, Homo sapiens
aaaaatcatggttgatgatgcaattgtgataagagacaattatttcagtctgcccgttaataagaccgatacgagcaaagcccccttacactttcccattcctgtgattcgctatgtggtgaaggaggtctctcttgtctggcatctttatggaggaaaggattttggaatagtccctcccacttctccggctaaaagttatatgtaagttaatttctatataagtttatttgggaggccaatatattcttttcttagaaaaatagaattttccatttcccctttagagagaaaaaagaaaaataggatttatcattttaagaattattaataaagtagtattaaaaactgtaatttaaatgttactctcacagttttccaattgtgaacttatttgtattatttgtatttttactaaaatgttgactctcatcattttcattcagcagaaattttcaggtatctaccatgtacctatttcacaaaaatgagtaggtcctgtgagtcatgtgagtgacagagggcagtgaaacgcaggaagtgtgtcaggaggtggggtcgggcatgccctgtccccagcattcagcagggcactgagcagagagcctgtggtcattgagcgcctgtgagacgagtgcagtgtgccggtcgctgggagaatcaggtggacagaatccctgtagggggcagacttccttattgaggtggggcatggcatggaggctgcgtggagcagtaacatttgacactatagttcagcagctttttctacttaaaagcgactttaaaacacgtccaactttactataattattttgtgtattagttgggattcctaggacttgtgttctgactataaagggtttccaaagtaacaagaagcttataaggaggtctcatttctaagtgtatcctgtgatacggatcccagcatcataattagcttttcctgtagttttgagtatttagcaagcaggtgattactctaatggcaataatgaaacgcgtgtttcagtgtctacagagtaaagaagatacggttttggtttctagtaatttgtggcagcgttctgatagctctgtactcttactttgtctttcatcttatcattttccttaatgtcattcattgactttctttgaatattcctttaacaaaagggtttt

SEQ ID NO: 77779 - DNA, 1033 bp, Homo sapiens
tccagagctccgcctataggacagaattgtcaaaggtgaaattctgggtaaagcaaaactccactcaacactaaccagcaactgctgagcttccccaacgccaactaactgggaggaaactgtctttgtgacattgccatttcgaatttatcatttgtctttttattagttgttgttttttgtttgtttgtttgtttttttgacaggttcttggtctgtcacgcaggctggagtgcagtggtgtgatgtcagctcactgcaacctccacctcccggcttcaaacaattctcctacctcggcctcccaggtagctgggactcaggtgtgtgccaccatgcccagctgatttttgtatttttagtagagacagggtttcatcatgttggccaggctggtctgtaactcctgacctcaggtgatccacccatctcggccttctaaagtgctgggattacaggcatgagccaccatgcctggcctattagtggtttttgatgtatttctgactcttgctgaggtgttttggtgcatgttacttagctctctttaagcctcagattcatagacttattttaggaaataaatgagatattgcaggtaaaagcacacaacatatatctgacacatggttaaaatgcttgttgttgttgatatttcaaagtgtgccaaaatgttgtaatctttttatctaggtgttttggatgaaaaatctcaaattcaggagccatgttgttcagacctcttcctgtttcctgacgagagtgggaatgtatcccaggagtccggccccacctatgcctcattctctcaccatttcatcagtgatgcaatgacaggtgtgcccactgagaatgatgacttttgcattctttttgcaccaaaagcagccatgcaggtaataaattaataacattattgaagccttgaatggtgttacaaatgaattgaccaaagggtacctggagaaaattctgttgattttgtaaattctttatagttcagagttacttttttttttttaatatactattg

SEQ ID NO: 77780 - DNA, 1008 bp, Homo sapiens
ttaaagacgcatatgagtttttatggatatctgttaatcattcagcttgtgtctactcagtgtctagtaaataggtaactctggccaggctggtgtcgggaatgcagagtgagtagaagacagtgcttatgttttctggtagcttgtagcctagtaaaacaaatgggcacaaaactggtgccagtacttagactgattgataaatgatgtaagaaaatacttcaactgtggtatatcctctactgtttggaaaggattgggataattttattagactttagtaaagtaagatggcttggctttttaaaagtggttgggatttaggtatgtaaagagggaggagaaggtaatcttggcaaggtcattaacatcaacagagcacagacaaaggcatgcatgagcctcagttatttagccatgacattcgggttcttactgaaacaaaagttctcttattgaaaagaattagataataaagttgggtaagcaaagagggacccaggtgattcaagatccttgaaagccaaagggaagcaggtaaacattttaaagcctctatttcaacagtattttcttctaattgaatggtcatagctatatctatatattgggaaatcttaattaaaaattatttcatggagttgtaaaagtctagtgttaactgttgctgtcttgctaatttaggataaattagaactaaggaagcaaactggggcttttagtgttctatgtactacattatttgtaataaatgttagcagctaggctgggcacagtggctcatgcctgtaatctagcactttgggaagctgaggcaggtggatcacttgaactcaggagtttgagaccagcctcggcaacatggtgaaaccccatctctccaattaaaaaaaaaaaaaaaaaaagctagatgtgggatgtgttggcaggcgcctatagtcccagatacttgggaggcttaggtggggtgggaggatcacctgagcccaggagacggaggttgcagtg

SEQ ID NO: 77781 - DNA, 3213 bp, Homo sapiens
ctatagacgtgtgcctctatccctggctgattaaaaaaaaagttttgtttttgtagagaaggggtcttgctgtgttgcccaggctagttgagaactcctggcctcaggtggtcctcctgccttgtcctcccaaacggctgggattacaggtgtgagccactacatctggcccactctatctttatactatagtttaaaccttgtgaatttgggcatctctttaaaaactgccaaaaatttagaattaatttgagtagatgatttaatctaattctttacaccatttaaatattcctagcattcataaacagtttttaaaaaatgttagatgacagttataagttagaaactgcttatgatttcaacaatgttcataccagaaagaatgatgcaattaagcatatagtgattatggggtatgatactcaaagcttagtttttcagatgttggttttatctttcttgcctcagaataatcttggatgaagctgctttacatctatctgacaaatgcaatactgtcactataaatctgagtagaggtaagagttaaaaaacaaatggagtagataaattctgctttatttttgtgcgtaaataattttaaagcattttaactctgggataatgctagtgaactaagaatcttattaaagatccttaaagattaaagggtctttaagtatatagtgatcatgtggtatatattcacagcttcatttttcagatactggtttttcagtttgaaattgtaatgttcttataatgctagttaagtacatcaaattactatatatactacaaatttttatttaagataatttttgtttctaacaaaaaataaagtgaattttaggacttctatgggatgaaactattttcattgcattataattatttgtagtgctctctgcaatgaattttaaaggaatgctagttgtattgggtgttggttggatacacatttttgaaagctgtactgaagagattttcttaattttaaaaattttagattatgttcgtgtgatggatatggggcttttggagttaaccataactgcagtgaagtctgattctgatggagagcaagtgagttattaaaataaatgaaaattttaagttctattttttaagagattaaaaaaattgagtttaacatttttccgtgtacctaattttggtcagaaatagagtaagtatattaaaaatggatttatttaaatactttttttatgtagcgagacagattatcatgaatcttatttaatgtaaatctatgcaaaaaaagaaacttttgtctcatttggaaaacattttcatccctttttctgtgtcttgtccagactgagccccgctttgagttacactgttccagcgatgttgtccatatcagaacgtgctcagactcttgtgctgcgttaatgaatctcattcagtacattgcaagctatggtgacttgcagacacctaacaaggcagatatgaagcctggagcctttcaaagaaggtctaaggtacagtcagcaatgtgattcctccagtccctgccatgtcgtgacatgtttacattattgaggtcttcatgacagtcataaggtagaaaagaaactttgaaagtcattcatctgttctttaccttcagaataatggggtctgaaacggtggtttcatgggcctttttggaaaaccattctgctgttttgatattctttgtttccattaatcttcctagcaaacatcatacttttttttttctagacttgttattttcatctgtcctaagggaagaaagaaaacatttatcatgcaaaagcttgttctatgcaagttgtatgtaaaaatgctatgaaaagatagatggcaggtgttagtattgttaccagaagacttacttatatcatcatattttccctatttttttatctctaagacaatccagttttcagtgtactttgtcatatatgacttccttttcctttcatgatgacctggtgagatagagaggttaaaaattaataagacccagagaatttagatgattgctctaaagagtagcagaaacagcaacaaacccagatattttggtgtccagttcaatgcacttttctgccccaagtgtcacctttctaacttctcttatgtccaaattgaagaatgtccagtttgtttagcattttttctttttcattgttattctttgtggtctctcttatgaacagaaatctcagtccccttaggttctagagcctctgttatgtactctagtaaaggcctgactggcatcgtgtttgttgtcttttgttcaggattattttacactttatttgtgttaatttctgtttgtgactccttgttcctgctgtattctcacgataaggtgatttatgacaccccgcctactatttattcccttttaaaaaacattcttcttattttaaattatccctttcagcttggaacttgctattttagagtcatgctcacatataaaaagcacgatctgggtttaatgaatctacagttcaccaaccattggtgaagtatttggttaagtatttggtgctggaactgagctctgaatcaccgtttagtatatttcccctgctgtgtgtgccccctactgttgttaggtgtccaagaaatgaggcctcgtcctacaggggctttatgtcaaagggatgaaagtcattgcaaccatcagagttgaggagatcaaacttatttagttatcccttctttcccagctttattgcagtttgttcaacttccctgttttcaaatgcattgcctcttcaagatcccagttcactgtgcttgctttgaggtggtgacacatttattgctctttgccagtatttgttagggtgataatactaaaaacttgaaatataacagctgctgggcatagaaaaatgagtaggtttctatttctgatgtttttgtacaatgtaatgtatttttgggataaaataaatgtaagtagtttggtttttaagagcattttcagttatttttaattaggttttttggctataggtagattccagtggtcgatcatcctcacgtggtccagtacttcctgaagcagatcaacaaatgttacgagatctgatgagtgatgctatggaggagatcgacatgcaacaaggcacctcgtcagtaaaaccacaggctaatggtaagaccaggactcttctcagggagcactgatgt

SEQ ID NO: 77782 - DNA, 2209 bp, Homo sapiens
agtccctctcttgggcggcttgcagtctaaaaaggggaaacgagaaaattcaggagggtgctgtaggtgctgtgatttaagtgggtctgtgtgaagcatatgctgtgggtccagatcttacgatgggtttactagaagacgtggtgaagtttgagttttcttgaaaacttcgaggatggatgaggggaggaggctaggacaggggcatctgagcagtgacaggtagttctttgaaaaagtaggatgtggtgacagcctaggtatgacatatgccttcccattggttgccagtattgattgggctagtctcgctagtcataagggtttttctctccttattttttgctccatatgcattcttcatctcatgaagtcttcccagtgaagctgtgctttctgttgctgatgagagaaaaatcaggtatttctagggaaagaactgaattgatcccacagataaatacttgccttaaaaaaagaactgaattgggagctggatgtaatctacataatctggactttcatccccatttttccactaattagccatgtgactttgggaaggtcacataacctttatgagacagtttcttcaggtgtaaagtgagaataatgattctgccctggacaccccacaggactgaggggagggtcagtgagatgatgcaggatcagttccagtttacaaagtgctctcatataggtgagccgtcctccttttctgttctttgtgggtttttatttttcatgagcttctgtttctaaggtatattttgaaatgtaatatgaatttgtaatttgatgtatataacataggtaaaattaggcaagtatctatttaggtatctaattgtgcagattcttttgtcactgccctgcattatagccatatcagttattttttcattgaaagaatgcagttgttatttttgttgtttttccaaattcttgtaggatctaatttccattttgccgtttaaaaaattattgttcatacgatcttttaaaaggatttttttttaagtttgccttctgttgaactaggagttaagtacttatttttcaacttttgtctttataggatctttaatgacttgctactgtgggaaccaacagctccttcaccagtggagacattcgagaatatttcctatggcattgggctttcagtagccagtcagctcattaatactttcaacaaagatagttttagtgcatttaaatctgcagttcactatggtaatatatttttaatttgttttgatttaaaatgcctagtttatcaattaacaaagtactaacctttgaattgtggatttaaaaatctttatgtttcattgtaactatattttgcaatttcttttagtaatttataagaatatttccttatttctatctgtatattgagaatatcattatcacttaaatatgttctctttagaatgatagtgtgcacattgtttgaagttcaaagctaaagagaaaaacagtatgtatttctgtgttcacaccatattctttgtaaaactaagcaggttatataaaatattttcatgatcatttttatgttgctgttttaatatgctatcagaatgtaattgtatgtttatttctcatagatgaggaaagtggatctgaggaggagactttgcagtatttttccactgttgatcccaactatcgttctcgcaggaaaaaaaaattagactctcagaacaagaactctcagagttttctctcagttcttctgaatattaatcatggattaatagcagtgttcacagatgtgaaggtgaggtttacaaatccgaagtgttttttcaaatgtatcttactttaaataaatctgctaggatacatatctagtgattgaagtatttgatattttgaagttgtttcagggactgatgaagaccagtgtcctggggcaaaccatgatgatagcaactttggggatttagctttcgttgcagatcaaactttgtggggctctccctttggaaaacaggtgctaattctgcttctggggtgacaacaaagtacagagattcatctgatagaagaggttccacatagcatttaagttatccagttttattttataccatgatattgaatagttcaaggattagactgctttgctgcagtatgggagattttcctaagctgaatcaacaaagagcatctcaaggaacatgcttacttttct

SEQ ID NO: 77783 - DNA, 2287 bp, Homo sapiens
catttttcatttgtaaaatggattgaaaaaacacgtatagaatttttgttgttgttgtttttgtttttcagacagagtcttgctttgttgcccaggctggagtgcagtggcatgatcttggctcactgcaatcttcatctcctggcttcaagcgattctcgtgcctcagttggatgtcaccacacccagctaatttttgtattttttagtagagacgggttttttccatgttggagaggctggtctcttaactcctgacctcaggtgatccgcctgcctcagcctcccaaatgctgggattacaggtgtgagtcaccgcgcccagcccgtgtagaattattttgaacagaggtgtttcttacagtgtttggtacaaaatacatatttaagaaatgtagttatttttctagtggtagattatatagactttatgaagaaataatcactaatagcacttagtaagtggtaagtgcttgctctatttactatgtcattatgtactttatgcagtgtaccttggtacttaagaatttgagtttgaacacaaaacagaatctttaatttattggctcattctgtctaccacacgtgcacatgaaaccagaacaactgaaaaatgctgtagaacttaaggttgcattatgttcctgattgagaggatctttgctcctccatctcttcttttagtacttgagaagaagcacatttcagtaaatcagtctttttttttaggatcgttccaggaagagaaaggagatccatctattaagtttttccatgtgtctagtggagtagatggagatacaacatcgtcagatgactttgactggccacggtgagtaagcaaatgcataggtttaataggattttccttttaaaaataaaatattcttttaaaccaacattttgtctattaaatataagctaaacatgtccatccttgattcttttgtggttcataagcgtgatgattgggtgttcacatgaatgtgtgagatgtgtcaccctcaaaccttgttgtgctatttttctgcctgccttgctttactcctcctctccactgtctattagaccgattagattcttaggacagatgttgctcatacacacctggtaataagcatgagtttagagcacaagtttcataaggactggatctacttcggttaaataattcagaagcacaatttatattaggatatgtatcaattaggaaaaaagcctgtgatcatttacaaaccaaataacaccactacctagggaataagagttgcagttgcagcacagctattctctttgagggttccatgcctccttataacaatgggtggatgtggtaatcaaaggagaatgaaaagtctgtgctagagatgttctgtagaagcttaggaaagggattactctggagtaaaaagctcattagtttttgtagtcataggctgcattaactcagtgatctttaggttttgtggttataaaacagaaacagcaccagccctttattattgaaattactagatgaaaacataactttgttgttagagttttgaaactgtttcctaatcagcttctcccttttccctttgaacaactgatataatatgaggttgatataacatgaggtttcttaggtagacaagtaatttattatagcagaacagactatatgtgagaagatttggtttaatgataactagaatccttaggtaaagtttgctgacttttaatgaaatttaaaaataacctttttgcccccttcagttacccaagtataaaatgtttatgtctttctgttacttacttgtttcagttccacacttgtaagtttacaacatgttcataagtgggttaccttagacataattagactttgtagagaagtttaattctatcattaagatttaaccagtggtgtgtgtattaatttgcacaaaagttaaagttttgctgtttacacttagatcttggtctttttaaaattgtctttgctatcagaattgtactgaaaataaatccaccagccatgcattccattttggagagaattgcagctgaagaagaagaggagaatgatggtcactaccaggaggaagaggaaggaggtgctcattccttgaaagatgtttgtgatctaagaagaccagccccatctcctttttcttctcgtagagtaatgtttgaaaatgaacaggtaaaagtgtgagcaagctacaaaggaataatactattattctctgtcatagagcaatgcttttgattttttatttttaaaaaaatgccttgtgta

SEQ ID NO: 77784 - DNA, 1971 bp, Homo sapiens
atttttagaaaatactttgggcgtttatttaatctttttaacttttttaaagtatgaaaattgatatgaaaagtagttttacacctaatacaagaaaaactctacaggttaggattatagtatttatactcaaactgtaaaaacattttgttttcttccacccccctttttttttcttgtatttttaagagagatggggtttcaccatactggccaggctggtctcgaagtcctgacctcaggtgatccgcccaccttgtcctcctcaagtgctgggattacaggcatgagccactgtgcctggacttttttttttttttttcccatttttgacaaagtttcaaacatctgccagtaggaaaatagaacaaaagcggcagaaaatataggtagacctcatttgggcttcaccgactaaagtttttgaaatattgcataatgtttttagataattttaagagactatttcatatattttacagatctgaaagattttgcctttgcaatgtaaatttttaaatgtggaagacgaagggcagtgttgggaaataaacagatcctggaaaatttcccatcaacagaactgattttttatcttaaggaaagggaaatttgaagcaatctttctggttaatttccttaggagtattaattattgataacttgaacttgtcagactaggtggataattgttacattttaacactaataatcttaaatggtgcattttttataatagatttataggtactggcattaaagtatcctatgaacaaagacaaagatcagcttcccgatattttagtactgatatgtccattgggcaaatggaatttttggagtgcctatttccaactgattttcattctgttcctcctcactatacagaggtaaatattgaatactttttctttaagattattttttaaatctaccttgctttttaatgattgtatgaggcaatgattttctttaaaaatgtatagaaagccataggaggaatattgtcattttctttttgcacttgtgttctatagaaatatatttaagaatgtcactcaacatcgttataaggatctgttagaattttaaattagagttgacttgtttaggagtgacaggtgggttatgagagaaatgacttcatttcactcatgttcaaagcactcttcatttcagaagaatttgattattgaacaaataattatcgaatgcctgctgtgtgctaagcattgtttaagacaagttaaatgtcttgtgttcattcaccatttttctgatatttttcctaatgtaaaagtgtgacctaaagaaactttagaaaactgtcaaagttatgttcattgctgttactttgaccctttatagtgttttatttcaaaaacactttcttggaaatgaatttatttgaatcctcgcctacattttacagatgagatatcacatgagttaactaacttgtctaaggttcacattgctagtaagtgacaaaaatgaaacttaaaaccagatttctgacttcagaaagcctttctcattattgtatgggcacctctgtaaattcttgtgattaatacatttaatttatcttcatctttacttttaagcttttaacgttccattccaaagaagaaactggttcccattcccctgtgtgtcttcagcttcattataagcattctgagaatagagggccccaggtaagagatctttttctataattgccacctgtaaattttaatctgatatatattttgtcacaattataaggttttaacccaattatatagtagtttttagtgattgtattaatgccttttcttttttttttttaaaagggtaatcaagcaagacttagttcagttcctcacaaggcagaattgcaaattaaattaaatccagtgtgttgtgagctggatatcagtattgtggacaggttaaattccttgcttcaaccacagaaacttgcca

SEQ ID NO: 77785 - DNA, 1042 bp, Homo sapiens
ccctcagtcaatcatgtgatttttgtttcactatttacattttccttggaagagaacctcaggtttcttttctgcaaaatttaattgatatagacccaaggcttaaaggaaaatttggtgagcagtttttggttaatcttgagttttccagtatgtttttattaatataaaagcttggtttgtacatttactgttgtcacgtactcttgtactttagtacaaaaatcttggatgtaagatgcagcaagatagcagttgattttacttaaattaattgtttaatatcattcaaactgttgtatgatcatctgttttttaaagctaataaatgagtaaatgttttataattttaatagttttatgtgtcaaattttatgtatataattttaatacttgtattttagctctcccatctagatctgtttcagtggatgaatcaaggcctgaacttatttttagactagctgtgggaactttttcaatctctgtgcttcacattgatcctttatctccacctgaaacgtcacagaaccttaatccattgacacctatggcagtagctttctttacttgtatagaaaagattgatccagcaagattttcaacagaagattttaagtctttccgagcagtgtttgcagaagcttgctcacacgatcaccttaggtaaactctcacatatgtattaatgatcctttaaacttccacatatgctaatgatccttgaaaaagaaccacatgtggacttttgtatctgcctatctgcatttgtttttctaattcacattttatttgtaaatgaatggaatgagtgaagttttcttgcagtgctgcaaaggtgtttagaatctttcattcaggttatttggcatgcagaataacagatctagataataggagttttcaaagtgatctctttagttccctgcccagctcttgtcaagtttctttaaccacattttgccttcatccctattgacaccactgcagtcgtgaaaacagttcttattgtcactggcattagcagagatgacagtggtga

SEQ ID NO: 77786 - DNA, 1139 bp, Homo sapiens
acccagcttactttacatttataggtgtttcacaatgtataaatgctaataacataaataatatggatcaatttaagtatggaatgttggacaaaataagaaatcaaaccctactcaaaaaattttggccataataaacttcatttgcatgagagtaaaacaattccgaaagaaggaactgaaatgtaaatggaattccaaataatgtttttggctctgaataaaagaaataactgtatccagatgaaactagaggttgcaatatatttatactattttaatatctgattttaattcctaaactggcatatcacattaaaaatataccaggtaatactacatttatatatttaaaacaaaagaaaacatgttcatcagtagggtagcttcattttttattaatttatattgagtttttactatgccattaatattttggactcataaattacaccactgtaagtaacataaaatttggggcatcgctgtatctcatataatctgaaggaagaggattgtattaacgtatattaacttacttaaaagacttgaattggtgggattataatacaagtgacatagtttaattctctctagaagaagaagtattcttctccatggctgatatggacatgtctcatagtctctcttctcttccaccccttggggaccccccaaacatggaccttgagttatcattaactagtacatatacaaataccccagcaggatctccattaagtgctactgtggtaaagtattacttaatttttcttctagactgaaaagttgcttctaaaattctacacttcattcatgtgcttaaaaaaaatcttttatagcttcagcccacttggggagagttccttgatcatcataaagaacagccagtaagagggtcaacatttccatccaacctagttcacccaacacctttacagaagacatgtaagtaaaaataagacatttgttgttagtttccgctggaatttttaaaatgccattctactggtgcttttctttcttttttttttttttctggtcttggccatttacaaagttcagaaagcaaaatgaaccattgttaaacaattcactgtgaagtgttttagaatagttgctcatttattgtattcttt

SEQ ID NO: 77787 - DNA, 1023 bp, Homo sapiens
gtctgtaaggaggaagcatagcaataacttttatagttctgttttggttaattatatgtagtcctcaacatttgtatgcttttatatttatgtaaacccaaacttttgtacatgatgtgttgatttgtacaaatgtcttttataataaaacattatgtatacatttgtacaaatgtataaatatatgttacttttagagttctgtatattagtgacaaatgaacatgtggaaaaactgcgtagtggcattgtgtgccagccaatatttaatatttagaagtactacccttgcctatagagtaatttttgtgtaatgacttgagtatttgagtataatttgtttttatttaatgcaaatgatgctaaatggaaaaagacaagttctggattttagtattgagaaacatagatctcataaaatatagtgtagataaagatggcattaattaggggtgctgaaaatgtcagatctttaatctctttctgatgtacattagccttaactctttcaactgtggattcaaaatgttatgaaagatttcatgttttttttttttttttaagttctctgaatagtattcccttgagtagtgtgtaagtctgtgtttcatgtattcagttttagcctatgtttttaggaatgcattttattgaaaattggagactgcccgtattgaatttagagatgttttgtttcagttaccatgttacattgagttgaaatttgttttttagttatgttcttttatattttcaaaagaaagtagtaagtactttgttctttttatgccaaacttagaatgtacaaataatgaaatatttctatgaaaattttaatttcaatgaattagaaatgaaactcttgattggccattctaatgaaagtcagagattgtgctttcagtacaacaattgtgaaattataaaacaatttttaaatttggcatgtagttagaaacacattttctctctcctctcagccttaggttggctcatggcttgggatgtcagtagtcaggaagg

SEQ ID NO: 77788 - DNA, 1043 bp, Homo sapiens
taagaatgtttcgattgctgcttatattctcttggtgtttaataaaattatcttcagttcaagaaacattgattactgattatttgtcaaaggtcacctggagactagagtgttaccttcactttttctgtttatatgcgtgaaactcattgatgataattgaaagcaaaatacccttaaacagaagaataaaaagctctaaaggactctatggtggggcatttatttgctgagtagttcaggtgtctccacttttagtttaagagttattttctcgttagcatagtggtgactaaaaaaaaaaaaatacttgataggactggtgaggaaacacttcataggactggtgtggaaaatgttgcttgagccaagtaggttgagaatttttactactcatatactatagtagccttggattttcccagaatgactgaatttcaaggtaccttatgctacaagatatatgggattttgctcaagtggttataagactgggcataaatataacctatttaaacatcttatacttagggaaattattttgtagcttagtggtgcaatgtaaattctggaactgttgactctccaaaactgttaacatttatcagtttttttctttttttccttttctttctttagagacagtctctgttacctaggctggagtacagtggtgtgatcagctcactgcagcctcaaactcatgggttcaagcgatcctccaatccagcctcctgagtaggtggggactactgatgtacaccaccacacccagttaatttcttttaatttttgtagagaccggatttcactatgttgcccaggctgatcttgacctcctgggctcaagtgatcctcccacctcagccccccccagtttctggaattacaggcatgagccaccgtaccaggcccctttaatattactcttcactgctgtaataaacctttttgtatttagaggtttaactttatttcaacttctctgccacaaaattgggacgaaaacttggtgtttactgagaagagagttccatcaagtc

SEQ ID NO: 77789 - DNA, 1553 bp, Homo sapiens
actgaaaaaaaggtaccttcggagattcacagatcctaatggaaaaactgatgctaattgaagaattgctgtactcctactgtttcaattctaaatgatcaattatgcaaagaattttgttgaactcagcaatgacattcctttcattcctgatctcaattagtttttctattatggctaattgacattgcatatatacacacaattaggtttaaaattcagtttttcaagctctttgttcagaagacttagattggttggaatagtcttttcatgtttttaaacattttgtaaactatatagataatgacttaaaaaataagcaatgtttttaatagacattgttttcagcaacaaaatcatggaacaatggaaacatttccaaatacagtttttcaaatgttctcctcatagtacaagtagtctttgaaaagtggttgctttcttactcattattaaagtgctatctttattttgaaaagacagattaagtatgttttgttttttggaaaatatctgctaggtagcatgtactactgatagtcattgtcataaatacataaatagtcagtggagaattcttctctgtgtaaaaggaaaatgcttatctttaaatccaacccttaaacacttggccataggagaaaccaggaaaccagaaggtaattgccattcactttctctttacaaagattctactgtttaaaggtctggttttattctatagaatgtatgtggaaatgtttcagtgtgcagaagtggaaggaacatccaactgagggcaccactcttaatccttctctgttgtggaactactagttttctctttgtaccagtttgatatgtggcttgaaggaaggtgccagtgcccatttgtatattaaatataagtacaacttttcaatctaaatttggaaaatttaatatagaatgtctcattttcctctcacatccttatgaatcatctgataatactttaggatatatgcatccagttttggagattactaccttaaacgtggcatgaagtggagggagaaatagaggcaaggggtttgggattgttccatcattggaatagactgtctaaaaatttcataaactccttgtccctagaagtggttgaaatggcaaaatgttgaaaggaggaaattctatttggggtgggaagttggatttaatgactcattcctttttaactctatgactgtgcctttatttttgatttttaaatggaatttctttcattaatcgattcagtacatttattgagctcttagcatgtgccactgtgaggggctgggggatatagcagtgaactaaacaaagacccttttcttacaggagctcaagaagatacacattaacaatttattacactgaggccttttattttattttttttttgagacagggtctcactctgtcacccagactggagtgcagtggcgtgatctaggcttactgcagcctcaacctgctaggctcaagcgatcctcctacctctcctcccctccctgcagtagctgggactacaggtgcatgccaccaca

SEQ ID NO: 77790 - DNA, 1033 bp, Homo sapiens
taacccattaaactattaatccataaatggattaatccactctttgggtagagcactcatgacccagtcacctcttaaggcttcactttttggtgctgccacgttgcattggaaattgaatttcaacatgagttttggaggggacaagtattcatactaatagcacaccccaattaaaagaggttgccagatggatgaaaaagcaggaccacactacatactgccagtaagaaacccatattaaataaaaagatatttgtatttccattccgaagaccttaaaacagcctattatatcaaaatcaaattcctctctctaggtgtcagcatgctgtcagattgggccatccctgcatatccttgtattttagcccgactagttcctgccacaccctgtgctgacctttgcttatgctttgttccctacacagaatttttcacaactctcaagacctttttgcttatttataactctttattcatgctcattccaaaccaattttgactgacctgtacccttagtcaagccccatcataactaaccattacgtcatagattatagaatgtcaaagctcttagaacagtaaagaattttctgcctatttaccttattttgtagatgagacctccgtaagaccaatgagattatgtgcccaactcaggttcatacaagtttagtgataagagtttgtagtaggacgaagacatatcattgttttctgtaattatctgccactcacaattaagtacatttggggagaataattatgatgtgtgtgtatggcattaatatttgtgcaaatatttcatgtgcctgttttctttcccaaagtagactgcaagctaccagtagatatcttttattagtattctagtgcttaaaaaaaagtcggctatgtaggtaccgagtggattatgatatttgattaataaacttagaatccaagtagacaagattataaaacataggataatgattcattagtttttactatttgaaacaatgatgattgattcctttacatacagtaa

SEQ ID NO: 77791 - DNA, 1051 bp, Homo sapiens
ttttcaaattctttctctgcatttccttgagcttctaagtaaaaccttttaaatgttgaaaattctatagggagcattttagtggtgtttctgtgttatacattataagttgctgaagtattaaaggttgtatttaaaatgtgtatactctgactttgagaaatagtttcactcagttacccatgtatctggtggtctagtggctaggaaaagaaataatttatttttttgaaaggatgattactcacataaacacttggattttgctttctgtaccaacatgaaaactaatgaattcactgttgcatttctcttgtaggtggtaggctatgcttttgaccaggtagatgatcatttacagactccctaccatgaaacagtctactccttgttggatacactcagccccgcctaccgagaagcatttggaaacgcactgcttcaaagactggaagctttgaaaagagatggacagtcatgactacactttttcctttcagaggggctggtgctggtacagaatgttgatataaagcttaaaattcttgcatatggtcatagaaaatgcatctttggttttgtgtttttatcacttgcttccaacttaggcttttggctcagaagattattgaataatgatttgtcttagtttctgtttcagtaagggaattctgaggccgttgctatgataccatcattaagacattcacatgtcttcatataatatctcttcatttcaaatcctaatcactatttcatactattacagggctttgatgctgccagcactgtcttttacataggaaattctagatttgcacagtaatagaggaattagaagtacctaactatacactttgattcagcctgctaaatcaggggttcaatactagcttggacaaactttgtagtaattaattgctaccagccttattggaaacaaattatcaactagtttcccctgcacaaattttgaaattcactgcttcacttaatctatttatattactaataatggattaataaagatgaattaattatatattactta

SEQ ID NO: 77792 - DNA, 1050 bp, Homo sapiens
aaaccagcctaggcaacatagcaagaccacatctttaacaataaaataaaataacctatgtggctcctattacatttctatatttctgttggacaacacaaacatcatcactgtgacccagctctgcctgctgctagaggagtgcagtatccggaaacaagttaattaagctctctgaccctgagttcctcatctgtaaaatggggaattataacagtacccactcctccaggaatgcaatcaacttaaatgagatgacagtgtgcaaagcatttgctttgccttggtggcacccagcaagcactcgggaaaggtaagtttctagaatcatcattcactggccccctgactctaattttctcttaccatttgggaaatttctgtttccttgcagtttctatctaactgtgtagttggggcttcgcttgaagaaattacagaggaagaggaagaggaagatgaaaataagtcagctatgctggaagcttcctcaaccaaagtgaaggaaggcacattccagattgtgggcacgctgtccaagcctgacagcccgcggcctgactttgcggtggagacgtactctgtaagtcccggaggctctggccaggagtagacagagggaagagtcaccttccgctccaacgccttgacaacttgttttactgtttgcctcccctcccctctcttccacagacatggccaggttgagggaatggctttctcctgtaatggagatttacctcacagaccccacttttaattttcggccaaagcaaagagtttaaattagatagtgttggaaaggatggatctaagttggactttcagactcatacagttctcctcttcagcatattctgccttgcattatccaagacgagtctgtgccatgatgggtgccatctgtgaaggagaaataggccaggcgcggtggcttacgcctgtaatcccagcactttgggaggctgaggagggaggatcgcttaaggccaggggttcgagaccagcctgggcaacatagcaagatcctgtctcttatatttatgaaaa

SEQ ID NO: 77793 - DNA, 2234 bp, Homo sapiens
agtaaccggttccaacccaaggcagcgactcatgcgagtcgttctaagcgccgcgctggggggtacatacggtgcacgcgtgggtgcctcaccccctggcagcgcctccagggacgctgctccgggaaagagcagccgccgcgacctcaggcggcgggaaaggtgggacctcacaatgcgccggaagcggtgcctcgtggcttgggatctctccgggttcttccttgcgccgtccacgccgcactgcccacgagggcgtccccgcccgagggacaactcaccgcccggggcctccctgagcgttcccttccaccatctgacacccactgctaagtgtgagaggacccagggggtaattgccgggccgcaggcggccttaggaactccgcttcccgtgaggcttcgcggcggacggcgctggtgcgcaggcgcacgcacggcgtgcgtggtggcgtcagcagttctagaacgttgctgtggtagcgctcgggcgccatgttaggacgaaggggaaggaggagaagcgcttaaagcggcgggagcggtgcgggagaggggttggacccagggctgaggcaggcccccccctccctcccgcctcagtggatcatgcccagggcggcagcggcggcggttgcgggggggaagtgactgggcggtgccggcgccggagacgatgccgttgtaagtaatttgtattctgttttctttcgctcgccggctgggccttggggggcgtccgggaaggggaagaggtaggcggagagggtggcacgcgagcccgaccctccccgctggtaggaggcaggcaggactggggaccttcctgtttcctcgctcgctcgccgccgcacttccccccgtgtgctgggttcccgcgtcccccgacccttcctggctgggtcagctgccgtcgggccgggggccttccccttccggaattgctggcggaacctctaactcgcccggccactccagcttctccgccccgtccacaaagaaaatcaaaacaacccgaaaacaaaacattgcctggtggtggggaaccacgaccctgctgcacgcgggatcagcacttggggttcgggctcgctctcggcgcccctcgggcccattcgatgttgcttttctgttcctggtctgtctcagtttgctcactctcttcctcccatttccagatgcctgtcttgtgcgccggagttagcccctttccactgaccttgtctgaatgtaggagcacgagttaaaagcccagctttgagcgttgagtccgcctgcctccacctccgcctccctagcattcacaggcggtcggagaagggggcacttcacagggtgccctcctccaaaacgacttatgtattgctttccctgttttgttttgatggggtaaccaggtttcattctgtttccttctttctctatctctggtgatactttttttttcctggttgtaaggcttgaagctagtctctttatgctttctaatgccactgcgcctttttcttttcttggtgggtttttaaaaagtttttttctcccctccccctttctgataatgagatataatttggcagctcattgccagtagattacggattttttttttcctgcaaatatacagcattgtagaggcctaaatagtgagactgcatttcttccatttttgaatattgaagcgtaagagtgcctctttgagaccagggaccgagttttcttcatcttagtagcctcaaaacgcaacatgtaattgacactcaaagttttggttaaattcaggataaagatttttgtggtttctagacatcgaatgtagtaactcaggtctattttttttttgtaagtaaggataatttctttagcacataatcaccgattgtagttttacaattatatatgtgtgtgaatgtgtttctttacaggtgagactctaactttggcacagaccttaatgacttctatcgcaatttatgtattttaaaaggattttccatggctcccacccacccccttaggttattaagaagtctatcacattacttctgtgatgaaaacgtttgttagacttaactaactatacaggtctaaaatcttggaatctgcatggtttctgtttattgatttttccctttcatagaataagagaccctaggagaactgagtctaagcaagattgttgtggtgtttctcagttcaataggagataaatgtttgcagtgatgtcgtgatgactg

SEQ ID NO: 77794 - DNA, 1389 bp, Homo sapiens
gcgagttagttcaagtgtgtaaaatggaagacggggccaggcgcggtggttcacgcctgtaatcccagcactttgggaggcccaggcaggtaaatcgcttgaggccaggagtttgagatcagcctgggcaacatggcgaaacttcatctcaacaaaaaacacaagttagctgggcgtggtggctcatgcctgtaatcccagctacttgggaggttgaggtgggaggactgcttgagcccaggaggctgaggctgcagtgagccttgatcatgccactgcgttccagcctgggtgacagagcgagactcaaaaagtaagtatacgataattactgtagtaaacaatagagagaccaaagaatgcctagttaaagaaaaatagggcttcttcctcattaagttgctttgtttttcatgtactgctgtcacactgtcataaatgttgtttttttgatgtgttggattgtgatttcccggctatattgtgtttggctttcatttttggtatacctgtcctaatgttaaatttggatgggtgagtggcattggggcatggaccctaggtgagttgtcggaatgaatttaaatcaaaattatcgaaatttaggatattacagaacattttgatcaagtgtccatattttgtctaaatttcatatgtagctacaaacatacttttggaaagattatagtctgatttaagagtcatggtggtgaagcttctgaaagttttgatagtctttggatccattaaacagtttctcacctagtcattattgacatttatgccagattcattccttgcaggtgcctgtcctgtgtattgtagtttaacagcagccttagcttccacctactggattccgggagctccacccctccatttccccagtaatgacaatcaaaaatgtctccagatattaccagatgtgccctggggtgcaaaatctggttgagaaccacggcattaacgaaaagtgtgatgcccttatggaaactagatgtatttctgccctactctgtgttggtcagatatttttggcatcagctcagttctgagtatcacacatatgataaaaaggtgtgaaggagagtaaccagtatcagtagcatttatgccacatgcatagaatgttgtcaaagttaccaaaaagagttactgcaaggtttaggcgagacaatagcaaaaatgttttcgggggctgcacaaaaaagagggaattgtagtagttttacatcgccataacaagcagaactggtacctgctggtggatggtctgtgcttcccagagcgggatctgtggatgcttggggagggggaccactgagatctttcagagggtacataatgttcaaactattttcatgttattgagatgttttgtctttc

SEQ ID NO: 77795 - DNA, 2856 bp, Homo sapiens
tttttcccaatacttaaaagatgtttctgctgacattggtggtaatattaatgcatatagttttaatgctgtataatgtgtgcttaaaaaaagaatgttttttaatatttggtagacctgtataattcagtgaacccatattttccaaatgaccatttgtgatgtaataaaatcatatgtgcattcaagggtacattcagagtgcaaggtaaaccagattttaatgcaacagagtaccaagggcttattaatagggttttaactttcatattgtaactaatctttgcaaaactgccacttgtggagttctggtgtagtatcaaagaagactactcatattaattgaaaatactaaatactcctcttttccagttataatgttgctcccagcactatgggaggccgaggtgggaggattatttgagcttacaagttcaagaccagcctgggtgacatagccatctccacaaaacaaaaagaaacagttataatgttggtttgatgccaggttttcttcatatgcttcaactagaacaatttattgcaacagattgaatgcagaagcagctatgagaatccagccatctttggtttagccagaattaaagagatttacagaaatgcaaaagcatgccattcttactaaattttttgttttggaaaatagtttttttttttttttttttttttttgagacggagtctcgttctgtcgcccaggcgggagtgctgtggcgcgatctccgctcactgcaagctccgtcttccgggttcacgccattctcctgcctcagcctcccgagtagctgggactacaggcgcccgccactgcgcccggctaattttttgtatttttagtagagacggggtttcaccgtggtctcgatctcctgacctcgtgatccgcctgcctcggcctcccaaagtgctgggattacaggcgtgagccaccgcgcctggccgaaaatagttttttaaagctatgttaacatgtaatgagtttcttgttatttaaatgaataaatactttaaaagttcttcagttataatttccaatgtagtggatattggtaagcataatgcatgtaagaaagagctctttggagtgctcaatacattttaagagttttacaactcgtaaaggggtcctgagaccaaaatgtttgaaaacttgagaaatcctgcttgagaacagctgccccaagatgaagtagacttttcagtggtggtatgagctgtccatgcagcacctctggtgtttttttgtttttcgtttttcttgagatggagtcttgctctgttgcccaggctggagtgtagtggtgctagctcggctcactgcaacccctgcatcccaggttcaagtgattctcctgcctcagcctaccgagtagctgagattataggcccgtgccaccacgtccagctaatttttgtatttttagtagagacagagtttccctgtattggccaggttggtctcgaactcctgacctcaggtgatctgcctgccttggcctcccaaagtgctgggattacaggcccaccacgcctggcctctggtggttttctgaacactgtctggtggttttctgaacactgcacctcagcccaccccaaccgtctgtgatttaaataaaatttttttgttgttgtcagtgaaaaacaatatagtagataacctttaggaaagataacagaactgtgggagattttgattctcagattttaaaatttggagtttttgtagtgaattgctgctcagtaaatgttgattatggttttgagatgtggtgttctgccttaaacatgttttcagtccatattttttggtagagaagttggaaggcaaggtattggagttgagtaaatttatgagcctactcagttcctatccctgattgttttcctcaccttcttaaggcagaagccagttctggcttgataacaactttgaaaatgttttggctcatcagaacattctattcttgggtaactaagtcaactttaggttaacattacaattaaatttcatcttcagttttatctaggcaagtttataaagctagcttctttcaggtaaaatgagaccatttggcttcttagctagttctcattttgggagggtgtgtgtgtctcttttattctgtatgttcagggttctaattacctagcagcttttaaataattggacaatgccagtttatgatttacaaagcagcaacattataggaggtaattggttcccctaaaagttggttaaagttgaggctcaaaagaatacctgaccaaggtcataaaggtactaaattgtagattggggcttaaatcagctctggattctgtgttgcattgtcattccagtacactataccatctcctgtggacactgtagggaaccatgtgtggttagctcagttggagtctttatttatttttgagacaggaactcactgttgcccaggctggaatgcagtggtgtgatcatgggtcactgcaggcttgacctcccaggctcaagggatcctcccacctcagcctcccaagtatctgggactacaggcacgcaccaccatacgtggccaatttttgtattttttactgtgacagggttttgccacgttgcccaggctgctctcaaactcccgggctcaagcaatcccaccttggcctcccaaattgccgagattacaggtggctcatgccaccatgcctggccagttggaatctctgtatagtttcaagtagaattaattttcaagctcaattttttttgtgtgtataacatgtaaatctcaaagtatttacataataaaaatgtatacaaaagtatataaacaaaagtaacatatagtgt

SEQ ID NO: 77796 - DNA, 1740 bp, Homo sapiens
gtctgtaatactatgacttactataatcttgactattttctgatacattttcacactctttcgtactttttcaggtcctgtttcatactttattaaatttacatttctttcattttcaagttgtacttggcaagttgatgtagcagtgtacaatttggcttttttttttttttttaagtttctcctagccatatgagagagagggacacaacacacacgcgcgcgtgcgcttgtgcgcaaaggggcagttggaagtaccctttggaagtgaggaaaaataacttggccattgtagtaattgaacagcaagtaccctttctctgcataagcaaccttgaattttcagtttggccttgggctttatcatacatactttattccccttgagcataaacaaactattaacatcatctttgagcctctgctgctgctttactaaatattggctggatggcccacctgcagtacgtttttaagaatatagtgggatctaaatatttttagtaccacttacacagaacaccttacggtgggccagttaaccatcgttttaatttcttagcaaatagattattttggcgataatcttgcctgtaagctactatcatgccgtataccttgtgaaaaaggagattgtattattttggctaataattaatatttaatgcacattgagatactttagagagatcccttgtatcttttctgttcatgtcctttgaatgagcacattaaggttaagacctttaaacagcaaattctactgtgatgaattgttactttaaataagttaactgtagtttatctgattggtttcaaagaagaatatttagcaagtttggctttcagttttaactctatcatgcaaataataaagtgttttctgttaagtagtagctataaattggggcagttgactctgttaatatcatgggccacaacttgttccaaatgcctaatatcactaggtggggattaatcagtagtgcctgatgagttttgtataaattgagacacaggcgggctgtggtggctcatgcccgtaatcccagcactttgggaggtcaaggtgggaggattgcttgagcccaggcgttcgacaccagcctgggcaacatagtgagatcctgactctattaaaaaaaattaaattgagatgcaaagtacttaaacattaactatttaaggaaaacaccaatggaaatatgatgttctgtccttttgtgtgttagtcgtctgcctagattacgcctctcctttccgatcatttactgtgtacaccttctggcatagtcatgattttatctttgtttctttaatggtttttttcccaaacttctactttgcacttgttgtttaaggatctgaatcccagactaaatttgagattgtcattgaaaacagagactaccttaagcatctttgtatttctgattttatttagcattgtcttttatgcatatttaggaatttggtacatttcaacctcataaatactgtactttctgacaaaaggtagatgagaaaaaagtgcttttaggaaaattgagttgatgtttaataacttggccgccctagcagcttcctggagcaataaataaagcaatatttgctttggatttactatttctagccacagagtattgcactaaaaagctattttaaaaatctttgtttatttcacaaaatagtgttttaattagcataaactgagtttttagctaataaccaaaagctaat

SEQ ID NO: 77797 - DNA, 1227 bp, Homo sapiens
tgtaaatttcagagtatgcatttgtttctttttatttggtaggtctatgttaacgtagtttttccttttctttctttctttccttccctttccttcccctccctccctcattctctccctctctttcttccttcctccctccctccctccctcctgggctcctatctcaaactcctgggctcaagccatcctcctgcctcagcctcctgagtagctaggactacgggcatgtgccaccaagcccagctaatttttatttttcatagagatgggtgtcttgctgtgttgcccaggctggtctcaaattcctgacctcaagtgattttcccctgctgtgcctccctaagcattgggattatatgcatgagccatggtgcctggctcatatatattctttcttgaattagatggaacacatgtggttttatcttgacagaaagtaatactgaggctagatgatgtgcctacatttggaataaagtaaataaaaatttccagcttgcgtctgatttatttccccatcaaaatgttagtgtaatcaatattttttcaaattaggctgaacaagtcttgtgcgcgtttagaaatcagggcctgtattctaatgttctagtgagaaagttaaagtagacaggagctttccaagcattgtttattgtgacaatgaaagcctaaagatttgagtaagaaaaaaatgggaagatttaggaatcttacagtggatactctttgtttttttaatgatccaaactgaactggtaatgaatttaattccttgagaatggaaaagaatgcagagaaacatattactcgcacaaaacaaaaatagaagtttattgcttgaagctacaaaagtataatttcagcttatacttgacttaaaagctctccttgcttgaaccagatctagcctagacaaaataaagtttttacactttttctggctttacttgcgttaaagtcatttataaaagcattcataatcccaggataattgtgaaggactgtagtttattcagaaaaactcatgaagcaatgaataacacaagataatacaattacgttaggatatgtggtaagcgtactttgtattgtgcacttgaaaatttaagagtagatctcaggttgcgtgctcttatggcagaaaaccagaggggtacacagggaaacttttggaggtaatggatgcgtttattaccttgattatgctaatggaactacaagtgt

SEQ ID NO: 77798 - DNA, 2472 bp, Homo sapiens
tttttttttttggtagagacagggtttcagcatgttatccaggctggcctcaactcctgggctcaagccattctcccacttcagcctcctgaagtgctgggattacaggggtgagcccacacctggcctataaacacttaatttcttaaggaatggaatttgggagaaataaccgatccagattttgggtctttccttattgtgtacttggttttgtatgttattcaactgttagtttaaaattattatgttgacttcttaatttaatgaaaaaatatttatgaaaaaagattgagtcagatttatttcctaagcatttaaagcatgctatgcctttttacaaatttggaacttatcttaaaatggataaaatagctgtgtgtgtgtaaaataaaccttttagactagcatcattatcgaagtgtaaatctcttaaaaagatcattaacaagcttaaggtatattcaccctaagggaaagaactatattcagttctttcccttcaaattttgtttaagtttttgctatttgcttcattatctatgaacttcgttcattgtaagccagatgccaggtttcatttggggaatgtcttatattggtaaagtagcatttctgtagcgtgtttatcaatgtttaagaaacagattttggcttcttttcaagaggtgaaatttctcagaagtttactatattctgaattagtgttttctctagcaatgtatttggtctggattctaacttagatgtttaagtagtgacagttaaaatccttggggcaggattttctctttggtcacttgcttttggtcactttttgtcaaaaattttgggggtattgcagggaaccaatcatgtttagaaatgtgtgttactaaattagtttttctggtcttactgatttgtttcaaattgtagaattcttttggcagtaattgtatccaattttgtttatagtccagttacaacacagggatcacaacaaacacaaccgccacagaagcactatggcattacttctcctatcagcttagcagcccccaaggagactgactgcgtacttacacagaaactaattgagacattgaaaccctttggggtttttgaagaggaagaggaactgcagcgcaggtaaatagatattctatatttttttaactcggaaacttttattaatgttgacataaactaattttgaggcattctctacttacttagaagaccagggttatttgcccagatctatatatctgttttggagaagagggatacttaagagagaaaactttttgtttttgagacggagtcttgctcgttacccaggctggagtgcaatggtgtgatcttggctcaccacagcctccgcctcctgggttcaagcgattctcctgcctcagcctctcgagtagctgggattataggtacccgccaccacgcccggctaattttttgtatttttagtagaggtggggtttcaccatgttgggcaggctggtctcgaactcctgagccttggtctcccaaagtgttgggattacaggcgtgagccaccgtacctggctgaaaacttttattttctacatagagttctcttcccttaattttgatgttatttatttttttttctgaagaattaattttgattttttatgcttttggttattatagtactgaattgtctggagaaaaaggaatgccttactcagtgtaacagtgcctgtatatatatatagaaagagagagagagagaaagcgagagagagagcgagcgagcgtgcactaactacaatatactgtgcttctgattgcttaaaaactcataatttaggaagaacgcctatttaaaactttaagaaatttaatcagtaatgatctggaatacttgattgataattgttttatcaacaggattttaattttgggaaaactaaataacctggtaaaagagtggatacgagaaatcagtgaaagcaaggtaaggcaacttttttgtatatgaaataatttcatatatagccaactgaacacagcaagtgtcttatataacctgttcttatttgagtggatttggagtctttaatgtggagtcaattttagactattgataacagattttacattatttttctagttaatttggaagcaggaaaaactgaactgagttaagcgatttttaaaaataagtatagtactctttgtttggaacatttgaaaactgaaactcagtaattgtaaagtacttacactcttcacagaaataatggatgtttctctaaaaaggtgctttaaacatatttgagactcttcttaccttttaagaaattctgccacagttagtttttaaaaaagattttcaggtattattcaaactgaatatttatttatttatttattttttatttattttttttgagacagggtctcgctctgtcattcaggcggagtgtagtgacaccattatagtgcactgta

SEQ ID NO: 77799 - DNA, 1093 bp, Homo sapiens
acctcggcctttcaaagtgctgggattacaggcgtgaggtactgttctgtcctctttttttttttgagacagggtctccctcttgcccagactggagtgcagtggcatgatcttagctaactgtatcctccacctcccgggctcaggcaatcctcccaccccagcctcctgagtagctgggactatataggtgggcaccaccaagcctggctaattttttgtagcgatggcttttcaccatgttgcctaggctagtctcgaactcctgggcttaagatatctgcttgccttggcttcccaaagtgccaggattacaggggtgagccactgccccagcccctttgagtttctaacacttcattatgaatactcatacatacaactcataaatacatggctgggcttcttctggtagagaaaatgtatttgtagagttgtgtgtggagttcatttgacccatttaaaaaaataacataaatagtggtaatttttccagggtagtacaaaatccgtgtttaatctataatataactgaaaggttgaaaagagaaccaagggtaaaggaaaaatttcatagagcagggagacagggtgtcaacttaaaagttgtagtcttttggttttaatgaaatttatagtactgtttacttatgcagtgtatatgtatatttcaaaatacaaattaaacttcagcaaatgtagtattctaaattatggactttacgtaccatgtgtttcttactgattttagtttctgatagaaaataagattttttttttggtttgtttgacatctaatactcttcacttaaaaatgaaaaaaagattttgcaagtgaaaatgtttttccatgacctgaattaagaaatcttaatttctgggttacaatgatgataataagtataaacatactaatatctaaaaatgtagtttataatatactagtcactagtcaccagccaggtatttaaataaaaattaaaattaaacattcagattcttgactacactagcaacatttcaggtgctcaacaaaagtgataacagtgacagaatatttacatccttgcagaaagtaccattggagagtatt

SEQ ID NO: 77800 - DNA, 1042 bp, Homo sapiens
ataaaaaaaatactctaatatgttgtgggatatttggtaaaaatcgttgaatataatctttttctttaaagcaatcagaatatgtttttattatactctaaattggtgattcattttatatacagcatctttgtcatgaataaagtccccgattctaacgtgctcctgtgggattacatgatcttctcaatcacagtcttctttatagtagtttctagaaatagggcaagaatctaacaataaagaataaacctctttaaaagttgaaaatggtttgaatttcaaatatgattgatctgaggggctggtattttttaagaacttttatagactttgaataccctttatataaatttacactgtaatctttcttggatccactccctcaccccagtatagtatcatttgaatagtttcccttgtgctccactggcaaaataaccattttttgtttcaacagaatcttccacaatctgtaattgaaaatgttggaggaaaaatttttacatttggatcttacagattaggagtgcatacaaaaggtaagtattatttcatttttcttagaaagggaccctttagttcttaaaaattatgacatacccgtctcagttacttgtgtatcatatagcttaggcttgcatggaagagagagtgctttgaggagtctaaatttttcagtaagaaagatgtaaaataatgctgacttctatatcgccactgtccaaaagtattattaagattaaatgaaattagcttagtgtggtgactcatatctgtaatcctagaactttgggaggccgaggcaggtggattgcttgagcccagggaggtcaaggctgcagtgagctgtgattgcattgctacacttcagcctgggtgacagaacaagaccccgtctcaagaaaaagtaaataaataaattaaaaactcagagtttcagtagaggtagccacattttatctgttcagtagccacatatggctagtcgttactgcattggaaagtacagatacagagtagtttttctgttggagagctc

SEQ ID NO: 77801 - DNA, 1851 bp, Homo sapiens
tggcctcttatcaagcactgaattaatgacaaatattttaccattgtctacttctttggattcttctgcttgaagtttattttgtaggtcccatttaggggcctggtagagaacctataagcaccaaatacgtagtacatagaggaaaactatttttgttttaccaatgaacatggctatgactaatgacatcaagatgttgggtgtatgtttgaataattccctctccaccatgaaagtacttgctgagccatctttctttgggctcccagtttacttgggccactataaatagaggatgctgcaggatcaaaatataccacatcaattaaaatcatgtttgtcctccattgactggtaattttaagtaaggggtggaacatttttagaagctcaccagtatgttaaacagattctcaacatcaaatactaccatgataggatgcaaaataattttcttgtaatattaattagtggttgatgggcttaattttttttaggtgctgatattgatgcgttgtgtgttgcaccaagacatgttgatcgaagtgactttttcacctcattctatgataagttgaaattacaggaagaagtaaaagatttaagagtgcgtaaatgttcggggtgaaatgggatgagttatgaacattcatttagtcagttgagtgaattttatgatatagccatcatttattgagttcttgcaatttgccaaacctttctaaacacttggcatatgtgtttgtgttttattctttacagcaagcctaaaattataaactcatttacagattaggaaattgaggcaaacaaaataaatatgaaataatctggccacaatcatacatctgatgagtgggtgaagtaaaatatttgaaccttgatttctgatctgtctgatcgaacagcccagtcttaaagctagctatttttgtgtcaggtgttttgctaaagtactaaaactagtagaggcttaaaatgtagtttcagagaccctgaacttgtttactttccttataggctgttgaagaggcattcgtaccagttattaaactctgttttgatgggatagaggtaaggtatagttcaaattgacagttcttgctatgtgctgtcactaattttgattgatataggttaaaaacttggtttaaagtttataattagtgagttggttgtgatattaataacaattaaggcttttaaatggaagtgactgcctattcttgtagaatataccattttaaatctttttaaaaataccaagtgaaatttggagctaaaacagaagtaatgaaaccttaagattgaaatgctattacaaaaaagtttttttggtagcttttccatatgccagttttgtgtgcttttagtctcattaaggcagtagcataatgtgtttttgcaagtaatgctttgctttgacttcatttaaaaattgggagaaaagtgtgagtgctgaaatatcttccgataggggaggatttatggactcaaattcttgagatgatgttcatttctccttgctgctttcggtgtgtgtaattaaagtgatgagaataaagttgacagtgaagcaactttagtaattcattacttttgctgtacagaatggtactggaaagtcacagataataaagtgaagattgtaacattttggaaactgtaagagaaataatttattgaagctgggcacagtgatgtgcacctatcaggaagctgctacaggaggatctcttgagcccaggagcttaaatctagcctggcaatgtagcgagacttaatctctttaaaaaataaaaaagataattcactgttgtactattttgcaaaaaaatggctgcatct

SEQ ID NO: 77802 - DNA, 1056 bp, Homo sapiens
tggaaccatgaaatcataccctcagggataactaccaaagctgtgctgtttctttgcactctcacctttcctttagaaaagaaacaattttgtcagcggaattctatgtcttcaaaattagccttaactgtggttgttttaggctgtactttccccagtgtttttgttttacttaaaactcagttggaaaaacatactgtagtattacagacataaaagttctcagatataatggaatctctttattgagaattatttttggctaaatgtaaggatgtttgccttatatttgagtactattaagttctcatgtataatgagatctccccttattgagaggtatttttggctgaatataaggctatttgcctaaatttgggtactttttagtatgtaatcaatttataattcatatagatgaagagctaaacagttaactttaattcagcatatgtatttactagacttactatatccagtagatgcatttaacaaacttaatacatcaaacttgataattgtgattaaactgacaaccaggtatttgtacatttccatttctgttttaaaaatattgccatgtttgtttgtttttttttttcttttttttttttctgaggcagggtcttactttacccaggctagaggcagtgttgcaatcacagttcactgtagcctcaacctcctgggctcaagggatcctcctacctcagcccccccaagtaggtgggactacaggcgcttgtcaccatgcctggctaatttttaattttttttgtagagatggagtctcactatgttgtccaggctgatctcgaagacagcctcaagcagtcttcctgccttggctcccaaagtgctgggactaccggcgggagccactacccccagcctatattgccatgttttaaaattatctaattaaaatacctatgatacgaaataatatagtttggacttttggagggacattgtcgtgttcatagataatgaaaggatcctggctttaaggaaaattaggtttttgttttgctgttttgagtcagggttttactc

SEQ ID NO: 77803 - DNA, 6458 bp, Homo sapiens
atttttttgtagtttttgtttttgagacggagtgttgctctgtcacccaggctgtagtgcagtggtgcggtctcggctcactgcagttctgcctcctgggttcacaccattctcctgcctcagcctccccagtaactgggactacaggtgcccaccaccatgcccggctaatttttttgtatttttaatagagacggggttcaccgtgttagccaggatggtctcgatctcctgacctcgtgatccgcctgcccaggcctcccaaagtgctgggattacaggtgcgagccactgtgccagacctgtattttttttatagagacagggtttcgccatgttgcccaggctggtcttgctcaagtgttccacctgcctcagcctcccagagtgctgggattttttgtttgtttgttttttcatagaaatgccttaaaagtagtttgacagatatggaatgttgttttgtttgtgtttcagattgatattttgtttgcaagattagcactgcagacaattcctgaagatttggatctacgagatgacagtctgctaaaaaatttagatataagatgtataagaagtcttaacggtatgagaaagcctacttccttttgtgtacttcagtttttgtcagatattagttgtttttacacaagttttgtattgaagctttttatagctatattgttaacacagtagtgagttaaataaaatgaactttgcctaataaactacagaagagtatgtagtagtttatttcactctacagtattttatacactgtatttcttctgtcattaatggtatactcaggacacttaaaaagaccatctgacttttgtactctgttgctagtgatttaggtttcatggcctaacccaaattaattttgatcctgttattctttagtaatgctttcagcattgctgagatcagaaggactactttggtacaattttatattagcatagcttgttactgtgctcttgaagagcagttcttggaaactttagtggattaagtcttccgcagtatatgtgggaagttttaattgtgaatctgaagttcaaattggggcaggttacagtttactttggtttctttggtcagtgcttacaataggagataaatgctttagattttttccccctctttattgaattagctttactggttctaccaaataaaaatttatgtttacttttaacttcaatctcagaaaatttggaagcattaccattaaacttttgatgatttaatgttgtttttttttgttttgttttgttttgtgtgtgtgtgtgtgtgtgtgtttttttttacccctattaattaggttgcagggtaaccgatgaaattttacatctagtaccaaacattgacaacttcaggttaactctgagagctatcaaactatgggccaaacgtgagttcagaatttgttggctagcttattaaaaatgttcaaacttttgttcaacactaacttatctttttgcttttcccttatcaacaggccacaacatctattccaatatattaggtttcctcggtggtgtttcctgggctatgctagtagcaagaacttgccagctttatccaaatgcaatagcatcaactcttgtacataaatttttcttggtattttctaaatggtatgtgtttagattatattaaaataaaattgattgtagacactgaagtttagtcttatttctatgacatttctcagcttggtttcagattcaaattttagttcatgatgtagtcatgtaggcagccttggagatcacattgtgtataaaatggcaaactgaaactattttttttccctagtttggccaggatagtaaggcagattctatttgtacttccttgcataaacttaccctctgaataaactctgaattttagcagctaagatccaatttattgataggttgggaaatcagttactatacttttggataaaacttgtacacactacctctttcactcttttaattctctatctataggccattagtttcttgtgattgttttttttttctttttgctttcagcatttatttggcctaatattaaagatacgaattttcataagaagcttttaaagaataaattaacattaagtgcttcgggacaaaaaaggaatttgagattagtcattaacccagatttttttaagtttcttcgtttcatttccacatatgtcaactatgatttaagaaaaagtagaataaaagattactgccattttatattaattgccttggcccaaaaggtgagggttcttggtttttaatcaaattaagataaatcgtccattcctgttcttatgaactcctgctcctccctctgcaaaagagatgttcttttctagtaattttataaaaattagttatttgagacaatttagagctgtgttcaactggaggaaaaataaaaaaaatttagaaccatgccacacttttcagtacacattctggctgttttgggatttagtagcacttataatcaggtgtgataagattaaagaatgtcagaatttcttttttttttttttttttttttgtttgagacggagtctcactctgtcacccaggctggagtgcagtggcacgatcttggctcactgcaagctctgcctcctggattcatgctattctcctgccttagtctcctgagtagctgggactacaagcgcctgccaccacgcctggctaatttttgtatttttagtagagacgaggtttcactgtgttagccaggatggtctcgatctcctgacctcataatccgcccgcctcggcctcccatagtgctgggattacaggcgtgagccaccgcgtccggctgtcagaatttcttttaatgctacacatatataagcaaataatgtttttaagaagctaaccttgatgttaagagtggcaggtgttctccagtttttacctctttcatatgggaccaaagtagctagtttatggaacacatatgaaaatgtggttatgccaccaagttttactactacacttgtcttaccacttttaagtcatgaattctataattattcatacccctttgcctgtgatcagaagtaacttttaaaattatcacttgactttggatggaactagtataaaggcaggaattttgtctttcagtggagatttattctgttcaaggttgaagtggacacatcattatcttgggatggtacttctttatttaaatagtcctttaaagttctttgagtggcagagaacgtttttggtttcagtctgagaaggctaccaaatggtttaagttcatttcatagttaggagaaaaagattttgagtagtctaatgtcgtcagaaaggattaaaacgttgtatgtaccaagaaggcagaatgaagaaggatcacgttcacaaatgctgtatgtttaacaaaatacgtttagatggtaatatccaatagtcttatcaagtgctacaatctttttaaacagggaatggccaaatccagtgctattgaaacagcctgaagaatgcaatcttaatttgcctgtatgggacccaagggttagtgtattattttttcccctaccaattcacactgtgcaataacaagtaaaaatcatctgcataaactccagggagacttccagccttttacttatgaatggtcatgtccgtattacactttcttttagataacctcaactataattgtcctcaactataattgatgtgagaagcataattatgtaccctgtaaaccacatttaattgtacatagtttttaatacagattttactaacattttaatttattctatatagaactaccttgtaagtcaaagttgtgtgggcatttgtgctttaaaaaaaataaaaggatactaaaaatccctgtattttttattttatctaagtattatgctaaagttgggttgttataggaaagctgttacttaatgtttacatgtggcatataacttctaagcattttcactttaattaccatgatgtaattgtaaaaaaaattggtttagatattttagagattataaaaacatggttgggctaaagaagaccttccattctgtttcttgggaagttacaacatttaccgcttactcattttaaatgttaacaacatgcactttataaactgataaaagaaatttaggtttgaataagatttcctaagtttatgaaatcctttttttctaaattattacaatatcaaaaattttaaattctgttgaattacatcaagctatgcattttcaggttttccgaacctcaaggcatttacttttagaggatgtgaatttacaacttactttgtggaaatgtgccacttactgatatacagatttaaaattaacagtatatcatttcattatctcctaacatatcaacatggataatgtagtttcaccgcgtgttaataagcttgaactccttaatagtttcagggtatattaagaacttaagtttctatcttgttgaaaattagcttacaaaacattgtagcatgacatgtctctaaaggtaattgtatgtgcatccccatttctgttgttgaataaagaaaaactaaacatcaatagattcccaagcagaacttttttgttgttgttcagcaggcacactttctagtaaggttgccaaaatccaaattgaagcagatcattagtttagatgaaatctttgattctataaaaaattcctataaaaacaatgtctctctacatggtttttctttctcaactccagctatgaatgaaataaaaaatagaatcattggttcagtttaacaaggggtaaaaagcccaagtatctgttgcatatgtacttgaagaaactgattggctgttgttgtatgtaggtaaaccccagtgataggtaccatcttatgcctataattacaccagcatacccacaacagaactccacgtacaatgtgtccgtttcaacacggatggtcatggttgaggagtttaaacaaggtaagtgtttatccttatgctctgatttatacaggaaggatttacgtaccattgtagacccagtagtcagctgtgcaacttaaattgaagaaggattcactgaagtggattttggtgttcatttatttattacagtatatatttgagaactgacttcaaaaaattaattccttttaggcaatttgttttttataacaagttggaagattaaccaacagttaaaaccagtaagctggtttagttgcatactattgccttgtaaaattataaatgataacagtttgtctacactggttgaaatgagagatgtttagcaggctgtatactcctgggaaagaactttgagcaggaatggggccaaaccacccaattacattccattattttggaggaaccttttaacttttgaaccctagttgtactgttaatttgaaggtatagctactaccaaatagtctttgagagaaataactggaacagattggtttgactgaaaacagtaaaggaaatagaatcagttgtctgactactagctttaaatttagacgtttaaaattcctgaatattttacactttagtttcatctttagtctaaagaggcccatcaagggaagatgcctctatccctttagaaacaacagggaaacttggttttagaaaggcaagaaacaaagtatattggaaagttttccttctcgggtaactggagtgtttaagaaagaaggtcattctatgagcatggcattttagaataattgtactttaccagaaacctggttctcaaaaaatcttccagctttttaaaaaaaaaatgtgtatatatataagagtatgctctaaaatcataagctaaaactatatatgttaaaattctggttttaggattatagtgagtgcatgtagtatgattaagattatttaaaattctagattgtagactgaagtatgcaaacattttaatatgtttttaatttaggtcttgctatcacagatgaaattttgctgagtaaggcagagtggtccaaactttttgaagctccaaacttctttcaaaagtacaagtatgtattttaaggcatgtcggacatgttgctctcttaagtaatggtttaatggtagcacattatgacatttcttcttgctggactaatgttattggaagaattttctttcctgtcacaaggacatactgttttagtgaactccttagttttttttggttgaggtaatgaatgtgaagcccctttgatttttctgcccgatctaactgaactcctgctacatttgtagcaacataagttctgtaggcatacatcagtcatgacaaaaacagtacatctgtatacagtggcaagtggatgcaccctgaaaaatctgtagttaataattctctgctaagaaacagtatttttatctaattctggaaactcattaattgctaggaatctttaaaaca

SEQ ID NO: 77804 - DNA, 1124 bp, Homo sapiens
taaatgttttcaatagttacagcacattattggcctgccattttcccccaatgttatagccccttcaaatatttctacagctagctttcatgaatctaagtgggtgttaatcattttaattaatggtttaaatataatggtttaataccttagtacaggttaaaagcttcattaattgtgttagttttgatgaaaaatgtaagttataatcttatttaaaaaacagacaaaccacagacttgcacttttatttgccctgggctgaaaatgtgccaaagtcccacttaaaattttttttttaatgcttgaagcttttctgaccatttgatcttgtgttggattgtgttttgtaataatctaagcaagattgctttatgctcttccccaattaaaaacaagaatgatgaccttcatgatgtctctgtgttttgtttctgtatcttttgcatgagaaagcaataacggagccagtaattgtgttctcgaagcactacgttgtcagtaaaaattaaaatagcataatcattaaatactcttattttactacgaatccccccataaattgtgatttctgtttgacagataatttttctttgtttttattttaaccagtgtagaggaagtaccttggaacatttaaactaataaacatgtatgtagatacttttaaaactatgatataaaagagacacagttacatgtaaggagaagaataaaggaattggttttacaggaaagtgctagtaccccttaattcctggaatcaatgatgaaactagattcaaactttgttctattcactttcgtataggactgtgacggggcttctttcactttaagaaagattaatgtttacactgaacaaaccttaataatgtcattttatttgaacaaattcacatcattagaactttggtgctttttctaaagcttgcttaatgtttcttttaaaagttttaaactatgcttcagtccttgctggatagtacctgtaagttctttgactggttaaaagatatattactaatcttcactgaagtttttgtgaaataatcaaatttttttaggttgtaaaaaaagcagcaacaaatagaggaaattacatcaggaaaatttgcatttca

SEQ ID NO: 77805 - DNA, 2848 bp, Homo sapiens
tacttaatatttctacctatatgtgaatgtgtgcatttgtgtgtaagatatatacagagtaggtactctttcccttttggatttcagtaagaagttatgttgaactctaggattcaaaactttgaattgccagcaaaaccgtgtccaaatggattgtatgttttccctttataaataaagaacattgtatatcatttaaggttttgttgaagactaaggtggttattaagaatttccattttaataatgtgttgtaagagtgatttagagactgcgggagttttgtccctgcccttagatggacccagacagctttgtgtttttgtgtacatgcctgatttctatacttcattgtctcctgttacaagtcactgtactttcgtgagagagctctttctgcatgttctttacctttttttttttttttaaccagttagccatttttaatgttttagggacctagaaatcaggttactgagcttgttaggattttgtttgatttaagagcatttggaactccgagtatgggtttttctacacataaaatacatgattttttaatgcttttatatgacttttgttgatttatttgggccatctgtgcttgctcatgtatttgacatattccaaataatgctgagcaaattaaactggtaaaggaagtattggtttgtaggagtttggactgcatattcacatatccctatataccttgttttttatatatctatctctgttaccttgagtttatagacttcaagttaactccattgaactttacaatacctctgccagtaaaatgtgtactattatcccattttacagatgatgtacacaagacttagaattgcctaggattacatagctgtgaagaattaaaaccatttttcttttttttgttttgagacggagtctcgctctgttgcccaggctggaatgcagtggtgcgatgatctcggctcactgcaagctccgcctcctgggttcatgccattctcctgcctcagcctcctgaatagctgggactataggtgctcaccaccatgcccggctaattttttgtatttttagtagagacggagtttcactgtgttagccaggatggtctcatctcctgaccttgtgatccgcccgcctcggcctcacagagtgctgggattacaggcgtgagccaccacacccggctgaaaccatgtttcaaatacatttttttaaaataagtttggtagtttttctctgggtctaggtcagatttttgctcttggttagaaactatacttataaaatgtgttagaaagtattaggaaggttttagacttttcaaagagtaaaataattttaaaattgtggttatactgctacttttgaaactagtgtcagtactagatgatgtcagtttgctttttggggtagagattctggtgtgaaatttggcccccagcacttctaaaatgggtactgtagaagagtatattggattgaacttttttagtcgtaggaaactgaatcattgtagttacattttagttgtaaatagtttgttttaaaaagacttcattatttatttgatcatgatgctattttctgaagtgaaaacttggcttttgtctaatatgaatgggattgagttttggataaaaatcagatttctttgttgctgtcatgttagtgattttttttttcttttttgattatagaaatgtatactcttaaaattgggaaaaaaatcacagggcctaactgcagtattcagtttaattttcactactatttcatttgaatttaaaagcatgatgtgtttgatactgtttttgaagttactgttgtagtatgtgtatttagtgataagtttttgtgtctaaagcaatggtgttttgattctattgaaacatttttgttataagtagattatattttagtgaacagctctttaattttataggcagagcactcaatcggtgtcattgagcaaaattattaatgcttatttatgcttcttgaattaagctgctttttggtaattattcataaagtcactgcctttttcagaagaattaaactcactagtagttagaaacatggaatttagcatatatgattttatgtgcatattgagattgtagtcccccttgctaaattgatgtggatctataactgtaaggaagcttattactttatggtttaatatccagcacaaagcgtgtaaataaaataaatagcatgttgtctttatcttcaaaggcattatattgtacttctagcaagtgcaccaacagaaaaacaacgcctggaatggtgagtataagaatagactttacagaaaaagcaaacttcaaaatgaatcacatagccactgaacacagtaggagatgggaggaagtccttaaaacttctagtttggtttgatttgttcacaaatggagctttactgtgtgtagtggaagtacagaaatcaggagatccatatgcaacttatttttttgtttgctttatggagatccgtgcataatttcttaattgtatatttaaagtgcacttatagcttgtttttcttaaaatttttgtgtggataacttttgtaaccttgctggtgtgaatggagtgtttcttggctcttttttccccgttgtttggcaattttgggtagaacataaggcttctggttttatctgtgggagttcagctagttgaaatgccctggtatgtgcattttatttatttatttttaagttaaccaaaactttttgttaatactaagtgacatttgttcagggtgggcttggtggaatcaaaaatccgaatcctggttggaagcttggagaagaatgaatttattacactggctcat

SEQ ID NO: 77806 - DNA, 1202 bp, Homo sapiens
ttacattttgtggtaattctaatcttaattataacaagaccgtttgatgttccattcagtagataaactgttaaatgttcaaaagtagctaaatcactaattactcctgttatgcttctgttcatgtggccttttaaattgaatttttgaagtttaagaaatatctattaagttctagttaaatttctgtatttagaaaaatcctttttttcccagatttttctaaaaagattattctttttccttcattagtttaaagataatttttctttgatttcagtggctttggttctttagaatcatcattaaggacattgactatcaatgcacagttagtaagagtatatttctcctggatctctgtttatgttgtagtaggaatatagaggacaggtgtgggtgaggactttgcgttttcatggagcttgggcttagaacttttagtttgctcatacatttgtattgtaagtttttccatgtctctgattgtcagccacactgatagctacattttcatgaaatccagataaactatggtaatgctcttctttgcagggaagaatttcgcacgatgtgggtgattgggttagtgtttaaaaaaacagaaaactctgaaaacctcagtgttgatctcacctatgatattcagtctttcacagatacaggtatgtctttacttggataatcaaaacacttcagttcttgcatatttcaaattgtcttgatgcataccatagtgatatttacaataattgttgaaattacttgcgaatattgaactatcatcagaataatggttttgtattagtctaatacagattgagtattccttatccacaatgcttgggaccagaagtgtttaggattttttcagattttggaatatttacattacacttaccagttgagcatccctagtctgaaaatatgaaatttgaaatacttcagtgagcatttcctttaagtatcatgttggcactcacaaatttttgcattttgtagcagtttcagtgtcagatttttggattagggatactcaacctgtgtatacacgatttttctctattgtggtgaccttaaagttaagtagaaccattccaaacttgacttgcgcataatttcttgagaaatgggaaacaacttgaatatatggttgtctagactgaatctgtgtctaactgccttcatcatcttgaacctga

SEQ ID NO: 77807 - DNA, 1969 bp, Homo sapiens
atcatatcttgcctccttaaaacctttgagtatttgtctcactcaaaataaaagtccaagtctttactgtggtttgcaagcctctgcctgatctgcctttttcattatgtctgtgaccttacctcctgttataagttcacagtcctttatctgtaagttttggagccagaagggtaataaagttagtaagtaatatacccagtgaggcctggagcagcatttggtactgaaagacagtatcatttctgcagggaaccattggtactcacatggagcaaaaggtaaagaccatatagccatagccacaaatagttcagaacagggtttgttactagatgaattttgtttcctatcttagaaaaacttgtgtgttgagagtttttgggattttggagttgcacataagggattatggatttctacttttcatcttcttcattggcatttttcttgtttctcaaatgttccaggcattttctgctgcttagggcattttgttcttgatgtttgctttctctggaatgctatttcaccaggtactctcagcttacatcctcatgttcatttaaatcttcagtcagatgtcaactcagtttccaggctgagcttcctatcctactccctacgtggtttttctcagtaatacttatcatcatctgacacggactatagtttatgttttatttttttgtgtttattctattctccctactgtaatgtagaccctttgaggctacgttggtctttgttcactgcttatctccagtgtctaggacaatatgaatcaagtataggtgtttcataaatatgttttgtatgaccgacttttttactttttggggccctctggatctaaataatttgaatttatttaattgtagcattttctttttgtacctgtgacctctgttatttaaattattactatattagaaagtatgtcattagttagttttatcttgcagattcttgtaaagatacctttaggtatagtttaataagtttgacttattttacagcatgtgttacatacttgggtaaagttttaaagaatagtactggtagcataaaagggtatgggtgtaagaaacccttttcccctcatttctgccatttcttaaagagttactctttagagttactactttaagagctatttaaagggttactacactggaagaattaatacattttgtgcttttattcagctcatcttgtggtaaaaggagtttgctcaggcaatgaattatgtcagattaggaataggtcttgaccgatctacagatatgcagtattgatggaaaaaggatccctacttagaatagtttctctggagtgagtataactgcctttattaaaatgtttctatttcttgtaacaatttcctaattgtatagtttataggcaagcaataaacagcaagatgtttgaggtggatatgaaaattgctgcaatgcatgtaaaaagaaagcaactccatcaactactacctaatcatgtgcttcagaaaaagaaaaaggtaaatttagaaagtacttacaaaagcattactaacataatgttttatgcatctggactatcattatttcagaatttaggctcagttaataagtcattttaaatagatgacagctttttaaaaatctgtttcatggagcagtttcattatgtgaaatctgactctaatcagttttcttgcacacagttgctttagattttagaaggattagtggtgatgcttcatatccttactttgtatatacccgtattctcttttaggactttttattcttattcacttaaaaatcccacaccagtatttaattttctttcctttaaaaagtaaactaaattaaattagtaaggaaatatgtgggtcaagtaaattatgtgagacttttaaaaaatgaaagtcgctttttttggtgaatgtaaaaaatataacgtatattaaaaactaaaagttgct

SEQ ID NO: 77808 - DNA, 1060 bp, Homo sapiens
ggcaataagttacactttttgaaattaaaaaaattttatatttattgtaggataattagaaatctatatgtaaacaaaatcacttctagtcccactttccagagtcattgtagtcccatgtttattgttgagacatttctttcttgtgtgtgtatatttttagagttctctgatttgagattcttgtgtttttatattatagtgtttttaatttgtgttgtatcttacagtcagtatgtacatttaatacggcatttctttctccctttttctcccacataagaactatatttaatgttgatgccttcttagaagaaagtacttgactcccaaatcgttgccttttagagtcagcatggcacatctaactttcgtagatttagtgatctgtgcttttcagtaaaaatcatatatgttaagtaaaaggtttccatgtttcaacatttggatgaaataaagatatatttgataaaatgttttattgtttgcagcattcaacagaaggtgtcaaattgacagctctcaatgacagcagcctcgacttgtctatggacagtgataacagcatgtctgtgccttcacctactagtgctacgaagaccagtccattgaacagttctggcagctctcaggggtaaggaaaaagagggaaatagaagtggaggggctgtttgctaaatcaatcagatacattctctttttgctattaaagtcatctatttagaatgttattttcattccatctactaatttttttttaaatagcaatttaattcccaggtttggggatagtactttttggttttgtcttgtcatacttaacattttatttttgagactgataatgtcttcagtcagatgtgaatgaatgttagcacataacccctccaaattcatgtatttagatagctactgctacagtgcactgtatggtgtgctgatgagaacagacaaaaggaacaaaaccacctttctgtcccagagctgcttatacctttgtaacagggaatgtgtctatgatagttagggaaacctgttttagaagagctagatatctgtc

SEQ ID NO: 77809 - DNA, 1030 bp, Homo sapiens
aatttttttttttttagcagaaacagtcctgctccagctgtaacagcagcatctgtgaccaacatacaggctactgaagtttctgtgccacaagtaaattccagtgaaagctcagggggtaaggagattgggtttgtcaggtttgagaattcttacattatatttggtttagccttcattttgaaaagtgggtttgttaagtagttgaaattcagttttttaaatgccagtttattttttgcatgtaaagttattcatgaaatcaaattcagagaaacaaaaacttacaacttgatactgatttggttattttaatttgtatatactcatatatttgctgcttaggtacatcgagtgaaagcattcctcaaactgccacacaaccagccatttctccaccaccaaagcctacggtctccagagttgtttcttcaacacgtctggtaaacccaccacctagatcttcaggaaatgcagcaacttcaggaaatgcagcaacaaaaatacctactcctatagtaggagtcaagaggacatcctcacctcataaagaagagagtcccaagaaaaccaaaacagaagaggtatatatatgaaaaacatattagttagccatggcaacaccaactgcctatttttaaatccagtggaagaaaagtttatgaaccaaaatagagaaggatcaaggaacaaagcttttagaaaattttaggtgtgtctgtagtgctttagtgctgtagtttctcttcacctttcccattcttctcagtaactacctctgctataaagctatgccctctcatttaaacttctttagtgtgtgtagttagcaggtattgtctacaacagaatttaacatgaaattacatgtattcttaacttattattctctaatgactaccttttatttgtactgattttttgatggtcctttggacagttttttgcttctgtgatccaaaaggagttttggagtttctctactgtacttggtgttataggaccatcaaataccagaggttctcaggga

SEQ ID NO: 77810 - DNA, 3613 bp, Homo sapiens
acatacccacatcacttccttccccattgttttgaagcaaaccccaggcataacaaccaaaaacatttctttgtatatctaaaaataaggacttctataaaatataagtaccgtatatttgtcacacaaatattaataatccatagttttacatatcagtcagtattcagatttggccaattgtgacacattactatttttaaagtttgcatatttgcagggtacaaataaagtccttattggaattgatcgatactgtattaaatctcttctaagctataagcctgtggtttttctatgcctgttttaaaagtcacatttaaaattaaattttaattctgctgagaaaatagtgtcaaaatagttattaagacccaagcaaggcatttctcaagtcttgtattctgtaggatgttagtaggtcgtaccaagagcaaggattctctggttaagcttgggaaaattaaagtggagttctttcttgatagaatttattagaaccttttatgtgccactctgtgtgaatctcccagaatgggggtgatactatgccaagttcctaaagttgtatgatcaggaactcttttttttttttcttttccttacaaaatatatttctatgaactcttagtggttttggaaatgtactttaggtggtgatctgcagtaacagttttcctaatgctctttttaattttattagctactgaagccaaatttaatctgataaaaacattttaaaagagggaccagttatctattttaaggctgtagttgatcttacaggtttaattattttatagttttaaagtttataaagtaaagcattgattggcaaataatctaaatttttcattttagagaataaagcttttttttttaaaaacaggatgaaacaagtgaagatgctaactgtcttgctttgagtggacatgataaaacagaagcaaaggtatactaatttagcctttagaatacatacacaattaagagtacagaagatgtaatagaaatgtctctaaaatattgtatttttgtgctataggttttagatttttttagtattgtttattactgttaattatgtaatgctgaacactgaagggaatattgtgatgagtgaaacacattctgtgcctttaaaggagcttataattaagtagacaagataagtcatgaatgtaattaattacattatcaaagaaaaagtaattgagggctgggggccacggggcaagaaaagtaagatgttatttctgactgcagaaatagcagtacatgtcttcattgaagaaagaagtagcatttgaagtggtcctcaaaggatacataggatttttgatagtccgggctgagatcatgatctgtctctttgggttgagaatttgttatgattatagaagcagtttttggcgtaaggttttggctagaacctggggtacatggggcttgaatgaggtgtagatggggtggaagaaatttttttttccccaaaatgtaaaagactcattttttttccctagaaattgaaatctattgaaggcttttaactttctttccttgtggaaaaattggaaattctcccccttctcccaaattatccagatttctatgatggatattttaacaaaactctcttaggttttgtgtgtgccctcataatgcccttgctttataattttgattcactttgtaaaccaagaaaaaagtatgtgtatcattatgtaatctacaaaattattaatggcttcatagaatgctgtcttaaggctatgattatttttatccaaccaatttcctatccatagcaattatttccatttaaaaaagaaagttgtgctttcctgctgtaatattggttacagctaaataccatatctgccattcattcatgtttatttacttagcataaattaatggaagaagaattattgaggaaaatagtatgctttatcttaaagtttggtatacatcaccaagttgtcctccaggaaggctgcatgtcttccattcctacttcttacatcttatttaccttttttaatttcataggagaaaacaatatttcgttttttttttttttggtatagtttcattgaaattgaagtttttatatttttcttttcttctttgtcctttttttggttttttttgagatggagtcttgctctgtcgcccaggctggagtgcagtgggacaatctcggctcactgcaacctctgcctcctaggttcaagcaattcttctgcctcagcctcccgagtagtggggattacaggcacccgccaccatgcctggctaattttgtatttttagtagagatggggtttcaccatgttggccaggctggtcttgaactcctgatgtcatgatctccccacctcggcctcccaaagtgctaggattacaggtgtgagccaccacgtctggcctatatttttattttcatttatttgtgtagatattattttcttttgtgtactgcttttaaaaagtttagagtgatggcatgacatactttaccctgtgttttctgatgagtagaatcagtgcactgattactagagaggggtgaagagaccataaggagggagaaatcttttttagacatattttctacttttaattaaaggtgtgaggttattttatttagtagtattgaataagtttttttttttttttttcctcccacaaagctaagaactgtccttgggtttatgctctgttattgtctgggcaacatttcatgatgtgcctatgtgtgtttttaattattgtttgcttaaaatgtcccaagttggagctggttggaaagtcatgagctagtttgacccatgccttataagatttaagtaggcaaatagaaatttattaatatctgaaatggtgaaataacctacaacatctactgactagatgtttttgtaatgtagtcacatctttctcttgatccctcctgtcttccagtttgtcttctttattagccaccaaacccagttatgttcttttattcttttttaagtctcttttcccccttccccatcctctttgtctcacaggaacaacttgatacagagacaagtacaactcaatcagaaactattcagacagcggcttctctgttggcctctcaggtactaagtgcaaaaagcaaggagaattttgtaaatgtccttaagattagtgtggtatattgaattaaagtgagagttcatagaagactattaaaattaatctttctgaaagtaattacttgctagcctataaacgtatttattgtagttttaaggcagggccctggatttgacggaaccgttctctgggactgtttcgatgttaacccatccccttatattaatatattatttgatactgcaaatcatttaaattctcactagtcatttacacagggttcatatgtaggttttatttgtaggtcaaaagtgaaattaaaactaggaatgaactaaaaaacattcttcgtggatttcttttgcaaaggctaatatatttttattttaaaaatgtatttctgccttatttttccactactgatttcagttagttatttaatatagcccatagctcttcagaattatgttttcatttgtcc

SEQ ID NO: 77811 - DNA, 4939 bp, Homo sapiens
ataaaactttagggggagtaactaacatcaggaagtatgcttaatattgatacgtggacaaacttgtttatcagtcttaaactgtcctgtgattgtgattgcatgttttttggtttgccacatactctcgggacttattttcatagttttgtcttactgaatttatccctatagtaattagtacccatgggtatttgccttttagatatttttatgagtgagtagaattttctttctaatgaaaggattcatagagccatagagagaaaaatcacccagttatgtaagaagaatgattatgttgatttaaaaaaaaattcattcctatctttggtaatgttaggggcgtacttatttctggggaggtgataatattgtggctatacctaataaagagttcttattgttttgagataaatctggaaatatttatagatgaaatgataagatctctaggatttgcttcagaataacacaaggtgaattgaaagtgggaggacagtggctttgatttgataattgatgaagctgggtaatgaatacatggggatgcattatacagtgctctctactttgtgtatgtttggaattttccataataaaacttttaaagatccatctctgtatttttttagtgttaaagaacgcttgtgatttaatctaattaatatgaaaataatctacctaaaatttaggatgattaaattattgcttagctgtatatatttgtttaatttacagtgtcagaaaataataaatttactgctgcttctgtatataaaatgagctttgagtattctcccacttgggggtgctccaatactagttaatattacagctattagtgttgtaataagtgaatacagtttagcagtaacttaagcattatatgataggtgattcttagaggaacaattttaaaaactatttgaaattacttaggagtttttaaaatattattaaaatatacctatttgaaaattcctttgttgaacacattatttgttgaacaaataatgtgataggcatatttacattccattttgacaacattatagagtttttaaatttgtaatacttttcttcttagaaggtttcttaggaagtaaagcaatggaaaatacatctcattgttaaattatggtgctttgaacaatgttgtgttctttgctttcattctcagaaaacatccagtacagacctttctgatatccctgctctccctgcaaatcctattcctgttatcaagaattcaataaaactgagattgaatcggtaaaaacaacctcaggggtccataaacaatatctgccaactcaacctgttgtcttcaaatgctaaaaaaggagaatggagggtacaagactagacatgactgaaatggatttgggttttttggtgacctcccttactgggctaatcagcacttgatcggaagtccaggttagtatgtgaagccaggagtactattattattgtgttagcaacagttgcattaactatttcaaaaattactgcctttaaaaaaaacaacctcaagctatatttgtattcataattgacatctggattgggtttatgtttgatgcattgtttggaaaatttgcaatacaaactggcataagaattacttattctgatgatgcacttttatgtatttttcattagaaagtagaactaattttagattttcagcttgatggattttcagtttttcctgaagaattttctttaccattagtcttcaaattggatactgttgtgcagtggtgtactgttatacttcagagaaagggtaagagtacatctagttcagttcctatgaggtagctgtaacccttaaaaatgaaacgtcaactctagggtacatttgacattgaaagaatagttaggaaataacttggttttgatagggtcatgattaagaaatgatatattggttttatttatggaattgttttatagtgcatacaaatcagcgatcagccagcaaatatttttctttgagcttgtgaaagctctgtgttcttttgccttcaatctgttgtcttcaaaacaaacaaacaaaaaaagcttcttgcgcctttccctcccctgttttcttcctttttctttttgcttgtatgcacaaggtaggacttacttcgtaagaaacaaaatgccagtattttcttaagccatgatgtgaaaccaatgaccctgtgaccacatggcacagaacactaaattttggtcccatggctgaaacttgagggtgactaaaagtaatgcctgtgaaacatgatatctatctgggatggccatttgatctctaaaaggaattttgtacactccacagaactcctatctatagtaaaattgattttcagttttaaatgtgggcaaaaaggcattttctccaagattttaaaactaattcttatttttaaatggtttaccaaaatttgtcagtacattttacgtgtagaagcattttaaaaatcatttctagcaagcacttgacatctagtcagctctctactcctttattttgttttatcaaaagattaagagctcctttctttgaataaaataatttctcataattaagcagtagaagatctatcttcacaaagtatgagggatgccagatgttgataaacttactctttctgaatctggacaaagtcgacttaacagatttttctgatgagcatgttttatgaatcctccattgtgctccattctatcacatgtgcatttttcatgttaaactgcaattacttaatctcttcccctatccttctaaattaattttctgaagttggagtgtagtcttttcccccttaggctatgcattaatcgaagctttcttttcaccatgactttataatgtctagtaaacaatatttctacttcccacatctttgctttacacagtcaccttgcccttccttccaccaccgaagaaaaaagatggtcatactaacaggtgaaatgtacaaggtgtctgtgtgttttgtgtagcttcagagttagattgaaattaccaggcacagatttagtcttgtcattttgtttacacattggggaaaacaattcagtttattaaacgtttcatgtaactgcacccaagttttgccaagctggaaacttggaccttttctgtgtagtgactttttaattatagttttcataacctggagatcagactgttgctttcgcatgatgtatgtagtgtctcatgactggagtttgctttgttttatagtatctgtactccttgtatttttcaagagctattttgtaaacagatgatgtatttctccattgaaaacacaataaaaaaaaaacagcacaatctcacagttgcctgatttcttttgactactacttttttccagtaatcataagtttatagtatgattctaagtgaggatttgcaaaagaatttggttacattagaaaagatttgtttctggttaacttcagccattggcagcagccttgtatttatagctcagataataattaggtgtttgtttttcatataattgatctttagggaggaaaacattaatatagttactattaattcaattttagctcttccgtcctctaaagtgttctgtgtctgtagacaccatacgttatctgtatatttattctatgcctgtggacagtgtactgtccttttcaaagcatttagcactttaatgtcagcaggtggcactgttgtttttcagtgaatttagaattacagaccacaaccaacaggattctatgtttcttattttactaaatgcaaatcagatattgcttttcttaaccccccagatgctcagcattgatacttaactcatggtgcaggagcgagctgctctgtgtattttgtgatggtcagctcttgggtatggttatcttgtgttttgggtggagggatggactctttgtgtcaaagccattattctgagggacatgcagttgttcatatatcatttctaaaattctaatgtaaccttccctatatatgaaaatgggaatgtggctgcattgtgggataactttttagtaaaagcaaaatttaacttctgagactgttcagtaaaagggaaaatattgtaggaattacccttatctcccttgttaacactaaaagaattgaactggctgtacttcctctactttgatagtcatctagatgcagtttgtatatcacagtttctgagttttatcatccacgtggcctcttggcattttcatgcatcttgctgaattagtaaaattataatggaaagttgtgttttgtggctgtgggtatattctagaataaagtttttatttttctaattaacaggtttttttcccaccacacagaaaaatgttttagagctctgcatagtattaattctggctgcattcaaggtggcaataaatgatcagcagctccaagtcgtaatggatatatgaacagataaatcattaatgtatacaaacttgtagattgagtcccagaaatactgttagtgcacttaaattataaaactgtttacctgaagcagcactgagcaatcctttggatatacttttacctgtttttattctaataaaaatgactagtacaaggaaaattagttggtttttagcctgaattgtatgttttgatttgatttttatttctccacattattttgcttgttagcttttcttcaaaccagtatcacaaatggatgctgtcttcactcagacctgactttggtaaatgaaatattatgttctgtaataaatatgaccttcagtcatatagaaaccagtggtctgtttaatatctatttctcatagaatcaattcattcttcttttttcttatcaatttaaaaattcttgttaaattttacatagcttttattagcaccaaataaggaagatggcctcaatgtttttgagccatgtgtttcaga

SEQ ID NO: 77812 - DNA, 1038 bp, Homo sapiens
tgtttgattaatgtctgaagggagcctggtccagtggttggaagaaaaagccctggccttcaggaaggacaaatctgatccttctccagggcctgatgaccctgggtaagctacttaacgccttcccccagtttctgaggaaaatgttaagtttttctttagatctttcttattgaagctttatgtggattagcaagcagatagggcatgtttaagcaatcagactttttttttttcagtactaggttaaacctagtttgaattagtcagagggcagtcacaaaggcagactgcaaaggaacatctggcaaaccacccctgctaattctcaaagctgtcttcctgctatgaaatttgggcaggaccagagtagggagaaaaaagtggagtcaggcaaagccctgtttaaaaaaaaaattagtgtgagtttggggcagactgaccttttcattaaaaaacgttctctcccttagtgccaagacaaatgcagtgcgtagcttctgaggagacagtgagcatgcctgcctgcttctggcaagggttcaagtgcagtgagtgggtctgggaaaaattcctgacagtagctgccttttattgagtatatctactaggtgttaagtggtagggccagttgttacagcaacctataagatttgacatattcattggtgtcaccatttacagatgaggaaacaggtttattttggcagagtatcttgcccagggtcacacagtaaattggatttgagcctggttctgtttgactctaaaacttaatcctgaaatatgaccctgtgttttcccactcaacaacgttgccttagtatctctttggatattatcgttgagaaggcaagggtaattagctctattttgcatatgcctctagttttagaacagctaaaatacattgctgctctttggatgcccttaaaaagctggcctgctggaggtgaggagggggagagatttgcaaagagcgacagtgaacagctgggctctgatgagactggtgtactctatttactagtactggaa

SEQ ID NO: 77813 - DNA, 1130 bp, Homo sapiens
ggaaatacaatttgctattgggaggatgttggttttagggaactgttgaagaacttcattaattattgtgtgtgtgtttttcttttcttcttctttttttttaaactggaattgcccatctgttgagactgaaattcaagagtaaaaaaaagtagggcagcatttattttcaagagttgacaataaaggcacctttctttatgacatgctgagcatgatactttgggggagaatttaatctagaattttgaagcattttcagaaggaagcaagggttctttatatagtcattttatgtaggttacgtttatgttcttcaaaatggcatgtagtgattggaattaaatttctgggtagataagattatgttcatctgttacctatagaagggaatgtaacttaagtagtcacttaataatagctttctctgttgatgctaccacagatggtattctctacatctcaacattgctgatcagattctgtgttaatacagtaacacaacttgaatttaataacaataaacttgtgttaggcgttactgtcaatttagttctggtatccagtacaaataccagttttatagtgcaatgtcttcttgttatgttcagtgctgcaaaaattatgagaggatatttgttaaacaaatgagataatggagtaatgtgttaagcatagagcctggcatatagtaagttagtaagtgcccaggaaatggttatatggaaagcttatgctaagttttattccagtatgcaagtgtgtattttaaaaataacagtaatgcattcaaaatgttgacagaccctaaaattaaatttcttaaaggaaataggccagcttttttttttaactttgagaactaatgtgaaataataataaatatataagtgaaatgtcccagatgtctagaaatgaaaaaacaagattttaattttgacagctatatttttttttcttaaaagcatccctaataagatataatgtactatgattaggattatgatttgaaaaataaaactttaaaaatatttttgatttgaaaaataaaacttatttggaaatgaagcgaagctttaagatttaccttatatcaaatgaaggatgtctcctgaatttatgcaaatgtg

SEQ ID NO: 77814 - DNA, 1031 bp, Homo sapiens
tgcagagggctctgtcctttgaattttttccctttggtgcttgaatgatatttaagcacccagcattctgaagttgctgttttgaagtaatttcatgcactttcccaattactcctgctccatctctcccaatgttgtcttaaatctttgcactcaaattcaagcacatcctactcctcctgttctgagtgacatatgggcaacactttaaaaaagaaaagctctctagaaaatctagagaggtacgagcgatggcccttctcccatattaggagttagatttttagtattcatcaataaatactgatgagaagaaactgctctacttttaccaacattcttcaggaaatttattaagatttttattagccacagtatctttgtcagcttggaaacatatatgtttgtgaatcacatttatttagtctttaggtaagtatatggattttgatgattctttgcagttactcctatctctctatgggtttcttgcccataggatgggaaccagtactctaggatttgaaaattaaggtagatactgttcacactggcaaatatttaagatgaatattaaacgtgtatactaaaatgtttattggtaagtaattcattaaatgggaagatatactagatgaagtaaataattaaattgcaagcacaagcaaattaaatttgagatttgggaatggtctgtcatatacttttaaagcaaatatcatactgataatggaaggacacgtgtcttgtggagctcagtatcaggaacaatatagttggtcctgcaggggactaaacatgagaactgaaagtcattaggaacacgagcagcctcattccactgttccagggaccttataatttctttctgtgtatttattttattttctttttgaggaccgtctgtctggctgtttgtatgtcggcagatatgtctgctctagacttagatacttgctttaagaatccaaaagagattgcattatctaattgtcatttatatctaaaattaaacaaaccatgaagttaga

SEQ ID NO: 77815 - DNA, 1544 bp, Homo sapiens
cattttggccaggctggtctcgaactcctgacttcaggtgatccgcctgcctctgcctcccaaagtgctgggactgcagggagtgagccaccgcatctggccgctgacatattgttataattactcttagtattgttgttaatctcttaactggctccaatttataaattaagcttcatcataagtatgtctatctaatgtatgtataggaaaaaacgtatttatgtagggttcgatactctccatactctccaccatttaaggtatccactgagggctttggaatgtatccctcacagatgaagggggtgctgctgtgtttgagagatacagtttctccacaacctcactaccatttggtattggtgatattttttgtgcgtactggtatcttgtcatggctttaatttgcatcctaatggctgatgatttcatgtgcttatttgccattcatattttttttggtgatttgtctgttcaagtcttttacccgttttgtgattggtttgttttcttactgattttagagcattctttatatgttgtgtatacaaaatcctttgccaaatatatgatttgtaaatatattctctcagtctctggcttgtcttttcattctcttaacagtgtctttagcagcaaaaaagtttcaaattttgttaaagtccaacttctcaatatatggatcgtgtttttagtgcctatcttagaactctctgcctaactctaggtcaggaggttgttctcattttttcttctgttttacccttatatgtcttacatttagatccgtgatcctttttggtttcatttttgcacaggatgtgagctttagatcttggtacatttttcttttccttttgtccatggatgtccagttgttccaaaaccatttgttgaaaagtctaccctttctccattcaataagttttaaaaatcaaaaatcagttggccatatactgtaaattaggtatcaaaacaaagacaggaagaaatgaatgagcaattaactattaataaatacaggtttattgaaggtataacatggctggagtctggaaaaagtgggaaaacattttagagaataacatgggcaaagatctgttctagagaaaataagtaagaactggctatttttgggagtcatgcaagtgaagggaagtagagaagtaaaggaaggatcattggttcgtgaaaaagaaagagtatataaacttctggctagattgaagcatttgtaatcagtttcattggctattaggaaggtgctgtatattcttaatcaggaaaatggtatgatagaaatggtattaaagagaagttgttttaggaccatttgtggcagtgatacgttggtaggaagaacaggatataatcatgacccttgacttacaactttgttttacaaatatctgccagaaagctaaaaaagtggtgttacttcagaatgttataaattcctagtattttctagaaggcagtggtagatttcaaacttttgctgctgtcctcagtgatggatatggagaagtcagcaggacttc

SEQ ID NO: 77816 - DNA, 1032 bp, Homo sapiens
atgttgagattgaccaagaatatttcacttgtgatttgcagcccttcagtattatcacagagaatttttctttttttttttttttttctgcagaagagcaagctcttatagtgctatgcaagctgcccatttaaaactatcattgcttggcacctatgccctagtgacagtttgaccaacatgtgagcaggcatactgccatcctgacagatgggcgtgagtataggcagccaagaaaccatgtatctgcatctagtgtatttgttaagggcaggattcccagtcggggatgttcaaacgtctgtccattctgagctttcacgcctatggataaaaggatgtcatcattaatcccatcctccatgggtatataagagcttcttggctcttacagaagtaggcaattggggacaatcaggataattgttctcttcttcatcacaggactacttcaaataatcctttcctctttctcctagccagctaggtttacagtgagtacaaacctgttcagacattgtcctgatacttgtggaatatgtgcttgttcatttcttttccagagtgtgaaagctttgaaagtcatttgatgtttatgctttggacagtgacatataaaattgggtcaggtagatctagttcaaatattgactgctgtgtgacattagagcaattcaatttagcatcaaatcaaggtaaaataatacctatcttagagttgttgaattaactgcaaactgtatacatgagtcatttggtgtaatgtctggcccacagtaagtgttcaataaatgtttgtcatcatcatcattttcactttgatatacctgaaggtatttttctctggagaggtatctgaaacaaaacttttttcaattcactctcacttcccatcattcccctccctccctccctcccttccttccctccttcccttcctctcgctctgtcaaccaggctggagtgcagtggtgcgatcatagctcactgccaccttgatttcctgggagcaaatgatcctcctcctgagta

SEQ ID NO: 77817 - DNA, 1184 bp, Homo sapiens
ttagctattccttacatggcatggtttcatgtcagtttaccacattggtggctttcctctttttaaaaaaatttcattttaaactgtagtgctttgaattgaattctgtgctccagacatggcttgatacgtgagaaatagagttgtatctcttgttctagatataacacttttcttctgtgagttaagggaagaatatcaccttccttcttctacataattttattaatattagctatatccttttgtgaccacatcatacattgaacataaagttgaataaaatccctgcatctatctaagctatgtcttttcatcctgtttgtatgcattagttttggggtccaaccatgggagcttatgtttgtcttgttaaatttctttttattgaatttaactaactgcaacttttaaagatattttggaatcctagttcttggtttaattggcagtttctagcctaaaagaacatgtatgtgatgatgctatgcactgagattggaaatacaagagaaagaagtcactctctctgtctctctctttctctgtctctctctctgtctctccctccctctctctctgtctctctccctctctccctctctccctctctctctccctctgtgtgtgtgtgtgtgtgtgtgtgtgtgtgtgtgtgtgcatgtgattgaaaagagattgagtatggaagcctgggtaataccaatattaagaggcagctgggcagaaaggaagtaagaaaggagaccaagaagtggtggtcaaaaagttgggatgaaaataataggagtatcttgtaatgctggagtgactctgtgttaagtactgtggtagatacttgaataaaaaatgaataggacatggtccctgctttctgcccctgtttttgtttaattgttcagtttatggaactgcctagtcagtcattcctgaagacttggaagtcatcctttatttctccctcatacccttgcctctttgggttaccaagctccattgattaaaaaaatttttttgaagtgtaacaaaaaggtgcagaagcatcaagctcaattatttttaaagttttacaaagtgaacaccctgtaatcactactacccagatcaagatactcattttctagccctcagaagcccagattatgtggggatatcttgcagacagtagttactcccacccaagg

SEQ ID NO: 77818 - DNA, 1034 bp, Homo sapiens
ttaaatactaagaaaatttgcctttagtcatatgttttgcaggtatttttaatttgttttttgaatttgtttatggcttttttttaatctgtggagaatttctatttttattttgttaaatttatcagttttctttatggcttgcgtgttttgtgtgtttagaaaaatcttcttgtctctgagattctgaaaagttctttcatgttttcatgaatttttttaatgaccacagtacacttctgttatactttatttagtcaccttaatttcctcttagagtatttggaaatattctcccatagagccctgccccaagactatatagggaaaaatgttgttcagtagctgttctatcagatctattgatagattattatatagtgaacatccagagaattaattgtaaaagtttgctcactaattttgctccctaaatagaatgaatgagaaatctatttaccagattttgaaaatatgctaagtgttatgtaaaagtattagctatatagttcacagtttctaattttagaaaagtttcagtgtttgctttatataaagaagcattcctttgagctcttctcatgggccataaggtcaaggagccaggtgtcaccgctttttgaagttgacatcttttggcttgctcctttcctaggtctgactctcttggataggcacaacagtgattctgttttctggtctctgtaggaatggatgttactgtagtgtcttcatcactttcgtttctgggagacctgttgagacccaggaatggatccttctacctactatctcaaaagtcagaaacggaaatacagttaaggcttcagggaatgcttcccttgtaggggaaagtgatagcagtgaggtgtcttgggcttgtgtttgcaaatgtaccacactgtgcattctcagttgaaaactaactctgcagttagtgtttctcttttagaacttttagaagttttttaaggaataaaagttgagaaagtacatttgatactatattttaagcattttactcactataccaa

SEQ ID NO: 77819 - DNA, 2791 bp, Homo sapiens
ccaccaccacgcctggcttattttttgtatttttagtagagacgggatttcaccatgttagccaggatggtctcgatctcctgacctcgtgatccacccgcctcggcctcccaaagtgctgagattacaggtgtgagccaccgcacccggccaaaaacattaattttttaaaatggcagagccataagcatttttaatagctgatgggaaggatctagttgagggagacattgaatatattagagaaggattaattaatagtgtaagtcttgagaaggttggaggggatgggatccaaagcaaaggtgaaggacttgatgtttgataggaggaggatagtttctttcaatgtgataggagagaaggaagctaggattggcttgaagtgggtgcaggtggtttgtaggtgtggctcttagaaagatagggaattcccatctgaagtttctgttttctctctaaactagagtaggtcatctgttgataattatggcttaggaaggggaattagagttttgaggaagaataaatagagtttgacatagtcattgtagagggtggttgctggacttttgaggaatgacattgtcctttgcagttgggtgatgtatattaaacataaagttagatatctggtagttggggaaaaatactaaacttttttgctgtttaattttatggatttagtgaattcctgctaactacaatgtattgtgactaagacatttctcatatacgaggagcttataagcttatagggaaagttatttgtcacatgcaataagaggtacaaacagtactgaaacttcaggtcatatctgacttcagaagagataggtctttaggtatggggaaaatgtcaatcaatgtataaggagaggttaaatgagagaaaaggctttgtgctgggaagaatggagataaaaatatgttggttccatgttaatagaatggtggagtccagtttgtccagaattatccttgaatcagagtgtctctatacagtgtaaaacatatcagagaagtttatgactttaaagaaaatttcataaaaatacatgaccccctaaaggagtttacatgcagaactattttggggaaaatttatgagtagtcattcagtatataacgagctttattcagcattgtaattttccagtttgtgtatgatgaattcatagagctcattaagtgtaagtgtcattgttgtgattcattcaagcctttttcctctcttcagcagaaggttaaaaaaaaattccaaatttgaatccaggacttgaagaatgccagttgtctaaatacagtaccatattgtgataaatatagctattgaaatttttaaaaatctattcacaaaactttattttaatattcatagcagaactttttttggaatgttatctgaaaaacagaggaccattttatcatcagagctgactattaattagggtattgttgcagatataaaagttgatctgccactgaaattctatttgaatatgtatagttccaagcttgctttgtgtatttaataactttagtaccataattactctgtttacaattaaattttggtgaatatgctaatatggaatataccaatgagtgatttcagcaaagggcagtattgatttgcatcttgatgtgcttttcagttgcatctgcatttcatttaatatcagaggaaaagaagtggtcagattatgtaatgctaaacttttttttctttgaaacctctctgttgcattggctactataaaagtagacttgcatagagtcagaggggctgaaattatgtggaaagatttaattttgttaaagtttgtgcctttcggtatattcattaatagaaaccttaatgcaagcatcggtttcattattagaagaaacctataatgtactaaagtgattgtttaattctaattagtattttaagttcttcagaaaactcactaacttactgaagcaaatacttgtgattattttatttctttgagcagggacttctggttttaaataattcctcttttaagaaattgcctgaaaagcaacaaggagattgagaaacagtgatttcatattctgagaaactgagaagcttctgtagccctgaactagaaaataaggagctgccaaattcagtgaaggtcaaacagggtatgggaggatgctgaaagggaacctgagacacagatgtcaggaaagctggcagaactgtgttctctaaagaaaggggcacaccctgagaggcacattaataagcctttgtctgggagaacaggaataggtgttggcaggcaggggcactagggaactttatggtgtgatgaaaatgttctgtctggtggtcgcacaagtgtatgtacgtttgtaaaattttgtcagtttactttgtgcaagttagtaatttattgcctctcaactccaaattcacccctttttgctctatttatatactcgagccagaccttttaaatattttttcttttcctggacagtgttagattttgtcagtagaaggtgaggaagggatactgcaagacttagcagagaaagtgcttctcttgttgccatgtgcttgtttttttgttcgtttgtttgtttttcttaatctcttaaggtgtggctgtcagctctacttactctcctgtaagcttcattagcaccctggtaggcagcttcttgctcccaccagtatctcgtgggcagcagattcctgtggataagctgtagctcactggccctacagagaactaccctaccgctcagtgggtcactgccacagtct

SEQ ID NO: 77820 - DNA, 1051 bp, Homo sapiens
tcagaggcaccatactttcttctgcttccttctttacagttgctgataccacacagatcttactgctgtttgtcatggtctgtcttcacctgctcaaattttgtagagataaagggatactgtccctccgtttggttggagaggttgtccataggtgttgagttttgctatccagttgtcctgtccagttttatgggggaattcagggagatgaaacagctgtgctgctgcctccaccatgtccagcgttaaccttcaggagctgtgatttagaagcatattgaagatactgacagcgatgacgctgttctgtgggactatttttaggaaagaaagtcattccaagccttaattaattattacaattagtttcaattagttggccacagaaataaaactaaaaataaaagcaaacagctttatttggaggaaaatcactttttattgaccacaatttacattgaatagatgctgagccagaatatttcatttaaaatatatttttgtcacttctggaaaggaatttcagaaaaacacaaaagattgtccagtcactattttgagatatataaagataaaaaacatgttgtccactcattttaaactattttgattactataaggaaccagtcaaataagagattactctgatgatttgataaagtgggttgaaattcagaagggcatctgttttaatatttggaagtactatgtgttttagttgtttcttttatttggtttactaccataggtgtaaaagtaacctttcttggtgttttgagtctaggctagcttggttggcacagaaattccattttgcaagattttaccatgagtaaaaacacattaattaagagaactaattgacatgaagaaataagagacacttttatttattttgaagatgtttttgttaacttagagaagatttagacagcgaagatgcattagtattctataggaaaaaattcaatttaaaaagtccccagtaaattaataaggaacattttcagataaggagtttgtgtatttggagtgatagtgggtgagt

SEQ ID NO: 77821 - DNA, 1004 bp, Homo sapiens
agctggtgtcatacctgcaatccaggtcttttgattccagtcagtactcttttcacaataaaacactgctttctctgaatgttatgttaaacttatgtgtcagtgagaaaaatgaatcaagattcatctcctaaaggatagctaatgggaaagaaagcttaggaattctgggtgtcaccagccttgcccagatgattaagccacagtttttcctgtcactcttgaaagttgtgctccttcctcacagtgacttccataattgtggagcatgttggtgaggtcttggagccaggtggtcaccggtgcaattttctgttgttccaccacttaccagcttgctgagccttagtttcctcgaaatggaggtgataatgtaatcttcacagagtcatgaggatggatgggaacctgtgtaaagcatttactagcatgtcccgggaacctttgccccttccccttgtgctcagttgccttatgttttcaatctctgcactgtgttctatcatatcggtattgaccttaataaactcttcattttgttcctataaaatgtgcattctaattggatgcacctttccctctcagcttcatagagcaattctttgttgttattaaatagcatttttagttgtagttgatcattatgccattggacttaaacctaattatttccttgaaaatagttgcatatatgattttattgtttcttctccaaagttaagagataatcaaataggatttgagccattataagtcagaattaacaggtatcctttaagttttggagtaagtaggaatttgaacagcatctccgtacggaagttttccttagggaaaaatgttttaaacacttctaagattagaattctgaccatttctttgttttatgttatagtgaaaatgcctcgtgtaaaagcagctcaagctggaagacagagctctgcaaagagacatcttgcagaacaatttgcagttggagagataataactgacatggcaaaaaa

SEQ ID NO: 77822 - DNA, 2186 bp, Homo sapiens
agataatacgatcatcctgtttaaacctctctgatgactctccagtgtccttcaaataaggtgccagacttttaaagagtggcatacaagtcccttcttatacaacgtttatcttcatcccttttgtctcctcaaagtctgtgcttcagccgtcttgctgccctttggctcttgatctttgtatatgatgctttaaaaatttttttaatatattttattttacattgtttttgtaccaagcctttgaaaaatttttagtagctttactgaggtataatccatatacttagactattggtatagcctcttaactgatctgcctgcttctgccccttgcccctatactccattctccacaaagcagcccaaagaagtctttattaccatagtctgattttgctaaccctcttccaatggctccccatcttattcatagtgacagccaaaacctttatgttacctgttaagcccatcgtgtttgttccctgctgctttctgatctgtctctcctcttctgcctcactgtttcccccagctacttttgcctccttgttttccaaacatgtcaagcacactcctacatcagggtcttttttttttttttttttttttgagatggagtctcgctctgttgcccagattggagtgcagtggcatgatcttggctcactgctacttctgcctttcaggttcaagtgattctcccacctcagcctcccgaagtagctgggactaacaggtgcgtgccaccaccatgcccggctaatttttgtattttaagtaaagacggggtttcaccttgttggccaggctggtctcggaactcctgacctcaggtgatccacctgcgttgacctcccaaagtgctgggattacaagtgtgagccattgtgctcagtccagatcagggtcttggtgctgttctccctggagtgctcttcactaagatacatacatggcttattcccttcctgctctcactgctcaagtaacaccttgtcagtaaggtttagatccctcttaccatgtagccactctgcttacctttctttcctgcttaatttgtcctctatagcacttcacactgtcaaatgtacttcatattttatttctggtctgcatcttaccactgaaatggtggctttgtaagagtaaggattttttcctgttcattgctaaatctctatttcctagaaactgacgtttagtatgtacttggtaaatatctgtttaatgaatatgggcaaccttatatttctaactcagtattctggggcaactgtacttctttatttacatgaaataaaatgatagccacattaaaattattctgatggcagttgaaagttctagtgccaacatcctgaactattggttcaggtgagtttttcctaaactagtgctttttagaactttagccccctcatttcttactcttcagatgctcctctcctcttaaaagaatttcatagtttattaaatttaagaaatgtattacttatcctctggggaattcacaatatccactagcatatcaaaggctattagtacttttgaattaaagaaatctttaacttatttaactcagtttcccatatgtaattgataatcatatagaagaaaccagaaattgtaagatgcattctcaattcagatatgttaaaacatgaataaaagtcttaaaatttatgaaatgtactgtaatgatatcctgaaacacatacttgggaactgaagtgtattctatcaagggttacagatatacaaacctaaatattaatatatttataatattacttgttctgatatcaaatattttacttttttaaacagctgatatgaattcttcagagtcagttggcagtgatgcaccttgtgttgtaaaagtggtaagaaatattttagctaatttgtttcttttctgttgatttggtgtagtattttgtaaaatgccttttttgattaactagaattaattaaaccataagatactacatttttaataacttaaaaaatatttaataagacacaaaagtagctttatagttttaaatcacttgagtgtgaaaagttcctctcttgaaataaagtggcactggtattcgggggtaaatgaaggaaagcataaaggcatgcagatgtggaataaaaatattcagctcatttaagaaatttcagctactttt

SEQ ID NO: 77823 - DNA, 2675 bp, Homo sapiens
aacgttttaatggttcatccatattgttggtgtatcaatcatttgtttcattttattgctctcttgatagacattgaggttgtttccagtttttggtattatgaataaagcgtctataaacattcttgtacaagtgtttttatggagacaggtttttatttttcttggataaatactttgagttgctggtttatagggaagatgtctatttaaacttataagaaagtactaggcagatttccaaaatggttgtgcccttgtacacattggccaataatatatgacagttctgtttgtgtcctcttcaacatttggcattgtcagttgtgtgtatttgttttttagccattacagttagtatgtagatgtgacttatagtttcagtttgcacgtgcttgttgcctaatgattttgggcagttttttgttgtgcttattggccattcatgtattttcctttgtggagtgcctcttccattctttttgcccctttcctcttatttttatcttttaaaaataactgggttgttttgctttttataattgaatagtaagagagtttttttctggatgcaagtcctttttcagatacgtgttttaaacattttctactagtttatagtttgcctattcattttttgaatgctttttctacatctgagatgaatcacagggtttttctcctttcctctgtcaatgtggcaattacattgattgatatttgagtgttgaccgaactttgtattcttaacatacaccccacttagtcatggtgtattatagtttttacataatgctagaattgatttgtgaatactttgttaaagattcttgtgtcgttgttcgtgaaggatattggtctttcgtttttttccccactgtttctcaatttaaaatttccaatctcattgttgattttggtagcagagttctgtacctggcactctgtttggtcttcccccttttgccctgcaggcttaagtctcctccattttactcctaggatctctaggggaaaaaagccagggctgccatggactcactttgttttctgtctcttaggggtcacagtcctgtcctgtccattgtctaatttctgaaaatagaaattttctgtttttaagtctgtttttatctttgtttgcagtgggagggctaactgggtcccagctattccctcgtgcagggaagcggaagcaaagcgatgcctttcaagttgtgtcaaagtgctttatttctcctgcttcttttcatgatggcctttcattgtggatttttcttcttcttcatttatggaatagcattctttttggaatattcagcctgttgctgaatcagaggaactaaagttcttagtattaaattgggtcatttgtatttaattgcagaatattgtgtgcatttgtttttgataatacaaattaaaatattaaaatctatgggtaagatgagtttcttcttaggctcattaggagttctgttgtgagaagaaagcaagtctccttctgacgtctcataacgttgaggttcaaatgatatggttacctctgaccccttgcagttagttggcatagctgtttctgtgtcttggaaggaaagtgtgccagtgtcatatcttaaaggtggaacagtgtataatcatgtcttttttgttctgtataacttgaactttttttttttttttgagacagtgtctcatcctgttgcctgggctggagtgcattggtgcaattatagctcattgcagccttgatctcctgggttcaagtgatcctctcacctcagcctctctagcagctgggactaaaggcacgcaccaccatgcccggctaatttttttgattttttggtagagatgaggtcttgctttgttgcccaggctggtgtcaaactcttaagctcaagtgatccttccctctcagcctcctaaagtgatggggttacaggcatgagccatggcacatggcctctgaacttaagttgtattttctcttagaatgatgtgcttccttattgtaattagaaatatttctgttgttcttctttattgtgagtaattagaagtatttctgttgttagtcaatgtaactttacttttactgcctttttaacttatatagttaagaaaaaacatggccaggaacagtattttctatatgcttaaggtaatgaattatatttttaagtttaagaccaagtacctagttcaggactgtgtatctcctgtctcctaatttagttctgtttccattatcctttattacttcttctctttgtaattaggacagtgatactcagttgatttctcttttgcatttaatattttagtaactttttggatgttacagttatcctagaagaatgtcataaacaaaacaatactactgaccaggcgcggtggctcacgatcataatcccaacacttcgagaggctgaggtgggtggatcacatgaggtcaggagttcaagaccagcctggccaacatggtgaaacccctagccaggtgtggtggtgcctgcctgtaatcccagctactcaggaggctgaggcaggagaatcacttgaaactgggaggcagaggttgcagtgagctgagatggcaccattgcactgcagcttgggctacagagtgagactctatctcaaaaaaaaaaaaaataccaaaaataaaacaa

SEQ ID NO: 77824 - DNA, 1158 bp, Homo sapiens
tgagaagtgacctgaatttttaattcatatatcataattttttggtaggaaggagaaattttgtacagcttcatttttaaatggcagccagttgcttttagctggtgccattgaaatatatcacattttaattttttttctgttgtcatcttcattttgacacttagaagtcttaaagaaacgtttagtgatattctagttaaaatgtcagtcccaatttcttttctaaatcttggctattatagagttggcaaagtattttagatttgaaatatgttaataaaattttagttatgagttaaggtattttcttcaacaggaatagctagctttggctagagtgcaatgccaaggaagtagctcctttattttgtgataatggaagtttattggattagaagaagtatgaaatgagctcagagagccttccttgtagtgggctttcattataatagcctgatttatatggttgattctcattattataggtttaataaattattgcctgaaggaaaacttgaaagttaaagttgatatgacataggttgaaactgaataaatcagaattttatactgatttgtcttaggaaaacctctttcaaacctgaattatataaatgagctattccaaaggtaagctttggagaggaactttaccagaatttctccttttgaatttctttttcttaacgctgattctgtgattcctaccaaagacctattcttagccattggctggaaacactgcaagtgtctcttgcaaatgcttgcaagtgtcaagctattattgctgctaggaaaggagccataggttatagaggaacttgggtactgagtccataagttaaggaatcagcactcatactttcagtatgttggttagttcctccttcttaaggagttgttgcatgccaagccatgatactactgtcttccaaggttaaggtgaaaagtatacttacctgtaacaaataaggcacgcttgttttcaggttgtgatccaagtgttaatgtgtgttgcccatttactgttaaatgctcattaataactgcctgagtctgcagattggctaatccgttttcctctaagtactttatttttatttttgagacagaatcttgctttgttgcccagggtggagtgcagtggcacgatct

SEQ ID NO: 77825 - DNA, 1653 bp, Homo sapiens
gccttcttctaagtactttaattggggattcctattttctgaattataagaaatctgagataattagagcagagagtatggagtggttttctacagttgagggtatcttgagtgaagaaaaggtgaacatattttaagtgcttgcaaaagtcatctctagcaacccaaaactataagttgtcactcatttaaggtagtaggcctcattactcacttcccccaatgctctatttaactttgaactccagttaaccaagatattctgcccaaaataatttttttctcatacctcctaaaaagaaaagcaaccctaaaattagtttagaaatgttagcttcctcatttgaagttttcactgctttaaaaactttttttaattcccaataaataatgaccaacacaaaataccagacattaaataaatactaattttaatcagatgaaatttactatttaaaaagtccacagaattataagatcttttccactcttacatatttatttaacaaggcaaaactgctgacaggctgttatttcttgtttgtgcaaatacgtttttgtgaatgtatgtctctttagtaataattttaattgttaatatctctaaaaacataaaatgaatgtagtccataacattggtagaaaacaattgttaatgagccccatgtttggtttgacaaatgtaggaatctgtgtcagaaaggaaggatgcaggttagtggacagtgcatgcttgttcaggagatgcataatatgggctcttctttgtggtaaggtctgtttttgccagtcctgataaagtagatataagtgtaatgaaaacaggaaaggaatgggattttggcattaattggttaaattaggtattgaaattttattaaatctgagaaatatcttatagccccttggtgatacagttaagatgattgctcatctttgcttaagggaaagcttaataaagatgaaaattagtttaaacatttttcttaaacttctgcaggctgagctatatatctgattttgtataatttatcacttatagaaatggaacttgagcaatataagaaatatagactaatatttctctgaacatttctaaggagtttgacttaatcttaacacagttataaacttaagtatcaaaattacattggacagaaaaatagatttgttggtcttttttgaaggttcattgaaaatatctcagtaattttaactactgctagtactaattaactcttatattttaaggaacccagtgacaatggacctctttttactgaattaaagttctaccaacgagctgcaaaaccagagcaaagtaagaaatacagtacacatacgtttacacttttaaaatgaccagttttttgttttaagccaagacctagagcattgtatcttattttatgactctttgttatttttttgctttataaattccacttacatgggatttgtgtgaaagaattctggtcttttaatgggtttgttgcatcaagattttatctatatagatacatagaatgaagttaataataaatgacctatgatttaggaaatattgttaaacattgagaattattgatgaaatagaacaggatatcaaggtagagagccagaacctctcctagtcactttggtcccttctgt

SEQ ID NO: 77826 - DNA, 1753 bp, Homo sapiens
attacatattataagtaatctagagatgagataaagtatataagaggatgtgtggaggttatatgcagatattacaccattttatatgagggacttgagcatctggattttggtgtcttgaggggtgggggttcctggaaccaagcccctagaacaaaggaatgactgcactgtagttttgatttaaaaaaaatgctttttgtagatttttcattttaaagacaattttaagggcaggataacaattttgtaggttaataaaaatgttttcatcgtaaaatgcttttcgttattcgttatactgtattcttcattttcttttttatgaatacaggtgaattcttattgcatgtataaatacattttgctcttaatgattttttaaaaaattatcatttatgtataacaattgaaatcacaaagatctgttttaatttgtagttcagaaatggattcgtacccgtaagctgaagtacctgggtgttcctaagtattgggggtctggtctacatgacaaaaatggaaaaaggtaaaaatatgtgtgatttgtctttctccttcccttttgcaacattcactatttagttggtttagtcagtaattatttactgatcacttacaatattactaggcctccctctggagtatgtggagtgtatgtgacagagaggaataagatgttatctctgtcctctgctttccatagcagcaggctatgatgccttattagaataggagtgcctctctagtcagggagcttctgcagagcagtatcaactgactggaacccaactgacaaggaggaacaaagccaaacaccctgcctttttttcctccttgcctttagaaataaacaaacaaaaacgcctctgttcttcatgcaaaagggaaccccttcaggattccatttggtatttctgcccacacagaaatgttggatacataatctgcccacacaagattaggctcaccctttatgagggttttagtctagctggtgagtgaaaacaaaaatgtttgaaacaattagagaacaattaagtgctaagttgtataatactgacttacgtgtcttaggagttcagagaatggagagaatgaattctttgggatagtttatttggagaaaacttctaatactttggttcataagcagcacttgatacatatttgaatgaatgaatggaacttcatggagtaaggctttggtagctgagacttgacgggtagatttagtttggaactggggatatattgcttaggatgatttcagctgcaagtaaaggaaaactttgactcaggcagtcatcaagggcccaggttccttatcttgcacctttgccctcctcttcttggttttgttctctgttagttctccattgtgtggtcgccaggtggctgctccatttctaggcttcacatgcaggcacagtacccaagggcagaaaatggtatctatcgtgtgttgtgagtttcactttcctggcaaagaaagctttcccaggagccctgtggcagactttctctcacgttttcttggtcagaattttatcaatacttaaaccattgactggcaaggacaaagtgatcacagcgatccatgtggaaaaggatggaatgccggaaccaaattggtgctccgttagaaaagattgagaggaggggtaagtagttgggtaggcagccagtgttgtttacttgggatccatgcctctcttagggagtgtggggatccctgaagtcacttttaaca

SEQ ID NO: 77827 - DNA, 1022 bp, Homo sapiens
tatgttataatcattacacacatcacctatttagtaaaagccaacatgtatatgtgccctggtctcatctctcaaccttgcaaaatctgttacacaaaggaaaccaggaagtcaaagttaccattttcactttattatcttacaagccaaggtgctaggaaatcttacatgaatgaatatattttgtcacaaatttttttttttttttaattgaggtggagtttgctcttgtcgtgcagctggagtgcagtggctcaatcttggctcactgcaatctccgcctcccaggttcaagcaattctcctgccttagcctcccgagttgctggaattacaggttcctgccaccgtgcccggctaatttttgtgtttttagtagagacggggtttcaccatgttggccaggctggtctcgaactgctgacctcaggtgatccaccagccttggcctcccaaagtgctgagattactggcgtgaactaccaggcccggccaccactgactaattttataaccttggacaaatcactttacctccaaagaccttagttattttatttattaaaagatgtttagacaagatgattttctaattttcttccagttcaaaaatgaatagaattctgagttacttgttcaacatcttgtcttttaatgttagtcaactcttccttccctattgaacttgtcatattgttatcatagaagcctataacatataaatgggatttttgtatcctactgacatttatttcagttaatatgtagtacaggggttaaaagcatgattttgccacatactagaggacaaattatcagttttcttctgctgtaaaatgggtatgataggagttacctactttatagagtgatgtgaggtttaaatgcattaataacgttttaagtacttacagtagtgctgtgtgcataccaggtgttcagtaaatgctagatgttatggtgttgatgattcataatcttcctcattggagatgtcctgatacattctgagtgtggttttga

SEQ ID NO: 77828 - DNA, 3765 bp, Homo sapiens
ttgaatctggcttttgttaaagcatctcacgagaatcttgattttagcagaatgttgttactgctgaaatataccttaaaaataaggagaaacagtcacaggaaggaagctgatatccagaaacatgaattaattttaactatgagaaaaatcaatgctgtcatttttattcagcttgttttatttttaccgtgaataaacttgttgggttctctctgtgagcattatcttaaattgaatagtctcttgaaactagctgcgaccaggaagaggccctccaggtaaaaagcaggacctgaaagcactctgaactctttgagatttctagttgggagaaattgtttcaaatgtttgtatttcttttttaaagaatacttctttactaaacattgtcttgaaaaaattactttgagagtactcattacaaagttggttttcttgcattgtattttgttcattggcttttcatatttgtcttcagttacaggtttatgataatggatcgctttgggagtgaccttcagaaaatatatgaagcaaatgccaaaaggttttctcggaaaactgtcttgcagctaagcttaagaattgtatgtgagctatgttcttcttgtttttaaaaaattgttttgagtacagtaaaggctagtttatgttgaagcttggtcctctgctggctggtgttaggtactgcattaacttattctgtatgatactttcatagctggatattctggaatatattcacgagcatgagtatgtgcatggagatatcaaggcctcaaatcttcttctgaactacaagaatcctgaccaggtagttttataactttaatttctactatttaaagcgtgttgtttgaaaataaatatggttgctttgaacttttgaacctgtgtagaagttttactttttgaagtagatatggtaataatatttcttcttgacactttgatctagttaacattctacatttttgatgtgatttgttggcactttatcaagttggctattttgccctaaataatattcagaagaagtgcttgtgatacaaaatgaatttcaaatagctatttgggggtggaagcttaaaattatatagtacaccaatgaattatgtttgcctgtctgctttgtcactttttttattcctttgttcaagaaatccatcaaatgtaagtgttctattacttggaaaatttggtctttaacatgttgattattcaaatcaattggtttacagaaatatcttagctgtctaaatttgtatacccttagtgtttggaattcaaatgtgcattttttttttagcttattacattccctttgtaatttttactttctaaggaaaggagaaaagctaatgttattatacctttatttaggtcagtttagttgaagtagagggatctatacaattttcctgtataactgtttctgtgatttcggtgaaagtaaggtttagttgacattcatacttaatgtatgttctcacttcttacttgatcttacataaaaaggaagatttaaacattttaaatgtgtttgggtactttgattattgtaattatttgtcagtactctgtacttcattctttctctcaaatgtacctttaactacctttgcttagtttttcctttttcctttggctctcttttctttttctgtcgtctcgtatttgcttcccttcctccaatgtcagttatggtggatagaagggaatctatataagtataaaagaagaaagttactatactattaagatagtgtgctaatggagaaatcttaaaaaggcaatcatcaaattcatctctgctctttctagccatttctttttagatatttctaggctaagaacaaagaaaacgcagctaacaacctgaacaataagggttccattaattgaaatagtctggacttgtacagtataataaaatacaacttatatcactttgtaggtgactaaaacatgctgcctttgtttatatggaaatatttttgcagctctgttatccttcagacatatgctttggatgggattatttttccagtgttagatgtatgtgctagatctagccacatatttttacttcagtttcctcttgtgcccagatgcatgcatttgtgacatttactcagaattagagatgtaatgtgtggctatggaatggaagaaagccaagtttattagctttgtatgctaatcagacccacatgtatatgcccacgaataagtatgtatataatattaaaatttacttttaatcatgaagacttggctttagaatatagtatttagatatagataaaagcctgatctaacagttctttagatcattattatgatgtatgaaatgtttttataaagtaaattgaaatttgattattttacaagtgaagaaacagaggaatagaaggtaactaacatatcatgtgtcagcatcattagcagtcttctactgggtgtgcttttctgtgtggaaagtagcagttgtattgcaacaagtattgacggtttgctctgtgctcaattttagagtctgtaagataaagtataaaatgtataattttcgttcaaattgagacaagattaattacaagtataacatatacttatcttaaaaaagtatataaagtcaagtgattacactgtagctatgtggtcatttaacatttttattaaaaataaaaagcctttcagaattaagtatttgctgttgtttgcattttggatctaaattgtttggagtgttatggaatgaccttgtaggtgaacccaccttcagatgccagtattttgtttctgtgctttaaagggttatatgtgcagtgattttgactttagtttgtcttggtgcttggaaatttataggtgtacttggtagattatggccttgcttatcggtactgcccagaaggagttcataaagaatacaaagaagaccccaaaagatgtcacgatggcactattgaattcacgagcatcgatgcacacaatggcgtgggtatgtcagtagtactggagtgagaaatagactgctaatgttttcacccagattcctacatagttcttaattatgcataagtaaatgaatagataaataaaaattgaaaaggcacagtggcatgaggaaagaaggcagaggtgagactcctacaattgtattccaggaccatctgtgttcttctgtcctgccttttcctcgcagccttcaaagataaccaagaaggtggtagtggttcattcagctgccatgaggatttctttttggttttatttagtttaattggaatgtttgtttttgtgttttttctcaagtttcttatgtatctacaactttgtaacagctaacttttattttgttacctgttaagttagtttatttcttcagcagtcatttcttctgtgctcaaagctgtggaagaactcaaatacccagttctctgggcctcttaatagcatataaaaattttaagaatatcttcaagttttccaaaggaaaactagttttatttctagactaacagtctccgcttgaaaccctgaaatttaccaatttgggttttaaagtagattattagctagaagttaattgggaggtaagctatttcttttatactgtccaatgttcagtacctaggtgaaatgcagtcaaaattttatgatgaaaaacagactgtggagttgacttgttttatgttattactttatatatactttaaattatacattaaaaattatttcagtctacctaatgttctt

SEQ ID NO: 77829 - DNA, 1056 bp, Homo sapiens
gtaatcccagcactttgggaggctgaggtgggtggatcacgaggtcaggagatcaagaccatcctggctaacatggtgaagcctcatctctactaaaagtacaaaaaattagccaggcgtggtgacgcacgcctgtggtcccagctacttggaaggctgaggcaggagaatcgcttgaacccgggaggcggaggttgcagtgagccgagattgtgccactgcacaccagcctgggtgacagagtgagactccgtctcagaaaaaaaaatatgttagatggtttgttaaatgaatacttgagcctcattcaattattattcagtgcttttagcaaaggaagcaaatttcattcatacattaagttagtaaatattgaggctttattgtgtgccagggactgggggtacatcagtgaacaaaacaaatatccctgccctcatgaagctagcattgtagttggaggattttagacagtaaacacatgagcaaaatttatatgttccccctggttagtactgtggaactagaagaaaacagggaatagaattagggggatggggatggggtgggtagtaaagtagtgaggaggactgtaattttaagtaggctgtccagggacagcctcacttggaaggtgacatttgagcagttgtaggaaggaggtgagggagggagtgagctgtgtagaagtctggggaagagagttctaggcagaagggacactagtgcccaggagatgcgaggactgtgtcttcataggtaaacatgagggctttggcttttacttcaaggaagagtgtgaggtttgtagtagaagagtgacatgaactgcttatcctgaggggaagggtctcctgcttctggcatggggatggactgctgaaggagcaaggatgggcctaggcagaaagcaggttaagaggccactgcagtaacccatgcaagagaagtagcagccaaagagtgagaattggtcagtctggatatattcagaagtctttctaagcctttgctcagttgtctccttttcagggaggtctatcctgaccttatgct

SEQ ID NO: 77830 - DNA, 2515 bp, Homo sapiens
gtgtggatctgtgcacctgtttctggactctcttttttcaattgtcctttttgcctgttcttggaccacactgtcttagttactgtagctttatttaaagcttgatatctggtagttgaaattctttggcactgcttttctttaactggactttgctactttgctattctttgccctttgcatttctatttaaattttagaatcaccttgtcagttacacacacactcacccacctccaagtttgctggaaccttgggattgaatttgactctgtagaccaatttggggagcactgacatctttatactgttgagtcttccagtccacttatatggtatatattttattaaatttggtctgtcttaatttctctcaactgtgttttatagtcttctctaggaaactcttgctcatctttcattgtatttgttgcaaagtatttaatgctattttaggtattttttgatagtttattttccaattgctttttgctggtatatagaaataagatagatttttatatatttaccttgcattttacgaccttgttaaatgtatctactagttctagtagttctttgtagattctgtaggattttccacatgtagtattatgttgtttgtgaataaagactggtttacatcttctgttccactctttatgccttctatttattttcctatcgtactagctaaaagtacacataactattctgttatactgaagggatatggcaaaagtggacatttttctctcccaggggagcattttcaatgttttatcatacatggtgatatttgttttaggttttttgtacatctcctttatcagatgaagaaattggaagttagggattgttgtccgtttttttcttggtatattccaagtatttaggaatagtgcctggcacataggaggtgcttaataaatatttgagttaatgaatgtgtgtatatatgcacacgcttgtgtgtgtgtgtgtagaactgataagatctcttgaaggactggtgtgagaagaaatgattcaagggtgactaactcagattttggcttgaggagctagaaggatgaaaatctcagtaactgagacagagaaaacctcaagttttagggataggtcaagagtttagacgtgggtttgttggaattaatggtgatatttacacatccaaggaccagtatatgaaatgatggatatacaagtctggaggtcgggggaaaggtctgtgtgtgagtcattagctcaaaaatgaatttttaatattgagaagtgttgatcttgactagtaggatttcttttttatggtgtggttctgtctaagtgtacagtacacttttatcatttggaagctgatttttctcttttataggaaagccagatcttatttctttcttctttctttggcctctttttggtgtgttttatttctcatttacacgaagaatatagctatctgctatagagctaatggctttgatggcaaaaacatattggctatgatattcattgtatttaaggacattttactttctaatctttattctagatccctttgtatttttttataactttaatactataatagttatttttatgagtatttacattttaagttgtcttgtttctcacaattacaaaaagtgtgttttacattgtatctcaaaatactttttaaatttcagttatctgacaattcctgagttcaaaagcatacttttcattgaagtgattgaaaaaaataggtatcttaacaagatgtgtatttgcattctaactttactataaccatgaattattttttttagaggttagagagaaatatattgaaagttataaaatgattgtgttattcttttaggtgaaattgccaaatacatggaaacagtgaaattactagactacactgaaaaacctctttatgaaaatttacgtgacattcttttgcaaggactaaaagctataggaagtaaggatgatggcaaattggacctcagtgttgtggagaatggaggtttgaaagcaaaaacaataacaaaggtgaattttgttattaaattattctttggtcttcttgtgtttataattgcaataaatactaaaagaaagtatagcagtagttcaatgaagaacaataacagattgcatggcaattaaggcaaacattttttgtaatacagaaaatgtgtagagggttgtagaaaaataaatatttatatatttcttatgtttagtagcaagttactaaattcctgaactgattttaacttggaatactgatatctgacagggaaattttgatggtgcactgaattcataatttatatgttcttttctcccaagtcaccacttagggttcatcttgtcttggttgtttcttatttgtggatatggtcagagtatttaccagttgaaaacgggcatttgaaaaattaccatttgaaaatttccttgtttgttggtgtggtgcattttaccatttgaacattattttgctctgtgaagaaatatt

SEQ ID NO: 77831 - DNA, 1736 bp, Homo sapiens
ttcttcccagccagggaagaaacaaaattacaggtcctgcttttggggagtcactggggagtagggagggtttcctcttttcaacgggcttaagtcttttctcccccaagctgcctgacttacatcttctagactgggggccactggtgaaaaatttcagaatggtgtttgctcacattcttgaagtgtctgacaaacttcatggtcatcacttttcaaaggttatgctgcaaagctatgatacttctgtttgctgctgaaatatttcttaattgttattttgggttcattacttcagattttaggtggagggaagttgtgaagtcttaacctccaaaatgtctccactcattttttaacacattttaatttgtttatgtgtgtgaacatttaattagaatttatgttcttttctcacgagtaaacagagcttgtttttacttttacactctgagccctccacaaaccatctctcatactgcagtcatctggaatttttagttctagttttttgtgtcatttgtatactatgtattattttttagagttaatcatgagtctaacgtattttgtgttttttgtttgtttgttatccatgtcctttctcttgactttatgtttcagagtatatgctcaatctttttttaaagaaagcttctggatggtaaacttgtaaatcttgggaagtccaaaaatgtctgttttttccccagttgaaaactaatgtggctatatagtttttaattgaagacattgctttgttgccttctaacatctaattttcctaatttttgttttttactagatttctattttttccactcttgctttgaagcttcttgcctttctctttgtcctggcattctgcagatatctgtgcacaagtgtgtgtgtgtgtgtgtgtgtgtgtgtgtgtgtgttctagtttgtttttacactttaattagttatctttcttggtacttggcagacctttttcatctaaaggcttaatgcctgtcttagacgcttgaacaatttattttctgtgtatgtgaggctttcctttcctttccttctctattctgtccctccggaactcctaccacatgaatatgggaactctggaagctagcttcttttctccatgtctcctaactcttcgaccacatgttcatttccttaacgctgttttgtatagatctgtgggcttcttcttgcccatttgttacatctgttttgttttttagtcatattttaagggtactagttctttttttaatatgtcagcatattcttgttttattggtaagatagcctcttaaatcctttgagaatagtaattatgagacttttttatattaactgttttggcagagggattgttctttttgagtttaatgcctttctgttttggttctgtgatattgcttagatttttttcaatgtttattatctagtcatgttttttgttgtttgacttattttaatagtgtatacctcagtcaaagttggaatacctattttcctgttagtttaatagaattttcattacagacatctacttccagtgatttcagaaatgagtgaaatttgtggccagatagcttgttttttaggtgccaggactcactgcttctccagtttctttttctggtccattaacacacaaatacctcagatcattttaatggaggtgcttgtgaggctgtgggtggcatccttagttgcatattataataaattcacctgggagc

SEQ ID NO: 77832 - DNA, 1071 bp, Homo sapiens
ttagcctccttagtttatagtattatattaaatagttttcaaaatcttacatttttaattcttgagcattcctcagaagacttgattgtgctcagtacaggtaataggatattgaccctttaaactttaggttatcactgagcatttatgtagtttctatattctttcaggacctttaaattattttttataacttttgcagcatgcctgtgaaatatatttgttcataaatgatgggactaaaactcagaagaggccaggtgacttgttcagggctgtgaaatcattattattatgcatttatatagaaagttcaaggcatcctagtgattttaggcataaaatattaaagataattaaagcatgacccggccactcatttgccttttcccataaattgtacttgaaccatcttaactttgccaaaagttttcgaccttaatggtgcatgtcatggaaccctcagaggaaaacatgagtgaagagatgtgacattgactttaatctagaatagaatacactgacatattagtcttctagaccgtagttcattgaatctctggaaacagctttcgtcttgttaactgactatacgtttgatcatattaaagtttcatgatctccttgtaacatgaatgatgttagaatcatgaaaagccattgctgccaacaagttggaagttgaatttacggttttcaaaagtgtcattaggagatttttctaggttgtgcttgctattattgtatgacattttgatgaaagttcttaagcatgtagtactcttgtagatcatgtaatcaagggttagcttgtttcacagctaatctgcttgttagctgaatgttttttctaggagaatggatgacagtagagcttgaaggcagctttccctagttccttagtaagccaagctgaagggacatacatgtgctctaaaataagtgaatagacaaattatgctgactttatgaaagcagtgcttttgctgaaaaaaatgtgttgcgcatggagcaatcaaccctgatagccaaccagatggtttttttcctccatttattctgacaaagtct

SEQ ID NO: 77833 - DNA, 1088 bp, Homo sapiens
tctgagttctaattttccacagccaccttaagaatgttttgaaacagtgggattaattgtaatacatagataataacagttctgaccgtttggaggttttaaggtaatgtgccttgaatagagttcagctttcccatgtagttctctttggaacagaacccatggttgccattaggaaaaggaacaatgtgctgtcagcaggcattatcctcttttctagctgtacacaaaatggcctgcagcaaggaacattctcagatgaagtttaacttattgttaattgttagaaaatataaatgaggacattctgttgcattgtgaacctgtgagatttggggcatgtcggatggttttctaaatgatacagacttattttaggcaaccaagagaagctttggattaaaatttgtattttaacctgcttaaatttgaaactacagaagataaagttatataaaaaaattcaaagttttatatttattcctaatgcccgtctataattttacctatgtatagagatgttagagaatttagaaacttaacgcaggattggacctgttagaaaatgttgtagtggtagaaacacataaaatgaaattgaaggaacatttgggaagaatggatggtgacagaatataagcactgactcctaaataacacttcactagaaaaataggacaggcccaagagaatgtaggaaatccagacgatttttgagattttcggagagctttgtacttttaagactattcatgtacagtaaggtttatggccctcttaaacttttaataaaaagtatgctaaaagagaaacaattattacaagtttttcattattgattcataaatagaattctaccaccaatgttatgtggtacaaacactgatttaataaatggggcaagacatacattttttccatttatcaaatagattatcctctccaccccacccatgttgtacaatgtggagagtatcattggcctgagtggtgatcgtgagtttgtaaaacattttgttttaaaagagtttctgtatgattagtcctgatggttaaaccatagctttgaataatgaagtatataaagc

SEQ ID NO: 77834 - DNA, 1502 bp, Homo sapiens
aaaaaaaaacacaaaaaaacaaaaaaaacaaggtatgaagtcatttttctgagatggcttataaactggcactgaaggcacttccaatagttccagaaatgacattagcaaaggcagcatctgcaaagggcagagctaggttggactttggtctgatatgtttaataaactgccagccaatgtgttccaggattcatgtgatatgatgatgtacttgactcaataaagagagctattcagtgtggcccacaatacatttttttaaaaagatttttcctgtctgcctttttttttttttgaattattattttgtttgtcctgaaatatttcttggttgctaacagaaaaggcttatttttggttaaaaaaaaattttacagcataggtgccatattgagtaatgccaccaatttattttaccttccttttgctagtgacattagtgcatgtttgtggaaagcacagtattcaactttcaaagagaatcatttttgccctgattttattactatgttcttcattacatattatggttagaacatcctttggtttaatctgttttaacccaaagaatacttgagatacctgaagagggaatatataacttcacactgaaggcgagaggttttgaagtagtccctctctttttcccgctgctgtcttcctttcgctactgtcttttttcctcctttcccctgtcttgttcattttgttattaggaagtgaggagtcccaaggagcaatacatcgaagcatgtctcagccagaggctagcagcagcagctatgacagtgagtgggaacaaaattaaggagtatttataaatatacagcaatattcttaaaaaacaatcccttaaattttaaaactggcaattttagtttcagaaagatcctgcattgttctagtgagattgacactcattaagtctaaggcagagtctcagctgcgcatcaggaagactcatccctttcttgactgcctggacatcatttgttacctgaactttgcttaatgagcatcaagcgtttttgttttgatagataaatgcctttaaattctagtataattatgaatttttttttaacctaagtttttagtttaaggtcttctactgatgctttttcccatgagaaaatatatcagtatttttgttattttattaatgacaaaagagtatagtaaagtcataaataatttaaggagaacaattcagtttttttgacctaactttttcagaagataaagaatagtcagattcacccttattcatataaactcaaaattgccgttcttaaaatgctgtttatttcccccattacagttcacttttttcccctaaagtacaatgcgagttaaggtattttactatcaaaataatcataagtgagagaaatattatctgatggtaaaatattattgcttccagcaaaaagaaaaagccaagagttcatgtaaatgtatatttttaaatttatcagtttaaaagttacttgaaggaa

SEQ ID NO: 77835 - DNA, 1424 bp, Homo sapiens
tatcacatatgatccttttccaggaggctactcatttgggacctgtataattcctagcggaaaagactttccatttcagtatatcccagtgctctcctgcctcaagggtgtagctaatagtctttaaaaagcaacttattgctttgcttttcataacatgtgtgacctcatcgcttccaccttaggagtgaatgcttatctatattgctaaggtttatatttggagataatgttttaaattttacaacaaatttaaattttggagagaaatatttcagtattagtaaaaattagatacgttttatcagtcagtatttttatatggcttaagagaaggtaggttttgtcagcatattttttgacatattaaaaaatgacccaattttctaagattttcagagtattagcaatcatacctttgtatgtcagttttatctttgcaaatcacgagagtcgatttgattttaaaatgttaataactatatttagggatatttatatttctgttcttttgcttttgtaaattattgactagtgatttcagtttctttgatttttcttcaaggttcaagaaccagaaagagagtccagaagtaattcagatgctgtgaaccagatttccttttctttgttttcttttgacttttttctccttttctatttgaactgttttattttcctgtgagtcttgcgaggtggaagtaatgattaaatactcatgtgttcagaaaacataaactttttttataaaaatattttgtacaattcattaaaggctaatttatgaaatttgaaaatcttcaggttatactccttaagttatcccaaagccgtgtgtttgtgatgttttggagtacatatatatgaaaattattatgacacgcacttttctaatcattgtacatttctcagagtggataaaaatgtttgacaaagtcctcacttttaaggaaatgcaaagcttaaaataaaactctcttttgtttgatgcaaacacacagtatgttgtggctgtaaggtttggtttgtattgattttgttctgttcccaaaatcttttattaaacacctgctgtatgagacaggaggtacaaagacaggaaaggaatatgaaataaaaagtggaggaagcgtatccatgagagagaaaatctacatatatgaaagattacataagaattatgtcagtatgcaagccgtatgacaagaaaacaagtgacagatgatcaaatggtggtgtgattaaagattgtgtaaagactggcttcatctacggaagtcctatgaactagatattaatagatagagcctattgttcattcacagaagtttatttttcttaaaagtttcactttcatagcatgtaatatttatacagtaaaccaagcacttcagagtttcagtgatcagaaagtttaagatctg

SEQ ID NO: 77836 - DNA, 1099 bp, Homo sapiens
ttacctctcaccactggacctcttgttcccagcatgttcactgagagcaccttagctctctgcatgttcactgagagcaccttagctctctgcatgtcacctgtcctcttcaccctccctttgatcacagtcaaactcttgggagcccttgcaaagatcagttatttagaaccaaaatcacaggaagatgcatatgatagtgaaaacctagaaataatgtaaatgcctgaccataagagatagtttcagtaatttatgacatattcataaattgaaacagcctttaaatgatgtgggaaaaaaaggataaatgaaaatgtccatgatatttttattgagaaaagaagcagattacaaactagtgtttaaaacttaaaagatgtagattttcacgtaagaaacgtgctatagaaatgtgtaaatgttgccccttgagtctgctccaattttgctaaaataaagtctttgatttcagagttctctcttctacccttgcagcttgaattcccatcagtgtgctgagggctcccaaatctagattccttcccaagatttcagcattttccaaatggtcagtttatcactgccttctaaaacctgctctttctttatgttgctgtcatagtcagtagttctaatattctaccagaaacctgggaatcatttaggatttctctctccactatacaaatccagccagttaaccaatttctgttgattattgctttctaacatccccaacctgttcagttctcctgatctctttcagcactttctcttgggctgtattatttcataggtgggagtttgcagcagactcctctctcatcaccttgcttccattatcactgcccactttgcttgcacacactgaagccagagcaatctttctaccatgcagacctggccatgtcgttcccaacttcaaaccctccaccttgaacataatctaaactcttagcaagatatttgataccccaaagggccggctccagccttacctgcgaatcatcactttttgactcacctctgagctcatctatccttccatccatttaggtatccatccatccaattcccccatatgtccccctatcca

SEQ ID NO: 77837 - DNA, 1029 bp, Homo sapiens
ttgtacatgtgtccacctgcacgaaagccttgggtaccagtgtagtttctctgcttggacatctgctattcttattcctctgggaaataccacaggattgacctgagccttttgtagtcaacctattttattctccttgtttggcattgactggcctaagtgggtgcctagtaaatgttaggggaatgaataaatgcatttaggtgcacaaccttggcacactcaagaccggtctgagagcaagtgcttaaaaaaattcctgggccccaagagctccatgtttcagtcacatgatggtctgacagggatgctggagtcttatctctcattctttctgtctgtctgtctctttctgttttttggagttcagctctcttttcctctccaagccctcccttcctgcctggcccctttgtcgacacttgatcatttacatcaagttgacattcgcagagtttactcaggggtctgtaattgtattctttccctggttctgcattaccaaccatgaaaatggaatcttatcatccctgaccaatttttaatgtacaaaatgatttggctgaggttcaaagggaagcacaattgaaatcaggtgaatgatacatgtagttttttcagttcctccgtgcttagatttgattttttttttccggtatagcatagaagaagtagattatttttgcaagttatataagtgcatttctgtgctgtgtaggtatgaatctttatacatctgaaagcacgaatatgtatatgcatgcatgtttgcttgtattaccatactcacatttcacatgtgtgcacctatttagacataagcaaacaaatataattatattgtttgcaattttattgatggcaatcaaatttgcaatgatccttaaaatgtattcaaagcacccaaggagctagtgcccaggattaatggctggaatattcaaatcaagctctgacactcctttgttaattcagaaaggaacccccagggagaaagtggcactctctggttctggccagaatcatccc

SEQ ID NO: 77838 - DNA, 1039 bp, Homo sapiens
ctgtaacgctgttgagcaaactcccatcttcatctcagagaacatcatacttgtgtctaatgttggagtccctgaggaacttgatcaaatctctcaggatatcttggcagaaaggatgagtatatgggggtaaaataccaggaggtgttagggagttattgttaacaattatactagaggaaatcaatcattgggtcaatgtcgttgctcaggaaggaattctggttgcgcccaggcctctgcctcaggctcagtccagttgatcatttctcccaatccagatgaagaaagagaaggtttcttatcagatttgcagctggtccaaagtgaggatgtattggttgatgattctagacttgaaatgaccttgatgcttggcattttgggtctaagtgatcaagacagatcacatactgcccagaagttcctaactcactgaaacatctgcctcaaattccaaatatctccacagtgccacttacacacacaatattcactaagggaaggaactatgggtaataataacagttatttactgagcaccttttttgtgccaggcacctaatcaattatcagtctcttttttaattcccccaatattctctagtatttaaaaaaggtaggtcacttactcaaagtctagggatctttggaacagtcaaaccagaatttgaacccagatattggggcccaaagtttgcattccatttgctgtgctgggcagccttcatgagctcagctcaaatgccttctttctgctcaggggctgagcttgcattccaaagtttgtattccatttgctgtgctgggcagccttcatgagctcagctcaaatcccttctttctgctcaggggctgagctcaagtagaggagctgggaaggaggagcgcctcaagactgggtcatgggaatttgcagtggccttgaaaatgtccatccaaatgttgggccaatcaatttccaatgtatctctgcagcaacccacagtagggaccaccacagtcacaactaccctctactaaccatctgcaggtatgt

SEQ ID NO: 77839 - DNA, 1032 bp, Homo sapiens
cattgctttgctacggctcggcaggcactaggatagaaggttcagtttgtgaggttccttcctgttgcagctagttttcatgtcgggttaccagcagggtgtgttaggatgctcccgagggggtcaggtgagggacacagggtcactctcttagtgagtcctgtgaaacactaacattaacatattaattcacaaagctctcagttaatgccagacctccaaattgaatcattctctgttgttctgatatgctctaagatctcttttggatgggagagtgtgaatgtagttgacttttagaatctgaggttattttatttatttttcgagtgtgggcttattcttgctttcacctgacaggttctctaacaccgtgaataccaaaaagaagggattccacggtgccttcaaaatgtacagctgtctttcctcccatgaaagcccagggatggagttggtttacttttgaatgcttcccattagcacacacggatgacatccagcccttgaaccatgtttaattgaaaatggcaaataaacattgcccagccggagctcccgtgcctggaagctaaattaaaaggaaaaatgaccagcttcctgactgtccacacggcctttccatatgtaacgtgggatgttgcatttggagttgcattaattttttatcattccttagtaattaacattgtatttctgctgataaaccccatcaatatggtgatttgattatcacaacataaaactactcattaaactccaattatgttgctcaggtataatttgattttgattggttagaaaaatgctgttgtgttgccttttttttcctactcccccttttaaaatatccagttaagtgctacatttacagtgctgctcatgttgcaaggcttctttagcgcaggacatgtcttaccatgtttactaagaacccattgatatttaggtgccaacagtggggatgacatttatgcaatctaatagtcagaaacctccagataattcacccttcccatccctggtgggaag

SEQ ID NO: 77840 - DNA, 1034 bp, Homo sapiens
ttgttgcgcaggctggagtgcaatggtgtgatcttggctcactgcaacctctgcctcccgggttcaagtcattctcatgcctcagcctcccgagtagctgggattatagctgccctccatgatgccctattttttttttgtatttttaatagagacggggttttaccacattggccaggctagtctcgaactcctgacctcaggtgatctgcctacctcagcctcccaaagtgctgggattacaggcgtgagccactgagcccagccggaattatatttcttgaaaacttcagagaatagtaattgccagaactctcctctgtgcctggtgtctagaaatattttgggagcggtatgatttctgaggcagaataatgctgaagagaggtggcatccaaaatagcacatttttttttttttaagtctgaacaagggcatttgcagtatgaaagtggaatgttaattgaaatcggactctgccaacaggagctttggaaggagcccaatcaggattagactaattaagacatctttaaaattgaacaggttggactgtcttaagaattgaaccaaatgaaaactatatgctcaggaatgtgactctggaggtttgaaaaagcaaaacaaacaaacatgaaaataattatggtaaagtcaaaggaaggaagaaaagatactagagccgtggacttgagcaagtcatcgtaaaacacctcgctggaaacaaaatattcttacatgtggctgacactggcagattgctttagtgttgggaagacagtctttcaaaccgaattggaaataagcccgctggtgttattttacaggccacgtcgggtgttttatagggaacatcttccccatacttgaactaccattccaaaggccaaaatatttaaacagaggtcatttaacattttaacataaagtgtcatgtacttgaaaaaaatggtttttaaatgttttaacatgttttctctctaggcttctcttcctttgtttcctcctgagccaatcaaaaagtctttatttta

SEQ ID NO: 77841 - DNA, 1527 bp, Homo sapiens
gcgccgctgcccagccccgggctcaacagcgccgccaagcgcatcaaggtggagaaggacctggagctgccgcccgccgcgctcatcccgtccgagaacgtgtactcgcagtggctggtgggctacgcggcgtcgcggcacttcatgaaggaccccttcctgggcttcacggacgcacgacagtcgcccttcgccacgtcgtccgagcactcgtccgagaacggcagcctgcgcttctccacgccgcccggggacctgctggacggcggcctctcgggccgcagcggcacggccagcggaggcagcaccccgcacctgggcggcccgggccccgggcggcccagctccaaggagggccgccgcagcgacacgtgcgagtactgcggcaaggtgttcaagaactgcagcaacttgacggtgcaccggcggagccacaccggcgagcggccttacaagtgcgagctgtgcaactacgcgtgcgcgcagagcagcaagctcacgcgccacatgaagacgcacgggcagatcggcaaggaggtgtaccgctgcgacatctgccagatgcccttcagcgtctacagcaccctggagaaacacatgaaaaagtggcacggcgagcacttgctgactaacgacgtcaaaatcgagcaggccgagaggagctaagcgcgcgggccccggcgccccgcacctgtacagtggaaccgttgccaaccgagagaatgctgacctgacttgcctccgtgtcaccgccaccccgcaccccgcgtgtccccggggcccaggggaggcggcactccaacctaacctgtgtctgcgaagtcctatggaaacccgagggttgattaaggcagtacaaattgtggagccttttaactgtgcaataatttctgtatttattgggttttgtaatttttttggcatgtgcaggtactttttattattattttttctgtttgaattcctttaagagattttgttgggtatccatcccttctttgttttttttttaacccggtagtagcctgagcaatgactcgcaagcaatgttagaggggaagcatatcttttaaattataatttggggggaggggtggtgctgcttttttgaaatttaagctaagcatgtgtaatttcttgtgaagaagccaacactcaaatgacttttaaagttgtttactttttcattccttccttttttttgtcctgaaataaaaagtggcatgcagttttttttttaattattttttaattttttttttggtttttgtttttggggtggggggtgtggatgtacagcggataacaatctttcaagtcgtagcactttgtttcagaactggaatggagatgtagcactcatgtcgtcccgagtcaagcggccttttctgtgttgatttcggctttcatattacataagggaaaccttgagtggtggtgctgggggaggcaccccacagactcagcgccgccagagatagggtttttggagggctcctctgggaaatggcccgacagcattctgag

SEQ ID NO: 77842 - DNA, 1139 bp, Homo sapiens
caagatctcgcatgccatgtcttctgctggatctgagctgggattcttgttcctcttgcatccccagctagtgagtgcaatgctgcaagacgggtcctgtctgcaccgtctcttttatgcagagcattaggagaggtacatactggaaaagcggcgagcttcacccccaggtgcaggagggcacttgcaggatgggttccggaggaaatgttcagcctccattttgtgattgtctcagtgatggacacagacgatgacgttttggctccataccacgagtgttcgctacaatttgctgcccgtgtcaccagagccagttgctaacacatcagcatttgccactgttcatcctgactgccctgtcagatgtgaggatgttctttcattgcttagtattctggcagaggactttgaaagactcatgtaggccagtgtgcccccgccttccctggggtctggaggtggaattccaagcggtgtttgggcgtgtgtgtgaggacacggggtgggggcagctgtcacagtagtagccggtcttcacagcatgttaaattttttctgttcctaggaatccatattcaggtgtacagtgctttctgcacagacggtggtgtaggaaacacgagaatttcctatagctaaaaatcccaaatgttgcagaggtattgcagctatttctcttaaaaaaaaaaaagtttgcaggatagtacagtttgatttgtgtttctgtacaactccctggaatcaaatattatcagaattggttgttctcaaaggggtcggtgatcttgcccccctccctgggaagattcggcaaggcctggagacatttttggtcctcgcaaccgggggaggtggatgctcctggcatctatctagtgggtgcaggcagaggatgttgctaaacatcctgcaatgcgcaggacagcccccaccgcccaaagaattaggatgtaaatgtcagtagtgccttgactgagaagccctggcctagatggtttcgggtgtggagcatcctcgagggctgggatttgccagggctgttacacagtccagccttgacagaattcctactactggaccgtattctcacaaacacgatctcccgtggcctcggaggtaatggagatcagaatccc

SEQ ID NO: 77843 - DNA, 1037 bp, Homo sapiens
gggggcagtggctttcttagccagaggctggctcagcacattaccaccagaggagaccatgtcttattggtcatagtaccactgctattaccatcagcacttacacccctcagtgggccacttgctttgaaaggtttttctcttctaaatggcatctattatttttgccatgagataatcagcatgatttcatggagttactgcaattctagccaaaagcaacacatcttgacatttttgttagtacgtgggctgaaatgaaaggtaaaatactgaggcccaggtagctagccccatccctgcccggagtgtgtctgctgctcttctgacccagcgtttatcagaacagcataacaagagcacaggctttaccgtgggcagctgtgcagccccaggcggatcccctatctcttcccgtcctcagtttcttcatctgtaaaatggtcatcatgacggtgggtactgcaggggttgttggagcagcatgtgaggtccttggtgtgcttagctcatgcctggcaggtggtaaggatttcataaagctttcttgttaccactgtgagtgttatttccccagttccgcctttgtcttggagagagctgaggtttcacggaatacatttggaacaggcagggatggttatcaattctgcagatggctgtgcccagaatgatatagacacgaaacttaaatagatccctgcggtgcccaatggacatctcctttctgacgtcatgaaagaggatagtttttaaatgaataaggaatctacacatctgagggataacactgataattacgatcattttggaactgtggagacggcatctttagcagacggattctggaggcggactgagtggttggccggtgaaaccagccatctccttgggtactgggtaccctgaagtccagagtggggaagggagctgccacagggggccctgggatctggtttcccatccctggatttggccacttcggtgtctacctcacgaggtccccagtgacgtgtcataccccgcaggctcgcttg

SEQ ID NO: 77844 - DNA, 1739 bp, Homo sapiens
atgatacccctgcggctggcaatgttgctttattttggggttgggtggctgtttcctgagcctgaaactgcacacctgggctaaccaaagaattgaacggttgaaacacagactgttttgggaaatctcgggtgcatgcagccatagttcagttttaatacttccctgttccaccgacagcctggactgtcttgtttctgaaggtggattcacaggcctagggtattcagatgtgaggcttgctggaatcgtttaactcctgccggagagggtaacctagaagccaccttccttgctagtgatcttcatagactggattttaagtttcattcctttataccttatggaaagcagcttgggaaggtggtcctctgaagggttcacatgcatccttttgttatattgagattttccttaatactgaacagttcttgacttgagtaggccttgagtgtgggcttgaaatttttcatggacgaaataggaaagttttcactatgatgggatttacagcaatggaatttgctctatatccagctaagtttcttgcgtgttttctgaacctctcccttttcaattttgccttcagttcttcctttctttgagtctggagtcccacctccgcctttaggcatgcagtacctctgccaggcatgcgctttccctcccttctctgcatgatgcacttttttttgagacggagtcttgttccatcacccaggctggagtgcagtggtgcgacctcggctcactgcaacctccgcctccaaggttcaagcaattctcctccctcagcctcccaagtagctgggactacaggcacctgccaccatgctggctaatttttgtatttttagtagagacgaggtttcaccatgttggccaggctggtcttgaactcctgacctcaggtgatgtgcatgccttggcctcccaaagtgctgggattacaggcgtgagccactgtgcatgatgcactcttattttccattctgaatgaacaccagggtctcttccttggagaatctttcctggtcccccgaggatgtcagcctctccctcctctgggttccacactgcttggcacacccttcactagtgactgagtggcctgaaccctgcctagatgttcctggagtcattggcctcttgctctagactttatgctccatgaggacagaccttcatttctttgtgtgtccctcctcttggcatagggcctggcacagagtagacacatcgtgcatctgtgaaggaagggaggaaggaacaagtgaataaatgttgttgagaagttgacggtgaagccgtgctctcatttcttgctgtaacgataccatttctgggttgccagatgcggtgaggtcttgggtcatcctgatactcttccagggcttccccaggaaagcacctcgggagcagggtgtcttctgcacacctaacacttaccctgggtcaggagggcgagtgtgcgggagtaaggacagccctgtggaatgagccaggcctgcactggatggagaccccttttgtggaatgctcttgggtatatatttgcctctccggttgcatttcccatttcccccgacctgcctcattctatagcaaacagagctgctttctgcgtcgcgtggcccagcgccctgcaccttgagtgtgctcacacagctccctaccttgcggacctttccctccttggcctgggcacctccggttctctgtgtctggcttgaacatta

SEQ ID NO: 77845 - DNA, 1109 bp, Homo sapiens
tgaggcactcagcaagtgctcagcaagggccagccattgttttgggggtgcaaagcccagtgcagtatcctggcttgggggactgtggtgtgtggtggggtgggcaaggatagaatgctgggtgcaccattcgcctgcagcattctggtctcatctgcaaaatggaggtgctgggggagccccacagaggaggtgtggggaatactggagagccctgggaagcttctcttccttttcttccagaggagccctgggtcagagtggaccactgtgttggtgtctgtggtggatttgacagtggggcttgaaagtacaggtcaggaagccaggtagttcgctccacatattttcctgagaacgcatcttggcttgctttaggtacttttcagtcccctgatcatctgggcagaagaggagtctgaaggctcgagttcctgcgccagcctcatccttgggctgtgcgacctcaggaagccctttctgcatgctgggcagccttcgttttcccatctgtgcacctgggggagatggctctgtgctaaggtgacttattggtggaaggagcaagggcaggctggctggacctgccttgttgcctggatggccttgggtagacgcgctttgttcctgagccttggcttctgcacttgggagctgaggtaagatgggatcgtggtaaggactgaccaaggtcctactggtcgggtgcccgtggttcaggcctgtctgcatcctcgggggttgctattatcgaaggccgtctgctccacggttgagactgcttttgagccaagtcatccaagcctgggtcccagctccttcacttcctgtaggaccagccacgcaacctggttgaatctcacctttctcccctgagtgacagggaaaatattagcttcctctgggggccattttgcagacaaggcctttcacaccgaaggacagattcagagaagttaagcaccttccccagggttgcccagctaataactgccgagtcatagctggttgggaatagaaccccatagtgttcagtcctttgttcaaggtgcatgggcaacactggatggggttctgggtgccccacagggcagaagccgagaaggaca

SEQ ID NO: 77846 - DNA, 1123 bp, Homo sapiens
gtgcacctggggatggctgacctagtctgcctgggaggaatgcagagagtcggaagcctgctagccccattcgccgaagagttttctaaaaccattgattaagtggaaagttttttgctgtgctgaccgggggtggggtggaacaggtattcttgtgtcttaggattagcccagatggggctgttctggtgagtgcaaagcagtgcatttcggaaggtgcggaaggtgcggaaggtgcactctgtttggaaggctgggggtatggctgagaatgtgtcgcgagacctttcataccattcaatccaggaattctacttccaggaccacggcctgaagactaaccagggacacgcataggctcatacgtatacacctgcagcgtccctataatcatggaaaagagagtggtgaaataaacatgccccagccatagggtggaacatcacccagcaattgaaaataatgatgtcagggcacttctagcgatgtgggaaaatgtcaagcacaaatcaaaactgtatacagcaggagctcagctgtttgaactgtatacagcaagagctcagccgttcgatgtctgtgtgttcttgtctatctgcatccacaggaaagggaccgaaaggaaacattgacattttaagagaagttattttgatggattatatttccttccatatccttgtttgtacctgtaaaggtttccacaagaagaaaagtttccttgaaaatcagacagtgcaatgacactgatctcaaaagttgtagccactttttctcagtggaaagaaaagtttctagctgggcaccctgcatcggcagcctctgccaaccttgtggtttcattagctcctcctcccacttcccagaaaaccatccagcccttcgatggatcagggggatacacactaagcccacgcgtgtcagccagctgtgatggatagcttcccgacacagcccgcgtcctgtgcatttgggaggcatcgtctctttattgctctgatttccatacctggcttgcggcttcaaattggaagtcaggggcctgcacagcagagtctgctgtcctcttctggggctgggggtgcatgacccagaaagggggacacttggtgaggatgtctcc

SEQ ID NO: 77847 - DNA, 1044 bp, Homo sapiens
gtggctgactaggcctgttctgctccctgcggccatggggaacgagaacgggaacacatggggcagtggagcagcccttgccttccagatctgtggttggggaaagccacagcctcagtttgtcttctaggaagtgggagttgagatagggtgtggaagggcccagcttcgtgccacagtggggtgcggacattgaacagctgagagccgggatgaggggaccctgtgtatttcttagtggaaacagcttttcaccggctgtccgaccccagagcacttgggctgtgaggccctggattcttggcgggggtttgaattagatttgcctggtttgactcccttcctgaccagagaccagaacccagagaggagaagggacacttctgggtcactcagcaggggcagcgctgcatgagaccccaggcttgttctaccggctccaggtggcctcggcctcgctattccctgcctgagctaggctgaatgaggctgaggctggggaggttggactgccctgtagccaggaggactgttagacttgagctctagtggccgacgacaggtggcctctgctctctccccagggctctgtgggccctgcctccctctctctccctcccatccccatgagtcctcagggcactccttgcgttgccttgcgcatggcttcaggaggaagctgtcttgtttgtcatttctggcccagggctgggctgtcctcttctacttcaaggcacattttggctgatcatgaaattgctacccagcaccttctctgatggaagggcagtgagctgacaagctgggaggctcaagtgtcctcctcctgggataggcctattaaaagaaaaagcaggagaaaagaactcttagaggctcctacagcatgcagagctttcaccagaaacaagtgatcctggcgcttataaagaggccagtggctggccatgctcacacctgtaatctcagcactttgggaggctgaggtggtaggatggcttgagtccaggagtttgagaccagcctgggcgatatagtgagatc

SEQ ID NO: 77848 - DNA, 1031 bp, Homo sapiens
ggggcttgagctgcacatgctgcagctgtctgaccaacctggaaggccacctctctggctttgggtgcaccgtttgatttttggaaattttggggagatccattttgcttttgcttctttattcagcaagttgctctagcccccccagtgctcaggtgaatccctgggtaggaggagcagttgcttgggttgatggcacctcctggaaaagaagacaaagtgtagggatgatgagaatgagtggaagtcggtgggcaggatgggagaagctttgggcttggaatctgatccaaagtgtggtttctgagtttggaaccaactcttctgctgggatgtgtggaggggggagtggggatgggcaggggttcaagttcatttacttgtatcaagttgaagtttcttcttcttataagtaagaagcaaaagcccacatagatgatgagaaagacaggctggaaaagcagactttgcttactcattaaattttctgtaaaataaacacaagtttagaaccgaggaaccagtggtggggggtactccagagggcagggcggagtttggtgtgaacctctgggtgggaaatgcaccagcaggtcagagtcacacattcacgtgaaagaggtcaggtgcagccctgagaagtaaggacgatggactcgaggaaccaggtggaggggggtgtgtgtgcacgtgtgtttgtgcatgagtgcattgtgtacatgtgaatgcatgtgcatgtgtacatgcatgtgtgcacatatgtctgtgtgcacacgagtgcatgtgtgagtgtgcatgtgtgtgcccatggatgcatgagtggcattggcaattctacgctataccctgagaccaggctctgtggccggctgccatgaggaggaggacagaacagcaaaaggcacaggccaggatggagtgaggggcccagacaacacccaagtacatgactctgccctgggcccagaggctgtccagctgcaggctctcatggggacccctttactcccctggttgcccatgggcttggg

SEQ ID NO: 77849 - DNA, 2112 bp, Homo sapiens
ttttttaatatttaaatgtattttaggttccgggatacatgtgtagaatgtgcaggtttgttacataggtaaacgtgtgccatggtggtttgctgcatgtttttttttttttctttgagatagggtcttgctctgtcacccaggctggagtgcagtggcgtgatcatagctcacagcagcctcaaccttctgggctcaagtgatcctcctgtctcagcctcctaagtagctgggattatgggcatgcaccaccatgcccagctaattttttaaaattttttgtagagacagggtcttgctatgtttcccaggctgttgttctcaaactcctggcctcaaatgatcctctctcttcggcctcccaaaacactgggattacagacatgagccaccacacctggccacacctggattcagattttatgtagaagttgccactcattggaatctggagtggagggcagtaggctggagtgtccctgggaggcagggtctttgtgggaattgaagctaggaacaggcagggccgtggatggggggacactcactgtgccagaagggaaggggaacttctgtgctgtttcaccaagggggtcagtaatatcctctccactaattaggcagctgacaaatggtgacctgttgttctgacacttgagcccaggttctgcctgccctctgtggggtctgaggactgggtctagggagagggaggagtcagtgtcctggggccaagcctctcggaggagcaccggagggctgggatgtgtcaccttgagtgttccagcatcagaagcaagatgctggccccagcagtacccttgtgcctgggcgcacggggcagcccctcggggggcccttgccaggggcccctgtgccttgttgccagatgctctccaagcagtgccccagagaggggacaggatgtgccccaagtccctgcgctgagctaggacacgtgtggctgacgctggactctatgccttccccttagacctttgtgctctgcccaagctcatggactctgcagcctgtggcgtccgggagtgtgggagacaggcaccggctggggttctgcatttgtacttttggggtagtaggacttaccattgcccgtggagtaaaatgagtgtttcttagacaatatttccctgagcccagattcctcagaagtgaaaattaagttcttctattaaaaacatgagtcataccagtccagatgagagtcattttggtgttcctcgaatttttggaggggaaacgtcgcattcatgttaatccattcaattatacctcattgctgaataacgtgccgggcattctgggtggcagcctctgctgtctgattagtcggggctgtgtctgctgcacttgagagggagcagctcggggccttcatcctcttttgtgctggcacacccaggtcggccgagcctccggggctcccttcttcattccaggggctcatcgagagcctgggcatggtctcagcatctgattcttgcaaatgattcctgcccagctgaaaagcctccctgtctgtctgctcatgtgagttttaagcagatggcagtaggtcccccactctgcactggcacagggtctagggtcccctctcccctggtgggcatcctgctcaggtgaaggtggagacaggcttggttttgttccctcagtgatgttattttatcctcccagaagccaccaatgaccaagactggaaccaaagcaggaaatcaaagcaaagtatcactgggtttggggacagacccagagacttcttgtctaaagacagcacatcctgctttgggcaagggagccaagcaggtgggggaggttggagagcatcatggccctgggatcagccctctgcagtgcagtctttctgcctctcacatgggccctgtcagggcctgggtcacaggcaagtggacacttgcctccagcttcagctcctgggggtggggcgtggaggggttgttctctgggaagtctctgctgaggtcggggctgaggtccgtgtcacctgtgccctccccgatgggcccctgtacttacccatggagacacctatcacggggtgggtctcctttcctgtctccctggctgtcc

SEQ ID NO: 77850 - DNA, 1658 bp, Homo sapiens
cagaaatatttttagtttgcatcttttaagacatggtgcatgttttcagggagtggagttcggagcccactggcatgtgatgatgtcaccaagtcagagcacacctgaagcctgtggggacggggtggtggcaggcggcggggtcagaggttaaggagcccagttctgagcaccatttgtctgagcatgcatttgaggagaggtgttccaccagcctaccgtggcttctgtaggtgctggagcctggggtgtcctggctacccccagtctggaagccagtagcattgagagaacagcagctggctcagctcagaggccagggggtgggggttccccctggataaggtggacctgacagggtctgagcggacctgcaagaaataaccaagacttgagggaaaacattccacggctttttcatttggagccaaacattgcctcatgtaattttctccctggtttttcccattgcctctgccagggtccttgggcctggcacagacccgtaataaaaggccgtgtgtgtgtgtgtgtgtgtgtgtgtgtgtgtctgtatgtgtgtgtatatttgtactcgtgagagtgtatatgtgcatatatgtgcatgcgtgtacacgtgtatatgtaagtgtatgtatttgtgagtgtgtttgtatgtgagtatttgcatatgtcagcatatgtgtatgtgtggatgtgcatatgtgtacatgtctgagtgtatatgtgagcatgcatgtgtatacatgtgagggtatatatacatatttgtatatatgtgtgcatatacatacgtatttgtgtgtgcacatatgtgtatgtgtatttgcatgtcagtgtgtgaatgtgggggtgtgcatgtgtgtacatgactaagtgtatatatgtgcatgcatgtgtatatgtgtagatgtgagagcatatgtgcatatgtatttgtacatacacgcgtatttgtgtgtatgcacacacgtgtgtgcagatgtgtgtacacatgtggatatttgtgcatgtgagtacatatgtatatgtctgagtgtatatggtatctgtgcacatatgtgtatgtatgcgtgtgtgtgtgtatgagtgtttttgtgtgtgagcatgtatgtgcatatgtgcatgttgagtgtatatgtgtatgtgtctgtgtgcagtccagggagaactatcagcacagaacaggcccctcccagcctcccaagctctgtgtttatggtgagggcacttgtgattatttttcttccctgaactttctgattcttcctggatttgtggtgtgtgtccatcctgaggcctgctgaggcctttgagggcgagtctctctctagagctgaattcaccttcttagtacctcctgggggagactgagcccccgcccccaatctcagagggagcccacagtccacagtgctgggaaatgtggccagtctggtgtgtgacccaccaggagtggctgcagagagaataagggctgtggaagtggacggctgggttcaaatcccgactcggatgtctctgagctttggccttgggcaggtagcccagcctgtgtgtgcatctggttccccacctgtggcatgagaatagcaccatctcacgactgagagtgggcggctagcagtgataatggggcgctgtgctaagaagcgttc

SEQ ID NO: 77851 - DNA, 1021 bp, Homo sapiens
tgactctgctgaaggaaggtggggctttgagtctaggcgttcctgggaactgaaatttcttccctgagaaatttcacatagaggatttggcacagtggctgtggggtcaagagcctcagactgtgttcctggtctgtgcttcagctggccaggggccctaaagaagtcattgcctcagtttccccttctgtaaaaatacacgtatgtatgtatatgtgtatgtatgcaacatttgaaaacgaggctcgtgttattttctgagacaggtcagtgtggagctgctgtgggtggagtgagcatggggctagctaggtttccagggcagggcgtgggacattcagagaatggtttggacactcctgggctttgtgccccgcatgccagaatccttccctgttctgaggcttccatgattggaaagcggtggtcaagtgtatgagactgcttgggggtgaaggctgttctgccccatgtagtcatttcccctctccatccctcagtttccccatctataaaatggagctaaggataggacaggctctgaagggtcgttctggggatcgtgtgagatcatacgggccaggtgctgagaacaacaccatgtgctgagtgagccctgtcgaagttagagtccatgcacgagcggaatgggattcacgacattgagactctgtcaggtctcacttcaagctggatcttcgctttccattcttaaaagtatttagccttttggctggctcagatcatgtaccagctttgggaggtggaataggaactgagacacttcattgcatatttaaaagctgcaaatggtcatcagccacagtgattaatatgtgtacttggtgaagttcaaggtctcacacaagaacacacaggatcccagctcagggaagtggaagtgtttggctttaatagagggagtcagttgcagtcattagtatatgctgaaatcacagggcaatcttgtaaagttaaattcaatttacttttctactgaaattgtgcttgctgtgttatt

SEQ ID NO: 77852 - DNA, 1094 bp, Homo sapiens
ccatccatccatccatgcatccatccatccatccatccatccatccatccatccattcatccatgtagccatccatccatccatgcatccatccatgcatccatccatccacccatccgttcatccatccatccatccatccatttattcattctttagcttgaagccatttggaaggcacctagcttgtagcactgtgcacacacaggaagagtcggcaggcaggtccctgccctcgtgcagcttgcagtctggtggtggggaggacagggagtggggacctgcagaaggggaaggaggagcagggagggagggagtggtggaggtgggatttgatcccaggctctccatccagcacctgccacatctttggctttggctcttcttctggcattaaaggcctttttagattttaggccttgagagctgccaggactcagagcctgtgagcaaccagtgcttgattgcagtgctctgggagggacgtgaggaagggcagtgtcctgttcctggggctgggactgcaggaggctgagcccctaggactgctccaggagacccttctaaggggcctgctcttacctcctgccctctgccaccatgtctggtacagttctcttttttcattcggtcccagttcattggccctcaccagcttgcaccaccatgtttcccgatcaatttgaatacctgaaactatcctattctggtgttttttgtccctttgtgatttgtgtccctggcactgggctgtttgcttaagtgtttttagtgcctgtttaattagtagttggaatggagtcattaagttcccagtaacccgttaggaagaagcaggcctttgtaaagatggaatgggcctgctgtccttacctggttttgtcccttttcggatcaggatgcattgaacccatctcttcaagttaacatggagaaccccagtgtaaacgtgtttcacacaggttaattgcgtgcctgttaccgcatctgcagttatttatagaaggatgtgattttacggggggagaaaaccacacaggtatgtgtgtttgtgcacaccctgggctggcagcatcccagggggccctgcctcc

SEQ ID NO: 77853 - DNA, 1028 bp, Homo sapiens
agctgcctcctcccaccctcactcatccgtgatcacttcacctctgcgtgccctgggcgctctcccgccctgcctccccctgccgtgctgcagcgcgcgcccggtctcgggtgacgggactcagggtgagggtcagacggaggctccctttggatgccagtgtcagttgtcaggtaacagacgacgccgcggtggggggcgggcccccgggatggcggggtgtgccatgggcagcgctggagcaaggtggggacccagggaggaagggcagctcccacccagaaggctttttggggtgccaggggaagtggtaaagaatgttcgctgaactatgagccagggcccggtgcccctcggtcaggagtcccccacggtgcccccacccgttctgagagtcttgctcccagaatgcattccccagcctcccaatcccgcttctttgggttgtttagcgacagcttaattggataacacttaacatctgaggttttcttcggcccttgccactgccaccccctcccccaccccagacaatcccctgccccgccaagaccaggctaggggaagattccttggttgactgtgtacattgctggagccgtccaaaatgctgagtttctctttgggagaatgtgttgcccattagctttgaaaaagaaaaaaagtggctcaaaaggagcctcttaaaaagctgtggccacgagagggagtgaaacactgtgaggtgtgtgaggggtgggggcgggggctgagtacctgctgtgcgtccggctctgggccagacccagacacagctgtttgtgccgactcatcctgctctcccgggcgggcggtgtggctgcccattctacagatgggcagatgggccggtgtggtgacacaaactggcctctacctgccctgcttctccccaagtggaacccaagatcttattctgcctagggtctctgggaatccttggggtccttgggaattcaagggcaaagggccctctcacaagtctgtccccccggcatctcggcagggcc

SEQ ID NO: 77854 - DNA, 1032 bp, Homo sapiens
gccaacaaccaaaaaaaagaaaaaaaaatcaacaatgcaagaataaatttctctggttggaaaacaactttgcaaacttgtcaaacagtccttgtggcttgctgctgccaccgctgtagcgtccaccagcgccacctccttccccccgctgtccttcccccaccaaaaaaagaaaaaagaaaaaaaaaagaagcccaagataaaagagaggggggagagaaaaataaataaataaataaataaaaagggagaaacttgagcctcagagatgaatatttgtcaagagagttgacgtaagtttcatttgcataatgactttgtacttctgcattaataaaatttgcatatgaagccatgttaattactcctgatcatgctttttgcattcatgcatagtaattttctccgacttgtgagaattaatgtcttggcatggggggagggggcgcggggactgtcaggttcccttgccagtgtccctcactcacacgcgctgcctccctggctgtctccttccttgatctatgactcatttctgcactatcagtaggagttctcagcttaaaaaaatgtatcaattgaaaggcaccagtagggagaaaaatactcgtctcctgcacagtgtattccagaccacctctctccagctctgaacatggaatctgtaatcctcccatttgggaggggacgccccagaggcttcaggggtggggaaggctcgaattccccctgaaacccggatggggcttttccaggcgtttttgtgtctccacgctcctcggcggtgggcgtgttcgctgggtgagtgcgcatgtgtgaggaacggagcaggagcctctgcaaagtccctctagaagagagacgggtgacagacccctgtggaatgcttaaacccatgaaggcatcaagaatgagcttatctagcattgccctgttttggagcctaagaagaggcattttaggggccttatttttagactttttttttttttttttttttttttgtgcatagacctccaaagccagcgtttt

SEQ ID NO: 77855 - DNA, 1045 bp, Homo sapiens
gtaggcacccaatctgaagatgagtttcctggtttttgccttgtgtgacatgtgagttctatcttaactgtgtatttccactcccacccccagctctaaattaatgaagaaataggaacatatctgagggatgcctggccaagcttgtcattggagtctggcccctaagttccatctgggaaagggctacagggtcccaacccgaagtcccacattctttatgcttggtatccagatgatttatctaacactttacttcggtttgcagcctgccttcactcttcgttgagttattcttcatgcagatgacatgtagtatactgtttgtggctctggacgcaactggagagaaaattactgaaggatcttgaattaaattgtcttagaaaacagagactgctgaaggttgaagcagctaccacacctctgatcagaaaacctaaattgagaggaaaaggggcaattcctccattaggtattgactggctgattttgctggtgagatttggagaatctctcagttgcaatttgtccttgccctctgtggactctggttggatgcgcgcaagacatcttaacatgtccacgttgctgatagatgagtgtttgtgtgtgtatgtgcacatgcatatgtatatgtatatagaacctctcttatagataatagaagtgcatgcacacatttttctaaccagtgcgacacatggcttcaccttctgttgtcctcaggcctgcccattccaggatggtgggccccaatttggtggaccctgcctgcctgaggtcacccagaggagttatattcatttttgtatctgtgtcctgaagccgtgatgcctaggagcaaaggaatgatcagcgtcccggctggaggacaagtgtttgtggtttatttgcatttcagtagttcggaacactgcaggattttccccgagagacaagcaaaagaagagtccaagctgcgtgtccctcactgcgcccccctaccccctgcaaatgcccacttaggggctggaacggccagccccctccacctccgtggttc

SEQ ID NO: 77856 - DNA, 1009 bp, Homo sapiens
ggagcctccgggagttcccttgtacaaaaatgtgatcatccaggggcaacagccccatctcaaagtggggatttcgtggggaccttagtttctttccgagtgggagaagagtaagcccgcttttctcaaggacaaaagtgttttcccaattgtgtgggaatggaaccctccactggagtgggacaccgaagctcctggaattacagggatttaatgtcagtcctcctttcagcctgacttctcttaggataacctcttccaacaagaatttgtatgcaaatcgtcaccttgctaggagtctctagttttgtgtgttaaaaattggcctccaattgtttaaagcacttcaacaggcccttaaaggcccagaaaagcagtggttggacgcccagcctgtccaccacaaagctcttaagaaaatgttcaaacattttcccaaagctgttactctggaaataaaactgtatactgttcgcctgtagccgattaaaagtttaccttcactgtgacagcttttccaggctaggattggacccacatctctattttccatttttcagaaataaatctaaaccaggcagaattgatttgctataacaagagtcaaggtagtattaaaaatatgcgtatacctatatacttataatatgaaatagtatgttacacttgctgggctctcaaggcgagtattgtgtaaacggcaccgtcatggcgttttgagtaagagttgattttaaaatctcagatttagctaacccgaactttgagcagccagcttttctggtagaggaatctgaaggcatttgtcaatttattttttgcaagccctccggaaaaggtaacaaattcaacacttgggagctcaaagctactgccagtcctggacaggaaggttttcatatctgtctgaacttgctcgctgatttctcagacgtccatttataacagtgggtctaacaagatagaatccgcctttgaatatctgtaaatacgggtaaagatcacagtc

SEQ ID NO: 77857 - DNA, 1028 bp, Homo sapiens
gacatcctggtttttatagagcacaaaaggaagcagtgtggcggcagcttgggtgcctgctatgacaaggccctggacaaggacagcccgccaccctcctcacgctccgagctcaggaaagtgtccgagccggtggagatcgggatccaagtcacccccgacgaagatgaccacctgctctcacccacgaaaggcatctgtcccaagcaggagaacattgcaggtatgggatgctgcgcttgcctggttgctgtggaagccacctcctgggtcccatgccctctgcctgagtgtgctggtgcaggggaaggcccaggggcttccaggatggcctctgggccaccagccggggctccccctttctgagggtccaccatccaggtgaccttcaggaggagacaggcctggggctcggggaggcccaaatggctgatggctgcttgcttttggtgaggggactctgtctcgggggctaatccagaggtggtcagaagcacagaatgaaaatttggaagtctggttggccctctctttgctactgatcttggcttagtccctgattttgaagccagacagttttgggttagagtttgtcttcacaacttggacatgttagtttgcccatctgtgaaatggagctaaggaaacccacctcattagggttgctgtgaggacgaatgagctgttgcatgcggcatgacctggtaggcacttaggaatgggagtgctcattctctcccctctcctttctctctggactcagtttcccatgtgtgaaatgaggagttaggccccctgatctcagaggttgcttctgacattgcccgaccccaggggccggtcccaggcaggggtgtgggaacttgttggagcactgtgcccgttgggggaggttggatatgccctttgacatgctcactcatttgaccactgggacagctggttttaccaccttgagaacaggtctagggcccctctgtccccaggcgtgggtctgctcaccacagtgagttagcatgaagtccctc

SEQ ID NO: 77858 - DNA, 1028 bp, Homo sapiens
ctttttgattaagattgccatcttgcttttaggcaaaacaaaccaattaacaaacaaccacaagaaagggagaagaggtgcctgtgggagattttgcagacctattgtgggtataggtattttcttcctggggaagaattcagttcccgtctcagctgtacttttgtgggcctgtcatcttgatgaccagaatgaaagcttgctctgcctcctgccagccagaattggtggcgggacttggggatacagcgtgaaggtggggaagttgcacagcagaaaacagaattgaagttgggaaactctagagtctgggcaaaatgtttggttttttctcttaaaaaaaataacaccccattaccaaaagaaaaggtaaggtggcaaccttatttttaatagtttgaaatgatgataatcctaattatataaaaatatatatataaacacacatatatatagtgatttctaaagatttgtttacttttgtgttttgttttactgtactaagaacttgtcctttctccttgaatcaaagtaggacatgcatcatcctcctaattttaaatgttggctctgattttaaagtggtgcatttgattccagccttggtaatggagagtttgcaaacacacagcggcccacagcttcacgtggtggtgtgcagtgtgaggcagctccttggctttcctggttttcacaacaagctagagattttcaaagctacacttttgagtaaaaacccttattaaaagaaaaacatgattaatatttttgtctattcctttttttggagtgggacaggccctgtgagtttagcttttacacaatccatcttactgcccaagcattgttggaaccttgacctcctgccctgggctgtgctaacctgggggctactgagacatagccgtggggcccagaggactgtaggagcccccctcatcagcgtgcccatctatgcaggcagcgggaactcaagaaaaggagtccttaggatttaggggaaggaaaaggttgggaccatgtccttg

SEQ ID NO: 77859 - DNA, 1036 bp, Homo sapiens
ttttaagattattcaatacttttttataatttataattcacgtgatttcacaaacatgttttcatttgtgctttttaagttcactactgagccactaacttcaaatacatctttctcatttattcgttccttcactgatgccattcacccacgtgctgccctggggctacatcagtgcccaagatagacaggatgatttttaaatcagtgaagttccctggcagatggggtagcactgtttgatttaggctgttctttcttgttttgtaacatttccattgaggtataatttacatacaatgaaaggcatacttctgaagcgtacgttttgatgtgagtgtctggtcatgcgaccacctgcccagtcaagtgttagaacctcccgtcaccccaaaaagttccctcatgtccccatccccagccgttgtgccctctgtctctatagttttgctggtttagacttcttgtaattaattttgctcttgttttccaggaagataaatccgtcttgaaaaaccacgatctttctgttcgtgcaaaaatggccatcaaattgcgcttaggtgagaaagagattttggaaaaagcagtaaagagtgcagctgtcaaccgggaatactatcgccaacagatggaggaaaaggctccgcttcccaaatatgaagagagtaaccttgggctgttggagagcagcgtgggggactcgaggctccccctggtcttgagaaacctcgaggaggaggctggagtgcaggatgccttgaacatcagagaggcaatcagcaaagcaaaggccacagaaaacgggcttgtaaacggtgaaaactctatccctaatgggaccaggtccgaaaatgaaagtctcaatcaagaaagtaaaagagcagttgaagacgccaaaggatcttcttcagacagcactgctggagttaaggagtagctcgaggtgaagctggatgggggatccagtggagcaggagttgacggacagtccgttcacatcgctgtgtttccttgttaacatttttctttctgc

SEQ ID NO: 77860 - DNA, 1064 bp, Homo sapiens
ttagagtaaataacattgcaaacagaatctgtgtagaacacaaaatgttcctggctacagcctcttatttcatgcccagaaagagttaagtatttgtattgagcatctacttttatattagcttaaaacaagtcatttggggtttcttatgctgagatttgacctctcgtggttgtgtttttatttttcatcctaaaatgtatcttacaaatttcctggccctgaggtttcatttttaagagagagaaagagagagagagagagagagagagagagagagagtgtgtgtgtgtgtgtgtgtgtgtgtatgttttgctgttgttaactaccttaaatcctgtacagaacagtctgagtaggaatgagtaaatgagtgtttgagtgagtgaacagacgaacaagtgttctggaaggaagctgcccaagcacttccttggtcggaggaagcagtcatggcccatgtgggggaagctgctgtgctcggcggtcactggctttggttttaatgtctggatccagggagcagtgcagcacaagtccagggtttgacgtcatgctggaggcagaaaaaacctagtcccgaaacaggagaggcagttcacacaccaaccgcagaacccaaactgagatacagtcattgttcctcataagcaaccctgtcgctagatttacggttattcaagtgggagcttttggtgctttttgtacttgggtaatggttcatcaattcaatgtaatgaacacgagttaaggggttaactgtgagcttttcttgcatatatatggatacagaattgaatgttgcagttcatgtactcaaggcatttataattaagagaggtgatggtgatgatattccttgaatttgtgaagcattcactgtgcgccaggcatgatgctacatttggtacatgctcagttttaatcccatcagccttgattgggaagtgctcccattttactgatgtagattccacttcaaagagggtaagtattagctgggcgtggtagcacgtgcctctagtcccagctactcgggaggctgaggtaggaggattgtttga

SEQ ID NO: 77861 - DNA, 1711 bp, Homo sapiens
actgctttacagttccagaagagaccctgctgtattaaaaggacaggaagaacttggtgaattttaaaatacagtcttatagtaatagccttgctgtcctttggaaggagaagaggtttataatagaggcctggtgaccccaggtcacctggggtcctttgagtactagtaaggcctttggtggtactttctcctggcctcccctctcctctccacacggtggtggaagtgggtgcttggtctcagacagtttggaaagttgggaaaattgcacagcttcacccttgcaacctataccaaacaggtgtatcaatactttcagctatttagtgtctaaatgtaaagtagcactaagcctctgccctgccctgtgttaagaatacatgccaagtttgtctaatgcccttttcttttttctttactgcatctcagatttacattttttatggcactcgatccaacgcagagtttgtgatccacagtggttttttctttgacaataactcacacgacagagtgaaaataaagcttggagtgagtaaaagtgacagactctacgccatgaaggccgaggtcttggctcgtgccggcatccccacgtacgtagaaaaacatcggttggccctttcttgcagtacttgaactatttccagttgcatagtgtttaattggtgtgttaataaaacttctctccagtagtttgtcttaatccgtttatccccgtggcacagcaaatttaagccatggcgacgcttggtggcttaccagcgttttcaggtaaacataattgtgtcgttgggcgcattcacagtcagttctgggggatatggcctgaaatcctcattaagttaaataactactttcgtatcattcatgtctttcaccttgaaaaggttaatggcctggatcaatttgtttcatttaattcgttgctaccattagtttctgtaatgaagtcatgatcctcagtgatttcaagaatttctagttaagttctttaagattttcttgcatttgaggcataaaatgataaagaagacaggaattaggattcattagttctccagggaatagaggaaccattcttaatgaaaatggattatgcagaccttttttttattgaacttgtcaatatttgattaatgattaaagtgtgaactcaacataaattattgttaacactttttaaaaaccatgtgtatgtttaatttttgaatgtattatgtgcaacctgagattacagctgttaggctctaggaaaagcttgtgaggatggtctccaattctggatgtccgcttgcctccgccccagcctgcggccttttgcaggggctgaaaatcgtgctcacagttgagatgaggagctggaatgacccattccagctcagctctccttgaggacaaccacacgtgctgtagacttaaggaatctcagtttggagcaagtgggtaaccgcagcagggtgactgatcttgctttctgcttttatcagttccagtgtttttgcattgcattttaccgagccgcccatctctgctcagcttttggcttttctccgagtattctgtatgactgaaggtaagtcatttcaggaaaaaagagatgttgacttttttctttttaaatcatgaaagtgtaaagcatagggattcagattaaaggtaaagtggattaaaactacagtacttttgggaagagagaagatacaat

SEQ ID NO: 77862 - DNA, 1114 bp, Homo sapiens
ttcctctaacctccctcctgtttgtgctgctggcaggtccctgtgtacctgtactgccagcaccctgggagtgcctggactccctcctgggagttcatgatatgggcagcttctcattccactttgttgtcaaggtgatgttttggggtcagaaaagtacatccgatgttgggcaggaacttcatggagttgattttcattcaattgaagtgtttaaaatgttctgcgagtgaaatgttctagaatacttggcttcatttatttctcattgctgcatatttatcactggtctttgcagatcagaagcatgaaggaaatttagacatatggttaataaaccatatttattcttgggatattgagtttaaagattagtgttacatggccttccatcccaaaatgccattccctagactcagaagtcatcttttgaatccaagctattgataccttattagcaaggagcacttgtagctgctgtgaatctttgattctccaggataaaatgagtaggtcaaaaagtaatcagtgaccatcgacagacaacctaagagattgggcgctgctctaaaagacaggactctgagaaggaggttttaatagaagctggggaccctttcctttcccctgcgggttcatgcatcacgtgaatattctcaaagaccacttcaggttttaggttctgtgtgctgagcactcgggacacagagatcaacaaggggctccagcttccaagtgtgaccgacggggaggcaggtgcacagataacgtgacttgggctggagcgcataaggactgggctgtgggagtgcacaggagggcagggtaaggaggggcttccctgagaagccaggccacaacaggagtagaaggtagtgtcaggcaggagggaactgggatggcaggtgggtggcagttcctgaagctggagggaagcgtgagccgcctccttattcggccgtgctcaggaacttggggtttattccgaaggcagagcggaatcataggaagattttgaacaggagagtgacatcgtacaattagcaactccagaaggacagtattggattttgagactaggttccaagagttggaaggtttttgcaaataacaa

SEQ ID NO: 77863 - DNA, 3156 bp, Homo sapiens
tttaattcactgcacagtgtaataaaaaagtcacattttacatttcttacaattcacagaggatttctgatcagaaaggagttttatggtttgcttttcaatgaggcttaaaataggtgcagagtcagcatttgggcaaaagagggttgggttggggggtgtcggggagtggattttgtgagtcacgaagatccgggaaggggcctgagccctgcgcaaagccgtccttctggctctgcttcttgggaacagtctgccttaaacactcactcctgcatttcccctggctctttcaaaccctgggtttgtttttaaatgatgatgaaggccaaacattacctttgttacttaggaaaagactttgtacgtttgtaagagatcaaacctaaatttttggttatgttatttcttactgcaattggcttttaaatgttccaaccttaagtcaccatttatcttgttataggtgggcagtctcttctgttatgacgaggcaaaaccaaattcccacagaggatggttcccgcgtgaccctggctctgattcctttatgggatatgtgtaaccacaccaacggcctggtaacgacctcttcccctgtgttgtgttgaatctgggaggctgttgttgctaagctttgggagggggctgttattccacctacccatcgtactccccccgttgcctccctccaaaaggaacaaacaaaaccgaaccggccactcctccccaccgcccacagatagaagctggtatttttcttttactgcattgactaatactgaaaactgggagcttgaatcttataccattttcaaaagccacagtgaactacatgtgtttgctaagccataattccagcctcaacattcattttcttatcttattgtaccacagactaaaccaaagtttctttttacttattctctttaaaatgctcatttattggggaaaaaaaatcatatttctcattttcccttttgtgtcttcttttctttgctgacactctgtttccagttctgtacctttgattctttcttgtccccggtcccttcccctgatgggctgacgaatccctggccatgtttatgaacctgtgtttgttacttgctttccctggtgctgtggggcgggaggagggggctcatgccttgggctcctcgcccttgactgcaggagtcagctggcatcatcatacctgggaagcctggggaggaggaagttgtattattatggtcccccacagctgggaagaggtggaggcaggctctgtttctccacattcttcggattccgggcagcagcataggtgaagcgctctgtgctctgtgagagggttgtctgataaagatttcctgatattagtaggcagaaataagatacatttcagatcattttgaaatatcatactttatactagtatactgtttgattaggttttatgttcatcttttctctgtcagctttccttgttattagcagtattataaatagaataaagaaatgccgtgaatgattatttcacattgaattccctggaatggccagaacacacgtagtgtgcgccagacactgaagacagaatatcctagtgctaatttgggaaggtctagcaacaagtatgttcttgaatcttaaaagtatttaaattgtggcaagaaagaatagttccatttttataattacattttggccttaatttagatatggttaatttaattagtaatgaatactaaaacataatagcatgttttataacttattttcattaatgaatataattttacattttttgttttgtttttcttcagagttattttaaattgacggtaagcttgaaatttaagaaatcttcaaatagcttttaatatctgactgtagtgtttttcttcttctttttttgaatgagatcatttgttcccaaactcaattgattattagagttctttttaataaaattaaagcaataatgcttggctttactctaaacaaacaaaaagaattaacccaggaacctctgtagcaaggtgagcagtgccctacccccagccccacagtccacctgatggtgttgaggccgccaccaggccaccgtggtccctagcgaagcttccatccattggcacctcacacactcatctgcacattggtttttgtttagcttccatgtaaatgggataaaacaattcctttttccctaccaagtgttaaaaaaaaaagaggtttatctcaaaataaagaaattgatgacaaccagtgctgtgttttccctaatacgactacatactttttaacctaccacagtcctggcagaaacattgctaacctgtagaaggtttattcaggatgctggtactttgtcttacagtggttatgttcctgacattctgcactctgcactcttgttgaactgtttcccattgtaattataagatctcatgggaaatttactggagtagaatttaagaaattctattttttaacactacaaagttgtttatgatatatattacagttaatgtctttttaaaaataaagtcttgaaatcaaggcttggcttttaagacgagattttcttttttgtgtgtgtctatcctgacgatcatcttcttattgtcagtctaccctgactatcactcagggagtaggtagaatttgtaacccagcaacgctgtctgcttctaacaatatcccaaaaacctgattatggtagtagaaacagaagaatcaagtcagtaacagtaattccaaaccagtgacagcaaggaaatgctaaagaaagtaaggggctggatgaacacctaggctagagattctggtgaatataaactaatttcctagccactcagagaaataaatgtaggaagggttataaggtgtggtactaagctggaagaaacaacacatctttatatcttgcatgatttgttcaaacttaatgtaagcagcaggtttcctttgttgaggatttttcggttgatatgacaaggatacttctaagtgactgttagacagtggtattagttcccatacagagagtatgttggaataatcagtgcttgcatttgaatctgcgactctaccaggtgggatgaaagggcagctggaaattcaggcacaacggagggaagttctttttcagggtccttctgtttg

SEQ ID NO: 77864 - DNA, 1006 bp, Homo sapiens
agtcagtcagcagattgagatgttgggggtgggggtggggagacaggtagtgtcaaaaggcaaagaaacgaaagatttactgtctttaaagaagacagcagtagcttgtctgcacctcccacccccccccccccccccccccccccccccgccctcgcctggctttttccagtgaggaaatggcagcacaagtggttgggcagcatgcttggatgacctggcaggttcccagcctcacctcttcgaagggtgtgtgctacatgttcggggtgagttgggggtggggcgagatttggtgaccatttggtacagaggactggtgggcttgatctgtgttgttgtttctctttggattcttagaatagagctttctcaaatgtgtttaaagagagatttggggaaaaaaatgagaagattctctggcccctagatggtagaagaatattctgttcataagagggaacataggatagaaggatgtggaaagctgtgttttttgaagcctatggtcactgccttggtgtggcaggggtgcccacatgggctggagctttctgaagaggaatgtggagatcagattcccctggggttgccagtccctggtgcagcctctcagcagcacctttggagtcatagctttcctccgctgtcccaggaaaaagagtagaagtgtatcttgtcacttggagaaagaagatttttttgtcccattccagcaggtgtagttaaaaataaattttaaaattttaaaaaagaagaggaattctttgaatgaggcactgagcaaggcactggggactcacagggggtcaaagaagacatggtccctgccttgctgagcctgcctgtggggactggaggggaagagatgctaatcaaatggccacagcgcatgcagttgtgaggggcagactgaggccagcgtgggaaaggcaggaacagggcaggaggatcaacagggacctggagattggagaaggtggcccggaagaagagggatttgcat

SEQ ID NO: 77865 - DNA, 1036 bp, Homo sapiens
tcagctcttcctgggctcccctcatccctgcactgctgagaaaactgagaccatgtgacaagaacttcctttccttttgtctccacctgggtttcttatgtcctcctctcctcccctccctctgaggaagggaccccccttagagctaagggaagccctggggcctggtcaggaactcaggtcaggagctcagcgacattggccctgtgttttcactctttctttctgtcctggctttatccccttggtttacagacagcccccatgcctttgagatgatgtcctgtctgtcttccacctttaatcacaacatttatcaagaacattccacactgagagttcttccagccccagcagcctggctctccccgccctgaagtgtgatgccctctgggagggcctggggtctggcttctttccctgcccagtcccctcatcctccccacgttcctgcttcgttcttcctgctcttctgaatctccaggcttttctgaccctaccattcctgtcccccgaatgtaagagctctccaagtttctgggctccgagttgggagtcagctgacctggatttcaaaacccaattctgaagtcttttctcatctatgactatagtcaaacatcttatagtaaaagatagcttaagtcagtctattggatttcctgcattctattccaggtggacaatttaataattacctgttttctaggtagtgcttaaaagatctgcactgattaaactattctttcattgaaaatttgtttccagaaattgaatgctccaacaaaatggtatcattcttaacaatgtgagatagtatttcctctggaaaaaaaaaaaagagagtgaaatccattttaccactattgatcagtagagcatttaatgaagaaaatataaggcaaagtatgatttttatgaaaaaggaagtaatcagacttgaattttctaacttgtgctacttggatatcccttggccgttctcataagagaaaccaggtacaggtgggtgcactctgtgtgatttggccttgct

SEQ ID NO: 77866 - DNA, 1772 bp, Homo sapiens
tttcttccaacctacgattatgacttctggggaaaataggaagtggcaatggtgaatatggagtcagttcatatttatcagcaccttctgtttgccaggtccagcaggagagctaaggactctctctgctgggtccccttccgccctctccccacattcaggcctcagctgctctgctgctttccgtgctctgcacaccccagcacctgttccctgttgttgcttccttcctgtttgtgactatttgtcagtgtccaccatccagcagacaggaagatctgtgagggcagaagccaggtctgtcttgctccctgcttttccacttcactcagagtgggtgctgtgaatatttgttgaatgagtgaatgaatgaatgaaatccatgaagcaactcaggagcaatttcacgtggcataaaccagagtgctacgtggtattttgtagactgcatgggttagacatttagaggtcactggaggtcatatgtagatttgaaggcaaaggaatcttaaaccttgtcttaggatttggctaagtggatgggggggcggattattccaataattggattattattccagtctggaaagttgtgaaaatgtgtatgtttgggggaggagggtttgaactgttttccacaccaagttttttttagggattaataatctaagattacctctaggttaatacaacagcttgttttttttagaaattaaaaggtaaataggaaaaataatggtcattttgctgagcatagagtcttaactgacaaagctaatgatctggaaaaacctatgttggaaaatgtcactttattatatatgtctggaagtacagatgggaaaacagatttttttctttttgcagtagattcattaagtgcttaagaagagattctcttctgtaccatctttacagcctgagtaattggaggctaaatctaaactccacattgtcttatgtttcttgcaaaagaggtagctggattgctattttctgacacttaaatggaggtccatttctaggcatctgccagtgccttgcttagagcgagataatcccttctgcacctgccgtgtacaaagcgattatggcagaaactaaagactaataacagctgacgcctactgactgcttactgtttgctgagaatgttccactgagcacagaaaccttaggcacttgctccaggtcttccaggttcagagctggcgctgggctttgcagggctagatgccaggcaggtgctctaaccacttggctctgctgggccacacggcagctcccagtgcccgctggcaggcctttcgtgttcttgcatgcgcctaaccccttgtggctcctactctaggagagttaaataccaaggtgtgcacgtggatggcggagttcctccttgaacctctgactttggcaagatagttggctaaccatcttgtagagggtaggactccttagttcagcaaacctgctagagtgttattttgtgtgccagtgcataaattaaccattattatttatagtcctgtttcttttggtctggtgcagtttaatttaaaagaagtagggagaagtgaaactggtttgctgtgatttagtccatcagccctccctctggactgcctcatccctcctgttctatagggcaccctccgaagccccgtgtcctccccaccatcccctttctcagcttctgctcccgggtgctgagtgttgtgaagtttccaggtgccataacagttagtgcaaggtgagtctagccttctcagcct

SEQ ID NO: 77867 - DNA, 1093 bp, Homo sapiens
ggagggctttattcagagagcagagatctttctttactcttctcctcctcagtgggagccagtgctaaacttggttcctggattcaactcgagtgagcataagtcacctgggaaacttactgaaaacgctgtttcctgggcttccctctctgggcccatcaggcccatcttgagccatcaaggctgggctcactccccctcccctctcgtttaatggctgggggtagtgactgcttgtctttggacccactccagaatatcttaccatttcctctatacttcacagttttcatctgtttcaaagaatgaaaacaggtgtgtggaattgaggagaccaaaataaatccttaagcatataaggtaggccttatggaggccttaaaattacttgattttcataagtaactttgggacttaaaaagattcagatgggtttctatattggatttgcttctgttcaagactcctggtgttgaggcacctcttcctcacgttttaactagccagtgtctgtctggagtacagagcacatgtttcaaagaacttggatatatccaaaacccataaatttaggactgaaataggatgttagttatcagatgactgagtgaatgctgaacatatatggaaacaaaagagacaagaaatggtataaccatattaatgacaatcatgaaacagaccaaatgcctcgcaccctaagcaaagtctcttacatcccgtttaagagaatcggggtgctctgtttatgtttagatttcttggcttctttccattccatctcagagtttcccctgcgtctcaccagtgctccttttcttcacttttcttttcttgtccagcctgtgcccttggtggtgtgatgcctcctgtgtctgtgttctgtcacttacttgccctcccttgtgtctttcttttttcttcatccttttaaatcctcttctttttttcctgcaaatatgtttggttcctgtgaacagaacagttcagtgcagaagggcactaacatttactgggttcctggatcatggagtggagatcccatggagcagaggcacaggcagcacccagggagcatgcagtgagtgagaaa

SEQ ID NO: 77868 - DNA, 1281 bp, Homo sapiens
ataagaatttgtggtggtagagtggtcatccagtgtgtgttgtgggatggcagttgctttgctgtgtgagaatgaccctggcaaggggatcagttgctctaggtttagacgctagggtcttgttttaaaatccctactactgtaatcccagcactttgggaggctgaggtgggcagatcacctgaggtcgggagttcaagaccagcctggccaacaatggagaaaccccgtctctactaaaaatacaaaattggctgggcgtggtggcatgcacctgtaatcccacctactcaggagctgaggcaggagaatcgcttgaacccgggaagtggaggttgcagtgagctgagatcgcgccactgcactccagcctgggcaacaagagcaaaactctgtctcagaaaaaaaaaaaaattcctactaatgcatgttgctattttaggccactgctggctccctcttgtacttttctgcgtttttgtgaatggtgtgcactagaaggagtgctagagttggaatcagaactcctgcgtttgagtcacagctctgcctgtaaatcacaaaggggtggcaggtcacttggccacagtttctccatgtggtaatggggttgccaatcactgccttaggttggtattggaaagattggatgagaagtatgagagcacttcatgaagtataaatcttcacaaaaatgtaagggacccacttggtggaaatacctatttaacaaaatccctattatgtgttatatttgtgcagagacagcacttgaggtggttaggtgaagaggattggaatctcctgtactttctggttggatgacctggggcagggcttttctgggccttttatctgtaaaacaggagtgatggccactgtgtggtttacatttgttaatacatagaagatgcttaggacattttattgtgtctggcacacagtaggcactcagtgttcattgttacttttattgttactgttagattagagctgatttgagtgagtgaaatttaggacctgccccatgtctgcacatactgaccagtccgctggacccaggtgaggtttgtcctggaatatttagtcctggttgccagccctttgtgggcaggtgggcatggtgctcgtggaggatctgctgtgagaggagaaggtggcgcctgggctcagcagtgccaggttcagtcactcgctgatgcatcacctgcttcctctccctcatttcctcagtggcgccacgtgagcccctagaggcctgagagcaaactcccttcctgg

SEQ ID NO: 77869 - DNA, 1245 bp, Homo sapiens
cagctacttggaaggctgaggcaggagaatcgcttaaacctgggaggcagcagttgcagtgagccaagatcgcaccactacactccagcctggacaacagagtgagactccatctcaaaaaaaaaagaacttttaaaatatatattttttaactcaagatacctgaaatatctattaaacatgtaattaatataaaaattattaatatattttacactgtttttataagttttggaaatccagtgtgtattttggggatgtatattacattattaatttgtaaaattgtaaaacacacataacatgaaatttgccattttaaccatgtttaagtatactagtgtcatttattgcattgacaatgttgtgtaaccatcaccaccatagaaaatttttaatccccccaaacagaaactctgtgactgttaagtattaactccccatctcccctccctgccattgcctgtctttaacttggctttttcttctggatgcgtgtcctttacaagatacacattttgtgattatcttctagtttgtggtttgcctagtcactttcttaatgatattatttgatgaagttcttaattttaacaaagtctaatttatcagttttattttttaaagatagtgctttttgtgtcctttataagaactccttgtttagcccaccggttctccaccaagaatgactgatcccttgggggaatagagacattttggctgtcacacctgggcctggggtgctgtaaacaccctgcaagacagaggacatccccacagcaaagagctgtctgtcccagagtgtcagcaggttgaagctgggagcctctcagcatgagatggtgagagtgttcttgtgtgtttgctactggaggcattgttgctttgtgtgtcactgttacgtctgcatccatctcttcttaatccttgtagatgtgatgagaagaatttaagagaaatcttggtcattccacatctgtgcccttagacttttgtttagaacaaagctcagtacattaattatgggagctttatgtggaccatattagcatatggaactgaagttttgctttttggtggcttaaaagcaatacttaaagtgtgaatataaatggcttggcatttgcagaaaccagagatttttttcctgctttgattcaattattaagaacttgatttagcatttttgtcattgttgctttttaactttcagattagaattgtaatgaagactgaaatact

SEQ ID NO: 77870 - DNA, 1446 bp, Homo sapiens
gttaaaggcactgcttcagctccgttctgttgaatccctagttgacaagctatcgggaagtaagacacatggggagaagctaaatgtcaataaaatacttgaataacagctgatcacaacaaaggattttatcagtcagcataggattaactaccaaaattctaggtagaaattgccaagaaaacttgagaggcaggaaagagtcaaatgatttatgagtttactacctaaaaaaatatagctatactttaaagacaatgacagcttccaaacattgagcattataaacttttaaaataaggtttattcatagtctatgaataaacatgacaatatgcatggcaaataacagaaaaggatgaaaatatgtacctggtggtaaatggtatcagagtaataacgaataggcctttgactactttgttaattttttaaaatagctggtattaatagaataaaaatataattttttttaaaaggctggggccagttagtaaccctcctatagcaaagatgagccagtttggggagttttctgtcaacttttaattttttaaaaattgagatttaacttgtacataatgaaatacatgtatattaaatgtaggttgtttttttttttttttttttttttttttttgaggcagagttttgctcttgttgcccaggctggagtgcagtggcgtgatctcggctcatcacaacctctccctcccgggttcaagcaattctccttccttagcctcccgagtagctgggattacaggcttgcgccaccacgcccagctaattttgtatttttagtagagacggggtttctccatgttggtcaggctggtctcaaactcctgatctcaggtgatctgcccaccttggcatcccaaagtgctgggattacaggcatgagccaccacacccaggcaggttagtttttgtactcaagtagcacaaccaagatgaagacatggaacatttctagcaacctagaaaactccccactgtcttttccccgtcagtgccccgcccgtgtcaggggtaagcgctcttctcattctgtaaaactccccactgtcctttccccatcagtgccccacccatgtcaggggtaagcactcttctcattctaaggcctttgggtgctttgcctccttggggtttttgcgttgggggagcatgcagtagggactccttggtctctggcttctttggctcagtctctggaattcacccatgttgctgtgtgtagctgtagtttattctttttgaaaatttctgtatagtttctcactgtatgaatgtaccagttttttatctgttctgtcgatggacatttgggtggtttccagtttttggctattacaagtgaagctgctagaagtaatcttgtgtttatcttcttgtggacatatacattcatttcttctgggtattctcttgggagaagaa

SEQ ID NO: 77871 - DNA, 1272 bp, Homo sapiens
ctcccagggttgcctgtagtgcctgtggctcccgccaaagttgggatcaagtggctgctgctttagcagttctctttgtgtgatacgtgctgaagccactcggatgctctgagcctcagtttccatatttacaatctaccctctgtgacagacttgtgaatgtagctgagctatcatgaatataaatatgttttttaagtacaatcattcttctgatgtaattaacctgaagctggatgtgagcaccttcctatgatgttggaaagcaaagtccctgtattggatgtaaaaggcaagaagatgaaacagaaaggcctgttcacggtgagagggagaggactaggtcctgaagagcctccagcaagccttgccaggtagttgggatcttatcctgtaggggcacatggtcagactggcactggtttggttgcttgcttaatgacaaccccagcggcagggaggtggacggtttggaggccataagactacttagcctggtgaatccgagaagtacctgcaggtagaattgacaggatctggtgacaaactggatgtgaagagttcgggagataaggatgatcttgaggattctggaataaattggttttaagtttaccttgcttataacatgacattactaacctttctctgttttgaagctttatggtctagaatggaaatcttcaatgctaaattcctagcttattctaacttgtctaaaccagagacacaccacaggtaatctactatgctttgcatccgagctttcagttcagacaggtttattttattctttggaatatatatttgaaaccttttgtatgcagaagtcaagcctagagcaaatttttattcttaaattataggcttgtgaaagtgaaggttttaatggaagtgctcacccaaccttaaccgtagtgacacacacatggtagcatgtctgaacgaaaagctgtcagaaagagcagatttcaatttaaatatatcagtgatttcaagaccagctctaatgagtttcagaacctttgtgtcagtctcatgttttttccttaaatgctctgaagtcatttaaaattaataagccagtttttatttgatagagtttacaacagaaatgctgccatcggctttgaagtccttgttcttgtgtggtctttaaagtgaattagtggctgtggtttctggaaccagaaggaggttggcttctcatgaatgggcatgtgggctgacctgagggactgcttatgtacagttagctggtatctaaatgca

SEQ ID NO: 77872 - DNA, 1342 bp, Homo sapiens
attttcatcatttccataaatgaaaactgtagctatgtcatttaaaagatctgtgcttttaactatgttcttgttttgtaaatgttatagatcacatggagacttcaccttctgtgaatttagtgttcttcattttttctattttgtccagctttagttccagtggcttttgggggactgaagaaatgaaatgggctgggcacagtggctcacgcctttaatcccagcgctttgggtggctgaggtgggcagatcacctgaggtcgggagtttaagaccagcctggccagcatggtgaaaccccgtctctactaaaaaatacacaaattagctgggcgtggtggcgtgcgcctgtagtcccagatacttgggaggctgaggcatgagaatcgcttgaacccgggaggcagagttgcagtgagccaggattgtaccactgcgctctagcctgggtgacagagtgagactctgtctcaaaaaaaaaaaaaaagaaatgaaatactttttctttgtccttggggctctgtctggggtcttctcggtggtgtgtgtccctgccttggagcctgggggagggtgcccctagtgtacactggtgtgtccccctgaggcgggtttgagttcccaggtcagaccccagcatctgcatcctgccctcgggactggcaacgcttctgctctgtcttcctcgctgacccttctcactggaagtcctcctattaaaccatggccttcctcctcttcctcatctctttacctgactgcggtccttggcccttttaggaaaagtgttgcttttgtcaatcagtttgggagctgatgtccagcaaagtgatgcacgttttccctagcctcccaccttacctgtgacgcaggtgtttgcatgggagtagaggcacccataggggcatggaatacagacttaaagggcaaacagttaccatggagtcccaagtgatataacttggggctggcatcctaaccaaggaaggttaggcaatgcccgctgtgggctgagcacggtaagacttttcttactttctattatataaggaggtgtctgaaactataccttcctagaataatctgagacagaattaaacaaattagaagaaagctccaataccaggtctaggctgtcattgatcgtttaatttgtgtactgagaagtcagaatagaggccagaaatacagggctttctcctaagacagtgttccttggcgcctccaaatgccagtggtgggctgagggccctgacagaggctccctaaccctcgctgttcctccagagctgggcaccgtccccattttataagtgaggaagcaggtgtaggaacagga

SEQ ID NO: 77873 - DNA, 1286 bp, Homo sapiens
tttcatgaccccggcacttttgaagagcactgctggcctgaccggttactttgtagaggtccctcagtatgcatttgttggatattttatcatgtgtagactgaaattacgcattttatgcaagaataccatggaagtaaagtgtgtccttctcagggaatacatgaatcaatatgtctttttggtttttccatcagaagttactgtttttctcttataattaatgaataccttatagaaagatactttgagactatgcaaatgtcctgtttctcaccatcaaatatcctgtttctcaccagatgcaaaaacctgatagatactggtttttgtatctatcatgatttttgtctgtaatagttactactgtagtgtttgccaagtggtgattttctgtctccgttatttcttctacatgcattcattgggattttactaaaaggaagagctgtcccttcttccacatttatttacttattcagctgttcatatcggtatggactcatggatatttattttatttgatagactatgtaatccattactatatatttgatacaaaaatggttttagatggctcttcatgtaaagatacctgatttcctcgtcactgataatttgagagtatgtgtcttgtgcagtttttgcatggagtgcttaataaaaaattgctgaaattgatgcataacacagcagatcatttataaagttcacttggcctcagagttccaagagtgactgtggccactgcttcctgtgtgccattttcctgacctcagtttcacttaaatgtttccctagaagcaaacgtgttccatatgtgacattttttgttctcagccaacttcatggtaacattgcatctgctgactgaggggtatgagctacaaattgaggagggacagaatagagtcaaagatgatggtgagggtacaaggcggtcagtttcataggccggaggtgttgaggttgatgagccgtgaatctagatttaatccttgcattctatggtcatgggaactgggtagatattatggggcatagaagggaaagaatgatgtctgttttcaggttgttcatctaggttggctggaggacttttccagtgaggtaagcagcattcttcacagtgtgcccctggaactgttctgtcggagcggctcttttccacgtcgtaggaaacccgtggctgcagatggaagacactgcgtgagaagggggctgaagctgtgctgagagctgcagatgacgcttctgccactgccactgccactgtgacagtggat

SEQ ID NO: 77874 - DNA, 3053 bp, Homo sapiens
agaggaaggaatgttactctggcttcaaaactcagtagtagtagtaattcacatcgacagattagggtttttgttggaggcaggaattttgttttgatttggtctggttttagaacttaaaagtacagtaaagtatacagtaaacgcctttatgctctactccaaatgttatatttgcttcaggttaaagttgaaagtcccttttttgattatttgcttctcagcatatgtagtttttagtttttctgttggaaacaggattttaagctatacttctactcatttaactataagataaatgcttacattttaaaatgtatttgaatatttatttgaagtgctgatatgcagccttaagttgtacttcatgtgtgattggatttctgaccgtagatatggttggattgaagactgtaccgtgttttgatgattctcctattattatttttttccctaggcagaagaattgtttttatgggttccacgaaaattgctaatgactgttgaatctgctaaaaattcagtgttgggtgagaataatttctgactcttcaaggcaaagcacaaatgacaaaaatatgtaaaattccattttatggcactaaggataatacttggtttttctcgactggcgaaatattccctcaaatatgcattaagtgtttttcatttaatgttataaaaaagatgcacatgacctttatttattattattattatttttgagatagggtctcgctttgtcacctaggctggagtacactggcaccatcatagctcactacagccttgatctcccaggctcaaatgattctcccacaggtgtgcaccactacatctggctaattttttttttttttttttttttgtagtgatggggttttgctatattgcccaggctggtctcaaagtcctgagctcaagcaatcctcccaccttgacctcccaaagtgctaggattacaggtgtgagccactgcgcccagcctgtacctgactttaaatgttacaagaccttttagtttttctgtaatttgtaaacgtatatttaaatgaagtttttaagaagtttgtggaacttacgctgttaacttctgggttaattcagggcccttatattctcaagaccgaatccttcaagccatgggaaacatcgcactggcctttcatttgctgtgtgagcgagccagccctaactccttctggcagccctatattcaaaccctccccagtgaatatgacactcctctctactttgaagaagatgaagttcggtatcttcagtccacacaagctatacatgatgtcttcagccagtataaaaacacagctcgacagtacgcctacttctataaagtcatccaggtgagcagctgtttgcaatttaagtatatatttcacagagtggggaggaaagaggaattgagtccataaatattccatttgatgtcttattaaggatacttaaacattttactttttaaattgaaaatataaaatacatttcatcgtttgtttttacagaaatatcaatgaaatgcggttacatatatatatctgatttcatcagtgcccagtgttaatacaagcagcagttgttcctgagttattgaaatcaccaagtttttttgtaaacaaaagatcacaatgaaattttaaaagccttaaagcatatctaatgcaataagttactctgtgtataaatttttcaagaaaatgagggttaatttttttctatatatgttagtgtaaaatattgacagttaatttagcaaattataacatttatgtttttcaacgtgtactgtgtattaattttaatttgttctcagtgaaagtttctcatagaaatctctataaggctccaagtatttgaattacctgtgatgacacctttctgtattttggtggtgtggccaccgttatctttcatttgcagttgaacagcagtcagaaggaacagggccagtaccacagtccccaccaggactgagaggcagtgtggctccttctcctgattctgcacaatctgaatcactcaagagtcagctcctgggctgctgttcttgagatacgacaagtgggcaggtgaactacttgctcgctttccttgtctttggttggtgtgacaacctgaattaggtttgatttggttgttccttaaatggtctatccttgctatgttttatttgcaagaagtggtaacctcatttcattgctacaggtgatattgctttccgtttattattttcactttgtagcatgcttactacacaagaatgttacactcagttacatctcctcctccagcaagcacttcaaatatgtcaaaaattatacatgactgttgtcttcatgtggaaatcaatcactcggtttttctaaactttaggaagtcattaggaatggtcatacagtatgtatatagcttttatttcaagttggcttaatttaaaaactattgatgaagccaaatcaaaactttgcttcttcatatagtgtgcacctgcagtcctgcagtctaaggttggtttggctcttcatgacctggaagggttatacttttattcttagttctcaatggtatatctttcatgactaaaggttaagctgactttagtaggtctaagtatttgtcattttctcttgctggacaatgaactacaagctggccctttttactaatgtgcttctagtttgcaaacgctggtagcctgctctgagaggactctcttctgttggcaggttggagggtctaggatgatggcaggtcttctgataaccgacttggcgtgaatgagctttggctgtttctttgtattaactggtccatttacttcagtattaactaagtagtgcagctttgcttcaaaatttgatgagtttttcaatggctgtgagtcactaaaatactctgttcatatagatggaaccattttttgtcaatttgtttaagagccaggtgtcttcataaccccctgaaataagcttccttagatgatgctgagatgctacggggattaaattataccaccttctatgtaataaacggtg

SEQ ID NO: 77875 - DNA, 1802 bp, Homo sapiens
tgccttacagccttctggcttacagctctacagttttgtgttcttagaatcagggctgtggggctcatcctttcccatgtctccttgtgcacatacgcgagctactcatttttgttttaatggaaattttgttaaagcaaatgtgaacatgagaggtggcatgtttgacttttaaggagaaaactgctctgtaaatcatagtagtggtaatagaagctctctgccctttgccatcgtattacctaatagtacctaatagtcaatatttatattacctagtgtcagtatatatttcactgtaactgacagggagtttaggattttaattcttcttccctgtcaccagttaaggtatgtactgtgaccatctggtgattagttttgatttcaagattggcgtgttaagactatttccagtgttagttatggcctgtttttattttctgagagacgtgtgaatgatatgtgtcctaaaagtagctcttgttttctaaaacgtggattaatataggtctgtccgttacttttgatggaaaaagagaagattactttcctgatctaatgaaatgggcctctgaaaatggggcttctgtcgagggttttgaaatggttaacttcaaagaagagggctttggtttgagagcaacaagagatatcaaggtgagtttataaaatgttggtctcaaggggtctatgtgtttgaactgtggtgtgctgtagagggcgcagggtgaagaggtagacgtgtggtgggggagttctagttctgagcctgtgggcagataggcagcctggaagggccttgggctcatgttctaagcagctcctcccaccttatcctcctggggagccaagttgctaatcagtgactggggcaagtcagttcacatttctgagcctctgttaggagaccatagaacatgcctcacaggattttgagatttacctaaagataaggaggtggactcatggtttggattttgtaacttactggaggtgagtgggtggaggactggcggtgtgggtatgcctactagtgtctgaaatggatgactatgaggctgaaggtactaggagctcactgaaatggcaataccagtggcaatagggagaggagagagaaacagccacctactaaggaagaagggctttttctcccctcttggttcttggttcttctttccacatgaagggagcagcagtcactggccatgcctggcctcttctcacccctcactcatgtctcttctaagaggaggcactccttcatctgttggccaagtttgggagaaggaactggacttggcctttttctcgatgggagctagttgcccgtatgcattcattccactctgctctctgccctggaagctttgcaggggcaggccacatgtggggagggcggtggggatccagctctgcctgtaactaggtgggggagtctgtctaattctgggattcagtaggtgatattttgggtgaccatctgttgtattctatctctctctcagttgcttcagaacttgggtggaggaaggggtgttatttgggccccctcaaacctccagcaacatttttggctaagttgtagttaacctttcattgatagattgataaatcacatgctggtatattagatacctgttaaatgtctactgtgtgaatggtagtatcttgcttccaaaaaaaccagtctcttccttcatgatgcttataatctatatagtaagggacaagacaggtacaaataacttaatagttgacattggtgaaagcaagatgccacatgttcttctcttgtg

SEQ ID NO: 77876 - DNA, 4086 bp, Homo sapiens
acataagagaagatacacacgttagcctgttaaataatgtgatgtcctactgttttagcacatggccatatttgcatggactcagttacagcagagtcaatgatcatctgtatagtgggagaatatgttttaaacctttgtcctagcatagttcttcacatggtgatagttaccactttttgtaaaaaacaaatggaccaaagtctgctttttgattctcacttgagataaagtgtaactgactggggctcctggaggccatcctcgtggtggtttgttattcattagcttatggatcgccctaccagcttcttggctggacactttttccatcttccttggtcatgatcttagccccttgtctctggagaatcaaagccagactcctctggcagtgactatcaccctgtcttgagtggctgcctcgctaggcttccctagagaccccctctccagccgggttcccttcctcactgtgcttccctcacgcttctagtcctgtccctgtctttgaatgcccccccccccccccgccattcttcacacatccatgtcccttactttctttgagacctattgttaaaagcacttgcaagcaagcattatctcatagggtctttacccaggacaccatggcgtgtcctataccacatggtctcatctgcgtgtgaaaatatgctcatcatttctcacatgcccgcagaggacccgtgtgtggcacactggaacgcgacgggagacctcgttcaagtcccgggtctgccatcagcttcctgtgaaatcccaggcaaggtgcttgggatttcccatggagcaaaatgcaggagttagactagctcgccagagttttttccagctctaaaacgtcttcagcatttgtccagagagtgtgatcagttgcttatgatacagttatggttaatgggaaatgattattttaaggcaaagtggggagagaatatataggtctttatgcccatatgtgtatgatgtatgcatgggttttatctctctagtatcctggaatatgttagtctgcacagtgaaatctatgtaattaaaaaaaaatctagagtaaaatttgctctactatagtttttgtaggtgaaaaagaacgaacttttcttccagagactacaaagcagatttttttttttcccatttgagaacctctagatactaatactacacatttctttttctggaagaaaacttcatgtaaggtaagatcttagcctctgaagactaagacactgccatgtgttggacatgttttattacttgattttgttctttggtaatgtaatttttttctcttttctttctcttctctgtagtcagaaaaatgggtaagaagagtcgagtaaaaactcagaaatctggcactggtgctacagcaactgtgtcaccaaaggaaatcttgaacctgaccagtgagctgctgcagagtaagtcctcctctgggctctccctgccttgatgtggtggctgtgcctttttcttctttgtcaccagaatggggacgcgtgcatcagacaagctggtattcaggtccaagcttattagctgtgggcctgggcgagtcacagaggttcccaggcttgcagtcctcacctgtgaggatggaaacacccgtcagaactgtgtggctgttaacaaggcttgggtgaagtaattgtgagcttccatggcacagtcacctggaacatggtcttccctgaggacctgtgggcgagaagaagctctactgctttttcacagtgtgccgctcggcagattactgaacccttccgaaactcagtgttcttgtcgtaaacatagataataactgtctcagggaatgagccaagggccttgtgagatgtggtgtgtgaaggtacttcacgggctgttggcccaggggagtccagcgtgcctcttggagacctggccttcagagctctgcccctcactggaatggctcgcctttctttttggtgattcaattaacagtgcttctgattttttttcttttttaaacagggtcccgctctctcacccaggctggagtgccatggcactatgacgactcactgcagccttgacctcctgggctcaagtgatcttcccacttcattctcctgagtagctgggactacaggcctgtgtcaccacgcccagctaatttttttgtagaggtgaggttttgccatgttgcccaggctggtcttgaactcttgggctcgagagatcctcccacctctgcctaccaaagtgctgggattataggcgtgagccactgcacctggctgtgtatctgatttttacatgctgtagtttgagagttcttagtttaaggaagtgaaatatctattaagtgcctctacttgttttagcaagttagtgtaatttggtaactttttaaaattatgaatttgaattggtgcaattagtgccttggctgtagctgtggtcactccgttgccctttgtccatgtttagattatgtggcaggctaaacctcaagtaaaaatgcagctttccctttgagacagaaagcaggccgcagccaagttggagtcaggtccctctcgagtgctgccctggaccctactggccggtggagtgtggctgtcctgcccattcctcgctgagctcccctgcctctggcagcttgaggacaggctcgctgctgcttcatctttgaggcctgttccaggcctcagtgagtgcttattgttggagaatgaagtaagactggctacccttcatagttaagactcagcgtgtgtctagttattgttagttatttgccacatatactcttttaatagagagcaaaggggccccaaaggttaagcaggagtgtgggaaggggctgtctaaaccaatgcagttgtgtgaaaagaaagagctgccaataggcggggtgcccagtgtgcagtctttcaaactcacacctcagcctcgggtgttggtcttttggttctggccccacagtggaatcttggcttcttttttagcagtgactatgccatctcattttgcaactcccccagactgctgaatatagtgccgtacacatggatgtgaaatgtttgtcgactaattgtccttatgtccaatttaactggttcccttagggaatcagtgttatggggtttaactaaaaagaaaggttgacttttactattaacttttactattaacttctttttgccatatagaagagttttggggggatagtttgcattttagcttagctttttatcatagattttcctgttagtaagtatattctaaaaagagttaactaagaataaggtggatgtgagctaggtgcttgctcagtgctctctcttgggtacgttaagtgggggatgtttttatgatgccccagggtttgtctgctttgagaagtgtacctgccttgtacttctcacattcattatcatggctgtcatatgtctgtcttttaaaaataaaccaaccccagaacagcaacaacaaagtccaaatcctctttcttgtgcagactagtaggttaagttgaaagagagaagtgtttcagtaccatgcctcttatgttacagaatgcagcagtccggcgcctggcccaggaaaagagtgggaagagtatgtgcagatccggactctggttgagaaaatacggaaaaagcaaaaaggtaaaattgctagaatgataactgtattttaataatgtcatgtagaaacttgattaggtcaaagggttgacgagtagtaaaggtctcagcatcattggtgtcactctgaaaggtcttgtactggggcttgcagaccgggagagagagcagttagcgggatttctcccctttctgagatgctattacctgcttcggaaagggtgagaatgttgagctttaggagaataaaatgtttgtatctgggtgctaaaatgatacaattttatttatttacattttataaagtattataccgttatttccttttgagtttcaggacagtgcatatagtgtatatcgtcaataacaaataaatgctgattggttaatgcattagcaaggtttataatgaactcacacacatctcagttaaataagaggt

SEQ ID NO: 77877 - DNA, 1047 bp, Homo sapiens
agaatcccaatataagccaactctttagcatctgtaataaccttgagtttgaccctttcttactgactttgttgggcgtgagggttgcatggaagagtctagagtttcccttaatgccacagggcacatttcggtagagcctcaaagtatgtgaaaaatcttgccaggagaagacaaggggacaggcagtgggatagctgcattccagaaaaagggaggaacatgagcagtcccctggagctgtgttgtgtaaaggtaggatgaagctggacatgtaaaatagagtgaggcagttcagtcctcgaagaccttgctagggaggttacgcattatcccgtgagctgtggaaagacgtgtgagcgaaagaaacctacacagtgtagaattccacttatatgaagtttaagaataggcagaactaatcggtaatagaagttgaaatgtgggctactgggggaaggactggttgtgaaagggttcgtcaggactgctggcaaggactggtgtgtttgctgccttctgcaaggctggggccttgcatgcatggggatgagtccatgaattcgtgcactatgcggtttgtaggtttctcttttttttagtcagggtctccctctgtcacccaggctggagtgcagtgacgccatcacagctcattgcagcctctgccttctgggctgaagggatcctcccacctgagcctcctgagtatctggggactacaggcttgcgccacggtgcccagctaatttttatattgttttgtagagacaaggttttgccatgttttccaggctggtctcaaactcctgggatcaagcaatccacctgccttggcctcccaaagtgctaggattataggcatgagccactacgcccagcctatgcagtttgtattttatacctcaatttattaaggctgactgttgacattgtggtcggggaggacttgtaggcagggaaatgaatcacgaagggattgaaagagctggagatgagggtcttagctaggagtggcttcagtgactgcataaacatcacccaaca

SEQ ID NO: 77878 - DNA, 1067 bp, Homo sapiens
aagataattcagtaagtatttgtaaattatacctgatttcagtctaaactttgtggaaaaaaatttttgagttagcattgtaccttctggctaatatctgtaatttaacttgagttcgtatgtgtatgcacatataattaattcagtatgcatttatattttcctaatataaatattggaaataattattgaaaataaacatttggtctttgtgggaaattgatgaatgtttaatatatttttttcatgaagagcatgaagtatgttcagaatacctatttgagtgtctcatttgtttaaacttgtaatttagccccaaattcagctgaaatgatcatgaaaattattcacggtatataacagacttttgaatcataaatgaaaagggtagttatttaaatccataaggttggggaacttacatggcatgaatcttttttgattgctaaaagaaggcaatattgggtgaatttaggaaaccacacatactggatactaacacctcacactgaatcttaaaatttagtcatccttcttgaattgtactttatttcttgcccttctatgtttagttacttatgtgttttaggaattatccatgctgctttgagtgtgagtcttggtttcccagcctcatccttgggaactgcaggcctggttttgtccaattttgttgtcttctgcaacagcgaacatagtataggcagagagacgttgtgcagcttagtttaatcaagcttgcgtatacttagagtccacctatatgctggagctaatgcaggatttcaggtttgaagctatgggtctgctgcttggcagctgtggtctcttggccaagtcacagccctctctaagcctcctgacaactggctgtggtcactgccggcctcagtgggctatggtggggatgcagggaggtcatgggcggatgctcgtgtccttggtcacaagtgcccatggagcttttccctgtgcttgggccgtaagctttccttttctatcagaaacagactaattcctgctttattgctttctaaagaccaataatgctttaaaaattccagtgt

SEQ ID NO: 77879 - DNA, 2021 bp, Homo sapiens
cgatgcaactcttgtcttttcccggtctccacttgggaaaaggagctgacagtgacgcgcgcccctggctgcggggctcacccctgcccggccggtgttgggaggagggcatttcagtgttgcaaaggcattcgcgggttaggaccactcggaccgtgttattttgcttttctaaataaataaggtgatgtttcaaaagcaaaaatacttttaaagtatgctgacaaatcaattttgcttttaagaatcctcgaagagttaccccatcttcgtagcctgattgtggtgctgatgaggccactataaatgcgtttgtcagaactcagaaccggacactgaaaagtgtgaattttatcttatgtaaaatatacctctccctctcccgtttttcttcttgaaatgaccttgccagtatttcaaaactgaactaaccagtaataatctcggagaagtgtttattattttaagcgaatacatttaacccaagaatatagcaaaataaagcagtcttcctctccactgttaaaatttgccaagacttgcttgaaccttgctgtatgtactgtgtttatacgggctaccatgcgtgaaagtccagcagtactggattagtcccaagggctgccgtgattgatactttggtgaaattccaacagtttaccgaggagtttttcttcggcctaagaaagtagtttgcaaagccaagttctcaaacagctacagaacctctttattgggaccccagacaaccttggattttagccttctgctacccctttcctgtctgccctccaagtgattgtaagttaatatctgaaatggaactgtagtctgaaggagtaaaatggttgcttctccagtgtgctaacatctcagtgcttttttttcctggaattggagtggtgttggatttgaagattagaacatcttatgtctgtatgtacggttatagcgaaagcttctcgtaagagcacagtgactgtcagtaagaaagtgatggctgctgcgctgctcttccgtgccgtggacatttaggccacattttaaatgataattaagcttttgctttagaagccactggataatgagaaaaatatggaggtgatatttttcctatttaaagcttaaccactggacaactgttttggttttgagagttctgataaacggtcacaacagcctccttggaacacagtactctcctgcctggaggagaatgacaggatgacggcgccggggaaggtatgaccatcagcgacggaggcttgcttggagtgaatatttagtagacaatcattgaattcaatgaaaaccaggtgcatagtttgtgctgtgtagagttgtagtaaaaatatgagcaaaaatcctacctccaagtcagggttactctgaatgctttgtgactagatgtcagtgtagtttgaggcgtaccagttttcttcaatgttttaattacatagagtcttttttcttatcacaaatccgaagtagggtttagaactgtaactagtaatactgtatctttcttttgtgtagttggatgaatatccttctctgagaggttatttatctttagagactggtttgcctgttccctggctgctgtgccttgtgcttctgttgagggtggagaggaagagtttcaagtgtgtttctttcccttggaccgaagtcctgggaatggagtggtgactttgttccctcaaagagaactcggagtcatttattgctatggcattaaatgtttttaacagaacggtgaacttatctttattcttatgttactttggatgttgcttgtggccagttataatatttgctttctcaattacctacccttatttttgggccctttttttatcagtgaaaaatcttttgattagccgtgcatcttttctctcctgctatagtcatagaagtgtttatctggctaacagtttgttttgggtcatatttaaccagtcgagagtattagaataaagagtcttgctttttcagttttctatagttttcacttctgt

SEQ ID NO: 77880 - DNA, 1995 bp, Homo sapiens
catggaataaactgaaaaggggtgctggatggaagagatggttagttttagaacataaatctttgtcaagattaagacaggcccaggttttgctgaagaatggaatctggaccagcgttagaggacctgtatgtctagtgaagaaaaaccagaagaaagtgagatatacttcgtttcttccaaaactttgtcaaataaggttaaccctttaatctcaagagagagggaggaaatagtcttatttttaaactaccatgaaatttgagatttattaatattagtactggggtcatcttacagtattgtgttaaattggctctggagttagcccgggcttgtaactggcaattgacagtgtggtttctataggaaatagtgatcccaaaccaggtacaatctatgattctagattgcttatagtatggagtattcctttccaactttgtttttctctttctcataggattctaacattttcagagaaccttttggaaagaacaagcctacttcaataaatgaaggagaataaagaaaattcaagcccttcagtaacttcagcaaacctggaccacacaaagccatgttggtactgggataagaaagacttggctcatacaccctcacaacttgaaggacttgatccagccaccgaggcccggtaccgccgagagggcgctcggttcatctttgatgtgggcacacgtttggggctgtatcctgactctccttggaatctgttacagataggctccccactcaccaccaagaaataattagattctgtagacaaaatatatagtaatttctctgtaccagagcagttcttaaatatctgtttgaatgttgtttctggtgggggtttttctctttctgatttgtcattttaaaggtgtagacttagccactgaggaggtggccagccaggaggatatgaggcacccattaggatcacagttgaggctgggcacagtggctcatgcctgtaatcccagcactttgggaggcctagacaggagcatcccttgaaatctggagttcgagaccaacctgggctgcagtgagccaagatcacaccactgcactctagcctgggtgacagagatgctgtctcaaaaaaaaaaagatcatagttgaagtgtttctaaagggtgttaaaagtataaaacttcagcttgctaattcttgtaccagaattctgacaccctgagattcccatctcattactttgccactaatattgtttactttaccattgattttgttgttgttgtttgtctttttgtttttctacatttaactaagagtataacctgtaaaagttattggttagagtccttaaccagaacaacagacactatgataccctggcaactggaataatttattttcatcgcttctatatgtttcattccttcaagcaattcccaagatatgtaagtgtttgaattttattgtaattctctgtcatatgttattatttccacacagtttggtggactaattataagctctatttttctcatattttccagaaagtatttatttttatatggtatatactgcatataaacaaaatcaagtttgaactttttttattccaattagccatgttcaaatcttttcacttaggccaatatggaccatagtcatattgcgctttgtatgaaagtttactcccgtggtacctttcccagcataaatttgggcttataattgagactcaacaaagaccaagaaagcaaaatggaacagaagttgtctatgccatatcactcattcttcggttactcctcaagacgtgcattgtgtcttactctctgtgggagatagagtagctttcagtccaggataagtggtatgacatgcacagaacacgtgatggaaagtgaggccatcagaagatactgataaaagagttgtggcattcaaggaggagacaacttacatcttggagagagcagggaaagtgctaggaagaaggtgccagcattaagg

SEQ ID NO: 77881 - DNA, 1050 bp, Homo sapiens
atttatctctgagttttcatgaggctggctatcataaactctttcttgcttaaaatgttttcaatgaaaattcctaaaagattgcatttttaaaatttgaggtcttgaaagaaattacaatttagtcaaattatcaataacgtaaagatctgttttgtaaagggagactcatgtatgtattgaaaataataatatttttaaggatcttttgttttcagtatttttttttacattacacctctgctttgtcttcctgtttgagatcttttcagaatttatcagtgtctctgagcatgttaaaagtctgagtgggagagaaaggaaggaaaggcagttgctaaaatataacttgaagagagaataaatagacaggaaagctcacttttgtaatgctgcttgagacctgcaattgtaattactgtcctaacatttgtgattgatttttaggaggaagtaatggttctggagagaatcttactgcagaccatcaagtttgatttacaggtagaacatccataccagttcctactaaaatatgcaaagcaactcaaaggtaagaagaaagttttcagaagaattttttcattctgaaatcaagtctttataatttgatgacactcaaattacgcttctcaaaagcggaaaacaaagtttgatgtgtgaaataccaagggcatggcttgctcagtcaattcagcattgcagctgctaatgctgtttccttttatgtataaacaggctctgtcatccagttgccaagtgatgggagaggcaggaaaatgaggcagaattttttaaatggactaataaacttagccttggagccaggttttccatacatggtggttcagcgtaggtcatgaggaggaagaaggggtaggatgtggacccacatcattcatccttgtttcccacgcaaaagctctttgctgtgtatttgagtggtgctgaacacgtggtaggtttttaataaatacttgatgctgcctgtgaatttttctattgctattaatttacctttttgtccccatttctaggtgataaaaacaa

SEQ ID NO: 77882 - DNA, 1522 bp, Homo sapiens
ttttgagaggccagggatctaatgaggggccgtggtgggaaacagaatgcctgtgaatggagttgctgccagccccatcccactgcagtcagtgaagcttctcttacatttgacttcctccataagatttcatttgaagaaacagttgagtggctaggatttcaacagtttaaataacataagtcattttcattggtgtagcaatttttggatgtgctagaattcttctgattctttaaggaatagagaaattactaactatggttaaagtaacttagtcgggtacctttagaagagtaaagacttgagtttatttatttatagtactttaattaaatttaggggagaataagcaaattaatggttagttatggcatctccatgcactggtttaatcataaatattagatcatattatctaacctttttttttcttgttgaactagtctctgcaccaccttgtcactgcagtgggaaccagagatcatagcagtagcagtgatgtatctcgcaggacgtttgtgcaaatttgaaatacaagaatggacctccaaacccatgtataggagatggtgggagcagtttgttcaagatgtcccggtcgacgttttggaaggtaccaggcatgctaagcgttctcgtgagggtgttccatgttgagatgattcttccatgtgtaccctgagtcccaagaatggattttcccagatagacatatgtgagcaatatttcagaagcatcattaattaaattatctaatagtttccactttgtccaaacacatacttttggtaaactaaaaatacacaccagtgttgcacacaacgaagatggggtgagttgtaaatgtgattcatgcttaggtcctcgtaggggtatcataactgattctttatccaggtaaaattttatttaaaataccaatttgtgtaaaatgtaattgttggctatcatttagacatctgccaccaaatcctggatctttactcacaaggaaaacaacagatgcctcatcacaccccccatcagctgcaacagcccccatctcttcagcctacaccacaagtgccgcaagtacagcagtcacagccgtctcaaagctccgaaccatcccagccccagcagaaggacccccagcaaccagcccagcagcagcagccagcccaacagcccaagaaaccctctccgcagcccagttctccccgacaggttaagcgagccgtggtgagtgggctaaagcaggccctgggtagagcaggctttccaggtggcggcaacacctgagcactgttcccatttctaagcgagcacagggaacaccggaagcagggggtgttcgccgaaactcgcagtccgactgcttgtcggtggggagcctgaaaacaaaggtgctccaaggacaggctgcctctgagaaccaggagggggctctctgcccggctccagccctgctgcctgtttcatccctgccagggttctgaagcctgtcggtgtcgttgccgtgtcctagcagtgtcgttgt

SEQ ID NO: 77883 - DNA, 1336 bp, Homo sapiens
tttagagactatttacccccatcacagcagcaggagtcctctcccaagcaccaagccacagcagatgcgggggggcagtagggggtggtgtgctgcccggacagcaccagcccggcccagcccagctgcccttgcaggcaaggcctctttgaaacacacttgggttgaggtgctgtcacatgtctagaacccaaagttagttcatgtcaatattggaaataaacagaaggagtgagcaaaattggaacaattacaaaacagaaagttagaaatgttttgtcacagggtcagtccacctatcatactgaactctttgaaggcacagaccctattgactcatttgtctttctttgttacttggttcttagttccagtagttcctggttcttagaaccatgttctcggttcttagttccattcattaaactgctgtgaaatcttccagttatgatagagctactttttttttttttccagtatatttgagggaatgatgagttcagtacaggtgaattttttttttttttttgagacagagtttcactcttgttgcccaggctggagtgcagcggtgcaatcttaactcaccacaacctccgcctcctgggttcaagcaattctcctgcctcagcctcccgagtagctgggattacaggcatgcaccaccaggcctggctaattttgtatttttagtagagacagggtttctccatgttggtcaggcaggtgtcaaactcccgacctcaggtgatctgctcgccccagcctcccaaagtgctgcgattacaggcatgagccaccgtgcccagcctacaggtgaattttttaattagcttcaaattgaccgacattaaatgttagacacaagaacgggctacactccatgccacatgaaatgcaattgagttgacgtgcaggtctgtcagaggcaggaaacaaactatatatgaccttgaaggaagagttgcatttgagcagcgagagcagagggggaggatggagcaataagttggaagtacgcaagtgagcaaaggaattgagaatcaggggaaatggagaggagtctttctggaatgtgatgaattgaaaggcaatagcttctgataggatctaaaatgtgggttaggaccagatcacagagtttacctggaggactgtgagtttggcagaggcaagggaagccattggagatttagcaggggaatggcagagtctaaattcatttgagaaggagtcccctggcagcagtaaatagggcaagtggttaggaatggggagaatcttgctggcactcatgggaaacatggtggcctcagcatgctggctgcggggcagg

SEQ ID NO: 77884 - DNA, 1085 bp, Homo sapiens
tgcattaacagagcaagactctggaaataaaaggaaaaaggataaaatttatttaacccgatagatcgaaaattttatttcaacatgtaaccaatataaagctttactaatgagatgtcttacgttctcctttcttggaaatctctgtgtattttgcattgtcagtgcttcagaatttgacccagtcacatttcgagtgcttgcagccctctgcagccagtagccttcggcatggcacagtgcagctgagttcctctataaagcttcctccggatctgcccttcctgccccgcagccagcatgctgaggccaccatgtttcccatgagtgccagcaagattctccccattcctaaccacttgccctatttactgctgccaggggactccttctcaaatgaatttagactctgccattcccctgctaaatctccaatggcttcccttgcctctgccaaactcacagtcctccaggtaaactctgtgatctggtcctaacccacattttagatcctatcagaagctattgcctttcaattcatcacattccagaaagactcctctccatttcccctgattctcaattcctttgctcacttgcgtacttccaacttattgctccatcctccccctctgctctcgctgctcaaatgcaactcttccttcaaggtcatatatagtttgtttcctgcctctgacagacctgcacgtcaactcaattgcatttcatgtggcatggagtgtagcccgttcttgtgtctaacatttaatgtcggtcaatttgaagctaattaaaaaattcacctgtaggctgggcacggtggctcatgcctgtaatcgcagcactttgggaggctggggcgagcagatcacctgaggtcgggagtttgacacctgcctgaccaacatggagaaaccctgtctctactaaaaatacaaaattagccaggcctggtggtgcatgcctgtaatcccagctactcgggaggctgaggcaggagaattgcttgaacccaggaggcggaggttgtggtgagttaagattgcaccgctgcactccagcctgggcaacaagagtgaaactct

SEQ ID NO: 77885 - DNA, 1091 bp, Homo sapiens
atgttgaaataaaattttcgatctatcgggttaaataaattttatcctttttccttttatttccagagtcttgctctgttaatgcaggctggagtgctcctttttcttgttaaagtggttcctggcacacttgtaatcccagcactttgggaggccaaggcatgctttgagcccaggagttccaggccagactgggccacatagggtgaccccatcactacacaaaacttaaaaatcagctcggcgtggtggcgccacacctatggtcccagctacttgggagactcaggcagcaagatcacttgagcctggttggttgaagctgcagtgagccatgattacattactacactccagcctgggtgacagagcgagaccctgtctcaaaaaataaaatggctcctggaaagtttaaaattgtagatatgtggctctcagttatattgctgttggacagccctgatgtagacggctttagctaactattaccagctgtggaaaaaggcaggaggtgggtccctgaggtgagagtaatagcagttataggatacagaggcaaaaggtagagtgtgaggtgctgattggtgggtctagggatgggccatggttttggtggcaagatggacgctagaaatgtaggtttgtagttgtccacttagagaggggctttggactctgaggaagagggtgaagagagaggaagtccctggaacttaaattgagcctgtatttgagatggaggaaatccagagaaagaggccagtgatggcagaggagactcagatctgagtggtgtacaagccagaagaaagtacatttcaggaagaaaaagcctcagcatgcaaacagaaaaatagggttctttttcagttgtgatgtgcacgctgccttcttaaacggatgagattggacttcccttgggctgccttggagacctagtgctgtcattgtggattctggctgcgtgccgctgcctgaccccggaagggtgggctgtttcctccacctcaaggggtcctgactgctgggcttttgtgagcggcacattcttcctgccatcagtgtgtcaacctccagagctctgctgactc

SEQ ID NO: 77886 - DNA, 1053 bp, Homo sapiens
gcttcatgagcaaccacaggcatttaagtaaggttcatattgaattgggggttttgggatttggccccaaagtggaaaatgacgcctctgttctcccaaagcacaaacactatcatgattgagtaggaacagaaatgtaatctgtggcacatctgttacgggcacacagtgctgtcagccccagtgtgagccacgtgcaccgaccaacagtgagtgtagcaggctggaggagctgctgacagaggcttggaagcctccggagtatcgaccaccttttggagagcaagcacaggtcactctggccttctctagcgcatcaccttctgaaatggtgccacaggtaaagaatgccatctactttacagcttttctcctctattgccagcggtatcagagaggctttccagcttaccatgtactacttgttgagaacttttcactctttcatttactctctgtacaattgcttattcttcagaatgcactaagacgacacactgccaataggaagcaggtgtaggggcggccggagcctagtagccacagtaaccctgcctctatctcagaaggcggggtttggctttctttcctaaaactgattctaatacaatgtgtagtttagcatttctggatgtgagaggtcggaaaatattcagatatacttaacaatttacaacattctcaaaatacctggtcaaaatcagaactttgagacacggtctccctctcacccaggctggagtacggtggtgcaatcatagctcactgcagccttgactgcccagggctcaaatgatcttcccatctcagactcctaagtagttgggactacaggtgtgtgctaccacacctggctaattttttagacagggtctcactttgttgcccaggctgacctcgaactcctggggtcaggtgattctcctgcctccgcctcccaaagtgctgggatcaaaaacacaagccattgtgcccagcccaagaacaattttgcaaagattcctgcctgtggctgacattgtcaatctgggccccagtctcccttttctaagt

SEQ ID NO: 77887 - DNA, 1031 bp, Homo sapiens
ggcagcctggatgagataacgtgagccttttttccctctttgtttttttaacaagattttctaatcgacttgcagagtagttgaagtgggtaagcagcagggtaccttgtataatgcacgacagttgcagtatgggaagaatggaccgggcccctgggataaaatcagagtggtcctcacacctagaggacggggacaaccagctttcagagtagcctcatcagtgcccttgcagtctgactgtgtacacttggttcagctaatgtctgagagtcctgcactgggttactttatactagtgaggacgttaaccagccatattggctcaataaatagcttcggtaaggagttaatttccttctagaaatcagtgcctatttttcctggaaactcaattttaaatagtccaattccatctgaagccaagctgttgtcattttcattcggtgacattctctcccatgacacccagaaggggcagaagaaccacatttttcatttatagatgtttgcatcctttgtattaaaattattttgaaggggttgcctcattggatggctttttttttttcctccagggagaaggggagaaatgtacttggaaattaatgtatgtttacatctctttgcaaattcctgtacatagagatatattttttaagtgtgaatgtaacaacatactgtgaattccatcttggttacaaatgagactccttcagtcagttatccaaataaaagcagttctgaaactatccctttctttgttatgggtggaaggtggggctccaggccttcgcagtctgtggcttataaaatgtgcagaggccctccttccagaccctggggacgcgggagaggcctggctgcagctcacagcagccacagccaaccccactgcctcccaaggcactctgggtggatccgcacagctgcctgccaagccagcctgcccccatcctgtgcctgccttggtttcctttggaggacctggttgagttccaaaccagtttgaaactttgaagccttgctgc

SEQ ID NO: 77888 - DNA, 1030 bp, Homo sapiens
ctggcctcagaacatgctgagcacattttgtagggtggcacctttttatccaagttactagctacacatcagtgtttaaagagaaaaaagtgacctttcattttttttttcttgaaacttgaggaaacaagatacatactactgattttttttttttcttaaaactaaatgcatgactgcagagcggtagaggtgtatatttttcatactgtggggcaaagtatttgtgctgctttttggagatggactggaacgtctggtttctgtccccgggcccggcagctacgtctattttctgtagaaggtgccacagtgagacctggagccaccccttcctgccctggcgccgtttagagctgggagcccgtggactcccggcctgtttctaccttctattcaaccactctgacgtggggagacaagaagaaatagaactttttgatagtgtggtaaaaacattgatttgaactattttagtaaaaggagtaacaaacaagattgtgatagtgtctactttgagctagataaataaaggcctctttgtgagcctcctggctgggtgctcagtgcttgtttctgtcgtgggtggcagggtcagcaggcagagacagggccaaggcccctcaagcaccgcagatgggggctcagtcggggccccttccacagacagagccgtggcccctcaaggtggacagtgaggccgctgctcctccagctgcctctgtctcatcacaggccagaagtggaaagggtttcaaatccaagcccccgggttcctgtgtgcgttctacgcagcaaggcttcaaagtttcaaactggtttggaactcaaccaggtcctccaaaggaaaccaaggcaggcacaggatgggggcaggctggcttggcaggcagctgtgcggatccacccagagtgccttgggaggcagtggggttggctgtggctgctgtgagctgcagccaggcctctcccgcgtccccagggtctggaaggagggcctctgcacattttataagccacagactgcgaa

SEQ ID NO: 77889 - DNA, 1029 bp, Homo sapiens
gctccgtgctcgacccagctgagcaccatcggcggtctccttgggggtgcttgcaggagccatcggggaaggagtttcatagggtctgaacccaggacttaaagggggggcgagaggctctgaactgtgcagcccctcccccgcatcacctagtggggcctgtggaccccactggacagctgcaaggctgagccacaccccagcagtgacctgctcaggcccgatagttagcgcggcatgcaaagacctggtgtgggtgtctctgggcctgcagtggcctccgtgtccctcctggccccatggctctgaggacgtgggtgattctgccgtgatgaggcggcggatgtgcataggcggcaggtggacgcgggtgagtcccaccactcacatctctctcctctccacaggtggtctggagaaagctgggagatgcagccagctccaagccctccatacggcagcacctgtctgggaaccagttcaaggggcctttgtagggccactcttctgtggacgtggactggccctgctgggggtccccagggggagtttcaggccccagacacgggcaggacctccagcccagcccctgtcttcttcctctgtggtgaactgtacataggacgctgcccgccctggcccagctgccatgggtccgatgcactggcccaagccgccatctcccgcctcatacaccagcaacctgggaagacgagacgctgcgactgttcctgcagcagagcggcccggacgcctcattccccctctgggccctgggctccatgagcaagaggctgcaggctgcttctgagatccagcctgggaactgtccaggctcctctgtcctgcctgggatggaggggccactcatcaaaccctctactccccggctgccacccacactggacagagaccaccactacctgggtcttgacgcaggtggcaccacttcttgcccaaatgccgtggcctggccccaggccccccaagcactgggtccccggcatgtggacaaggccactcaccaca

SEQ ID NO: 77890 - DNA, 1020 bp, Homo sapiens
atttcatctgcagaagacctggtgggcgggactggccagactggctgtgggctccttgggtctccatcctcacacctgcctcctctgcctcaccccggtccccttttcctcctgcctgggccctggcccctcagaatgggggccttgtctgagccaccggtcattcctgtgggagccagccagggtgagctgagatgtgtgattgccttccccagggcccggcctgccccgcacctgagctgccctcgcccccctctgctggctacagccctgcaggacagaagcccgaggctgtcgtgcatgccatgaaggtgagggccactacccgctccctcagaagtcctcagatgctgggtgcactgtgagactgtgggacctttgcacctaggggtatccaagtggcaggggtgggaggtttcatctgtgtgtgggtggctgggtgaccatggctgcctggagcactgtgaggttgaactcagaggtggcagtcataagtgtgtcacctgtctgccatccctgagctactgcacctaacaagactgaggcctggggtcggggagggcaggcacccaactaaggccagagagagaggggcaggagtggggctagaactaacctcaggtctgccaggcccagcctctgcaggtgcagactggtgagtccgatgggctccggttcctccaggctgtgcacacctgagcacagtccccactcccatgccccccttcctcctacgtacgtgccccatgacatcccacatgcatgcacggccacgcctactcacaccccctccacgtggcgagtgcccactcatctccagcgggccctgggttgcagtgagtccacctgtctgagggtcttccttgcccagcctgtctacttcctcccgggtggcccagccatgagctgcttcccttgtagggcatccagtgtcagcagggtgagatgacaacctgcccctcagttttttccacgcttgtccccaggggcccagcggctcagggtcctcagctttggttc

SEQ ID NO: 77891 - DNA, 1023 bp, Homo sapiens
gagctaggggtacatctctcaggagaggtgacccagagaggcatgggtggctctgatggggtggggggaggggtgtcactcatggttgggggagggtgagtgctgggcctaggggtgggggctgtagcctcttcctctttttggtacctggtgggtggggagggggctttccttgatctgacctccacctgcgggccgtgagtgcctctagttaacctaggcagggtcagccagggttaatgccgtggtcagggcatggcagtcccatttgatggttcagggctgtgcccaaggcccccgtgctgagacccctttgtgatgctcgccagggttatctaaaacccatcacactttgggggccctgcaggaaggttggttcccacttctctgtctctcctttatgtccctccctgaccttggaccacacccaggtcctccctgaggcccaggaagcagctcccagcctccagtgcccggctgccctggctgaccggcgtctggtgggcgtgggctatttaatgaggggagtcagtgccggatccctgctttcctgtcttggctccgtgggagctggtaatagagcatccacttgcctcctcacccccgcaggacacggctgtttgctggcccttgagccaagctcttgagacctcccagccccagtggggggcctggccagggctctgatggggctgggagaacacaagagctggacctcagtgaggctggggcttgtgagaagtgcggggccaggtccagcttttgagggaggcaagcagggtgtgtgtgggatctttcacagccaggccgaggggctggtgagtggaactgggaccccagacatggctgcagcctgtcctgccttccttgcccctgccccagcccagccccagcctgggcctcccctgcccctgcagtttgtttgggtaactcaacagcctgctgatttatgggacattccgcagggttttatctgcccagccactttctctcagttcctttgaagtagaaaagggtgtttcg

SEQ ID NO: 77892 - DNA, 1121 bp, Homo sapiens
gctcagcttctgtttggactccggcgtcccttcctccacatcctctctggccctcgaccaaatgggctcccacgtgctgttaccgaaaacgcaggtttgtgctgccgtcccctcccctcccccagataatttccctgggaggagatgtgtgtgcgtgagcgtgagggaggtttttaattagctgcacgcaattcccacccttgccttcggtgagcctctataaacatttgcatgtccatagaactttattagcaagccacaaagccaggcaggaaaaacacacaatctctcattaaggggcaatgtgactaatggcgcatcaaatgagtaaccattattgcacttaaatccaaattaaaaatcctgctatgagacaggtcgctgcctttgcagaatgagattccctaggatttccccgaggaggggaagcaggagctgaaatcacctgctgggcttgttctgcacacagagaagagccccagctaaggaaggtgctggcccttcctcagggggaggcagggggtccactgccgctccccagaaacacccacctgcccagtcttcctcgggtggctccctcaggacccagggagaagggatcttacacacagagctgccagctcagagctcaaacaagatttcccgaatccttaacagggtggggccagccctgccaaacactcagcgtggccccttccaccctggccaggcccaatccgcattactcacttctagagcctccagagggcagcatgagtgtcctggactagggaggaagagacccaggaggttgcagggcctccttttccactgaggaccggagttcaggacacctccagcctgtatccagggccttcactgcaacactgcccaactcagggcccagcgaggactcgctgggtgaactccagttgttccccagccctttctgggcctctgcagtgcggcccagccttctccccagaggggaaccccgtcctgcagcgaatgcctgcctgcaaagctgcagggggcctatgtggggccaccctggggtgacccctagggagcattgtcagaggggatgctgaacagaaagaggataagacatggaaacagagcccacccaccccagcctgccc

SEQ ID NO: 77893 - DNA, 1049 bp, Homo sapiens
cccatgcccgagctgacactaaaaagtgtctgtagacactgcgagttgtcctctgggggcatcacccccatttgagaaccagtgaccaactgtgtgccagccctgggcttgggctgggaggtgaaccacacctgtccagccatgcagacagacgataaaccaacaacgtcattacacagtgccaagtctacctccccttccagagcagcccacaggcatgactgacggacgtgtggacacaaacctcctgcgtgccctcgtgggaacaactctggtgcagttcccgtggggtcaagttgaggcctgtcttctgtggaggcctctgtgctacgctgcacagccctgacccctgccctgtcctgcatcctccctgctttctctgcactctccctctgaggatctccgagacggatgacagctggatctcggtgggctttagtttggggccggacagtggagcccaggctagtctgtggccccagctgcccctggagctgctggggcccctggtgggagaatggtctccccaagtcacgcattcgagcctctgcttccaggtgggtcccccagcccagccagctgagggtgcactgtcttccagcacttcctgggtggaggtgtcagcctgataggccactgaggccctgcgtttattactcggcacccagaccattgattacgcatcactgaccaaccctgggagctcccacagtgcttcgtcttcctggagggaggtcgccaggtcttggggacggggtgttccctgggccctggccttgcccccacttcctcttcctggagggaggtcgccaggtcttggggacggggtggtcactgggccgtggccttgctccctgggtctcacctctcgcctccgtagcccctgggatgatggcttatctgtgggagtgggattggtgggaaatgtgaactggaaggagctctctccagctccctgtcctccaacctggctcccatcccagcctggggactgcacagtgaccacggggacctggagaccatcttagcacacgctcagggcagaggca

SEQ ID NO: 77894 - DNA, 1073 bp, Homo sapiens
ctctctgagctgctgggatcttggggtgcctctaggccggggcaccccatcccagggcttctcaaaggtttgcttttccctgggagggtagcagggcacttggggtggctccaccctggtgtgagttttggggtgggctatggggggtggtgggtgctcctagggacccagtgccgggcacatggcaggtcttcagtgagtccttgtgaatctggagtttctgaagacgtggagctcctggagtcgccttggcgagccccaaccctggccttcggtgtgggaaaaccactccggctcagctgaggtcctggtggctttgggctaatagatgtccagggaaggcactgggcagagtgatgggcatggttggcatttactgggtgacactgttctccttccttctagctgccccgcccctacggccgcccgagaagctggcttcaggtagagctgcctggtgggaggcgtgtttgcagtggtgtttgtgggggtcgggaggctgctttgtgtgctgtgcgctgctgtgtgctctgtcccctactccccagcaccctcccgttctttcctgggagcacttccttcccaggctgcgctggccctgcctttagagtcttcttgggatctgccctctcctcgagctggcattactggcgaaacttccagttttgcaaaataatagcaagacagtgatgcagcgaccgcccccgagggctctccgtggtgtgagccccttctcacgcaccttgcccaggtgcccggggtcctcccgcctctgcagggcggcagggctggtgctaatccccactttgaagtgagacacctgcagtgcacggagggagaagaggcttgcaagtctgcatgagttagtggagacgaggctggggcccacatgcccacccagctgtggctcccggtgggaagctgcctgggtccttgagggaggtctccagggctgctgagctgggtgggcactgggctgagggttctgcgtgggttgcacagttctgagggtcagcatgagtcaccatgccaggcaccctgggctgcagccagatccctgctggacagggcct

SEQ ID NO: 77895 - DNA, 1057 bp, Homo sapiens
tggcaagttcaggagtctgtttccccactgtgtagaggagggggctccccggaccccgaccctggggtgggctgtgccctggctgtgtttgtgagagctccatttgagcctgcagcatcttggaagctgaaggaattgctccagggcaggctggcgaggccacccccacaccccccacctttctacaggtcctgaaggtcctgagaagggctcagaggcccacagcgagggcagcagcgggtcctgcaaggctggcctctgtgtgtcgtgccttggtgtcaggtgccctatggccggaagcctttggccacaggccgtgctgtttccacagggcgggcgagggctcggaggggctggggcgtcacctggctgtggggtgggactcctcagacccaaaccttccatgccgggtctggggccagtcggggttgcgcaatggggatggagtctgctggaggctaatgtcccccttcctcttgtgtccttccagatccctcatccacctacatcaggcaactggagagcaaagtgaggctgctggagggtgacaagctcctcgcacaggtaggccggcttcgggtggcgctgccttgaggaccgcgacccagcacccacccctccagctcacccagggcacccttccccttgggacctaggctgtccccccaactgctcccactgccacctgtcacctcctggaaagtggggtcagggacctaaccctggctcccacacctctgggcttccctctgcccaaccttccatgctgactgcccagtatgcgagctcctcagggctggcccagggcctgagagggtggacaacacccagttgatgaagaaatgggctgcttcactcctctggcagatgggcagatccaggcaggagatggggcagactcacacggaagcctccccgcctctgccgtgctggactcactggccggtacctccctgggctgggttcccctcctccctcctgggcccgacctcacccacagacagatgaggctgctacccctgtgcagagctgggcagcaggggcacggcgtgggagg

SEQ ID NO: 77896 - DNA, 1075 bp, Homo sapiens
cggggtgaggggagcttaggtctggctcctggacacaagaacgttgtagggagacaccctcctccccggttggcagctggatagggaatcccccagaattggtccgatggcccccagacgggttaggggagcaccccaggggaccccttggccaggccagcccagggtcacctccctcattttgccctcaggcagccaagctgggaaatgatgtcccctcccctgtggctccagcactcattactgtaaaccctgggattaacttaattacccgctcatctccaagaggctggggcttgcaggcacccagtgggatcacgagttttgaggctgccaggaaggacagtcctcccggggagccggcccttcccggggtctcctgccctccagcccccgcctgggagtgcccagatcactcttgttcttcctgtctgaagagtgcctgctcctgacccaagggtgactgacgcccggctcactggctcctggcagcctggagagctcttctagggagctgagtgtggggagagggtcagggtggtgggtttaaaatgtccattgcttcattgggtggccatgcatgtaatgtgaaggtgcaagagtttaatccgttcccccccctttttttttaaagacagtctcgctctgtcgcccatctggactgcagtggcgtgatctcggctcactgcaacctctgcctcccgggttcaagcaattctcctgcttcagcctcctgagtagctgagattacaggtgcccaccaccactcccagataatttttatatttttagtagagatgggggtttcaccttgttggccaggctagttttgaactcctgatcttaggtgatccgcccgcctcggcctcccaaagtgctgggattacaggcatgagccaccgcgcccggccattctttttttctgaaagaaggatttcagaactagactacaagtcgattatttgaaaattaacaagaaacgatgtgaataaataaaaacccactggttccctcatctgagcagccgcacagtcaggatttctgtggacttccttcctgaactcacgtcaatgcc

SEQ ID NO: 77897 - DNA, 1003 bp, Homo sapiens
aacaacacacatttattctcttgcagttctggaggtcagaagtgccaaaatcaaggcatcagcagggctgcgttcccttctaggggccagaggggagagcccgcttccctgtctgtccagcttctccccttccccatcttcagtattacagtggccaccccaccgtggtcacatctccctctgagctcagcggggaaaggctctctgtttttaaacattcatgcagttagattgggcccacctggataatccagactaatctcctcctaattttgagttccataaccttgatctcatctgcaaagtcccatttgccaggtcagatagcattcagagatcctgaggattagggtgggggcatctttgaggggttgttattctgctgactacggttcacaagcccaggctgagaactttatccagaacaaggcccttgtgttgtcatttggggaaactgaggcccagtgtgtcatggagggcgctgccagggctgggactcctgacccagtttcttcccccgcactacactgcctcttctgaacagagatcgcagcagccctcacgggcacacagcttgtgttgtttgcattgctcagcaccaattatctcctcttgcaacatgccctgcgcatgaaaggagctggtccttctccacggctggaagaatgtgtcctccccaggacctctgggaggatggcactattaagccaggcttgttgatgatcatttcggtcaacaatcaccctgctgttagttttatgtgaaacgcgggaagcccaatttgctgtcctcaaactgagtctatctcgcttctaaccgggcaggtccactccgctctgcctaatttcggggacagtgtctcgcaggagacccagttgcgttcctgtcctgccctctgagtcctctgagttatctgggcctcctgccctcatttctctggggcctgggaaagggaaggggcttgtccaaggtcacagagcaggttggggcaaagagggggcct

SEQ ID NO: 77898 - DNA, 1035 bp, Homo sapiens
atctggcggggctattgttgaccatacaaaggatggaacgcggcagggcaggggcccaggcccgaggagtggacggagaagcaggagggaggatgcctggcctcccagtgcacccagtccctgccatggctgaggcatctgttttattgcttcttgggttggggagtggagggggcaaaggatccccctctacccttccagaatcttcagcttggatgctttaaactctggttctgagctgatttattactctgctaagatgcaaaggccgttttatgtactaggtaattaagtggcattatagacggctcgagagtaagtggctgctgttttaataattaaaataaatgacccctggactgttccccagctcaatactctttccgcagtgtcaagaccctggagagacagagtgagtgtgtgagtgtgcacatacctgtgtgtgtgtgtgcatatgggtgtgtgtgtgcatatgagggtgagtgtgtgaatatgcacttgtgtgtggatgtttctgggagcgtgcctttgtgtgtacatgtgggcatgtgcatacatttgtacacacgtgtgtgcatgcatgtgtgtgtgagggtgaggtgtgcaggagggatggaggaggaggtggctcctttgtgaccttctgtttccgtgagaacccttgggacacacctctcacccaggttgggggttccctgtcctggattaacttttgtttcacccagaggccaggccaacctaggcaggtttcggatatcgcctcctgtgtgggccagccctggttcaaacccgagctctggccctatgtggctgtggccaactgcccttcctcagaagcttggtttttgtgcctgtacagtgagggtggccatgtccatctcatgcaccatgtgcctgatgtccagcagcgcgttactgttcctcagtgattgtgtggcattgcgctgtggctctgtggcacttggttagggcttgtggaggtagaagggtgaaactggctggccactgccctcaggggtgccagaggagggaggg

SEQ ID NO: 77899 - DNA, 1042 bp, Homo sapiens
acaggccctcggggatgcacacaccagccagctggggcctgcccccctggggggctcagagtcaggtggtagagacattacaagatgagatagaataaaaaagaactagaggtgctggcgcccaggacagataaacggtgtcgtgcaactcaatagggaaatcaggaaggctccatggaggaggaggcttcagaaaagtgcggacgtgctcctgctgaccaaaaccctaacatgctgcaaggtgggcacaggcatatggggcatgtcctggggtcagctgggccctgctgctgctggcttctccaccctcttccatcttgtgggtctggggagggtgcaaggaggagagtgcaagaccctggtgcttcttggttatcaggaccagagagcagcaaggacgcagcagtgggtgcgaagaggtctccacctgtctgtccccttcactgcgcagaacaaacaacaaaacaagaaacttctgtggagagacagtgctctcttccatggctaatgggagtgaggtccagcctctatggagcgtaatctggtcatttctagacaattgcaaaggcaagtccccttcaaccagcaatcccaccacctgtgtacatgtaggctggaaatttttcctgcaggaaaacgggctgcttatacacttgcagatggtccgtgcccaggctgcttacttgaagcgatgcttgaaatggccaagtttgggaacagcccagggttccattgccaaggacctgtgcccaccccctgccccacataccctggaggccgtgctcagagggcagactctgctagcccatctggctcgtgcccaggaatggcacagtgaatttattccttcctgcctatgccattttgcatgtccccttgcccacagagaggcacaagggatgctggcacatggaggccagcacggcccacgggagtgggtgatttatgtctgccggctggtgagcgccatgccgctgccttctgcccgcctcgtgggaagcatggtgcctgacatctccctgcctgctctctcaccctccca

SEQ ID NO: 77900 - DNA, 1098 bp, Homo sapiens
gccccctcgttgggagggaccacgtgatggggtggttcatgccaaatgctgcccaggtgccatggtggccagtggacgtggggcagagtttgcttacaggccttttcagggtagcaggtgcctggtaggaggtgggcgcctgcccagacactgattccatgaggctgtcctgatgtaaatgggtgcagagttcatggggccaggcagggagaacaggcatttgagacctgggggagccgagggaccttggcaccttgcacacactggaggtcagtgtgaacctgaagccccacctctccggatggaggggaggggaggagaggtgggaggccaggggtgtatccctgaagatcccggctgtgagccagtcagccctggattcaaaatcttaggctaccaggaaccattcttggtgagtacgtaatttacagcactgtccagagcttcggtttccccacctgtaaaacagggcactgatagtgcttaccttggaggtctgagatgatccatgcagtgtgcttggccctgtgcctggcacatggtaaatgccaacaagacattggcagtgatgctgactggcaggagtgagtcgtccaccgagtgggtggtcaggaaagaccagtttccttttcaagtagcattcagtacgattctggagcgtagggctgggagagcacagagccccttgcagcttccttccctagtctcctgtgaccctccataatgttgcctgtttgctgtcagagttgtctccatcagttggcctcatggtcagcggtgcccaggacatttcggcgctgcgttacgacagctcattgtgcctctgggctcggggctggagcagacgggcgcagcagccctgcggctgaaagccaccgtcccctgcattggtggaggctgctggcatgccctcgtgtatcatcctgcctcttctctggggtctccccaccctcctccctggcctggccttctggaaacccatttgtgtttgttgctcttctggagtcttttctgcttgggttggggtgtccactatagactcttccatgaacccaacagccagacaatgagttattaggcaggtggggtgggggccgg

SEQ ID NO: 77901 - DNA, 1058 bp, Homo sapiens
cctagctcaatgaggcaggaggctggataggtgtgatgtcccaggccacccatgtgccaagaggtgccagaaagcaggaagaaaaggggcaggtgggatttgttgttctgatcagctcactggagacaggctcttgtcacagggggcattgaactgggcacctacctgcctgaaatatttacattggcaaaggcccggacaggccacaaattaccctgtgcatgtgattccatttcccagccactttttttctctaaggagttgctggcatcgtaaatcttactgcaaacagtggggaagaaaagaatctgagattctacaaagcacatttaacatccatgactgtgtttgatctttccagtggtggaggggcccgcctgctcccctgcagacgtggctgaacctccccgtcagggtagcccagtgctgctgcctgtgggcctttggtctgcgtctcagccttccagtggggcctacagaacggcacggctgtgcacctctggcacctgcacgcccaaaaggcacttggtcatcacagcagctggagctggggggttatcgtaacttggtagccattattattattattattattattactactactactattgctgctgtggctgtgcctgttccagtagctctggcaggcaggccttggcgagatggcctggggagggagtttgtgaggcccaggttagagtcctgcatgttggttctggaagggacttcttgtctcccagcccctcccccatgatccctgtctccggctggcccctcactgcactgcctttgtcttcctcatcctttgtcttcattcctccttcccgtgagggtggggtggtctgctgaagagggagtgtccctggcaggtggggtcacttgggcacaggcaggggtggcagggctggccggacagtaggtgggagtgggggaagctccagggctgactttgtgctggctgtgagttggagaagcccctcgtgggatctgggaggcaggggtgggttgccttcccccgcctactgggagggaaggaggcccctttccatttcctg

SEQ ID NO: 77902 - DNA, 1999 bp, Homo sapiens
actcagtccttctcctgggccagcttggtcctgcatgtcagagcaggaaggggtgccttaagctgtgtggcctggggacctttgggaccaccctcgaggggccctggccctggattttagatggggtcagagggtgggcttcgggaggcctgtgtgcaaagcagccatgctctgagttttactgaagggctcttgaaatcctcacccaaggtcacagtttgacttgtggtctgtttatgccttggatgtacccctggccctctttgtgggattgtggctactttttggggatggaggaagatgtggccattagtgtgagccaccctcattagacgggcacagatcggtgaggtttggaggagtggggtggtcacagcagcgggtttcccccgggttttctgttgcagctcagtttctggaagggagtggatggggtgtcatctcagcccacgtgtgtgatttggcctggtaggtgatttggattcctgatgtctacctctgccccctgtaggcagctgtgaaccacaggcggtctgtgggggttagtccgtgtagcagcgcaccagcttccagcctgggtgtccctgggtgggccccttgccctggaagccagctccctacttgtcttgttttatctctgacagctggtgatggccctggtggctcagggcaggccagtggaagcctggagaggggtgacctcatggcctgctcatccctggcagcctgcaggcccagcacatgcaggtccgctgtgcgcagaggcacaattcatacagggtcctccggcaggtgggacatacagggctgccaccctgttgtccatttaaggggaagaaagttagtggtcacatatgtttgtgggtgatttcctttggtgttggcagcttgcatttttgtggtgctttgagctcttgagagagttttctccctttctcagcaggtctttctggcaacccttcgaggtgtgttaccaacagaagggggtgagggtcgctgagtgattgctgggcgctggtgccagctgagctctggatggtagacagtaggcggctgaggccctggcggcagggggacccaggagccacgctcatgagtcatggggcctctcccaggttcctgagggccttggcactcccctggcgcagtcactaatgcacactaagcatcctaatgccctgcgctggctgagggccaggacgcggcctcaccccacgaagactcctgtgtacgggaactcaggtggaacagggctggatcctgggggcagggccagccagcaggaaggaagagcaccctgaccatccccgtggaggctgggaccaagccccgttccagatgccatccaaaaggccaccctctggctgcagtctcgaccctccaggaagtctttctgcccctccttgaaggcatttgccctgtgaccttgaccagtcactggcttctcagggtctgtgggtgcaaccctgggggtgacccatgggatggccagcgtcccacagaatggcttctacagcctgtccctgggtggggatctggcccctgacctccttaacctcctagaatcccctgcaggccatccaccagtctcttttgcagatgtggaagcaggttcagtaatgtgcctgggtcatagctgtgagtggtcaggccacctgacccggctggtgcccctcgggcggacacaaggaccaagtaaatcagatggtgctcatgaagctccttcccagcaggctaatgctgtcagcaccactgcctctcctctccgctctccccttatctccctgcattccctaaattcctcgcaggccaccctgcctcccctcctcacaggccgggagttccccacctcccttagctttattgcctccctgcccaaggtctggattgaacttggcagggttccctgtgcctcggcctgtgaggagtgagtggggatggggtgaggggagcatgtgggagggtgaggggagcgtatggggtgtgacaggacctgttt

SEQ ID NO: 77903 - DNA, 1157 bp, Homo sapiens
caccctttctccagaaaattaagaagctagtttctccctctttcggcaccttctgtcctggctggcaggggaaggctcccctcttctccccctcgcctttgcccagcccctcctgggggacctccctccgcttccgccattgtctcctttctcttgttccttttgggtctgtcctctggctccttccccacaaacaggctcacgtttcctggtccaaagcaacacagagcccctcctgtctactgctctgccccttggccttcctccctttgccagaggataaaccctagaggctgaggccacctccttccccatgtttgctccttggccctgggcaatcccaaaccctgagaatggtggctctggctctgtccagcagcctcttctcatctcaacttcctggtggcatctgatttccccctgggattgtcttccagaatggggtggtgtgctggtcacctaggacctctttgagcaacttccagcactctctccagcccctcctgcccagagggaaaacatcgccctgggctgggctgagcagtctctccctacctcttgctcctggccttgaggctcaggtgtccagattgctgctggtgactatgctattcaccttgtgtcttctgggtttgggtcccttcctctctcccctgcactcctgctcccctgcctaacccacgacccctcagagtcaaggtttcctggctctaaccccgagtggtgtccactagccatatgtagctgcttcaattcactttcattacaattaaatgacatgcagctgtaccgaccaccctgccttcgcatgggctagtaccgtgctgacagcgagatggggaaaattccatcataaagggaattccgctgggaagccctggtctagacgattcttccttgggctttgtgactcctacttgtccacggaaagaaacctgaaagctggctgggtgtggtggctcgcgcctgtcattccagcactttgggaggctgaggcaagctgatcacctgaggtcaggagttcgagaccagcctggccaacatggtgaaacctcatctctactaaaaatacaaaattagctgggcatggtggtacatgcctgtaatcccagttactcgggaggctgaggcaggagaatctcttgaacttgggaggt

SEQ ID NO: 77904 - DNA, 1545 bp, Homo sapiens
catgcccagataatttttgaattttttgtagagactggatctcactatgttgcccaggctggtctcgaacacctgggttcaagcagtcctcctgccttggcctcccaaagtgttgggattacagacgtgagccactgcacctggccttggctgcctttggtagaggtctggtctgggctgactggacttgggactgggctgtgcgttgctctagtccagtgtggcacactgagacaggtaaaccccaacaccagaaagtcaggttctccttcatgaactgataggattttcaaacaaaagaattttcagttctttttccagctgcccctccgcctgtctcctgtgccccacgacaggcaccatgcccccctcctgcccattgccaggcatttccttccctcccctgataacctgctcctccacggtccactcccctttagccaacctggaggaactaggattctagcaagcctgtgcatgagccccatttactttttaaagttcggattaaaattttgagcttctcaaaatgagacaggtttgttctcctgcttgtgtttttgttggtttaagagggaggatggaacggggtggtctgggcctttagaaaaagacagagcacgctaactctgaataggtcttttctgtgcagcagctcggctaataaggctgcttttcctaaacccagccaagctcaggaacaaaggtcagtgaagacaatggggtgggttagataagcctttccccctccttccccagcctgtcccaagggatccatcaatggccttgggatgctgggcctcagaaaggagggctggccttgagaggctcccaggcaggtgacccaggggtgggtaaactgtgcccagtgcttcacagtttgccacaaacagcatcccagtcccaattccattctgttcagagcttccaaatggtcccaggagggagaccttagcatctccatatcttagatggggaaatcagggcttggagtggtggtgcggtgacttgctctaggtcctgtggggctgattggggggcctgggatgcgtcttgggtctcctgtgtcagaattctgagcccatggccctgtgcctgctgcccagagagttccaggggagcggtgacctctgccacagagacagggcacctcctcccaggatgccaggcccggggcctcattcctgtctccctgtgtcctggcatggaggagtgggggaaggcggtgcagggtgggccaccttccctacgatggctgtggctccccatctcttggtttctccttccctcacttctctgcacgaggctggcttgccaccgcagcagtcgccccaccagacctcttgctcaggcctggcctctgagttcccaggaccagcacgtgatacagaaggaaatcagtggttgctcctaatctgttttccgccggtggggattttccaatccatgcttgttgccttcatttgcgcagagaattggaagtctgttaagcaagttcctgagcctccatgggcctctgttttctcttttgccaagtgggaaaat

SEQ ID NO: 77905 - DNA, 1854 bp, Homo sapiens
ggcgcgccaggaggccctgctgcgcgagaacctggagctcaaggagctggtgctgctgctggacgaggagcgcgcggcactggcggcgacgggggccgcaagcggtggcggcggcggcgggggcggcgccggctcccgcagctccatcgacagccaggccagcctgagcgggccgctgtcgggtggcgcgcccggcgcgggggcccgcgacgtgggcgacggcagcagtacgtccagcgcgggcagcggcggcagccccgaccaccaccaccacgtcccacccccgctgctgccccccgggccgcacaaggcccccgacggcaaggcaggagccacacgtcggtccctggacgacttgtcggcgccgccgcaccaccgcagcatccccaacggcctgcacggtaaggactacacgggccgggcagcgcgggtctccctggctgcagcccttttcccaggctgcggcgagaggaggtggtccctggctgtcccactcatgcggccgccactccagactcctccagctgtcatggatcctgggccaggggatcccgcactcacccaaagtggggctttgggcggtggtgggccggttcagtggtggagcgtctttttgtccagctcagaacctgctgccggtccggtcccagaaaagtttctagcgggtgtagttgccaaaattagggtctgtcactgctgggctggcggtgggcgcctcatcccagccttggaaatccttgcctagtagcgggaagttctaaacagcaaaggatacaaggccccttgagcgcaagtgaatttcccctcttgcagcaacaggtgtcctccaaaccaagcagcgtccacgtgtgtgcggtggctggagttctgcagtggggtgtggggattgggaaggtgcacaggcagccgcttgagacccagaggcagttggggagaggcctggggctcagagcctttcttgtttgccataaattccgcccttctagtcctgggacctttctcagccgagactctaagactttcccgagggagatgtatttggaacggattctagcttttctcctctgtgtgcctcagtttctttgtctgtgaaatggagatgatgacctctgcctcgtgggtttgaggtggagataaaccttctgaagggatttataaactgttgatcgccttacaggaagtgccgtggtcatccgtgaccagggtgtgggtgggaggaactttggcctctgtcagcttctgtcttctacgcccatgttactgctgcgcccagtgcagagggtggccccagcttggggctgtgggagcttgcagcctgctccctctcccagccccctgctcagcccttctgctccctgccagctttctcctcctcgctggtggatccggggcctccctgttcttccacgttttttggtagcttggcttccagttctgctggtagttgcaactgcctgaactttttgcctgaaggtggagaatgaacagctctttctggttccctttaaagcctttcctaattcagagaaagtgtgtctaagcctgcaataactgccctccccagaacccctcagcctgagctggggagggacgttttctccttagtttggtggccaagtggcctctgcagacgtgttggggtgggggctggggtgggagacatacccatggaggtggggcaggggcagtgcagcatgtttttcctttatttaccatcctgagcctgtgggttcaaggcaggactgggtttagagggatattttgttactgattagcaatctatggctacaactcaggtttctctttgtaacactgtatccacccccacctcccaccacaggctgcttcagggca

SEQ ID NO: 77906 - DNA, 1072 bp, Homo sapiens
ggatgatggaatacagcttcacaaaccctgccttgaaaagcaacccagagggaggacaccaaaatgctaacagcaagggaaactgatgcattcagtcggtgcatcagaaatcaccgctgagaagggcatgttctccgcactgtctttaagcacattacagatttttcccatcacgcgtcacttttgtcatgagctatcctccttagctgcttggagcttagggctgcacccctctgctctctccccctctccccaccaacccgcacgctggtgcatttggctttgattgcaatccttcattcactgactctgcacttaatggtcacctactatgtgctggtcacagtgccgagtactggaagaaaactgtaaatacaagtcattttttctagtggaattttcaccctataccacagtccgggaggactgaatggtctgagcgggaccactctactattacagttgaggacaccaagattccacagagtgtgtggtaaagagcttgagtttctgggcccaggctgtctgggctggatcccagcggtgcggcaactgggcgatgttatttgagctttctgagctccgctgccacatctgtaaagtggggatcatactaggacacacctacctaaacgactgttgtgaggacaagacgaaatagatgatgtgttgtgtccaacgcatgggacaggcctggcgcacaggaaggtgggggatgcatgttgagtgaatgaatggttacccggctgtaagtagttaaggcggacagcatcccagggtctctggccccacagcctaggctcaccctgcacctggctcagcggtcagccggcgccccagcacctgccccgcggagcccgtgagccctggctcagggcgaccccgagccgcgccctctcccaccccgcccgcaggtcggcgctgctgggcaaggtgctgcgcatcgacgtggaccgtaaggagcgcggcctgccctacggcatcccgcccgacaacccgttcgtgggcgaccccgcggcgcagcccgaggtctacgccctgggcgtgcgcaacatgtggcgctgctccttcg

SEQ ID NO: 77907 - DNA, 1936 bp, Homo sapiens
cttctgcatcatccccatttttatataatatgtaagaattcaaagcttggaacaaaacctttcccttcaccctctcgttccctgtagctgccgccccctatggtaacccacctggctgactgcctgcctttgggcctcccttttctcccctctggttctctctgccccatacctctccaccaaacttgctgggggctcggttcccggtgatctccatgttgtcgcacccagccgtcagccctggatcctcgtctgacctggcccccagcagcctgggcagagccgatgccccctccgccttgtcccgcatcctcctctggcttctcacccaactctcctggctctcttccctcctccccagtgctcccgctcagtccacttggctggctgtccctatgctcccaacttctcagtgatggcttagttcttggtcctcttctctgtctgtatccattcccttgtggcctcatccaatcactgggctggaaataccacttctctgctgtgggctctcaaatttatgtctctagcctacagcccttccctgggctccagatctgagtgtctaacttcctgctcaatagtccaccacaaaccttaccggtcccaagccaagctcctaatttcatctgcttgtctgagattggtccccccaaagctgatcctgagataagaaatgaagtgtaagtagtttaggaggtgggggatgatcccagtttgagcagtgggaggaggagagtggataaagaaggtaaacaaaccaataaaacaagttacctcttggggaaacaggtgcaattccctgggaaccctggggacttgtgtagagcacatgcccagagctaccccagaagtggaggggctgaggtcattggtggagggctgctcaaagtgggttcatctcctgtgggcagagccagagacggccctggcaaattgcagggggtgggcacggtggctctgccaccccaaccagctcctcctcatcttggtagatggtcgctccatccattcttccagcagcccaggccaaaaacacagagtcatcctcacacccccatagccaaacggcacgttccagtattccgcctcacagagcattcagaatctgacctcttcttatcattgcctccgctgccctgctctgttctgagccctcgtcacctctcccagtccttccctgtcactagtgtccctgcttcctcccctaccctggttactctctgcactgctgcaaaacaatccattcaaacccaagtcagatcccatctctgctctgctcaaaaccctctagtggaccccagctcaccaaagtcaaagcaaaaatctggaccacagcccacaaggctctacatgacctgcccccagtcttggtgacccaccttgtactctgtttccctcaagtactctgcccgagccacactggcttcctcactgtccaagcacactctgacctcaggaccttggcacctgctgttcccattgcttggaaggctcttcccccgcttcttgcaggtctcatctcacaagccaccctcttagagggacactgcgtgccctgcctgcattaacccatttatgcctgaggttgcaattttttgaatttgaaaaatcagaccttggtgttgaccttgagcagtaggacataaataacttccacaagcttagcgttccaataatggaacactaggcataaatgggttttaaacggacacccacacactcatccccagcccttcctcttccccgtactctgttctctttttctcctatcaccctctgacattgtctttacttgtttatttactctccgcctttccctgggagaacgtgattttgttgtcacccattggggatgctgcattgagcttggtaggaataaagtcatacaggagacaggaagtcatgggccccttggaatgagcttcaggatgac

SEQ ID NO: 77908 - DNA, 1020 bp, Homo sapiens
gactcctcgggcaagggccgtgcccgcccacctctgctgcccacggccacccacccttctcccctgccccgtcccctgggccacccttcacgctggcttccagcgggccctctgccgaccgcctgcttcacacccctcagcgctccctgtcgcctgcggactccatggcccttcctggactggcccttgcccaactcccagccaccaccactgtccctaccactgagcccttgcacaggccacttgctcagacgagacaccctaactcttgctcactccctaaagccctcttcaggggtcacctcctccaagaagccctccttgccaccccccgccggcaggggcccctcctctgtgctccctcggtcacctgtgctacctctaacaccacactgaccacactgtatcgtgagtgtccgttgacgtgaccaattgccctgccaggctgtcagcgcctcaagggtagggtctgcgtgtgatttgtctctgagccccctgtgcccacccagggcccggcacagagtcgatgctcaataaatgtgtgttgactgcatgaatgacctggaaccaggccatgcgctctcgcctcagcttgctcgtctgtgaaaagggggagatgcggaggctggcacagctttggaagccaccagcccgcagatgccccgcagatgccctgacaacgctgccttgggagagactgccccaggttaccagcctgttccctgtgctgtattcacggccatgcccctgggtgttgtgtgaggttgggcctgggtgggtgactggctctgagagctggatttgagaggtcagagaggcccctgggcctctcttgggagcagcttggtggagctgagccccgtgcctgtgggcacctgctgccctcctgacctggcaggggggcagggcaggtgagactgcatccctcgtggtggtgatgggagaagccgtcccttcctctccagggccgtgtcctctgagctcatccaaggaagaggtcctgccctgagtttctccttc

SEQ ID NO: 77909 - DNA, 1046 bp, Homo sapiens
cccaattaacaatcctgctaggacaggaataagctcttaaacttctccctctgcccacagcatatagcaccagtccttactaacccatgcactaaccgtgccgcacgcagagtgacagagccctgtccctcacctgccatctactgatgtccaagctgggcttctggaaggacaggcctctgagcccaagcgagacctacgagttttcctaattttaacttactcagttcttatttcacctactctattcaacctgcacaagttagtacctaccatttcagattttggcatggaactgaattatgactgatgcaacaggaagtgtaaacgttctgcagtctctttgggaccaagctcattcttgggttagatgatccattttatatattctaatttattgcttcccactcgttatttggcgcatctttacttactttactccatgggtataaaatgcgaaccattaacagcatttatacgtgtatggcctggaaaagttacaaactcatagatctatgtgtttctccgactgcgctattttctcctaactcttggtgtctttctgatgtagaataaatactgatttccttagtcctgtagcaagttaacaagcctgtaacgtgacagatctgtatcccaggggctgatcatagagaaaccacaaagcgatgttttagctgcgtcgagtcctcaacacgggggacttccagcctggtaccaggatagcctctctggcccagtgtgagcgaaggttcgagctgacttgccagtcccgtgctaagtctcactgaggcagggccttgctgccgcggaaaaacgtgtggacagaggaacgcgccggtcggatgtgggccacagtgagccgcggcgtggaaacggccgaaatgtgcgggcgcgttgtccatgtttggtcgtggagctgcccgcgggcgcgggaacagcgcgtcgggggcgggtgggcttgggtgtccgtggcggaggttaccccgggccccacgcgcccgctctctcccggccttggtctttgtccccgcgcccccgcaagg

SEQ ID NO: 77910 - DNA, 1037 bp, Homo sapiens
tagtatagagtcatgggaacggttttgctctccagtaggttaaatagattcctcaattaacattttgaataggttccttaattgacttataatcaatcatatttgaattattgtttttgatctaaaaagtagttatatgcttatggtagaattctccctatgcttagttggaaagatatgtggctgaaatttgtattaaatgactttgaggcatcaggtcttacaaatttaatctgtgggcgtattattgacagcttgatttgcgatatgaaaatgagcctagatatttttattggagcagttgtttggggcctggtcatactgttcctaaatagcagtttagtcatgaagttgacctacacgtctgttcatgaatgttttcgttttctgcattttccttttaattgccagcctagagatattggcatggtattttactggtggtgatgtccagaagaaagtaaaaaccaactcttatattttgtagaagtattggtttaaagaaaaaccaccttaactagaatcaaacaataagatcactttataactattgaattacttttctcaaaaagttctcagctctgtatttgttattttttttttaggttgtctaatgaataaagtttaaagcaagagtggcctatggggcagaagtcaatgttaactggtgatgtcttaggcaacagatgttttgatgtgaaacattttaagaggctttcattaagtgaagatataaatgaatacaagtcagttaattactatgatgattcaattaaagcagtggatcacagaaatgccatttcactaggaactaaattaaacatttggatatttcattagctacattggcaaacaattttttctttttaaatgagagacttacattacaatggcaagacagcagcataatacatgaactcatacattttcatatgttcagtatgcgtcatgctgttaatagtgacagaaactaaaaaatcatggttacagctttagaaaatataattcacacatattatttggatgactgtcatagt

SEQ ID NO: 77911 - DNA, 1088 bp, Homo sapiens
aataagtagagacgtttgcaaaaagcatttggtggtttcactggcttaaaacaaattattttcagccaaagtaattgacacaatgaagtggtttttggcaactccagcatttttaacagtaaaaaggatttgacttaaatcgccccccaaaaagttatgtaacatgaattttaccattcttagaaaaatatgttccagttgagaaacgattgaatggaattaggactctcttatactgcagcattactgtgcactttagccccagctgtcttcatcacaaacacttgaaaatccttaggaatagaacttagtgatgatgctttatctactattgagtcgcttatgcttaccaatcctgtatgcaaaatgtggcagccgctcccaggggactgtatggagctataataaagataatgatctgttagctcggcttcaccgaattagtcctttagaaagtaattaagcaggattgcccacactccactgctcccaaagactgaaatctggcttggtgtgtcatttctttgccttccttgaaaatggccttttattgagttgatataatttaattatataaaaatacgtgttcagattgcatcttgtacttaattatatcttacgccacggagttatttcccagccagagcttgtgctgttagaaggtggggtccatgtctcattcatgcgtgtatgtgtgtgtttaggtgcaggagaggaggggagagaaatgctggctttaaagagtgctcaccaagcatcaggtgttgggctgagcatttttaatgtattcttttgtttaattctcacaacacccttttgaagtgggtcctattattgtctccattttgaccgacaaggaaacagaggcccaaaactttgagtaacttgttcaagattgcctggccagtgtgtttcagagctggggtttgaagccaagcattctggctccactgtccatggtatactaagtactcagttatgctcgatgagtgaatgatgggaaaaaagatgggacagctatagacctgaaagggacttaggagattgttctggtctgcccttgcctgtaggagaggccacacatggtt

SEQ ID NO: 77912 - DNA, 1039 bp, Homo sapiens
gctagtgagttccttgagggcaggggcgctgtgttgtctttttctttcgtttgcttctttcccctgctctgcacagtgcctcgcagggagtttgtctccagtacattcttgttgaatgaaaaatcagatgctgaaattatgcaaagagctgtgttatctttaaattattataagagacaaggagagaacttctggatcctgagaagcttttcagtaataccagaaacatttcttcattgtgtacggtaataaaataacacacagtcataggtggcaaagcctcctaattactgtaggttggagtcagagtgtaagaacttccagcattcatggatcacatatattatatacgtatttagtgaaaaacaatatatattatttaattttgtttatttttctatttttgttcaaaatggtctctaaatgcaggccaaccacggtgtgtatttaactccccaaacaggaatctattccagtcttggagggatttgctgagagatgatacagtttacacaaaaccacgtatgctccacactgtggactatctggggaatttttcaagagtaatttcaacacactctattttccatccaattcactgcccttagaacataaccccaatataaaatgatctcctttctaatattttacagtttttaaagcaccttcagatctgtttctcacttaattctcacaaccaaactctaaggtaagtaaaatactactttatcatatttatcttacatgtaatcagggaagctgatgggtgctgagtaacttagccaaggccaaatagttcagtgaggaccacatctcgatcctaggtctcccgaaaaaaaccccaggtttctttgaactataccaagtggctttctatttgttgtcttcatgttagcatccgtgttgacctggtaatctatacctttataaaaagagaaaatacgctatagataattgaatttttgcaaattttgttatttttttccctgcaccttgaaaattgttatgccctgctttaagaaaccccgacattctgtaa

SEQ ID NO: 77913 - DNA, 1033 bp, Homo sapiens
gcaggtggggtagggaggggagtcagccttcctcctctgcagggttgcagaaagtttcaggggtcaaggaaataataaacacctttgaatagaggctcagaattgtttgtttggagttcccagtgactagtatctcagctgccaacagctttggtgcaatttacttttctttagctgaacattcttacgtggttttaaaagcaagtaaacagataaagtgtttctaagtgtaataattctctttcctgatgcatagctaacaagcagtgagcaggcagaggggccctaaaccaaaggctctctcatttactctgtaaaaaatctgttccacactgcgtaacctccacatccttctcctaaggctgaataaattgggtgccaccctttgaaatgtagtactctgtttggcccaggaaccgtagttagccgtctttcttgaggaaagctgattaatcttgttttgccaagcagaaggattatgggtatggctgaaccagttttgtacgctttgaaatatcagccctgtcaattttgtgtttctcagtgagggaggaacaggggacggtctcacgcaagagaaatcctggcttttgatttaaggaaaaaacccccagccacttagctttttttctttttaatcattatcttcaagacaaaaattcaaataccctaacatgtacaattatatagtgtttttgttgtagaaaatatcatttggtagattatcaagactgacaaaaataactatctttacctattaaaaacgattgagatggccaggtgtggtggctcacgcctgtaatcccagcactgtgggaggccgaggcagaaggattgcctgagcccaggagtttgagaccagcctaggtcgcatagtgagacccggtctctataaaaatttagccagttgtggtggcgtgtgcctgtagtcccagttacttgggaggctgaggtgggaggatcgcttgagcctgggaagatagttgctgcagtgagctacaatcatgccacagctctccagcctgggaggcag

SEQ ID NO: 77914 - DNA, 1042 bp, Homo sapiens
agagagcagagatgttattctatgtgacactctgaaaagctttttgatctccgttgctaggcctgtcttttgaatatccatgtggaagtatgacgttctatgtatatatttgtatgcttagcaataaaataaagtcacgatattaaggagttcactgtcacttccattccacccttagtaacatcaagaggaccagctcttctgaacgagtgtctcctgggggtcgaagggaaagcaatggggattccagaggaaaccggaatcgcacaggctccaccagcagctcttccagtggcaaaaagaacagtgaaaggtaaggacgtcttatctctcagttcctgctgttcagatatgttagtacggcttgtccccagagaggagtcagaagatcccctcatattccaacaagctgggagtactcttggagaagaagaccttctcctcaggtatttataggactaatcaaacagccatttgagggcagctgccaggcacagttcacacaaactaccgtccaggtggaaaaactgtcactcagattcccagcactctcatgtagacataagtagttcctgagaatttcttagtaccaagtacctagaactggggaagccattctgaatttctacctgagcaccttcgatttctagtacactctcctgacctttttaagttcattttaatggactgctttaagtttgtcagcagtattttctgagacacagtggctgaaaagttgtaattttatgatttatcagaggctatgtttcatattgatgctaacaccagaaatgtgaaccatttttctttatggtttcatgaaatacgtggactccaaatttttgagtttttctatgaggttagtttgtaatggattatgataagtatcagtgaaactaatagtaacattttgttcctgaatgctgctttttggcattttagcagcttgttttgtgtctatataatatatttatatctatataatgtactttgtaaagaaaatccagtttctctatgtatttttacctaacattgtactttg

SEQ ID NO: 77915 - DNA, 1097 bp, Homo sapiens
gacagggtttcaccatgttggtcaggctggtctcgaactcctgacctcaggcgatccacctgcctcagcctcccaaagtgctgggattacaggcgtgagccaccacacctggtctgttaagctcttaatattatttggtggtgaccatcttatgaatttaggcatggtgacaccttagcaacaaaacagactttaaaagaataacccatatgtgagattccattttacttgtcatttttcatttctaaaattcagacacatttagatgcacaaattaaagtgtcagttcccatggtactattgtcaaaaattggccattcaaattctaaaacttggtagacctctccttactgttaaattatcaacaaggccctccacctcctgaagtcatcgggaatgttttatttacataaaaaggcagactcctgaaatgcagaaaaagatcttttgttttgacaaagtccgagttactgcccaagtaatcttgtagcttcaaggtaaagacacatgtgtatcaccatcacaattgatggctctgtgtttcttttctgaacagcaattgcccccacatgtgcgcatctgggattctgtgacattgaatactctccacgtcattggaataggtttttttgaccgagcagtcacctgtattgcattctcaaaatctgtaagtatgtgccctgtggatattgctgtcttcttccacaggaagtagagaatcaactcagggttgaagagggggagttgacacactcgatacctgcctgggtgtatgtacagatttggactctgaaacattcctgcttcccagaacccctcagtcagaggtcatatgcatgtctcatcagggacacacacttccttccaatcagacatctccagccacatgggtttggtgatgaaaacaggcccccagagatatcgtcctcactttccttaaggcagtttatgtgctctggccttgaatttcacctgcttctttcaagggtggctccagcgtgtctgtctctgccatcctgctactggaaaggggtcccgatccagaccccaagggagagttcttggatctcttgtaagaattcaaggcaagtccatag

SEQ ID NO: 77916 - DNA, 1035 bp, Homo sapiens
cttaggctccggggggcctgcggcggcctgggaggcagacccccgcgggcaggtgtggccgtgtcccgaccgcgcgaggaccgaagttggcggaagcccctgtgcggtgccttccagcccggaggaggctggcctgaagcccccaggcgttgccgaagcctccccctgccagcgcccagagccgcgtttgggcttttacaggtgtagtttcccctcgacttggagcccgtcaaccccttcgtctcctaattctcaaccccccttttttttcttcttgcacgccagtaaagtgcaaggcccccaaatgtaccgctcgttgatgtatcacccagctcgggagcctgctgattatcaggccaagaaataaaaccttgcttctgccagaagcccggtgccctctcccagtcgctaaaccctcccttcctctccagatcctgtcgtgacttttttggggtaatcactttttttttttccatttgtaattttgctttctgaacacgtatctcgtaaaaactgtagtttgtaactatagtttcgttttgcctgttttgtattatttatgacaatgaaataatacagtattcttttgtgtctggtgtttttcaagatgttttcgagatccattccgttgtaatcgttatttgttcatttttattggtctatagtattctgttgtaagaatataccacagtgtacgcattctactgttactagacattttagttgtttctagctttgttggctattaataatgctgttatggatattgttgtgtatctcctggtgcattcatttcgattgggtagatatctagtagaatttttaggtcaaaagataagcatatctttagcattagcggtaaacaccaagttgccaaagtggttctacgagctgacattcttaccaaaaaatgtgtgagagttcttgttgcttcacctccttctcaacacttggtattgtcagtcttaaattttaaccattctggtgattatgaaatgatatcccattgtggttttaatctgcagtttcctgttg

SEQ ID NO: 77917 - DNA, 1021 bp, Homo sapiens
tgacctcaggtgatcaacccgccttggcctcccaaactgctgggattacaggcatgagccaccgaaaatagtttcctgtaaaatattagaaagcttacatgtgttttcccttttacattaagatatatggttcaccagaaattcatttttgtgtgacataatgtgaaaaaggggttaaattttatttttacttaacaccatttttttcagcaccatttattaaaaagataatcttttccccataactctgttgtaccacctttgtcatcttccagtcttcgctttggagttattttctttctgcctgaagaatactcttcagtattctttagtgcaggtctggcaacaaattcttagtgtttgtcgaaaaacatcattatttattcttcattgttttcttttttgtaagttttattgagatataattcacacagtaaaatgtacccatttaaagcctatggtttagtggtttttagaatattcagttatacaaccattaccacatctaattttagaacttttttccatttgtgaagtgtctttttattagttttatagaactcttggtttgccattgatttcttttagcattttaaaaatttaattcactttatttttcttgtataaaaatcctgcattgtataatagccatagctggagcctgggttctctgcagtggagactctggtcagtgaattcctagtttcctaataggtagacttggtgaatatggtctccttccagagcttggggatcagatagctgtaggtctttgagatgacattaacagtggccttggtgaagttgcccagggtggcagtgcagcccctgactgaggtgtggcagtccttaatgccagccatcatcaacagctttttgggcacagagatcaagatgaaaccattgtctctgtgtgtagagatgaggtgtaccagcacagagttgcagtggtctgtcaccttgcaaggaatgccgtggggcttgccagtgttgtctcctgagatgcctctctgcaccggga

SEQ ID NO: 77918 - DNA, 1681 bp, Homo sapiens
tccatcacccctcctctgctgtatataatctgctattaaaaccacccattgagtttttaatttcagggtttttaaaaattatttttaaatttcttttttgttttttatttttattatttttcagagtctcattcctttgctcaggctagagtgcagtggctcagtcatgactcactacagccttaaactcccaccttagcctcccaagtagctgcagctacaggcacacgcccccatggccagcttttatttatttatttatttatttatttatttatttatttatttaagtgacagggtcttgctgtgttgcccaggctggtctcaaactcttggcctccagtgatactcctgcctcagcctcccaaagtgctaggattacaggcatgagccattgtgcccagctgatttttatatttctatttgtttctgttttatacttccaagctatctgccaaaattatcagtcttgtcttttacctcctttaacatagtatgtgtaattatcttaaagtccatgttcaattatggcaatctgttagttgtttccagtgtctgtttctgttgattttcattcatattgtcttgtctccttatgtgcctagtgttttttttaatgtgtggtaaacatcatatttgcaaaattatttgtaggaataatttgaggcctaagatgatgcttttttcttccagagataattaatatctgctgttataaggcacatgggagcacttacaattggcgttgccttcagtacagtttcagggattgaaatatctctaagctgagctgcagttcttgtgaagacaaacctgttctgttcacttttcctcctaatgttctcttcttcaccagcacctttactctccaccccagcgccaatcttttagcattcccttcagaattgataaacacccttcaggaaaattagcctcaaacactgagctcactttctcaggctctgacttgctttcctcccccgtgcctccaagcaggtatttcttacatttttcccagcgtttctagttctttttagatggaggattgttctgattgttctgattagtccacagttactatcagtaaaagtccctgatttttgcattttcaggaacagtttgagtcaatattcaattctggagattcatgctaccaggttatggaagctgtagagaacagtgacacctattttcttgtgttctgtcctaattgtattagattatctctgccagtttgtgaaatgcttttggaatcaagataactttaagaataagtctttaactcctcttaataaataattaattgaaaaaaatagcagtttagctcaggtcattaaaacaaaagatttggggggcaggtacttttatctcctttccatggttcctttctcctgtcttgatttccttatttatttgataaaaattatgctctaaccagtcctcctgaatagaaatttaatttattttttatttttattttttagatggagtctcactctgttgcctgggctggagcacagtggtgcgatctcagctcactgcaacctccatctcccaggttcaagtgattctcctgcctcagcctcccgagtagctgggattacagacatccgccactatgtgcggctaatacatcgtattttcatccgccactacgcgcggctaatattttgtattttta

SEQ ID NO: 77919 - DNA, 1065 bp, Homo sapiens
atttgcattgtattaggtgttataagtaatctagagatgatttaaggtatatgggaagatatacctgggctatatgcaaatatgactccattttacctaagggatttgaacatctgcaaactttggtatctgagatgggtcctggaaccagtctcctgtggatactgagtatgactgtataacagttttaaaaattcattcttcaaatggtctgaaatatgagatggagacttaaattatatttttctcaaaattgctggtcagatacttgatcatatcagtagtttatgtggtagagataacagcaacattttctgggttggacggccgtgcaggcatctggatcccaacatcccggggtgcatggttgtggctggtaatgcctacatgagtgagaatcacctctaattctcagaaagttacctgcctcccccggggccagccttgtacatgtgaggcatggccagtccagcctgtcaacaggtctggttacgagccaagaaccgcttcatctgggccaagggcactttattgatattggagttctacagaatgcagtgtgattacagaatacagtataaaatacacaggtacaaacagtctccatttctcacccttagcctatactagctatcacagttgggtccaaatatatttctgaacccagtgctgcaaattgcaggtacggggcatttcctaaggtggcttttgtaagggctatagggattccgtgtgtatctttccaggctctcttgttctgtctgcctgtttttaggcctatgccattaccatatttaccttgtgggcagtgattttaatttgagcggcatcattgattaatgttattttgaattttgctggtttggtgattttgtttgtatttaatttataagtttgttttttgcttatctagttatataaacataagacatttaaacttagttttatagttgtgtatataagctgggtgtggtgtcacatgcctgtaatcccagctactcgggaggctgagcagaaggatggcttgaggccaaaagtttgagaccggcggcggtgggcaacata

SEQ ID NO: 77920 - DNA, 1146 bp, Homo sapiens
gtgaaattcatggaagtcatgacagaaagggaaacatgagccagtgtgtgcctctccttgggtaataaaggagagacatgccattttatagctctaaaggtgtgtttcctatggaacttaaagagacagtggaccttacaagagcttggttttggcagccgcctacacccttctccagtccttttcccatgtatttgtcctgggcctcttctttaaaaggttccagcactctcaaccattctctgggtcctgcctgctgctctgctgcttttgtggagctgtgtttattgcacttatcttctcttctcccttctctctcaaagaattcttaaataagaaaagatctgttgctaaatcatgcaagttgatctcagtctagctgcttccttttcctctttaccttgctaacttcttagccttcaaatcttatttgaaacatcacttcctcagggaggcagcctttgacccttagcctagctgagggccctttcctgttaattacctttgtgatatcccatatttcctcttctgtaactgtttatatgtatgtaattacttaaaatttccctgatctactgaaggctttataaaggcagagattatgcttgttttgatctctgctagaaccccagaaccccaagcactggtacttggcacttggtagatgtttaataaaacattgacactgccacctgtacctaagatggatagttgatcgtggcattcatcccagtttggcatggatccttctaaggacagcatttcaggtggccacccccaaatcgtagaagctagcatccaagcaaaagctattttattatgtgcttaatgacttaatgcattactgaggtgtcagtgatttagtctgttgtgtccttactgctgccataagacatgatttgtttggtgatgtgtggatgggtatttttttctgtgatttctttgtaaggacgttatccactgtaacccttagtatcccagatgtttctcaaacttgaatatgtgtaggaatcactggagggatgtgtatgtatgtatgtgtctttccaaaatggagaccccagccccatccccaaggatgaatgaatgcttttctttcttttttaaattaatagactttgtattttagaacagttttagatttat

SEQ ID NO: 77921 - DNA, 1031 bp, Homo sapiens
gatcagttgagactggttttggtcaggagggcaactcgatgggtttttgaggcatatttgataatattagctaccattgattgtggttaatgtgtgtaatgcacatcacagcatccccacaaaatacatgctgtcttccccattttaggatgaggaaactgagacttaggctggtgagaatttgcccaaggcttctcagggagataggagtagaactggattcagaatcaagtggctttccatagccacttgtggagagaaggtggaagcactatggatccgggaccgagggtcccctggccattggaaagatctttgattgggccatgagaaaagaatagtatttttagtcatgttcatagctgatttccatttgtggctccttgtgtttcatctccacacagcacaggtggaggtgatatggttagggtgcggagtcagtgcagggccatgccgaggggccaggttggcaagtttgagagctgggttgaagcatacaatggtcagattgtgcgggagccaaatgccaagtttgggggctgagactattatgcagacagtaaaaaagaatggtaggtttattttttatatttttatggttacatagtagatatttctatttatagggtacatgagatattttgatataggcagatatgtgtaataactaattacaaatgggacaaatggggtatccatcacctcaaacatttattatttctttgtgttgctgacattccagttatactcttttagttatttttaaatgtacaataaattagtgttgactgtaatcaccctattgtgctatcagatactagcatttgattcttattcattctaactctattttaatagataaaatatgatcagtcccctgcccattggttacccatgaacatccccaacccttcccagcctctggtaaccatcattctactctctattctactcacaagttcgattgtttcaatttttagcccctattctaatttttaacttaaatttaatttttagctctcattcttctc

SEQ ID NO: 77922 - DNA, 1171 bp, Homo sapiens
ggttgcttccaaatcttggctattgtcaacagtgctgcagtaaacatgagagtgcagatatctcttcagtatactgatttcctttctttggggtatatatctagcagtggaattgctggatcatatgaacactttagttttagtttttgagttgtgggttttttaactggcaattggtagggttgaaaactgtgcaggaagggagtaagacaggcaggagatcaggtagaggctagaagggtcttaattagggttgtagaagtgaaaccagggagaaatgggcctctgaagacactgttgaattcctcttattaccgctcagccccctggccattggaaagatccttgattgggccatgagaaaagaatagtatttttagtcatgatcatagctgacttccatttgtggctccttctgtttcatctccacacagcacagaagtgaatgtgcatattagtaaatgttgaaatagagttctttttttacttgattggcacattagattctgttcagatgctcagtccttattttgcttcacgtccatcatggctgtgtgccccacagcctaaaaaagtggcagaggaaatgttgattgtaaggtctcaagtccacgggacatcagggccttaaactctctgtttattggcctccaagtgaactgtaatgagattcagtactaacaaatcataaattccttttcttggacagttgaccatttcgtatgaaaagacatgggttgcaaaacgaaggtaccggttaagctgaggacacttgtttaaaatattctcatttagctttcccacattgtcaggaacccagggccatttcctgttcatgtttgtgtttgtatcagcgtctccatgtttgtttctccggagaagtcccgggcagctcacatgtccagtaactgcagatgagtgttctaccatggtagtaccgctggggctagggagggtattcttaggaatgacactagaaagaggaagtgaatccagattaactagggtgagtgtgacagtttgtagctgggagagccccacagatcattagcgccggcagggactgccagagtcatttaggccagtgtgttcaggttgagcctgtcctggtagagagagggaaggccttgcagcagggactctagggcccctccaccttcttcagctggaa

SEQ ID NO: 77923 - DNA, 1562 bp, Homo sapiens
ggggggtgtggaaaccccgcctcatttttctgcactttgcaccatctgactaactaaatggttgtcctccataccaaaaagactaccacacaatctaaggaaattgtctctgactaggtcatgtttgcatttgaagaattcaggtatgttctgggctttctacatcagtctgctgctggctttttgttctcgctaggtttttgctgtgtaatgacagcttaggctctggctggttctcacaaaaaaaacagggttcttttcagcttgtggtggggtttatcccagtcatgggggtgggaggtgcagaggtggtgcaggtcaggggtgtttactgtgtgcagaagtgcagcgtggataattggtctgatcatgggtgaatttgtccaggaccccaccttgtgccttatttgagctgctgttgctggtgtagagttgtgaatacagaatagcaactgtgtgtccagaatgagtctcttgctatcttttgtttttcttcctttgtcaactcatgcagtctactgctctttttaaaaaatgctgattgtagcagtgaaggtgaaaaattctacaagtctgtctgcatagttgagatttgattttggctcttcttgtcttcattatttttagtagtaatctcatcgccggtctgttttctggaaagtgccctgatagtgttttgttaacagggctctttgctttcgtatgcttttcagctgctgtaattattagtgctccaaattagatcttttgtgaatcttactccctctcttctccaggaatctatccctgtatataaatgtgggaagggatgttccaatagaaggagtttctaagaaatgaaaataaaggaggcggaatgggagggtcatcagattcttcttgtgcatatttccacctctctggaacatatggaagagagtgtgtgtgtgtgtgcacgcacacacacacacttccgacttctgaaagcttctcatttttcaaatgcaatttttgtgcattttagaactgagcataaattccatattgatgggcaaagagtgattgtgcgggaacctcagttctacctctatgggccttttttattcctccaaatgttgctgcggtagacattaaaacaataagagaataaccacctttcattcttctaagagaaaactacagacctgttagccagtcaagggagtagataagaggatcattagatctccacaaagaaaagtcggaccgtaaaggtcgtcccctgcccttttcagtaaacttgatactttggattcaggaagttatcctttgtttagtcgtgtgtctctgcattatttctaatggcctgggtttgcgacaaagaaattctttttatgtggcagtgtgctctggtgacatgggcccctgcccttacagagtgaccagaacttttataatagccccattagatgactaacaagaatttatataatgtctggcgtgttacagtagataggcccctgggttctaatgtctgtttcagaagtagcttttgtgatccttgtgagagttatggaagcgttctgtaatttgtagaaagtagc

SEQ ID NO: 77924 - DNA, 1155 bp, Homo sapiens
cactctctgtcacccgggctggagtgcagtggcacaatctcagctcactgcaacctctgcatcctggattcaagcaatccttctgcctcagcctcccaagtagctgtgattacaggcatgcaccaccacgcccagataatttttttgtatttttagtagagacagggtttcaccatgttggccaggctgttcttgaactcctgacctcatgtgatctacccaccttggcccccagaagtgctgggtttacaggcgtgagccaccacacctggctggccacattcgtttttaaaaggaagtctgattttgactcagatgcatttacttattggactatgaattccatgagagcagaattcataaaaacaacagaatcctgcctgtttttgtttccttggcacctacaactgcttgacacacagtaagaccttaatgagcagttggtacagtgcattttaaccagaacttaaggaaaagcaagcaagctatccagctagctcggcacagtcctgaggtcggtgccatggtgccacgtgggctgttttgtgtgctggttcaggagaacgtgtggaaaagctgataactgatctcctgagaaaagcgtggtgtcctcagcacaccccacttgctggagtgccagagaagtcatcacgtttcattaaggaatccctgcagatgatctcactccactgagcactgatggttgtgatgatttactgctgcctgggtcccacgcctagagagtaataggagcttgagaggttgggccagtgttttacagctgcctaggggatttttgtctgccattgcctacaagactattgttctaccaccaggcaagctgttctagctggctcttggggtagacacaggtcacttgtccttttgcccttttttttttttaattttttttttttggaacacagtctcactttgtcacctgggttggcgtgcagcggcaggatctcagctcactgcaacctccacatcccaagttcaagcaattctcctgccctagcctcctgagcagctgggattacaagtgcccaccaccaagcccggctaatttttttttttttttttttttttttgagatggagtttcgctcttgtctcgggctccagcaattctcctgtctcagcctcccgagtagct

SEQ ID NO: 77925 - DNA, 2060 bp, Homo sapiens
ggatgtgggagggcccttttgatactaggataaccattcattgaacaaatacttccagaacatctactcaatataagccacagtagaaaatgtaaatatgtgtaatccttagtcctgcctccaggaacactgtcctcaagaggtgtggaacagacagaccaaaagcatggagtagcaggtagcaaagataatactaacataggagattgggatagattccatagggatacagataacgtgctgtggccgggaggtggacacagttttgctgtataaaagttaaaagagattttcaggaggaagcatctgtgggagtgagccttggagggtataggattggggtggatgaaaatcaagacaagggctgttagtaggtgtgcgggagctgaggtataggaacagggggacagtgtgctcttagccatgctttagctgattgaggggagagtttttgctgtcttctcagggtataacccaggtccattttgtcctttccctgtgactggtgacttctctgccctgaagttggctactctgcagagataaacattttcacctctggggaataagtagtagtgatgggaaatcctactaggtgttttgccatgctgctagcaccttgacttttcttatcaccttgagcaattacttaagttctctgtgccttggttgccttacctgtaaaatgggactattaccaatctctgacagttactatgctaattaaatgagattacctttttttttttttttgaggtggagtttcgttcttgttgcccaggctggggtacagtggcgcaatctcagctcactgcaacctccgcctcctgggttcagtaattcacctaccgcagcctcccaagtagctgggattacagacatgtgccaccacgcccggctatttttttttttcttttgtatttttagtagagatagagtttctccatgttggtcagcctgctctcaaactcccgacctcaggtgatccgcctgcctcagcctcccaaagggttgggattataggcgtgagccaccgcgcccggccgagattacctctataaagcatttagatactcaataaattaattcttttaatttactgtaagcagcaaagcattttatagacacttatcctggattagaaattgcatgggagccaggaaaaaggctgatacattctccagctagagtacttctagtcttcccctctccctgagcgttcagactcagaatgccagaaatcagtccttggaagataatcatgtttgctactgaaatgtttatgacacagtgaacgaaacatggtgtgactaatcagctgagagcttggatcttggcttggtttgcatgcaaattccctggtctgagagattaataagttccttgcagttgacaaactgggactacagtgttttctggctaactgtgataatacaaccagagcccaccaccaagtgacccctggttctctgagtctgcagtgcttctgtactcaggccacagcccattgcattattcattgttgtacgtttctccgtgtcctatttcattatccttggagcctagtgtgatcagtaagtgtctgttgaactaactaggactacacgggacaactatgacgtatgaggtctcttccgtgtagggaagagtgaattacaagtgagaactcagtgaagagcacccttccaacaattgtagctatgatgtgatacattctggggtggttctcctggacagcaagagaatcaactaaagagctttcaagagtgactttcaacttgggaaatctatgtaatgtttctcaactgggaaggcccattgcaatctaaagacaggtgcccaggccactcctcaaacctcttaagtccaaatatgtgcaggtgaaacccagacatgtgcactgtttaaagttccactgatgattctgatgtacacacctcgttggagttcacgggaagaacctgagcttgggaacctggaaaccctaggttctaatgatgctgcgttagtttatgtaagtcacataacttcattgggataaaataggaataatattttat

SEQ ID NO: 77926 - DNA, 1036 bp, Homo sapiens
cccagtactttgtggatataaaattctgtccattgccaggacggcttttcattgttttctacaggtggagccctccatggtctggctgcggtctcttgaagcttggctccttccgctccaaaaaaatgatttagtctggatctgcactcaccactttgcttccccatttccaaacctttttttctttccatgaaatcctctaaaacccagccctgtgcatgcagtatttcttcaggaagccttttctgacctctacagcccacaaaatttctcttttttctgaactctcctataacacttaaggtatataataaacaatctgatatttaatttcctctatcttatcctcttaactagattgagggttacttgaaggcatctgtcacagttgagcagagctggacacatgttggcttctcagcactctttgtttattcatttttattacctttttttttttaacctcctgcattatccttgtcatgtcacaggccctagaagaggaaatggcagtaaagaggacagttgctgcctttttgatgtctgttcatttctaagcatgaaggcttttggggattttgatggaagtgctgaatccagtgagcaacatctgtttgtggatgggaaagatcagccggaaagactaaaagggccgaatggtagattttcaaagctgtagggattgacaaaagggtttgagttagtaaaaacccatgtgaagttttaaaagtccttacatatataaattaagcacttctgattcttctagattcctatacaaacaaggtaacacactttcaaatgtgcctgctgtactgtgggcacttttgttatcacatctaattttcacagtaatcctatgaacaccagtcaaaagcagattctagaggcaggtggttacattattattaccattttacctaagaggctcctaagattcagagaggttaaatcacctcctcaaagtcacactgcttaagtggcaaagctaggatttggatctgtatcttctaactaaaaagtcaacatttgtttt

SEQ ID NO: 77927 - DNA, 2104 bp, Homo sapiens
taaaatgaagtcactcaattagaaaatcagaacctatgtttccttcattcactgtattgtaccctggtttggactgttaaggcagtttattatgtgttttttttggcaacaacaaatgttttgcatagttccaagatggtaatttcattcaacagtgtatgtgtttttttttctttttatatgctgctcactccctcagatggggccatctgttttctcttttttttttttaataggaatttctaatgtaccaccctattgatgtagttactcttactgtttctatgataaagtctagctctaatttattaagaattgtcaggaagagaaatgtgctgccgttttgcataccagtgtggttttcactgatggggagagcgctgagatgtacaggtgcgtcatttaccctctttgagacatttgttttctagcacctggccaaagaaacaagtatcagtttgagattgttccaataggtaagacattgcacaaagattgagaaatttaaaagaaaagacattcaggtcatttttagcacacctatttgtctgctaggatcacattattatttctagaaagatacgtgttttgccagcaactggttagttgggtagaagggagctagcattttctattcaacagtaatctgacctaactacctgtcatgtagtttatgtgggtctaatcccccacctcacctagggggcagcacatgacccagacctggccagaccaagactcaatcccctggctatggtgactggtttaggggcagttttgtcatctaagaattctctatggcaggggtccccaacccctcaggctgaggaccagtaccagttcgtggcctgttaggaaccattccacacagcaggaggtgagcagtggtgagcattactgcctgagctctgcctcctgtcagatcggcagtggcattagattgtcataggaccagaaaccctactgtgaactgtgcatgcaaaggagccaggctgtgctcttcttatgagaatcaaatgcctgatgatctgaggtgggacagttttgtcccaaaaccatcccccgatcccaccccagtccatggaaaaattgccttccttgaaactggtccctactgccaaaaaaagttggggaccgctgctctatgggacttgagctagaactattataaaagatactgtttggtttcttttttctgggatcaagagctgtcaagatcatgaaagcttcaaatcattatttcccatcatgtggggaagactaataagccaagagaaagggaagtagagttcagtaatgacaagagagcaagttctcatggcagccttgaccatgtgcactcaggtatttaacttaagccaggcttacccataaacctttttttttgttttgcagtatataaacaacaaatttcattgttcatgtctgttacttgcagcttaaaaaatcctgaataatgcaaaactgcaagaaaaataaaaaagcagactaaaatgtgtatcattttacctccaaaggagatgaccatcccagtcatcttcaaaattgtcagaccacagctgcagtgttatcttctgtctaggtgtttaacagaggaccgtggcactctagggcactgttacggactaaattatgtctcccacaactcactggttgaagcccctgacctcagtgtgactttattcagagatagggcctttaaggatgtaattaaggttaaattaggtcttaagagtggcccctagtccaataggactgtgagaggaggtgaagacatgagggatgctcatgctcagaggaaaggccctctaaggacacagtgagaaggtggctgtccacaagccaaggagagaggcctccagagaaggcaaacctgccaacaccttcctcttgggcttccaaaactgtgagaaaatacattgctgctgttaagctgcccagtctgtggtattttgttatggcagcctgagctaactaagataggtttttctttcaaaagaaagaaagaagaagaaggtgaggggactcaagaccacatctgaagggcagtccgttgaagagcctggaataaaaggctctggagagacaatcactgtctagtcta

SEQ ID NO: 77928 - DNA, 1140 bp, Homo sapiens
acagtaggggatggtaagtagtttcctagcctggaattggtctatatcttcacccactctgttctctctggcttgtgtgtctgggtggtgtggctgaccccatgagctgctttttgtttttaatagagacagggtctcgctctgttaccgaggttggaatgcagtgacgcgatcatgggtgtcacgacctcctgggttcaagtgatcctctcacctcagcctcctgagaggctgggaccacaagtgcacaccaccacactgggctaattttttaacttttttgcagagatggagtcttgctgtgttgcccaggctgatctcaaactcccgggctcaagggatcctcctgccttgacttctcaaagtgctgggcctacaggcatgagccactgtgcccagcccccatgagctgttgatctttgtggcttctgtccctttgtgtttgcttgtggcacttggacagccttagcaaacggctcaatgcacagtgatcctgttactagcactttgctgcccttactacagatttttaccagctccttttgttccgcttttttctctctcctcctttctttatgcatttttaacattactgtattttttctcttgtgaactcttccttgttcacaatctaccatgtagctcttcccctcgccctgtatcctctcctcagctcagattagcctcccgtctagtctacattcaagctacacgttctctggacttggattagttctttttgtcattgtttccccatgtttttccttttagcatgggagcagagagaaggtagagtgtggctgctcgtctgcccctcagaaagcagccatctgggcaggacagaacggagcctgactgctagtcagcaaacgcagttcaacctgagaaaggaggtcttcctttcctttgcttttatctccccagtctgcaccaaagggtttatatattgaatagtgaggcaccttccctgggatgtgagaccaggaggagaggttttgcctcagtatgtctccgtgtctccatttaactcttcatgacctttattgcctgtgtttttggtctgtaagtagctctgagagctttcataaatcacttagctgttgtatgctgcagtttcatcctctttgaaataagaataat

SEQ ID NO: 77929 - DNA, 1011 bp, Homo sapiens
atgtgaggattaggccaaaattcacttctttttgcataagggtgtccaattgttccagtaccatttgctgaaaaggctatactttctcactgaacggactttttacctttgtcaaacatcacttggcatttttgtcgggacctatttctggactttctacccacgtgtccaagctctctgtagggtaacttgtaaaaacaccaggctaactcacaatctgaataatgaacagtggttgggtacctggtttattccgtgatataggttgcagaatgtgtaacccaggctacacaaatgaaatatttagatcagtttttgatattacaatataagcaaggcactgccaacctggaagcattccttgacggcaactaagataataaggcaaatagaaatcataacatctgacaactggctgaggaaagcagggctgtctgtcccggagcaatggaaagagagtgtgagctctggctctggacctgtgcaacggagctcagtggaaagaacggatccttctgtgtgatccctagggagacgattctgcccaatgactagaaccaggctctgtgcttgggtacagggagtccagagatagataggctatgcttcctgctttcagagggggaagctacaggaaaactattttggtttgccattggccatctagccaatggtaactatagcgcccgtctactttaggtaagagactggatcaaaggacttgcagggctctgattgttttcagattaaacccaaggacagtttctgtcctaggtttaacggcttcctgaagaaactggggtcaggtaaaaaaaaaaaaaaaaaaaaaaaaaaagagagagagatctgcccaaggtctcaaaatattggctgcaaaactgagtttagaaatcaaccctcctgctgggcgcggtggctcacgcctgtaatcccagcactttgggaggccgaggcgggtggatcatgaggtcaggagatcaagaccatcctggctaacatggtgaaacccca

SEQ ID NO: 77930 - DNA, 1037 bp, Homo sapiens
cttttttctttttctttctctttttcttttggagacggagtcttgctctgtcaccagactggagtgcaatggctcgatctcggctcaccacaacctctgcctcctgggttcaagccattctcctgtctcagcatcccgagtagctgggattacaggtgcatgccaccacaccctgctaatttttgtatttttagtagagacaaggtttcaccatgttggccgggctggtctcgaactcctgacctcacgatccgcccacctcggcctcccaaagtgctgggattacaggcgtgagccaccgcgcctggcccacgttgttttcgtatcagttctgtttggaacgctgttgaccctttcagtcttgagctcttacatctttcttgaattctataaaattatctgtcatttcatcttttttttaattttttttttgcttctgagatgccttttacttctgtagtccctgtccctttttccctacctgatgtttttgggtcaactctttgaccctattctaagtttctcatctttgcctcttctgctgagcatacttactgagttctctatttcagcaattatatttttatactaaaaaaaaaattgcttggttgttcttccttatggcttactctcacttaatgttttaagtatcttcccttgtgtctccaaagacatttattatacctattggatttttaaattctgtttcccatggtagaggttgcttcatttgttatctgtcttttaagtttttcttttatgctacttgcatttctcagagatgttataatttcctcctggaaattagtaatgatgtccgtagaatattcagttgccttggctagcacatgtggtctacttctgctgcggatgagtttaaccaggagtgtggttggaagggagtacctcagggcagggtggcctgatattggaggctagactcagcaaactctaagcttgaaaaaacgaggccctatctgtccccttttcatatcactagtaatttgtgcacttcttgagtcccagtcctttcaggc

SEQ ID NO: 77931 - DNA, 1092 bp, Homo sapiens
gttgagaataccagaatctctggcagatccaatttccattttggtttttggagccatagttgaggttctaggagtcaaataatgatagcacatataaaatattatatttaaaaagcctaatgcagcattgttaataggatttcataatgtgttagagactgtaactaattttgggtagccatttctctgtcctccttttctctactcccaggacacaagggctttgtactcaaaacaccctgccttcttaacacaaattctcatgaaatgtcattattatacaaacataattcatttcttgttagtgaaagaccctttcattcacaaacatcccaatgagaaagaaagagaagtgaggttagtctgtttacagaaaagaaaactaaaatccacagaagaaagttgactttcccaagtcaccacagcaagtttttgaactagatctcctaagtagagtgtcttctagtatagctctgtgatttattttcagcccactctgccttctcttggagtctggacacatggaaagcacatcttttaattcaagtcaacacagttgttgtttattgagcatttactgttttcaaaatccaaagccaaatgccttaggatttaatatcagtatcctgtgtgagtgttgatgcccgtcttcctcattcattcattcattcatgtattcatctatgcatagttattcatatgatcaccacttacactgtacctactacctaagcagtataccaggtgctgagcgcaattcatggtttcacattataagatgctacctcaaacaggatacgtttcttaacttgctcactaaattgcgtcacaagtgccaacagttcctattctatctttccaacattttctattgccctgacatgaacgatttaggaattggtaccactcctgcagtacatggttatttataagatcattttttttttcatcggacctggagacaccagggtcaaagtagagacctgaatgcccaggaacatacagcatgtcaataacaaagcaagggttggaatccctatctcatagcaccctactcagaaagcttgccacattttttgcttcttttcataa

SEQ ID NO: 77932 - DNA, 1027 bp, Homo sapiens
acagcactcacagaaatgaggaggcgactggctgtgaggaccctgcagcacagagagtaataagcatagacaggaggggcagtaagagttgagaagttggggactgtcagggaagacctcaaagagaaagtgggatctcaggtgaactttgaagaatagggatgattttttagaaggcactggcaggcatcacaggcaaccagtcacccagcggctgctctgggtgctagggacacagtggtaaacaagacaggcagtcttgtcctcaaactgagggcagagtcgggaggcagaatatagtcaagaaaccatcaacaagagacgtgaaaacaatagagcagtgtggtagagagtgactgggccacgccttaggggacatgtggggacatgaggcagccatgctaaaatctgaaggttttggggtggaaagggcagcaagtatcctcagctggggacgaggccctgagataggaatggtttggtgggttcaagggtcaagaaaaatacagaggctggagcaacatgaagaaggaagagtgaaggcaaataagggcacagaaggctttatcaggcccaacggcaaagcctgcgagctgtgctgaatttagcgcgtatgtcagaatttagttaggggaagcctttggagggagggtttgaagcaaagggaaagacatctcatagaagcttaagaaaatcactctgggccctgtgtggataatggctggcagtgtggcaagaatggaggcaggatgacctcttgggaggctaccgcagtcatccaggtaagaggtgagggtggtttgggccagcagtggagcagtcagggtaggcggtgagaagtcaccagattcaggaagtgccgtggtgctgtagcctccaggactatctggtggatcacacatgggcgtgggggaaacatgagtcagacatggcttaggtgggtggtgattcctttcaccacgctggggcagctggggtgctagctggaagaatctgtagaggtgtgggcctagcagcacaggttccc

SEQ ID NO: 77933 - DNA, 1043 bp, Homo sapiens
acatccccttcctgaattcatcttaaaacccacacagcgtttgcttcagaaagcctccccaggcctggcgcagtggctcacgcctgtaatcccagcactttgggagtccaaggcgggcagattgcttgaggctgggagttcaagaccagcctgggcaacatggtaaaaccctgtctctactaaaatttaaaaccctgtctctgctagaatttaaaagattagccaggcgtggtggtatgtgcctgtagtcccagcttcatgggaggctgaagcacaagaatcgcctgaacctgggaggcggaggttgcagtgagccaagatcgcgccactgagctccagcctgggcaacagagtgagactccgtctcaaaaaaataaataaataaaaatttaaaagaagaaagcctcccctgtccccccctcccccgcatccctccaggctggataaggtttataattactcatctgactgccttactagctgtgagctcactgagggcaggtactgttctacccatctctctttcattaatgttttttgactcactaccatctactggtcagactaagcctggaatattgtgcccagttttaggacccagactgattagttactgggatggcgaggggactggtagctttgtcgtgtggctgatggaaggaagcgctcttccttcagctatccggtgggttgtcacaggctctgcagagcaccctgtgtgactctggagagaagcgagtggcatgtcactcagaacaaggaggggttgtctaaattaaaaccatttacaaccaacgggttgctttggagagtagtaagttaagtttcccatcacccaaagctcagtgtggacttgtgagggcagcttcattggacacaaaagtggattagtgtctatagttcttttcagctctgagattatttagtgagcatttattaggcacctgctctgtgccaggttctgacacaggtcaaaagtctgcgaaaggagaaaggccaggaaggatggactagaagcatctcagaccacatcacagtgctga

SEQ ID NO: 77934 - DNA, 1035 bp, Homo sapiens
ctatcttttttttctggagacagtcttacactgtcacccaggctggagtgcggtggcacaatcacaattccctctttaaaaaaaaaaaagaaataaacgagtattgcttttttaaatttgggaattctaatatgctagagaagatgttaaagattattaggtttatgaagagccagtgggctccgagagacttcccctgaataccgtggcaggagttttagtgtattaattttagtaatgactattttatcctttcaggggcttctcccctgcttctctgtcatactttgaacaaatgaggttgctttactacgtaaatgtcttcagcaaagtatggtgcagccatctatttattttgatttatgttgcatttttctttagatcaccaaaatacttcattgcctacatagcttatctgatgctaccctagcataataccataaatgaagcattttgttggatgttgcaaagaatattatctatgtcatatgctctagagtcagacagaagtggttggaaatccccagtgtaatcactgaatacgtgtatgaacttgtatacatctttgcaagtctctgagccacttttttctcatctaaaaaaatggagaatggaggtaataaatagctgcttcataagtcatgaagcttagatgctttaataatgcattctctctctctctctttttttttttttttttccgagacagtttcactctgttgtccaggctggagtgcagtggtgcaatcttggctcactgcaacctccatctcctgggttcaagcaattcttgtgcctcagcctcccgagtagctaggattacaggcatgtgccaccgtgcctggctaatttttgtgtttttagaggcagggggcatctcaccatgttggtcaggttggtcctgacctcaagtggaccaccagcctcagcctcccaaagtgttgagattacaggcatgagctaccgtgcctggccacattctcttgtttaatacagtacatggaatgttgtgaacagttggcaaattataattgt

SEQ ID NO: 77935 - DNA, 1176 bp, Homo sapiens
tggatgtcactcatgtttgctgtcctctggctttaccttatccagcagcacagcagtgtggagcaataaaggaaagtgataaatcagcatagagagcgttatccccaacctcagatcacacagtccttgcaaccttaaagccagacaaaatctgagaaatcatcttgtacttctaaagcaaaatcctttccatggcgtctctaagagctggctctccggcctcatccagactctgcttgcatacttccattcgtagagatcttcatatttctccattcagtcactggcagcctaccttgtgccaggagctgtgtcagttactttctcatatataatttaatcctcacaacacactgtgagggtgccatgccatagccatatcacattcttctccatttgacagaccagaaaaccgatcattcataagtgtcatgatgttagatcatctgactccaagctagaagggatgggaagcagaatgagggctccagccccagcatcttttcctccagggcacgacttaggaatatagtcttaaagtactttgaaataatcttcttttaaatctctgaaagagcagaagtttagaggtcaggcagacctggtgttgaatcccctagcagcttgtaagcacctgaatgtctggattctgtcgtctctgtatccttccctgctgggcctggcattgctcctggcagtcagttgatgctttttgattgagtaataagatatgaataatgctgtatacatgtgtggtacataaactttcccaagttattctttcgacacatagcccacttattaatgcattcaaagtactagacactatgcagagggctataggaggcataaatatgaattatagaagacttgcccttaggagctttatatctagaaggtaagctataaataagatacgtatcacaatgtgatcttcgcagtaaccccattggattggtaaagccagaattattatccccatcttataagtggagaaactgagccccagcaaagtgcagtgactgccatgagtggagtggctgagaggcagggccaaaccagagccagggaacctgcctcccagctcagctgttcatctggaggttgtaactacatagcattattagttaaaggaaagaacaggttttgcaaaccctcactgttctatagattatg

SEQ ID NO: 77936 - DNA, 1065 bp, Homo sapiens
ctgaaatggcagtgtcagaccagacaagaagctctcaccagagacaaagtggaaacggagagctgttggcgatttaggggacagcggggacaggtgcacattgcaatgtgcaggatcatcctgcgcagtgaagtcttgtcttgcgtgtcccaccaaaacatgcagttgaaaaactcaagccagagcttgctctgttttaagaaaaagcacttatttttttaaccaggtttagtatgtgctgaattttctaggaatttgactactgcatccgtcaaaagaaaatcatacttaattttgtttgtaactttaccaagagttgttttctgtttcgtaaagtcctatctccagcatcgtcactgtgacgtttcagtcatccatagacctccccttcgtcacatcccatttgcagcagcagcactcccagtgggtctgtgggtaggtgcaagcgtggaccgcctccgtctcctagtgtagctgggtctggccctttatgtgttgtaatgcacattttattatagactgcttctcttttctctctcctttgcagtacatgtaaggcattatatccgaatttaggtaggtaggttatgtaatctatgaatttcacttcaggataatgcaaggatcattacaaaacattataataaaaagaggaccatcgggcctgagagggttgaagttttgtgaaactcgggctggttccttcctgcattgcatctgtgtcttgcctggttgtcgcttaacagtgccatggagatagcacagtgtctgtctcatttcacagccaggaaaactgagccccagagggaggaagtttgtacttggcccaaaccacttcctgatatgacccagtcaggaagagaagccaggatgagaacatgctcctcttctcctccagtgcctggaagtgtggtgggagcagcttggtctagcaggaagagtgcatgtcctggagccgggctacgttgggtctgtgtgaccctgagcaagtcacctcctccatcagcaggtggaatgacaccacaggcccgtggcagttcacatgacacgaagatgcccggtgcc

SEQ ID NO: 77937 - DNA, 1122 bp, Homo sapiens
ctggcggccactttctgaaagccggatatgtctctttgctgacccacccctgttctcaccccagggctccagatgttgtatcaggcagggcctttgtacgcctccatgccaacagctacccaagtcgcaccgtcagtcacactcttactcaggctctcctgtgcccctggcccttcttcccctctcacttttccccacacttctaaaatctcactcgtcctgtcagaatgtggctccacagatggagcctttcccagccgccccgctccctgtgactttgcactccctcctgcactcccacggggctttatttttgcctctgtcctaacagtcagctgccacttggcctgtcctgctattcccactgcatgaatctagtcaggttggaaattcagaaagtggcctctttgtctctggaccccaaaaacccacacatcgtctgccttataagctctcagtatatccatccctggctgcaggaacacaccaggacccagaggctgccgtgcctggagccctgtctcctgactcagcccaggccccagctcagcatcgaggtcctgtgggaccatgtccagcagtgaaggctgtgcattggcctgagcccctggtccctctgactcactggctcccattttcaccacctgcactgcatattctcaccgtctctcccctgacactctctcccctgaagtgttgtaatggggttgtaacccatccaccttctcttgtccttcttcagtctgtcctccctgggctgcgtctaaaggggccccgcccctgccctcatgcatgttctctccatactcctggtcaccttctgctcatcctttgccctgctgttgtgaagccttcccagtgccccagaagacctcaggcaccccttcccagtcctcgcacactgttggtgtcccatttgtttggaccctgggtttgtttgtctagactgtgagctcctcgagggcaggtgtctgtttctgtgtctcgggagccctgaagagagactgacacatcagaggtgtctggtgactgaacaagctcccagcttgcgcccatgtcatattgtgtgcctctcatagcctggcacttcctgccattgcatccttctctgcagactaagat

SEQ ID NO: 77938 - DNA, 1012 bp, Homo sapiens
atgcctcacaggcattctctgcacacttgctcccttctgacgccacacctaccctgttccatcccattgcccacagggttaagaggagtgccacctacagggtatctcttggcagacacctggtgtcaccaaggcctgtgagctgagccccacaaggggtctggacagtcctccagggccagggccctgggagcttgctggagtcaggtgggcaggaaggttctgataggttagctgagcagcctcattaaagattgaggtggggaagcccacttgatggctggaaggcgtatcagttacccactgcaccagccaggcgacagaggagaagaggtaagtggcccagtacgagaggtgcccccggcctgtgccgcggagccctgcccgtgatggtcagcagggagtgggccttccactgcttttgcttctgccactgggactgcaccgtgctttgcagagtgagctgtaggtgatgggagcccctctctctcctccctgctcctcatgggcctctcctttcactcccacctgctccgggggtgggggtgggagtgctggatcttggggcgagtatctgccactgaccaattacagggtttgcaatgacatccttgcggaagcggcagggtggaagcagcagctgggtactgggaggcctgagcttctgttccagcagcaccgttcactggaggcacatgacctcgggtagcttttccgagcctcagtttccccacctataaaatagggttaataagcccagccatggatgattggagagattagtcacaaaaaaaaaaacaatgcagttatgctcagtaaaccattaagcattaagatgtggcagatttttattgctatttgttctgtttgaggttcattttaaggttagttttgtgtcctgaaataagcatattaggaagacagaaagaatattctgcagggaaaacaactcccctaaggaacacagcctagtgggcccaaacagtgggggtggggtgtcctggcctggaag

SEQ ID NO: 77939 - DNA, 1039 bp, Homo sapiens
tcttcaggaggaggggtcagtagttcctcgccttgtctgcctgcctttggctgtataaattaatgcattacctcagacaggagccacaccgctccctgcctaccccgcgcccaccatacctcgcggaggatggatcgcagagcagggattctcctccgtagggtctcttagacatttatttgtttagaggtagtgcatgatttggaaattcagagagaggaatataagcccacaatcccgagatagccactgtgaacattttagtatatttcctcctttgtcctttagagttgtagaaatttggagctgatgatccttggttccacgcttctcactttatagaaaatggaagtccagagaggagagagactcccacacacctaacttactggcagagctccagcacagttcactctgaaggggattcgtacaatccagaaccgtccaggagagcacagccaaggcggaaagggactggaagacaggacggggaccaagggaggcctggaggggagtgcaccagggctgccaggccagcacagagagacggtctttgtggtcctgacagaccactgggggcagtcctggcaagacagatttcaccctttgggaagaagactttgccagtgagaaccacccaccccagctagggcctcgcacttgaggtcagaccgggtggctcctaaggctctctgtacagccctgagaacctgtccagctcctgggatacctctcccggtgccacgtggatgggcattgaggcagcaaggccattgggtgctggcaatgtgccacactcctgcccaagaaggggctccgccagggggctccgagccgcagcttctcacactcgcaccagggctgggctccccttcttgctctccctgtctctgtgccccgcttgacccttcttcctccatgtgtcctatccccctgcagtcttggtgactctgtggagggctttagagtcctctcttttggggttgaagcctggcttaactgttgactgttcagaggccacaaagatgctacttcagtt

SEQ ID NO: 77940 - DNA, 1016 bp, Homo sapiens
tgctggggggtagctggtgaggtgtaagtgatcgtggctaggccagttaggagactctgacagtccaggaagagatgataggggcatgcaggaaggtgttgaaggtgaagacaaaaaagacaggcaggtacccagatttagagaactgaccaggctgacagttataagaagctggtgtcagggatgattccctggtttctgggctgagggacgaggtgggcagacctgtcctgagatgggagctaaagaagggggcccctgctgtagctgaggaggctgccaggtaggcccatcacagacaggtgacagcctggccacggcccattatcacacctcagaccagctccatgcttgatgggcagctcatctcaagttgaaaagccacagaagcgtatctctgggaaacactgagggtctgcctgcctctgtagacctgggaggtcagcagataccactgaggccaaaaaatatgggtgaggttttagagtacatgaaacggggattcatactggggaggtgcacgaaccgactcaagggcgtcacgtggacctattccagggctcctcttctgagcatttccaggctctgagtggcattctagattggggagggcgtggctgggttaactgagttccaagacacaagggccttagagtgacacaagaaagtgtccagtgtcccgacctgtgggacagactgcagcccagagagatgcctctctgtcccgtgtggccaggccttcagtgtcctggggacagagcgtgcccgcctcccctccacgcctcagatgctacagctgctgccagtagagctaaacagacatagaggcatctcgccctctctgcctagaccagttttgtgtcccaggccatgaccacacggagggcctggacatttgcctgggcctggctcctcaccagacggggcctagacaagccgcctccttcacgccatcgttttcccacacaggtttatctgaggaccggggtgagtctggcagggtggaggcagaagag

SEQ ID NO: 77941 - DNA, 1028 bp, Homo sapiens
tctgtctaagctgtggcagatgggaggtagttaggagagtatgatgaggcttcgcaggggaggaagaccccagggttggttgttcattcgacaaacatctttgcagcacctgctctgtgccaggcctgtgctcatgagcacagcgaggagagacaggggcatcaggctgccctagctgggcagaggaggctcttgccagctgttcgcgtgtgtctctggggcatgctcaggttgggtgtcgcctccctgtgaaactgcacgccatgtcctctcctcctaagatttttgcctggtgtcttgatttgccaggatgcataggttcctggctgatgaacgtgatcaatacccctgccctgtttgcttcttccaacagcccagtgagtgggctacgtggttcccatctgtgtgcaaagtggtttgctcaaggccacacacctgggacatgtctgtagccccaggtctagtgcctgcaggcccagcgcctgtcccagaaggtggctttgaggaaaactgcctcaatcccaccgttggtccgcagggtgccaaggcttagctctgggccaggcagctgccccactaccccctagagattttgtcttctgcctctgcttgtcctgcacagtcaacgaattcaagttaatgcaacaaatcttttggagtagaacaaaatataatccaataccacttaaaaaagacaagccagccagaatgggacagagccaggcgcagcatgggaggcagactaaggagcccctcagtagcaggtgccgggccgaggggcctggccgccacaccacacgtgggagcaaggctgtgctgggatgtccggggaggtcgtgcttgctcgccctgtggctctagtcactgggtcccttaccagcaggctcacattccagagagacctggcacagtgaagggctcagaaccagatcacaggtcagggtcaacctgacctaggccatgggggactgagaacaaggtgccaggttttggcttaactcaatcagaccttcctgccacggggctct

SEQ ID NO: 77942 - DNA, 1056 bp, Homo sapiens
atcgccaccacaaattgaagggaaaccacccttatcacagagcaggaggcattgaaactggccttgcagagctgaacaggtggtgagagcagagcagtgcaggtggacagagatgaggaagtcttagcagtcagctggggtttgtccaaggcttgtggtcagccaggccgtgtgctggggacagtccctgcctgcaaagagcaccgtgtgaacaaggccactgtggtcctgaggggtgctctggacagggtgcagggccacatggtggaagggacagggtgctttgcggagtggggtggggcaagcctctgtcgggagctggcattttcgttgacccggacgaggaggagtctgctctgcggagatcatggggacagcctcccaagctgaaggaagggtaagtgccagggccctgagcctgcagccacccgccaagctcccccgcacctccacctggaagcagacaggccatggggcaggggaacgggaagggtgaggaagagggtgtgggggagcgcggagttagaagtttgcattgtgttcatgcgcagggcccagtcatggaacttgaggcacagggtgccatggtggaggctgggaaggggaaggcaaccagagtgggcaaaacgagggccctggagcagacacggcagcaaggggagcctgcagcgctcccagcggactccgccacgtcctgctggtggagcaaaggcgggctgccatgttgtgagtggccaagggtcgctcactgggcaggaacattgtcaaggccattcatgcttggaatagggtctctcttcagctctgaggcaaatctgttctctaattttcagatgacttcaaggggaacgtgtaccaccacccctctggtgcgtcacattgcttaggaagcctgctgtgtttatcactgggtggctgtcagggctgagatggagagggccagggcctggcgaggtggagcagtcggcccaggtgtcccagcaattgttgctggaacagggtctggaacccacaggagaggcctgaaggacccagggccctctggctggatgcgtt

SEQ ID NO: 77943 - DNA, 1011 bp, Homo sapiens
gtgtgtcaggagcgcgcctccaggccggtgtgaactctgcaacttcacattgtgcctcctgccgccgctgctgcttccccgagccccaagctcaacctggagcatgagctcccaccctgaggaggaggctgtcaatactgtgtttctttccagggaggcaacgggtgggtgcgatgttgtcacttaagttgccacctctgcataagagctctctgatcagaaagcagtttctttgttgaccccagccagccttggctctcgggttgggaaatacagtcacggtatccatggagacctcttgaggtggagacgggcgttaaatccttctcaggcagtctgaggtggccagagtctgaagcaagcagcctctatggagcgaggggagcaggtgggcccagcctgagcggggcctctgcacagccagctttcccccacacctgtctccagccagggcacccacaggccctttctctcccaggatgaagcctgctgggagcgtgaatgacatggccctggatgccttcgacttggaccggatgaagcaggtgagcatgccctgtgcccttccctcaagaggctgagggcagccagcaggcgggggaccgtctctgaccagcatggccaggcaggccctgggggcccacatgtagctgccaaaaggccagtcagggagcagccacggcagaaagggggtgcccaagcctgtcctttgtccccagcccctgccatcaccagaactaggatgtccctcaacctttctgggcacctccctcaggcctgcctctggggctttctgccccgaggaagcccttagtttcagtggcgtctacctgagggaggtggcagcaggattttcccaggcctcccatgccgtcccccctcagcgtgggaagggggccacgaggagacaagggtgacagatgcaactctggagaggcccaggagaccccaagccctttggacatggcccagcccaggccggcttttccgtctccactgcctgtcccttca

SEQ ID NO: 77944 - DNA, 1046 bp, Homo sapiens
agcccaaagacccaggcctcctcccccagccggcccacccttgtttgagcagagagcactcagttcctgtttgtccagttcccccaaaggcctgggctggggagataaggagttaacaaatgaggggaatgaggcagcctgggcgataggcaggcactcagccaactggtcacaccgccttactgctgggtgccgtctggccccaggcatagctgggtcagaaacccagggcccaccacagcctctccacctgctgtgggtgcagccccaggtggaacccaccctggctgagagcccgggggtaggcatgggccataccaggggctctgagaagcagctcccatcccccagcccccacaaccttctcctggctgttggctcttggcccagcaaggtccatccagagagaggcctgagttgacatagaggagggggagtccgggaggggatggataccagaggaaggagggaaaggcccaaatttgggaggccgggggttggagcactagcttggggtgatgaggaagctggggggaggcaagagaggaccctgcctctcctgaggagtgagcagagccagggcagtccctggggtccagggccaagatttcctgctgacccctgcaggagctgggagggcagagcctcagcctccactatgttgggggaagggctcccgggcccccggcacctggacacccacctgtccagagcctacagagaccctgcgtccccacacagcagctcctcacaccagagttctggtgcccagcactcctcagcagcagtgaggccacaggcagggcacaggcctctgtccctacgccaggtcctcccctaaaagggcagtggcagcaggggccgccgcagaaggaatggcagatgagacccaaagcctttggtcatcaccccagaggtctatgccaaagcctgggtggggctcccaggagatggaacagggacacataccaggcaggtccacgccaggggtgcggggccctgatgaggaaccgggctgcactggtcatggctgcacctgagccgcc

SEQ ID NO: 77945 - DNA, 1009 bp, Homo sapiens
ccaggtctgctcgtcttttttgtgttttatatttgcttatttaaggtacatttctttgggtttctagagacgcccctaagtcacctgcttcattagacggtttccaggttttctcccaggtgacgctgttagcgcctcagctggcggtgacagccggcccagcgtggcgccaccacacaccgcagagctgtccaggcacagctccgtccccagcgctcatggtgttgaaactgtctgtcatgcaccacggtgtctgtgtccacacagtaataaacggtttactgtccgcaccctcgggctcaggccctcgcattggtccatcacgctccgggctggggatgccccttttcagagaagggcccgggaccacggtgaccaggagtcgtaggagcaagatggcggtcttcgacaggaagctgggctcagaacattcccaagccccgggaaggtggggtggtgtcctggggctgggcctcaggtcctgcctgtagggaactccctacgggatctccaggaagatggtccctcaagtgcaacccacacccccgaacctcagaggactccacgtgcattctgacgggcagggccctgcgagcgtcctgttcaggggagggatggacttggggcttagcaggcaccaggcaaatgcaaggcagctttgccttctcctcggccccacaaagtctcctgggaggaccacctggcctgcaatgggctgtcccaggcccctgccctgaggcagcagccagagacagaggttctgaccctcagcttcaaggaaccagggccaccaacaggcaggccttgagatcctgtgaccactcatgcccccagttctcccacatgacctcctgcagccacagagcagtgtgcccagcagcccccaagggccatggcaggggagggagccggcactgcctgctgggacccagtggctgatctcaagggccggctcctagcacactgcacgttgttgggcttcccggcagccctagcaacaggaatatga

SEQ ID NO: 77946 - DNA, 1026 bp, Homo sapiens
tgataattttcttatttttagtagagacggggtttcaccatgttgcccaggctggtctcaaactcctaagctcaagcaatccacctgccttggcctcccaaagtgctgggattacaggcataagccattgtacccgacccctaactatatactatatatgtttatatggggtttttttgttgtttttttgagatgaaatctcactctgccacccaggctggagtacagtggcacaatcttggttcactgcaacctccgcctcccgggttcaagcaattctcctgcctcagcctcccaagtagctgggattacaggcacgcaccaccacgccctgctatttcgtttttatttttagtagagacaggctttcatcatgttggccaggctggtcttgaactcctgatgtcaagtgatccaccggccttggcctcccaaagtgctgggattacaggcaccatccaccgcacccagcctcctaactatatgttaataggtgaaatctcacgtctataaagctggcaccctttatgtagtattttatgtccttttataagaccttaattaaattctttttcttaggccaagtggtttattacaatgattgaacctgattattgcccataaatataaagaaagttgaaatctttagtaatagattagcctctgtttttctctgctttgctagtataacgtccctccaaagaagaagctaaatcaacttaattgtactgaagttgctcctactgcccacccatcccaacaaatatggaatgcacaattaaacagaatggaatttttttttttttttttgagacagggtctcactcattgcccaggctggagtgcagtggcaggatctcagttcactgtagcgtcaacctccccagctcaagagatcctccctcctcagccctccaagtagtttggactacaggcatgcatcatcacacccagctattttttgtagagacagggttttgccaaattgcccaggctggtcttgaactcctgagctcgagggatctg

SEQ ID NO: 77947 - DNA, 1035 bp, Homo sapiens
ggcggaagcgcccgcggagccccagggccaccgttgggaggatgtccgttattctttagtgacccgcggaaacctgagacgcagccgttgggtgcctgtttccccgtagatcttagaactacagggtcctggcggctttctaaaattttctcctgagcttccccttctttgctctccagtcagccattgtttcccttgcccaccctttccccctatttgtcactttcataggtgctcctttttacgcccaccaggttttgcatttgtctcatttaaaattccaaattttttcagccgtgtcctccattgtacctgcaacagagcctagatttttttttgtggcacggattagcggcaagttaaaccttcctgaatgagttacattgcagcgaagtgtttctgctcttatctgtccttttggtcgacctgacaatttgccttaaagcaaaacaaagatttcctgatttttaaggaaactatgacaaattgaagagttggaaaggtgtgtctttgttgtactcgtttggccgatttaacgcctctgtgaatttgttcaacttaaatattatcaacatttactgttttgtaatagtgttcatgcagttgaggcccatgattttctgaactgtacgcaatacattaatcttaggctcaacttgttaaaacaagtagactatacattctcattaaaaggcaactttataaatcctagtcccttcttattgctaaatcgcattggacttgacttttgagaatattagtgtaaggagtgacaaattagatcgttttctctttgaatctgagctttgaaacctgaataattccccttggagtactgcacccactcagtttggaaaagtcaaatctgttgaattaagtcatctctggctttatagcttataaactctgcataaatatttcatgaatggaaaccagttgtgggagaacttttacatgtcttaatgctttttaaatttcactttccccactctctagtaattgatggggaaatggcactgcaagtagttgatactt

SEQ ID NO: 77948 - DNA, 1638 bp, Homo sapiens
ggcggcggcgagatctgggctcgggttgaggagttggtatttgtgtggaaggaggcggaggcgcaggaggaagggggaagcggagcgccggcccggagggcgggaggaggcgcggccagggcgggcggttgcggcgaggcgaggcgaggcggggagccgagacgagcagcggccgagcgagcgcgggcgcgggcgcaccgaggcgagggaggcggggaagccccgccgccgccgcggcgcccgccccttcccccgccgcccgccccctctccccccgcccgctcgccgccttcctccctctgccttccttccccacggccggccgcctcctcgcccgcccgcccgcagccgaggagccgaggccgccgcggccgtggcggcggagccctcagccatggcctcgggcgacaccctctacatcgccacggacggctcggagatgccggccgagatcgtggagctgcacgagatcgaggtggagaccatcccggtggagaccatcgagaccacagtggtgggcgaggaggaggaggaggacgacgacgacgaggacggcggcggtggcgaccacggcggcgggggcggccacgggcacgccggccaccaccaccaccaccatcaccaccaccaccacccgcccatgatcgctctgcagccgctggtcaccgacgacccgacccaggtgcaccaccaccaggaggtgatcctggtgcagacgcgcgaggaggtggtgggcggcgacgactcggacgggctgcgcgccgaggacggcttcgaggatcagattctcatcccggtgcccgcgccggccggcggcgacgacgactacattgaacaaacgctggtcaccgtggcggcggccggcaagagcggcggcggcggctcgtcgtcgtcgggaggcggccgcgtcaagaagggcggcggcaagaagagcggcaagaagagttacctcagcggcggggccggcgcggcgggcggcggcggcgccgacccgggcaacaagaagtgggagcagaagcaggtgcagatcaagaccctggagggcgagttctcggtcaccatgtggtcctcaggtgagcgccggccgcgcgccccggccccgggatgtttttgttttgaagggaagccatgttttatgtgtgtgatgggcgccgccatcttcttcgccagggcaagtatggcggccccaaaagatggcgggccgtgcggcggcgggggcgcggcggcggcggcgggcggcgggccgcgaagatggcggcaggccgcgggggggaggggccggcgccgcccggctaggccgcaatggcgtagtttctccgagagggggaagcgccgcgcggggcggagacggccgggggaggggccggcgcgctcgctccccgacgccctcgctccccgcgcccgcatcaacgggcgcgcccgccggcccgttgtggcggcagctgcgcgcccccggcccgggcgggacgcgggaggtcgttggcggggctgcgccgcggcctcgcgggccagggattgctgcctccgggacgcgcgcccccgcccccgcccggcgctgccgttaccccatcggccgctggagggcgccgcgggcgcttgccccgcccgcccccaacttccccggactcccaactgctc

SEQ ID NO: 77949 - DNA, 2762 bp, Homo sapiens
gtagtttaattttaagcctttatggtttttactttgtagaaaggtatctattttccccatgaaaagaacgataatagaaagcgggtttttttgagttttgttttactgttttaatactacttttaacgaaggcctgaaaaccatctagagcaaaaggatcttatctgcctgtgtaaaatctgtttttacttcaaaggcaattattaattcaatgctggttttttaggtcagtatcctattagtatattcatatgctacctagctaaattgctgagatactaaatagactgagaataatcctgccatcgtagttaatctaatgcctgtgatgattacgtttagtactccatataagcggtggaacctcttccctataagtactttaaagcttcataaattctcagaactgaatggagactcaaaatatggtgacctttgagtattaaaagatcgttaaaattcggaggaatgaatgaaacagaaatgaaaaggctggactgaaaaagctagtttgtatctggtgaaagcctcaagatgagacaactacagctgggtggatctgtgattgaaagaggcctgagcaaagggatctaggagctgtcaaaatctaataggaaggtgctaacaggcgctgtcctgcatccagggtgccttgtagaattcatagcagtttgagtttagcagaaactatgtttaaatgaaacatgaatactttagtacttaatggttatcaaaagataatttccatgtattttggtagctcaagagattacatactgatcatgttggaactaaaagtcatggttttggccgggcgcggtggctcacgcctgtaatcccagcagtttgggaggctgaggccggtggatcacttgaagtctggagttcgagaccagctggccatcatagtgaaaccccatctctactaaaaatataaaaattagccaggcgtgatggcgggagcccgtaatcccagctactcgggaggctgaggcaggagaatcgcttgaacccaggaggcagaggttaacagtgagccgagattgcaccactacactccagcctgggtgacagagcgagactctgtctcaaaaggggggggggggcatttttttttgttaataccaatgagtaagggatgggggttttagttattgatgaatttgcagaattcagaatacgatttgaaataagatatttaggtaaagatacattaaccacaaaagtaaatttactttttctcatagtgtgtggaattagaggaatttagaaaaccgacatatttttacatgatctgcattttatcttaacaaattgctggtccacttttccacatccagagaagctggtagtgtacggctttgcttgctgaagtggtatgtatggagtcagccagttaggggagaaagtctgaggggcttgactgatggaagtcaatttacaattaagtgagcatttacaagtgtgcaagtggctgttttgttttgttttttgttttttttttttttttttttttttttttgagatggagtctcgctctgtcgcccaggctggtgtgcagtggcatgatctcggctcacggcaagctccgcctcccgagtttacgccattctcctgcctcaccctcccgagtagctgggactacaggcgcccaccaccacgcccggctaattttttgtgtttttagtagagacagggtttcaccatgttagccaggatggtcttgatctcctaacctcgtgatccgcctgcctcggcctcccaaagtgctgggattacaggtgtgagccaccgcgcccagccaagtggctgcttttaaggtggcacagtttggggttgttttcacgtccgtttcttttcttctcttttctttttttaatttgagacagagtcttgctctgttgcccaggctggagtgcagtgtcacgatcttggctcactgcaaccttcacctcccggattcaagggattctcatgtctcagcctcccaagtagctgggattgcaggcatccaccaccacccctggctataatgtccatttctttaaagcgctggttgtctagctagtgtggtagagtacgctgtgcataagggtagttataaatatttgatggcagtaacataggatggcctgtttctcggacatgtgttttgtggtaaactatcccccttacttttccttgtgatttggaattattactaaagagaagctaaagagcttatggataactctgcatttcccaagctgaaattctgaaggtgatttcatcttcagaactgaaatgacgtgatatactcagtataattccataacaagtggagaaatgaaagtgggttaattgttgggtaaatctgtatgtatgtgtacatatgggttgagcatggtgggcagcattactgctttcgtgtacttgatctcatttgatcctaggcatgaaggttttaactacactttagtttcactaaaatagccccttagtttggaatgaactgtgaagtaacagttttgcataagccccaagctgagttacttgaagtccttataaaaatagttgtacatacagggtattccccgagggtctagttacttcttagaccctcttggtttaaaaagcaaaaagatcaggctgggtgcagtggctcacacctgtagtcccagaactttgggaggccaaggcaggaggatcgcttaagcccaggagttcgagatgaaccttggcaatatagtgagaccccgtctctgcaaaaaaacaaaaaaccc

SEQ ID NO: 77950 - DNA, 2082 bp, Homo sapiens
tagttgccaggaaatgtgtgtggtgtgagtgaaaagccgaaatctaggctgggtgtggtggctcatgcctgtaatacgaggactttaggaggccaaggcaggaggatcgcttgagtgcatgtgttccagaccagcctgggtaacattgtgagaccctgtctctacaataaataaaaataattagctgggtgtggtggcacctgcctgtagtcccagctactcaggaggctgaggtggggggattgcttgagcccaggagtttgaggctgaatgagccgtgattgtgattgggccactgcaccactgcactccagcctgggtgacagagtgagaccgttctccaaaaaaaaaaaagggagaggggagaacaaattgagctggtggctataaatcaccccatttaagaagttactggtgaaagcagtttttgtagtttttaaaatctatttactcagctaaagataatctcatgatgtgtttcagatgaaaaaaaagatattgaccatgagacagtggttgaagaacagatcattggagagaactcacctcctgattattcagaatatatgacaggaaagaaacttcctcctggaggaatacctggcattgacctctcagatcccaaacaactggcagaatttgctaggtaagttataagaactttcctttcttttaattatagaaagtgcttgagtcttgccagctatgttttcctgtgcctaagtcaaaatggtggtttgtattctttctctagggaaattcctgaaaacaaaagcagtcagttttatttgtttgttttttgtttcctttttttgagatggagcctcgctctgttgcccagactggagtgcagtggtgcgatctcgactcactgcagcctctgcctcccgggttcaagcaattctgacagtcagttttatttttagtagtaactatgctattaatgtgagtggcagcattttagatccttgcagtaagatgaagcaaatacccttaaataggcattgcatttgagtaaataaaattgcacgtaatttgttttggaatagatatcttccacactgccttatggcttcttggtacacattttattttttatttttttgagacaagagtcttgcttgttgcccaggctggagtgcagtggtgcaatctcagctcactgcaacctccacctccctggttcaagcgattctcctgcctcagcctcccaagtagctgggattacatgcgtgtgccaccacgcccagccaatttttgtgtgtttagtagagacagggtttcatcctgttggccagtctggtctcgaaccagtcctggcctcaagtgatccgcctgccttggcctcccaaagtgctaggatacaggcatgagccactgtgcccagcctgtagtacacattttaaatttgggtgtgttgtattggtctatgctgctggagacctgggtctgtacttgactcatccagctgaccactggaaaggatttcataaattcgtgtttgtcttgtcatcagttaagctcctggtatgttaatttaagctggcatgacaggaggagatcaagtatttatggcttggacatggcgagcagtggagaaactctgaacccattggttgggtgtgtttgttttgcctaaagtgggctgggttcttatagaagcctactttttgtgttactttctagtactgtttggcagtttgtacaaggagctgaaaataccacaaagatgtaaacttttaagttaaatgaactaataaactctggagcagaaagcctaatgcctttccatacctgaggttggttggaacctggaatagctcaggaaatttcggcaagggcaggatcaagaagaaagaaatccttttgatcttgcacattctaagaacagagtgggttgctttttttttttcttttgagagcagagtggtagaggtggagaccgttcagtgtcctggcttccttcttggccctgccgaaaacaaggtgggcagttcctgccacctggagctcgtttccccacctgtcaaatgggcgttaagaattccattgtggtttgatacatggaggttctcactgtgt

SEQ ID NO: 77951 - DNA, 3239 bp, Homo sapiens
gatttatttatttattaaatatgaaccatcatggaggggtgtgagaggggtaaaactagggacaaaaagaaaatctgtttccgagatttaaatttattctctagtttttttaggaacgcttaatttctcacccccctaccacacacagatctatagggaatatttggagagaaagttttgacaaaagtccaaagcttgattcagtggagaagcaggtaggtaagttaccaaaccaggaggctctctggacagtaatttcacctggggctctgccagacggttaccacattaccaggactcttggtacaaatgagaacttccaagcccccatccagaagtagggtaacagtatgagagtatgtggtgttcccatctgtccaccaggccctaggagctctctccccaaagtaactggtgctaatggtttgtcgtgtgtccttccagagatatttgatatttaatatctataaatcttgatttaaaaggactcttctgtaccctttaaaatgatatattttaaagatcattcgtgtcagtactaattggacccatttcgtgtatagagatggatattttaggacactcctgtgttcaccgcttctttttcataaggcaccttcatcatcgcagcagctgcctttggaaatcttcccttgcctctcacaaggagattcatctgattgtctgagttgattttttgtgtttttttaaagggtttggagttaagaacaggtatgtgaatcacacagatcatagtgccattctaagctgcaccagcttattagctatgagactgtaggcggcaactcgatgtttctagcctgagcatccttatctgtaagatgggaagagtgcttcacagtcattggtacttagtgaatgcaagttgtctcatcctttctgcttcatggaaatgtatcataattttagtttgggtacctataaggaaagcattttagggactatatgatttatgccagttgagtctacccactcctacaaatctgtctgtctctctttttcttttgataagaatgaagccaagaaaaattaaagaagatgatgctccaagaacaatagcttgccctcataaagtaagtaatgctagagggagagtgttcattaaactgttgatgaagttttagagagttataagaaatttgcacttttgtttctgcttgtgataatttaaatgaagcaaggaattagaatcttcggtttctaaatccaagagatgaagttttgttatttagtaaaggcaactttttaaatactgttaaatgggatgactgcagggagccgttgcttgattactgtgtgttgactctactgttagcgtttcatttctttttggattatattaacaagtccgtcttaagatcctgggttgtgtctcacctattgacctttatgggaatgtaggcttgtaactgaaatttgaaaattattttggatgttgctaaaataagccaaataaagacttaataattgtgtgtgattagagaggcacttaattgttttcaaatgtagttagtctttaaaataaaaggataacctgaaaagtacttttgagatatttgttgggggctattttcaaacttaattggatatgagactaacagaaaaatcaagtatcacataggtacagagaacaaagtaggagagattgagtggaataaagaatgttaaaaatgaacaatcggagcaggctacatttagtttcacggtctcttccctgtaatgactgtgcactagcaagtccttcctgttctttgtcagcgttcttgatgtggcgatttgaaatgtaaacgtatctccattagggccgaaataacaagcatttgaaaacagttaggctggaagtgcctatgccatccctttagcttctctgaagttttctttataatggacacataatacttgtacatatttatggggtaccgtgtgatgtttcaatgcatgtatacattgtgtaccagttaaattttttaaatttccattttctaaatggaaattcaacctaggggtaaaggcggaaaaactggggcttccctctcccttctgcctgtgagctgtctagtgacttgtgctgtccttctgtcatgctgtcttatcatttccccattcactccattactgggcaacaactgcagaagaaattgttgaggacatgcttctcgagcgccacacatccatctgcctttcccgccctgcactggtatcaatttgcctgcttcttccttttcctagtgtctcacaaaataaatttcttctgtagttgccattccttggagaccctcttgcttctttctctgtcaagaaggggaaagaggcaaagagagaagagggaacagtaggcgatggagaatgacagtccattgttgcagcacagaatatggggccaccaaaggtagtggtggactaccgtcattttaactccatttgcttagcagtgcttctgttacttcattttgggggacatagtcgggtgaggtggctgtggtagagctggaagccagggtgttgggttctattcccagtttggctactactagtagtgtgaccttgggcaagtctacttaaagacatctctaagcctcagtttcctcatctgtaaaactagggtttgcattgaatgatgactttttcagctgtctgctttttgtcttaaatgatattaatgttctaccgtaatactaagtaaaattaaaatggggggttggggaggtggttttgttttaatatgtcagtaaaggctgttaaatggttgaatcctttctaacagtttgcaatgtgaacttctaagctgctttctctgttttaagggctgcacaaagatgttcagggataactcggccatgagaaaacatctgcacacccacggtcccagagtccacgtctgtgcagaatgtggcaaagcttttgttgagagttcaaaactaaaacgacaccaactggttcatactggagagaagccctttcaggtagagccagttccctctcttccccacactgccttgcctgtctgaacactgcaagtgtaggtggtgtggtgatgaggcaggaggcgccagcccagagactcagggtcttattactccttggtgagaaacaaaacttctcctggggagtcgcttagaagggttgccggggctctggacatccttgtctatactctgtggtactgggtacgcaatgtattggtgttgatggagtacactttatggcaggaggagaac

SEQ ID NO: 77952 - DNA, 3611 bp, Homo sapiens
ggctctccttgggttttcggggttgtccaacctgcctgctgattctagactatatccacaaagttcacccagggcaggaatgaaaagtgtttggtaaaataaataggctgttctctagcaaagcagtgagctcctgactcccagggtctggtcagagttgctgagtgggttgatctctggtctttccttgacagtgcacgttcgaaggctgtgggaaacgcttttcactggacttcaatttgcgcacacatgtgcgaatccataccggagacaggccctatgtgtgccccttcgatggttgtaataagaagtttgctcagtcaactaacctgaaatctcacatcttaacacatgctaaggccaaaaacaaccagtgaaaagaagagagaagacccttctcgaccacgggaagcatcttccagaagtgtgattgggaataaatatgcctctcctttgtatattatttctaggaagaattttaaaaatgaatcctacacacctaagggacatgttttgataaagtagtaaaaattaaaaaaaaaaaactttactaagatgacattgctaagatgctctatcttgctctgtaatctcgtttcaaaaacacagtgtttttgtaaagtgtggtcccaacaggaggacaattcatgaacttcgcatcaaaagacaattctttatacaacagtgctaaaaatgggacttcttttcacattcttataaatatgaagctcacctgttgcttacaatttttttaattttgtattttccaagtgtgcatattgtacacttttttggggatatgcttagtaatgctacgtgtgatttttctggaggttgataactttgcttgcagtagattttctttaaaagaatgggcagttacatgcatacttcaaaagtattttcctgtaaaaaaaaaaaagttatataggttttgtttgctatcttaattttggttgtattctttgatgttaacacattttgtataattgtatcgtatagctgtattgaatcatgtagtatcaaatattagatgtgatttaatagtgttaatcaatttaaacccattttagtcactttttttttccaaaaaaatactgccagatgctgatgttcagtgtaatttctttgcctgttcagttacagaaagtggtgctcagttgtagaatgtattgtaccttttaacacctgatgtgtacatcccatgtaacagaaagggcaacaataaaatagcaatcctaaagcaagaatatggcagaacaagatctgtaagcacagtcttattttcttttgttgtccagaatacttataattcttgagcctcccagaaattggaagctaaataaagcaactcaagtttcctttattttgcactcaattacagtgattattgatgaaagcgatgcatggatattttaatacttcctacatgtcctgacttctgaaagagagtaggtaacaggcatcccgagttcaggaactacctcagaacaccccaggccaggttggtcataggctgtgattttagcccccggcaagtgtgagtgaagcatctgtaccaccgcgcaggctgagcgcctgcgcagggtaaggtgccacctggcagtggggcacacagagggaagaccaggcctgtccatcagccggctgccttcagaggcagctccagcaggaccttggcttgtctgacaggaaatgcttgtggtcgttggttatttggtttgagagcccttgttcctccatctagtggagtccttattaaatgctagcaatgtggcaattgagtgccagtagcttaatttcatgtttctaaatggacactgggtgcaaatcggcaaggtgattagattattagaaaattctgctcaatgagtacctctcacattgtaacctcttaaatgtacgattataatgttggatcttaggtcaaataacagacttgagaatactttataaactgccatgatacagcaaaatctcatttattcaaagtgcaaacatactgtgtgtctttctgttttgtgtatgcttgactgcaagataaatgacaaactagctaatatccgagatttatttacaaatggccagggaccccatcaggtgaaacacatagcccattgtcttagagcttctccatcggtcctgtacaggaggattggtgacctactaacagtgaccctgtggctctgtggaattttgaagtgccttttgtgaatcatgaatgaaacatttaacttgagaccctttaaaaaattcatccagaatctgttaccccttgggtagtttgatggaactgagttaagcagaagaccccagctgttttctgggtaagccaggctttgctgtatctggcagtcaggagagaggtcagcccatggtggaggtcttcagtgccgagggctcggatgagaacgtgtagttctttgacttggacctgggcagcgtcttctatggatgcctgccttgtgagcacccacaccttccctccccactgtcgggttgagtagccccagcgtggctgtgttaggagtcctttgcccaacattgtgctgcactggagcctggccctggcactgtcctcaggaccctgcccaagggcccaccgcagagcacacctatgctatggggagccctgctggcagccccgagagccatgccatggcctgcaggagccaggctcctgtgtggatgaagtccctcttcctctgtgccttgatcccttgggggtgcctttggtcatctcttctgtcctttcctgtctctgaaatagtcatcactccccttgactctctctgttcacgtcttctcagtctgcagagttaacttctgtaaggagtttaatctggggttccaagaaaacaagttccttgttaacatagcactgactttgcaacaatagaaaactaacaaatgagcaacaatataaagagtagaggtagttctcattgggtgtaacttcaacccattctgcttgtggttagaatttataattttgctaacgatgtaatttactaaggtttgaaatggtattctaacagtgagtccattgtcttgaggattaatctgatttataagtaatactgatagacatattttcgtacatctgagcagaaataaatgcatgtttctagcatatgtaatataaaaactccagaggataagtttacacttaacaagatgttgttttctatttttgaatttcttattatttccccctttttggtagtggagttgagagggggagcatactatttgtataaagaactgtcaccccagagtgacatttattttccaagatgaccctgaactcatgctgttggtttcatatggtgtttgtgtgctttgcctagattcaaggcctgaggatttgaggaaaatcgggattttttttttcctatttggttttcatgtaaaagttctaaatgtcacttattttgctaaataagaccctttcacaggatagtgtgcgcaatacctgtccgtgtttccaagcagagttcaagttcatgtcttcacaagtagatgagagtcacttccagtcgggggaagcccgcctgagcagtgttttgagagtgcgtacattggaggactgccccacgtccgtttgcact

SEQ ID NO: 77953 - DNA, 1973 bp, Homo sapiens
aaaaaaaaaaaaggaaacctgacaattctacccacctccccccacccccgactataggcaaagagagttgatcacttccagggtctctgacttctgtgacctggaaatcagcctggcttgggaaattcatgttgttgatctttaattatttaattattctttaataatccttctattttcttgacatctgacccccagcaagagtaaggatcccagaggtcaaaacagtggtgagagccaagctgctcacagacacccacttgatgccacagccatgccatgaggcttcctcccagctgctctgctggcttgctgaagccagctctgagtcacagggttgccttggaccctcggctgtagggggcacctgtctggctccgggccctttgtcctggatacactgacagtaatgtgagcgcagcacttcagagttcaggcccagcaggtcctggcaagtgcattccacccgaacttttaacccaagcggtggggaaggaagccaaaactccaagctgcactttcttggggttctggccatgcacttcttagccttctctctgactttacaggacaaaaggtaccccacgccttcagaatcatgcttacctgcacggcagcatctgactggatggctggctaggtctcatccaccccaaattactgacccttgatttatgttgttactgctcaggttatgctcagatgccctggttgcctgaagatggtttaagtgcaggcccttcagacaagtcacgtcaggcaagagagggctggcctctgacccacaagagggcagatttgtggccaagaggcttcctggcatccacccccaggcccaagggatcagtgtggtgccagagaggatctttaagctgggactgtactgaggcttgatgggaagtatgggcagcatgtacttgacacgttatcacccagtccccttgtaaaatctggaatggagcgtttaagctgagcgttagcatcaggtcagcaggcaaagcaaacctcccacaaactgggtgccgtaaggtgggaggtgacacatggagagcttcgtcctggccgagcaggcacccagccccatgtcccccgccagcattctggatgtcagaggagggtgcgtgtgatggcgtcacattcatctgaagcacactgattgattttccacaaggtggcaagtttgatcaaattgaccgcttttcatgagacacccagatgctgtaaaaaaaaaaaacagcactgggatgtgttgaggagggggcagtttgctgtgctctgttctgtctgctgctctctctgggggccgcacaatgtccgcacacatcacggaggggagaaaggcatcagtaccaaacggaacaacctcttttttctacattgtccatacccggacatgtgaggctctattatcaacaggtggtgagaaaaattatgtttttattcgctttctggtaacttctgtaggccctggctcaaggacttagcatttcgtctcatgtacatctttttcttaagtgttctttgccatttctggaattgtccttggtttttccttagctcataggtcatagatgcagaaatatagtatttaaggcatccgcatccagcatcagatggctttgcatccagaaaaacattgataactcagtttgaagcaccaagcatgtgtaatatggctctatacaatataataaatgcataatgttaagctttttaatgcctgtggttcttgtttgttcctcagtcctctaagccacttctttagtgtttcactgcacatgaaaccaggccatgagcccttcctggtctaagagttgcctaaactgcccggggcagttcttgcggcttgctttctcacacacaggactgggaactcccaggatttggtctcacaccagcaagaaatgcttctgtaacctttcagctccaaggtgggctcaggagcaagagggcgttttaaagagagcctcacc

SEQ ID NO: 77954 - DNA, 1012 bp, Homo sapiens
ggggtggtgggtgggtcgggcgagccggtgtggggcaccttctccgaggcgcggtcgcggctctggggttcctcccatgcagttgtccccgggagggcccgggcgggcgtgcagtccaggctctcccatgccccgaccgtgggcgtcgggcacggcacttccctgttgggcctctggcttctctgcttttaccttgagggttaatttattcaccaggatttagatgtcgggggcgggggagggtggttggcggcgggagttgctgagagggccggccgcttatccctgtttggtcccacttttctcccagcacctgcccttgttcaccgcctcttcatctacttggatttggctcgaataaaccctcagctcccggccagcgctgagagccctggcggaagagtgggtagcggtggccttaagtattaaatctgtggcgtcggagcctgcttcttgggggagagactcgttgaaaagggagtgtgttggggaggtgttgtgcgctgaggggagttagaacttcccggtcggttacccagtgggaagctgcggggcacaaagcccagaatttgctgctaatcgctgggtgccctggagacagagggggcgtgtcctctgcggattccattctcaccttcccctcccgcttctgatctcgctgtttgctccacccttgctccccacccactatcagctccagcgggtgggggtgaagggctgtccccaggccaacacctccttccaggctttggggagtggggattctttccccggatgggcagagttccttctgcagtggcgctaccgtccgtgctgccctcctggaaacaccggggtttggggcaggaacacttcacctgaaagcaggcctgcttggcgcctcccggcacatctgtggtctcctctgcacgtcgctcgcgcagcctccttgcctggaatgtccttcgctgcccatcctcataggcccacctgggagagatcatatccatgccccctgccccaggtttgtggg

SEQ ID NO: 77955 - DNA, 1078 bp, Homo sapiens
agatgaggagtgcgggcccttagctgtgcactttgcaaggagagggcagggttctgggtgtgtgtgtgtggtcgggggagggctgttggatttggggactaaggtcaacatgtgggggacagtggaggactgggctctgggacagatttgcctgacctgacccgccaagggagcctcagctcccttgtgggtgacagggggctgccttcagctggaagtaccctgagggcaggtcccaggtctgtccccttcatcttggtgtgcccagggcctgcacagttgacactgggtgggggacattggggagggggtgaggacaggcactggaaagggatgcgtccacacgggtgtgctgctgggttactaaactttgcaaaaccacatcttcctgagcaccctgtttccctgctgcctgggaatcatgcactcagtcggcgcactgccctgtgccctgtgttggggacaagacagacacaaatccctgacctccatgtcagggctgaggagagaccagaaaggaggagtgaaaaagttggtgccaagtaaatgaatccgtatgcctacatcttggacacttgggttcagtgtctattgttttatttcatttcctgaggataaggttacagcacagaatgtgctttctcaaactcccatgttccacagagccctggacctcccatcccagaggaggcagggctctgtgcagccctgaggaccccagccttttaaggggcagggcagacccaaggccagcacaggacagcaaggccggagggactgtcacggggcaccgagggtcaagccagctcactggaaagggtgtgttggagttttccctgtgtacagcttttattctcacacaagacaggttcagtgtggagaaatcagaaacgccagaaagtaaaaaggaaacgcaagtctctgtccccaccctggaatcttggagctgaatgaccccctgcaggagctgtttgggccaggacttggggggggtggctgcaactcaggctgccagagggcaagttgagggggagaggatgaggcaccagctgtgtagaccttcccaggagttaggctg

SEQ ID NO: 77956 - DNA, 1052 bp, Homo sapiens
aaaactcgacaggcagccttggtttcatgagtagagggcatgggcggggcgggctgcggtccacgggatgatgacgcggctgaggccgtgcagatggacagtggtgaagggagctgaacgtgaatttaagaggttgacacacaggactggggactctggatgtggggtggagagagagaggtgtccagggcaattcctgggcttctggctcaggtgctatgggtgggtggcacttgctgcattggatgctctacaggaaacatggatctgaatggtccctgttctttcagttagacacagtgcttcaaactccctcagcacccaaggtactggcttcttgagtgcagcatcagcaatcaaacccaagtctcagctgtatttgccctgcccagaacaggccagccacctccttccttccagactctatgcttctgttaatgcagcattagcatttagctggccactctcacagggacacgcccggactttgccctgcgtggtcgcagatatgaggcaggtactctcttcatttcatggatgcagaagctgaggcacagagtggtcaaggggctggcccacggtctcagctgtgagtggcagagctgggctttaaaggcaggcagccagcttctaaccagatgctaagcttcatccccttgagggccaggactagcattgggactggccttggatgggccacttcccgccctttgccctctgccgtggcagctggcactgctcatcctgtgtctcccacttgcctataaatagccgggctggcaggggggctgtccctccatcagctctcagcctgctcaaggccagcctgcaggtccagccattagaggacaggaaaacaggtagacaaagagcctcctggccttgccacctgtcccgagggctgcccagatgggctgcctgggcctcatgcatcaacacctgcccctcccctatcctgctggcattccagtctgtggggcactcacttagattctgttgctcagcagctgtgtggccgaggtacctgcacagcctccctgagccttggtgtc

SEQ ID NO: 77957 - DNA, 1056 bp, Homo sapiens
agggcctggctggaaccagctttcgctcagaaagcgggtgggtttgggatagggtggtgaggacagtaagtaccctgctaaacagccccctgcggcaggactcagcaccataggctaggccccacagcccagaaggccgagagagtggagcccgccagagtgccaggcggggtttcagtgtggccatctgcacagtgggagcaccagcagctcaggtttcgagggctcatccagcaggaagggagcaggacagggccacagccccacacctcccaggacgggtgggcaggcctcacagggtgcaaagctgctgggggcagggaacagtcagcccacggccatggagccacagccctgaacatcctcagaaacattttattgacaacagttcccaacagagtctttggggtctttaagtggcaggtgcagcgtccacaggcagagtgagggctcctgaggaacctcaccccaaattccctaaccggccgaggacggccaccccaggcccctctcaggtgggcatggcagtcccggcagcaccccctctgagcagcctgctgtggggaagaagccgagccgggagccctcagtcgtggtgccagcccagctcatgctccccgccccgaggcccccagcctgtgggaagcccctgcctgtaagggacagctcgtgaagacacaggaacagtggtgggggtgagggtctaggaatggggcagagggtggctgagcacacacctgactccctggaggggtgcttcaaagacatgggaggcgagggccatggggaggctgggatgaacaaccgactccatgcaactcaacgctctcatcaaagaggcccactcctccctggctcctgccaccctaggccaaccctggctgatggctggcgggcccctcgacctgaggtcagtagctgggcagggcgagctcaggcctcggccgacaacactgcagggaggctcctcattctcctgggcaatggccctgtggggtcccgaacccagccacactaccccttgcctcctccagccactacgacctccagcagctg

SEQ ID NO: 77958 - DNA, 1694 bp, Homo sapiens
actgccctccccattggccctttcactgtgagaggccaagtcatggctatcgtcagagccaggtttctagccgttttaggaaaagtgtagctgaaggtataggttattgttgtggtaacaacagatctcacttctgagtgccacccacgtgccaggctctgcatgggtggtgtgggctgagctggtgcccgaggcaggaaggagccactcaggacatgtggagccatctctcacgtggctgtctccctccgggcaggattacaccagcggagccatgctcaccggtgagctcaagaaggcactcatagaggttctgcagcccttgatcgcagagcaccaggcccggcgcaaggaggtcacggatgagatagtgaaagagttcatgactccccggaagctgtccttcgactttcagtagcactcgttttacatatgcttataaaagaagtgatgtatcagtaatgtatcaataatcccagcccagtcaaagcaccgccacctgtaggcttctgtctcatggtaattactgggcctggcctctgtaagcctgtgtatgttatcaatactgtttcttcctgtgagttccattatttctatctcttatgggcaaagcattgtgggtaattggtgctggctaacattgcatggtcggatagagaagtccagctgtgagtctctccccaaagcagccccacagtggagcctttggctggaagtccatgggccaccctgttcttgtccatggaggactccgagggttccaagtatactcttaagacccactctgtttaaaaatatatattctatgtatgcgtatatggaattgaaatgtcattattgtaacctagaaagtgctttgaaatattgatgtggggaggtttattgagcacaagatgtatttcagcccatgccccctcccaaaaagaaattgataagtaaaagcttcgttatacatttgactaagaaatcacccagctttaaagctgcttttaacaatgaagattgaacagagttcagcaattttgattaaattaagacttgggggtgaaactttccagtttactgaactccagaccatgcatgtagtccactccagaaatcatgctcgcttcccttggcacaccagtgttctcctgccaaatgaccctagaccctctgtcctgcagagtcagggtggcttttcccctgactgtgtccgatgccaaggagtcctggcctccgcagatgcttcattttgacccttggctgcagtggaagtcagcacagagcagtgccctggctgtgtccctggacgggtggacttagctagggagaaagtcgaggcagcagccctcgaggccctcacagatgtctaggcaggcctcatttcatcacgcagcatgtgcaggcctggaagagcaaagccaaatctcagggaagtccttggttgatgtatctgggtctcctctggagcactctgccctcctgtcacccagtagagtaaataaacttccttggctcctgctcttgtcattgtgctctgtctgggaggtctgaggagggagcagagacccctcccctcacccttctgtggatgaccttgagtctgctggagtcaaaatttggggatgaaagcgcacagtcccaggaaccccatggtgttgtgccacagctcccaggaatgggcttgtgctgggagagcccttagcagcatc

SEQ ID NO: 77959 - DNA, 1617 bp, Homo sapiens
aaagctggcatgttttctggccgccctcatcagggtccttactctccccacaggatccttactttagaatgacaagggacgtcgcccccaggatcggctatcctaaaccagccctgctgcactccaccttcttcccagccctgcagggcgcccagaccaaaatgagtgccagcgaccccaactcctccatcttcctcaccgacacggccaagcagatcaaaaccaaggtgagcagtggcccaggcagagggcagccagcgggatcagaaacatgccctggggggcacacgcacacacacaccactgcgcagtgctttgggcctcagccacccagccaccgtagcaatgctgaactccaggattgccaactttgctccctgcagaactcaaggcagcctgtccttcccacatgaatcaggtgaatttgttttgtgtcctttcatttaggtaaaattttgaattttttttctttttttccttttctgcttttcttatcagcactgttctgcaggcaaagtcatggcaatttccttaaagttataattagtgtggatgttattaaataatggaaaagatttgtgtatatttctcatcatcagctgtgttccagcggctggacccggtgccttatttatgttttctcatgtttcattctcactgggaggtggtggtgctattccctttaaagatgagatgatgaggcttagagaagcccagccacttgaccaagtttccaccaccaggaatcagcagcactgctctcctggccctgagcagccattaccaagcaggggttatgagctggtcttctcccagagagcgttctcactgagagacatagaacggagaaacgtccatccacgggacagtcctgctggccccaggagggatgcatgcagcaggcattcagcaaacatttgacaaatcactagagaaactaaaaggagaagttagtttgagcttccttattttgcatggccccagttctgttgcctggttcctcaacagccagtgtatatataattgcctcactgttacacaaagcagttgacattttctttggaatcaagtgtgtgtttgcaggctagaagattgcagtgggaatgctgggaactgtatttgaggcatgtcacatgccctctgagtcactgcccctgaccgttctggaaagtcccaagcaggttctggttgacaatggggaagcctttcatatcaaaacttcctaagacatgccctccaccaactctccccactcagttggaagctggtataattgaagacttttctttccctttcacttctggccaaaacttccggagcacagggtgcagagtggggagggaagcgccattggaaaagtccactgttttattttgcttctgagaagttgtttggaaaaagttgtttatggccaggtgcgatagctcacacctataattccagcactttgagaggccgaggcaggtggatcacctgaggtcaggagttcgagaccagcgtggccaacatggtgaaactcctgtctctactaaaaatacaaaaattaaccaggcttggtggcaggcacctataatcccagctactcgggaggctgaggcaggagaattgtttgaccct

SEQ ID NO: 77960 - DNA, 1050 bp, Homo sapiens
tggagtcagccaggcctgctcctcttctcatcctgctccctgtctgcatggccatgggcctgctacttctctgagcctaagtttccacatctgcaagatgagaatgaagatacctacctcatagaactactgtaaagcttcaaaacaaagtgtgtagagcagctaacacagagcacacagggccacctggtcgataaatggtagtagaccttatcattatccatagtcaaattcatatcacaattcaaattgtgattttgtaggcaaggaagttttaacatacgttgtaagtaggagctgtgttttcagatgcacgatggcgttcctccacaggggagatgagacgtcagctttctccccctgtgtttctttaggtggctccaggatgtatttaacgtgcccttggtcatccagatgacggatgacgagaagtatctgtggaaggacctgaccctggaccaggcctatagctatgctgtggagaatgccaaggacatcatcgcctgtggctttgacatcaacaagactttcatattctctgacctggactacatggggtaaggagaaaacgtctggctgccttttcaataggtagaggaggatgtcaagttgtcatgaccacagctaaattcgaaacaactgaaatggtcttaaggcctagtaaatgttcttcttcctttattaaatgctatgagtggccagccatggtggctcacacctgtaatcccagcactttgggaggccgaggtgggcgggtcacgaggtcaggagttcaagaccagcctgaccaacatggtgaaacccatctctattgaaaatacaaaaattagttgggtgtggtggcacgcacctataagcccagctactcaggtggctgaagcaggagaatcgcttgaacccgggaggtggaggttacagtgagttgagatcacgccattgcactccagcctgggcaacagagcgagactccatctcaaaaaggaaaaaaaaatgctatgagctggtttattggttttatttaccaataattttgaaagtgaaaagctgtgt

SEQ ID NO: 77961 - DNA, 1990 bp, Homo sapiens
tgcagtgtacttcaaagcaaggtaagccttcccatagataattggatagattatacgtactaaactgttattttttgcaagtactgagcctaggtactacagaaatgagatgggtggaacatacttaactatctaacctgggcaaacatctcatctatgaatcgtatccattgggttactgattccacaaatctggctcattttaatgatgagtctcagataattttgtagtttgaaacacagattactccagaatcacagtcctttatggcccaagtgctatatctgatggaatagttatctctgaatggaggttggtgtttatagaacattctgtatatggtaaaaggaatttaaggagatttaaaagaaagaatgttctgtataaactgtaagtggaaatgtttgtatttcccttggtaagcaaattgggctgtgtatattctttgtttgtgatctaatccagcaaggccaattaccagaatagagctttagggcatagcatgactaatcagcttaattaggcctgcttttctaaacaccaggcttccaggggtggccactatggactcctgcaaaagagtctttaatacatttccagactacccaagggtacattttacctttgttttttttttttcaagatagtttgataagactccaaaatgtgatgatgtaactatttcccagtgaatccctccttaatttataacctgagagcctacattttttgtccttgcttttatctgttttagttgctcttactatccttagtggcatcattggttaagttaacgtaaatattcatctcaacctgtgtggtatgtaaaaactagttccaatgcagaactccaggaatctcaattaaaggagcttgtcacacacgttctctggcatcagtggtgtttgagaaatctttagcatatgaactttgtcataaatgacagtgtatattgtgtcactgctactgtcccaaagtgttcatggtagcactagaataacagataaaaatgaagtgttttcgagccaatgacttgctgtgattctatgggtaagctcctctacctctctgagtctcagattcttgagctggaaaaggacagtgacaacaatacctgccttgtagggttgtgacactaactaaggtaacacgtgtaaaagcatttaacacagtgcctgccacagaataggcattcagcacatatcagctattagtaatacttttagccatcccttttatttcctctctcaggatgaaattgattctgcagtaaagatgttggtgtcattaaaaatgagctacaaagctgccgcgggggaggattacaaggctgactgtcctccagggaacccagcacctaccagtaatcatggcccagatgccacagaagctgaagaggattttgtggacccatggacagtacagacaagcagtgcaaaaggcatagactacgataagctcattggtacgtcctctgctttcttcccagaaaaagctgcaacttttagaagtggtcccattgagttgattccattgatgtttttaaattttgaattaatcataaattcagtgaagcttcaatgccaagaaaaaatggatactaaaatcttttggttgtgcattatattcccaaaggattattttaaaataaaataacaatataaaatatatttcaaaataatgatctatagtagacagcttaatagaaggttttccctttttttgagcacttcagaacttgggaaaggtctattgaaatggccatttataacatttagtggctacaagtcaatcatagattacttaggtttcacctccagtgatactgactatggacctagaaggctggaagtcagcttaagagcagtgacttctcacatcgggcaagttcttactgtcatgcccttccttgagggccttcctgctcaggaaagactgttgccattccattgaagtctttactctgagatcattgctaattatcagaga

SEQ ID NO: 77962 - DNA, 1048 bp, Homo sapiens
gtgcctagactgggggcagtctgcacagttggggcactggcagcacacagagaatagggagcttcggggaaggatcccacagcccagcccttctctcccactcagccgtagaactctggcagcgggactcaccccctctgaacagtggactgggggagctttctctggggaatctcacttaactttaaagaaaagatctaaagaccttgacacgaaagattccccaacaaaaggggagcagcctggtcactctccaggaagtggaacctatgttgataagctcttccccaatgaagagtgcatccagcagctttcagtgcaccccccaaaacaccagcaaatagccaagaaacaccaaacagttgagaattgcctctaatatgaaaggcaggtagaaaacaaattaagatggaagaaactgaggttataaaggatgtagaggacatatggaaaactaccattaagatctcagagagagagagttgagtgtcctgagaggtcagattgctgtcagacatggcccatggacatggacatgagcatggacatcgtaaaatggaacttctagattacagacaacggaagacagaagggacaccattagaaactatccagaagaagctggctgaaaaagggctaagggatccgtggggccacaatgaagcttgaagatacatgggtggctttgcaaagagtgtttccttttttgatgtattgtttaaaggattcaaatggggatttgctgcatttgtggtagctgtaggagctgaatattacctggagtccctgaataaagataagaagcatcactgaagataatacctggaagtatcatagtggtttcttaactctccaaaataagatttcttcactgtagcctactcgtctggtttgtcccttacagaatattagtaagatttaatacagtaaaataagattaaaaaaaaaaatctcagagagaaaagggtggtactgtacctatgagtcagggcagagtgctgtgaggaaacttcagggagcatacatgctcctggaagttaaaaatgat

SEQ ID NO: 77963 - DNA, 1052 bp, Homo sapiens
aagtatatgccttgtgatcatgatcatctgctatttcctcagtctaatttcattcccatgtgcttcttaaatggagttctgatatttatagacacatgtttttccctgcaacatggaccctaaatgcaagtcctgtttatctagctgatcctctagcaaagaaacagttatctattctattgcagtgggagattggctgtcctgggatcactcaggcattctacctggcactttcccctggaatttttaaggataatttttatacttgattgacttcaaaaccttactgctgctgccttgttgccttcacgcggggcaccacattttttggaaggacagggtaaaccaaaaggaattccaaaaatagtgaccaggatggtgggcagatgttagcagagggtgaagaaaacagactaaggttgggagacctggaggagaccccaagagaccagcctggctctccttagatgtgggaaagctcaactcagtaccaggacgttaaacaagaggccatctaaagtccagctgggggaatcagtcttcaactggaacaagtaaagacattctaaggataaaccttagaggaaaaagttgaactagatgactaaggagattcattcattaggtaaatattttttgataagctgtgtgccaggtactagaggtacatggaagaataaacccagggcttacctttgctgtctgctggggaagacatgaataactaaactgcagtgtgagtgctttcataaagttactaaaggagtgtttggggatcacaaaggatggagcaaccaacttgttcccagaagcataggtgtcaggagaggctgtgaagagctgaggttcaaattggaaagataatcaatcagcagagttcaggcagagaagggtgtgagacatttcaggcaggcaggcaggcaggcagcagggagcagcagggattctgagagagcacatgagcaagggggcttgggaatcagattctggcttagctactccctggtaatggagccatcagcctcttgtctgctattgcagggcacatagag

SEQ ID NO: 77964 - DNA, 1467 bp, Homo sapiens
gctgcccgccgcgttctggcactgtgaggcgcggagcctgccaccgacccctcgcccctttcctctgagcgccgccgacccaccccgtctccctttcccactggcacccttcatcgtctccgcctgttcgcttttcccgaggagagaggcccccatttttatttagcgcctgccatgtgccagaggctttgcgtagtgttgcacttagtcccctcaacggtaatgttagcaggcttctccatgcccattccacagatgaggaaaccgaaggggaagcagaaaagtaatgcgacccttgcccaaggtttcgaataagtccaagctgggattgaaacccaggcgtctgtgaccccagaactcctgatctttccactgcactgtgccgcctcggtgaacagatgcggggaatttacagtttctctttccaccgcccacgactacacaaaatcagtcacactgacgctgagggtggggaacgggaagagggtggggaggttatttggaggccagcggggggtgaggggtggctgatgcaatgaccagctaatggctcgattctcaagagggtttcattggtctcaacctggccccccaggcaacccacccctgattggacagtctcatcaagaaggttggtcaagagctcaagtgtttctgagaatctgggtgatttataagaaacccttagctgaatgcagggtggggagaacgaaagacaaaagcatcttttttcagaagggaaactgaaagaaagaggggaagagtattaaagaccatttctggctgggcagggcactctcagcagctcaactgcccagcgtgaccagtggccacctctgcagtgtcttccacaacctgggtatgtattgccatctttgccaggcttagagcttgttcgtgtttttagcaaagtgctgaaaaccttggtttagggggtcaggacttgtgtcttaggattagggtgttatgcattttacttcttccattgacccaaagttcaggtgattcactgctcccatagggaacagagatcctggctgagcagtcgcgggcttggatccgtagcttgcctctcagcaccgtcatgctgtctgtcataattttcactgatgcaccctccttctgtgctcaacatcagaacgtattgtcattcttattgtgacacccaaaagtgtctcgtgcctggcttcatagaaattaatgtctttgccttttaagataatgttcatgctgttatttggcggggaaagcaatctttcttttagtgtttaaaaaaaatggaacatgatgggtcccaaaaggtgtcaagaaatccttgctctaaagaagtcattttcttgtcctctgggaacttgccagtccaaaggtattgtcacctacactctggggccaagatagaaaggatggtattctacctcctggtggtattccagggatccagaaacactcctgggccacattctcttc

SEQ ID NO: 77965 - DNA, 1036 bp, Homo sapiens
cacagtgccagaacgcggcgggcagcaagccgggctctaaggatactcccgggagggccaggccactgggcgccgcgccagcgtccctccatcactccctcccttgtttcctcactccgccccggccttactcccctcgcttaccctgcccagccgggccagtcagcgctcccggctcagcaaccggctgtctcctgggcgtccgtggaaacgccgtccggacggaacaacttccggcccgacggcgccgtcattggctgttcgcgcgggggcggggcagaggccgccactgattggctggcggccgcggcgtcgcgtcggaacgtgactggatggtagtgtgctggccggtctgcctccgggagaaccgagcgcttccggtgcgtgtggtgagcggcgggccccgggctggaggggccgggactgggcagcgcctaaagcgccccgtgccgcttaacgcggtctctcatagccgctcgccttcctttcacttcctgttccttcagaaagcgctgtgccttggaccaaccttacttcttactattgacagctcagctaactcctattcatccttcaaaacccatctctggtcgtatcttgtttgttgctttcatcgctctggggcctccggggggatctgtgttttgtgtttgatttccacccacaccagacccagcatagggcttgacaaagagtacgtaatcaggaaatgtttgttgaatgggaatatcctatttcttttacttcctagcatctccccctcccacccgtttgcattccagaaatatttttagacgctgggcattgaatagtgaacaaaacacagaaagtcctgtcctcatggggctgacttgctgatagtgactgtcagagtcactcgctccttccttagactcttctccagtgtccctgccttcccttccatcttactgtctgttcctcttcgtttaatccctcatctccttccagagggagcacgggcaccctggtggtgggaatctgggtgcatggtgggtggtgcctgggcagaggagtt

SEQ ID NO: 77966 - DNA, 1063 bp, Homo sapiens
tgccaactaaatgctagctgaacagaaagctcttggaaaggaaataacttcaagggacctggcttcacatccagctttgctgcagagtagctagctggtcgaccactggccggctgccttcctgtggagtctagtgtctcatttgtaaaagggcaaaatcatacctgggtcatgtgctcatgtgagaaaaatgctgaaaaagtgccttgcacagagccaggtacctcataggcgctcagtaaatggtggttcccttgcccttgtttcctcagagttctggaaccaactttcctacatcttttctcttgcaaattacattttgagcttttctccctcggaaacattttcttaagtgaagaaaggaagctccaagtatagagatgtctttgaaatgagctgaattgatgggtggcatttttaagtggcgaactggagtcctgaagtggcttgtctgtgctcttttctagcaagactcagagtcctgtgggagagaacgtcatattctctcttcagcctggagttccaggattttccacttaggtctttggtgcttttcctgccattccgggggctgtgaagtgtgcgcggaggcttctggcatccctggcgtggatcacagcatgctgggattgatcctgtggccccggggcttctctgctctccttcccaagtctgcgctgcaagggctggaggatgggaagcccatctggagggttgctggtgggcctgggcagtgtctgactggccctggagttcaagtggtggcccttgtcctccctgtgctcaccttcctgttgaggccttcttttacctgcccgctcacctctggagttctctctcctgatggtgaggggcagacctggggccctgtgggactggccttcgcctggtggcgtgaagtgctccctgggccctgctggcagagtggcagcttgggtcacttttgcctgggaaatttagatttcctaaacagaagcatccccatggtagtttttgagcagagagcacctgagtagaggcattgatttctggccttgtggagtagacaaatgtgccaggcacg

SEQ ID NO: 77967 - DNA, 2290 bp, Homo sapiens
agcctttgggaagggattgtcttttgagtggataaatcatattcgccactagggtgcacagtaagacttaatataagcagctcatccaagcttctagaatgtggaagaatccttgattcaaggtaacatttactgaaaaatgatttctttctgatcaggagaaaaacaacacagtccaacttattaatctaaagaacatggagtgccagttccttcatatccttaaaacgtagcttcggaattcatacatttcaactggacacattacagtggaaagatacttattttaatatgttctaaatgttctgtgagctgtaaaatatgcttttattagttttgaaaaatttacagctagagaaattaagtaaaataaaacaatgactcataattctgcaccgctgctctttcctgacgatcccttcctccccttgtctgtgaacgtgcttgtttttttcatagctgtgatcccagcacggatacccttttatatactcttttcatctcccagtgaactcttttggcttaacgtgtttgaacacccactgcacgtaaaggtagaaattcagactttgatgcctttttttgaaggaaaacatgtacgtggcctgcgttaaccaaaaacacaaccagccgttattgaatgctcccatgtacagaaccctctgccaggcactgagagggagtcccaaaggaataagacctttgggtgggtgacagaagacccaccagggaccttctgtacctgtatgaaaacctgcagttctgaaacacagaaggtttttaaagaaaatatatgaattagatgttgtttatttgctttacagaataatttgctctagaaattctttcagtaacaagcttccttaaaatactttgaaaaaaaaccttttaatttttgaccatgaatgtaatagatgcttattgtgaaaaactttaatgatgcaggaaatatgaagtatgaaggagaaacagaaatcattgataactcccaaccccaagtcagtgcctcattaacatgaggggcctccctggtcgggggccctacattcctatctgtttacataattgggcttattgcatagtatgtgcagttttgaattcttcctctgctgcccaatcttctgtaacgtgtaaggggaatttttctaccttattaaaaacttttccccaaatatatttttataactgtctcaagtttcatactttgctccatcatttccatgttgtttcctataatttcctgcttttgtttaaaaaataatcagtattacagtgaatatggctatacataaatattgtctttttttgctgccttaatgcagttaagatgggctttgaggccaggcgcggtggctcatgcctgtaatcccagcactttgggaggccgaggcaggcggatcacgaggtcaggagattgagaccatcttggctaacatggtgaaaccccgtctctactaaaaatacaaaaaattagccgggcgcggtggtgggcggctgtagtcccagctgctcgggaggctgaggcaggagaatggcatgaacccaggaggcggagcttgcagtgagcccagatcgcaccactgcactccagcctgggtgaaagagcgagactccatctcagaaaaaaaaagaaaaagatgggctttgatttacacccaggcattagctaaagcccttgtgtgtggtgagagtgggacctgattagattggcaaaccttcagtaccactgttgtactccttggctcccatgccaaatcttctgcttggtagctgtgtgactttgggaaaatcacttagcctctctgatcccctagttcctcactggtaaaatggggataattggtaaatggccaccaattaaggttgttgctgtagagctgaaatgagaagatccagcctagtgcctgacaagggagaggctgaggaagcatgtttctgattcccctgtacctgtcttgattagttataaaacaaagtgtagaaaagacaaatcacccagaatcctccaacttactgtaactcttgttttttgtgaatcttttcattgtctctatgcacacgtttttaaagcgtttcaatctcagtgttcttgagataaatacttttagaatctaaagagtttgaggattgtctgtgccaagccattcatgcactcccttttcatgtactgaacacttggcaggtctgtgttggagagctggttccctgtccccaaagtggtcacatttaaagcatggatgagaggatggagagcgctagccattgctgagtgcttaccatgtactaggca

SEQ ID NO: 77968 - DNA, 1033 bp, Homo sapiens
gagctgccgagcctctgggaagagccatgagattctgagctggaatcttctcttcgtgggaagtgaagtttttttgacactcctcctcccccatgtgaaagccgcgacatttctgaggccaacaaatgagacatttcccagttccagttgccttacaatcttgtatcttacagaaaaaaccttgggttgaagaggaataagaaaaggaaagtgtagcagaacccaagctgtgttttctgctttttaataacttcattccatttaacttaaacagttcagtgtaccaagggcggggccttgtgctcgccagaagctgacaggaagaaaacagccgtgtgaaggtgcagcctctgtcctcgagaagcaagcctcattcactctcatcccatgtcattaagggaaggatagagcaatttggaaaaatgcttttaatgtaattgaaaaatgcagattgcaaaattggcgcacttaggagtcgagacagtctagtaaattatttcttgttgcttttaaaactcggagacagtagactcttaaaggtgcttgtctaatgcccagtgatggcctgtgtccaaatgagttgttttagatttaatttgttttatcataaaagtggtaaaattttgggaaaaaatgcaagaaaatggcagaaattaaaagataaaccatagacccttcattcaagcctaatgaccatgaacattttgcaagcagcgtttccttctagtcttttttccctacatatatcaactagttttaatcatatggtaggtactttgtttttgtagcctgcatttaaaatcatagggtggtcatttctcccccagattgttagtattatttcctcttaagagaagggttaggtaagtcattccaaccttttaaggtttccttctagcttctgctgtttcttgtcaggtgttttcttttgtctattctcccagatgaacacagctctcatgcggacccctcatatactggggggagtggagcaagccgggggacagaagccctgaggggcagtcagaaggta

SEQ ID NO: 77969 - DNA, 1099 bp, Homo sapiens
taatatatattcagggaagtgttctgtcatgtttttacattccaagagctgtttcttattttctgaatgttcctttttttaatatagcatattgttttttattgtatatttacaaggtcttttcttagctctttgagttctttgaaagttttcctgttttctgaaatgtttgtctctttcttatctcctttggtctttttttgttttggtgtctgtgttccatgttagagatttcctgctgctcattccaattagggagggaggacctaaaaagctgacctgaccaaaagctgtgtgtgtgtgtgtgtgtgtgtgtgtgtgtgtgtgcatgcacacgcccttgtgtgggggcaaagggactttgtttgcagcgggccggatgtagggttatgaggcagcaggctggcgctcatcataggaacccacttgtgattatttttatgtatttccttgagcctggtcagcttctcagggaggtgtcttctctgggtgggctcttggcctgctgccagccttccggcatctgagctggggaagagggtcaaggtctctgtgtttagtgtgcagactgcactctccatcctgtcctccagcttggttttctcactgtccggcacatcttttcccaccagtgtgcagatctgtgccgctctttttgggggctgtgtagcgctcagtgtctgacacacaccatcatttatgcgtaaaagtggctgcgtcttctcaccctccacagcggcagaattattaccttttgaaaatgtctgctaatttaatggtgtcttgtttgagaaccaagtgagttcatttacgtacagctcttttagaacgggccggcacttcgttcattctaaacaagcatttgttatcctgattcttgtccattcatctcctgtagtcttagcgtttctcttatctgggcaatttacgtacttacaatattgacctttcatcatattttaccctcttcccccccagggtgttgtgtgatgttgagttttggtatttcatgtatttttttttaacagagaaaacctgacatttttcgctgtcaagtctctggccctttccctttgtaattgtccatggctctagagca

SEQ ID NO: 77970 - DNA, 1021 bp, Homo sapiens
tgcctagaattttcccttgaagccccaagggggcaaaggcccttatctaagtgaatgtgatctgtaattatttagactaacaccaaaattgctttcagaacattcttaacctgctgagtttagaattctaatttgaatacatgctagcattaaaagtttcacaagtagcaatttctctctccctactcacagtgtatttacacagcctgacaactgtagggaaaatgaaagagattttataaacagaagtgctctctttctgaactagttgaaatgttattttgaaaggtacaaaaacacaaattaaaacagattttcattgtcacctttgcttagaaaagttgtttgttttcgtcctgggcttcttttcatgttcttttctctcattcaagtgtgttctgatatggttctgatacggttccggtacctgggtgtcctgctgtgttgctgttagcccgggggcggaggattggtggctgtcatcaggtgctggcagggctgctgtgggaggggaacgaggtgtattcgggtttgctcccagggcagaagtaggacagatggtggaaggtgtgtctgtggggggaagaggtcagcacatggtgaagaactttccggtgctcagagctgggcaactcgggcagtagactacttggaaagggagcgagggctgttttgcctggaggggtgtagtgcaggttggagcccatgttgctggagggctgggaagtagatgcaggcattgggtcagccactcagaccttgggctccaaggccgttaatggcttgagtgtcctgtggtcagggccaagatggtggctgtgagctgctctgccctgaaatactgcactttactgcacttggggccccgcctgagtggagcacagcgctccacacactgcgtattcaaaagagagtcaggcacattcctcctctaatttctctgagcttcagcattctcatctgtgaaataattatctcacagggctgtgaggatcagaggaggttagatgtgtgaaaccac

SEQ ID NO: 77971 - DNA, 2088 bp, Homo sapiens
gtttattctgtgattgcctcctaagccgtgttcctaagggtgtgaggcttgcaatccactttgcctccagttgccttgattcgttgatcaaataatccggtgcgcacccagtgaccccagcagactcttgaggagctcaggtccctctaggtgtggcttcttgtcttccagtccagcagtgtgacatggctggcagtggttgaggtggtggacttgggggatggctcagctgatgggccttgtgacgtctccatgagccaggcttctggacttgctgctgtgtggcctgtgaattcctcgggccttgctttatgctgtctctgctgtgagcagagaaagcactcagtggcagtgtcagcagggctgttcctcacttctttcttcatttggtcatctgtatggctgtccagccatcagttaaattctggctctttgccaggccctgggatcagaggggaccagacccactcttgctggtaaaaggtgaatgaggcacagacatcaaagcagacttgagagggatgatgagaaaggccctccagggctatctgtgctgggaacaggaatatatgggagagtgtgctaggtctgtcagtgctggaggcagaggacaagaaaagcctcagggaaggggaaggacgagttgggtcttagaagatgaggagccaggatttcggggccagcctggacaaaatagggaggcctatctccacaaaaaattaaaaaattggctgggtgtggtggcacatgcctgtagtcccagctacttgggaggctgaggcgggaggattgcttgagcccaggaggttaaggccacagtgagccatgattgtgccactgcactcaagcctgtatctcaaaaaaaaacaacaacaatgaaatcgatgaggggcagccaggtgggtggggaggacagccctgtactgtgcatgctgtggggcggggacagtgaggacggccaggtgaagtgcttgggctggtcatcagctttagccctggatggtcagtggcccaaggccagatggcgcttcctgtacttgtgctgggtcaggcaccacacaggggtttacatctcatttgccctcagctgggtaatcatcagagctcagggagtcttatttcggtgttcagtcccagcccctgtgctttctgtgtggcttagggtaagttacttaactctctggaccttagtttccccatcgtaagtcaaggacaataacagcatccacctcagtcttctgaggattaaacaagagaacccacggcagactctcaggagagtaccaggcgtatggcaggcactccataatgcaagctggcagcagcatcagcatccgtatgccccctttacagatgacaaaactgaggaccagaggggcgtattgaaggacatgtagctcctaagcacggggctggcatttgaactcacctttgctgcctctgctttctgggattgttctagtcacttccctgcttgggggctccaaaagtgtagtcgtgtaactgtggcaaggcctttaatctttttgtgtcttaatgagctcgtctgtaaaatggcaggagctctgatataagttccatgagggcagggaatttgttttcttcccttgttttatctccagtttgaatgaatagcacctgctcagtcgaccatgctctttgtgggcctacttgaattttgggatgtagagaatcttggaggggtccaactgcactcccccacccacccctcacctccagtctgtgcaggaggcatccctgtggggattcgggattggttaaatgtcgccaggtttgtgaaagggctttggaaactttgctgggagctaaatcaaagtgatgattgttccacatctgtgaaatgttttttttttttttttttttttgagacggagtctcgctctgtcgcccaggttggagtgcagtggtgcaatctcggctcactgcaagctccgccttccgggttcatgacattctcctgcctcagcctcccgaggagctgggactacaggcgcccaccaccacgcccggctaattttttgtatttgtagtagagatggggtttcaccatgttagccaggatggtct

SEQ ID NO: 77972 - DNA, 1028 bp, Homo sapiens
gttctttctagggtgggctgtggcagggccacaggtccctgggccagactgccagagttgttttgctcttttctgtgccttggtttctctcctgccaagtggctgtaacaatacctatctcacagacctgttgtgaggataaatgttgtggttttggccagggaccttgcaaagtgcttttgttaacctgacctgtatggtctgtgtttctcatggtgaatgttgtatttctcaaatggctcaagtccttcaactcaggtccccgagttcagaggagatgctgctggaggggtggcaaggtggggtctcccctcatgcccttggctctgtccatactgacgttgtcaagtgtgacctgtttgttattgcctaaaaacacttaacgagttcaaagcaaagggaacatactttttaattatttctctgcttgtctccagcaatgctgttgtcaaggaaaccaaaacctttggaaagcttttcagcttctcggtcggaagaggatacttgtacagtgcgtatattgtcggtggaaatggacctgtcgttctgtaacaaaatctgtttcttttaaaagggcttacttccttcacttcttacaaatggactctttttggccttttaacagaagatggaaagttgttactggtattttctcttttaaagaattgcctgcattcttgacatagtatttcattcattcaacatctgttgtgagacttgggtgctagggatgggagtgtgatacagagatgaatatagcctttctggaaaggctcctggctcattgaaagaaacaggtggacagatcattatagcgcagcatcatgactgctctgaagggtgttgggtaaggtgctctggggcataaagaacagcctgggaggggcagtgtcagcaagtcacaggagtcctagaggatgggtagccattgctcagcagcaaagcgatagaaaagcattccaggccaagggaacagagtgtgcaaaggcagggaggtgtacaagagcatgctgccatcagcaaactgc

SEQ ID NO: 77973 - DNA, 1597 bp, Homo sapiens
acggaaacagaagcccagcagaagctctgttctgctttccggatgcttctaacgatgatgacgcagataatattgatttctagaatcagctaagccctggcctgtggcctctggagtcccttcattttccaaaggccaagctgatgccacagctcatcattctgttcagtagatggtcatttttgatttcaaaattgaaacttcaaaattttgagtaatctacttccctgtggctccagaagactgggtgcaaccatgtgaaaaagacttacttgaatttacttacattaactgagggaaaaataccagatgaggagggtacgggtgctgcaggttccaggaataacttaagttacacatgggagagggttagatgcatttgttgaattactgggctgaatgactgcttttaaaggacttgggggaaagagaagtacagttgaggccttaaaaaagatacttaattcaatgaatgttcagtgaggactggccatttctgagacatggggtcaggtgctgtggggcaccaggagtgtgaaaagcacatttcctcctctggaggagtggctttttaagtgacagagctggggcatgtgtgtcctgtaccgcagtgacattccttgatacttgtcatggtgatccagtgagtgcagctgttgtcagttctgccgtacaacccacatggctgcacattaactgggctttgtggtcccctcggagggctgttggcgcctggtcctcagtggagctggtttatgatggtggcagccttgctgcacctttccgggtttgactcaggcccagcttgttggcattagctaggatttggagttttgccattcagccagcaccagctaatagcccagcaaggaagagttagttcatggattatatttaagttagtacttattcccaaaggtaactttgtttaataaaaaccttaagcccttattactgtgcttctgggtatcctggctccagtgtgtaaaaataagacttataaaattcaaacattatttgtgaaaatgcaaaaacattttcattaatacagggcatgataaaaagcaaaaggcactttccatctgtggctaagtggtctttctgcactggggtctttttgttttcataatcactttgcgcttatttaaatattgccctttcagtcgtgaattttaaagggaggaagctttggtgtgtgaataactttacaactacccacagtatttccatccagttgctatgacttaagttgataatggaccccacacagtagtcactaatggatgataatctaggagtgtttttgttattgtttttattttagaagaaaggtttgaaattagcatagtaaatctctgtgggatctttgcaaataaaagaatgttcacgttaaaaacaattttcaagaaagatgtatggtaatgaataaaacatcagtgagtgaaaataagcgtgtttaattattcaagtagaagtagtaatttaaactaattattgcttgcggatttcataattcagtttttgtctcacaataatatttcctctgggcctccggggcgcgtcggcggctgctcgctgttcctggggcgggagagac

SEQ ID NO: 77974 - DNA, 1671 bp, Homo sapiens
cctcaggtgatccacccgcctcagcctcccaaagtgctgggattacaggcatgagccaccatgcctggcctctctgccccatcttataggcaccctggggcctaggatggggctggggtgcaggggatggggagggaggctgggccccctggaggatcagtaactctgttatatgtcttcactataatctcattttgggctgcactctgcttttgtttttgtttgggagcctgcttggaggccagcactaacagaaacatgcaagggcagaagcagagctggccatcgggaggtgggtggcctgcagggcctagctctgtggcgcatggattggtgtgtcagtcgcccttcctggcagcagctctcagtgattaggcttggaggagccttggctttaagttctctttggggaagggcggatattagtgcttaagaaacgccactcccgaggaaacccacctggatgtttttctctgtaactggccatttggagacagggccaggctgtgcataggcttttgagtttctcaggtgcctacatggggctcaaaatgatgatgcaatcaatccgtttcttgacttttgggcctgggtccagctcagaatggaggtgtgctccatgggcttgccttcggagaagatggttagcagggctgtgggaagggatgtgtggtggacagaggtacaggctccccaaggcttagaggcttcagaagcccatgtcaggcacgtggggcccaggttcaaagcagaggatggagaagggagggttaaagccttccttctgacgttgatatgtgtgtctcagcactgggacctggagcagtcggcttcggaggcccgttggactgttgaatattgatggtgtgggtttggctgaggagcataggcaggtgtgtttgccattcttatgtactcaggaggggtatgaagggcaagtcagtggcacaattcaagcaaagtgctgctgttactcgagcatttgctgtgtgccaggatcttcacacggacagcctcagttttcataggagtcacttttaggcattttatctccattttgcagttgaagcaattgatacttaagatggtagtatctttgtttagtgtgaagagccaggaattgagtggggaatgcccttatggcagcaagacagtggcaccaagtcctgcctaggtggcttgtccaatgatcagagtccaaggccacattgctaccaagtggcagagctggaatcagcgctactcagcctcacacattttgctccctgtgcctcttcagaacttcggcctgtcacatgtgtgcagctgtgggagcccagattgtgagttgatcaaggtcagggccacaccctgcacttcctgcctgacacagagtaggtgctggacagacatttgtgttgtgaaagagtgagtgagtgaatgaaagacacaccatggggatagaaaaataaggggcaggccccagggcggttggcagatgtgaaatgtggtttaaagacttggcagtaaatctgtggctaggccccccttctcctttcattcccttcttccttccttcttgggattcagaattgctctctgggcagagggctgcggagcaggagcgaggctgcaggtgtgagaaggaccccgccgtgccagggcagcctcaaggagctgttgagcgagttg

SEQ ID NO: 77975 - DNA, 1068 bp, Homo sapiens
ctgtctcatgactgggccttctcacagggctgcctttgagcttatcaaattggagacccagtgatccggctccagcctctcattttacaagtgaggagttgcaggccactggttaagcgtgtctggcgcaaggtgatgtggtagcttagggctggtcttcatgcgttgtaggcctgcattgccttttagtatatgaatcagttaggaatattggcattttaactttaatgccattgtcacaagctatgtcaccatgcagaggacccccccccacccatcccaggaagctgatcgagggtctttaaagggctctcttttgagggaaggggacacctcagagcacctggcacttgaaaagatgaaaagtaagagccccatcattgctgttaggcacacaaaggaggagaaattgctgtgggtgatccctggttgtatgaatattgagaagaaattaagtaaaggctgtgtttcctgacactgatgtattagaacatggagtaactttctacaggaaattggaacagggatccctttaaattgaatttgaagctgtgaatagcaaacctgcacttggccctgtgtgtcctaatgcaagttaagtaagcagtttcctgggtgagagttaagtactttagggatatgggttaatgttgaggccaatgtggctcaagttaataaattgcctctcgcgtgtattgtctgtgaagatgcagaagagtaatttgcttcctgcagagctgctccagaattctcatacttagtttattagatttttggcccaatacattttttccctctcattggttttgttgataataattactcacccccttccatctctctatggatttctcttggttttaattgttttcagtagccacaaaagtttaccatttcagaaaataagtgttttaaaataagaatagtcttggccaaaccccatctgagtttccagagggagacagtcaaagctctattgttaaagtgattctgggggcagtggccactgagattaggaaaaagccagcgctcccttcgtcaaacacgtcagtgctcgtccctggccta

SEQ ID NO: 77976 - DNA, 1718 bp, Homo sapiens
gaacaagactccatcacaaaaaaaaaaaaaaaaaaaatttatttcccgtctccacaggggtctctctgcggcttcctggggcctcgctccttccgcctacctctttcttccttctcctgctgtctaccctgtgatgtgatagctttctcggggagtgttcagatgaacagtgtttagaattgttgaatgctctgttggaaaacagaaaaggctatttcatgagcagatgatgaccttattaactataattaggcaattcacagaggcttccaatatagtccagcatcttttcttgttgagatggggggaaaattctatggtaatgtctttggagatgtaatagtctttatcacattactagtttaaattattctagaagttttggcagcctggtgttttcatttagaaagccgaggtatagttttacagttagccacattaatataataattataattttgagcaagtaatttcagacactgacatcaagagttgtttttatagcagagaaagatcacaggtaggaaggtggaacctcgcgtctaatctatctaatctgtcacaaataggatgatgttgtgaacacaggcagttcatgcccctggcccatgctttatattatgggacagagatgcaaatgcttagaaactccccctgtattaaatccccagagaacacgcacatttgaaattaatgggaaattgtcttttctaaagaatttggtatgcaggggcacatgatgtggaatttcccctgggttctttgtatcaggttgccccattgccttgggcttgtgtgagagtggacctgggagtgaacgggtgctcgcagggcccacctggtggtcagtctgtaactgtggctatgagcagcctcccaccctgtaggcccctcacaaggcctagttgcctggatctccaggggcatctggaagcctggaagctactgtctcctgggcaaggaggccttcactgcctccacagcccccatctgcacatgggccgcaggccctggcaaccccttcccccacttccctccactggcttggacctccaggcccacagcaagtaacttttggtttgtgttttacctttcacttgtaagcacattttttttttatcgttctatagggatttttcatatatcattttggatcctgtttttaaagctcagtatccctgtttttacagccttcaggatagtcatcttctatcatgtggttgtaccacaatttgctagttgtatccctgttgctgaacattgagctttttattccagcaggttttttattgttgttttataggcagtgctgcagtgatcatctttatgtacataatatttagcttctgtgcagttagtttcttagactctattgctagggttggaattgctagccaagactaagaataactttttaaaaatatattaaaatcttcttatagtaataatatttgaagaacagaaaaaggtagaaaaaggaaaataaagatgcccagctgtcccatgatgtggtgttcaccactgtattagctaggagtgtatgaggctgcagataacaggaaacccaactcgagtggcttcaacaggtggagagagactcgtttgtctcagggaacaggagacttgagagagagtccagggctggacccaggtgaagccatgctgtgagcgaccctggctgtttgcatctttctgtcccactgtcctggatgttgctg

SEQ ID NO: 77977 - DNA, 1017 bp, Homo sapiens
ccccagtcagtcttgcaaagggaggtttattgagcacttaccatatgcagcagggggttgtgagccacagtcgtggcctttgggaagctcacagaagaggggaggaagcaggctgacttacccctgccctatcacactgttacccttgtgtcaaccaagcttaaccttggctgagtagaaatgagtgatttgtgacctatgttaatcctacagaaaagaacaaaaaaataaaataaacttccatagatgcaccaccaggttttagttattagcatttttccgtatttatactgggtacctcttttttgttttgtaaggaatgaaatatggcagatagagctaaaaccctacttcattccctttccattagtggccactcccctgacgttggtgggcatgcttttaaatgtttcctgcatatgttatgaatgacataaataatatgtaatacttttgtattttaaaggtttatgtacatgttattacactctgtggttttttgcaatttgcaaaacagtcaacattatgttttctgttatctctctatccatccatccatctatccatctggttcattcaattttcattggtgtgtgggattccactgtataaataagctcaagtttatttactcattctcctactcctggaaggttgtttttactttttgtctcttgcatacaatattgtagtgaacatgtgttccagttttttattgctgtttaataagccacctctaaacttagtagcttaaaacaataatgtttattttgcttctgaatctgcagtttgggcagggcttggtgtgggcagctcatctctgctccacttggtatcatgtggggcagctcaaaggctagaaatggaagcatctgcaggtctgttcgctcagcatccgatgagtgattctggctgtctgctgggaccctggctgtgctgtttgctggagtattacatgtggcctctccatgtggtctgggcttcctcatcccatggcagctgggttctaggggctag

SEQ ID NO: 77978 - DNA, 1045 bp, Homo sapiens
tctcttccagctcttgctgtctccttggtcatttaattacttctggtactgatttcccccagcctgatctcccctgttataatagcgtgtgcatgaagcttctgtggagaatgccactgaggatggaagctgtcggtggttggcaggccccagtgtgggcatacctggacccacgggctggctgtgggcttcctccttgggccacatagcacccaattagtcagacacaccttattccgatcgtactgtgaggttgtagaggaaagtcccttcagatcctggcacaaaggctggcattggggagtgtttaggaaacgtgttgaaccaaataattcaaaatgttcggttattataattatcaaggtaacctgctgacgtcactcaaaaacatctggaaaatagccatgtcagatcaagaattttatgatgaatttcctcgaaaacggaacttttgactacttttaatttaatctggttccatctgaacactctgaacactatttgcagcgtgctggagaacattatcttctctgcttccctcctaaggggtgtttggattcttatctgtgttgagaaccagagcctgtgctgcggaaatgagatcttgtctgtgcactgagtcagcccaggtcttttgcaggcactcaggaagcagcatctacatcttgaggggctacttttctggattgtgtgggtgcagcgtgtcctgaaaacatcactgggcactgctgtccataccttatgatggggcacgggccactccaggagtctcaggtggcacagctgcccaggatgggcttggtgctggtcccagggaggcagatgacacgtgttgcccctcagaacagtggggacagccaggtgtgccacaggccatctcgcagggcctccctgtaccaaccagattgggtataaacaaggcattcattacctgttgttttaaggggaggaaggcaccacgggcgaggcctcccaggctggctgggtgagtgttcctgagcccaggcacttcgatgcccacactacttccagggagctgagtttc

SEQ ID NO: 77979 - DNA, 1034 bp, Homo sapiens
aagaaagaggagaagaagttgcctccttgggccaaggggctaaggtggctcaggatatgtctgttcatcttatatcggagcccactgttcatctgccctgaggcctttaatcaccaagaccccagtggctgggggaaggcctaggcagtcctatacatacagcttctgagaacgtcagaaaatcaaggattcaaccccataatataggtgacactgcttgtcttagtctgcttggactgccataacaaaataccctagactgagtggcccacacaatagatagtttatattctcccagttctgtagactggaagtccaaggtccaggatcagccagcagcattggtgtcaggtgtgggctttccccttgggttgcacacagccaccttctccactatgtgcacacatggcctttccttggtgtgtgcgtgctgctggggtggggcggtgggggcagggaattggggcagggagagagagggctcttatgtctcttcctgtaaagatagtaatcctgttgaatcagggcctaacttatatgacctcatttagccttccttccttccttagaagtcccatctccaagtgcagccacctggggagttagggcttcaacatatgaattttggggaagacacatccatgacacccctagtatgctgcctgacacatggcaagtgctcaatgaatgtttgttatatttgaatctgaaaggttccagaaagatgagatggacttggccccagaggctctaggcaaatcttgcagaccaagggggcctggtgtgtgtgtgtgtgtgtgtgtgtgtgtgtgtgttcccgggaaggcacatcctaagcttggcctgctggctctggctggtatgttgggtatagactggagatgagctccacctctgcccagccagtcagagtcacctccggacctcctgcttcctgatctcctcagccctttggggaaatggaggaattgtgacatttgccctaggtgatggggtgctgctactggggccatataccatgaagccgaaattcc

SEQ ID NO: 77980 - DNA, 1116 bp, Homo sapiens
aaacttgtgaatgacgggtgtacttgctcctcctgctggggttcattgcatgcctgagatgccaagagcagggctcgcatcaccctgggtgctaaggaaaaaggccccagggagggaaggataacccaggagaaaggaggagctattccccttataattgctttccttatcattcttttaaaatttgttgtgtgtacatgttttgtaatgagtataacacatcaatagaatagggtttatgtactcaaagttgtgtgctcagaaaaatttttaaaaatgatagtgatatgtgatcaaaaaagtttggagatcacggaaagagaagctcactcagctgtcttgaagtggagagagccctggcctggccttaacatccagagatgagggcttgtgatcccacctgctcctgctatgggggcaacaagacattcattcactcaatcattcgttcattcattcattcattcattcagtatggctgagcggtgaggttaacacagtgagcaggaaggtgctgtcctgacttcagagagcatctgcaagtccagatggggatcttcatggctggaaggacagtgaggcctgtcagggaaggacacagtgctgtggatcacctaggaggggcttgtaagtgaggtttgggggttagatgtgacttccagggagaagagtgacgcctaagtgtgtatgagagtcctctggtgtgaggcttggagaggagggagtgtagctgctggccagcaccgtggaagagttgactctgagcaaatcattaatctttttgggccttaattgtcttctctgtaatggggaaggatagtaccactggcctctccagcaagttctttgcatctgctgaggccagattcaggtgtcaaattctcagctctgctgttgactagccatgtgtctttgggatgtgttatgtctggagctttgctaacaaagctttctcaccttatctcattgagtcctcccatccagcattttccatatgagtgctttgagtttcagagaagtgaagcgcttatggagggtcccacaagcagtgggagccgggacgcagggctgactactacacctgggcccgccttttcaccacagactgtgtgtgct

SEQ ID NO: 77981 - DNA, 1030 bp, Homo sapiens
gcagcgttttcctttttcaatttcaacctgactccattcctctctttatgtgtgtcagtcatagcaggggagtgttttcctcttggatgcgtttgcacctggcaaatgaatgtgcaggaattctttgattgcaaaatagctactctcaaaatgcagacaggcagccacagtcagggagcccttcggccacggcagcggggtggcgccagacacctggctttgagtcccgtggaggcatgccacttagtctgttctgagcggctgtttacaggcggatagaaagggctgtaggatgggaccctcaaggttttggggcatgggaggggctggccgtcatgattcagcatgctagctctctggaggctgtgctgagcactgagggacactgggagaaaaacacaggctcctgctttgtccatgtggaaggagcccaggctgccctggctgctatacgcatccttccaggcaaccttcaccttctggtctatttagtctcattccctgtttttattcccttcttttatttagggagagccagagcagcaattctcaggtcaggattatttgggagatccatattacttctgattatttacgaagggacaggccgggggaggtaaccacctcgataaattcgtcagcgaggcagctggagggatgtgtgacaaacataccaggctgtcatttggccagagattgtctgcactgggattgttcccccaggatagtcctgatgacaaatgtaattgacattttttattaaccctgaaatgattaaagatgctgctgctgaatttgtgtcaaagtacccggtccctggcattttgagaaagggattctctgtggagccaataaacagcctgtgttttcttcctgttcatcactttaatcaactaagacatacagagccctgtctggtttggtcttgaaactgggccagggagataagactctgcttcctggcttaggtttccagaacactctggtatggacatcatgagggacacataggaggcactctgttcattta

SEQ ID NO: 77982 - DNA, 1039 bp, Homo sapiens
cgtccttagggacttgagcctggtgtgtaccgacactgcgctctcttggcagcaggcagtgagggacaggagaagaaccaaagttgatagtgccttctgtggcaccttctacttcgtcactttaattccctttaagcttccccaccactctggaaagtgggaagattagccccgttttctagctgttgaaatgaaagctcagagacaatggtcatttacccaggccacatggattgaaggggcagaacagagttaggattcaggggtgtctgaccctgaagtcccccatggaactgggcctctgtgttcttgctgtcaccccatatccccaccaggcaccctctcactcactctgttcacatctcccagcaacctcagagttttaccctatgagttctcagacaaaactttagaatttattatcaatgcatttctctgcagcaaagtctggatgaatttaagattaggggattcggttacactttattactgtttgtcattaaaaatcatgcaaataagccatggaataaagtaacttgtgttgttttggacaccagatttacatgtttactggaagaaaaatgatgctgaactccttcaaggtggtaataaaattttgcctcagagccttagctttgttggtctttttctataatttactccacaacttccaaaaaatattttaaactagtttatcataaaactcacaccaagggtttcaaaacatccttttgtaaaggtgaaaagaagactgagaagctgcataggctgcaggctgggagtggagaaggaaagacctgctgcagccatgtgactcaggggcctgagaggtgaatcaaagcctccttgttgccagggctgagacggggacaggatggcttctaggcttcctgtctttggattttagtaggaagtttccaggcttttgttctgaaacccccaggttgcttcatttagcttccgacctccctgtaggaggaggtgggcacagaacgtgtttggaagcgtctgggagaataaggaccaggctagaaagaac

SEQ ID NO: 77983 - DNA, 1543 bp, Homo sapiens
gtctccgagataagagtgagtaggatagggccacgagggaggcgaaggcttacccagaagtttgacagccaggtgatggggttatggatgactcttattttcgttgtatttttctgtttttttttgtttgttttgtttgtttttttttttgggcagagcacacatatttccaatgaaatcagagaaacaacaatcctatagctgtttcctttgggattttgtttttgcacttctgtatagtttgaataatttacaagaagactgtattttttgtaaccaaaaacgaaaggcaggcaggcagaaagaacatgacctgtggctagatcaatacttgttcaatctttggagactgtgaggaactcctggtggggccatgtcttggtaacgaggacacagaaactgtggtaaatatggcaccgacaagtgactgcaccatattttacttgtcatattcttttcaaatctgttacttttgtcggacacaaagaatgtctctagttaatacatgaaatcatcttggaacatttgacagaagatttaactccttaattctatgaaggcagtttgggatctctaattacttaattgaaaaaagcacgcacttcagtctgctgcaatgttggggaattaatctttaaaacctgacagtgaacattaaattcaattaaggagaccaattggcaaagattcttccctccttcaccctggatagctttgagaggtagctgactggtctgcattgattcagatgctgtcgttgtctgtgcatctactaggagagccaagtgtgcgtttttcacttcagggggagcttgtcagacgatttacagattgatggatctccttacatgtttccgtggctgatttgggagttcccctggacaagaattcaaacattccagtttgctgcttttggccttggacttcatagagttcaagttttttgtaatttcttctttcttgcatgagaccactatgttgcccaagctggttcttcctcctccctccgtcctctcctcctctccatcctctcttcccctcccttctcttctcttcttcccccttcctctctgcaccccccttcctttttcccttctctttccctctccccgcttcctctcccccgctccttcctttttcccttctccccttctcttctctcccccttcctctcccccttgctccttcctttttcccttctccccttctcttctctcccccttcctctcccccttgctccttcctttttcccttctcttcttctttcaccccttcctctccccctgctccttccttcctttttcccttctcttttcctccctttccgtttcccatcctgtgtttcttttttctctcctctccccaattcctccatcactccttctctcccttccttttttcttctgctcctcctcctctccgtcttggttaatttaactttttattttaaatatgaaatgttttaaacatactcaaaattatagaaggtaacagatacctatacacctgtcactgagattgtcaaatccccaggtgtgtctgt

SEQ ID NO: 77984 - DNA, 1032 bp, Homo sapiens
agcaagtgccaagatttctttccattctaaggctgaatactattccactgtatggatagaacacatttttacaattcattcatccatccatagacacttggattactcccctcttttggctattattaataatgctgctatgaacatggatgtacagtatctttttgagaccctggtttcagctttttgggcatttacccagaagtggaatggctggatcatgtcataattctacatttaattttttgaggaaccatcatgctgtttttcacagtggctgcaccatttgacatgcccaccagcagtggacaagggttccagtttttccacatccttgtcaatgcttgttattttctgttttttgatagcagccatcctaatgggtacaaggtggtgtttcatgtaaaaacttaaatggcattgtacttcgtatatgcagcttgacttatgtacttaatattaacttttttaccatttaaccatgtaagccctgtagatctcgtttattttactatttaaataaaattaaactcatattcatacatatttttggaaaacagcagttccctgtgccccatctccctcccgtgaattcttattccactttgaagtcttctggctgtgtcttctggctgtgtcgtgtttctaaatgtaaatactgctgtttcttgattttttcagtttgagaccccagctattgacccttagtgaggaagaaaggaactgagctctcttcacattttttgaaggctactcttgaccttttgttttcttaagtgtagacatttacataatcccaggaaacaaggtttcagagctctgatcctttgcattctgagaacattcgggacttggcaggttgaattttcttgtctttaatgagaaggttatccctgggatcaggttggtagaagtgcatgggtgtactttgtttgggtttttctcttattaaagaaaatgaagcttggttttcctaatggaacaggtctggaatccacatccagttgtgtgccagccattatgccatgtgct

SEQ ID NO: 77985 - DNA, 1041 bp, Homo sapiens
aaggtcctgcccaaggcccctccactggaagtgacagagctgggatgggatctgggtctgcgtggctctgaactcctcagctataccatctcctgcttccaacattgtgccagataatgatggctatggccctaatttctgaaacaaagtcttatttgagaacttcttagttagcgagatttctaccttagtcttttcactaggtatccagaaacttactaaaaaatttaaaaatcttgtagttttgaacccttttaacaaagaaaagcagtaagggcctagttattataagtacaaataggaaaaatgtataaactacagcttatcttctaaatggaaatacttaaaagacagattttcaatctctttagggggttgaggaaaaaataacattcagattttttgtttgtttgttttagcagaaaaagttcgatcatcgtcttttagcaattcagctttcacattttctctcatctttcttccccattgttggcaagactgtatcactgcacttttgaaaaaaacatatggataattcactgccatttctgaaattaagcatatggttatatgctatggtctaaaaaataaggaacattttttctccaggcagagagagtttgtgtttccttttggatttaaggattggcaatgaattccaagtgagcaagaagccggccactgaatgttctcagcaataagcgcagttgtccttgtggggagaaagagtttggcagtcctgggccttctcggtggtgtggggactgcagtggtatccgtgtcctccttttctgtctaggggttgtgatggtggtccctgcctgcagtctccagatgacccccagccgcttggctgaagcgagtgtcctggggcctctgtgctgccacattgctgctctgagtccctggcataggcacatggagaccaaggggacagccctctgcctgtgctccctgagcagggggacttgctagttggtcatatcacggttggtttctgatcaccaattgtagcttaaaaggtggggtttgtcatgctct

SEQ ID NO: 77986 - DNA, 1132 bp, Homo sapiens
atcttagttttaagatatttgttttgtgacctaagtactttctaaccctctcttctctttttgtgttgtaggaacccagctatttagtggtcgaagtgactttagaatcactaccttgaaattccatccaaaagaccacaacatctttttatgtggaggcttcagctctgaaatgaaagcttgggatataaggactggcaaggtaatagccatattcctaacttggcctttccacaggagagcttgtttcgacaatttgaataattgggggcaggtcagcatctatatataggacccttgaggtggaataattaccacttaatatttaatcagtgctaagcataatttttagatgttttgaaagaacattcttgagttgtcagacttaaaatatcaaaggtgcaattttatgcagcatattactaaaaatatttgttgaacacctactgtgcacaaatgcttccagatgatataaaatgaatctgctgggttactcaagggaataatgtgcgggtacagatgactttggtacagagaattggtgtgtgtgtgtgtgtgtgtgcgtgtgtgtgtgtgcgcacttgtttgcatgcttgcgagaggaagggagggggtaagtgcttttagcttgctgtgggaagacttcttagaggaatcacttttcctcagtcttaaaggctggttgtgatttccatccccatcctttattacaacctgctgtgccttttaccatcaccacttactagatggcagctccaccctagttgttcaggccaaaaacatcagaattagccctgtctctgctctttgcatcacattcccatacccaaaccattagcaaattctccaaaacttggacatttttccccacatcagctgttgtagctctgctattgtctctcgctgggatggttgcaggagtttcccatctgatctctcactttcccccttgccccttggaggctgttctcaacacagccgctagactggtctgttacagtgtgactcagacatgtcactcctctcatcagaatcctccaggctctgatcttacagtaaaagccaatgtctctgatgatccacaaggcctaaatgatcctccttggcctgggggtaggtcagcatttctcat

SEQ ID NO: 77987 - DNA, 1043 bp, Homo sapiens
tggaacccaggatgcctgtggtctgacctttatagtattgtgagggtcaatttctgcagaagcccctgagcctctagtgccgttggcctgagctgcaggagacctgggctcacgtcctccctctgctacttgcttggctgggtgatttcggccacattccttaagcaaaagcctctctgattcacaatttttaaattggtatcgtaaagtggcaggccaagccacgcctccaaagtagcgtttctcaaactcacctgtgtaggagagcacctgggctcttgttaggatgcagattctgtttcagcaggtccaggttgggataagatcctgcatttctaacaagctcccaggaaatgaaggggaggatagtatatggaccacattttgagaagctagggaccaaagggcctctgaagttaaaagtcccttgcttctctcatttgaaccttatcctcaattagcctgcaccatctgtgacctatctcagggacaacgatcactcttgatctgtgggcacttttatccacaggtgtttatttacagccgcttggtgtgggagcctgagtcacctctgtgcctggcatccccgacagggcctggaccagagcaggtgttcaggataacctggagtgagctgatggggtcagccgccactgtcattgtgatagaggcctgcaggagcacccacctgcccacaacctcaggggcagtggccaccctgggatcgacatagagggcatggcccctctgacaaatgggatatgaaggctagctggaattcagctgtagtgagtcattccagaagtgtggacagaggcaggaggacttgggagaccctgtgtcagatgagatatggtgtggccatcaaagcactgtagttctccactgaggctgagctcctctgctccccggtgtttggtggataacagagttatgagtctcttgcatttccagctttgcggtgctgtggctctgtgcccagcacagaatggaagctgtagaattgcaggagaagcctgtgacacggactcagctgtactggg

SEQ ID NO: 77988 - DNA, 1053 bp, Homo sapiens
gaagggagatgaggagtggatagctctctttcccctctgcatgccccttttccaccaaacagatttcttggtttttaattacagtctttgtcttgaattttttcttttttttcaaaaaggtcggttttctggctcacctcactcatttgctcattgaacactgcggagcacctgctgtttatagggtgtcttcctagtttagaggattcagagaagctgcaggaaatgtctcttgccctgctgctggcaccacctccacccagttggtggcccagccagaaacctctgcagcagctttagggtctcccttctccaccacctcagtccctgcgtcctcctcttccagggccaacatgtgaggttgtgcagtctgtacagtgcagagaggcaccttgctgagggataggtggggtctgtattccattccaagccctgctggccaggccacgcccctgatttggaatggtttctactcgaaggggtatctttctctaataggaaccaaggtgccatgcgggccagtggcagccctgtccctccccttctgtctcttacttggcctgagtggggctgtgagccgatgagagggcttgtcgtggggtccccctgtgacttgggtgcaagcagggtgtaggggtagaggcaaaaaagggccttggagacctggagacccaagtgctgcccatgacttcagaatggagggtgaggtggttgttctctagatgttcgttttgattagaaaaggaatacatggtctttgttggctacttgggaaatggaaaaatataaagaagataacccattaaacttcaacccagccataaccaccactgacagttggtatccttcattcaattgttttatgcatatgtatttacatttttatataattgtctttcagcttattataatatcattagaatttcccatattgttaaaaggtttttggatgctataatttttaataattactcaatatattataccaagatgtatttaaccagccctctattgttgggtgtttataagatttccagtggttcccttattaca

SEQ ID NO: 77989 - DNA, 1173 bp, Homo sapiens
caaggtgtcagggagttcaccgtttgcagttttaaaataagaaagctaaatttagaaaatgtggagcaggaatgaaaaaggagtatggtctcttccctccacccaccttcctggggctgagtgttcaccttcatcctctcctagaaaatctgggatgccagatccgaagccatcgtggagaaaaacggcttcacctccagatgctgtgcaggctgtgtgtgctggctgcagtgctgtgtgccgggcgtggccgtggcttttttctgagtgcagctgatgctcgcagcttctgacagggtgtccatgatccccactgtccagcagaggaaactgctgccctgagggcagggagccatgcccaaggccctctgaccccaagcctgagctctttttgcacctgggatcccttcccaaatggcctcccgtaggcgccacctccacctcactttggctgtctgtacagtgggagacccagctgcctagagggtccctggaaattgcattgatgaatgtcctcaggctccagcaagggaagctggccagggggcctgggtcttgcccaaggtgacactgtcaactggtggcagagcccaaccctgcgctgccctgccgagagctgaggagaaacatacatggatgtgtgggcgggtggcggatgtgcagacagggcctccctgacggcaaggcaggatctcagtgcagggagagggcaggggtggagcagggaaccctgtgccaaggccggctgcctgggtagatggggactgtccaggacttcccgttcagctgtggggacagtccaagtgcagaaggtcgaagggcagatccagagggaaactgccagctccagagctcagccccttgggagccccacaggagcactgaacagtttctagaactctccagctgtcacagatctgtgccttttcatggctgtgttccatttgcctaaaatacctgttgaactcctattcatccttcaacacccattgtgatcctctcctctgacccctttcattcgtcctcctggagcagtgagggccctcccctctgagaggcccacaggccctgtgttctggaagccctgagctgagtgttacactgtctgccttcctcccccacctctgagttccttgtgggcagggccaggtccccgaggccagcatgaggctg

SEQ ID NO: 77990 - DNA, 1002 bp, Homo sapiens
tccacccggccccggcccgtggaactccacttagagcgtttttcacgcgtccttcccccatgtgagaggagcatccccccttttataaagcgaaactatttttatagagaaaaagggtctttcttaacgcacttggcctccagctccctggacggctgccttggcgttttcaacacaaagctcctttattttttgggcgagggtgcgtggggcctgccccttggaagggaagggaaggacggtgtcctgtggagaccagactctgcaagtggggagaccacccccgcaagccagtgacaagggagccctgaagttgtgtccacgaagagggagctgaaacaaattcggggctatgaagtgttttaaaaatccattcttcgcagtgtggccaccacaccgccctgagccctcccacggcccatcgtcccgggtgggccgggatgatgccccagtgcggccggtgctcatctccgcccccgggtccgccccctgacaccgtcttactctacctcagacatgaggaggccctccattcctggtttctgtagcttgcattcttgttgtctctgatgcatgccctgccagttagtactgtattttgcattcattaataaaagacaccggtggaaagaatctgggttgggctgtttctcctcctcctgccttttggtctcgggaacctggggtccctggtgtccctccccagccttgctctctgcagccgagttgggccccttaaccccacttcacaccccatccccataacaccccgtccccaccccgccatccaagttcctatctagggtgtggattctcctgcttctcccaacccactggagacaacagctctttcatcccattctcctgcgcgctgccccaccgatttcctggcccctaatcctcgtgtctcagacttggcttctgctccttgagatgtactggggccacggatggaatgtcggcaggtggccttttcccgggcacacgggatgctgccgctct

SEQ ID NO: 77991 - DNA, 1011 bp, Homo sapiens
ctgccatgcaaggcctgtccctcccacgacccttatggccgcacagcctgctgagcagggtggggctgaatttggacctcctgagctcaccccaccagcttcaccctggtggaatgtgtgcccctctgcacacagcagagaacatcccattaaagcaaacttttgtagaagcctttcctaggccagggcccaggactgtatttccccctccaccccgggaccccctgaagatgggaagggaaggcttgttattcacaagagactctgtcccatccacacgcggagccagtttactcacatttgacccacaattcttacaaacctgttatggggttgacagttcaaatgcaaatgagcagggaagaaacttaacactaactatgtgatgggccccagggtgaggctggagacatcacagtgaacaagactcggttctgccgggtaggaggagtggagctgagtgtcaggtgggaatcaggtgcttggagattccattgctggtgggagggggcttggggatggtgtccagcctcagacaacctatgtgtcgtgttatggcccctgtcttgccaatagggaaactgaggtgaaactttaattacttaaagcagtaactggcagggcccagattttaactgaggtctgactgcactgcccaagcttggtttccacatgaatggagggtgacattcaaaacactcaggagctggggctgttcggagagggacaaaccctctccctatggcaagtcctccctaggggcaacaccagccgattctctacaaatacctaaaacaaatcaagccaacagcaaaggttgcatgcttcttgcattttctgtttaagaagatgagaaagtgcatattacatttcagaaaaacatccattttaaatgtgcacaagaaaactgcttttagaaaagtttggtgtttgagggagtccagcacaactggatcgacacttcattagcccgtacgcgctcaagggaagggtccctaaactggttcatct

SEQ ID NO: 77992 - DNA, 1058 bp, Homo sapiens
acctcagggcctttgcacttgctttccctctgccagaaacactctcactctctcccttcccctccttcccatcatctaattcccagctgaccttcagggtcccagtttcacagcctgtccccctctgtccctcagattagatcaagtacccctgcggcagccccttatagccctggcccccagctgtaactaatgtttgcaattatttattatctgtgtgtgtgtccccccgtagaatgtaacttccactgtatcccagctctttgcatagggcctggcacatagcaggtgctcaatgcgtagttcttgaatgactgactgaatgaatggcatagcaggttcaggctgtcagttcacaaacatccccagcctggtgtgggcctactgtgactggaaacaggatgagaatataggggagggatctcaggctctcgggaggccacagtgtcctcctcccaccctatggtccccgacagtcgcccctctacacccggacagcccttccccagcagcagccgttcagcccctgccctattaccagtgggaaagagacttggaggctggcagatccaagttcaaatcccttctccaacactccaacaggcctgcgggcaagccacatcccctcctcatctgtcaggtgggcatggggcagtactcagcccatggcagtgctgggaagtggcatgagcaagggacttcaggactcattagcactggggctctgatgtggccgtttcactagcacgcatggttgcaggagtgttctgggggctctggccaaccagtcctctgagctgcttccagagtttcaggctgcatcaggcaagtttccgttgtcataacaacctgctggctctcaggcgcctgggcctgaggctctaaggatgctgccggctaccgtgggctcacggcctggacctgctcacctaccagcagcctggacaacctctcctggaggggcttccggctcctggcaccgcagcccctgcctcttgactcatctgattcagtcctgcttcccaagcccatcctgcgtgccaagctccgtgctgtgc

SEQ ID NO: 77993 - DNA, 1022 bp, Homo sapiens
ggtgtgcagccctgccaggctggccttggtcttgccagcaggggcaactggccgttgggggtggctctgcctggcatctgtgacacgcagggcggggagacggcagagagggccccagcagcatcctgcaaacccttaattttcccgactctcactataatcagggcagcttggaaaagcaagcactgtggcagatgcggctctgcccgggctcagcacacgggctctgggcgatgggcggctgcgctgccgccaagggccctccccagcttttgtctcatatttatagattccaaggctccgcgttccgtttgtcgtcaaaacctggagctgttcgcacctgggagctgagtggggaggggagggctgcctagaacctcagcctggaggatgagttttccatgcgctggggtggagtagggggacacctgtcagagcccaggcctggagagaggaaatgagccctaagcaatctggaagatcttccatccactctcccaagacttgggcgcagggtctggcccacatagctgccatttatggaacgcctgctatgtactgggccctggatcagcatttccacgcatcatctccacggcaacactttgaaggagcttccctactcctgcaggcactcctgatgctgaagagtggatggatggatgaatggatggatggatggatggatggatggatggatggatggatgggagggagggagggatggatgggagggatggatggatgggagggagggagggagggatggatggatgggagggagggagggagggatggatgggagggagggaaggagggatggatgggagggatgggagggatggatggatgggatggatggatggatggatgggagggagggagggagggagggatggatggatggatggatggatggatggatggatgggagggattgactgaagcccatgagtccatggctattggacacagtccacaaatcattacccagggtcccaggaggtggggtccaagggctg

SEQ ID NO: 77994 - DNA, 1050 bp, Homo sapiens
tgtgtgtgtggggactgcgtatatgtttttgtcagtgtgtgtgaccacgagtcagctgggtatgtgtgcttgtgggtatcaggtgcatggctgtgcgtacatgtgtgcgtaagagtcggtgcatttgtgtttcagcgcggctaaggccctgactgagatgctgtgtgtgcgggggtgggtgtgactgaatgcgggcacgggtgtccgtctgtttatacgtgtgtttgcgtgtttgggtgtgcaggtggctctgcgtaagcgtctgtgtgcagggggtcggcacatgggggaggatgcccatggttgggtaaccgcaggtccgcttgaccctctgccacctaggactgtgtctatacggcgtctgggctacagtgtgtttgagttgccgtgtgcgtttccgttgcggggtgtgggttgccacggggcaactgcatttttctgcgtcttcatggccaggggtacagggggcgtcgggcttttcctgggggtttttctgtgtgcgtgtgtaattatgtgcttagttcacatcttcatagtgcgcctttgtgttttcctgggtatctaaccattgcacgtgtgcccgggacttcagcgataagtgtttcggtgttcctgcgtgcggatttgtgctctccggggaggtctgcggcccaggttcgattcctgcgacttgtcctaggcaggcctgtatgtgcgcggcggccgcgtgctgtacagtgtgagggaacgtgtaccaaacgctcgcgggatacctgtgcccgtctagccaagagtgcacccgtgtgcgcgagcgggcttctgggacgccgccgtggtcgggggcggccctgcgaggggagggggtcacagggactggccggcgccggccccgtgcgcacggaggcgggggcggggggcgggggccgcgaggggggaggcggtacgaaaagggcggcgcgcgcggcggcggcggcagctccccggcagcggcggtggagagcgcagcgcgcagcccggtgcagccctggctttcccctcgctgcgcgcccgcgccccctttcgcgtccgcaa

SEQ ID NO: 77995 - DNA, 1050 bp, Homo sapiens
cccctcccctaacaggagagggtggagatgcagtcttgtctggtggagacaggccttagggaatctcagctaggcacgctgttgcagggaggggcatgatgtccacagtgaacgtcacggacatgtcgctggatatggggtgacctggtgccaggcaaagggaacagctatcctggcctgaatatcagtggccacgactttctgatctgtgaccttaggcaaggaaaccccttcagcttcctgagcctcagcttactcacttcatgggtttttttgagggggctccctaaaccctcttactccagaccccactcggtggccatagagccattttaaagcccactggggcccgcatcacgctcgtgtatggagaggaagctaagttctcgtcttccccgtcaccccgcagatgttcgggcctgctcctcggccccctgtgccaacaacaggacctgcgtgagcctggacgatggcctctatgaatgctcctgtgcccccgggtactcgggaaaggactgccagaaaaaggacgggccctgtgtgatcaacgggtaaatatccttcctgtgtgtgatctaatgaatgctgcttttcatgcggccaccaaagaccctttcagcctaaccctgctggacctgtcgtctgacaaaagatgaagtaagcgctcatcctggcagccccgtaggggaccgccctggatgggagtattcacgggggaatgtgtcattgccataattttttcaaatgatcctgaaggcgatttcatattcccctgatgttctcaagtcccgatgcgtgtgagtgacagtcgatcggaatgatgaactgacactcggagctgcgtaattttctaaaggcaacgtagtaaaagattggagctccgcggggctgaggctgtttgtgaaacccacttgctgtatctcagggggtggttttggggaactggtgggctctgcaattggattttctgggatgtctgtggagggagttgccaggctgagaggtgaagagattgggcttctgccagcacgagaggaggtgggccagctg

SEQ ID NO: 77996 - DNA, 2422 bp, Homo sapiens
aaaatctattcctgaatgtccctcgtcctgtggagtggcagtgaggcctgaaaccccctggcttcaccccgcggggccaggtcaggacagcgcggccaacccagggctgaggcagggcaggctgggcctcatgcagcatgtacccaggcagggccccagccatggcgccagcagggtatcagttaatctccataagaggctggcgagggtgggttcttggccccattttacagatcaggggccagatttcccaagctgctcagctgacagatggcgacaaaccaaagggccgacctgaagccggtctgtgctccagccgtgggcctccacttcactgtccttgagatctcaaaacccctactcccaaaatttccaggctgggtagcctctagaggcatcctggcccccagcccctgacttctggcccattgccgtgtgcccactcagagagggagcatggaagacctttccgtctcccttcgggccttataagtaaaacccagctgcgcttccctcatgccatctgcaccggttaatgatagattgagaggatgctggcctggccatgggtgagggtctgtcctaaataggacatgtcaagtgcccagcaggatagctctgtgtcctggagtaagacaggtgtggatctaaaattggaggagcggaggtggcgttgactttttccaaccttggttcacccatcccgcgccttcggccgggaaggacctgacaggtggtcccagcccctgggcccatatgcctggattcctgtgctcacagcagaggccctaaaatagaccaggacattatacaccatgtccacagtgccctgcttctccgtgaggagtggcgcggtttccgcctggagtcacaggggctaatccctgctcttccccaagcctgtggcggatcaggggagcctgggtgccgggcgggcctggccctgtgtttctgttcagctgcctgttccctgtgggtttgagggcaagtcacctaagtcctctgagcctcatgtttcttgttcattcctgtttctctctgcctttccctctttagagcctggagacatgcctttctcccaattaagtgccttaattatttgccatcttcctcattccaaaaatcccacagacaggacttaattcttccatcgacacagaatacccggaattccgctatgagcaaattcacaatatcctctgaagcctgcaattttcttctgcctaaagccagctgacgcacacaggacagagccacggctgcctgcatttcctagcggagtacatgattcatcattttcagacttggggatcagggggccgggcagggcctttatctggtgggaggcagggcgcaacttctgctgattgcagactgcgcagtctgttgtggccgattcttacaggaatcctacaagagagctcgctgtccttgtttcacagctaaggagacagagacacagagctaagaaatagcacactcaagttcacacaaccagtaatgaccagatttattacaatttctcccagtgtctcaatctggaatcatgtttgtcccctctagggctatagaaactgcaaatgatggtttcttattctcagccctgaagctaccagttgctgagatgttgaacaggagcttcctggcactgtgtcccgtgtccggggctattttaggtgtcagaaattcatgcacatttagcacatggccaggaccactggagtatccctcctgccctgcctgtgctcctcagcccaccccaagaccctcttccatttcctgctaggcagcagatggaggaggatagggtcttcacctgacaactcctacccctgaagaaactctggcggcttgaagcccaggtcctgtggacactttctgaccttctgtccatgcctgtaacctctggaccaccctgaaaggtttctctaaagtggttgcctctgttagaccatagaagctggccaactagctgatcccctgtctggaaagcctgatggctgtaacctgccttcctgcaacaatttggacaaacatcatcaatctgcagtttcttaacaggatctcatttgtcctggttctcaggcaggggtggtaggagccgagggcagggccttggcctgcaggactgtgtgcgcatcagcagcgagcagccatgtgcagactgctttgacatgcgtcatcctgaatgcttttagccacccgtgggaagagaatgccaagggccagaggagacagcttgagcccacagtctttgaattcaggtctgtttttgtctgaaattcacagcatatctttttgggaggttcagaaatgttcacctttcaaatcctatgcccaggctacctccctagcagacagtcaagggtggcaccaacatgaagtgccacgtcccaacctatgttcaggacctggtttggtt

SEQ ID NO: 77997 - DNA, 7596 bp, Homo sapiens
attttctttcgctaagcccgcatcctccgatggatgttccgaaaccgccaggtgtgggatctgcgccccgacagccccaccttggccatcggccgcctgaggacggccagccatcggggcgattccccccacacattgtgcctgaattcaccctgcctggcgagccgggctcacgcagggaaaaagcacccgcgaccacagggtgttggtcatggcggccaggggcactgcggcagaattttttcctcccttctttgctgcaatctgggtgcggctagagcaatttgtcatagaatctggggggctcatttttccggccaatcacttttagagaaatgagcgcattgcagcagaatgcgctgacgtcagagaccaccccttctgcgcctccatataaaccccacccagccagcccctagcgcagacggcggagagcagagagggagcgcgccttggctcgctggccttggcggcggctcctcaggagagctggggcgcccacgagaggatccctcacccggtgagtggttggccatccttgccgcaaaggatgtgcaaaaggaagacggcatccgcttctgggatgggctctgtcctcctggacatgccgagagcctgcctgatcctgggtcctgctgctggaggcggccacttcgcctggtccccgagcgtccgcaacaaaatttgtcagaaagaaaatcttgaggcacatttccctggggggaagtcagggctcctctctggagggtccagtccttaagggtgggctgggtggtagggacttcagttcagaggagcgggaggaatcagatggaactcctcttggattcgggtatacggcagtcactggggggcgaaccccggatttcctgtattagaagccgcctctagaatcgcgttaatagtgggagatatggcggcgatgccttctgcgtgccccatgaattagggggggaagcacccgaatagaagggtctcccgggcatatttgcctcgccagctgttggccaggtttttggtggatcgtgggcgggaggagtggaggttcctcttcgcgaggttttccgaatccaaatacacaggtttagtgcagtgtggaccccaggcaaaatgtggagtaaaatttctacccgatatcatctggttctgccctgatcagccactttcacagtggagagagatggcgcccaagtgcaaacctgccagtagccccctaggatcagtccttgccgaaggggggtcgtgggattgggggcactgggagaatagatgcagggggtgggttggggaggagagaaggccgtgtccttgggtctgggaagagggaggagagaaatgcagaaaagggggtgtgttgctggggtctggacgctgggagctggggatggggtgccgcgggggtcttcagagcgttgcgtggtggtcgctcgaaaatcctgacatgttgcagtcttggacttttggtcaaatcgccttttgccatttcctttgtcagagtcaagcccccccaggccgccccctcccaccctgggccggcgggcctggtgggggcgcaggcgggtggctacgtggcaggtttctggaaggtttcctggctggccgcgagagggcgctggcggcactgcggaattttggggggcggggtggggaggggaggtggcctttgttctcctgatggagggggtcgggcgcgggatctactggaggatcctggattcgtttacccaagagggaacagttttgagaccccccggattcactgcggagtggccgcagaggccggggtcggcctttgcgccgtggcttcgggtgttgtggaggcgcacagaggcacgttagttgatttccagtggtttttggtttcgggggtcttaggaaggtgtggctcatttgagcaggatggagagagaggctgtgacaaggtcagtgaggggccatcgtgcgggggctagaaattgttgttgtggcgaaggagggaggcacgactttggaggcgtgatgttgatgcctgggggcgaaggcggggagcggcgtggtggccccctttgcgttactttccagcgatgtcacaggttctgtctctcgttccgagaccacccacatgcgtgacagcggtgcctggaggactgggtctttctgactttagtgaacgtgtgtttaattggattgacgaaggtgggagtcgggatttctgcttttccctgtagcaggcggagcggcgctccagaggggcctggcgcaggtccgctgggtggcccaccttcctctggggctggggcccggtggctgggggcgcaggaggcgcctggtgcgggcgggaggcgctgcgccgcagccacaggtgggctctggctggtggtggctggagaggcgtccagggggcgtagcgacctggcgcggtggcctggggtgggctgtggagcccttcctagcctgagacctgttgggcaccccctgtccatccaggcccgccgggcgcgggccggggcgccgcaggtggctgctgcactcctgggttacgggtgcgggccgcgcgccccctagcggtgtgtgccagccccgctaccttgggttttgagttgcgcacacgcacacagctaacacttgtgacctgtcagtcaaatcatccttaccccctcccactcctctcctccacctcccatttctcctctccctccaccctttctcatttcctcgtccctcctccccctcctatttttcttctccctcctccctctttcctcttccctcctccctcttcccccctcattttcctcatctctcttttcccctccccttctctcctcccctctccctgcccccctccttcctccctccatacccctccctcttccctcccagcccctccctactgccttcctcagtcctcccctttgccactcctccctgcctttccctctgcctgcccccttttgctctctgctgttccggtgctggccgttagaggtcacgaagatggtttctaacctgcccccctcccatgccatagggtctctcctcagggatgacatcatccgtccacctccttgtcttcaaggaccacctcctctccatgctgagctgctgccaaggggcctgctgcccatctacacctcacggtacttcaaccctcctgctatcatttcataaccaacgtggcgggcagaatctcccaaccccaccaccatccttgcaccacccccagacccactagcaattaaaagacaattttaaattttaactaatcagctttaattgtaattaatgaacttaaactgtaattatgatctaggcttgggcttttaagcaggttctctaacctttgatcaattgcagagggcactaggagcacggtttcctggatcccaccaacatacaaagcagccactcactgacccccaggaccaggatggcaaaggatgaagaggaccggaactgaccagccagctgtccctcttacctaaagacttaaaccaatgccctagtgagggggcattgggcattaagccctgacctttgctatgctcatactttgactctatgagtactttcctataagtctttgcttgtgttcacctgctagcaaactggagtgtttccctccccaagggggtgtcagtctttgtcgactgactctgtcatcacccttatgatgtcctgaatggaaggatccctttgggaaattctcaggagggggacctgggccaagggcttggccagcatcctgctggcaactccaaggccctgggtgggcttctggaatgagcatgctactgaatcaccaaaggcacgcccgacctctctgaagatcttcctatccttttctgggggaatggggtcgatgagagcaacctcctagggttgttgtgagaattaaatgagataaaagaggcctcaggcaggatctggcatagaggaggtgatcagcaaatgtttgttgaaaaggtttgacaggtcagtcccttcccacccctcttgcttgtcttacttgtcttatttattctccaacagcactccaggcagcccttgtccacgggctctccttgcatcaggtaggggctttgcagagaccatcgacgggctgacttgagtaagaacacgaattatgcatgtggccatttccagagcactttctatgtgatatgaacatgtgatttttatgtaatatgtgtatgtaaacgaggcagcctcatttccaggtgaggatgcatttggtagtgttgatttttgtaatttaaagaagctgaaagggagagaggacccgtgaggactgaactctctgtcccatggggtagggcttacatttacattaaagaaacagaaacttgctgggaggtgtaagtatttggtcacattgctggcaacagaaggggttggagttggacccagggtgccacgctagctgccctcaccccttcttcccctctggcccagagttatactaagagtccttttatttcaaaccaaatgtttgacaatgggacagtctgtttgaaatcccagctgcctggggtggtcttgggggtctgggtggccccagtgctggtaccatgtgctggcttcaccttttaataacagtgtgaccttaaacaagtcgcttaactactctaagtttcagtttctttcatggtctaaatggagattaaaacacacacacacacacacacacacacacacacacacacaccccctcgtgtatctaccccacagggcgcttttgaagaccaaatgctgtaactactatgaaagtgctttgtaaattgctgtggaaagtgtgagctactcaagcacccgaggctgtccctccttgctcacatgtccagcccaattctcccttagtgagaacagcactcagtaggtgctgtgtgtgtttgtgttcaattaagaaattccagaataaataaaaatgaattaattcaacaaacattttctggggcaccgacaatctgcccagtgcaccaggctaggtatctgatacaaagataatgaaaacagtctcttggaacctaattggggtcctcatttgaccaggaatttctttcgtcccgttttaagccaaccagttttgtccggacaagacaaaaacaacttgggctgctttagagaagcccagctcagtgtagacaatagctgcccagcctctgaaaggggctgattggattatgtggcaaatggaggtgcaaggatgacttggacggtgacaaatgaagtgggcggagacctgctttgagttaatccaggctattaggaggggaccttttgtcttccagagactggcaggagcttttaccagtggtttttacatccttaatgttcaggacgaataatttatggtcagtgaaaatccaggccccagtgagattcgagtgggctgtaaaatcgagagtcctgctcccagtgagtaatggtagtgaatgtttctgtcactttttgcaaccgtccattcatttgatcctcacaactccctgtcctgagccaggaccggccactgccactcccagggaaacagaggctgtcaagaggctccacagattgggccccactggatcattgaacccctgttccctgagttctagaggaagaattgtacctgtctcagtcccggccacctccagaaggcctccctctgcatttctgactttgctgtgccggcagcctggagcctcccaggtccctgctgtcatcttttctagccactacagtctctgtctttcctttcacagccaagcttcttgaaaggcctgtctacacttgctgtcttccttcctcacctccaatttcctcttcaacccactgcttcctgactcgctctactccgtggaagcacgctcacaaaggtaaagacttttctgtggcttaatccttgtcatgttttcggctcatggacacaaggacacattttcatgccttctctcacagggctctgcgtctccggttcacttctgtgtctttacactcccttcacagagacacttgctcccccttctctcgttcttagcatcccctaggaacttgcacacccaggtctctcgacttctggacctgcttcttaccatgccgtcttaagcagtcaggagtcgctgcctgggttcgagtcctagttaaattacttagtgctgagaccttggggtaggtaaacttttccaagccaggtttatctcagtttcaaaatagggttaatcgtctttatctggcaggtcaggtgggatgtctcacaggtaagcaccagatgccatttgaaaggcttgaagcaaagtcaataaagcattcatgggaaaatacaactggaggcaccactagattttcgtatacattaggttcccacggggaggaccgaagagagaagaaagaagtggaaagggaggagcgtgcaggagagacaggagaagagaataactaaacaaagacattaaagacaaaaaaaaagtaggaaagggagacttagaaaatattaaaagccaccaaaaacacatccaaagacggtttccccttacgttagttgggctaaaagaaagcaaatgggaagaaggttttaaattgattatcccagtgacaaatcccaggaagctttcacatcaaatcaccctattctgggtttttaactccttccatcgagtttaacctctttacctcccacatcctggtaaaccctgccccctccctaccgccccctttgctggtgattaaatcctgaaggtacacgaagtatttcagtgaatgaatggctaacagaaaagggcctcccctcccccttaccctggcggtgtttttcagttttattccactttccgcccttttcccttaatgaacacagggctaatctcgggccttgtcgaaggaagaggctgcagacgttaatgaggttagctgctggattccagtattcgtcgcataaggatccttctttgtctgcgaaggaaaaacacactgattatcataatgaggtgaactggccaccgccgggccggggcgatgtggcttcttaagccacacttctaattttggtgatggagccgacatttctttggcttctcatttaagtctttgcctctgtcccagtgcgaagtccattcagcggggttgaaagttgcaggcagctttgggaaggggggcgtcggacagggttgcattgtagaaagtggctttgttcgatccttcgcacagatgcaaatggccagagcattcattccctttcttcaagagctgaggactgggggggccactggtgatcagttcccaactctagctctcctctgactcatctcaggacccattgaggacatccaaaactcactcaagatcaccaagtggtaggaaagtactaactcctgggcatagccctaggggagtgactacaatgtgaatactcatggaatgcctagccaggtgaagaagtgaatgcatgttggcatcccagagggaccccccttaagagggcatagtttggggttcagatttgactccagcatactgttgaaattgggcacagggggctagtgattagtcaggatcaatcagtggagaggagattaaaactcacatctgggagtccggaatcagaacttgtagttcttttttttgaaatggagtctcgct

SEQ ID NO: 77998 - DNA, 12880 bp, Homo sapiens
gttgctcccttgagtgtaggggcagccctttaacctggctccttgagtccctgctttttctgcttctgttgccttcttcctcgtcttcctctctctcaatatctccctctctttgtccctccccagttcctgacctggccatcccggggtgcccttgaccagccccgtgtctcctcagggtgtcccagcaccagcctggcacagagtggggctcagttagagtatgtgggatgttggtttcgccaggtgagtgaatgaaaggactcgaccaccacagctgagccactagctgggccatgcgaagagttctaggtgcaaaggctggagggtggaattcatttttgagaggtgtgtgagcagcttccgacccctgccccatttgaacgggggccttgctggtcgcgtccctgcattcacccgcgcggccatcccgtcatccaacagttgatcctaactgagcacgcccacggccctggtctggcctgggcaccggccaccgtagcccatcccttgatggcctctgtgtccccaggagggcgggccggggggttgcccaggggctggagcagtggactgtggctccatagaggtaggccggagggtgtgagggcagattcaagctatccccagggctctgctctggtcggagccagccccttctccctctctgccttccccgccccattcctgatgctgaactgttctggacccctggccctgagtctctcaggaccaaagtgggcacgggaacagctgtagtgtgtgcccccccgggctttggccacaggtctccctctcgaggtgtggttgtgactgcgacccttcccttgccgtgatgccttcctcccccggggcttggtccagctccttcactctctagcagctgctggggcccacctcccatgccgaggaccagcaggggaaacctccagggagcatctgcaggctctgcttctgcccggctgctggcttgctctccctggtggctctccagcggccagcttcctcacccacccggcactccgctttgctctgtctcctgaggtgggcctgaccaacctccccttctctgcctcagtccctgggctccagggctcagctccacagccctctgcctagcaggctggttctccctgccaagcccatacctgtggtcacctggccctcctgtggtctgagtaccactcccctgccccaggagccactcccactccagctgcctgtttccagcaggttcccagtgcccccgacaagcccctgctggtgtctccatctcctgccaagcatcctccagtgcctcctcctgtgggcctggcctcagggctatggacagactcctgtcccatcccagagacccctcgtgatcgtgccctggtgggtgttgcccccgcctgcctttgcctccgccgtggccctgagagtcctgggctctgccccgcccggtcccttgctccccactcagttctggatttggggctgcccctaacccagcccgttgctgctttgcaccttttcctgtcattgggcatcccccagtagtcaccccactccaccgaaaagtaaactgcaggtgaggccgtgccccgagtctttcttcggtgtgtttggcttttccggggcgcttgccttgccatgattctaactctctgcccttccccaaggcacgtgggccgtggcccggctgggtcggctgaagaactgcggatggaagctgcggaagaggccctgatggggcccaccatcccggacccaagtcttcttcctggcgggcctctcgtctccttcctggtttggggtgagtttcttgctttcttgagacccaggattttattagggtcagctcatgtctctcctctctgatcaacaagagtgtcaacatttaatttggggaggaggcaccctgccaaggtgaattctcttcacatcagccccaggggtctgggggccggagagctgcctggagtggagacccttgctatacccagcaagcatgtgtgggggtccaccctggctgatggcatgctgtgggccggcgacggtaggtggggagtgtccacctccactctagacccccgagagcggctcgggccaggcactcaggagccctcagtacggctttgctgaacacattgcaaaagggatccagggggcacttgccctgcccacacccggcccagggaccccttcggagaggaggaaatgggaatgcttgcctgctcctcagctaggaagacatttctttccaccagccatggtagcgtcaccccctgtgagaaccgtggtttctcacacatgaggctttgataatgtcctttaatcaaatagtggtttttgagcaagttcttctctttcctcctttcctcacccctgaaattgcaatgagacgggaatgtttttgtttgtttaaataaaacagcaatggtagagaagaagaaagcgggattggagccacacaattcactcgaggacccatcatttgtttatttgtgttttactaattcaagatgcagccgggagccgtccagggctcgggcctggggttgttctggggcgcctaaggctgggctttgcactaaggaccagagggtctacttgggtgccgtggagcacccatgcagcaaggtggcttgcacagcagccaggcgaggtgtcgtcgagggcgggggctcagggtggcatgctggacggccatgccaggctgaagtttgggctggcaggaagagaggaggctcagctgaggccactttcctttctgggggtcccagggactgagtctgtggctcactcagggcgatggggtgtttttagagccactgccctgggaggcagtgtcaggatcctggcacccctcatatatgacgcccctggggtggccattgtggtgaatgagtgcagttagacttcccagagaagctgggtgggcgctgagaaaggtctgaaccgtggggtgaggctggctccattcccccagacatttatggaggcttgagggggccctagcactgtccttggcccagatgccaatactcccctctggacgcccacgaatggggtctctgagaaggaagtggatgaacacagctgcacgctgggtggggcccagcctctagtcctcagccatgtgcacgcatcagcccttgtgcaggcctccgccctccgccaccccccacccccggagtgtctctggtttccgacgcagcctcgtaatgctctttaatcaaacagaggatttggagacagctctcctgcagccctgcacttctcccctgaaattgaaatgggatggggatattatttttaaacaaaatctggcagcgtaggcagagggggcagaggcgctctaacctggggctgttgcctttgtctgcttgtttctgctctctggagagccccagagcctggagagacggggaggggagtgtgtgcccagggctaaacccagggagggggcccaggaaggctctgccccgtgacatttactccaaggctagcatttgctgagccacctgcaaacacagtgatgtggagaagaggcccgggaggggaggtttgcacaggggcaggctgctggggtcctggggggatcctgtcccaagcttactagaatgcattcgagtaactggtctgagccagatgccctcagctcttggactggtttctcacggacatctcaggactttcccaaggtggactaagcccagggacaaagtcaaagtgaaggccaggggcacacaggagaggcccagataggaccaagctttggcagcccctggctctcaggggttgaaatggaaccctctttgcactgagttgtatttcaggtactcatgagtgtttcggtctcaggcaaacacatatttggggttttgtgtgtcattaggtataaaataggtaaaatatgccacgttctcaatgaaagaagttgaaacgtgacttactacgtcagccttgctggtgatcttctcgggaactgccgaaaggccactagtaagtgctgaaagacatgatcattttcaggaaaattctattttgatggattggccaatgcctgagccatagcgggtggagatgagaccctgactgactaggcagtgagccacagaggaccctgtcacatcagcggagggcggtgaggggtctctggccatttgtcatcgtgctgattcctagggggctgcctctagtgggactcttctgggtgggtgcaagtgtcagggtaaagacggcggtctggtctggaaactggctctcctctcgcacctgcccgccctgggtggttgggaaaggaaaccaagagggtagctcaggcctgagctcgtggaaaggaagaacatgacccctcattcgctcactcgcccccacattctctcacctgcgagttgctcattgctgctttcagggcccctgacctcatgcctcctgagttgtgattcaaaccccaaatgaatttccaagtacatttctccaaataatgtcaaaacctggcaagacttaagggcaacaggatgcatgtgtttcttattcattcatttacataaaataacttaagtgtgttttttatgagcaatctgacttccaaaaagaatgaaaaggaaaatctacccatctttaatgaacttgctaatgaatttttccttgcaaagaggaagggagcttcctacagaagggggtgtggagggagacagattcaggtcccaaagggttaaagggcagtggacaatgcggaagccagcattgtgagctgcagtggaaaagccctgggtcgctgggagtggcttctttttaggagactggaattaatgagttgtgaagtgtcccaaggactggttccccctccctgctgtttctctgagccctgtcccctcttccaaaggaggaataaggaggtctagcttcgtctcccatccccgatttgagcagatggaagagtctagaaaagaggtgtaccttttgaaacgaggcctcagatgtggggttcctggtctggaaaggggaaggatgaatctggggtaggagagggtctcgtatggagccccattcagacagggcagtcccacacctgggctgcccacaggttcttgggggagtctaaggaaaggggagccacagaacaggcttgcctccttggcatggattgggtcagtgtttcagagccaggaaaggtgggagtgtggggggccctcggggctgatgagggcgtgcagaccctcccctcccacctcctgtcccaggagccctgcagacactgcagcaggagggcactctgccagaagaggggttccagctccagccggatccagcagacatggagagaccccttatctttgccaagacgagctctgcggtgcctgagaggcccgtaggtctggaattctagggccttctgggtttgagtcaggtcctgaggccagggcctgggccctgatcctcaccatggaaaactggtcactttactcaggataaactgtgatgaggacttgggacatatctctgtctgtcctctcagctcgcgtcacccctgagcccttggcgatcgtgggcggcccgtgtacagagcaggtgctgggtcactggggccgccgtgggcctcccaacatgagggactgtgtgtgagagaggagttcattaagggagaggatggtggtgaagggtgtagccatgactttcttaactgctctccaatttctttgagcttaaaaataaatccagatggagagttcttaagtcccctatcctgggagaaaggaaggctgcccaccaccttcggcttgcctcgactctgagcagtgaatagggtctttggcaggggcttaaggaggagactcttagcctgggagctcccagggctgtttcagatggaaacaaaggctcaggccgagaggaatgtgggggagccccccgtggggaacagccacctggggataattgggagggctgagcgcagatgagttttcccaggttctgtgaatgcgccctttcaatggaaggtgcctttttttccagatgaaaagaagaaaacgtcaattaccttcccctgaaacggagtgtgtgtgtgttccctcccaggggttgtgtggggccccttgcccttgtgtgtgtgtcgggagctccaaggctgcacaatgacgcacttaaccagccactgggttcgcgcgaccctgggatgctcacgctcttagattctagggcttgattttgaaagtttcttagcaaaggggaatcagagtgattgagcctgtaaacaaaaatttgatcaacctgggcctgatgcctgaaatatagccaaagagacagaatggggctgcggggagagaggtccaggatggaaagttggggaaggaggacagtcgggggccaaaggctgaccgcatgtctgcgccggcctccgcgctcacagctgggctgctccttctgccaccccagccctttctctgggccttcctggcagtggacatagagtgattccctactcaggaagttggcggtagggggctcagaaatccacagggctgttgtttcacagttagccaggagaggagggggtcatggtggcccgcagggatggtgggcagctgcgagagaggggacgcttcaggttagagcgaagctgtttgcaccaccactgccccagactgccgtaagggtagggccactccagaggcaccagggacaaagtccctgccgtgacaggaggggggcacaggtctcagtcttggctggtcactgactttgctgctgctggcttctgagcctcagagaggtcagcagtcttccagagacctggttagagcctgtgctcagccctgactatgggtgtgaccttggcccctgtctccagccccttaggcctcagttttcccgtctacgaaatgggcgagtgcaggcccatggtcgtccgagtggctcggggtttcttcaggcctccctggaggtcatctgtcgtttgtttgctgggtctttggagttgttgggactttgggggtcactggtccgctgccccctctgctttagaggtggggaaaccagcgatcccagaggcccggagccttgcccgaggttgcacggtgagccggcagcaggccctggaggtgaagcccctgccagttgccagctcctgtgtgacctgtgtggtcggggggggtcacagtcaccggtcattagtgtgggtcagagctcttgcccaaagaaggttccaaggggctgccccatgagctgggatgcagggatcgtgttttatggggcattattccaaacaggcaggctgctggtctggtctggaacacctttttggtctgtagagtgactcttgtttaatgagactggacttgtggcttcagaaccaggagatgttcgttcccccaacccccgtggctcaccttgtgccttttgggtcctgagaccctcgccagcgcctctgttggcacggtggcccagtcggctgagaacttcctgaaaaagccaacaggatgacaacttctggaaaagtgatcatcacccgcctgcactggctgcccatcttagactcagctttgccaacattcccagctatctctgtgtgctgcagtgtgtagtaatgaacagctcacaaaacctccggctgggcctgcacctggttattaccgtggtgggctgcagcttttgttttgtgaccttggttgctacaatacctgcgagctgaaatgaggaatcgaaaaattgccagcttcaattagacgggcagactgctttcccaaggctgcctccgccactccatccattaacggtaaacaggcaccaaataggccctaattctctctaattgcccactcctgaagcaaagaggtgaaattccaggaagaggcgtatgtaaacatcctctgtaacctgaccaagtaaaattagagggctgatgggggcctgcgagagagaggggacatgatttcaaaagatgtcccaattacctctcctattttcataaatgggtctgtaatgtccagggccccggcctcacaaaggtacaggaaattagctctgcaaagagcttgcatttgtcaggggaagttgtaagggggtggtgtttactcaacaggtaggaagtacgagatctgaggcaagactgattatttgtgtaacgacgggctctatttcttgagatcaacattttaataaaagtcatccttttaggtccttttgtgtttgaaacagccataagttgtttataccaaagacatgccagatcagttaggtgctgtttgcctccagaaaagaggaacttttaaaatcctaagatgcagagctagagttttctaatcccattaagctgtggaagatgtttttggagtgttcaccaatgctttctgcgtgggtcatgagctcactgcacgcacttatgaggtcttccatcaaatgcttgtgacaattactcctctggactctataaggaggcctcgtgtttttctttggttccagacagtgactcatctctgcagcttttctgacatttgttaagattctagcccagcactgcgttattaacacatcacagcaagcccagagctggcacacgcagcttttaaaccaaggcacgaatttgctggggcttctctgtagcagagcagcctgcggtctgcacacaagagttaattaaggacggtcagggactctgaggtttcatggggtccctggagcagaagcaggaaaaaacccagatgctccttcctgcttctgatttctccgctcctattaaaaacacaaaaaagaacaaaacaaaaacagccaaacaaagcacccgcctctgattcctgcgggaaatggcagtgcctttggtcgcgctgtgtgttcttggcctgagtctcgttgccaccttaggacgtggcgatggtgagaggccaccccagccacgcacagtctcggagggagggtgggaaacggtctcgagtggtggtcagtagataatgggtggtctggcagcctttaggtaaccgaagtcggcccctcagtcacccatgcactgatcattgcttcactaacacttattttaagacttgttgtttcttggttatcaaattaaccagttatggcagaacagggtttatgaagggcaaggccagggaaggagattttaggaagatttggaggcaagaagtgtccccagtgccctggccgggtcttggacatcctggctggagacatgactaggaatagagaggcagaggcagcaggggtggcccagatggcaggggtgggttggagagatccctgagaggcctgaggacaggcggcagtcttgggagcccctgaagacctgcagtggggcaggcagctggagtcaggtgtctcccgggacctgttttttttttttttttttttttttgagacagagtcttgttctgttgtccaggctggagggtagtggcgcaatcttggctcactgtaatctctgcctcccacgttcaagcgattctcctgtctcagcctcccgagtagctgagaccataggcacataccaccacgctgagctagtttttagtagagacggggtttcatcatgttggtcaggctggtctcgaactcctgacctcaggcgatccacctgcctcagcctcccaaagcgctgggatgacaggcatgagccacccccctggggctggtacctgtggtctgtggcttctgcctgccctggtgcccccacatctctctcatggcctttctgtttcctgggtggctttgtgggggtgtcccatggtctccccctggcttcctgtctccacctgtgcctaatccaggaaacggtccccagagatggtgttttcaaacagaccttggccctgtcctcctggcccagcccctggctgccctatcacctagcttgctgcgttggtgggacctcagctgtcacaggctacctttctatgacgcctcctcaccttaagtagactctgaacagattttaaaagccattcattcaacacattttttaaatgaataaactttttttctgtgtagttttcagtttacagaaacattggtgggaaagtacagagaattcccagatcccgtccccaccatctcccctgtcattcacacgttgcctccgtgtggtgtggtctgtttgttccgatcgatggaacgactctgatacatgattaactagaggccttggttcacatcattagggctcactctttgtggcgcacatcctgtgggtcttgacaaatgtgtcatgatacgtgtctgacattgctgaagtcaccttttcttaaagcttaacattttgggagtattctgaactatgtttggcccagcctgctgcccgatttttataaaaaagaaaaaacaaaacaaaacaaaaaaacaagttaaaacgtaaggcagatcttgacactgaagactcgatgtgcctggccatggtgcttcccggggcctactgcactgtgaacaaaattgccacagtggagttgtctgtccaggcacacaacgtgtgtgccatggttttgggaaacgctgcccattaatagccctgcagccctctgtgggctgccctcccggccacaccccgcttccctggtctcctccagggccagccatcctgctcgccgacctgggcaccttgcttctgccagagcacaggttcatgccctgtcttcagggcctgggccacccccgtttctcatctatgcagggtcctaagcctttgggtcccacagagcacgacttcgctccgtgaacagcaccaacccaagtctgttccatgtctccacacctgccccttccgctccataggcagctggtgggtgagtggagtcaggagagaaatgcgtggcttctccaattccacacttgctggaggttggggagtctctgctccaggccacccctgcccgccccccagagctgttgtcctcatccgccctcctcctcctcgccggcctgagtgaggttctactctgtgacctagtgccttcttgttacagcggaagccatcacctggatgcctacgtgggaagggacctcgaatgtgggaccccagcccctctccagctcgaaatcgtaagtggctggagtgtaaagaacacacatgtggccttgctgctgagggtggggccagctgcccggagcacaccgccaggcggacctcgtggaggggctggcgggcactggccgggggtctgtgcaccgggaggtgggtgcccatcgagtcaagccaagtgcagacctgggggctcctgttttctaagacaggagccccctgcctccttgtgttgtctctgtggcaaaagaattctataggcgggcttcaaatgtcggaccccaaaagaatttcttctttttcactcttctaaatgaatggctctttcattattgagtctccctttggctcttgtgccgcagggcagactaggatggaagtgccctgtgagctggggggcccttcaaagggccaaggagaaaacgcaggccgagggaccagccttccaaatgggcttcaagctccaatgacctccgctcgccccctcgaaatgtctggaaaacataatgggcagattttctgtcttcaaagtttccggctaaacctcttcaagttctttattgtttgggactgagacactcagccatgttaatgggtagtttcttttgtatttgccttgaaaggccaaaatatttttatattgccacagacaaagccacctatttaaaaatgaactccatgtccgtcgtttcccaccaggagactatgtaccatgtgtgtgtctctatgtattctggggtcttgaaacaggtttctcatggggatggtcattcaccacggtccagaggggcagaacaggcggcgcttgccttgcccagggggcctggggaacgtgggccctcatctcagatctgcccccagtatgtttaggacgcgagccccagaaggatctgggagtaaacttaacattcactgtgtctctgctctgcatccgccatttgtgtgtgtttctggactgtgggctgtgtgtaccttggttggtgactcagtgagaagaagcaggaatgccaaagatactgtgaatgttctgagttttgttgctgttgttgttgagaggttgtttcactggtatctattgcattgtataataaatgaccagatgaatgaatgagtgaagcaagagagaatgaataaacaagtaaataggtaaagaagtaagcaagccaggatgagagtgtgtgtacacaagaccatggttcatccgctttgatggctaggcaatcaatatataaatagaaaaaaaccagtgaatcactaagtaatagggcaacacacaaagcgatatcaggtgattatggactaaggggtatgtgtaactcaaatatatgcctctgacatttgacaatgaaaaagaacctaaatgaaagaaagaatggatgtatgagtagtgaagtgcagaatgagacatagattttgaggcccgtcaaaatgaaaagatgcaagttagggaacaagtgatcaaaagggagaagggaaaggttttttttaaaaaaccaaaacaacaaagaaaggttaaaaaaaaaaacagactagaggatgagtaatgagtaactctgtaaggaggaccatgtcagactattgtaagctaagcattaggactgatacaaataatatatgctcctggcatagaaaaataaaccacagagaacgagttcaaagaatagcaaagaaagaaagaggacccagtgggcgaaagatgagagtgtacttttaccaaaagttatctaagcctgagcacttgaagtctgcacataaataaataaatgacaaaagaaagaaaaaaaggccaaaaagtctacattgcgtgtgtggatggatgaatgagcagtgggagtgcagcgccaggtgacaagatgttgtgaggggttttga

SEQ ID NO: 77999 - DNA, 9705 bp, Homo sapiens
gtcagtgagtacctaaatagacaaggatgaggtgaatgagaagacatggccccatgggtcctcctgatgagggtgttggggtcccccctgggcaccccagctgcatgaaaatgaaggacaggaggtatggaaagctatgacagaagagagaaaggaacggtaaaaagaaataacaaccaaatggataaatgggtagatccacgagaagagttaggctaggacttgtcataagggcacctgactccactaatagaggaataaatgcctaataaaaagagagcaagcaggaaggaaggatgctatgaatgcaggaaggaagtaatgagtgagacgtggaaccgcacggccaaggatggacgtttgcgggtggctttttgatgcgtacagccaagccactccatggcaatgagctccgaagacaaagtgcaagagagaatgagtgagagagtgagagagagagaaacaataaaaaatgggaagaaatgtaaaaaggaagaaaggaagagaggtaatatattaaggaataaatacatgcatgcagatttaagacagagccatgctagaacaggaatgaaaggctgtgtgaaccaagcagaccgcttaattggcaccagtgctgctggtatggtcaatcacctactcaactaaggaacggctcaaagcatacacatgggagggaggagtggggccacagagagagggcccattagttgcagattacgatgtatccagttaggtgcacctgccttcgagaagtgtaaaaataagtatttacatagaaagaaagactgaatggatgcacggtgaatgcatgaatgattgaacgacagaaaagatttgcattgaccgatgaggagggcattgtagacagggatgagggtcattgatcctgggtgcagatctccaaaagaatgacagaaagaaagagggagtggtggaaagaaacaataggatgggaaaaaatgaaaatagaaaaaaggaagtgaaagagataataaataattagatcaaataagttgatgaaaggggactggtttagcacaagccatccacattaattcaaacctgtggctctgaagtttgttttttaaatgaccacaagtgtaagactgaatgaaagaataaatgcgtgcattccataggatgcaagaaaaggagtgaggaatgggaaaattggaagaacgagagagggagagatgtaagaaaagaaaggaaaagtgaagtaggcatatgaaagaaaaggcacttcttggacaagcactgaaatataatgagacagttttacccattaaatataataaacagtaaacgttgaggttcatcaataaaagcacagatacctgaatagaggagtgacctgaatagaattcgttcagccgaacgaatgagaatggatgattttcactatcctgtgcactcaaggcccaaaagagaaagcaagagaggagagaatatggaaacgtatgacaggatgtatataagcaatacaaacatattgaatgaataaataaagacataaatatgtgggagagtggaccacgcaaggacaaaaagaggagagaaggcagcaagaattatgactaattcaaaactgggttcctgagatagttaaataaatcctgcaccaaatccccagggggagaaattaacaaacaaaagacagccccacacggaccagtgtgcagaaggctccaggaaccgcagattatggttaatccaattctgtgcacctgaggtccataaataaaagaataagtattgaaatgaaagaatgacagaaagaatgaatggacacatgaacgactgaattagaaatggaaatgcctggcacagccaggaaggagctgcccatgggattgtcattcatctcactctgggcacctgaggtccataagcgtgaaaagaggcaggaagagaagtgtcagggagtcaaagatagagctaaggaaaggcaaaaatgaaactaaatgaaagcgaaagggaaaataaagaaaaaccaataaaaaagagaacgaatacgtgggtgtatctgtaagagtaggatctgttaggattagtcataagactgtcagtaatcctgaagatggatgagataatccaggcccaggttcccagggggagggaaaatggagaaaatataaaaagatgtgaaaaaggaaaaaggaaaggtaataaacaaacaaccaaagtgataaatggatagttaagggaggttgtctgaacagggattataattagtttacatacatactccttaaacagataaatacattacacctttcaaagaataaatgaaaaatagagagacatacctggctccaaaacaaggctgtatcttctgccactgtaataaaatagatgcaattgaggttcataaataaaagaataaatacttaaacgtgaaaggtgactaaatgcggggaagaaagattgcaaataaatacatgggccaaagatgtttggtttgcccatggagttttaattaaaaaaattaataaggaaaacaaatacccaaaataaggaagactgacaaatgagtgagtggatgagagagtgaatggtgcttgacgtaggagcagtagtgctttagggaccagcatgaaggtggtgaccgggagccctgattcatgggattctgtccacctgactttataagaaccaagaatggctgggaatggtggctcacgcctgtaatcccagcactttgggaggccgaggtgggcggatcatgaggtcaggagtttgagaccagccagtttgagatcagcctggccaacatggtgaaattccatctctactaaaaaaatacaaaaattatgggcgtggtggcacctgtctgtaatcctagctactcgggaggctgagagaggagaattgcttgaacccgggaggtggaggttgtagtgagccaagattgcaccactgcactccagcctgggctacagagcaagacactatcttagatcaaaaaagaaaaaaaaaaaaagaaggagaaagaaccagagaaacataaggaagagtgagaggaagaaagaaagatgcaatttgggaagaaatgaaaaagaaatgaataaagaataaaataatgtaacggtcaataaataggacttgtgaatggaggcctttaggccaaaggctatgattaatttcaagctatgttactgaagtccataaacaaaggactcagatctaaatggatgaacgaatgactggaagaaagggtggtaggaaggtaggaagaaaggaaggagggaaaaagggaagagaggaaggaaccttctttccagtcctgtgttctagacagtggaatgaagtggtccccagggagggtggctgtaggcatgtcatgtgcttgtcacatgcacttgccctggcagggaggagctggctcaggaagaccctggtcttggggtgctgttgccctatcttggctgtgtgggccatttcactgcatctgtctcttcctcagtttccccatctgtaaacctggagtggcaccagctgcctactagagttgatcttatgtgtctctgttgatggtaccccatctatggcctggataggcaggaagggcttggaccctgagccccgcagaaggttgcatgaacgagtggtgtgaagcctgttgggtagcttggccactcccgcggcatgggtcacctgcacaggaggttttgcccaccagggggcagcagagggtcagggagcaataggccctgggtggagcatgggccccgcctgctgtgtgccaccctgggtgtggcacctactcacatccaggggttggtgcagggaaaggccagaaggtggccaggcgcacctgagaagggggacccagaagccccgggacccaggagccctgggcaagccaccagaaaccttgttcttgcaactctctgcagtgtgcccaggccaccctctggcctggtcttccatggggcagggcgcccacccttctcaactcaggtttccctgggcagcaggtgcacctcagcacccctggggttgcagaagtggtccggggaccctggcttccttgacatgccatccccagagcctggttcaaggcctctctgtcttctcggctgtttcacgacgtgttttgtaacttggcgggattgcgtttcgctgtgtcgaggttgtctcttctctgactcgccctccgggggactgccggggtaaatctggagagttgctcgtgctgacagtcctcccccagggcctccccggttctgttgagtctcctttctctgtagtggaggaaatgtgtgtagttttgtgttgtgtgcctgtgtttgtctgtaaaagcaaggaccaaagtctcccttgttgacctctcaattcctatttgggacatataaaaacactggattcttaacaagcgcccggagcagtaggagcacagcttggatggactcaggacttgtggcagggagcacgtgggaggcaggggagtggggtggggccaggccatctggagtgggaggcgtcatgctcagagtgactctgtagacgctgggtgggatggggagtgcgggcgcaggcatggatggggctgttagctagtgtgatgcttgaggtctgagctgatggcagcaaagtggggtgctcaggaatcaaagctatggggttatagacaggatatgaaggagggagggaggcaagaagaagggggtggttcccacgcttctagctccggccgagtggatggcaacagcatttggaaggcggaggacatggaattcatgtgtcaggagccaccttccgagcctccagtaccacgtgtcagggccacatgagctgggcctcgtgggcctgatgtggtgctggggcctcaggggtctgctcttcttctctttcagaatctggggctccaggctatgccttggctggactgaggtctgggggtgcacttattatccctggggacacctgctgaagcttctccctgacaagctgtgtcactgttggatgaggatggggcgggaggggttcagggcagaagaagaccgggagggtctttcaaaagaactcatgtacggctgttaaaaaaagtcagcagaggctcaggaagacttaaagtgtgcagaaggcggggaagggagggcccattgcatgcaccaagaggaaattggaaggaacaagcgacgttggctgctaggagagcctgctcccaacatctaggggctgtcctgacgggtcacagtgggtcgaactgagccaatgagagcagctctggggagacccactggtgccctggaggctgggtgggtttgggttggatgaattctgtgtgtccttttggaaatgtggaggccatgaggggggatcagggctcttagggttttgacccttaagagttttgtatctgtaattcaaaggttctttagttctgggatgctgagattcgggatagggttcctaatggcacaaaagccagagataaaacatccttcacgtgctccctacccggttctttctgtaccagacccacaaggtccgagttgggatcctagtgctcctgtctggtcagggcctatctttatgtgttcgttaaacttttaacaatgagaattaattctgtctcttgacattgtcatttgcatgctccccacacacaaatcctttcctggtgacaccaggagctacaactctccttggcctcctcttgtgactcccaactccctccttgggaagcttggcctcaggacctctgggatagacaggccacgaatcctgctgtgtcccgttgtgttcctaatataaatggtgtggatggcacttgacctagagcagtgggaaatgcatgcaccactcaacattctgacatgtcacccattttacattcttacaggcatactttttttaaaaaaagagtgtctattctttaatgagcatcccttctttaaaaaaacctaattgccattattcaccacatacacttttttttttttgtatcctgcctcttctatttaattttctgtcatcaacattttcccttgttccatgaatcttcataacctcacttgctgcgttgtgccttgttgagtggctatggcatcattcacagaaccattctgttattcttatgtataaccaccttttaaaaatattatgaataatgccacaactaactgcttaaaacaccctttttttcattcttaagaattatgttcttccacccagaaattatcattgcttcactacagatcagtttcccctgctagactgtgagccccataagggcaaggagcttattgaattggcctttgtatctctgatgcccaacatgttgtagactataaataaatgatgaatgagtggatggaagaatggaggaaggagcgagtgagtgagtgtttggctgatggataagagggtggaaggataggcggaaggatggattggtgaatgaatgaatgaatttcctttggttaagtctcttgaaagaaaggctatggatctttgtatggatgttgaataatttcagtaagcttacagcattttacaatgttcagcaatgtatgaccacttaattaagatatggctagtttgtctctgttataaagtacttttgcattactttaacttgcattgctttaattactaatgatgggtgaacactttgacctatgtttgttaacaaattgtattttatcttctgtgaactgtttgtccaagtcctttgggtcatggctttctgaagagactggtcccagatgtccttgggatgtagggagcccatagctcactggaggcattcaaggaaccagccaggcagccctcagagaaagtagtgtttaggagattctcatggtgtggggttggcctaggtggcctttcaggtctgtttgatgttaggatttgcttctccctgggaagtgggtgatggggaaaaagacaccttccattggcaggtgtagacactgcaggctggacctcctgggtgtgcttgtggactccgatcttgcccttgataaaacccctgtgggacaggaatagctctttgaacctccaaggtccagacagccacatcctagcaccctgtacaatcagttagtggccttcccaccagcgcagtcactcattcctattagatcccgatgaagccaggccctggggtttccattttcccacctcttaggggaattgggttccccgcgtcctgtgatatgtcagcaaatgtcctcagccctggcctgcacatgtggcctcagtggtggtctttggggtttaactgacgaatggaacattttggatcaggactgatgggagaatctcctttcatttttcttcacctggggcaattacattctaaggagcggaataaagggcatgttctgcccaaagcatcagggctcacaggtcagtcacagccatttagggagggcatgtcacccaaggagggctcgcccttctttccagagcatcctccgctctcagcagagctgcttctgcccacccatccctctactatagcactgagcactgtttgcccgtgtcagaatccctcacccacatgtttagcttggtatccgagtttgggaggccggcaatgactttcaacatgaattgctccatctacccatccatgcatttggcctacttatcttgaccccgtgcttttggccttttcttctcctgaaagcaaaccctttcattttgggtgggctgtgtagcgccatgggctgtggttatgaagcaaacaccctttcttgtagctgcctcctccggggttactgccctgagcacgtcccagctggatctcgtctgccactgtcacccatagcttcttccccatggtgctttccatgtgtcacacaccacgactgtgacccagggtcggggtcaagagtagcctggggccaagccctcccacccatgagcggagaagtcctccccaggcctcaccttgcctggcgcatggtccctcccatgagctttgctttcagcctttcagcttcctccacagggtggcagtggttgtaactcatccattcatcccttcatcccttcattcattcactcacagccaacagacgtttttaaaaaattagccagtgctatactagagctggctcccaaggacccgctgccgcattgccttttgaaacaaaacaatgaacacgttggtaaaggggccgtgcttgtgtgtcggtgacaaggcgagatccctgagtcaggtcaggcttgtagattcgagttctgttgcgagtttgattgcccctctgactttgtcccctgtacaactaggttgattaggaatcagccaactgtgttccctgggtgctcagaaatcacagcccatatcctcgagaggccaaaatgagagccagggggttccaagatgagtggctgcttctggccgggagcaggttttcaagtcattagaacactctggcctttcctggaggtgatcttggagccattcctgcccctttcaagaggagttaatgcccagctctgtttagagaaaattgggggagatgattgctcatgtgggtgataagaatcacctcccgtgcaggggtctgcatagaacactccataggcaaacctgggtgtccaaggcacgtggcattttgcaaactctgggtgcagctccgagctgtcctgcaggtcccagaccaggtgagaactccctgagttcctgctgcctgggtcgggggtgaggcataggtcttgggggttcaacctggaattctgaatgtcattcattgcattggagaggaaggagagtaggcaaagccaagaccctggaactggacaaactcgtgtggtttaaagtcactgtgagagctggagttgagtctgcctacgggggaggactgcggcacctacctcgcagggctgttgtgaggagcaatgtaaccgtgattttgaactgtgattctggaagggcggtgtgcgtgtccccgggggtgtgccaggggagtgaggagaaaaggccagggagacagcctcactcaggcagctgagtgggagagcatttatctctaaacctggaggggtatatggtgggacaggaggaatttgggcaggaactttcatgctaggggtttgggggactcgctggacaatgcccctggaccccccgggggtacgcgttcacgctcacctctgagaggctggaaacgcctggctgtgctttctgaatgctgtgtgcttcctgcctctgtgcctggcctgtgtgcagcacctacttgtgtccgccttcaaaaggcccttctgggtggcgtccttttccccaaaatattaggcaccagccatcaaagatactgcattgttgcctcccccacccctccccccaactgacaacatttgggctcaaatgcagcaggctgggtgcccaacacagtgcctggcgagtggtagcgcttacgtttcttttctgttgaatggatggatagctaatgaaattgtaaccaatgacaagccttgatgtttataacctttactaagagattattattttgctcttcatggacctgttaacaaccaccatattgtatcttacggacgtttgtatgccacgtttgaagagcaggagccttgtttcggcgtcatgttgatggaacttgagctgtctgatgcgaatctgtgttttatgttagaaagcgcgtagccttaggatctggcagacccaggggccacttaattaaccctttgcctctttgaccctcaatctccttttctctaagccat

SEQ ID NO: 78000 - DNA, 12289 bp, Homo sapiens
gtgcagaccactggcagagcagcctgcaggtgcttagcgatgtgggcccagagtaaatatttgtttgattgatgagtgatggctttttccttcctcagagtttgccctgccccccattccaacgtgggctgctgcttctccccagcgggttgtagctggcagggccgttgtgctttggggtttgctgtacctgtcgctgccgtgaggggacgatctgtctgcccggaggggtttctgcaaacattcatgtatgcccctgctttcgtttgttagggagaaggagtggggtgacctagagagaggatgaggaaggggttctgggtggcatccttggggtaccaaccctgcttccatcctgcgctctgaatttcctcacagcccttttctgtctctggtagaaggtgcagaaggtaggctttgccaccttccctgggcctggcaccaagctcgggggtcttgtacacactttcccttctctaactggggtgtgggcccatttcctagatgagcttgctgagaatcaggacagctggtatcagagccaggacttcccagtcttgcacaaacaacctgtgcatttttgagtccaccaaataaggcctcctgcctggtccggctcacccctgccagcccccagcaaatgcagcctggtgcgtccccacccctgccaagagcccaggagtgctctggcagagaagtgcagggatgaggaaggaggctgtgccctccaggggactcagctgcgttagaggaggtgctgctgcagtggcaggggtctccagacatcccacgcaggggtcctttcagatcaggcatctcttcaccagaccaccgtattcctttttcagccctcgtctcttgcacgtgggggtgcagtgtttggctctcacatccccacattccagctggtgggggtttgagctgggtgttccttctgctccccactccccactcacggcccccaccccacgcaagcctcccttgcccccactctttgtctccagctttcacagccttggcgggcaggctgctgcgcctgttgctgccccggctctcttccacccgcctcttctttctcagcctgagctttaccgtgaggtctgggcgccacaccttggcccctgccatgcctgctcccagaagcacccacgtgggtcccctgattctctcctcccctgggctttgctaaggagccctttcattgtggcctttggtgtctgcctcatgcccatcccctgttcttgagaacttggaagcagagggggcccctcctattgctcccaagaggctccacagtagggagcccctcccaggagattctgagtctgtgtttaggtgtcgattcctgggtgggccttggggtcccctcaggccaggcctgtgtgtgacctaaggctggggggctctgtcaggcacctagtgtcccttggaggtgggcggggctgggtcctggtctcctgaggacgggtggggagacaggctcagggagatttccacgaagctgcccttgaacccctcctctgaggcccacactgccctggccctttacaccctgcctcctgcactagtaggcacataatagatgctcgccacctgtggagggcagggtttaaatggctggaaagagctgagtgggctgtttggctagcgtacgcgcatttgtttaaaaggaaagggtgtgtttcttggcaaagactcttcggaggaaacgctgaactggggatgggtctctacctgttctggggcctcactgcccttcctgccggggacaggcagtcactggtgggtttccccccagtggaaacacaatattttggaaatatttgtatctaggataaaacttcatctggaccaacatgtctttgttggtgttgtggcccaggtgattttgagaatgtagaatacatttggcaatttccaaacggagtgatgacctgctcctccgccccccatgccctccctgaggctggaggcttcagaagcccctgccttgggaggaggctgttctacctgagaagtctttgtccccaccgttggtgacaatcagcattgacctgtgaggcacctgccaggttcgggacgcagctttagacatccagaaaaccgggggtggaggggtggggtgggggcttaagaccccagagcttgattccttttaactgtctcatccccaaagaatggtacatgggtaccaggtaggttacttgaatcaccctgagcctcgattttcccacccgttagaaacagggtaattcatgacagtgtccgcttgggagacggctgtgacccctgagaattctcgctgcatgccgtgggctggctcgtgagactcaaggtctgggttcgaggcccccgcaaccccttctgactgtgtggcctgggcgagtttgttgtttgtaacctggaaagcgtcacacctgcctggcacggttattgtgggcttcaatgagattgtttgtgtgaaataaacgctttgtgactggcacacaggcgctctcatcccggctctcctggtgggcccggaccgctgggtgctggctgcggaggccctgtgctccctggaactgtctgcgctggtcccagggactcttgggcagagtggagggcaagggggaaagcaccagcctgctctggggagacagtggcagagggaagtgtttgcttttaaatacactcagcaggttcagacaggagaggatccgaggggaaatgtttagagccctcaggaggaggaagagaccgagttttaggaaaaacatcaaagctggataggttgggcagaagagctggggatagcatttagagaggctgagagtcctgggttctgggttatcaaggtgagagaaaccagaggttgccagttgtaggtgggcgtcaggactagagtgatgcttccagaagtttctgcaagtgggccgagtctaaggtagggcagggtacgccagaagttgaggggcactaggtagacaggccgagctggtggctgggtgctcccctcaccctccatgctgctaggagcccgtgagcagggacttgctctcctctccctccctcctggggcctgcctgtctgtctgtgaactcttgtcggccagcgaggccgggagcaggtggccttcatctgcaactgtgtctctctcagcctccacagccacggggacaccctgcacctattcccacgggacaggctggacccagagactctggacccggggcctccccttgagtagagacccgccctctgactgatggacgccgctgacctggggtcagacccgtgggctggacccctgcccaccccgcaggaaccctgaggcctaggggagctgttgagccttcagtgtctgcatgtgggaagtgggctccttcacctacctcacagggctgttgtgaggggcgctgtgatgcggttccaaagcacagggcttggcgcaccccactgtgctctcaataaatgtgtttcctgtcttaacaaaaactgatggatgtgctactaatataaggaggggcgagtgttgggcatcctgtctcgctgggtagtgtgatgggtgggagggcgggggccgacttgaaccccacacacctgccagcaccctaccctgcccactgggctctcaaaggggagggtggctcttggaggtccggaggttgacacgtgcttggatgaactaacatctctctggtcccctccttctactgatcgtgggatgccaggcttctttccagaagggactgtacaggaggaggtggtggtggagaggggttctgagttgagctcactgcgtgagttcctggagccccagagaggaagctcccctggggctctgagtcttcctcctcctcttctcacattccccagggctgggctgagtggtcatcatgcttgaactgatgttgagcgatggccaagatggcccagccaggctgtggctaaactcattcctcaaaatggctcctgagcaaggctctgtgtgtaggctcctgagcagggctgcaaaggtggagcctcagacccatccctgcccgcggcagcaatgccggctgagctggggaggtgagccttgcacccctcagagtggctttctgtgagcagcttgtggctgggctgagcgggggcactgaggggcaaggggccaaagggcactagacccaagtcaagacggatcctgagtctgcacacctggctttgctgcagcggatcataaggacatgctccctatggggaaggagagaccgactgcttttgctgccacagccaccacggccatcacagctaccacggccgccactgccactgccactaccaccaccatcacaaccatggccgccactgccactgccacctcctccctcttctccttgctctcctcctcctcctcttcttcctcctcttcctccctcttttccttccgtctcctcctccctcctcttcctcctcctcttcctcctcctcttcctcccaccttctcttcttcctcttcctcctcctccttcttcctcctcttccttcctcttcttctttctccttcctccttctccctccccctctttctccctcttcgccttcctttcctgccttcttctcctcttccttttcctccttcctttttcctttccttctccctcctcctcctctttctccctcttcttcctttttgtcctcctccttccttcctttcatttgtttctccctcctccccctccccctctctctttttcttctccttctttctcctcctcctcctgcttctcctcctcctctccctcacagggaggtacctcaagagaactgcaggcaagtccagccgtaagtgcacaggactgagcatggcccctttgctgagagaaacaaccgccttggggatcatggccatgacctggcaaaggagacctgaccccagcccctgatggagatggtgacatggatggcgctgagtcagcagtgagaagaggaggagatggccttcagagtgcaccccacctagatgagtcagtctgtgctcagccaagaccaggctgagagtccaggagagtcctgtgtggtgagcagagtatcagcctttgatgaagctcaggtgtccagagcaagccacccactgatgttccagagccaagaccccagctccagcctctgttgaaccttgggcattcagaatgagccacccaacttttgacgtcccagagctaagactcagttccagcctccaatgaaacccagatgttcagaaagagggacctccttgatgttctagagccaggactccagatctagcatcaggtgatgctcagaggtctagaaagaggaacctgcttaatgttctagagccaagactccagatccagcatctgatgctcagatattcagaaacagggacctccttgatattctagagccgggactccagatccagtgtctgatgctcagatatccagaaagagggacctccttgattttctagagccaggactccagatccagcatccgatgatgctgagatgtccagaaagagagaccttgatgttctagagccaggattccagatccagtgtctgaagaagctcagaggtccagaaagagggacctccttgatgttctagagccaggactccagttccagcctccagtgaagctcagatgtccagaaagagggactaccttgatgttttagagccaggactccagctccagcctccgataaagctcggatgttcagaatgaaggacgtccttgatgttctagagccaagacccagctgtagcacttaacaaagctcaagtgtccagaaagaagtgcctctttgatgttccaaagccaagataacacctctatcatttgataaagatcaagtgtacaggaagagggacctccttgatgtccctcttcagccaggacttcagctctagctttcgaagaagcgcagatgtccagaaagagggacctctttgatgttctagggctgggacccagttccaacatctgacaaagcccagatttccagaaagaggggtctccttgatgttccagagctgagggacctccgtgatgttccaaagctaggactttagctttagtttttgatgaagctcagatgtgcagaaagagggacttccttgatgttctagggctgggactcagctccaacctctgacaaagctcagatgtccaaaaagaagagtttccttgatgttctcgaacccggactctagccctagcctctaatgaagctcagatgtccagaaagaaggactttcttgaaattctagagccagaactccagctccagcctctgatgaagctcagatattcagaaagggggacttcctttatgttccagagccaagacccagctccaacctctgacaaagcccagatgtccagaaagagggacccccttgatgttctagagctggaacccagatctagcctctgaggaaacccaggtgtccagaactggtgagaaaacctcaagcctctgggctttcctgggcagggataggtgtggccaagtttgtcttgagactggagagggcagacaacactcttctgtgcaatggtggcctgcaacatttctcaatagtgacactggcataaagaggggtcccagttgcaggagagatgtggagaggggactccttgtgggaggaagcgtattaggaagaacatggcagcagaaatcatggattgcagatgggatgccttcgatgaagcttgcctgagggcgtgtaacaccgcagcaaagcgctgttttatgccttttagttttgctggactcatggctggccacacatcagccttgacccacagggctgccaaattggctggaccccggaatgtaacccaagctagtttctgcggcttagctcctctcccagtggaaggtgctaaacccccacttgccagcccagtgtaaagctgcaaccttggggcgagtcagatctggttgcctccttctagcaatggaagttcatctaggttaggactggggcagggccaggctatcgcaatgggtgtgaagacagcatgaacggcaaaggaggcccccaaatacgtggggatatggatgctaatgtctcaggtgaagctgcatttggggctgcagccctgccctgagcaccttgactctaccacttgccctccaggagctccattgacaccagactgtccattaagctggagagagatggcaagtaaagaaataggccaggaatactgacttgctcagaagccataagagcattacaggtagatagaatccaagggacgaaaaatgtagacttggggaggagagagcgctgaatgctatttgggatgtttgagctctgcaatatccagaatgggagagaatcttatctcaccagttttgccattcagacacagctatgagaatggatcctagaggacgacttacttcattcagctggagtctggaggaaaagggagcagctaacaagcattcttgaaaaacacgccctaatgatgccacatcattctggtgatatttcctagaaactcattagaacttggaactgtgcaaacaagaacttctttgatgagtaactggaactcgagagttgggattgcatgaaggagaaatgtcatcttagaggactgcctccccgctccccaccctcatttggccaagttattttaggaaatttccaagaacaagcaattagaatcactcattgctgatttcctagaagtctccacaacagattctgaagccaaatgcaaaatgggtgagcccagcttgtgaggcctgtgaagaaaatgtgaatcctactctataaagtcgttggcctcagggagcaagactcagaagtagagctgcgttagggaaaatgaggacagaacagaaggtctagatggccaggcagagccccgtggcaaagacgagccttgagatgactgtgggccctcccctgccggcagccacagcctgtctcagactcactcctcagagcctgtttctccatcactccctttgtccttctgcccatcagagggatgttctccaggcttctgtgttgctatctggcttccgtgggccatggcttgagccaggctgtgggctctgggtgactgtccctgaggtatggtgagcttcctgagtggtggccacttggcaaagtgagtccatcgcagggaagtgggcaattaccggggagaggaaaatcatggctttcttgcttcccaagaggggctgaactgggctcccaatttccctgacactcccagctcagcttgtagaggaatcagggaatggagatgccttgggctgcaattttctttgagatgactgtaattttcccctcttatcctcaccggtagctgctgtgggacagaggcaggcggggctctgaaagcttttcctcaagctccccttcagtgcagagctgttttcacgtgcccaccagccagcaggaggttatgcttctgattgtgaccccctacttctcagaagacacttcggactccgcccccgcctccatacccaacaatgccgtgcggcatttcgtgtgactggaatggaaatccaacctggccctcgagggcagtgaagccagtccgaatcgcagcagatgatgccctctgcagaggccgggctcatgaacggcctgggtgggtggaggtgggttgacaggatggggtgggcagggcaggggagtgcaggacagtgaccagctggtccagagagtcctgccaaattcaatccagatattactggattaatcagcaaaggagggggagccccgcccccaccccatggagacactgatgagcaccatgggatagctgtggcttcccaggcagcccacggacctacagctgcctatcagcagccagggccttctgggcagagcgcctcggacccccaattgccctgggagggtgggtttttggtgtcagcttagttcagctcagctggcttttatagagcatgcactggctggctcactggggtgatgctgtcgtggggtagatgagcagcaaggcagattcgcagggttgggtgcaggcagcactccatgggggcatgcacggggcccttgcttttcaagcagaggtggactgaaggctgggcttgcaagggggtgggctggggtgggcgctggtagggtgttctgaaacattacctatatacctgcactttacaaagcactttatatgtttgcctggtgttggctgatggtggaaggagtgattggagatgcctgtctgtggcctgggtgctggttagtacccccatgtcagaggtactgaccctgggctcagagcgggtagaggctctcccagggattctcgagtgtctacagggggactgggattcccttcctgggaccaggaggcggggctcttcctgagatgctatggctggaggccctcctcccccagaatcacagggccatatgctaggaggaaagaccctgtaaactccagacctgacctcctgggacctggggttagtcacccaggtggggatctgcctctcttgcccttcatttagaattggctgtgagcctctaagggccagcccttagccaaaagcctccatgcagcccggtgctcctgcagaagtgctgcctccggagggtttctgcaacttgggactcctggcagtggggctagtgtcctccattcacccctgctcctgcacagtccccagccctaggtgtgcaccctctagtgtggggcgaatgggctcctatgcccattagctctgggttaggctcagatgtatgtgccgggctcctgttatgggagggctcagagcacaggggcccctggcctgggagcgggtagctgtgtgcatgtgtgtgggtgtgtgtgcctccatgagcctgtgtgtgccttcgtgagcctatgagtgtgtgagcatgcccggtgtgcacgtgtgtgggtgcgtgtgcctgccagtgcatgcgtatgcagctctatgcttgtgtgtatgtgcatgcgtgggagacagatggtggagagcgactgggagtgggcgacagtggatctgtccctgagcctacagcaccctgggtgccgatgccacatccacatcctgcccccagacctgcttcccggagtcacccatgcctatatcccctgtggctttgcccatcagtccgtctttgtgtccaggtctgcctcagtggacagaagagtgagagtcttggcccttgaacccctcctcttctccatccttctccacctccccccctgcctcttcttggcaaagcagctggagtgagacctgggctgaggccaaggttgggggtactgtgctcccatgagctgcagacaccgtcctctcaccggctctccctcctgtgtcctggagtggaacccacccccgttgcccaccccttaacccctgcccccttgtctggggttctggccatcccccccacccccaccccctagtctccagcttccaaggcagctcccaagacaatgggttgagcaaggggcaggctgggtcctgtgcctagcccctcagctcccccagccactgcatggggcttctgctgctctgtggcactggctggggaacctcaggaccagatggggcctcccaggcctcggctactgcatcacgctctggacagggccttgggcccggacgacgcctgtgcccgccatgccctctggccagatgctgcaccctccacccagcctccaggtgagttctcgtcatacccacggtgccccaccctccttggcatccaggtgatgcatctacctgaggttccgaatccaggggggaaatgtttgcctttgcactgcatatttacacactgatttgaattgaggggttcccaaaatgacatcaggctttttctgaaaaagtctgttttgcccgattggtttgccagtgaggttcagagtggacaaatcaaaatgagctgattccagacctctgaggttttgacaagtgctccatacctagcatttgtcacatctatatgctatagtatatgccagaggccacctcattgcaactttgtaaacttcctattaacttttacggcccatttaaaaatgggctatgggagggggagatccgtggctttccaaaatcccttcatggggtctgtaagcagaaatgtctgctgccccctgttccagggcacgtcccactcctcactggcagggctctcgggctcactgattattctctgaggatcacacagggtcgattttctgtgaatgcaagtgcgtggggtgggtggtggggcgtcgagctgaacgctggtctggacaggaaaggctcctgcttcatgtcccaccttgaccctcagaggtttccaggcccagctcttgggccctggcttcctcctctccctctcgtctttggggggggtccatctcatgcatgtctgttaccatggactccatcatcacggctcccatcacctccatctggcctctgtcatcctgggcacagcatctcatctctggccattccagcctccatcacccgcctcacctccatcatcctcgcttcggggctcattctggcctccagggctttgtacatggtaggctttcattcattcgtttgcacattcggtgaaggtctactgtgtgccaggccctgtgccaggcatcgtgtagatggacgttgcccttgtgagtgcacgcctcggggagacgcacgccagccggtggatggcaggagagcctgggccagggctgggggtgggggcgtgggtgtgggcatgagtgcagaggagggtgagctggtttccagaagggcgggatcagctggggtggtgggcagggggaggaagtgcgggctcagctgaggtcctgctgtgtggagcctggagggagagattgcatgtcccctctctattccccatgggtcatctcagtaatggctgccggagttcaggggtccctagattgctcccaaggtcctcactcccaagtccttggcaagattcctgcgccccaggagccttttggcacctgaactctgccacctagtctgctggtcagcctctgtgctgcccgcgttggtgggtgtcattggattgttaacgatgtacgttttgctctaaaatgatggtgattgaagatgggaattattttgtcagttgattttaatgttttcttttttgtgtgtgaagtgtttgttgtgaaatatctattttggaagtttttaggtgttggaaagccagaatctggggccctctggtgtctaggaagaacctgtgatgccctggggtgaagggatgtggactcccagggacaaaacagtggactctgaggtcctcagggtcacctccct

SEQ ID NO: 78001 - DNA, 1513 bp, Homo sapiens
tctggtgtctaggaagaacctgtgatgccctggggtgaagggatgtggactcccagggacaaaacagtggactctgaggtcctcagggtcacctccctttaaggactagagcacactcagtattcgggggcctctgtggtctttaaagatgtcccatgtttgctaaggaaatgttacttttgctggagaaacttctgaaaaatgtttagaattgtttacctgcatgttttatctcgttcagaattagaattggtggcatgtagatatgcttctgggtctaccgagatgaggcaggcctactgggtctccaccttcagctcaggacacccatcattcacctgggaggggcttgcttcattagatgttcacaaggctgaaaagtgtcccagcctcaagtgtcacgtggagcctcttccacatgcatcgccagaagcgcctcctcccccatcactctgaccccgccccacacagacgtgtcacactaggctcctcctcgagtcatgtgtcacatgagacacccccgtgtgtcacttccagccctgactactcagtgtcacttggagccttttgtccctccccaatgtaccacttgaaccgtccccaatccatgtgacacaccaaatctctgtgtcccactgagttccatctgcactcgtgtcacacagttccaccctcatgtgccacactgagtcactcctacatcatgtgtcacagagaggtcctgtcgcctcccttgagtcatcctgagaacctcctttctccgctttgtcccatggaaccctctttcacccagggttcctcctcagcacctcatccacccgtgtgtcccacggagctctcttcctccacctggggttcatcctgagctcctcctcctcctatgtgtcatcctcagagctcctcctccctcgtgagtgtcccatggggctcctcctccccccatgtgtcatcctcagacactccttcacctgtgtgccccatggaacccccttcttatctcatgtgccatattgagcgccttctccatccttgtgtcccatggagctcctcctcctgccatgtgtcatcctcagctcctcctccttcctgtgtgtcccatggagcccccgcctcttcccatgtgtcatcctcagcttcctatcccttccgtgtgtcccatggagtccctcctcttcccacgtgtcattttcagcacctccttcctccagggtgtcccatggagcccctcctcttcctatgtgtcatactcagcacctccttccacctcctgttccatggagccatttctccttccatgtgtcatcctcagctcctcctccctcccaggtgtcccatggagcccctcctcctccatccttgtgtcatgttcgacacctcctccactcatatgtcacatggagcctccacccatgtgacacaaataatttctcatctacttgtatcacactgaatgttctatctttcttaagggtgtcacagcaagccccactaatgtgtcacaggacgcccctct

SEQ ID NO: 78002 - DNA, 4628 bp, Homo sapiens
gtcactctgaccctgtcctctgcgtgtgtgtcactaggagccccacccattcagctgcactctaagttcctcctctaatcatgtgtcacacatgtagtctctccccacactcataagtcatacagaatgcctctccccatccatgtatcacattgagtttctcttcaacatgtgttactcagagcccttccctgactcatgtgtcacctggagcccctgtccctgtccatgtgttacaccgagttctttcctgctcatatgtcacatgaagctcctcctctactcacaaggcacacagcaccccctgcccgtttgtcgaatggacccctcacctcatgcatgtataacactgagccgctctcccaccccgtgtcgtactgagctcctcctccactgatgtattgcatggactccttctgacacgcggagccctccctgcacccttgtgtctcactgggcatctcttcccaaccttgtgtcccgtgagatcttcccccacccacgtgtcacatcaagtcctctttcttgtgttactccaagtccctgcccccatatgtcacagagagactcttcccacccacgtgtcacaccaagtcgcctttcttgtgttactccaagtcccttccccccatatgtcacacagagactctcttcccacacacgtcacactgagccccttttctgtctcacattccacctctccttcactcatgtgtcatgaggagccttttccctactaatgtgtcacctgagcttctctcacatgtcacttgaagtcctccccttcccatgcatcacccagagaccttccccccactcatgcattgccctgagcccctcccttacttatgtgacatggagcccctctccacacccatgtgtcacaccaaccctctctccactgatgtgtcacaccaaccccctctccacccatgcgtcacatggagctcttcccccacccgtgtgtcacaccagccccctcctccacccatgtgtcacactaaccccccccacccatgtgtcacaccagccccctcctccacccatgggtcacaccaaccccctcctccacccatgtgtcccatggagctcttcccccacccgtgtgtcacaccagccccctcctccacccatgtgttacagggagcccctcctccctccatgtgtctgtcaatctgagccccttttccattcatgtgtcactctgagcctctttcccacctccataccctcctgccacccctacttcttaatctttaacccctttccctaaaggtttccctccatgggctctttcagagaatgttatattatcaggtcatttactcacagatatttttgcaccacctaccacgtgcctggctgcgtgtccctgtgcatgtgtgttggtggtgtggatggctggagagtgtaggacgaggcaggcagtatggtggttgagaaagatgtcaaagaacaaaggaaggtgttttggggtacaactttattgagatgtaatccacatacacacaatccgcccattaaagctcacagcgaagtgtgttttagttattcacagatatctgcaactatcaccataatcaatttaagatcattttcatcacccccaaaagaactccagagccttcagctgtcaccttcaccctccatgcacaccccccagccctcagcaaccaaaaatctactttctgtctctgggaaattcttgaagtgcccctggacttcatgagtcctcactgggtccccagaggtgcctgttgcaacccatttcacagatgtagaaggcaaggctggagaagtaccagggagtcaaagcagtgggtgggtggggtcgagtccccgatgtccactcacagacctgggccagaatcaggcctgtctcccccttcacctccccatcctccgtcccttggcctggctgcacagtcacctgggggctctgtggggctaagggaggcccaggccctggccataggaggcaggtagggcaaggctgggcagggtggacaggtaccccagcgctgcaggtgcccagcagtgggtggcactgcctaggctggctgtcccttgctgtcactgctctaaccactagcagcaggcgtcccctctgccatccgagcgcttgcactgcgcttccgggaggagggttgcggcccgtagtcagtagttggggggtgggaacggcttcatacaggagttgatgcacagttatccagctcctatatgatgcctttcttcatccccttcaaccacgcgcagcccccggaccctcctctgcacccttggctgcacggggacgcgtcctcaagtccgctgctgtcctgccagcctcttcccggcatgctccttgggctcttctctctctcttctgcagctctctgacttcctggaggggagggcctggggctgggccatctctgaggcccctccttggcagggaactatgcccctggtgggacaccccctgggctgactccacagccaagggcagataggccggagggggagttgggtagccctggggcttctcccactgaggggctggggctgtgctcccacacagagccctccaaagggacccggcccacaggatggatggacagacgttggagagatggtgcccctttgtgcccagggtggagggggtggggctttggcggaccagggctggccctttctgtgccccaagaggagggtctcctcgaggggtctctgcctctacccaggactctttcatgaccaggaggctgaggcccctcacaggcggcttcttactctctccttaaacctgttctggagacatttcccctctccccaaggattcccaactctgggtccccagaagctgtcagctgggctcccttcttcccctgtgcgtaccctgctcaggctgggtacctgagggtgcccaatggcaacatgagcagggggcacggccgtggcccctggttcttggacctctgtcttctgcctctctgactaactcaggtcctgtgcatggcagaggtgacccgcaccaagccctgtgatattggcatcattaaccccattaacaagccacgacagccagcccaggcatgagcatcggggcagcagggcagccagtgtggggagagaggccttgcagtagctgaggccattagagaggacaagagggtgcaggagggagcatcctcacctctgcccttcccacttacatcccatctccccttcctcacccctccttccccatgcaccccttcttcctgtaggagggagcaccctcacctctgcccttcccactcacctcccatcttccctttctcacccctcctccccaatgcaccccctcccttcctgcaggagggagcaccctctcccctgcccttccttcccacctcccgtctccccttcctcacccccgcttcccccatgcacccgctcccttcctggtctacccctcagcttctgtggtgtcaggatgggtatgcttgtctttgttgatctcagacaggtggacaggggtctggacgaggcttactgtttgggtctgaggtcagtgctcatgggcttggggcatgacaagggtcttgtcgtccccgcagcagggctctgagcgggtgggtggagcttgggagtgggggtgatggcttctatttgttgtctttctctttttcactttgggagcaaccggggtcaccaggtgggcaggaggggacctcacgtctctgccctgggcagattgttaagagctggtcaagctcctggcacgggggcctgagtccaaggccctaactggacctggggccgcctgcaggagggatgagcgagtccggacccgagcggtgagtagccctcagctgcctgggtggtgtgctgttgagtgttccagaaactggccctgtgtgcaccagggctggaggctggcacgttgggcatctcatgggggtgggctgggtcgggaagggaggttgatggacaagactcagcaggagtggagctcagggctccctccatcccctgacatcagtgacctgggggtggacagagaaggtggaagatgggtgcatttagttgtggcccgccaggtcccgtgggcctgtgtgccagtgtccgcgccaggctgtgctgtctgctgttcagaggagttttcacctttttttgtggtggccatgatgtcataacccagcatgacatttaacattaaccttcctttttctttccccaggagaaaaaaaggtttgtattatttttcttttgaattttttatttccataggttttggggaacaggtggtgtttggttacatgagtaagttccttggtggtgatttgtgagattctcgtgcacccatcacctgagcagtacacactgaacccagtttgtacttttatccctcaccccctcccacccttttcctggagtccccagagtccgttgtatcactttatcagtagttctcctctgggcctgggggctgccgctcttctctgtaaactaaacctgctgtggctggatggggcaggggagccaaggaggcgaggtcctcactgtctgctggtgtggggggccgtggccactctagcaccgggagcccccagtcaatatgtgtgtgtgtgtgtgaactgtggataaatacgcttacctta

SEQ ID NO: 78003 - DNA, 1059 bp, Homo sapiens
aggggatctgcacctcttgcagctgagcccctggccttaacccatggcagcctgtcttgggctgccatcagaggcagagtgctaggtgaacggacagacagacatggtgcccttgagctcctggagctgctgtgatgttggttgttgtggaggtcattgctgggccttgtgactggaggcagagtgggtgaagtggcccaggtgagaggacaaagatcagccaccaggaaggggcctccatcctggctctgtcctcagctcctctgcagccggttctgggccttgatttccccaagtttaccttgggaaattgacatgagaagtctgtggatggggctgggagctctgagtgccagctgtgcccagcagtttattcctaactctgaatcctcacagcagccttggtgggttggagtgacagatgaggaaactgaggctgggagaggccttcctgcagccagccagtggagggagagagaagcccagaggtgtagcccctgcctttgaacctggagatcctgaccatgatctcctggtgctgctatcaggggtagattcttcagacaggtggatggtgggtgaaggccaggcacccctggggacttgtgagggcatcgtgagccctgtgtggggctgggcagtgcagggaaggaaggaggctgagcttgcagtgccagccttgggctcccgtggggtgtgtccttggtcaggggctccccactgtgtgcccagtggtcctggtccacgatgggtaggagcaggaggcagagccacactgtctggaggctgtcatgctcccgtgcctcccctcgaggacacagtagggtctcttccatgtgggagctgagaactctggggccaggtggaaatggctttcctaggggatggggtggctccaactcaggctagtcagacccctgcggggcccctgagctttgagcctgagatctgttgggtggtctcacggtgtgtcttcaggagcaggttcctcagcagggcagagagggcagagctggtgtgtcctggcatgggggcccgtgtgcacagagctccagtgtt

SEQ ID NO: 78004 - DNA, 13846 bp, Homo sapiens
cttgtggaccctgcagtgtggggctcagaccgcacctcgttaatcacatggcgaggaggccaaggccagaggtgggaactgggtttcggggctcccttttctggaacccttaggagagacagcccccactcccccgcctcccactgccctaaggcacctcttctgtcctctctttgacatgagcctgtggggggtgcacgtccctggtggcctcagtgggggtgggtgccttctcatggcagaaagaagtgcccagagtcttggtggggacgccttcaggaaggttgggggaggcctgctgcccatgtgccaggcccccaggggctgtttcagggcagagcgtttcctgcccccacccttcctgcccagtccacttgccccctcgtccaccccacctactccctccctcctcccatgcgtgtcccctcccccgcctatcctcccaccacctccacttttagaacaaaccccaaagtcagacagtcttttagtttgctttatttgaggagtgcaaaaagattggggggtgagaaagctcggggggtggggaagggtctactccccttgcaaagcggtggtgtggccagagcctctctgtgactcggcatggtcccctgggtgtctgtgtgccttctgggactccatccctgtatgaggggcccctgcacccctgcactgtccagtgttcagtgttgggagggaaaggcgccccaaggcatgcaggggccctctttgctgtgcaagtctggtaagtggcactggtacgtccggatgccccaaagagcggctttgtccaggtaagtccagagctcagggcaagaggaaggcggggtcaaaaaagctgaagcagatgtggtgggggtgggggtgggtttgcttgcagggtgtgatgggggtgagggaggcaccacatcatcagatgtcgggaggttgggggatgggggttggggggcgggggcgggagctcaggggagcaggagcaccggcagtggaggtagaagaagtcagtggagcacccgaggtcagtgtcccagggtggccatcaccaggccgggtggggggccccgtcacctgcttgcttggctgcgcctgctgtgcctgcttcttcatctggccacgcgtcatggggtcacttcctgctcaccactgctttctccctcatggatgtcactcccgggcatgggcttgggacctggagaacggagaactcgtagcccagggctggcgctgggtctctgaggactgggtagtccgttagcacaggtggcattgctggttgatgagttgaagaagttgttgcccttcacaagtgggttcctcttgggtcaggagtggcaggaagggaagcgaagcaggctgaggcgcggggaggccaggggacgtcgggaggtgttggggtgagaaatagaggggactctttgctggagacagggaggcgtcttcagtcgaggttagcatcttcgtcctcatcaggcagctcttctagccttgcctgctccctgggctggctctcccaggcggggatgggcagggcccgcctgtagatcagggtcaggaactggctcagggccctggctgcctgctcccggctgagcaggtgcagctggccatctgcactgtggatgtggagcaggcggctaccaaggaattccaggacctggggatccatcaggtggcgtgggcggggtgggtgggtggctgctgtgtggctgggtggggcctcctgcacgtcgttgtcctgcttgtcctgcgaggtgtcttgcaggccgtcatgcaggccacactgacggtaacgttgcaggtcgtcttgcagggcttctcgcaagacgacatcctcatcaccaacgacgtgcagctccaggtagcggttctgacgcagggcagggaggtggccctcctggggggtgactctgacaccgaagaactcacacagcgtcagccagaagccaggggtgaactgcaggcctcggtgggcctgggagtgcagagcatttcgctgccagcggccagggcccaggaacagctcagccagctcctgggctgggatggtgtttgcacctacgagagcgggcatctgggtgagcagctgggtgatggctgtcgtgatgctgctgcctgcgatgagggacgaatccaggatgagtcgtagggagcgctggggctggggccgagccacccgcatggcgggtgccggccgcagcgagaggcattgcctcacgcgcagtagcacgaggatggctgccagggctagggtgttcttccagtacaggaggcctcggaagaagtgcagaatgacggccctgatctgggccatgctgaagtgggcgaggaagctgttgaggatctggtcgatgggtatcatggccagcagctcttgccgtaggatctgttcattgagctcatcctgttcttcattctcttcttccccggattccgtcgatggatccctggggaatccccttgaggccagcagcagggtttgcctggcggcagtgttcctctggaaggctctcctccaccggaggtttctcacaggtggcagagctcggccgccgtcttgttctggcagctccatgacgtcaaagttgaagtgggagaagaagaagacccaatgcccggggagaagtacggtgagcctgtcattattcagagaggctagatcctctgtgttgagaaggatcatgatgggctcctcggtgttctccaggtagcggcaccacaccatgaaggcagcccgtattggaagaatcttcatctccgcttgagagtactcaacctcgataggggagatgttgcgggagtagaaagcgcagcaggctctcttgccggtttggtcgtcgatttggatcagggaggcgtgcagggccgtgccggtgacgccggtttccaagtagaatgggttctggggcttggggtggtggaggagaggcgccttgcggaaagccctcttcaggcactcgaaggcctcttgctcctcgactccccagtagaactggtaggagctcagcagctgccgcaccaggggctctgcgatgatgctgaagcgctccacgaagtggcggtaggggaagacgaattcgatgaagtttcgcagagatagcttggagccaggggtagggtaccctgttatgatggtcatgacgttcttgttcagtttcacccctttgggggtgacgacgaagcccaggaattccacggtttggcggtggaactggctcttgtccagggagcagtagacgttgtgatggcggaagcggaccaggacttggcggacgtggtggaggtgctcctcctgactcattgagtagatcaggacttcctggccataagaaagcacaaagaaccctagcatgtcctttaggatgaagtgaatcacgttctgaggtatgatagggtctggggagagcgcaaacggctggtagctcttcatctcttcaagctccaaaccaaacgctgctttccacacatcttcggtgcggtgcccgttcacgctttcctccacaatggtcccacgcagctccagttttgtgaaccactcggctccgtgtaactggtcaaacagttccggaatcatctgtatgtagtcctgtctgttggtcagcatgtcctgcaggtcccagtattcctcctgtagcctggctctttcttgcatcctggcacccacaggttcccaaggcgcggtggagggacactcgtaaaaggtctcgctgtgatcactgtctccagcctgctgaagctcagagggctctgattcagaaagatcatcggatccgtctgagcttggctggtcggaagtctcatcatctgcttccttcgggttaaacacgtcggccaggtctgagtatgggtgtggcagtccgggtagcaggctcatgccgtgcctctctagggcaatgcatggcgggggcgggcggaagcagttcttcaggcagtagggagagtggaaggtgcagcggcctttgatccagtcgacttcgggggcgtggactcggagccagcggatgcctaggaccacagagaagttcggtgaaggtacgatgtcaaattcgatggactcctggtggttctggtggatacacaccaggggctccgtgtagagccagacaggctcgttgccaatcagcgagccgtccacggattggaccggctgtgggtacggcttctcgtagagctcgacgtagtgctcttgggcgaacttctcatccatgaagttgccgtcagctcccgaatccaccagggcctggaccgcgacgctgtggtaggggttcactctcaccatgagcagcaggaagaggtgggcgcgattgatgtccggatggacttcgctgggcaaccagctgctgaccatccacctctctggagcaggtgagtcgatccaggtcaggttccgggggcgggcctcggggggcagcctgagcatagctcttctctctgccagcttctcttctatttgcaggatgagcacaatcagactgtctagggaatccggctgagggacccggaatagatagtgcctgatctcctcgttgagcccctggcacaagtgggcctgcaggacttcatctggccagcccaagatgggtaccaggctctggaactcatcgatgtactcagtggcagagcggccgccctgcctgatggtgaacatggcctcttctgccacacgcagtgcctggcggtactcaaacacttcggacatggcctccaggaaggctgggaagtctccgatcagggggctgttttcctgcagtagagctttggcccattctaatgccaagccggacaggtgattgatgacatagccaactctcagacggtcgttatagaacattcttgggtagctctgtaaggtcagttggcagagtacgatgaactcgtggaattctctgcgatcgccagagaagtgctttggggcgggcagttggcctgcattgatccctttgatcaagatctcttctgctactctctgttgctctttgaggtcttgcattcggaagtacagcgagatgatggacctcaccatggccataagttctgcggttgagtgctcggtctggttttgctcttgaggagtctcctcccttcccgattccttcaggtcagtgtgagcctcttgttcttctcgggctcccgatgggttgactgatgcttctttcatcctatcagatgctccactgagtggatccccccttgcctggtgtgaaccgttgcatgactcctccaggtcttggagtaggtcattgggtggatcctctatttccttacgtgggccactggatggctcctccatgtcttggagtagatcagtgggcagctcttccatttcctggagtgggccactggggggctccttcttttcctgggctgggccgctggctggccctgcctctccccgcactccactgcccgacgtcgcctcggtggtgttggatgagccctcggaggactccatttgttttgatgatggattcttatgctccatcatcgtctcaaatgagtcttcagagggttctatcatttcgtcggatggaaaggagtgtattctgaagattggtaaggttgtgatggcgtccagtcagtagctgggaccgtggagatcagaacctggtggtggaaggggagtgtggggagtaaaggcagtagtttaggatcttgtgaagtggcagtatcagggtctcaaggacaaatcagatgcccaactaatcagagcagagagaaatgggggaaagccttcttgtatcgagccagcctctttggctggtcacttggggtgcccccagggagggaagatctgtcaacccctgacctgcctcccaggcttattcagtctgcctgtcctgtccttttcctccatagatgtgagaaattcacagcccataaattctgtggctgggagcagccaccgtggcaggcgggtacctggcagggtgcacaggctgctccattcccccctggcacatgcacctggtcaatcctcttttcctgctttggtcacctgagaatcacagaggtcacatctcagcaccatccaaagccacccctggcaggctcagggctctggagcaagcccagccaccttggttgtggagcgggaatctctagcaaagatgcctactgtttcaccagtgcagtggaagaggagaaaatgggcacttggccactgtcccgtcagttgggtcagcagcccaaaatagttcttatttccttccccatgttcaaaatagaaatttcagggggtgtgtacaggtctgggttttttttttttttttccataaattttataacatacctactatgtgctggataactgcatatttgttacttgattctaactcagacttttggccaatttctctttctcgatttggtctccttccaatgctatgttctcccgacctctgagctgttgaggagatcttcaaataatctccttctcttcctacaatctccactctcccaggactgccctctttgtgaggcttctggaacttcacacatctggcctcaatttcaccagtgcaagcatatctgcacgcctctccaatcttatcctcccaggtccccttcttaacgccagtgggtctggtctcctctttctagcaaatatctttttctctctgttgctggttgagccctcccaacagacatgtatctggcagagttgggacattgagtgtgggggttggggggaacatgtgacatctttggaatctgacggtcccagagtggatttttggaaatctagtgttgggtggttttagtgggctgagacagaattgaaagggaatgtcttggttggggttatttgcacatttcttctctgctggggcagagcaaattaagctttgattatctgatagattaactgtaaagctactgctctttataaatttaacaccttttgttacttctgagttttcttctaagccactggacccatccgtaaaaaaaaaaaaaaaaactgcgttcccccttacgtgaaactcattggctaaaatccaagctttccaacaggatacaaaattcagatctgctgtttctcaaaattaagtacacccttgttagcatgacacttaaatttgatcatgcagtctctctgattaaagccttccactgtttatttactgtctgcaatattaaatccaaaccttctagcgtaaacatatctgacatgtaaactcaccaaaactattctctggttaaaatgtaagggccttaatataatataaaattcttattttgtcattcctcaaggtagagatcacatttttttaaagcacagtatacaaatcagcatggtataggaattataagaatcatcatcatcatcatcatgatgtacatagcacattgcagaaattaactcatttcctctccataaaagtcctctgagatatgcattattactgtaaaattccaaacctctaatataaaattctaattgaaatacaaataaataattctaattgaaatacaaaaactaagtaattcatctgcagacttatctatcaggaataaaaatctcagcatgtctctcacttaaaactctttattggtgaaaatttaaatttcttagcaagacgatttaaaaactagattatgccccctcttaatataaagtctacactgcttaacatatttacaaattcgaccatgtgaatgattaaatccttcaatgttcctgccttcagctcaaaatctaatatcctcggcatgttagaaaaatcttaatacttcttaacatcaaagtttaaactgttagcaagatgaataaaggtcatctcataatttctctatttaacacatataaaaattcatttttattgcctgtaaagtttcaaccacttagcataaaatgaaaattttcaccgtgtaatttacttgccaactgattaatacgaacccccaaatctcatcaggtcactcctaaaaccctttattggcttaattccaaacctcttcgcatgatataaaattctgaccatgtcattcctcaaaataaaaaggtcactctcccttgcaagatacacgaatttgctcttataacttctgcttaaagctttattctatctcttaattacctatgagataaggtctaattatttttagcatagaacaatacattttactataaaatttctctgactactctacccaagacaaaatttctgccatgttactgccttaaaaatctcttaatgagccaggcacggtgactcacagctgtaatcccagcactttgggaggccaaggcaggtggaacacttgaggtcaagggttctaggtcagcctggccaacatggtgaaatcctgtttctactaaaaatacaaaaattagccgggagtagtggctcatgcccgtaatcctagctacttctcctaggctgaggcgggagaatcgcttgaaccttggaggttgcagtgagccgagattgcgccgctgcactccagcttgggcaacagagggagattccctctcaaaaaaaaaacaagactcttaatggctgaagtccaaattccttagcatggcataaaaatgtaattctgtcatccctcaaaatagtgtccaaacttcttagcatgctatgtaaatttaatcatataacttctttttataaaaacatgctttgtctataaatgacccgtctcctcagcatggagcccagcctgggtgcccttgtgcccaggggatacctctgctcacgagtggtctgatgcttattcattatctggttcagcaaatccagataccttaacttaaaatatgtttacaatccagtttctctggagacaaaaccctcatcaatttacttcttaaaacgctttactggctgacatccgaacgcctctgcatgagatttcaacaatgagctcaatgagctcatcccccaccccttccaaacacagcacttgaatgccttcaactcttttgtaaaatcacatctccttagcatgtgagcaaaatctgatcatatcatctttatcatagagatcctgtcttatagctgtgccaaaatgcacttgtttgagcatgtaacttctcaacttaaaacttctcgaggtttcttcattgcctgtaacataaagtcccaactacttaacacaaaatgcgacattttaccatgtagtttctctcaggatgatctattaaaaaaccccaaatctcatcctgttcctgctgtaagccctttattggcttaaatccaaagttattaacatgatataaaaatttgatcatgtcatcccttaaagtcaaattcacacttcctaggacaatatataaaatttgatcttataactccttttaaaatcttacagtgtctcttagttgtaaatggaagaaaagtcaaaattcttagcataaaatgtgaattttattttgtaattcactgcatactatttatcaaacgcaaaaaactcaccaggccactctgttagaaagttttattggctaaatcaaattccttggcatatgcaacagtctaatcatgttggagcctcaaaataaattccaaatttcttttcatattcgcaatattgatcatttaactcctctgattaaaatctttcaactttggtgtcaacattaatcacacctcctaggcaagctctgcaggttgaaattggcactcccccaagatagaaattcaaaatgtttgcgcatgattgttaaattggtggctgttacttttacaatttccagtgtttccttgttgcttgtaatgtgaatcccaaagccgttacccgtaaaatatattttatcatgtttttctgcatacttatctcccacaaacaagaatctcatcatcacatttcttaaaaccctttggcaaaaatccaaactccttagcatgatataaaactttgatcctgtcatccctcaaaacaaagtccagatttcttcccaggaaactcaaattatgaaactcttgcttaaaatctcaacgtgttttcatcactacaaaaagcctcaccattttagcaaggcacccacttttaatcatggcactcccagcttcaaacctgtcaaatttcatgtcctcaacataaaatctaaatgcctgagcatgaaatgaaaattggaccaattatttcttacattaaaaatctttggattgctcttctctacttaaactataaagctgaagttcttttcgcatgaaactagaacttttcaccacctacagtttccagcttccatttcctgttcctcacgcttctctctgaaaagactgagtttcccattctccagcctccaaatgcatttcgattttattgtccccaaatgtttcttttcttttttttgtttaaccacgtccctctgcccataattcattaattcatacagcagcatgtcctgattctttttctgggccaggcacggtgctcgatccccaatggaaggaaatggaggcagacccatcttgcaggtcatcaccaggaaggagatgagactcatgtcctggagacgaataccccactggaggtgagtgaggggccttggaagcagggccagggggttccctccacacctgctgagcatctgcctctctgggagggctttgggcgttgttggggcctgtcgggcctccaaattctggctttagatgggcactctgggattcccatctggcttcacctgcctaccagctggcctgccatagcctgggccctgcctcttctctgcgctttgcagaaatcatattctcagtccttcagctgtggctcaatacatgttgttctcaaatctcatgacagtttctttaagaaatatctactgatttgaaaattcccgccttatttgaaaaaaaaaaaaaaaaaaagaagcccagaatttaatgctgctggtttggggtcacaactgcctttgaggtcttcgaatgggaccctcttccccccaacactcaagagacagacgccccagcctcaccaccttcagtgcccagagcctctgtcgggtcagctccttgcttgcctctgagccagtggcccattgggtcagggctgccaacgtgtgtctatgaagggttgggtgtggggggggccatgggggggacaaatccctcagcaaatacctctctctgtcagctcgcctgtacagtaaaggaaatctgattttaaaaatagagcttggaagaggagatgagaggatatttaggagcagagttgagcctggggcggggggccggggtgggggaattaggggagaggtgaggacaggggaggagggtgggaggctgggggctgaggaggaaggtgaagctggtgaggagtggggaggctgtgaggatggaaaggggagtaagggagaggtgggttctctggaatgctggccatgcctcctctcctggcctccagaaactagcccagtcacacctggggcccctggctctctgggctgccaggatgggtgtcaggtgaagatccctgtccatcttggcctccttgtaggtggtgctcagagctccttgggtttgagggacatagctactgggtcttaggagggaagtggcctcaaaatgaatacccccagcagctccctctgctgcctggcctgctgtggcctcctgtggatggaaggcacagcgtcacagtgagggtggacatgcagggaccctgggagggtttgttattatttatcgattattattattatttattttgttgaactcgtgtcaaggttaagatgtgtccatggcagcttgaggcttggaagccttcctggtttccctggtatgaacaagtgtcaaggatggctcacttgatgggacttggtgaggaggctggtgagattcctgggggcttcctgagggcctcataaggagtttgggttgggtcctggggatcccagtggactgtggagtctgcaggggctgctggcctggcatagcttatgttggagtccctccccccgggacccttcaatcttgcacacccctgacttgtggctaaagacgacttgagccttacagggtgggaggccgttggcatctcggcccagggcagcccagtctcggacattccctctcttcccctatggtctggaccgaggtccttgaatgccaggccccatgggcctcggacttcatcgtagtgatggggaaactgagtctttggaaggaggaacagggagttacagtagaactacgctgtccccagggcgtgtctaaatcccaaaccacccagcagggtgggggtcttctgtagagggacccccagcccctcaccttgctaagccactgaggtgacagggagtgcctgggcccagcagcgctcctgctgctgtgtccctgccccctctatgcttgactggcagctccagggggcagctgtatcactctgcccagaataaccctgggaaggggcgtgtgccgcctgcgggaggggctgtgcgaggggtcacgggtgagcttgtccttcttgtcttgcccaaatcagcggggccaatcagctgctcctgaggctgatcttgcctttcaaggcaagtgggcagggacaggtctgcaccggcctcctagcctagatgggctctgactgtcaacatgaccttcctctcccaggtcctcagtttccccatgtctgcagggagggtttcggtggtggtcttctcactgtgctcctgtagctctggggttcctaagaggtgcctgcgggggtccctgggaaacagtaatgagaggaggtggctggcccaacaggtggagctcagggacacccattgctgccttagttccaccagctgctcctataaattggggtcgtcgtattatttcatttaaacagaggttgccagatctgagcaatggttgaaagcacagactatgtggtctcttctaatggcttgtcttgattttccaacctgggctgggaggggtgtaagagtggaacctgctcatctctggtgggctctctactctcacccagtgggctgcatggacaagcccaggtggctgcaggcctaggagtggagctgttcttagagtaggaaggtgaagactttgaggcaaacaaggagggccccacctcagggcctggtggaactagaatgagggcagaaggcagatgagaggctggctaaccttgcagaacctcagtttctaaggggatgattagaaaggtaggagcacctccttccagggaagacgggtgtgtgaagccctttgtaaactgtaaatgctatggacaagtcagggatagctaccgtcattaggattcttacgactgttacttccagaacacccactgtaattgtatggtcaagatttggacagcatttcatgcatggtgtcaactttaattttcccgttaaccccacaaggggacgatgccctgcttggagagtaagtaaactagagtccagaggggtgaagtggctcctctggaaccataattatcggcgacaatggtgcacagacccagcatacaggaccttccccgggaggggcaggctgatgactggagttggtgaggggtacgtgcggaagacggaatgtgacccagaaagggacgactagaatgtatttattaaatacattcaaatgagtctctgagtacctgctctgtgtcaggcgtgattctagccactcacccctaaaactgactttgctcctaacgagttgggggatgtgctgccgtcttacagagttaaactgggattcggagggcgaggtgctggcacaaggcccccgagagacagaggcagggtttaaagccaggtttctcctgggcaggagcagatgcccagagtggggttggcagttgccatttgggaaactgttgggaccttcagagccagagatgccatcttcattccatggtgttgatactgccagcctcgtggcctgag

SEQ ID NO: 78005 - DNA, 1040 bp, Homo sapiens
tgggggtctcagtgtctgcctccatctcccccaaaggtgcttgctgtcattcccaactcattctagcttatttggtgttcgaggagggacaggacagctggcccaggacctgctaattatagctgctcaagtatttgaatagaggccttgagtacacaccaccatgtcatggttttttcttacagacgaatgaacactttaacccttgtcctgagtgccaggccatcccattcactgccccacctcccctgcctgcccacccgatccctgggggaggtcgacatgggacctctgccccacatcttaccttggctgcaagcgttcaagtggatctcctcccgtcctgtgccactcgatcctcgctgcttgctaaaaagttattgaatacatttgtttctttaattgtgaaagtccagtctttttgacatgcgtacattttctacagtagcaaccacagtgcacacacacagtcttccagcctgctctgctcgcgtgcctttctgttgtgagcttttttccacgtggctacgttggggacctccgtgatgcttcctgagtgcttactatgcgccaagcgctgctttcaccattttacaggttttcactctttcaatcgttctaagaagctgcgagggccttccttttattatccccatttttcagaagaggaatccgaggccttgggacctacacccaccctcacacccgggcccacgctcactttaataacccggactgggcaaggactaagtccagccagagcgtcagcctcgctggcgtcctcactggccatggccctgcagccttgctcttcagttcctggaagcctcctgcccttggtggacaaccattttgctctctagcaaatggatagaaaagtttatgtgagtctggctgggcggggtggctcacacctgtaatgcagctcgttgggtggctgaggcaggcagagcatttgaggtcaggagttcaagaccagcctggctgacaccgtgaaaccttgtctctactaaaaatacaaaaattagctgggtgtggtg

SEQ ID NO: 78006 - DNA, 1682 bp, Homo sapiens
taatcccagctacttgggaggctgaggtaggagaattacttgaatctgagagatggaggctgcagtgagccgagatcatgccactgcactccaacctgggcgacagagtgaaactccgtctcaaaaaaaaaaaaaaaaagaaaaaaaaagaaaagaaaaaaacgtgtatttgagtctgggccccggcctctgttggactttgagtaaatcttaatttagcaccctgagctgcaactcctttctcctgaccctgccacctgcatgcgccattcaagtggctgcgccccaggctgctcatcccttccgccctgggtccccatacacagcaaccccatggggtttttgtcctgctccttcatattaatctgcattggtgactcctttgtcccatcttccctcagcacacagtagggctgctggcagcaggtgaggcctggggcaagggctcagagaggcaagatgccatttggccatgccaccgagtgagcagtttctcttcttgccctcccaggtggcgtgaaggggagatggctgctttctcctgggaagggagcagatgcctggcccaggaccaaatcaaaaggtctgaaaaatgatattcattgtcctaatgtgtaaatttcgacaatttgcaaatttgtagattctttagaatagaactaactcaagcccttcattctgcagctgaggctcactgcccccagtgggcagtgggtccagggggtttctgaggacagggcatgacccagccctgctgcccccaagatggcacctggcttggaggggtgaggggccctgttagtctgactttgaagaagaccagccttccagactcgcttggtgccctgacaggtatgtgtgctcttctctctcccacctaacagccccttttgggagacagggtctgagaggagtcagggtcgtataaccttaacacagtgtgttatccaaaaacccactaaccctgttactcttgtctgtctgctatgtgaaaccaagggcggtgttaaagtttatcaccatgatatacagatgtgcgtggggacatctgggatggggctcaggggtctacctggaggtcagagagggcaggatctgcttaggggagatggatgactgtgggggtcagacagggcagggtttgcttaggggagatggatgactgtggacatgtggctgtaaatcatcctccccgtcttacataggatggggatgcaactttcaagagttgccttgattggtaccttaaaggaaataaaacataaaatgcttggcacatagtagatgctcaacacatgtagaaaaggcacttattttaggtggatctgccgccgaatggcccttttgcaagctcttctcattttttggaatccaaagggaaggtgtggggagcagggtcggggtggaggggaaggacgacgtgaggttgcagagggcattttcttgaggcaatggcatatctttcattggtactggctgggtttatgcggactttgagaggagtggagtgtctccaagtggggctaccccagcctgcaggttggatgcaggtaacctcagtctgggcactgcatttttatttaccataaaaatatttcatatttgctgggtgtggtggctcacgcttataatcccagcactttcggaggccgaggccggtggatcacctgaggccaggagtt

SEQ ID NO: 78007 - DNA, 12192 bp, Homo sapiens
ctgtagttccagctactcaggagactgaggcatgagaattgctcgaacctggaaggcagaagttgcagttagccgagattgcaccattgcactccagcctgggtgacagcaagactccgtctcaaaaaaaaaaaaaagaaagaaaaattgcaaaactatagcaatcacctcaaggttttcacaggaatcaaactcagtccaaactaaaatgctgtgtaataaatagtggggcttcacgtgcaggaaaggcgattaagagcgaggcatgcaggccgagggctgcttaacctgtctcagatttcttccgcacaaagtcatggttgaaaataggtctctgcctggcagagggtaaagaagttctcgaaggcctctgtctgcattagcttggtgagagggaagacatttaaccaattaaccaattagtgatctgtgcggatggagactgagcaggacgagggtgccacccgactgggtgtaaagtgggcttagttttgtcttcttggtgtctgggagcctcagtgcctttctacgtagatgggagtatgcttgtcacatccttgtcacacaagtaaccctgtgcctgtttgaggattccaagagcctgtgacggctgcagggggccctgaagcttagtgtgcaagcaggagctggggacagaggggcttctgacgggagtcggggtgcctcctctggatgtgggggtgggctagggtgggcaaaggttgcttcccgttctcctgcagctgacagttagaaatgccagtgccgtttagccacagtccctctgggttagagtcgggaagaaacatggcagttgtgtgttttgcacaggaatcaagctgtcagggggcacagtgaggccccagctccttaccagcaagccgtctaggctgcgaacgcgagccgccgggccgcagctctctagaggtccctgtccccaccgcctggccccatctcatgtcacattcccccaaggtctcattccactcggctaatctccaagaacaccggccagggcattggctttcgggtccttttaaagaccaaaaagtaaagcactcccccgtgggtgctggacagcttgggagggatttggggctgtgggtggtgaaatcacagccctgggcacacacctgccagcccgatgtcactgacaggctgctcggaggcttggggctccagtgagagcatatagatattttttaaaaaacatattcgcgataaaataaatcccctgtgtctgcagaacttgctctgggcatgtacccactcccaatccatcaggaaacatgccctttgctttgtatttgtaaaaacagaaacaaaaacaaaaacaacccacaggcgaacaagcaaattaaatcccccccacacaaaatgtttattctaattatgcaagaaatggattgataattaatacacgcattagtaaaaatcaaacactgcagataaagccatctttaatgcttccctcgatccctccccatcaccccccagcaaattaactgctcttctcagtttcaggcgtctggttccagatatttttttctgtgcatttgcatatgtagataaatatacctctaaaatctatgactttgtttattttttacataaactatatcatagtgtacatttcctctcgcagcagcttgtgtttcttccttcaagagtctgcttagagataataaagatcaacactattccttataacaacacctcagtatcctgcgagctgtacacaccagagtttatttaaccaccttgctgctggcatgaaagcctcaggtcctttaccctggttggcgggggggggggtgggggggtggggggcgggggggggcagtgaattggtggcggcaggtgtaagtaattgctgagatttgggtttggggagtgggctcacgagtgtttatgacattattataaatgaatatatgagtgcataaattagcaaaataaaagggggcttttctggaccaatgatgagacagtgtttatgaacaaaagatcatgattaatccagttctgcacaaaacactgaggtccattagaagacaataggtcttggctgtttcattccttttaagagctgtttaatattccacggtatgtatgcaccattgttgattacactcttctactgttgaaaatcccagctgaaagtgctctgggggaggagaagctttggtcacagtcctagccgtcagggtgggtcacagattcataggtgttcattaaattattttttaaaaaagaatacataaaaatggtgcttaatgcagatcagtgaggaagcgtgtcacaaatcgaggttttaattaatacgattctgctcaactaatgcccgataaaaaagatctaagctgtttccattttttgttgctgttaccaacgacactgcagtgagcattcttgcagctaaatctgtaaacacatcctcgactgttcctttaccccagcttcttagagatggggtggtgggttaaattgtttgcaaaagtttattttcattgagtgatctttctaaaatggcattttgaccttgttactgtcttgctttaaagcctccatctgacttcctggagcttccgggacggggtccaaaaaataaggccttatcctggcatggaagaccctttagggtctgtcttggaacttgccagcctcagcccctccccactggtgtttacctgctaggcgcacctcacccccacggggctacctgtttctctcagcgggctccctacttcttaggctttgcgcggccgtgccttttcagccagtttctccccggccttaaagagcaggcttgaaatatccctgttggggagcccaaagttagatgggccccacgaaacactgtgttcagaagcccaccgaagccctgaccctggaagtgggatgcctcattgacatttttttcccaattaaagggaatgttttgcatttttctagaattgatgaaactggtcaactgttactcaccctccttcctttgtccctttctaggagccctgggctcccccagtgttgcctgggtctgactttgcctcagtgaaaactgcctcgaattctttcttgcaccgatgggcagatgggcagtgtcggaggatcgtgtcatctgtcccgtggcgctgggtaagtctgcagtgttgtaaagctgcaaacacccttctgggtggggctcaggctggcacccccccactgccccagcctgcgctataccacgttcccctgatgcttgccttgtgccgggccccagaacccagagtcatggggtccacagcgcgggagtagcgtctcagtgttgtgagttctggggatgaggttcggggtatgattacagcttggaaatggctgattgccattatggctcctccttgccagaggtaaacgggtctggtcccagaacaggaggaggacatgtgatgactggagtaacgatgaggggctctggggaaggacagggctgagagcaagtgctgggacctttgggaccgagtcatattctaaaaagagcacaggctttgggggagaggagctgtgaggccaaggcagcatccccctggggagcttgtcaggagtaacaggagccactggcagtgtttgggcttttggtccctttttttctctcccaggggaagggagaaggaggcattgcaggaagccagccaccctgagcacagacccagctacagaacagacttgagctgcgtgtccttggcaaatccccaagtgtttctgtgccttggtttcctgatattaaaaaaaaaaaaaaggactcataatctctctcacacagggctattgagatctcaatgaggaaataacgcaaataaatcatccagcacagtagccaacacgcagtacccagcaaaactcggtagctctccccatcttaccccgtcatgaaatgcttaaccccctccctgagacgggcagctgctccctttcagggcagggagacccaacagaggacaacacaaatgccagagagagtgtgaggggcaataaaagctgatgctcgcctccctcccagacatcttcccagggaaaagtgtgctttcttgaacacctgggggccggggaaggggctgccctaccactttgaatcgggtttcccgaaaagtttggtgagagtttatttttatgtaaataacatataaaaagtcagacttctccacaggcagattttttgaggctcatattttacagactttggcaagggtcactcggaaggaacagtggttacagtctccagaggttcataattcctggaaaaacttctggccaaacctgacttctcctaaatttcacagaaaattctccctgggctgggctcaggctaaatgagctttttgtgtgttagtacagccttacctagtggaagcatgacttgcacgttgccctttacacaaaagggaacctcctcggccgctgtgaacaaaggctccgctctccgaaatgtttgatttgtttactcgggagcgtgagcctggtcaggcacatgtctgatactggggctatttctctgcggccatatgtagagctgtccaggtctctgcaatttaaccctgcgcttcatgccagaatcccatttcctaacttcctcaagcaacggggcaagggaaccacagcaaaaaggagtgtagggggagtgttccctccgtgtccggcaggggctaaagggcttgctgccctgtggcgtctgcctctaaatagggatttgggtcggtgacttttcacatctacaccaaagcccttcagaaccctttctgcaccaccagctatcctgaaccagaaatccctgttcacagaatttcccatgtgggtgcctcttgttctgcaccctgcatcgcgccccctcccccgtttatgtaaatgacacatgtaaatgtcactctcccaaacattttcacacctgcagcttcaaatcaaccttttaataggttaaaacaacagcaccaacaaaaaccaacaaaaacagaggctcccgagaaacaaacagtttttcccgaagggcttgcagtgcctaactgagctgccagggccgtctgtctgtctgttagccaggaaggcaaaccagcctgcgcactccacctgcaacacgatgctgcccccccacggcgggtcggagcagctgtggcgaccccagggctgacagattgggttgtcaggagcaggacaatgaggctgcagtgaggatgggctccatccttgaatgactctgccctccttgaaatttttctgctccatggaggtgcatctctgcccccgaggaccttgggcatttcacagacaaggagccctggctggcctcgcagccatcccccatatgcacacacgcacacgcacagacatgcgcgcacacacacatgctgagtgcctgcactgggagcataaggcagaaaactcctttggaaactgcagaacagagccttgtctagcagaggtcccctgataaaggtcccacagttcctgggaactgaacccctgtgaatgggccaggagaggcagctcccgactcccgtgtgggctgcattcatcagcaggccggcaccccagccctgtcactgtgtgaggagctttcatgagtccactgaacatgtaagtcacagtctggcagctggctgcatctgtggttgctgctcagcctccagaaaagggcccctcaacctgccagacctcctcgctccttccactcactctgccagcctgttgccccagagaggacacaggccagcctctgtgggctcaggagccagggcaggtgcttggccactctaggtgttctggccctcaagaggggagttggcagcaggacagtccccacctccccccaccagccctgggcactcaaccccattctctgctcctctccctcattgccttattgggacagaggcaccccgccaaccatctctgtgcctttgccatttagcccagggcaagctactcgggagaggccaaatggcctcatactgacccctgcctggtcccctctggccacctcgctcacttgcccgcttgcctgctcaggagttggtgctgtgggagcttctcaaaggcctaaacatgtgggctgccagcctgggcaggaaaccgtgctgcagccttctcagccaagcactggcctgcctctctcccctcggatgcctcctgtaacagggagctccctctctccccaggcagcctgctcagggctcgcacgcagagctgctttgctgagccctcccctgccttttgcatctgcctcctcggctgtgcagcagcccccttgccccctctgccctccgatctctgcaggctgtgggctccctctcttttcagtcctctcctttctgtgctgaatggcaatacccccaccaatggtgggaacaggattgggcgcctctacacctgtcctaacacctctgtctctgttcttttagacctgggacagagccctttgccctgctgttctgctaaaagcccaggggagggcgtggtgctcccctcctggggccagctgctccatgtctatctgttgagcggcttctcagccctcttgggttttctatggccccttttccagttgctagggagaacgctctgtatgcagccccctgccttttctgcaggagctgctggcctcccggccagccctggtcagccctgcagtagcagcagcagcagcagcagcagcagtaggcagccacagcagggctgggggctcccgagccaggcagaccggcttgactccctgctctctagctgcaagacaattccctttacttttcagactcggcttttcccctgtgaaatggagatgagagtttctccgtcactggcgtgaagtgaggactaaatgagataagtgtaggcttgcacacatcagacacttcataaatgcttgtggagtagacggtgggacccagggagggagagagaggtatgtaacaagtgtcgcaagagagaaaacagcctggcctttcaagaccctgctcccaatacaaacgggaacctctcctggcagagtcccctctgctggcttaatcgcacaaatcaagtcagccggaggcagcccccggcctgtggaactcacagtagatgcagcaggcagcataaatgacatgcagagcccacatctgcatttaatagaccgagaatttgcattgtatataacagcacgaggggtaaagcatgaaggcataaaggaacagtttttcccggcggcttccttgaagggccagcttagacaggggtctggggaggagaaactcagcggggtccgggcatcccatagactatgggacagacatccatccatgcactcattctccaagccaccacagtgtacctaccttccccgggcccagtcccaagcgtgaggctggggatgaagtgatgccggtggcttagtgatgccggtggcttcctgtcctcgaagctcagtcggtctggtgggggaaacaaacagggaataagacactggaaattgaggtgatcaagagggggtgcaggcatggagatttatggagccccgtcttggagccaagtcccgaactgggctgtctgcaaagaactcacccgggcaataaccctgcacactggtctcatgagccccattagattgatgaggaaactgaggcacagaaaggcaaagtcctatactcaccgtctctcagctggtgtgaggctgggccaggatggaaccccagactctccgaggctccccaccacaccctgctgctgaaggctgctcagcgaggctgtgccgagtgctgggggggtgtgggtgggcaggggacggattgattagttataagcacctcccagcggtgcttgagatcccagctcctctgtggcccaatccgtttgaagggcagattcaaaattaggtggtagcacctatgggcagaggcttatgaaaatggcattattaacctgatgtggagagggccctgcctgtctgcaagtagattgcagatagagacggagggggctgggcttgtttgtgtggacagtgagttagagaggacagagaacatccaggggccctccagggcttccggacggggagaaccagatctggaggggctggacaagtgggagggggaagaggggtacgtcttaagggtgccccggcacctcagggaaatgccccaggctggacttggaggaggatctccagccttgactctgacacagacagggactatggccctccccgcacctcggtttcccatctgtgagataagagatggaaaccaaacgtcatttcgagaaaagcccccattcccaccaccctcctggccccccccttcccccaccaccccaatcacgtttgccagacacctgtctgcttgtcagagcaatattcaacaggagagttccttcgcttcctccctggagggagaagggagaggtgtggacggggagaggggaggggagaggtgccccccactcagagaggccgctgagcagagttctgcatcgggtaggagttgggccaccgaagatttgtgccaactcacggtgcggtggaatcagacagtctgaattcttcagacaccagccaagagtctgtggcgcccccacgtgccacaagggggctgcctgggccacatttctgagcccgaaaagtgaggagggggacagtcaagagggaccggcgcttttgctctggcagcggcgcttttaactgcgacagatgcgtgcggtgcggcgggggagccggccgtgccggggctgggggctgctgggcgggggtggtcggggcggggggcgggggctgcaggttgcgcccctccctcacagacggctgcgctgcaatgcagcaggctgcgggagctgtcccgggagctgtcctgtccggtggccggctttccaaagtggggaacgagagatgagggagggagcacttccaggcgctgcgtggtggccaggcgcccaggaagccgaggggcccgagactctgcagcggggccagaaagagaagagtgggggaggaggccgggagtggtgcatggaccagggggtagagggaggtgggtgtggacctggggtcgggcgccagtcagcttgcagcctatgaaggacggaaaggagggctacagagataggggaagagtggggctgaggatagccagagcggcttggcacacagttttagggtaaaagcatcaactcttatctttccaaaagaaataaaaaagccaaaaaaaaaaaaaaaggcatttgaaagctagacagctgaatccttcccagcatgactgagccggtcactccagggtcttccttcaaagcgtgtctaatgggagacagcgttgtcccagtaaccaaattgggaccagagtcccagggaagggctcatcaggtggccgctctgccttgaagagtggtaccctcaggcccttttccagccaggggtcagggagagagctggagggctcggggaggcagggactgggagggagagtggggagaggagcgctgggggctgcaggagggtctctgggcagctggcgggtgtctcgttccgcaacactctgcaccctggtacatcgtcctccgtccactcaacgtggaatgattctcttccctctggatccagcccctctagttcccttttcactttgaggcatttgccccctgtgaatcagttccctgctactccagaaaatttctctcataccccaggcccctctgttcttttaaatggcacccttcacccccagcccttcatcttctgcactgtattttcacttgttgatttaaaaatccctttattatgggaaattgcaaacaacacaaaagtagagaaaatagtacgtatttttactgtttactcaattttcatcttgccattacccggacacggttgccgtcaaaccctggcccctcttgtttcatctaaaccctaaactgtccctctactcccactgcccaacccctacccctggactatttcgaagcaaatttcagacaccatcctgtttcctctgagcattttttagtttgtatctctaaataagaagcttttgtttcttaaaaataaaaccacaacaccattatcacaagttaaaaaattaatagcctttccttaatatcatccaccatctatgtagcattccaatattcttgattgactcataaatttcttttacagttggcttggtcaagtcagtgttcaaactatctcctgctctttcaaggggatctggggctctagaaggtaagtatggctacacatttaggggttgaatatctgcctggaccttaaatgagaaactcaacctcagcaaacctcagtgttctcactgaaaatggggcaagttctgggtctctccttgggtcattgagagggttagagcattaacccctgaagccccagccgcatgtctaatatgtcagagacactcagcaaacagtagctgcgagaatgattctttttcccagaaacgtttaaaggggatttgggcaggggcaggcaaaacatagctggctattgtccataaaacaaaaggctcctggcagtccaggtcccctgagtggttaaaacagcacatgcactacatcccaaaaagggcagcctacagtctgggggctgggttcgcctggacctcctggcttgccgtttagctgcctgacctcagctgttgtgacctgggaccaacaggggaccccggcaggtgcctatccactagatggcactctctactgtgagtccaggggggaccaccaccccaaactgctttggccactgcccagccctgggtgccaccggaagatgcacaccactaaaacatcgcagataatttctaaaaagcacttctcaacatgtcatgcaaaagatgcggtggtttatttccttgcataaatcccaaccagattgcagaagcagagggaatgaacatttaatgactttgctgaggccagacactggtatgtctacgctctctttaaatcctcatcccagcgacatctgatttcccttcattttacagattagaggacttggagaggttagtgacttgctcgaggtcggctaggaagcaagacccaggattccaactcaggtctgtgtgattcctctgcaaaatggagaggtggaaggatggatgtcaggtctgatggatggatggatgcctacatcaagatacatgcatagatggagagatggctggctacctcatgaatgctggtaagatggatgagtgaattgaagcacaggtggtggaaggagagaggaatgagagaggatagtcaatttcccaccaagatcaaaggcttacttgatctttgaagagaggttccctctgaatggagcttgctggtgaagctcctgccttctgttctgcttctgagcgcactgactggctcaggtggctctgggacaacaggtgggatgccagcttacagggaccaagtcccagctgtggtgctggagctgctcagtggcaactctccgtctctgctgctttcacgcagcactgacgaagagcaggcatccgcctttccactggctctcctggatgactaagccctaagccccaaccgcatactcagcccttcactggcacttggcataattttatctcctctaaatcatcacagccaccctccatgatagcaatttctattctcaattaagtgaaaaggaaaccgaagtttaggagtggtaagtgacttacccaaaatcgtataaggaggaaatgcagacccaggatttgaactcgagtcttctttccttccaaactcatcccctcaacctgtttatttccttttctctatgaccatgtctgaagaaatctgccttggggttgtctcatattggactcactctcttggtctgtcagtgagctgaacttctcatccaatcaaatccaagcttatttcccaagtaatatctctagtgtattctatttgtaatgatcacacaggcaagggccacacatatcactggcatcctacagtacaattaatcaagtcaaattagattcctggcatctcatattctgactgaatgctaatggtagtagatgtaaaaatgactccagtgcaaggcaaggagggaggggactggatgtagggctgaatggcgaatcagtaagccttgctgcagacctgggttaacattagcagataggttttgagaacctgctcatgggctaggccctacttcacacattctaggtgctaaggtttcaa

SEQ ID NO: 78008 - DNA, 4818 bp, Homo sapiens
cagcacatctgtaactggagcctaggtggcatgtggctgcacatcacatggggtgcctctggcggggtgcaatcggatgccctaacagccaggcgggaggagatgggtttagcattggtgctgacttgctgggctgtgttgaggataagctgtgatcccagcattgcctgacttcagattctgtgccagtcctgtaagaactgttgcccctgcatctcctccaagatggacagtctatttattcatccaggtccaatggtacatcctggggattccctctgcttctggggctgcctgtgtgggaggtcagaaaaaccttcgcacctcccccccagcccccgccacgtgatttattctcacactcacattgcgggctggcagtgggacattgctgccaaaacgaggcttccggaagaagtggtaaggccgactctggagcgacactgcccgggtttgcctcctggctcagcatttccttgctgtgtgaccacttataagtcacttaacttccctgagtctcagtttccttaggtataaaataggactagtaatgctttgctcaaatatcatcatctccgtgaggcctcctccctggtgtcactccctacccccttcctgctttattttcctccctagttcttaccaccatcttttatcccatgcattaggcttaccttttctgatgattttctgttcctatctccacccacagggatgttaattctcatggaaccgggatctgtccgttttgctcactactgtatccctggcacttagacccagcaacaatacaaagtgcatgctcagaaattttggggaaaaatttatgagatactattgaattgtatccaccccagaggagtgtcaatgtatgcaaagtaggcagtgtggtgcttggtacagagtatgcattcaataaatattggctaattatgattattatgtctaattcacaggactgttgtgagaatcaaacgagataatgtatgctgaggcatgctgtgaacactacgtgctgggtacaggaggtacaatattaatgatccctgctgcttggagggaacttgcacttaaaatgttatgcttttcattttcacaccacttaggagggaggaaaggctggtgggacgatcgccacctgaggctcagggaggggacaggccttctccaaggcctcacagtatgaagaaggcaggggcaggtccccacactggtggtcttcccacgactccctcatgacagtcccccaatggacagattgatgtgtaaatgacgttatacacctacaccataactctatataatatatagaattattttcaggtccctgagttgctctgaggccagttgtggcaggtggtacacacccaggacaagctggggggaggggtaagaaggaaactggctgtgtatctttggtaaggcccatagtgaagcctcttttggtttcttggaatcaagttgaacatcaagaatctcactgcatagacttccccaagggcagtcccacttcacaaaatgaattttcattttccaaagcacatcccttagttggatttctgtttttcagtgtatttgtttaagctctgatgccatgtccaaaaaagaacatgcccgaacaattccctgcccgagtcccaaacccttggcttgatctgagcattgaactaattcatttctttgatcaaactggggactgtttgagcagtgggctgggcgtcatgggacggggaaagggtggggtgtgcgcaggtgtgcaaggcgggctacttgagggatgggcgatagttcaggtcaccctccggttggacccacgagggcgctgcattcctcattctacaaaccgtacaagtcggggcacaagacagagaagccaggtcacgtctctgcagttacacagctcacgagtgcctgctggggtggaacctggtctgtctgtctgtctaacaccagagctcgggcgctgctgcagagggagccaagatttgggtgagggagggggctcagaggtgggatggagggtttttttgtatttttttttaacctggttgccattggcttgaaaataataacataactttgcttggggaccccccactgcaactatcttgctgatggggaaacaggcacagagacgttagtttgctttgctgatgtcacccagctcgtctggcattgaggctggatttgggaggtgggtactgaggtgtgagcatatgtgctgcaaccactgggcccactggctcgtggtgtgtgcgcaggtgcagatggctcagtgatctgggtttgagggcttttaccaatccccccagcagtgggtgtactctgaactcaagcttgtgtatttcacactctccctcgacccttctctttagccttcactgaaaactcctgcaagccactgacccatggaaaatatttaagaatacatatattacatatatgttgtaaatttatatatatatatatctggaaagggattgtatccaggagatttgggagtgattgtttaaggtagagggaggcaggggcatgagagggggagggatggaggtggggaccaccagtggtaattctcgtgggtggttttaacaatcaatacaagaagagagagacatgccagcagcaaggacgggagtgggttgtaaaccagggatggtgattaattcttcacaactgaggggcattaaaaaaagaaatcagagtggttcgtggctattaattttgttattaaaaataatcaaggaataaagaaataaggtaataaaggcctcgaatggaacaattctgagaatgtgttctgggcaaaggattatgactaatccaggtctggtaacctgatattaacaaacaaaaaaggcctcgtaggctattttctttttttaaccggctttatgttccatagaatgggcacactggggtttctctcccagagaaggtgagtgcagacaaataaaagccggctttgtgggtgttgattgaacagttaaaaatgaatgaatgcgtaaataaaaccagagacagccaagcatgtaccaatgatggcaatgtgttcctcactccccagctttataaatatataattgataaatcagtattgtatgtatttgtattgtatttaaattgtacagtgtgacattttgatatacatatatattgtgaaatgattaccataatcaagcgaattaacatacccatcacctcatgtagttccgtttttccatgtgtgcagtgagaatacttaaggtctactcttttagcaaatttcaagcatgaaatacattattgttaactatagtcaccgtactctgcattgggttaccagaacttactcctaactgcatcttactcctaagtttgcatcctctcactaagatctccagattcctctcactcctgacccctagtaactacctttctagtctctgcttctgtgaggttattccaaaacaaaagccaggttctaggctgttgaggctgagggtaggaagtgtatcaacaggtatacagaatagtcactggtcttgggctaaatggtgacttcaagtgtagtggctgcatagtcaaaaatgaattagatgagtacaaaagtgacgaaatgaaagaatgtcaagaatggaccacaaagacagtgttttatgacctaaagattaagatttatccatttgtgtacaattgtggactatataaaataaaacaagactttgacctcagtggataagaagtatttggatgtactaatcaatatttttggtctgggtcagtggtgggttcatctgtgtttgttgtatttaaaaaaataaatgaaaacattgaaaagggtgagtaggaatcaaatatgattgtcactccaagtctgcgtcatctgcatccgttaggaagaatatctgggttggttccttcttgggtaagatgcacagggacatatgtttgtgagagtcatgattcttgtttttgattagagtggtgaattaatacacactcatttgtaataatacaaattaataaatgaataattgcggagagctatgcttgggccagtggtgagactgtcatgaaccaaagattatgattaatactgtgcttctcacctgatggccattaaaaaaatctaggttttttcatcctttttaatatcagccttgtgttccacagaatggaggctccagagtgaaattaatgacactttgtcgatgaagatcttgattgtgacctctgtggaaaatgagccatgaaccaaccaatgtgagtaatgtttagtgttgttgttttgaagttgggtggttggttgatggttgtttattacattattaaacatgaatcaatacataaataaggtcaaagatgacgggcatgatgagaatgtcatgaaccaagggtgattaatttcatatagcgtaactgttaccaaattaaaaaacaatattactgggctgttctctgtagcaaatgagcaaagaaaaaaaggaacacacacacacacacacacgtatactacatatatatcacatgtatcatgtgttatgtttatacatgtatcctatatatatatcacatacgtaatatgtgttatgtttatttttcatatttgcaggctggggtgggtttatatatgtttatggggtaattaaacataaatggatgcatgtataaacaagatcaaagagagtcaagcatggactaatgaagacaatgtatcatgatctaagatttatgattgcacagctctgcaaattggagagacattgaaacacaaatatttatgctgtttcattcatttcagtagcattccactattaatttatgcactacactttt

SEQ ID NO: 78009 - DNA, 2327 bp, Homo sapiens
tgacacagtttgcagttatccacctcctccaagttcttaatatgttagatccagataactgccttgtacagccacctccaggatactgcctccctaaaaaacagctagatacactgaccccacagcctatgtggaccacacagatatagtggcttgctctaaatgcaccagtgagaactctctgcaggaaacctgcttgggaaatgccatagcctgcaatacaggctttccccttcccgctggccctgtgaggcatgcaggatctgtaagtaataaactgcttctgttgtttcatttcatgtgttttgttgagttgcttcctctgtgtctcacctgaccaacacacttgaattgaacttctttcctggtcagggatctcctagagaatggctatcttggcaggaatagactagatgtaggtcagacaagaaccacaggggtactgccagtgtaaatgagtttcctatgagagggacacctggtaatggataggatgcttaggcattagactgtctgctgggataaagacgtatcccataaaagatacgctgtaaacacccatgaccacctctcctgcatccccatcaggcagagctagaatttatattcactctcttgagacagacctcaagaccatgttagaagaaagtacaacactcatcatcctagaattatgattattccaattcagttcatccaaggtccctttaaaaatgcattggttaaagagtcagttaatattcttttttttggcatggtggcatgttggatgttgattttagtactaaaaataaataaataattacctaagtgtgtaaaataaacaaaaggccaaaacatggactggtgatgagaatggtccaagaatgaaagcattatagttaattaaattctgactgccacacaaataacctaccctgtttcacttcctttaccagctgttttgtatttcattttgtacatgaacatagtttatttacacgtttgcccataaatagaaatctgggctatttactctgaccaaggagcacacaaagagatgaaagatgacgtcagtgttctattagtggagtaacagattggatttatgattgctcattgcaacttctttagaaatgatcaaatcaaataaaagagtgtcagcataaaccaatgatgatgtttcatgaagcagagatcatgattaatccaattaggttcattagaaaaagttctagaatataacctaagagtattttctagtattgcccaatggaactttctttctttttttttttttttgccttgagacaggtctcactctgttgcccaggctagacctccctgtgctcaggtgatcctcccacctcagcctcctgagtagctaggactacaggtgtgcaccaccatacccagctaatttttgtattttttgtggagacagggtttctccatgttgcccaggctggtcttgaactcctaggctcaagcagttcaccggccttggctcccaaacagctggttacaggtgcaagccaccatacccgtccgcagtagaactttctgcagtgatggaaatgttctgtaatctgttctgtacagtatggtagctactagtccatgtgattattgagtccttgaaatgtggctggcgttcatgagtaactgaatttttaatattacttaatttttattaatttaaatttaaatagtcacatgtggctactggcccatgcaagtctgatatccagtggggcagtcaaattttaaagctactacattagtcagttgtgttaggtggttggttcatggcagttttttgaatattaaatatgaatacataaatacaaaagttaaataaaagcctaagcatggaccagtgatgaaagtgtgtcatgaaccaaatattatatccatacatttctcaacagatgaagtccattatgtaaaggtttctgtttctccagttatggttaaggatgaaaagattatctatctatctatctatctatctatctatctatctatctattcatctatctatctattatctatctatctatctatctatctatctttctatctatctacctacccacctatctattatatatctatctatctctataatatactactgtttttcttggttttgatggtagattcgtggtgttttacttgattatgttataaaaatcaataagtgaatacatttttaaaattcaaagaccttaaataaataggttatctgtcttctatatggtaaatattctatagacacgaaggtcacaagaaccactcccacttacaaaaagaataggaggcactgagcagtgccaccccacggc

SEQ ID NO: 78010 - DNA, 2574 bp, Homo sapiens
tatttaaaagaggacaaacatagatgaataaagttaatgtatcattaaaaatgttcatataaataaaaggggactagggttctgcacactgtggataaagaacatagagtcagttatttgtaataatattgtaggccattttgcattttccttgaagaaaataaaaatactaacaaattattccatgagtgaataaaaaataaacaaataaatggattcataaattaggatcaaacatggaccattggtgaaaatgtgttaagaaatggggacataaatttatccaattctaatcaaggaagacctataaaaaagatcaccttggttcttacctatgtgggtggggcttaagtgatagaatttggaacatgcctagttttttattattttttttagggcacaggtttgggagttttcactatattgcctaaattagtaatttaaaaagtcaataaataaaatcagggccattcttgggctaatgatgggaatttgacaaaaactggagttttttttttccataaatttggtacaacaggacttaggtcccttaaaaaaaatctaaatctgtgctgcttcttgaattttctaaaatctagtttttactccacattctgtatgccagatctgacttatttgttatccaatgatggagatcatggctgtcacttatgtggataagaagcagagaggcacgttaagtaacagagttcttgttcttgctttgaagggggctattcatgttgtccatggaattaattcaagggaatgaatggctaccacaaacataaatagaattaaaaaatgctgagagagtggatgtgaagtgttctcaccacaaaaatggcaactacgagaagtaatggttatatcaattagctagagttagtcatccgacaatgtatatataattcaaaacatcatgtcgtatgcgataaatacacataattttatctgtcaattaaaaataaaataataaaatcaaaaccaattaaacaatgccatgcatgggcaaatattgggaatatgtaatgaaccataggttaagatgaattcattttagtacagctgaagtcccttacaaagatgaatttattttggtacaactgaaatcccttacaaacataattggagggggttgtattcattttcacagttgcttaatattctactctattgtgcaccgtattttaagaagatttctctattgataaagatctaggctttttcattggtggggagggagcacctacaaatactgaacaaattgccagtgttccagttgtggaatgaggtgatagggtgttcattgtactgctattaagttatgagtaaattaagcgaaagacgattgagcaaagagcagtagcacacgggatggttaggaagcaaggttatcgattaattataggcacagtctgaggcccaattaaaaagagatctcgtctaccagctctgtgggaaacaagcctggaaatagcattctgcagcagtcagaggtcttgttcttgggtttttgtgattcatggatattaaattattttgtgggtgaaaccatgaatgaaataatatgcataatcaataaacagtgcataagtaaatacatgaggaaaaagtgagtgatgaatagttctgtggcatatgaatcattaattttgattaaaccctaaactctgaagtccattagaaagagaccttgctcttctctgtaagagagtggaattcagagtaaaagttcagtttcttgggctttagtgcttcctaggtagggatcataaatgaatcgatgaatgcattaacaaagaaatgtgtaagtgaagataaagactgtcatatgtggaccatttatgagagcatgtcatgaaacaagtatttctaggaatatatttgtagaatactgaatttcaatataacatataggcaaaagctgtcatttggagtacataggagctgcagacacgcagaagcacatggacagatgcatctaagtgtccatgttggcattctggattggtaagaggttgctagctgtcagcttattgagaaggaaaaatatttacacaaacaaaagattacatgactgtaatagaaaaggagcaaatatgtgccaatttgaggatgtgttacatgacaccagttatgatggatctaattgtatccactgaattttataaaaagcgacaaaaaatggcaagggatagagtcggttatttctatgggttgttttgttttgtgttcaagttcaagtgtagagtctgggatctctggtaattatatattgttttttaagttgaatgaatataattatatctcaagggccaactctggacagtgtggagcatgtgatgtggaataaagcttatgactaatcccgttctaccctactggtgtccttatagagaaagtaggatctaggcgcttctaacttgggttaacttgggttaagttcatagagagggatcatagaatatttcagttctgggctgctggtgggtttaccatattttattgagagagggccaaacacgaaccaatattcagaatgtgtcgtatgaccagggttataattaatcc

SEQ ID NO: 78011 - DNA, 1986 bp, Homo sapiens
ttgtccagataaatagagctccaggttgcccctgctttggataaagcacacattgaaatttccatggagtaattctttagaaaaacagatatgtaatttattccatgcataattgtatatatgagtaaataagtgaatcactagacatgtaaatcagaaagattttgcatcattaatgagaatatgccataaaacaaaggtttacatttatctaattttgcacaagtgagatccactaaaagtgatcacctatctggtaaatttatggatctggagtatgtagacagatatttatgatagatatggctcttattctcatgttgatattcattgtattatttaaaagcccaaactacacaagtcaataaataaggagtgccatttttgggcaatgatgagatgaccgaagtttatgattaatctaatactgccaaacaaatttccattaaaaagtctaactgtagggtctttctttctcttgaaagtatgtattttacttcaccaaatgagcacattatggtgaagaactgatttagtcattctctaatgctaaagatcttgccttttacttctgtgggtaaggagagaagagatttatgtaagtaacaattagtgtttactgttcttggattgggaggttggttcatgggtgttgcctgaatttattaaaataataactggatatattaataaataaaactaggtaacaccaatatgtaccagtgatgagaatatgttcagaattgggatttatgattaatctgatttggtactagtaaaattcaataaaaaagatacagggtatttcattcattttcagagatgattcagattgttttattattgcgttgtgattcagttaagtacctctccattgataaagatttaggctattaattccttgagggaggagcacataggaagatggacagtgttgtcagtgttctagttgtgcagtaagattatgattccttggtgattcattataccatatttggcacttgaaaaaggaccaaccgtggaccagtgagtagcatggagctgacatgaaagaaggaagttgattaatttataagtgccaaaagtgcatatatgtatatatatgtatacaaactcacacacacatatgttgcagaaagtgacttccatctattagctctttggtcaatggacatatatacaatcattagtattcacagatgttgttcttgagctttttgattcatgagaattgattatactattattattaatgaatcaatgaataaagaaataaacaatgcataaagtatgtcaagtatagccaatcattagtattctgagctgtaggaatcaaagattttgattagattctgtaactcagaggtttattagaaaaaagaaactagttatttcgtctgtgggaaaggggcttacagcaaaagttaggaatagccaaagatctgattctcagttcttcatgcctgtgaactgtatgagaagtgaaccaatgcaagaataaagatgtagaaattaatgatggctaattatgcaagtctttaatgaaacaagggttattactaattattgttattttctgaagcactgagtttcataacataaatagattaagtgtcccttactattttccacaaaagacatatctaatttcacgagagtccctgttgtaattttggattgatgttgggttgtcggttttatttagaaaagaaacaaatcatttacattaaaagtaattgttccaataattgcctaattgaaagaaggccaggtgtggactaatactgagaatatgaccataggtcttattaatccaattctgttcactgaacattatctaaaacaacaaaaatgatctagccatttgtatttttgggcagtgagcatacaaacagatattagtcagtgttcttgtccattgtcttggcttttattcattttgatgtattgtaaaaagtgaatgaataaatgagtttgcgtttcaat

SEQ ID NO: 78012 - DNA, 1582 bp, Homo sapiens
tactcaagcagtcctgaggaagagtctatttgtgaagaaactgtggcttcccgcaatcagcaccaactttccagccatgtaagtgaagcagacactctagcacagtcaagctttcagatgactgcaactcaacctgacatcttgcctgcaacttcacaagaaaccctaagctaaaactgcccccagtaagcctctcctggattcctgccacatagaaaccgtgagaaatgacaaatgtttattgttgttttaatccattaaattgttcagtaattcattacacagcaaaagataataatacaatagaatgaacaactgtgaaccaccatcttaactcacaatgaggacactgacactatcttccttttcctatctgcttctccctagaggagtgaatagccttgatctttaactttaaagaaatgtgtgtaaatcaaccacggcacaaaataaaatacaatattaaaaacctctgaaattaataaaagccctccatcatttgtaatggacctaagttgggctgaattaaactaatcataaaccttggttcacttccattattggttcttgtatggtatgctttttatatatgtatatatttagcggtttattcttctaacataatttagtgatgaacaagccacctaaacccaggacatgaactttaactattatctacaacagactctgagctccttaaccacagaggcaaaacaccaatgtctttattgttatcgaataattagctgtggcatgttcattgtgtgaaggaaaatacacattttagaaagaacgaaacagcaaagacttaacttcttttagaaattattttagattaatcataaaccttggttcctaacacattctcattattgactcaagaataaccataccttttatgtatgaatttacttactgtttaattcttaatataatgaacccttaaatccacccaatgcaagagtaataaatgtaaccactaacaactatctatctgtatactccctaaccacatcaacacccaaacctcattaatttttttaaggcaccatatttgagcatttctgagagtgtgccatgaagcaatgatccaagatctaccttaatttaagcatttactgactcacttgtgttctttcttttatttaattacccccaaaataatttgatcatttattcattttttctaaaaaaagaataaaaacaaacaataatcaagaagtgaaataccatttcatgcaactgttgacacgcactttgtccaaagtgggatccatgtagatttcttttatttttcatctgtaaaaatgggttaattgttatttttgtttgatgacactttggccaatcctccatactcttttaaataattgaaacgcaaactcatttattcattcactttttacaatacatcaaaatgaataaaagccaagacaatggacaagaacactgactaatatctgtttgtatgctcactgcccaaaaatacaaatggctagatcatttttgttgttttagataatgttcagtgaacagaattggattaataagacctatggtcatattctcagtattagtccac

SEQ ID NO: 78013 - DNA, 1716 bp, Homo sapiens
ataatggaagtgaaccaaggtttatgattagtttaattcagcccaacttaggtccattacaaatgatggagggcttttattaatttcagaggtttttaatattgtattttattttgtgccgtggttgatttacacacatttctttaaagttaaagatcaaggctattcactcctctagggagaagcagataggaaaaggaagatagtgtcagtgtcctcattgtgagttaagatggtggttcacagttgttcattctattgtattattatcttttgctgtgtaatgaattactgaacaatttaatggattaaaacaacaataaacatttgtcatttctcacggtttctatgtggcaggaatccaggagaggcttactgggggcagttttagcttagggtttcttgtgaagttgcaggcaagatgtcaggttgagttgcagtcatctgaaagcttgactgtgctagagtgtctgcttcacttacatggctggaaagttggtgctgattgcgggaagccacagtttcttcacaaatagactcttcctcaggactgcttgagtatccttacaacatggcagttgatgtcccctagagcagtcaatctaagacagagaaaggtggaaccctcaatgtattttataatctagctccagaagtcatacaccatcatttccacagtattctgttggtaatacaggcggtcatgatttaatatgtaaagaagctacacaaggctatgcataacaggagcatgggccttgggagccatttggaggctggctacctcatgtactatctttaaaatatggacaaattaaataaaagaaagtctggatgaaatattaatgtgagattggtatgaagcaaggaagtgtagttaattatttgtataatgcttggatccattctgaaaaaatgcagtatcacttctatggaaaataagcttatagatctcagtaatattcaaggatcttgttcttagttttttttgatttgtgtctattggctttgttgttagtgattcaatgagtgaaacaataaacaaaggtatgaatgaatgaataaaaaagaaatgctaggcctagaccaatgatgagtattctggggtgtctgaatcaatgattttgattaaaccctgtaactctgaggtccattataagaggagacctagttaatacctatatggtaaatgatattatagtggaagttagaattatttgggattttgttcttaggtggttgaagttcataggtgtggattgtattactagaaaagatttagtaaatgaaaaatgaaacaaatatgtaaataaaggaagacaagtagagccatatgttgcctaattatgagaatgtataatgtatttattattattaacacacttctgaagcactcagtttcaacataaattgattaaatctgatacctatttgggtaaggaatatacatacagagacaagtacctagaaatcagtattgtttgtcctgcattatttagatgttgctgtttcttaatgaacacaagaaaatatgatctagtctgggaatcatgagcaaatgacaggtgttaacgccattcatatttctgatgcaatctgtatgttcacagatattgatgatgtcatgagtgaatgtatacacaggagtgaatgtattcagttatttgaggaaggtaaagcagtgtttcttgactttggctctattgacattttggg

SEQ ID NO: 78014 - DNA, 1992 bp, Homo sapiens
ataggaattgaattgaacctgtaaatgggtttaggtagcatagacactttaacaattttagttctttcaacccatgaacacagggtatatttccatttatttgtgttttcttcaatttctttcactagtgttttatagttttcagcatacaggtctttcaccatctaggttaaatttagacaatatttttggtgctattgtaaatgggcttattttcttcatttcaagttaattacctattaggatatagagtcactactgaattttttttgatgattttctatccagcaattttactgaagtcatttatcagttctaacagttttttttttttgtgtgaggtagtttggattttctgtatataaaatcgtgtcatcagcaaatagagacaatctcacctcttcttttttctataaagatgccttttatttcttcttgttcttctaggataagtctacttttcttccacgtaacaaccacaggatagatgacattcattttctaagaaacaaaatcttggcagttagatccgtggggtaaagaatatagatactaatgtaagttaacacctcaagttcatgtccttggtttggatgctttgttcaggagtgtttagtggtatttcaaaggaatcaatatctataacaaattaaaataaccaggaatggaccagtgatggaaatgtgttccgaaaatatgtttaatataatttggcacaactgaagtgataaaaatatagtagttagaccatttatattcacaattatttaacattgtatcttattttctacctcaaatgatttaatcttttccatattggtatggtcctggccgataactctttgtgtggcagcctgagagaatatggaagacactgtcagtgttggaagatggtggttttatcacttttcattgcactgtctttaaaacatgggcaaattgactaaaagaagactacagaagaaataatggtgattgtgaatttggtatgaagcatggatgttaattaatcacacatgttctctgaggtccattgtaaaaggagacctagtcttcagggagagagccactaatggggagatcttattcctagaattttgtggttatattattattcatgaaccaatgaataataaatgaatgatataaaggaagaaaaacgtgcttggaccaatgatgagtaccatggggtatctgaaacaggatttttgattaaacccatatgcaattctgaggtccattacaaagagacacgtattattccttttttgggaagtgagcctatggtaccttttccttggactttgtggttcttggggatggattgcatttttgttataaaatcagcccatgaattaaaaatttatcaatgagtaaaacataaagcataagtcatgtacttattatcagtgactgtaatgaaacatggattattattaaaacttatctgagactcccaataaattaatacccaaggcttctaccattctggtaaggagcatatggtcatttgtatgcaagagtcagtttttgttctgtgttggtggtgggttgctgactattttatgaagaaaatgaagcatctttaatcatataaatagttggttaaataaccacttaattgagaccaagcagagaccaatgatgagtgtattaatctattttttaatggatttttattaaacaaataataaaagaaacacagtctattcttcctgagggcaataactctagacagatgtaaatattcttcagtgttcttgtccagtgctgtgagatcacagatactgatgtcttttgtatatgagaaggaacttgcatttttatgtctcagtttatattttagagtcagcaaaccatggaccaattaggaacaaatgttatgatatgagaatgctgattcttgtttttttttttcatgatagacattctaagaaaaactctaggctctctcattgtttttggaatacatacatggttctttccaagtag

SEQ ID NO: 78015 - DNA, 3605 bp, Homo sapiens
tcatataattattattcctgaaaccatgaatgactgagtcagttcaacaaggtataaatgaatgaagaaatagaatgcctagcctggatcaatgatgagtattggtggaggtgtctgaatcaacacttttgattaagccctctgtgtaactctgagatctgttattgaatgagaaccagcctatattctctgtagaaattacctaatagaagttaggaaaattcaataaaacttgttcctgaacttttgtagttcaaagatatggaatgtattattttaagtgaattcaatgcgtaaatagagaaatgtgtatacatgagagaagattaacagtcctacttatggaactattctttgagtacaatgaaaaagtattataaatattaacactggcaataaaacaagtataattattaatctgaggtaaaatcctattatacagaacatattgtatctgcagttgagacaatttttttggttttatagtttgctttttttttaattaagaaaagggaaagtgtttgcatcagccagaaatccattaagtaatatctacttaacagatttttatatagacaaatattcataatcattacagatcttattcttgggctaggtgacgcattagtgtctattatactatttaaaactaaaagttcaatactggcctgaaaaaattgcatttttgagccaaggtttattgttatctagttctgcttgactaacatccattgagaaaaccgtatatctattctaaatctgcctttttccctccagagtggacataggccagctgatttaataatttaagaaagaactgttatcctgagtaaggagcatagagacaaatataagtaagttccttatttcaagttctttctttgaatggtttgtttttgggtgttagctaaaggatttcaaaggaatcaatgtctacatacgtgaaataaataacacaccccaaatgcaccaatgatgggaatgtgtaatgaaccatgaattatgtttaatctaaatcgtcacaactgagttgattataaaagaagacaaaagttaacttattctcagagcagctcaacattattctttatttcatgccatggttattttacacgttcccttatgggtagagatcctggctgacatccgttttggggcagcgcatgagaatatggaaataggtgatttcgttgttttttatcaggccatcgttgacatatgtatgaattaaatagaagtgggctatatcagaacgaatgctgaatgtgaactgagagcatgcaggggcattgaccaattcacatgtgcacctttacgtgtcatggcctaagaaatgtagtctagctctatgggccaagagcctaaaatttaatgatcttgttttggggatttttgattgtatcgttatttgtgagtcaataggtcaatcaatagatgaaaaaaatgcacatcatggaccagtgatgaatatcatggggtttctgaaacaacatttttgattaaacccatctgcaactctgaggtccattacaaagagacacctctttattcttcatggaaaatgagtctaggaccttgttcatgggccttttgtggtttgagggtatgaattaattattataataaacttagtccatgaatatagaattttatcaatgaatgaagaataagaaaggtatgcatgcacttacctactaaggcatgtaatgcaacatggattattattgaaacaattttgaggttcttagtcccaataaattagtggctaaggctctattcattttggtaaggagcatatggtcatctgtgcacaagactgaatgtttttgttctgtgttgaggcaggttactggttgatcattttattaaggaaaaagaaatacatttacataaataaatagttgactgagtaactgtaattgagagagggagagcatggaatgatgatgagatctatatacaacgacactcatgattaattcagtcttttatggaattttacttaagcaaacagacaagtttggtactagattcacagcgtttattatattatctaaaacaaaaaatttcatggtgagagatatttcatcttgacaaaaacaatttatgtaagttaataaatagaagtgttctctcttctcaagtgttcagaatagggtacaaaacaaggtttatgattgtttactacagagctatgattcattttaaagagctaaacatatagtatttgattctttttaaaatttgcgttttatgctgcagaatgaacgcactctacctgatttaattatagtcttctggtgaagatcttgctgttatctctgtgaatcaggagagaagagattgatgtaagtaaaaatcaaactttgtgttctcgcttgggaaacttgatcaagtttattcattgaattatttcaaaggaataaaaggctacatacataaatgagtcaaaggtggttatgcatggaacaatggtagaaatgtgttatgaattaagaattatgattaatccatttcagcacaacgaaattcattaggacaaaaagttgaaaggtatttctgtcattttcagaatgccttaatatgctgtttttgtaccatagtggatttaaatacttccccattgtgattgttattgacagttaactaattgagggaagaacataagaaaatggaaaaccttgcctatagctgtggtataacttggtggttataccatgatataaccatagtaacgtcttaaaaatacggatgttaaatgaaaaaagcccaaccatggactaatggaatatatggaattgacgtggtgcaatttgtggaatgaattaattcacctttgcaatactgaggctcattacagagagagccagtcctctagttctgtggaatatgaatcttacagacatagttacttcttcaaggatctttttgccctctaattcatggatagtgattttactattagtgaatcaatgcctaaatcaagaacagtataattgaattaaagcacagaataccaagtctggatcaatgatgagtatgcgtggggcatctgaatcaaatattctgattataccctgtctgtatctctgaggtccattgcatctatgggaaatgtgcttggagagaaagttagacatattcaaggaatatgtttttggtcctttttggttaatgggtatagattgtattataagtaaatcaatgaatgaataaagaaaaatacaaataaagacaaggaaggcttcatttcattcaattatgaaaggagctaatgatgttttgagtttatataagtctgctcctccttcgagagcatatagatagatatgcactcagtgttccgagttagtggcaagtttctggttgcgtgtcttgtttgatttagaaagggataaaacatatacttaaatgatgtatttagtttaataatacttaatataataaatattagccaataaaattaacattcatattcaataataacaatattgcaaatcatgctaaacacattaacataatttttataataaacaacaatttaatacaattaataataaacactaaaatactaatgattaggttgtgaaatgtggagaaagtct

SEQ ID NO: 78016 - DNA, 2473 bp, Homo sapiens
gtgagaaatgaaaatgaaagttagtctttttctaaactactgatgctgtcttcctggttaggtgtgggaatatagacattgaacatgaaaagcatttctgttgtgggttcttcatgagtttactgctctgtgtgtgtgtgtgtgtgtgtgtgtgtgtgtgttagtatttgtgaatgtataatgaaatattccatgcgtcataacataaacaaatcaaaacaataaatgaattcatatataagtagggtaaagcatttaccattggtgataatatgccatgaatcatgaatttaaattcatccatttctacacatgttgagtccattaaataaaaaagatgatctaaagcggttgcctgtgtaggtgtctatagacagatgtgtgccatagtcatagtttttgttttgggtgatgaatttaacagtgtttattgtattatttaaagttaatagttaaatcaggaaataaaaataagtgcagttcttgggtcagtgataaaaatgggatttgaatcaactttatgattaatttaatatcacacaactaatgtcttttaagtcaatctaaatctgtactgttcattcttttgaaaatttgtattcaactccacagaatgaagaccatggttgatttaatcagtctctgctgatgaagatcttggctgttacctttgtgtgtaaggaagctaaagacttaagtaaataacagtccaaaaacttgtcaattagggtaaatttttcattaatgttcactgaattatttaaagttaaggcatatgtagatcaatgagatgaatgtgttatgaaacttagattgtggttagtccaattaagcacaattttggttaaaaataagatgaaagacattttattcatttttttatctgattaataattcatcttattttgtactgcatttaatttaagatttattcactaataaaatctatggctgcactgttcaatgtcgtttcctctatccacatgtggctatttatatttaaaataattaaaggtacatgcacttttaaatgtaatttcttggttgcattagccacatttctagtgctcagcagctgtatgttgctattggtgactgtaatggagaacgcagttacagtacgtttacattatatgcaaagtcctgttagacagctctttaatgagggaggaatgcatggaaaggtggaagataagtggaatgagatggctaggaagcaaggatgttcattgatctatacttgcttcactgtgggccactacaaaaggagatctagtctattgagaatagggctagtctatgcgaaaagagcctgtaaacagatcttggttatattcaaggatactgtttgtggatgctaaaataacaatgggtattgattttattactgctactgaatcaatgaatggatcaataaacaaaggtataaatgaaggaaaagattgcttatcctggatcaatgatgagtaccctggggtgtctgaatcttggattttgattaaaccctataactctgaggtccattacaaaaagagtacttttcattatgtctatgggaaatgagcttattccagaagctaacaataatcaggatttagtttttgggcttctgagtatggactgtattatttttagtaaagaagtatatggataaatcaagaaaagtacggtataaataacagaatggttattcctgctccaaatatgagagtacataaaataataggaatcattactaatacgtttctgaagcactaagtcccagtaaaataaattaatcaaagctgaccctttgggtaaggagcagttagataaatggatgttagagtccatgttgttgttctgcttgagggtgttcatttttttttttttaaagaaaagggcaaaatgtttactttaattattgcttaaattactacctaattgagagagagtttacacatggatctatcttgagaatatgtcaaatgaccagttataatgaattctaataatcttcactatttaaattcagttcctcagtttaatttacgaaagcaaggaaaatgatctgaattttctgtctaatgagcatgggatgggcattgatattgtccagtttctgtgaagtcacagacataatgattttattataaatgtaaaaaggaacaaattaatgtctcaatcagttattcaaaataaggccaaatcatggaccaatgagggccaggtattatggaacaaaaagagtgattaatccagttccatacaacagctctccagtattgtcattatttccataaacaaaattgaggtaggctcttgcatttttggaatggtgaatatgtttatatatttggatagtatttccctttcagtctcattggtgcaatttccttaaaacacggaatagacatgcctccatgtgtaactatttaactttatatgtatgtgtgtatgcacgcatacacaattgttgagaatgtactcgaat

SEQ ID NO: 78017 - DNA, 1566 bp, Homo sapiens
tattcatagctatttattttatgattacagcactattaatgaattgattaatcaaaaaacgaatgtagatagacatgaatgaagaaagatagagtcaatcttggacctatgatgatgactggtggcgtatgagtcattgacggtgaatacaggtctggaagtctgaggtccaatataataaaaaatctagtcttcaccttctatcctagggatagacattaggaatatttgaggatgttgttcttggtcttcacgttcatgcattttccctctatttttataattggatcaatgaatcaataagcaaatatattttaactgcataaagataaaaataggcgttgtccaattatggaaatatatggtgaaataagaaatactattcacatttattaaaaacactgaggtcttctttctattaacaaataaatgactcagaggtattactcgcttgctgcaggatggcatatacagtaaaaataataataacgtatgtgaggtcatttgggtcaggaccatgttcatggttgtttgttttctcaagaaaaaatagtttcacacatacttacatgactaatagaatgaaaggagaaatgtgtggataaatggacagaatatttccatctttttatcttttttgctttgtactctcacaatgaacaccctcaagttgacttaagcacccttccatggtcatgaggtttctggttgcctctgtgtgttagaagcttggagaccaatgtgagtatagtcaaagttcttgtcttggttctgggtttttaaggggtagtcattgttttattaagaacattacagataatccaaaaggttaaccatggtccaggggtaattatggcattgccatgaaacattatgttgattatctaatatttataaaattaaaaatgattaatgataaaatcactgtgagagatgatcctatagagagctatacagtatttcttgttcttaagtttttgtaacattatttaattactattagtgaaaggatgaattaataaataaacaaatgtagaagtaatggagaagaggagggccagtcttcagtcaatgatgactctgcctctgttgaaaataccataccctatagacagatttaagaatacacaaggctcatgttcttggtttttgcattaatggattttgattctattattataaatagatcaatgaaagaatcaataaagcaatagaaacacacatgagtaatgaaatcatcgtacaattatgaaactatgtagggaaacgagaagccatttatatatatatggaaaaagtctgttaagaaataaatgtttcaaatgtgttacctctagctaaggatgatatagaggatataaataatatagatagataaaataattaataaacaaatataaataaatctgaataagtgaagtactgtccaattacaaaaattgtatgagtagataaaagaaactattcatatatattgaaaacaatagagtctattatgaaatagtcaatatacaaagaaacgctcttgatttgtgtcagtgtcaagatcaatgttgtttgttttct

SEQ ID NO: 78018 - DNA, 1090 bp, Homo sapiens
tggacgatgaatactacgtgtctgaaactctgaggtccaacagaaaacataattggatagatatcagaaatgtgcaaagatcatattcttactttggattaatagattgaggttcatcatcaatagataaatgatagaacaattaaacaagaataaataaaggtgaatcattgttcaattatgaatatacatgatgatgtaagaaatattatcactaaaaattttaaacacagatgccccttaaagaaatggatcatgagtcccgccactgcactccagcctgggcgacagagcgagactccgtctcaaaaaaaaaaaaaaaaaaaaaaaaaaaaaagaaatggatcatgagtatcagctctttggctaaggttcatctagactcttaataagtaagagtcagtttcattttctggttaagtctcatttgacattgttccttttgttatgagagaaaacatttccattctgaaaaattaatcaatataaaaataactgaataacagaaatatggaaaggatcaatggagataaggtttgaattttttctaaaagagttacctgctctttgtattctgcagaatggatgcacttgagccgacctaagcattcatggtcatgagatttgtggttgccactgttggttaggagcatagagatcagtgtgagtaataaagttcatgtctttctctaagagactttttaaagggtattcataatatcatgaatgtgtgaaaaattatccaaaaggccaacctcagccaatgataaatatgagattggttgaaacagtatatttgctagctcatttatgacacattgaggataattcatgaaagatatatcaaagtggcagattatatagaaagttgtggaatattctatgctcttactgtttggatattatatttacatgggttataatattaatattcatgaattaatgcataaataacatgtaaatgagaattaagctaaacagtcctaagcctgagccagtgatgaaaactggtggcatagaagtcaaggatgctgaataatgtgtgtctagaactctgaggttcaatagaggaggaaatatagtctattgc

SEQ ID NO: 78019 - DNA, 1283 bp, Homo sapiens
aaatattgtgtagattaatagatattttaaacaatgaacatgatgaatgaaggaagtattaatatactaattgaagcaaatgattatgtagacagatactaggaatacttaaggatcttgtccttaaaacttggtgatccagaggtatttatgttattgttagtgaactaatgaatcattaggaaacagcttacaaataaaaggagaaaaagagggccaattctggctggattgatgatgaccactggtggcctatgagtcatacaatgaatacgtgtctagaactctgaggtccatcacaagcagtatctagcctagtccctctgtctgaaaaactcctgtagacagatgtcagggaaatacaagaaccttgttctttttctttatgtttatgaattttaaaaatattatattattaaaatagcaacgaagaataaacaaacatgtataaatgaatatagatgaggatgaagtattgtttattgttgaaatgtgtagtaaagagaaacaatactaatataaattgaaatggttggataattaatggaccaagtgtaatacatctttgactaaggatcatatagatagcagtaagtaatggttagttgcaagtttcacatttgttgtattaagaaaaaattaataaatactcaaatgactatgtaaatgaatggtgaaaaatatagattaatgtaaagaatattcaattttttaatcatcttctctgctttgcacttttcaggatggatgcaatgagctgatcattttgctgtgatcaaggctatgttgcctctgtgttaggccaatgtgagtaatggttcttgtcttggtttaggttgtttaatggtattcctgatattattaaaaattatttaatataataaaaagttaattggcttaatgacaatgtgcaacattgaggttaattaatgaaagagatgtagtctctgtgggaaattattgtatagacaaatgtaaggattcttcaaatatcttgttcttgggttttcaaaatcatgtattcattttattatcaaagaagaaatgatttattcaataaatatttagaaatgaatgatgaaagagagacccaactatgaatcaatggtgaccactggtggcatataagtcatggatgatgaatatgagaagaaaagaatctaggtttttgcttctgttggaaatgatcctgtagacaatgtcagaaacatacaaagatcattttcttatcttggggtcatagatttaggtttattattactaatatatgaatgatagaacca

SEQ ID NO: 78020 - DNA, 1905 bp, Homo sapiens
tggttgagtcgtgtttatgtagaaagaatatacaaattatgtgaaaaaaggctaaggaaggaccaacgatgcgagtggaatacattctgaaatgtgttttatgatcaaaatatctgtgacctactgcggtccactacaaagagggatttaagtgtttatatctgtaggaatgcctacagatagatttcagtgatattcaggaatcaggttctcagtctttggtgcttcatggattttgattttgttgttattcaataagtgaaagaataaataaatatgtcagtgtataaaaatgaatagaatgaagttatctaactatgaaagtatggggtgaggcaagaattattattaatataacatagaaccactggagttcagtaagtaatgctatctttaccccaaaatgtaaccccttaatgcatcaaaggggttacattttggggtaaggataagtaagcaagattgtgatgtatgttcttgctttgagtcagtgatgagttcaagtggccacttactgcagagggaaaaaaataaattatgccataaaataataaatacctaaatgactgagcaaaggaaatggggaaggcatgtatcagtggaaagaatatctcagctttctgttatttgctgtgcttatattcctcagaatgaaagctcctaggtgatttaagcattctactgtggccatgaactcttatgtgttaggagcatagaaaccaatgtaagagtcaaagcacgtgtcttagtatgagtggcttgtttaaaaatattcactgtactgtttacaaaatgtttagtcaaagaagttgactatggtgtactatggcattgatatgaaatgtatgttaattagtggatatatacaacacaaattaattaatgaaggttatatttgctgagtgaatttactctgtagacagttatggatacttaagaatactgttctgtggaatttgtggttcatgtacatttattttattgtaattaatctattgaagaactaataaatcaacaaatatagaaatggatgaggaaaaagatgtcaaatcctgaactagtggtgatggcttgtggcatatttagtcacagatgatgaataaatacatgcctgagactctgaggttagtacctagacagagatctagtctgttatttttgatggatgtagtcctgtaggatgattagttatacacaaaggtgatgttcttggacttttgtagttcatgagttttgattgtattgttacaaagcaatcaatgacaaaatatatacaattgcatgaagatgaagagggtgaaacattgtccaattatgaaatgtgaggtgaggcctgaaatactattaatataatttgaaagtcctaaggtccataagtaaataagtggatcaagggtgtcacctctttggtacagtatcatatagaccaggggtccctaacctcagggctgcggaccagtatcagtgcctggtgtgttaggaaccaggccacacagcaggaagtgagtagcaggggagcaagcattaccacctgagctccgcctcttgtcagatcagtagtggcattagattctcataggagcagaacctgttgtgaatggtgcatgccagggatcaaggtcacatgctacttatgagaatctaatgcctgatgatctgaggtagaacagtgatctggaaaccacccctccctgccctggtccgtgggaagattctcttctacaaaacccatcctgggtgccaaaaatgttggggaccattggtatagacagtgataagtaacagtcagtgttattgttctgcatcaatggcaagtaccatcctgtcctatttttagaagagacaaataataacatcaattagtaaacatttacgtgaataaataaatgaaagttggaaagccat

SEQ ID NO: 78021 - DNA, 1027 bp, Homo sapiens
tatgattaatgaaatgaaatttccttaacagaaaatgaaattaatatgaagtccaaataacgattgcataaatgactaattatgggtgaaaagcaagaaacaatggtgacaatgtctcaaatttgttttcatcttctcttctctgtactcatcagaatggatgtccttgttctgatttgaggatgcctccaaggtcacatactctgtttgcaccacgcttaggaaggagcgtgaagaccaaggggagtaatagtcaaagtccttacctttgtttgggtggtttgtttaagagtaatcaacgtattatttaaaagtgtgaaatacagtcaaagatggccaatgttattccagtgatatgggagtgacatgaagtattatattgatgatgcatatataaaaaacaggatagttaatgaaacacccaatgtttgagtgattctgtatactgatagggaatatcaagagtgttactgggttttgtgaatcacgggccttgaaagtattattaatgaataaatgacataatcaatagacaaggtagaaatgaatagcaaaaaaaaagaagatcaatgatgactactgttagtgtatgagttacacatgatgaatacatgtctgaaactctgaggtccatcacaaaagaaatctggcccattccttctgattcaggtgatcctatgaatatacaatgtgtttgcttttggtctttgggtttgttcacttcactgtattattataattggatcaatgaaataatttatacgtatacatgtacgtatatgaaggggatgaagtattgtccaattataaaataagtggtgaggcaagatgtattattattattatattaaagcattatattaaagctttaatatattaaataaaaatctaatattaatatataattaatgcaatatttaatatatattaaatatgataacatattaaaatattatattaaagcattgaagtcctaagggaaataaatggtaccccactgtaacgtctttgactaaggatgatacag

SEQ ID NO: 78022 - DNA, 1024 bp, Homo sapiens
gcacagtgaatatcatgtgtctggaactctgaggtccaatacaatgggatctggtccattcccccttataaatagatgtcaggatacaggatatagaaggatcttcttcatgatcttcgtgctcatgaatttaaaaaaatattattgtaaaagaatcaagggcaggatgaataaatcagtgtataaatgaagaagataaggaggtgaagcattgtttattactaaaatacgtgttaagaaaaatggattttaatttaaattggaatggataatataggcatggatgaaaggtgttatgtcttggaccaaaaataacatagattgtgataggttatagttattactgtcagttagttgcaaccttgaagtctattttattaataaatattaccattaattaataaaagccaaagtgacaatgtaaatgaatggtgaaatgtatggattgatgcaaagaatgtctcaatatttttatcatcttctccactttgcactcttcagaatggatgcactgagctgattatgaatttagccctgatgaagacttgtgttgctgtcatgatatgaaagattccagtgtgagtaacagccaagttcttgtgttgtttgggtggtttgtttaaggatatttactatgttactgaaaataaaaaaagtcaaataatgtgtatgtatatataacgaatattggtgatagaattgaattatgtgaaccataaaatttttataattattatacatgaattactgaatttatcaacaaataatgtcgaattgcatgaagagaaagtgggcccttcctggaccaatgatgacaaataccggcgtatgagtcttggatgatgaataatacgtgtctggaactctgaggtccatcagaaaagaaaaccagttctttctgctcatgtattttcattctgttattataattggatcaataaaagaatgaatcaacaaatatataactaaataaagatgattcgtgtgaagcattgtccaattataaaaatagatggtgtggcaa

SEQ ID NO: 78023 - DNA, 1108 bp, Homo sapiens
gagtgttgggtgatgaataatacgtgtctagaactctgaggtccaacatacaaaacacctcaataagcaaggatcagtggaggaatatctagtttaaaaaaaatcatcttctcttttttgtactcctcagagtgataatctcgaggtgatttatgcattcttccatggccaccagccttatgattgcatctgtgcgtcacagcttagagatcaatgtgagtaatagtcaaagttcttggtgtggtttaggtggtttaaggtattcactgcatcactaaaaagtgtgaaatataatcacataaggcctgctgttacaaatgacaaatatgaagcatcatattgattaatacatgtgtgaaatgctgaggataattaaagcaggagatacatggagatgagatggtaatatgtacagattaataatatcaaggctgttcttggggttttgtgaatcatagggttttaatttattgttagtgaactaatgattaaatcaacagacaatatagaaatgaatggagaaaaggatgcccaatcctggatcgatgatgaccactggtggcgtatgagtcatacatgatgaatatgtgtctggaactctgaggtccttcacaaaagaaatcgagtctttctgttcatgcattcttatgttattattatgattgggtcaatgaaagaatgagtaaacaaatatataagtgaatcaaggtaaaatgggggaaacattgtctaattataaaaacttgttgtgaggcaaggaattttgttaatatatatagaaaacactaaaatgcaaagagaaataaatggtgcataatggtttattttggcaaaggatgatatggacagtattaattagataatgtttttgttctgggtcagtagcaagttcaaaattgttcattttaagagaaaaggaaataaatatactccaagtaatgattgcctgaattaatgattaaatggaagatgataagcaaggatcaatggaggattttctcattttttaagtcatctgttttgttctgtactcctcagaacagatgctttagaggtgattcaatctctcatccctgctcaccagcacgttggctgcatctcgtgttag

SEQ ID NO: 78024 - DNA, 1005 bp, Homo sapiens
tggtgcctatagttcattttatacatcatattcttgaaaaatgctagagagtagatgttaagtgttctcatcacaaaatgataactctgagatgtaatacatatatcagttagatagatttagttattccacaatgtatatatacttcagaacatcatgttgtgcatgataaatacaagcaattttatctgtcaatcaaaaaattttaaagtattaaattaatacacagttaaccactgctcaataatgagtatgactgaaacagtatgttgtttaatttctcatgtgcaacattgaggtcaataaatgaaagagatctagtctatgttgaaggtgactctgtagatgttatagatattcaaagaccttgttggttttgtctgaaccatgtatttgtttttattaatgtcaataatatgatcatttaattgataaaaatgtaggaacccatgaaggagaggagacccaatcatggaccaatgatgacaaatggtggcattggagttatggacgatgaatgatatgtgtctgaaactctgaggtccaacacagcacataattagtgtattctctctgttgaaattgacttacagagaaatgtcaggaatatatagataatatctatgtattgattccatagattgatatttattattaccattggatcaatgatagatccattaaactaatataaattaatgtataaagaacaagagggtcaagcattgtccaatatgaacatatgtgtggagtcaagaaatattactaatcaaaatttaaagcactgacattcatttacaaataaatggataaaagatattaccacttttagtaagaataatatagaaattgataagtaagagttgattttattgttctgggttagtctcatgatagaagtgttcctttgcgtaagataaatacacacacacacacacacacacacacacacacacacagtgaacaaataataaatacctaaatgacctagtaaatgaaatacag

SEQ ID NO: 78025 - DNA, 1109 bp, Homo sapiens
gaatgtttgccttaattactggctaaacggtagacacaaagcagggaaccattgccataaggtctcaaattttttatcaacagtcctactttgtacaccttagaatgggctcacctgagttgtctcaagcactccttcatgccctcaggctgtacagttgcatctgtgtgttaggagcttggaggccactgtaagtaatagtcaatgttcttggcttgagtgcttttttaaaggatagttactacagtattaaaaattatacaatatataaaagaaggccaactgcagcccagtgacaaacatgaaatccatatgaagtagtatattgattaattcattgaattaattcatttaagaaaactgaggatatttagtaaaggagttacattgacctgagaatgattctatacacatattagggacatcgaggcttttttcaggttttgtgcattatagcactttaaacatattattagtaaattgctgaattaatcaataaacaatgcagaaacaaatgaagaaaagatgggccatttctggaccaatgatgatgactggtggtgtatgagttaaaggtgatgaatagtaagtgtctttgttagtggcaagttcagagtcgtttgttttaagagaatatgaaataaatatattccaaataatgatgatttaagtgactaaatgaaaggtgaaaggcaaggatcattggaggaatgtctgaatttttaaatcatctgttctgtttatactcctcagaatggccccattccagctgatataagcactcttccatggcatgtgcactatggttggttctctgtgttaggagcacacaaaccattgcgagtatgcattcatttcctctctttacaaggtgcagtaagttggtgtcagtgatatacaagaatctttgtgttcatgcatttttttttttttttgagatggagtctctctctgttgctcaggctggagtgcagtggtgtgatcttggctcactgcaacctctgcctcccaggcatcatcattggtccagaaatggcctatcttttcttcattcgtttctacattgtttattgattaattcagcaatttactaataatatgtttaaagt

SEQ ID NO: 78026 - DNA, 2585 bp, Homo sapiens
catagactgggtttgtttttggtctttgtgctcatacattttcattctatttttattattgggttaatgtgagaatcaataaacaaatataaaaataaagatatattggttgaagtgttgctcaattataaaaataggtggtgagacaagaaatactattaatatgtattggaaatagtgaagttcaaggaggaataaatggtacgtgtctgtcacctctttggctaatgatgatatagagaggataattatagacagtgtttttattctgggtcagtggcaaattcagaattgttcatctttttaagacaaagtgaaataaatatactgtactctaaataatggtagcctaaatgactaaagaaatgtgaaaagcaaggatcaatggtgataatatgtcaaatttgttatcatcttctttgcgctgtactcctcagaacggacatccttgttctgtcttgagaattcctctagggtcacatgctctgtttgcaccgtgcttaggaaggagcgtgcagaccaatgtgtaatggtcaaagtccttattgtggtttgtttaagagtaatcaatgtattattaaaaagtgtgaaatacagtcaaagatggtcaatgttatcccgatggtagacatggcagtgacatgaagtattaatataatactgaggataattaatgaaacagataatatcaatgttagaatgattctggatacagatcagaaatatcaaggctgttcttggagttttttgaatcataggctttgaaattattattagtgatttaatgaggcaaccaacagacaatgtaaaactgaatagaaaaaaggagggccattcctggatcaatgatgaccactggtggcgtatgagtcatatgtgatgaatacgtgtctggaactctgaggtccaccacaaaagatacctagtccattccctctgttttacatgaatctatagactgatgtcaggaatatagaatgaagttgttttggtttcattttcattctaatgcaagaatcaataaacatataaataaagataaaatgcgtgaacagtgtacaactataaaaatatgtgttgagcaagaaatactattaatgtatattgaaatcggtgaagtacaaagagatattgtacatacctgttacttctttggcttataataatgtagacagaataaattacagataatgttcaaattcttattcacttgcaagatcaaattgttctttttcttaggagaaaatgaaataaatattagtccacctaatgaatgcttaaaggacaggctaaaggcaaggtgaaaagcaaggatcattagtgagaatgtctcagttttgttaccgtctctgctttgtattcctcagaatagatggcttgtgctgatggaaggattcctccctggtgacatgctgtgtctgcctcttgattgggagcacgcagacctacgtgagtaatcaagttctggtcttagtttgggtggttgggttaggaggatttgatgtattattaaaaagtctgcactgtaatcaaaaatggccagctgcagcccagtgatagaaatgggagtgatatgaagcgttatattaacaatacatgtttgaaaaactgaggataattaatgaaacatttatcagtgtgagaatgattctatatgcagataaagaatattaatattaatgctgttctgaggcgtttgtgaaccaaaggttttcaaattactattagcaaattaatgaattaatcattagacaaggtaaaagtgcccagagaaaaataggacacattctggatcgatgatgactaccggtggcgtatgagtcatatgtgatgaatacgtgtttggaactctgaggtccatcacagataaaatctggcttattctctgtttcgaatggtgttacagacagatttaaaaaatatagaatgtttgttttttctgtgtgattatgaagttttcttctatttttataattggatcaatgtgagaatcaggaaacaaatatataataaatagaaaatgattgaaacactgcccaattataaaaatttgtggtaaggcaagaaatgctattaacacatattgaaatcgtgaaatctagaaagacataaatggcgtatgatatagatagtataaattatagacaatgttcatattctgagtcagtggtaattttgaagttgttcattttattaagagaaaataaataaaagaaatataatccaaataatgattgccaaaatgactaataacaggtgaaaatcaaggatcaatgttgagaatgtctcaattttgttatcttctctgctttctgtcctttcagaatgatgcactttttatgatttgagaattccttcatggtcacgtgctctgtttttatcatggttgggagcctgcagagcaatgtgagtagtaatcaacattcttatcttggcccgaatggtttgtttaagaggactcagggtattatcaaaaagcctataatataatcagaatggtcaactgtatctaagtgatagaaattggagtgatatgaagcattatattgataatgcatatatgaaaaattgagggtaatgaaaca

SEQ ID NO: 78027 - DNA, 3931 bp, Homo sapiens
tctgccttctgggttcaagtgattctcctgcccccgcctcccaagtagttgggattacaggcgcccttcaccacatctgccaattttttgtatttttagtagagacggggtttcaccatgttggccaggctggtctcgaactcctgacctcaagtgatccgcctacctcagccttccaaagtgttgggattacaagtgtgagccacagcatccggccagaagcactcttaatatcttttgacacagcgaagtccacagagatataaatggtgtcttctggtgacttctgtggctaatgatggtatagacagtacaaattatagacaacattcaatttctgggtcaacgacaatttcagaattatgcatttctttagataaaatgaatatactgcaaataatgattgtcaaaatgactaactaatgataggtgacaagaaagggtcagtagtgacaacatctcacttttgttatcctcttctctgctctgtattccctagaatgattgcactttgctgattgaaggattccttcaagtccatgtgctccacttgcaccatttttaggatggagcctggagacctatgtaagtaatagtggaagtcctcaccttgctttgggtggtttgttcaagagggttcaatgtgttacaaaaaggtgtatattataatcaaagatgagcagttgtatttaaataaacatgggcctgatgtgaggattatattgaagatatatacatgagaaactgaggataattaataaaataaatattcctatatgttaggaatatcatggctattcttgtggttttgtaaatcatagggcttaaagttatggttagtgaattaacagattagtcaatagacaaggaggaaacgaacccaaaaatagaagatcagtcctggatcgatgatgactactggtggcgtatgagtcttttgcgatgaatacgtgtctagaactctgaggtccgtcacaaacaaaatctagcctattctgtatgtttgaaattattttacagacaactgtcaggagtatagaatgtatatgtttttggtattcatgtttacatgttttgattctatttttataattgatccatatgagaattaataaacaaatacaaataaagatgaataaattcgagcattgtccaattatgaaactaagggacaagataagaaacacaattaatgtatatgaaacagcgacatccacagagaaataaacggtacattcctgtgtcttctttggctaatgatggtatagacagaataaagtataggtaatgttcaacttctgggtcagtgacagtttcaaaattattcattttattttcagaaaatgaattaaatatacttcaaataatgattgcatgaatgactaactgatagttgaaaagcaaatatcaatattgaaaatgtctcaattttgtcattatcttctctggtctgtattcctcagaatgaacaacttgtgctgtgttaaggattcctccatgatcacgcgccccatttgtacaccatgcttgggaaggtgcatgcagaccaatgttagtaatagtcaaaattcctgtgtcggtttgtgtggtttgctaaacaggactcaatgtatcatgaaacagtgtattatatagtcaactatggtcaactatgtcccagtgatatttatgagagggatctgaagtatttattgataatgcatatatgaaaaacggagaagaattaatgaaacagatatatctgtgttagaatgattctgtataaagatagggaatatcaagtctgttcttagtgttttgtgaatcacagagtgtaaaattattcccagtgaattaatgaataaatttaaagacaacatagaaatgaatgcagaaaaagagggtcaaccctggatcgatgatgagcactggtggagtatgagtcacatacgatgaatacgtgtctggaactctgaggtccatcgcagaagtcagtttcctctgtttcaactaactctgtagatagatgacaagaatagagaatgaattttttttgtttatgagtttttattttataattggttcaatgaaagaataaaacatatatgaataaataaataagttatgcattgtccaattataaaaatgtgtgatgaggtgtatttaatacgtatttaaattgatgaaagccaaaaataaatctaacatacctaacctttttggccaataatgaagagatagtataaattatatgctattttcgtgttcttggttagtggcaagttcaaagttgttcatacttcaaataacgattgcctaaatgtttaactacagataggtaaaaaggaaagatcaacaatgagaaaaatcacatttttgttattattttctctgctctgcactcatcagaatggacgtacttgtgatgatttaaagatgcctccaaggtcacgtgctctgtttgcaccatgcttaggaaggagcgtacagaccaaagtaagtaatggtcaaagctcttgtcttggtttgagtggtttgtttaagaggattcagtgtattataaaaacgtataatacattataaaaatgtaatatattgtaggaatatattatatatatttctataatataatgtagtataaaatacattataggaagatataatacattataaaagaggtaatacattataggaatatattactggaatatcttatatataaaatatatattataggaatataatctatatataatatattccaatatattataggaatgtaatcaaagacggccaactctttcccagttagaggagtgataggaagtactatattgaaaacacatatatgaaaaatggagaacaatgaatgaaaatatatatcaacattataatgattctatgtagggattaggaatatcaaagctcttggatttttaaaaaccaaagattttaaacttattatcagtgaattgagttaattattagacaaagtaaaaatgcatagagaaaaataggaagaatcctggttcagtgttgactactggtgtcgtgtgagtcatacaatgaatacatgtctggaactctgaggcccatcagaaagtcaatttcctctgtttcacatgattctataggtagatgtcaggaatacagactcagtttgttttaggtctttgtgtgttatgcatttatattttattttataattggatcagtgagaatcaataagcaaatatttgaataaataaagatgaatcaggttaagcattgtccaattataaaaatatttgatgaggcagcaagcactattaatatgtactgaaacagtgatagccaaggaaaaatgaatgatgcatgcctttggcctcttgcgagtgatagtgtagacagtataaactatagataatgtttaaggtatgggtcagtggcaagtttgaaattggtaattttcttaagagaaaatgaaatacacttcaaataatgattgcctaaatgactcattagatgaaggtgaatcatgagcgagaaagtccccttgtatgctctgaactcctctgtgctttgtgctctgcagaatggatgaattgtgcaccttgaaaagttcttccatggtcacctgaggcatctgcgtcatgattaggctccggatgactaatgtgagtaatagttaacattttttacttccttctggtgccattttaagaggactcattgtattataaaaagtgtgtgacattatcaaagatgtccgcctgcatcccagtgaaagatatggaaacgatacgaagcgttgtattgataatgcatatataaaaacctgaagatagttaattaagaggtgtatcaatgttggaataattcagtatacaaattaggaatattaaagttattctcaggatttttttgaactataaagtcttaaaattgctattagtgaattaacaaatcaatc

SEQ ID NO: 78028 - DNA, 1770 bp, Homo sapiens
ttgtaaaaaatatttggtgaggtaagaaacactattaatatgtattgaaaatagtgaagtctgaagagaagtacatgtacatgtctgtcacctctttggctatggtgatatagacaggataattatagacaatgttcaaattcttggttaattgtaagcttgaaattgttcattttttaaagaggaaatgaaataagtttactccaaataatgatagcttagatgactaactaatgataggtgaaaagcaaggattgatagttaaaatgcctctcttttgttattatcttctttgctctgtacttagaatggacgtacttgttctgatttgaggacttcttcatggtcacatgttctgtttgcaccatgcttaggaaggagcatgtgtaccaatgtgagtgacagtcagatttcttgcatttctttgggtggtttatttaagaggactcaatgtactgtgaataaacatgtaatataatcaaagatggtgaattttatctagtgagggatattggagtcaaaagaagtattatattgataattcacatatgaaaaacaggataactcatgaaacattaatataggaattatttgggatatctttttgggttttgtgagtcataaggtttaaagttattattagtaaattaatgaattaatcaacagacaatgtagaaaataacagagaaaagaagggccaatcctggatcgatgatgactactggtagcatgagtcatatacagtgaatacatgtctggaactctgaggtctgtctcaaaagatatctagtctatttcctgtttcaaatgatcctacagacagatggcaaaaaatagaatgtatatgtgtttggttttcatgtttatgaatttttattttacatttatgattggctcaatcagagaatcagttaataaatatacaaataaagatgaataagggccgggcatggtggctcacacctgtaatctcagcactttgggaggccaacacgggtagatcacttgatgacaggagatcgagacctacctggccaacgtggcgaaaccctatctctactaaaaatacaaaaattagccaggcatggcggcatgtgcctctaatccgaggacttgggtggctgaggcacatggattgcttgaacccgggtttcaaaaattgcttgaacctgggaggctgcagtgatccgagatcacgtcactgcagcttggcaacagagcaagattctgtgtcaaaaagaaaaaaataaaaaggataagattaaggattgtccaactataaaaatatgtggaaagacaaaaaacactattaatacatactgaaattggtaacaactaaagagaaatcttgcatacctgttacctctttgaatgagatagacagtataaattttgaccgtattcaagttctgggtcagggacaattccaaagttctttattttcccttcctttcttccttcctttctttctttcctttcttccttcctttcttccttcctttctttcttttctttctttctttctttctttctttctttctttctttctttctttctttctctctctttctctctctctcttttccttccttccttccttccttccttccttccttccttccttccttccttccttccttccttccttccttccttctttctttttgagatggagtcttgctctatcacttagggtggagtacaatgccacgatctcagctcaccgcaacctctgcctcatgggttcaagcagttcttgtgcctcagcct

SEQ ID NO: 78029 - DNA, 1011 bp, Homo sapiens
atccacctgcctctgcctcccaacatgctgggattacaggcatgagccaccacatctggccagttattcataaaaaaatgaaatatacctcaaattaatgaacatataaatgagtataaatgtttatacatttattaatttgaggtatatttgaaaagcaaggatcaatggagagaaggtctcatttttgttgtcatctcttctgctctgtactcagaatggaagcacagaagctggttttaatagttaagagctgtatggtccatctctgtgctagaagctggagaccaatgtgagtaatagtcaaagttcttgtctcatcttgggtgttttgtttaaaggtttatagtgcattaacaaaaaatatgaaatataatccaataaggccatgagtagcccagggataaatatggaatggatgtggaatgttacactgagggatgcttatatgaaaagcatgtcctgtattattaagaaaggtaataatgaggggatatggtattgtgaggatgagtgtatatacaaattagagatatcaaggctcctcttggggttttgtgagtgatagtgtttaaaagttattaatggtgaattaatgaagtaataaataatgtaacaatgaatgaagagcaccagagctaatcctggatcaatcatgactactggtattggatgggtcttcgtcagtgaatgcctatctggaactctgaggtccatcagaaaagaaatatagtgttttccctcttttggaagtgatcctatagacagacgtcaggaatatgcaagggtcttgtttttgctctttgtgagcacgagttttcaatctattattataattcaatcaatgaaggaaccactaaacaaatatacaaataaagtatgttggatgcgactaagcgttctctaactgtaaaaataatttgtgaggcaaaaaaagctatgatatggccaggcatggtggctcacacccgtaatcccagcactttgggaggccaaggtgggtggatcacc

SEQ ID NO: 78030 - DNA, 1005 bp, Homo sapiens
accccatctgtactaaaaatacaaaattagctgggcgtggcggcgtatgcctgtgatcccagctacttgggaggctgaggcaggagaatcacatgaacctgggagatggaggtggcggtgagccaagatcacaccactgcacttcaacctgggcaatagagtgagaagaaaatctatgatatatattgaaaacaccaataccattaggaaataagtggtatgaggttgttatttatttagttagggatgttatagacagtggtaaataataatgaatgtttatgctttgtgtcagtggtgtgactgatactgtctggctatgtagagtaaataaaatatatgttatctcaaataacctatgtgactgaatcagtggaagatagaatgcaaagagtaatgcagataatgtcttaatcttttctgatcatctcttgtgctctgtactcctcaaaataaacacactctggctgattttatcattcttttttaatggtaagatccatggttgcgtctatgtgttatatggtgtgtggagaccaatgtgagtgacagtcaacattcttggtttcagtgttttttaaaaaagatattcgtagtattattaagaagtgttaaatacaatcattgaaggtaaactctggcccatttgtaaaaataggattaatataaagcattatgttgattaatgtatatatataaaacattgaatttaactaatgaaaacattgaatttaattaatgaaagaggtgtattgctgtgagtaatattgacatagacagatataagagctatttaaggattttactcacaagtttttgtgactcttaggtaattattttattgttagtgaactgataaattaatcaataaaaacacgtagacacgaattaagaaaaggaggtccaagcttgagcaagcgatgacagccggtggtgtgtgagtcatggaggatgaatactaagtgcctggaactctgaggttcaatataatagaaatctaatcta

SEQ ID NO: 78031 - DNA, 5541 bp, Homo sapiens
ccaatgataagattgtattataaatcaaggttcatgatgactactgttttgcacaacagaagccctttttaaaagaagagctctacatttttagctctgtgggtatggaatatggagtcagatgtatgtaactctcataggttttatgttgggtggttcatttaagggtattcctgatattgttaaaatggataatatgttaattaataagatggagctccattcacgaaccagagataacaatgtggcataaatcattgtttgtgttcaatttctacgatggttacttcacgtttactaagtcgaaacctaaatctaggtcttttcagttggtaatttcctctttcatttggtaatatcatctacaggatgggtagaccagagctgattaaattattctcccattgatgaggaactttaccttatccctcagagtaaggagaatgtcatataatgtaagtaataaagttcttgagttgggttgttggttcatgatttctactgtcatttaaaaagataattaaattttaaaaggtcatactaggcctatgatgagaatgtgttgtggaccgaaattaatccaatttagcacaaatgaagtgtaagaaaaaatttagctttcccattcattttcaatagttaaatgtcacattgtatgtttgtctcattgattatttaaagactcttctcttgataaaggctgttactcatttatggagtcagtattctagttgttgagtaggatggtggttcaagtttgttcatttgatatctaaaagttgttcaaattaaatgtagaggggccatgtctggaccaatgatgtgaatggaatgcatctgaataaaaattatgatcaatcagtttttggaacaactgaggtccactgcaaaatgaagaactaatatgtaaacctttgtgggaataatgtcaggaaagtttgagaatctagttctggagcttgagagggttcacaggtactgattttatatgattagcagatccacttgtgtggatcaacacacaagtatattcatgagtaaagaaaaagaggttaagacatggaccaattctgagggcatgttgtaaagcaaggaatataattaattcaattctgaaataccttggtccatcaagaaaaaaaacagattaaatttgtcaccactttgggtaagaagcatctagatagaagtacttaatagtcaatgttctgttcttagtttgctgtgggttcccagatgtttgattcattaagacaaaaaaattaaaattaaacaaacaaatacgtgtataactaaataaatgggtgccaagtatgaaccaatgataagggtacttcattattttctatatctgctttgtaaccccacagaacagaggtaacttggctgttttaataattatttaaaggatgaagatcttgactgttacccatgtggcaaggagagtgtagaacagggtgagtcagattaagtttttattcttggtttagccttttgttagagatgatgattaattattatttgaaaagaagaaatgactttatgcagtcataaaatccaagaagaccatgcctgaaccaatgataagaatgaatcctgccaagtgtcatggttaattcattttgcaaaacgagatccatttaaaaagaggtttggtttgctatctcttagattaaggagattataggcagattctagccttggtcaaagatcttgtttttgggttagttgtggttctcttgagttttgttattttattaaaaataataaatagttaaacaagtacaaagcatttatgctagtaaaattacaatggccactcatgaccaatttggagattatatcatgaaacaaggatttgtttaactttggttaactgttttatcactgtttgaggaggtcatggaaagatttaaatgatagtcaatttctcccctctttcttgggagtagattctttgttgttgactttgtttttgaaaatgagtgactgactaaattaatgaacgacaaaaacactagaatggacaagaatattcaaatgatgacatttcatgaagcaagaattatgatcaacacaattctgcttccctgaaatccatttaacagaaaagagtcaatctgttttctctgtgtataatgaggtcagaaacaggtgttaaaatattcagtgttcttgtttttgtattttggtgggttcatggagttgattattatgattaaggaaataagtatatgaaaaagtaaattacaagagggtaaatcatgaaccagtgattaaaatgtgttttgaaacaaagattgtaggtatttcagttctgcactgtggacttttatgaaatgaaaccttaatcttttgtatctttattttaatagtacatagtaccattctgcatatactatggatatattttagacattttctcatgctacttacattcagtttttttcactatctgagttataaattctagtgaattgatttatttggaggtggtggtaggaaacccctatgccccatattttaaaattttctggcagctgatatctaagagagtactaaaatgactaatattaaggtattaatttcagctcaacaagtattgatgctaactcttgtcagaccccatatgaggagtgaaatttatatatgaatttagtctagttccactcattgagtagctctgtgagattagatggagacccacttacaaatgcagcaattcaatagaatagggcaggtagatgggttctctgtgagactagagggagacccacttatacatgcagcaatttgataaaataggacaggtagatgggctttctagaagcacagaaggtatgccttcagctcaatctcagtgtcagttgagttgtggaagagatgactcctgagccagtgacagactcattagtccatagctccgcaaagctggggaccacactcctctccttcactgctctgccccttgtgccttacatggacagcacatgcaataagcatctgttgaatgaataggtgaatacatggtgaataaaagaatggaggagtgaagcagtatatgaacaaatgagtctttgagtagacaaaggaacgaataaatgaagtaatgaaaatgggaatgagtacacgaatgagtgaatggatcaatgataggtccatgagtgactgaatcagtgataagtggataaatgcatggcgagttaatgagtgggtgagttcatgtgtaagtaaaaatgtcacaaagtgaatgagtggatgatgaatgactaagtcattgagcgaatgaatggaagattaataggtcaagtagtcaagaaatgaaagacaaacatgtaaatggatgagtgaatcaatgggtccatgaattcttgaatgaatttatgaattaacagataaatgaaagtcaatgagtaatgagaaaataaatgaatagatgagtctatgtatgaatcaatcaatgagttaatgactcattgaagaaccaaatgaatgaattaatctaggaattagtgagtttactaatgaataactcaaagaaagaggaaacaaccaaataaattaactggataaataagtcagtgaatgaaacaaattatgagcgaatagatagacaaagggatggataattgatggatatattacagctagtgaataaaagagtgaattagtgagtgagcaaatgagtcagtgaatgagtatgtaatcaaggaataaattagctctgggaatgagtaagtgaataagtgaatgagtcaataaattagtgaattagtcacttattgaagcataaggcagtgagtgaatgaactcacactgggactctttccctgactgttcaacagagagtagtcatgccccagcttcacaccacagcataaataactcaatcagagcacccaccctacgctatcgtgggcgtttgtttacatgtcatcactaaactgatgtgccgcaggggccaggaactgggtcaaattattctctgtatccctggtgcctgcccagctctgagcctcggaagagcacagtaaattgttgctgaatgaatgaacgatagctaaaaatacattggcttttttggaaccaggatggcccatctgagaatggtctgggagctgttctttggggagatgtgctgtgtgtcagatggtttgtggcatcctcctacgcaagtctagattctgccttgaatccagcttcctgtgtccagtgccagacagcgagacaggatactggcagttcggactgccctggacattgccccatccttgggcaatgctggcatggcatggtgaaatgaaagccctaggtcttcccgaaagctgcccttgcctctgccaagacaggagatcagaaataacccggtcttgtttttatgcctccagcgagtgggcccactccatgcctttccaagcaaccacattcctccttgctgtagttgtgggacactgggttgaagcaccccttgacctttatctggtagatgagaataacaatccctgtctggctgggtggatgtgctgctttacgggagattatttaatacatgttacataggtagcatggtacctgggaggaaagagatgtctcagaaatgttacatgccagttttcatcatccccacctaacgtagctatatttgattatttcaaatgcattaatttaaaagctctcaaatggatgtgatactcaaattcccctcttccagaagattggagagttcaactgagttctaggaagaacaccagtctggatggtattctgggctagtccagaccttcaagatggcatggcacgcccttctaccagggaacagacaaccagaaaaatgaattggcaatacccacgctctatgtaggacacatacacaagacccacccttcacctctctacccttccctcccttccttcattcaacacataggtattcagggcccactgtatgcctcacactgaccatttcttgtcttctcttgtcttggctggctcctgaccctggatttcatctctcactggtgttctcacgtccttcgtttgaacttggcgattggttcttggtcatctggtgtggatactgccctctccttcgtgaggacttgatttgggcttcctacttcagagcacgccaagtagactcccccttcttagtttggggtattgggacccctattctgactcttccagatcggccgttttccatctgggtgagctccagccccttataagaggagcttaggctgtgttggtggcagggagacctctgaacgctggggttgggcagcaacgtcagcacagaaggcttcggactagactctgaggtttgcttggtgcctggaagctgatctaggagagaggagttaggttgtcactgcccctctgtccacagaattccttggataatgaggcaaaacaacctcagagcattcagcaacttacaattaatttagttttcccatccctcccactggttactcacctgtgctgggcctgacacaaatgtcaccccctctcctatcttcacagccccctgccctctcc

SEQ ID NO: 78032 - DNA, 1081 bp, Homo sapiens
ctggtctttctgctcccacctccactctgttctcttcctgggcgatggagttagagcggtctttctagaatgcatgacccagagtccctgctcctgagagcccgctcatggctcccacaggccccaggatggaggcccagttccttccctcctgccacgcctcccactacatgccccctgcccttgtgtgctgcctggcagagcctccccgggtctccgggcgtgtgtgtctctatgcctttgtccctgatcccctccctgtggtcaccctcccactgctccatagatgcaagacttctcttgcttccctccccaaggtgggctatgttgccccacactctgaactgttacaaggccatgaacttgaccttcattcataacatctgttgtttggtcatgatttgtttaggtgtctgcttccacaaccagaccttcagctccctgggtataggtgctctgtcctgggcacctcagactcccccactgtccagtacacaacccagtgcagaggagctgatcattaagaacgttagttgaattgaaggaatgagtggatgcacaaaaggatagttgtatggtcatactggggcacaaattatatccctggcagagaactggggtccctggcatggcggaatagcacctccttctccagccaactccactttgccttccacctgcgactcattaagagatatgtaaccttaatccttgaaattgcctgggacggagcatgttttcactcaatggcatgaacatggggatttttttcctttcttaaataaatctcactcccccaggaagcttggacaggatgtgggcaatcgaactagctcttgaaactgaacgttttgcaaaaggcccctttcgaaatttgaaaccctgtggccaccggccagagctgagtctggcttgtggggttcgcgggggcctcctgaaagaagggaaggaaagattgaaaataaacctaggctgatggtttgtgagacagaattccgaggtctggttttgcttctctgatgaaacttgagtgagcttggctatcctctttagctcttctttcgaacctttggccgaaggc

SEQ ID NO: 78033 - DNA, 2395 bp, Homo sapiens
tcctatcagcgtgacaccgtgaatgcctctcctcctcgcttccttccagttgcccctgcctggtcacaggcctcatcctccctctctggcccaattggatgccctctgcttgcttgcctcgtctctgactgtatcctgtgggtgacatgcatgcatacccggtaccacttaaaccccccatgggctccaggggccccacttgtggtgtaccaagccactctatccccttggccctgtgtcccttccttttcctctcttgctccagccttacttgtaattcttcagttcacacctccatcatgtctgtgagtctcaagatctcctagcccttctccagacctgttcaagacacccctagcccttctccagacctgttcaagacacccctagcccttctccagacctgttcaagtgcccctttcatcactccccatgtgcagttccatagttgtccatttcacattgacttccatgtatctggagggcaggagccagctctgacccaacttgccattcccaaagtaccctctcagtgaatgtggatgggtccccctgccttgttaataagtcatgtgattgagcagattgtgtgacttgcccctcttgtcttggaaggtcatcctgcccagagcttgtgaaggtgcagtggcctgagccaggcttccaagaggacaaccgtgatgggctctgtgtgcgttgctgggtgagctctgcctttcctggttacactctgaaatacttgtgtacctgtgactaagggccaaactcagactagatgataggtgatcaaagatgggctttgtgacaggctggagtgcctgcgatggcctcagacaggggctggaatgcatgtgcttctcaccaagaacattagcaagcagaggctgggtcatttctgacagctgcttctctgagcggagggcagggctggctagagaagtccctcatctctggtcccacctaagtggtgggaggcgtgttactttgcagctgaccagatgccagcttgagatggggctcagagtaaccttcacatccctgcccgaaggctcttttaaaaattacgtagctaattgcattctattaacttattaccgtaatggagagtgcaataagcaggggccatgtacgttttccccataaaataacctaagctaatggctaacatttattgcacctaatttttacaaatatttttcccattaaaaaagaaatacatgtttattataaaaagcttgaaaaatattgaacagaacaagtgtaagagcaagactctccctagttcccccactcacagatcaccattgccaacattttggtggccagcctccgccttttgttttttttctataaattaggtgtgtacgtgtctgtgtgtgcttaattgagtttatcattgccatcctgtcttttatttccactaattatatatcctgaacatttcccatgccattaagcaattccttatcttgtgctttttaatggttacataggattctagcaaatggctatattgtaattaatttaattggtttgcttttattgaatatttagatccatttagaggttggattgcataagtctgggaggacatctttgtttattcattgtcatatacatgtctggctcattttctgcagttcattctaaatgtggaatgtcgtgtcaaaaggtgtgatcattttatggccaaattgccctcttaaagcttgtatcaacttacgttctcagaattagtttgagaggtacttatttctctgggaattatcaaggttgttcacctttgccaatttgtcaaaacacagtatttcgttcttttcattggcagttcttttattacctgtgataaaaaaaaacatttcccccgatctcttttggttatctgtatctgaattgccagttcaggtttttttcatttttcatttagtttttatttttgtcgaagtcatgcatatgcatcgttttaagagtcagatagttctacatgatcgttgtagagcatcaggcctccaactctcccaactccaccctaatattctgcttaatggaagcaatagtttttaactcctttaactattctcttgacatttacatccatatgtttaagtaacattgtttttctcttctacttcttgattttctttttcttttttgaggcttaggcattatcgtgactttacaactgtagaagatgaggatttgactccttggcctcaccgccccctcctcccttccttctgtgcaccatcctcaatatatttagtacatagttcgggtttgatccaaattgagagttcatctttttatgagagtgtaagcattcctgaaatctgagcaacacagcactacaatttacctttccttcatgactattatttttctcttggagttaata

SEQ ID NO: 78034 - DNA, 4541 bp, Homo sapiens
gtcaggagttcgagaccagcctgcccaacatggcgaaaccctggctctaccaaaaatacaaaaaacttagctgggcatggtggtgggtgcctgtaatcccagctactcaggaggctgaggcaggagaattgcttgaacccgggaggcggaggttgcagtgagccgagattgtgccactggactccagcctgggtgacaagagcgaaactccatgtcaaaaaaaaagggtcattcatatctatatataatgcaatttttgtctgtcactttatctcatctatttcttttcctttgactagatcttctaaaacattatattattgataacagaaatcttgtcttgtttctggttcacttttaagtatggttgcaaatcattttttagttgagattttttaaataaatgaagtatttatacctagttaatataagactttaaatcaggattggagttagaattttatgaaatgcttttttgatatctgcagatatcatgttgtttttctctgttgatctgttgatacaataagctaatgtttcgtaactttgaaacatttttgattgaattctacttgattatggtgtattgttgttttaatacactacaagatttgctgggctaatatttcatttagaattttccaaatctatttgttgttgaatttgggtgtcaaagttatgctgactttgtaaaataaattagggaacattccatctttttctatgttctgtaccatatatgcattatttgaatgatttagtccacgaaagcttgaaagaactcacgtatgtaactatcctgggataagtctttggtaacgtctcttatttcttctgtatttattggattctttaggttttctacgtctttagaatttttgcttctttttctaacatagctcagcgtttaaatgcgcaggcactggaattagacaaatccagtttaagattttggctctctcattttccatatgatggggaaactgtgtcacctccctagttcttagtttcctcacctgttaaatggttaaaacgaaagcctccgagggccctaacaggaccagcgtgaggattcagagataaagtaccttgcactggttctggcacataatgagtgctcaataatgtttttagatattatttatcctagaaaataatagatttttctgagatttaaaaacttattcacataggattataaatagtatttttatactagaattttaatgtatttctatgattacttcacttttgtcattcttaattttgtatgtgcatactttatctctttttcattagatgacctagaagaatatctattttagaggtttctcaaagaatctgttcttgggataacttgtcagttcaactggtttttgtgtgcctgtgttcaaattaaataatatctgtctttattgatttctttcttctgctttctttaagtttgttttatggatttgtccatatatgccctattgttattcttctttaataatgaaaatatttcatggtatgaacttgcttctgttcacaattttgactgcattttcatgtgtcttaatatgtggtcttcagaacattaaaatatttgttataaggcttcttgtttcttcttgttattggaagaaatgattatctgagttaaatgttcaaaactagagctgattttaaaaaattaatttctaattttttaaagttgtaagttgtttatacttttaattcaattgtggttatcttttattgtggcttgagaatgtggacacatacattctactttgggggaatttattgatgccttttttgtgcataatataattgattttgtaaatgatttttgtggacatttaaaagtaggatgtacttgtttataaggtatggattttgatgtaaagacatttagttttattagctttttagtctttatttggattttcttagtaaagaattacataatctataagcaaccgtattttgaatctcaatctaagagtttactggatgtacctggtttttgtttgtttcattacattggttggaactttttggacggtgacctaatgttgatgagatgaaggggcttctttcctgtttttctcatgttctgttaagtttgttgttgcttctagatttgaggtatgttcatcactgacttcttacttatttgatatttttaggactggaagagttttggatacgatgtttctattctttttccttgttttggtgctattttatttctaatgcaaatgttcatgaatgctatgtcattgttgtggattataccttccccctcagagaggtgtttaatgacctgaaatcacagaagcacatctgttttcttttcatttgtgttcctaagctaggtagcctcactttctcatgtaattgtttctgcaaagtgttgtttgaaagttgaactggagacttgcatgttccaaagaattttgctcctcgagagctcaatcttccaggcaatttctaacattccatggatgttctttagttttgttcttttcaaacactcagtcgactgccttaaattcaattatcaaggccaaggactggccacgttgggtccgcctaacgatgtccatgtttatactaatttcttaagtatataggagatcggtgctcttaccacaggtatcagcaactttgtttttccattttccacttatttataaaacaatgggagcaaaatgtaattaaatacttgctttcaaaggcagccaaaccctttattcagaccaaatattacccagaagccccataagtaaaatagatcaagtcagggctgccttgtttcagggctgtgctgtgaccccaagctgttggtgctgggcaccctccttaaaatgctatgggggaccccaaatgcccctgagaataccctttgaaagcctctgcaaagaaatatttaaaattgcacaagcaaactgaaaaaaaatggctatgtaggcaaaactgggggtgccattgactgcttgctggcagtcagcttctgtctgcattccgtggtttggaggatgtcagtgcatgattgtgtgggctgcctgggattccagtgcatggaaattgaggccatcctatttatctgtgccatccctcaactttgaattttcttgagttaatttatttaaattgtgtctcagatagaaaacatatagtttcagttggagtcttttgacccaaactgagcattctttttggaaaggatgtgtaacccatttacgttttgtgtcttatttgtcatgtttgcgcttaaaaacaaaaatgtacttaatgcttgttttatttttttcacccttttttccctgctatcttttgttatctcacagagactacattttttttaaattttaattttctctgtgatttggaaagtacataaccagcttctatgtctgttagtgcttacatttcaatttttgaaaaactacgcttacatctattatttctctatggtaacaaatgaaatagtattctctgactttgccctttgtggaataattaagtttcatattcatctgcttcctccctttcctcccactgttacgccctcccaaacgctaaggaaggtgttgagttttatccctgccttctctactcaccatcccccccagtcctgtgccatgtgctttggggggcacaaatggcctctctctgcctctgtggtctgcccccccgcagtaggtggggctacttactgtttctggactatagatcgtgtagaccttgaatcctaccacttcatgcactctgaattaactgatcaacgtcatgtgggttgagtatctgtttttcccttatccagcctctgagcccctggaaggcaggagcactgagtcagtctcagcctctgcgcaaggcatgctagaaaatgcatcgatggttgagtatccgagagagtacctgagcgagccaatgggaggatgcgtagctgaggagcggatgactctgcggaggagtgggttcttcagggagaggggtgtgtgcaggagtggatgaatctgtgcacctttgcaagaaaggatggatgagggagtggaacagtgactggggtctggggagtgagaagggttgccagccatctgtggtcagcaggagcttccaggcccaagtttggtgtgttgggaggctgggtgagaaggtgggtccacccacctctctagatacccaagaggctagtggggacccaggccaatttctccaggaggacatggatgcttttggggtctatctcttgtactccttccttcctcaccatgctgtggcatgcacggcctgtgctgggaactaggggtacaaagctgaggccagcacagccctttcctgccccagaggagttcccataccaaggggggacctgagtgagttccccacccgccccccgactggagcctcccccttggctcttatgttctagtccctttatgtttagatacctcaagaatccgccttagctcccctcacctacctgccatcttcttggcggcttctctgtatctcacttctttgtggctcccaaccccaccactcca

SEQ ID NO: 78035 - DNA, 3556 bp, Homo sapiens
cgaccatgttcatctgacccatgctccatccagtccatgctccatctggtcctctgcttttaccctacagtgtccactcttgtcctctctcttcttggcttagtcccctcatcctttatcttctaatctaaacttctgagaagttttcctgattggcgagagcctcttgttaaatgctctctgctccttcacaacactttggcctcctcacattttgaaaccaattctctgcaataactactttaatgttggttttccccacaacgctagcagctgcaggaaggcagagactgtgtcttatttactggtctagctccagcacctcacagatgttcagtaaacacaagtttatttctacgagtgaccacatggaaaatgtgagtgggctggaggagaggtgcaggcagggtgctgtggagggtcagggatgcaaaggcctgagttggctgaggtggggtcgggctcgtggaagaactgccatttggttgggcttcagagagatgtaagcagacacggggtctgggtggaggagtagtgccagcaaaggcatgtggacaatgcacggggtatggagggtaatctcttagactagactagctcacacttggagggagcaggggagcatgatgccttgaatgacttcctaaggagttaggacttcaacaactgagttgcagggccccgtctacactggggttcaggactttagaggacaaccgagctgtcctgcagggctgctgagggttctgcccttgtcctttccctggaggctaacaaatcattgctttgcattccattcacatgggatagttgtgccatgaaaggggatggagaaaatcaaggaagacctcctgaaggaggtggagaggttaatcaggagctggaggaacgcactgcccactcagctctgtggtttgagtctccaaaggtggtctagagcatggcgaggaccatcggaacttgggtgagctagggaagtttttacctagaggttgagggtccccttttatatgatgaactgtgctcttggagtgtcccatttgccatgcagaacaaaacactgccctttatcttgatgaagagatagttgaccacataatggccaaagcatggtcagtattgtacattttgccttgtcgcagtctttccaagttgacatggccttcctggaggaattaccacttagggtagaggcaccccttcccccatcaatgccactgccccacattggaggaggggttgtttatgttcaccatgtgcctgcttccaatgccaaatccagcctcagaaagctttctggaagtgacgccaacttcaggggcaaggccctggttctggggtcagcaccattccgtggttcctgaagagatggtagactatggaacgtaggcgttatgatttctgacctatgtaacatggtccactaactctcagtatccaatccatcctcggagggcttcctggaggtgttgccaacttcagggaagagaacacgtggtttagcttcagcactgctccacggcaatttctgtggctcatggttgatgtctgacttgtgcaacaaggcctggctcttctgggcactaaatgcactctctggggagttttctggaagtgatgcaacttgggctcaagacaccggttccagcctcagccgtggttctggaagagatgatttgccatgtggcctgtgcgaaaggagggatttgtgtgagatgggctaccacttcccagtagcctgccagctttggagggcttcgtggagccaatactaccttcagggggacccaccagtccatccttcattccgctgtgtggcattgaagagttgctttcctgtgttgaagttttctgtttataccaatgtccacctctgatcaatcttacattcagtctcagggttttccggaggcagtgccaagtctgggaatgagacagtggttctgtccttagggaggtggttgaccaaaacaactcctgctttgttcatgaagatggcatggtggttactgctcagaatctaatccaacctaagaggacctcctggaaatgcccttggtattgaggcagatatggccttagggcactttttttttttttttaatgcccaagactagagctcactaataggtaagatctgggcctcaggtgcccagtactgtttccttggcctggttagtgtaactagatggatgttctttggttgcacgtgggccattttgtatttctgattttctccccactcccctaaccagctctgttagccatgtgccatgtcctccctcccatctacccactccttcagacccagcacagtgcgcctggcacacagcaggcacttaatcagtatttatggagtgatgaaatccatatcatcgtccacttcttctcagtgggactttcggcctcgaagggcttcctggaggagttgccagttttggggatgagccactgcttcgagcattcatgtcaacccccgaccatgaagacgagactcctggcctgtgtgtgcttgtcgcatgatgcatgtgctgtgctcaacctcccttctggttccacccagctcaaggccttggagggctttctggatgtgtcctgagcctttgtcctcggcatctctgtgtggtacttggagagatagtagaccgtatagcgtacgctttatctgtgacgtatgtaacacggtccactaaccctcagtatcaaatccatccccgaggctcctggaaacaacgctgtcttcggggaggaacggttggacccaccaccacttctccatgacacccgaagagatgattttctgtatggcatgtgtttttctgcatgatgcaaaatggcataatctcgctcctcttaaatcaagttctgccttgggaaatcgcgccatccctggggaggagaccttgattcttcccggaatcagtgccattccatggtgctcaatgacgtggttgactacgctacgcttattcagtagacaccgtgacctgcttcttctcagcgtcaaatgcagcctagaagaagcgccctcaggcaacttcgtggacatgagccttcttccagccaccaccaccaccatcgtgcggtacttgaagaaatggtttaccgtcccacatacattttgaatatgtatgtgggatggtaaaccgcttcttggtatccagcccagccatccaaacctccctggagaaagcctggagttagaggagagccacgggtctcggcatccgccatgccatggcacttggtggaatggtagactcttagatgtgtgctttctctgtcaatgcttgtgatgcggtcttctcctcagtgccaaacacagcctccagtgacttcctcaggacaaggatgacctccaggaaggtgtcctactgcccacgttggcacatccctctggagtaattgaagaaacggtggctggtgccgcaaatgttcatgaacgagggatgtgaaacaggtcacctctcatcctcagagccctcctcagatgacttcaggacagtacgcccatgtaggagcagatatgggtccaggagatgatgccactccaggt

SEQ ID NO: 78036 - DNA, 2616 bp, Homo sapiens
attctcagtatcagccagccctggggcttcccggaggccatgccgacttgagagccaggcctgagtggtagccagggtgcagtgcaggtcaccgggtggttggctgcagacccagtcctttatttattacattggccatttggtccaccagccaagaactcagtaccggtcccacccttacagggcatcctggaggtggtagtggcattggatgtgggtttgtggtcattgccacattgccggtggctggtagttcatgatgcgcattgtgaggctttctggaggtgatagcaggtgaaaggaagagagccaggggtcagcgtcacttcctggtatttgaagatgcggttgaccatggtgtgtacgctttatttgtgacgtaggacacatggtctacttcttctcaatatcacatctcgccttggaagacttccaggaggtgatatcagctttgcggaagagccactgtcctggtgtcagtacggctgctgcttggtacttggagagaggtggtccgtggcgcgttcgctttatttatggcgcacattacacggtcgacctctttgcagtatctaatcccgccttgcaagctttcctggagctaacatcaactgcgggggtgggggccactaggtctgcgctcagtgtgacccagcggggtttgtgatgtgtttgtcttgtgtgtgacgataactcacgtgtggcagccttcttctcagcacactgctctggcttggcagcagggttaacttgcggacaaggagcgtggtgtcagcacgtgcctggatacatgagatggttgaccagagagcacacgctttatttgtgccgtttgtgacctggtccactaaccctcagtatctaatgcccccttggagaacttcctggaagaggtgtcaactttttgggaaagagacagtaaactggggccagctgcactctgttagactctgaagagagcatctgcgaggcgtttgcgacatgtatgccaaatgtggctgagttggactgattttcactccgatctctttccttggagggcttcctagatgtggaggcatccaagttcaagggaaggggcatgctgtctataccatcccaaagtcctccagtgatcagctgacctgagtgtatgcactttaatttacaaccaaggtcgcctggcccgtcacacctcagtctccactgggtccttagcaggacctttggtggagtcagccttgctttggggcatctgtgcctctcttgagtaactgagaaaagatggccctggaggttaaccctaaacgcgatagctgctgtgaccagcctttttatggcatcaccacctctggctgtgatgtcaacttccagacgtgatgtggggtctgctccactggggtacttggatagatggttggcaagcagcatgcatccaactcttggcttcttccggcaaatcaactaactaacgctcagtgtgcaattccatatttaacaggacttccagcactgaatgtcaagtctggggaagaatcagtggtgttcttgtcagtgttaatcagtggtacctgaagagaggttttctgggtttctgtttctttaatgaggacgaaacacacctggttaacctcttttccagtatcaaatcccatcttggaggccttctggtccagacctcagcttcagggaagggcgttactctcagctccagtccactggacagaaatctatggttaaccacgaagcctgtgctgtattattttgactgatgtcatctgttctactaaccccagtgtccaatccgtatttaacaggacttccaggactgaatgtcaagtttggggaaggaatcagtggtgttcttgtcagtgttacttggtggtacctgaagagaggttttctgggtttctgtttctttattgaggacgaaacacacctggttaacctcttttccagtatcaaatcccatcttggaggccttctggtccagacctcagcttcagggaaggggtgctgtggacataaataaggagacacgagcaaatggctgatcactaagcgtgccccatgtttctgaattttgccaccgattgcgctaaccctcaatgtcttatcccttcttaggaggacttttcaatgtgatggcagcctgggggaagacagtgtcaccacgacagtgtcacggaacatgcaggtgagttgtctgtggttgccttcgttgtgctcccaacggatcgtgtgtgtaattcaggctctttcggcatctgaccctgctgtagggggatgcctcgtccttgccacactcagtgatgggcttgaatgagcccagcccacagcaggggaatgccagcatgccctggacagatagtgcaggtgtcctgcacgcctgcccctagcctgcagtttattctgaaaggatgtcctggatataatgacaccttagggaagaaaagctgattctgaggtcaagaggagaccttgggggccctggaattggcccaggttgagacctgtttatttctcacaggaattgtggagttgacttcctttaaatctggaggaatccttgatgtcatgccagcttgaagggagggcattgtcaccagccctgatccaggggaagggagtggatgg

SEQ ID NO: 78037 - DNA, 8446 bp, Homo sapiens
gggtgctctgctggctacggaggggtcaaaggacaggtggcaagggtgcagagccgcagcctggccctgggattttcttctcagacctctgctccggggtccaccttcgggggaaaagagggcacaattttacaactttgtaagaggaaacctgaagttttctgacccctgattctccccagccctgtcaggattgatctaactctctgttgagatgcaaaagagtctggagataacagtactccccccaccatgaaaacaattattgtcaaaggagttttatagcaaacagaaaatccggcccagaattggctaaaacatttggggagctcacatcaggaaatgagattcgtttttatttcttgattctgctgaattggattgaaggcagcagaaggcattaagtgggatttgacctggaggaaggtggcctggcggtgctcctggcttccccgaccctccctccctagccgtgtgtagcaggcactcactttgcttacagcttcctcggtgccatgtatctgtttttggaatcacaccttgcctggaaggctgcttggacccatggccagtgccacacaggggcctgggcaccggctaactgcagacccagccacctgcttcttgaccacagaattcgagatttactcatgagctctcttgacgcactgactttgggatgcaaaccattatgactaggggcacttcccgtggcctggacttccacaaggaaaccctggttccaccgtcaggaaagctccaatacctggaaagaggttgtacctaaagtgttctctgtattggcggaaaatgtttcccgggcaacctcttttcattgtgaaggcttgaagagcttttggctgacttcccaaaagcaacctgggacacgcaaatagaagccatctgacgtctggtctacccagtgccatgtagattcggggaatcttcctggaggtgacaccaacatcggcgaagattcggcagttctgttttgattttttttgtttgttttttgatcagtgctaatcttcgatactcgaaggagaggttgtccgtgttgtcttctctttatttatgatgaaacatacacgggaaacctcttttttagtatcaaatcccaccctggaggcacttcctgttcctgatgcagccttcagggagggacgttgccggctccactctcggtaggcgcaagcgaggctgacagcgtgccatgcgtcgtgggggtgtggctctcaggccccagccatggagggcccctaggaggggaagctgagtttggagaagggcctgtgcttctgtggttgaaggaggttgctcattgtggtgtttgtctatttgttgattcacggtgggtggcgcctcttcagtgtgagatcttgcttggatggccttctggacacgctagcaacgtcattgaagggacgatggtgccatctgctctccagggtagctgaggggatggtagaccggtgacgtgcacttcatttacgatgtaggtcacccgtttgactatccaccagcgcccggtccatctgtgggatgacatcttggtgcacatggcaacttcggagaagatgtgggaggacgtggggcccgtgggactctgcaggattttaggaggggtttcccttcggggccccctcctcctacctcgttaaaatcaatataagcaatcatcagtgaataatctctcttttggtttcaaatcctgcccaggagggctgatagtctggccacagacaatgccaggattgcagaggcctgggcttcagtgccccatcagggaaagtcccaccccacaccacatgctgactgcaggaggtgtgtgtgtgacctggtacaggggtgtggtttatcctcggaagggtttgaggagtgttgtgtgtgtgcaggacagggcaggcgttgggacagctgtggtagtgagggccactttattctgtgctacatgaagagaggctgtctgacaaagcttgccatgtgtttgatgaatgctacgtggcccatctcttttccataggaggacttcctggacatgaagctagattccggcagggccactggtgtcagcagcactcctggtgagtcgtggatgggggactgaggagctggcagcgtgattgagatgagcccttcctgtgttgggaccactcagaatccagccgcttcgtgggcagcgttcagtccatgcttggggaaagggctttgttgccgttgctcatctctgtctgttgttcagctctgcttgccttacgaggccccagatgccctggatgccctcagtgtcagactgcggaagatgtgtcccggctgtgacacgcgcttcaggggagggctgttggcgtcaggtccatggagaggtatgggagtggacatcttgtctgagagcagacattctatttcgggtgtgtgtcttggtccgttcatcctcagtctccctcccatacctaggatggcttgtggagagaaggcctgccctgagggctgaagttgggacccacagctctcaccccggccttggtatgctcccatggctacggcagaggcacaagaaagtaattagaaacgcagaaactccttaaggccaaggctgggaactgctatatttctacccacagatcattgaccagaacaattacacggccgaacccaaggcaaggggcggggaggcccactccacccgggagggggttgtggtgaggtgtgaatgcaggaaccggtgaggatttgccaccaccaagtcagttgtccacgtggaccacctgagaacttgggttttattcattgctcattcatccctccctaacccgcagcttccggtctgccccgggggctcttctccggctcaggctgatcgacagtggtgacgctgtgccaggacccctggtcattccatctgtttgaggcaaatgttaaaaaatcccttgcgctacccattctatgacgactcccttggctcagaggctccatcagggcagacactttgctgtttgtccctaaagggtgggtggtagatctcatccatcttatctggggagttattgtgactctcctggtccctcctcatgtatcctcaggaggacttttaggatgcaaaatcactgtttctgtgccattgtcatattctgtgctactggaggagactttttgttattgagaaattgaacacatcgtgctcacaagcagctccaggacacaatgccacctgtgcagagggggcagacctgttagatgtctcccaggtcttgagggggttgtatgcacggccatatctttgtcaccggttgcccggtgcgcatcaggacccatgtgctctcaggaagcccgcaggagtgataccagccgcggagaagcagtgttgtcaacggtgctgacgtgcggtacttaatgagaagttgcccgtgtttttttcgctttatttgtgacgaaacattcgcggtgcacttctttttcagtatcctattctgccttgaagacgtcttggtttgggtgcaacttcagggaaggcacatgggcccctgtagtggacgctgatcaggacctccctaccccatgtcttttctccttcctaaatttctccttgttttttttttttttttttttttttatgaaagctcccgtcttcccgccgtgtgctttgattgcattgaccctgccccacttcctccaccagcccaggcttaagcgaatctcttgatctcttctcctttgccactgcaattgcttccggaataggcccatgaccccactgggccagtgataggcaaggagatgcttgctgcagcttctgggaaagaaactgtttctccctttcctgtgatagctgccagagtagacactgtctattccattcagctgggaatagacagtgaactttgacgtgagcttcgaaggtcccacagccgtttaaggactgagaggagagggcttggtgccacgcagacacagcagagggagtctgtaccatgaaaggcatcttggagacctagagaagagcctggatgatatcatttgagtccctagatcaaaccctgcctgaagcttgctctgtctctgtactttttagttatatacgtctataaatcccttacttgtttaagccagttggagttagatcttatcttacttgcaatacaaacagatgataccacagtgtgttttccagtgtgactgggaaagcctgcatttttttcaatgatgtgtttctcacggtttgcctatctatcttcagtgtcctatttaaggcagggttttggtggaaggtgacttttcttatggacttatgctttcaaagctttgtcttagtgatttaatttatggttgacaaatgatgcacaattaccgtgttttgtgtccagcaatgggtcactgggtcctctctggaaggcctgatggatggtgggccccagaacttctgccccgattcactctccctcgaatccacctctctctgggaggctgccctgcaagtgatgtggacttggggaagccgttgtcctttcctggcccctgctgtcctttggctctctgtgggttggctgtatttgtcacaactcacacttaactgtcagtgttttagaaccaagccatgcctccagggaacccggagcactttagagaggaggtgcagtggtcagcaccatgcaaggtgcacagagagatgggtccaccgagagccggggctgccttggtggtttgtttctcctgattcgatatctttgtcttcccatctccttcctggaaccatgggctcatggaggagattctatttttgggtccaggaccatcccattttctctgaagtgatgctctccatgagcatttgcagggttgatagtaaacattccgaaagccgtctgccctgattattgaattctgcccatgaagacttcctgggatcccgaagtagagggagtctgggatcggtttgctttatccgtgatgactgtccgcctctgctcagtgtcagcccagcccttcgaagcatgtcccccacctcccctggggtgagccaacttacctgatgcttttaggcttaattgagcataagtttgattggcagcgtctgcccggccctgccctcacgccctgaccctcagtgtcccttcacgcccaggtgtgcctctggcagggaggacgtgctcatctctggtacctgaaaagaagttgcccatgttattttcgctttatatgtgacgaaacaaacatggtgcacttctttttcggtatcaaatatctccttgaagtgcctccatccccgacgggaccctgagcatgggacctggtgtcactacctctcttggtatgtacatggaggatttgtcctggcagcccctcggtgactttgtgtgttggtgggctcagggaccatgctcagtcctcagtcctcagtccacgcccacctctcggacaggcacagttggcgaggcctcaaccacatgccagttccccgctgccagggaggctggggagatgcacttccaggctccattgagaagcgttccccaacatttgagaagagttcagatcatagcagccaagaaaaaaataaaaaaggaagcagctgccacaacaacaaaaacaaataagcaatgaagacccctgcccccatccgctctctccagaggcttgaggggatggctgaaggggacatgaggacatgccatctgggggactgccacccgcacctccacagaagaattgattgggggtagcaattgtggcagaaggcgtccctgtggttctgggagatgggatttctcagagtggtgatttactggagcctaatcctccctgccccgctctttctttacttttcttttctttttttctttcttttttttttgacacagagtctcgcactgtctcctgggctggagtgcaatggcacgatcttggctcactgtaacctctgcctcccaggttcaagcgattctcttgcctcagccttccaagtagctgggattacaggcgcccgccaccaggcccagctaattttttgtatttttagcagagacggggtttcaccatgttggccaggctggtcttgaactcctgacctcatgatccacacccaccttggcctcccaaagtgctgggattacaggcatgagccagtgcgcccagcccccgccccactctttctaggtgccagttctgcctctgagagatgtgctccttgatcaccagcatcagagagatggtgtctgacattggtgtctgccccaaatcgggagcagtgaacaatggctgacggcagaacacatgccttcccgaagacactgctgtccgggtgtccagtccccacattcagtccatccttgggccctggaagagaagaggtttccccagtgtgttcattttatttgtgacgaatcatttttggccactcttttttcagtatcaaatcccacttgaagggaaaggctgtttgagctgggagctttggtggcatcagcagctctctggggtgagtgatgggtgttgcccagagagcatacgcgtcatccccacggccacctggtcctctgaacctcagcatccctgtcccccgaacctcagcatccctgtcccccaggagggcttcctggagctctgccagccagaactagaggctgtgggactgctctccgggctacactttggtactggaggagaggttatctgtgttttttccctttatttatgatgaaaaatatggtgcacttctatttgagaatcatgtgccatcgggaaaggtcagaacccacttctggaaggagatgctaacggcagtccattggtgacactgggaccatgctggcctcagcaggtgcccttcagacagtgggcagctgctccacccatcctttgggctctggcctccctccagagaacttcccggtggcagaaacactttggagaagcagcaccggtcttcatgtcaggacattccatcaagaaaggctgtccaagctgtggcctgcatagtcaacctgttttactcatttgagtgccacctttctaaatgatggggtgcccacttcagggaaggtgcagctgtgggagcagaaggcaggccccacagtctgtatatgacacgtgccacttggccggtggaccctcagcctgaggacctctggaggggacactggctctgagtcccctgtggaaggggaagcacagttgttggatgacgcgacatggacagttctctttcgaccagatccttgtctcccatcgaggggggattctgctctcactgctgcttatgtcaggagagggtcactgttgcctccatcacctcaggtacgtcagaggagggcctcaaggaagccttgcatctctgatggtacgtatccttgtgtgttaacccttgccgtctgtttcctttgcaggaggacaccctgggctctggaagagagacagcaccccagaagccggccaggaatggttggagggaggctattggtgatgtgttcactctgtgtgtggcagataccccacagtggacctcctaaagcactgagtgcctccttgaaggacttgctgtacgtggtgtgaagttcaggaacacagtgtgggtgtctgtcagcccctcgcagagggtatgtgcgcagatggtggaacagctggcaagtgttttcctttatttgttttttcttttgagaattgagactttattgaatgaatcaccatataatcctgtttcctaaggtaaatctatacataaaaagttaggtcctacaccaccaatttcttgttaagaaatggaccaagaaatatgaacaaaaccatgtgtaacacagttttcagagttttagaagaatggcaaaatatacactagcttgtctcttgattgccaaagcttaaactctaaagaatagggaggacataggtatacactggaaaaaaaaatggcaaatacgtgaggaggatgggaatgtttgtgactacatgggaggcaaactgatttttttttttttgagacggagtctcacactgttgcccaggctggagtgcagtggcgcaatctcgactcactgcaagctccgcctcccgggttcatcccattctcctgcctcagcctcctgagtaggtgggactacaggtgcccgccaccacacccggctaattttttgtatttttagtagagatggggtttcactgtgttagccaggatggtcttgctctcctgaccttgtgatctgcccgcctcagcctccgaaagtgctgggattgcaggcacccaccaccgtgcctggctaatttttgtatttttagtagagatggggttttgccatgttggccaggctggtttcgaactcctgacctcaggtgatccgtccacctcggcttcccaaagtgctgggattacaggcgtgagccactgcatctggccagcaactttttgcatctaaaaggtggatgttccttctatgcttacaggatttatggttaatca

SEQ ID NO: 78038 - DNA, 5630 bp, Homo sapiens
agccccgacctgggggaagtggccttgctctggctggtatgtgcagaatgcttgtccatgtagacgtgctttatttatgccaaatcgtgcttgggggcttcgggggatcagacttgcttcctcaacaagctgtgactgcaggggagggactggctaatagcagacaatgggtgttatctggtccactcactgatccattcgccagtaggaggaatgtctaactctgcatgtgtgagaagtagtggttttcaagtacaagacttttttgaaccagttccagctttagagaagtgagattggtgtaggttgtccgtgtgtggaatgtgaatggagggtgggacatggagcatacgctttgcttgtggaaaatgtctcctggtcctcagaactgaagccgttttagcggcacttcctggagtgatggcacccttgcgagatagggtttgagtctgggattattggtccttcattttttgctatgggaggcatgtgttgtcgctattttagtaagcctctgcatccactccaccccaaaaatgatttttctggaagctgtgatcattgtttttggagggtggtattagtggtggtggtggtggtggtggtggtggtggtgatggtggtggtggtgatggtggtgatggtggtattggtggtggtggtggtggtggtggtactgatggtggtggtggtggtggtggtggtggtggtggtggtggtggtggtactgatggtggtggtggtggtggtgttggtggtggtggtgttggtggtgttggtggtggtggttgtgatggtggtggtactggtggtgttggtggtggtggtgttggtggtggtggtgttggtggtggtggttgtgatggtggtggtggtggtggtattggtggtattggtggtggtggtggtggtggtggtactgatggtggtggtggtgttggtggtggtggtgttggtggtggtggtggtggtggtggtggtactggtggtggtggtggtggtggtgttggtggtggtggtgttggtggtgttggtggtggtggtggtggtggtggtggagggtggtggtggtaggggctggtgagcatcatgttttgctacctctctcagttgtatttaaagagacattgtttttgacctgtttgcctattcctcagtctgtcacaccaacatgaccagtcctgccgattgaaactttctggacacaagcttcagtctctggaagattcttgggtgtccttctccctccaaggtatgtgaaggatgctccagcccacagttacatgacattggtcattaggtgccttgggagggcttcatggaggcgatgtgactttaggaacctgacaggcttattttctttttgtttttgatatttttcgaattcaaagcatagaatccctactttgcctgctttacttgtggcaaatttttgatgtacattcactttttttttttttttttttcagaattaaatgctactttggaaacgctcttgaccatgaagcctccattagggaagagacattagggttacccccacccagacgagtgacagcagggcagaccccaaacttacgtttgcctgcataggagttccatctctggatgtgaagaggccaggggtgggccctgcgcttcccacgtgggactcgcaaagtgctcacctgcttctgttaccttctgtctttcatgaatcatgtttgcgtttgtgctctccagggctgttcccacttttcccatctaaaaggtggatgttccttctatgcttacaggatttatggtgaatcatagaggaaaatccgcattttcagtatctaaggctgcttttaaaacatttctgaacatttctgagaggaaggttagctccctcccccatgcggagagtgatggaaggtgaatcccagaacctaagctcttgttagcaaggtctgtcctgggacatgcgtcctccgcagggcccatgtcactgccgctagcccgggaggcccctgccgactgcacctatcctgtgctgtctttaattttgatagattgtgcttaggttcatgctttccaggactcaatccttctttggtatttaaaaggtggatattccttctatgtttatgttatttatggttaaacatagaggaaattccacgttttcagtatcaaatgctgcttggaaacattcctggactgaaaccaccatcagggaagagacaataaagtccccccccccactccagggtaagtggaaagtcggtggacctcagaacatgtgctgaattcgtgccatatgtctgcggaccacccacccgccttgaggagacccctctcgcaagctgcccgctcggccaagcggctgggctccgtcgtcattttctccatgaggccgaatgctctcctctgtgctatgttacttttgtgtttgatggattgtacttaggttcgtgctttccgggatgaaaccttctttggtatttaaaaggtagattttccttctatggttacgtgtttgatggttaatcatagaggaaaatccacgttttcagtatcaaatgctgccttgggatcatggctggactgaagccaccatcagggacgtgaggtggggctgagccctccagggtaagtggaaagatggtgggccgcagaacatgtgctgagttcgtgccatatgtctgctgaccatcacctttagaagccccctttcgctgaggagccagcttggtgcacaggctgtggtgtgttgtcacagctatgctacgggactgaaaacggttgctttactgtcttgcttccattttccatgaactgtgttcagatttgtcctttccagagcccagtccttctttggtatttaaaacgtggatattccttctatgtttacgtgattcctggttaatcatagaggaaaatccatgttttcagtatcaaatgctgctttggaaatgtttctggaagagaccgtagggcctgagtaggtgcaaagatggtaggccgcacgtcgtatctgaatgaacggggtatgcccgagaaccatctcgagacgccaacttggtgaagattaaattgtgggtctcgtggtgccagttcttccctggaagctcgtctgcctcatgtgactttcttttctgatgactcaagcacaggtgcacgctttcctggatggaatccttctttggtatttaaaaggtagattctccttctatgagtacattatttatgattaatcatagaggaaaatccacgttttcagtatcaaatgctgctttgaaaacctcggaggacgtgaagtcgccatggaagaggagatgttatctgtacccctcctgggtacaggacggacagacacagaattgtactttgtatgaaatacgccgtcagcttctctgctgtttgctcactgcccttggtgcacacataatgtgttgttacaaggctgtgttctcagtattgcctcattgaccttgaatgaagtttgttctctgtatgtttaccatgattgcaatgcattttctggaatgaacctcttttactgtgactagttgtaccttagagaatacctgagtgggctgtcaatttcaggaaggggcactgcttcaggggctatggaaggaatagatgtgtgattcacccacgggcctgcacttcacacctcggtgtgctgctctcaccatgcagatcccatctgtgtctctaaggcttgctcctggagctggtggcaacttagtcacagaggaaatggccttcctgtcactgccatcatttgctacttgaagagaggtaatccttcacgcatttgctttacttgcaatgattatacaagggcagactctctctggggagcaaatcctgcctgggaagccttcttgggaacaaggctgactccagcaacctgttagatggccaggatagccctggggtgtggatggttgaccacagggcatgtgcctctgtcttgctgtttgtgacctggttctctgaccctcctcatctcatgcttccttccaagaactttctggaagagatgctggctttggagatgatatagggttttctcttcagaccacctgttctgcctagcaaaaagggcctaccttggccgggcacggtggctcacgcttgtaaccccagccctttgggaggctgagacggtggatggcttaagcccaggagttcgaaactagcgtgggcaacttggcgaaaccccatctctgcaaaaaatacaaaaattagctgggtgtcatggtgtgcgcctgtggtcccagtacttaggaggttgaggctggaggatcacttgagcccgggagttgggaggttgtagtgagccaagattgtgccactgcacttcagcctggctgacagagacccctgtctcaacacaataggttaaaaaaaaaagaaaagaacaaagggcctcccttgatgggccctacttatcacaaagcatccatgggctgctactccggcaggtctgcccagcatgatgccagcctctgagaagaggtctcgtggtcagtgcatctcccagatacatgaaagaatgaccgtcagcaaagtcaatgtctaatgtagatgtgggtcatctggtctacccactctccatacctagcccatccttggagtgacttttggacctcactgtccacttgagggaaggccagtccacaggaaggaggccccagagcacccagtgtggctacaggacttgctgctgggacctctaagccccactgctctcttagtccattggtgtcctttagggattcttgccaatggaaagacccttggattcctggtgttagcatgtgtttattcagagagagttggcccatgagaatctcattttcctttgacgaatcttgccctagatgaatacttctgagtaacaactaactgctcagatggctttctgaatacaatgccaaattcaggagaagggacacttgtcatagtgctgctttgtgatttgcaaacggagtgcgttggatttctgtttctcttttttctttaatgatgcatgtgactgcatcttctaacctcccttagccagtgttcaccaggagggcttcctggaggcagtggctttgggcagaggcagaggttcttctcccagggtgtttttgcaggccctaaagggatttcagccattttacatttacattatttcaaatggtacaggattgcctgtcttttggtaaccaatcctgtcgtgaagagatgctgggaagtaaagtcaactgtatggcaggccccagctccagggccagccagatgaggcttgtcacctggcccctcccccttggtctcaggcctcgcaggaggagatgtccactccggcgaagacccggcatagtcctcacctgctctttgagccactctttggtacttgaagagaggataccctttgtatgttcacttgattaatggcgaatatacagggggagactcttatttgcgtatcaaactctgtcgaggaagacgctcagaccctgctgtctccaggacaaagcctcggatgtcagcccctctcaggtacggcttggcttccctgtctgggaacgtgagcttggctgtgatcctagcccttgggttctgccttcgctctctgtgctggttcttcctgtggactccctggaggc

SEQ ID NO: 78039 - DNA, 7309 bp, Homo sapiens
ccctcccccttggtctcaggcctcgcaggaggagatgtccactccggcaaagacccggcatggtcctcacctgctctttgagccaccctttggtacttaaagagaggataccctttgtatgttcacttgattaatggcgaatatacagggggagactctcatttgcgtatcaaactgtcggagaagacactcataccctgcttgtctccaggacaaagcctcggatgtcagcccctctcaggtatggcctggcttccatgtccgggaacgtgaggttggctgtgacgctgcccctgggttctgccttcgccctctatgctggttcttcctgtggactccctggaagcagtgggagaggagggacctttttgtgtgctccaagtttaatggtggtttgcttttttaaggataaatcacacattgatctgcctcttcttggtaccaagtcatacacagaaggcttcctgttcccagcatcagccttagaagggggacctggatgttggatcatttcaaggggaacacagacagcagtgatggtggaccacggagcactggctctgtctatgctgttttcgagcctggtaggccagccccaggagggcttcctggaggtggtattgaccttggggaaggggctgaggtgtgctcatcagcgctttttttttttgatgcttgggtgttcatgatccagctcgcagtccccaggctgaatctgtaagaatggtttgcttctatttgtcatttgtgattgcccatgaaggcagcgctggggatgagccgtgggagctgtcagccccgcaccaggtgcgtgcatgtgggaggtcagagggcgcctgcttctgcctcgatgtctgtgccccgtctctgactgctggctttctgctcacacctaggatggctgcctgagaatgggactcttgttctgtgtttgtggagacactccttgggccgtgtgactgccggctttttacaccccgactgccatgggggtcatctggacccgaagccagcttcaggaaggacattcgcagcatcctcagcccaaggaaagcgaacgtccagctgaagagaggtgagcaccacgcctgggtaatgagtcacataacctgccacctggaccaggcggctcccgctcctctccccttcttgaaggagagaccactgtggggaatgggctgtgggtctgcttcctcagttacttgggggtacgtggggtttactactgttgaccctgtgctctttcttagcatggcttcatggccacgatgccagcctctggcaggggtggggcaagggctggcatggagaatgacactggtgtcaacggctctgtgagatggatgaagggatggtgaccacagggcctttgctttgtctaaggtgtaaattcatccagtgcctgggacctcggtgctgagtgcatccttaggaaaacttcctggagaggtgcccacactgggaaggagatggtggtcccaccccagggaattcctatagaaagtgagaagctgagctctgcgtgtgcccaggaaggcccgtggggtggatctccttttcaggaacaagttctaatctggagtgatgcctggaaaagaggctgattctggtgaaggggcactggcgtctgccccttcctggcccctttgggatggagagctgacctatgggcacacagctggcaggtggtgtttgccacctggtctgctgatcccgcatctcccaccccctcccccgccaggatgaaccccgggagaggaggccggccccgtgaatgatagtgaggaacctgcccagtgctattgtttggtacttaaagcgaggttgccctttgtatattcggtttattgacatggaatatacaagggcaagctctctgtgagtatcaaaccttgtcttggacccagtccacactcagcaagggatgcggtatgtgtgtgcatgaccgtgtgtatccgttttgtgtgtggcaaatcgttcacgggtccccacttcacagagaggacttcacgggcacctggatgactttagggaaggcagtggcctctgggacatcccctctcctggtgcagtgtgggcggggccaaaagcatgcacgatgtgtgtggtctgggtccctgcttcctgagcgggaagtcatcagcccgggccgatggctggggtggcgctcgtgtggggtagtggctttgtggtccctgctgttactcggtccgtgagtgtgcatgttctgcttggggtatgtgacccggtccactaaccctcagcatctaattcatccccaggaccgcgccttgaagacgtaccaagtccacccaaggcagtggctttcttttccgtgctaacctttggtacttggagagtggttatccctgtcctgttcgttttgctcatgtcgaatcgtacagggtcatccactttttcagtatcaagagcgcagactctggagctcgatttcctgtgtttggatcccacctctgacatttactaaccgtccaaccttgggcaaggatctcatcgtgctgtgcccattgtctcacatgtcaaaggggaatcacattggcgtccatttcttggggctgctggggctgaacgagttaagacttgtacacggctcagagcagagccccgtggtcggcacttcgtaggtggtagccaggacccttgtgtgctgtgaaactatcattggtggtggtggtggtggtggtggtggtggttttatgactaaaatctctccatgggtttttggaacagtgtcaaaacatggaagtcaagtccttcatcgggtatggaatggactaggaagcccagagcatacacggtgtttacaatgggggctagtgatgctcttgatgcttggcagctaagccattcacacagtggcttttgatacagaatgccacatgcagtgggggtcagcaggggtgccgagaacatttgctccacttaagagagacagtccctgggttcttgacctcggccactatctacgctttgaaggagtcttgagcgaggatgccaagctgagtgaggattctatggcatcttgcttccctggtgcttaaagagaggtcaaacttggtgcatgcattgtgcatgcctgtgtgtgcgtggtgtgtgtgcatgagcgagtgtgtgactgggtttgccacgaagcagtcaccatctaaccttgagccaaagacctggaggtggtggtccgtgctgctgtttcatacttgaggagaaattatccttggtgtgttcgctttatttatgatgaatcatacaaggacaatttctttttgagtatcaaatcttgcctcggcagacttcctggacgccatgacaagttctgtaaagggatgcacgcatcagcccttcccaggggctcacgcctgggtggggatgagggcgcatgcagttggtttgtggtggggacacttgtgccctaacctcagaaccctggaggcggggccacgcttggcagggggccacgggactccttggtgctatcagggatttgcattggccatgggtgtgtgttgtgggtgacgcagcattcaagctacttatcaaatcctgcttcttggaggcacttcttggacatgaagcaaaccttagggaccgatcattggggccagacccccttcccctgcccaagagtgtgactgacccccaggcatgggcttgactctcaatgtgtgaagctgacctgctaatcctcattgtttggactacctgagaagaactttctggaagagacaccaactttggagaagatgcccagctcttcttgatggcacagttctttggtgcttaaagaatggctgtccgtagtatggtctctatatttatgatgattaatatcggacaaccattgttttagtatccaaatttgcttcagaagtttttgaaagcacagtgctgacttcagtgaggggacattggtgcctgccccaccatggagtgtgactgtgttgatgatttataatgatgaatccagtgatctcagaatgcaagccaccagtgtgatttccttggacaaatgctagctttggggtggagatgccatttaggggcttggtgccatatctttttattggaagatgttcacaattatttcatctctctttctcttcttgttattaaatcttagccacgaggaattccttggagagatgccggggtcaagcctctctctaggtagatggtggaccggggaacctgggtccagcctctcctatctgtagccttcattctgagtatgaaacacttcctgtagggaatgcaaacattagtaaaaactccgtacatttcctgttactattactactttttggcagctcctaagcagctgcctgttgggtatttggattattcttggtggacgtggcatggcttcgtgccttccttgggaaccaccccatcttagacagactctcatggaataagacgttgtggtcgacagcacctctggggtgtgtgtgtgtgtgtgtgtgtgtttgtgtgcgtgtgcatatgaatagttggctagagtagtgtttctcaaactttaaaaatgctcctaagattttcatcacctagggatcttgttaaaaagcagattctgattcagggaccaagattctgcatttttagcaagttctcaagtgatgctaataccgccggtctgtggacaacactcacagtggtttggggctggagaccaggtgctttccctgtgatatgtgtcgcctgtctccccacatgccatataccgtccatcgtgggagaacggcccagaatcaacgtgccatgttttggtttgtgaacaagggttcactttcacatgcgtaaatagcatgagattacttttctttaaaatcaaatcatgcctcaaagggcttcccagatacaagacctgcttcagggaggggccgccggtgtcaagctgctgcaagattgtcgggtgcaggtcaacggcacgcttattcattattgatgtgctgggccctggaattctgtgaccctccgtttccaagcagtcatcgggaggaaattccaggaactgagaccatctctgcggtagggaccctgtcttcagggatcagtgacaccccattttatcggaaacagaattcttcatgatggctttgcttatctctgacatgcattctgctggttctcgtcatcaaatcccgtctttcaggaatccgtggaggaagctttcatatatttttaatggaacctgccttagaagtctttctgagcatggttccaatgtcagggttttgactttggtgccagggctgcctgggccctgagactgaggtacgggaatggaaggtcaatgccagtacgtgtgctttctttgcaggatgtgaacacctccctgccccaaccctgggattcagctcatcccaagaagaatcttctggaagcaaagacaacggtggggaagaggccatggttttcgtttcagaactatgcaaggatatttgaggagaggttatccgtgttatgttcgcttcattcatcatgaataatacatggttaacctctttttgaatatcagactctgcctcggagggccgcccccacaggagacgtgagagtgtgtgccttgtgtgagctgagagcccctgccccggctccgtgctgcgtgagggaagcttcctggaagtgaggctggtggagggaagagccctgggttgctttgctgtgtttgctgtgaatgcgatgtgtttttgcgagttatgtgaggttccctcctctttgaatgccaacttgtgccttcccccagtggctgggtctgtggcttagccacagggctaggtcccttcctggacccagtgcttttcagggtgggtccctgggggcaaggacaaggtttaccactccactgggacacttgaggagaggttaactcctccatgcggactcctttgaggacagcctgttttcctctcagggtggctccctggatgaagtccagcacctctgtgggtgtgtgaagggcaggccgacttgggctgtgttcccactcctcacccaggtcactggcccagtgccacttcctcctcaggtcagcttccctctgccagccgacctggtggggtctcctggtccattgcttggtgctcatagacactggcacggtgccaggttcccttcactccttcccgatggagaccatgcagctaatgaatcttcggctctgtgatgctgccttggagggcttcctgcacacagcacctggtttgagaggagaacacggactccagcgtgtcccctggttatggagaagggaggctgtccttgatcccccgtttggtggatgatatagtttggctgtgtctccactcaaatctcattttgaattcctttgtgttgtgggagggtcctggtgggaggtaattgaatcaggggagtgggtctttcccttgctgttcttgtgatagtgaatgggtctcatgagagctgatggttttataaggcagagtttccctgcacaaggtctctgtttgcctgctgccatccacgtaagacctgacttgcttctccttgctttccaccatgactgtgaggcttacccagccacgtggaactgtaagtccaattgaacctctttcttttgcaaattgcccagtcttgggtatgtctttatcagcagccagaaaatggactaacacagtggagggcagtggcaccaagccccgcccccttcaggatgtggtccctgtgtggggcagcatcctggagtggctgcaaagccccactgctctctgcctccgtggctttgtcctatctgaggtggccagtgcgctggggtccctgtgtggagtcagttctttatgggtgcctgcaggtgccggcttcacagtaagaaaactgtcagcttcgcctgaggtatgggcacagaggtgacgcagggatatgaactttgttgacgaatgtgttctctgcacagctaacccagagaattcattccaccctcaggagaagccctagaagtgatacaggctctggccgggggacccgatgtgctcgtgtcgcggcgtggggcttggtgaggaaccaccggagtgctcttgcatttttcatgacaaagaccacacagttggcctcattcctgcacagtgggagaatgtgtggaggtgtcccgccaccagagaggaggtctatgtcagcaccatcaccaggtacctgggggagggtctgctgacgatgcccaatgttcaatggcccaagcaacccgtccttgggggacttctgggcaagaccatttcggtgctcagccccactccgtgtcccaggcagagagggggctgaattgatgatacctattaaa

SEQ ID NO: 78040 - DNA, 11719 bp, Homo sapiens
tttgtggcttatcatattggaccactgtttttcaggacaaactccccggagatgtcccctggcaggaccctgacctggaggcagggtgctgtccatgataggggaatggatggttgatcagagaacgtacattttataaatggtgtatgtcagttgatccacagtccctacctatccagtgacttctggaggccacatcagctcagaagacaaggtggtggtttcctaggccatgctattttctggcacttgaaaggaccttctccttgccgggtttgctttctttatgcccagtctcatgagggagtgccttttttgagtatggatcttgctggggaagctttctggaaggagctgttgcccttcgtccctctccaggggcaagaatgcatggttggctggaaagcaagggcttgattgacattgtgcacccctcaactctcctaaccctctgtccccaattcatcctcaggcggactagctggaaggaaggcagactctggtgaagacgtgggccgtcaccgtcagccttcggtacttgaagagtggttatccctgctgtgttcgcttaatttatgacgaatcatacagggacatccagtttttcagtatcaaatactgctttggaaggcttcccggacagcgtcccgccttcaggcaaggggtcttggcttcacctcccacccaaggtatgtatgtgaacgggccatcgcagtgcactagcttcttcatgtgccacagccatgaccagaatcgaatctctgaggaagatggttacttctaaggctgtgattttctggaaggggctttggtgtctgcactacattattgggggaagttgaccagtgagaggcccattcacacaagacgtctgtcacctgctccaagtgaccctcacccttggtaagatgaatctctggagacatgctggctcggtagtgttactgtcatcagccggactgactgataggtaattggtcatcattattgcttttgttccagggcagaatttttgagtgccaaatcttgccagggaagggtttctggaagcagcaccgccctctggggagacttggcatccacatctgttggagtttgtggagagttagttgagcagtctgagctttgtttctgaggcgtctccctgagctcactctcctgccagagctgtgtcctgcccatggccataatggctattgagagggttggtgactttggccaccatgattttgtttcgataaagttctctctttttaaaaaaatcagattcttttgtttatagcataactacatggttcatgagttgatcaaataacaaggaatgacttggtcattccataaatagtgatggagtgcacactgtgttctaggtgattctggaccttagcagagagcagtgaatgaaatcaagttcttgctcatgtggactttacattctggtggaagagacggatgagaacacatgaattaggaagcgtaattttgtccactgctaggttttatggggaaagggaaagcgggttacagtgacagaaagaggtaaaagcaggtggacctttgtgttaaatacaggggtctggaaagctctctctgaggatgtgggtgggaatggagtggggtggaccagaggaaggtctggggtaggagcatttcaggaggagggcaaggcccatggaaagccccctggcatctttaagaaaaagcaagaaggccagtgggattgaaccgagctgctgggagtcgctgggtctgagctgggagaggcaggactccaggttttattctgagtgagatgggggatttggaagggttgtgagcaggggggatgcgtggtctgtgttggaaagatcactctgaccacaagggcattgatagagaatctacccagggcagtgatggggaacctaccaggagcctggcgtgcctgagctgggcagtttctctaggggcacctgcagtggcaaaagggggccccctctggacctccctagttcagtgggccctgcgggagcctggctggcaccttgatgtgcttgatggataactcagtgtgctctgttgagaagtccaaggccctgttcagaaaccctggggtctacacactgcggagtgctcctggcgtgtgacaagtggcttccctcttcttatttctaaaccttgtgcgtgtggattcaggaccacaatttcaactccagggaagggggactgtgccagcaccactccaagggaggtgagtgaagggttgcccaaactccagtgtgttcctaggacacccgtaagctgcctcactaatgctcggtgtccactctgtccacaggatggtggttggcagccactccccttggagaagtggaaggggactccttgtctgtcttgtctctgcttttctgtggtacttgaagagaagttgttcgtggtggattcgctttacttatgacgaatcattcacggacaacacttttttcagtaccaaatgctacctctaaggacttcctggacacaatggcagcttcaggaaagatagtctttgtgtcaaccatgtggaaaagccaagaatggatggcgggccatggacaatgcgctgacctagctgtaagtcacctggcccgataatccgagcctcccatgcacctataggaggtcttcccatgggtctcaccaactctggggaatcagctgtggttctgtcaccagcgtcacctcacaagactttgaagagaggctccctgggccccaggccgacttccagaagagatgttggtgtcagcaccgtccagggtgtgtgactggttgaccagaggggcatgcactgtgttcaccctgtgggccacctagtcaccaaccctcagcatcactcccactccaggaagactttccagagctcccaccaactctggggaagcggccatggacttgctgtgactgcttggtggactgcgatgacacgtgctcttgggggtgtatgtttacttaaaatgcaatgagtcagccttggcagccccttcaccactgtgacagcctccttgaagtgttgacttccgatgtgggacgccatgttgtcttctgttgagggacctgatgtgggccagcttttctcctgggtgtgtgactgaatccttcttcccagagcatgtgctgcctttgttaggtctgtcacgtcgtcctctaatacccagcatcctgtctctccctaggaggctccatggagataatgcggctttgggaagcggccatgattctcctgtcagggaccagtgagctacgcaaaagctccctgtcttgtctggaaggacgaactgcatccttgctgctggggagaaggcagtgccctcagcactcccttaaggtaagtgcgcctcgggtgagcatgcacttaatgtgggtgtatgtcactcggctcggcccactacccaatactatcccacccattcctaacaggactcccgagaagggcggccacctctgccagagaggcaatggatttctcaccagtgttcatgtgtggtacttggagagaggctggccgtgatgaattcgattcatcaaagcgagtcatacacggctctcctctcttttagtgtcaaattctgcctcggagggcttcctgagccagtgctgcttccaaggtaggtttctggatggctgaccccatggcaagcattttcctgaggatgcatgtaactgacctactaactttagagtccaagctgaccctaaaacaacttcctggggcactaccaactttaggaaaatcgagagaggttgttgggatgccctaattttttaaaagttaagattgaaatacacatggctgacttctttttttattcctatcaaattcaaccttggagttgaatcttgggcatctagaagcatcttttattagtcagccgtcgggatacagaagaaaacaggaacaggactctgtgcgacccctggtttactaacccacagcagccttacaccctccagagaattcctgtaagggaatcccaggtttaccaaggaggcagtgcttagcctgcttttgcacacacatttgtgtgtggtttgcttcatatttaatgactcctgtgccactgacatccttgcattattaaatgttgcctgcatggccagctgagcacaagaagtggtatttctgtgcacactaatcctggcttggtgaacctggggttggccggagagcatgggtttgagccacctggtccactcatcctcagggtcccatccaccctcagaggccactcccaagctgcccaggctgtgcagaagatgcaggaatgctgcgagcagtgccacctcatggtactcggagggaggttgtccgtggtgagttcgcattatttaatgatgcccaatacacggtcgacctcttttcggtatcagatctcaccaggtgtcttcttggacctgatgccgatttaggggacaccatactcatgttggttccacaccagtgcaactgaacatgtgtgtggccctggaaccaatgggtaggtgctgctagcactcctaatcctcagccagtgcattcctggggaagaagcatgtgatctgtgctcaagacccctctgtgactgaggaagtggtggtgcccatgatgcttctggggttttgtgtttttttttaaagaaaaacaatgtatagttctcttctctttcactattaaatcttaccatggaggaaggacttcttagacatgttgacaaattcagggaaggggcgttgatttcagcattcttggggactcactggaagggtgactcaccacatctgttgatctggaggccacagcaaatttaagaacagaagacagttgcattttcaatttcttgtttttcttttcaaaaaggataattattctaccttattaccatatttatgaaaatgacacatgcttaataaaattcaagcgatgtggaaaaatctaaatgaaaaagaaggaaaattgcccaattctctggcacccagaaataaccattaagggctttagaaatttcatacacctgtctgagcatacatgcaaatagaaaaacaagacagacgcagggaaaatatgagatcacactgtacctaatcattttattaaaaatgctaactataattttccttgaatttatcataaaaaacaagctaaaggagattgaaatgattgataaatgtttctcgctttaccaccacaggtagcaactcctaaaagatccctgtaaaattaagaaaaattagagtgtaaaaattaagtggttaggattgttatggtttttaactatttcaatttcactcctagttcagaaagataaagaagtcagcattcttattcttcctttgcttactatctcctgctttttctcaattatacattttaattttacattataaatatctgcaatttgttctagaactataattcttgcaggtgttttgccatagttctatatttaaatgaattcatttctgaccacaaggtttgtttttttttaactgaggtttctccgttctttagtttttaagtttaatttatctctcaatggaaatgatcttattgtttctgtgagaatagctcatagacactacccttgagttcctgtgcatttgagagtatatatctctttatgcacaagggacagcttaactaggtataaaagtctcagcctacttgttttttctcagaaatttatagctattgtccactgttttttgcattgaggctttcactagctgtcttaatgtggcttctccatgtagctcttacttacctggactattttatctagcgatcttcacaaaccttgttggaaagactttgaggtactatgttctgtgaggtatttcgtctctgagaatgtctgaccattgctcttacaccttttcccatctgtccatttttttttcattctgttctatttggcctttatgatttcaagtttttaaaatttctttagtcactttaaagatatttattgtataatttctttcagctttagggatacaagcccctttctttgttgaatctattgactctcatgatggtgcttttcttcatggtttttgtagctttgtgttgtgaggttatcatcagttgagcacttaggtgtttctgttttgtttcaatccctatgcacatgagtttgcatttggttctgcctggtaccccaaggaatttaccagttggtaccagtttttcaactcattttgttggcttaaggattcccagacatatggctggcagaagtcctcaccatatctttgtcctgaacctttggtatctcacaggagacctcattctatccactccctaaaaatgacaaattctcttatccctggccattataaaattttctggttcccctttccattcccagatcaacttctcctggatgcacggtcatgtcttttcatcctgcttgtacttgaacttgactgtagacccttggagcctctagccagcacagcatcccttagatcccttagtggcaggttgcatgaactaattcttttcattaacacctgagggttttgcctttcagctgtatgtttatttgggaattgattttgcctgctgttgcattttatccaacacttctcaatgtttgtggaggagagggttccctatcagtgcttgttgctgggatggagcctttgagctgaatgatgggtgaacttggcatgacattcttggctcccagtttcttccctctgaactttgtaaacttgcctccattgctttctggtgttaaaccattgctgtggacaagcctggggacagctgctttcccttggatggatgaactttttttttttcctgcttagatttcctgattctttctttagtcttgaacgttggtgactttaccgggttatgactcagtcactatttttattcattagtttttctgaatcataatatgccttcttgatgagtagatttaatcgttcctttgtttcaaggatttattcattttatgagcacttttctactccaggtgttggttttttctttggtgaaataatctgttttgttcatttcattgtgtactggaggagaagaaagtctgtcatctggccccttgctgccatctgtctgcacgtcagtctgttgtcatttgcactgtgcatttgtctatttaaaacaatcctacccagatgccccctcctcagtgtcaccttccaccctggcaggatgccttatggcaatgccacttctgagatggtcgtgggagtcagcaccactggccaggtatgtgaattttctgctaacaatggaagagtttgaaaaaccatatatgaagtaccattaaccccaagcatgcaatctatccttaggaagacttcctggaaattatgctcacctttggggatgaggccatgattctgaggtcagtgccatgccatggtctaataaagtttgcattcaatgctgtttgtttctgtatgatcaatattgtaaagtcagtctctttgtcatggactcagctttggagggttcctggacacaaggcctgtgtaaggaaaggatcattactgtcagcctcgatgctaatgtgagatgagggaatgtgccctgctctgatccaaatgctgagtttctgtgcacttggcctctccaccatcaggttccctggcagtgctcctttagacatgcacccaccttggcaaaggcattgaggtctggatggctgcagggtccgggatggaatggttgaatacagggcgtgtgctttcttctcaaccctcttgcagtccgtctgctaaccgtcaatgttcactgtctcctagggggacttcctggaggaggccaactttggagaacaggcattgacattgggtctgcgctagcgtgtggtacttgaagataggttatccgtgttgccttcgctttatttgtgacgaatcatacacggttgacctatttttcagtaccaaatcccgccttggagggcttcctggagcggagtcttacttcagggtgtcagctcctctccagggtaaggaaggggaccattgaccatagccgacccagcagtgtgccctggccctaaccctgtgtgtgccccgtccttggggaggtttctagagatggtgccacctttggggaagaagtggagcttttcctatcagagctactctgtggtactggtggagaggtcttccatgatgcattcgatttattttttgaccaatcctacatagtggactcttttgaaagcattaaatctagccttaaagcaccctcgggtggtgccgagtttaggaactagaactggtgtctgaatgcctgaacgcacggcgaagctgacagtgtgcacactcttcttggtgggtcgtgcacctgcaggcgtcctgcttgcttaccatggcagtttcctcgaaagaggcggcagttccctcatcggctcactgcatgtttgacaagacaccgtcttgctgtcttccctgctgccctctcttcatgtatcacagatggtgctctgcagacctctctgctgtggcacttccctccctgaatggcttcctgcaagaggtgctaattgcaagtaagggatggagtgcggcccggaccgcagagcttatttcgtgggtggtgtgttgccaccttcctgactctcagtatcccgtccgtcctcaggcctgctgctgggacgcgctggaagcgagcacccaagtcaggtactcgaatggaggttgtccatggtgtgttcattttatttatgatgagtattacatggccaatctcctttcggtactcaattcttcttgggaaacgtcacgaggggaaagcccagccggcacctgcgcagggtaaggaagtggatcacctccgcatgacaggtgctctctgtgtgacttacatcacttggctcatatcccggccatcattaggaggaattccccgaaatgatgctgacgttttagttgacatggtggtcttctagtcgcatccttgaagactcgtcagtgaataaaccacatttagtcaacctttttaggtgtgaaatcatcttggctgtgtggcacactttagggaaaggaactcctggctgaatggaagacatccacattacgccctcaaataccttatcttctgggtgacctctgggaagcaaggggtgaagggggtttcctcagcagtgagaattaatgttgtttaaagacacatttccatggcacgactcggttattcctactgcaagacgagaattgttaatagcatttattactaccttatgttgccagctgtgtgcccttggaaaatcccttcacctatcagctctctgggcctcagtctcttcctctgtaaagcagggttaacagcggagtggaaacgtgctctttgtgaagtgtctagacagcgtctggcacgtggctgtaggataagcattgtttctgaggatggtcattatatgaatgttatgtcatctgcactcattgtcctctcgccactagaatggaagctccctgagggcagagtccttgtctgttttgcctggtgctgtgtcgccagatgtgcacagtaggtgtgatgctgaatgaatgaataggcagcgtgacctgttttcttggttgaactctctttgaggcctcctggaatggagtgcatggagtacagtcacctgagcctgtgctgtccctgtgacgcagccccacccaccctctgaggatgctgcgctggacgaggagtcgccagccttcaggtcgggtcctccctcaaacccctgtaggctggactgaacacggtcacatggttcattggcagcccccttctctgtgtgaaatcctgcttcagagacttccagaggagataccggctctggaggtggaccttggtgttccagcccctctagggtaggtgaccaggggctgactctagctcgggctgacctgtgatgtgtgtgtgcatagcctcgcccccactgcctgctccagggctacagaagctggtccatgaccaaccatgttctgaccactgcctggggggcttctcggaggtagagagagagagagagcaagaggggagagagcgagccagcaagccagcgagcctgcagctggagtcagcagggaggtcccgcaggcaatgccgcctttggtgaagaggcatctcggtgtgttcttgcccgtgctgatgtttgacccttgagcagaggttgcccttggtgaattcgctttatttatgttgaatcacacaaaggcaacttttgtttgagtatcaaatcctgcttgggatggcttccgggacccagtggcaagctcaggggcatctacacccctcccgtgagcaagaatggacggggtagacgtgggtggtctgccctctgcggtcctctgcggtggatgagaacagatgtcgctcagagaacacaagcttcattcatgatgggggcggggctcgcggcccggggaggatggcgttggtgtcgcgtcggctttagctcttaccctggaccctgtctctttacatcaccattttggctgtgttgatcccaaagacattttgactccaccatttttttttcggaaggtatttgacctcgcggatacacaaagagctcacacttggcagggtctgtgacgagtctgcagccccagacccccgtctagctcacaagcactgtgcttctttctgcacctttccttgtctctatctttctctttctatcccccaaccaaacattgttcccaattttctcctgggttatgaaacaaatagaggctatcagtatctcatcccatttgtattaaataatactgataaaaataatcaacacaaaataaaactaaaaacagctgaaacggcacagtgctaaatgtgttcagttgactacaaattggcagaggaatccaattttcttgacaacatttcagctgtgacatttgacctggggaaatagcaagctgccgacgtggcagccatggaaggaaattcacggtggcggcggtgataaacagtgatatttgatgtagacaagaacacattgaggaatcaaatcttcatgcagatttttaaatggaaaaaattgatcctaatgaaaatgatttggggaaaataacaagggaaataagagaaatgaaaacagctcaacagcgcggtcaggaaagctaaacagggaattggattagtataatggcattggctctgaaaaacacgtttctatgaatatcagtgttggtacaattcttgtgaaggtggttacatttgtgcgtgtttacagtggagttggtggggtcagtaggaacctagggtcaaaaaatgggatacagtctccccctttatgcagttgatcttttcttgctgccccaaaccttcccgagagcttcccggaaaggtgtgctgacttcaggcgtgacacactggtaaggcgtcctcccggggatctgggtgcatgttgtccccagagcattcatacgtaagtgacaggcatcacctggtctccctccatccccacggagggttctgggtgagacgctgactccggagggaagcagaagttctacggtcagtggggtctggtctttcaggacagttgcttctgtgaactcagaaaatctgagacagctcttagttaatttagaaagtttattttgacaaggttgaggatacacccgtaacacagcttcaggaagtactgtggtcaaggcacagcttggctttatacattttagggagacatgagacatcattcagcacatgtaagaagtacattggttttgtctgcaa

SEQ ID NO: 78041 - DNA, 3904 bp, Homo sapiens
agaggcaggtttatcctgagcagcttccagcttgagttttccttagtgattttaggggcccgagataactttcctttcacacttccaaggctattgatgaacacacaggcatccaggaacattctggggttcagtccttcctcagactctgctgttgataccttacatggttccatgctggccccaaggacgtgcccttcgttggtgccgaatgtcatttggtcatagaggctgaaagtcattctggagttgatgtttccaaggtcaaaaaccttgctggggctgtggaaagagctcgttgtttgctggcctgctttgttggtgaccagcattgcacatggctttcttttcagatcaaaccctacctggagaatttccagaagcaacagcaccctcaggaggcggcctgcagccggagccctctccagggcaggtgcctgagggccgcccatgggacaggcccgattgtacccacggtgcatgtcatctgttccactcctgctgactccggtgcgttccgggaccaccttgggaggtgatgcctgccccaggaaggaggctctgatgcaggtcagtgcccatggctcctgaagggaagtcgtctgtgacatcttttctttctttacagcaggcctcgcatggctggcctcttgctccacttgtagcaaggcgcagagggctctctgagctcatgccaacgtcagggaaaggattctgctgtcggtcccactccaaagttcacagaatgggtggtgggcacagaatctggactctgcttgtggcatccatcgtctggcccgatgcttgctggctgcccgctccaggaggcaccttctgggtgttctctgagtctggggaaggttgggttctgaggtcagggctgccctgacccttgtgaagagaagacatctgtgactcacctgctttcttctgctgcatttatccccccagtcccttattttgaatgtctcacttgctttatgaggctaatcagatggtcagccagctgttgataactgtgaagttactctttgagggatcctggggtgatgcctctgtgggctggagatggtgctggtgagaccgcaggtctggggtcagcgttgtgccccgttgagctcccgccaaaggaatcctctgctgggagggaggctctgtgcttgtgcaggggtccctacagggtcaccccctctcagggtctgggaatgaaaagcgggtgcgagcagggtttcattttcatctttagcaaggtgcccaaggaaggttgccgtcttttcagtataagatcctacctgggtcttgcactcaacttctgggaagagtctctagattcattctggaaggggttggaatcgttggacttggtgattgggaacgtccttggagagtgtgaggctctgggctctgaatgcccagaccttgtgctgcccttgggggagggtcttctgcaagcacagccgcctgcaagcattcaccttagtccgagcatctgagcctctccatggtactcggggagaggttacccgagcaactttgcatctggacgacgaatgttgctcggtgaaccccttttcggtatcaaattccaccagggaggccgtcttggaggctggggcacctcggggaaggacgccggcatcagcaccattctggggtacggggatggatggtcgaccagttggaaagtaattgtttctaatgtacttcacctggtccactagccgtccgtatccgctgcagcctgtggggcctgcgggccggggagccgatcgcgcttcagctcagcgcctttcctggtacttgaagggagatcgaccgtgttatattcgctttattgacttcgaataatacatggttgatcttttctcagtatcaaatctcaccttggaggacccgttggagatgaagcccttttgagggtaggagcaggacgggtgctttggagtcgctgcctcagtggggcctggtcaccgagagtgggccgggcaggggtctctttcctgtctctgtgtcttctcacctttgatgtcccatccgtcctcaggactgcttcccgggggcagcgctggcaccacgggacgcggcagccacgttcttgagccgatggcactctgggtacctgagaagaggttgtctgtgatgagttcgcttttattaatgacgaatataacacagatggcctgttttcagtaccgctaccgcccggtggtgtgcgggcgccacgcctgaggcgggactttccagggtacgtgaatgcatgggctggtgtgacatttgtcatcctttcccctgacccccgccattgaatcattttgggagagctttcggggggccatgtggactttggggaagatgctagggttgtgcactgtggtggggggcggtcatgaagctgatgagcaatggtgacggggctcagtctgtttttcatggccagtgtcatcgaggcagaggacacgggggagctagtcccgctggaaggcatcctgctggaaggccacccacccctcgccaggatgttgggggcggctgcatgcattccctgcacctgggctgccttctgctcatctcagtgctgtgagaccctgggtgggagctggtgccttgggtggccgtgtgcgtgtgctgctccttgtggtgcctgaggagaggtggcctgtgttgcattcacagaaatcatgacacacaagacacgagcggcctctcttcagtatcagatcccacctgcatgattcctgcacctgctgatgtcggggaggtccggttgcgcgccctgtgggcccccagaggcatggctggtggccgagcacgcgcttgacttccacctgcagccctgtgctggcctccatcctggaggcgggtgggtggcagggcccttccctgtggaagaagcctcctccctggagtcagtgctgctcagtggtacctgaaataggttgcctgtgaggtgttcactttctatatgatgaatattatacagtcaacctctttccgatatcgaatcccaccttggatgccttcctctttgctgtcaactccaggcagcagctggctctgcgctggttgaccctgtggactttgtgtaggacctgtgtcacttggcctgttaattttccagctccactctgttctggggggctttggaagtgtgacagaatggcatccccaattccagtgtcagcgggagcacccgccatgcccttgcttccggttggcacatcccccaggctgggctggctctcagctacccgatgcttatgtcatatttgcacccctggcctgcccagactacaggaagatgaccagaggcctgtttgcagctgacctggagacttagtgactccagaacatgctgcccatgcccagggtccagggctgaaggcaaggagcacctcaggagtgaccccaaagaatgagctaaggctgtcctttatcactcattgttgatcagtgagctcctgggctcgggagatcttcctgagctgggctcccgtcatcccctagttgagacgtcgctgccttggaagtcacagcctgtgcctgccctcccccttgtcctcctcctcgggaccgctcctctccatgcctagcatgggagtggggatccctggcaccatccctctgggctgcctgctcccactctccctcagcacccctcttccccagcccctgggccacagccctgctggagaggccgccccacaggctaggtccctccagcctgtggcacttgggtctccctccagtgcccctccctctgccagggagagcatttccaagtgcagagtccagctgtttaactccgctgcccagggcacctctgcaggccccttcccttgggcttggtaccaaaatgatccgaggaccccccaggccctcagagtggcagcccccctcttctttt

SEQ ID NO: 78042 - DNA, 3699 bp, Homo sapiens
caaggggatggaatggctcttgttcagcaaggtcatccctgataaccctataaaagcagctccccttgcctcttccctatcacattctaccagttgccccgttactgttttcttcctagcttacagttctctgaaattgcctaatgttaatgtctaccttctttgtgccctagactgtgagatttctcattggcagaaatttctctctctctctctctctctctctctctctctctctctctctcatcccctgctgtgttcagtagcagaacagtgagtgtttgttgattgactaatggagtccccaaaggcagggaccggatcagatgaattcccaggcaggtgctgggcacaaagcaggcagtcaataagatgtggtgatggagtacatgaatatgttaattgatttttagaaattcttcccatttgttcaaagctgtttggttttctagctttttctgcccttccaggatgaggctgagattagctgcaggaggcacgagtcagttgggtctgggttctctcttccacttgtcggggggtgggggcaccaaagccccagaggaagtgacaggccctgtgttcccctgcagatgccgactgatcgcgcccccgcccctccagcaaacgccccagcgctgagagccaaatgctctggggaactccatctgcaacgggctggagcgtggtgttagggctcatattttatgcatggggctgactaaatgggaacatttggagatgaaaattgctgttaatgcatctacacatctttggaatatattaaatgtgtgtgtgaggggaagagtgacattagccttatttaatagcttcaatataaccatccccgcacaccacggcgttaacaggcacggcccccccgccgagtctcccaggccaccactcaggaagagtgctgggtgcatcacgcgccacttgagaattagggggtgagtccggcgtcggcccggcatgcagcagcgtgcatgttccccgccgatttctaacccaaacacagtgaccctgtgccacttgatgcagaatttcattaaaagcaaaaatgattgatttatctattgtttgcggagaagaaaaaataaacaaagggcctttctcatcagataagccaaataagaacgtgtgccccacaggtggccaggatgaaagtctccatggacccttcaaccagaggctctgtgacttgtcccgtcttcagtgcggtgtgtaaaccctgccgccggtccaagttcacgaggtgtgctcccttctccagtgcaagggcccggtttatccccactatgtctcctggacgtggttgggaaattgaacaacctggacctccgttcccatttccttgttgtttcagcgggagataagaggagaagtaatagctgtcgtgttggggcgcttgccttggtcctgggccccatcagctgctgtgaggagacagtttcttttccatagttgaggaaatggagcgcagagaggttgagtgagtcaaccaaggtcacccagctggaggtggggcagggtctggctccaggctgtgtgctctcacccaccctgcttgcacgggctttaggaatagcccctgtgtcctggaagacagatcgctcaccgaatgggcctcttttcttggtatcatatgatgaggtaggctcactttcccccagacttagcttgccagaatattcatggttttttctctgtactcacctgtcatctctccaacttggtgccatcacccatgaagtgggatgctttggtgcgtgtctggcctggggagagggctgcttgctttgtcagaagactcaaagcatgatgggcatccaaataccaaagacctatgttgacctgtgtttttcactccgcttgatggcagttgagggctatattcactgcctcagttgcatggagtgaacaagacctagtgaaggtggtgggtgcgctgagaccatctggttgatctctcctgggtgggaccaggtgctcccctcaccacccccacccttgtctgtgtaccaccactctgcacagacacgttggctggtgcagtcctggagacccacggagctcacggtcgtcaggggtcctcaaggattcagagaacccccaaatgtcagggctgctcccttcttgtcctgcctctctgctcacacccttggacaggtaagaaaactgaggtccacagagggcagggtgcattgctgtggcttttgttctgagcactgtctccccagctttggggttgagactctggggtcaagacccacctctgatgaacgagcggcttccttctttgtaaaaattgaggcgacccagaccaagaagggctgcaaaatcaccaagccaggacctcaatacccaaggggctggggtttcggccaccctgtggcagagcttttagaagccagggcccttggctcggcagtgctggctcatagtaggtgcttagttcatgcctgtctccttggatgaaatctgaccatagacaccagtgcaaagcaggtgttcaacacaggagggtgtactgaacccgatctctctatcaccaggaggaagcacacgggaggcactcagagaacgtttgtggaatgaataaataaaagcatattttgagggaataaagaagcagaaaaacaaagaagaatctggggaagatgggcataaatctccaccaagtgctgccaaggcttcccaggcgaggctgctgaaaagaccctgtggaggtagagggacaatttgtcatggatgggaatgggcttgagggccgggaagcagggcatgatggggcctcattcatcattttcccgttatcccagcagcgtgcaggggagcaggtacagcacctgcctgtgcagctgcactgcctgcccgaaggccctaggccctgggccaagtgagtgaccagagggggactgggaatggaaaggacctcaaggaaggacaagctgagctctgggaggccacctcctccaggaagccttccctgattcatccttcacaggcagtctcaatttgcagtcagatatccactgctctgattcttagatcagcaagtatctccctacccagactgcaggctctgctggggccgcggctgtttctgacttgtgcacaatggcatccctgtacctagcacaggactgagtccagagaaagtgctcagtgatgcttgttggccttgtctctcctctgtgggcagcacagggcacccggcgggtcctgagggtgtggacatcccacggcagagcctgcggttgatcccgaccatgaaccaaggcctggggcgggggtggccacatcaggccacttctgccaggagagatgtggctgtgagctgggggtctggcctgtccccggaggcattccttgggtttgcatccatcagaagatccactggttgcctctatttgggcctggagcagggatgggatttttccaaggtacatggggtctaggggagacccaggcccattattagggtcggtcttgagaaggcagagatcaggccaccactttatttggtgtagctcctcgctccattggtgtgtgctgagtgaatgaatgcatcagggactcctgcttcctgcccagagccccctccgcaccccacacagccttgctccaaggagaaggggtcagagccaactggacagtgctacagcatggggagcctcgaccaggctcggccctcga

SEQ ID NO: 78043 - DNA, 1297 bp, Homo sapiens
agggggctggttgggagaggaaaggctggaaggaaaggaagagaaacgggcgggtggcctgacacccagcagccaggtgtctataggttttctgtcctgggagggggctgtcagggtgatgcccgcctgcagagagggggtcattctgcgaggttgggctgcagacccctgtgccagcgggcctggtgattcggaaatgatggggcactgtggagagaccccaggaaaacacccagtgctgcttttgacattctctctccatctcccctttcagcggctgctctgcctgggataaacacatttcaagagtctcagtccccgctttgccaccatctcctcctctgatctcctttcctgcttcaaaagactccagaatcttctcggttctcagagaaggctgaatccacctatgacctagtgggagcaccctgtgccgaaactgtttaccttctggtccccggagccatgggtcacgacctgggcctcatgtaggcccgctcctcagcagaccccaatctgcggcttctcccacctcactggggaagaaggagagccctggggatgtggagaagccaccccccaccccgccacatcccccacatcttacagaatctcgattgaatccccgggggcacatccctcagcaggacagcaacagtctttgccgcagcctggggagggctgtgctggggatgagcgccgagtggccgtggactaagtgaaggaaatgaccatgctcttctcccagctggatggcgaggccgggcaggaaccgcggaattcctgctcttcgttttcaaacactttgctgtcaagctatttgaataataaatacacattataaaaatgtaaatatgtttgtgtgtctgtatgttcggagatgatgtttgttaagcgggaggtttaacaacggaggccatctgccttcagcagggattcgcacagaatgtcactggccttcgcccaacaagcactttgcagggagcaacctcctgaagtcggggctcactcctgggtccccctccactgcatgcgagccccccgttccaaggcaggagccagggtcacgaaaatgcatgcttcttcatcaatccgaggtctcaaacggctcccccagccccactgcctgcccgttccaggcctggggctggcagcctgggccccacgagggggcagaggccagagcccggcggcagagcccgtgcccacgcctcgctgctgccagcctccgcttggtcacgacacagccaggctgactcagacacagccccaagcgggagcctcataaatgacatca

SEQ ID NO: 78044 - DNA, 1036 bp, Homo sapiens
taattgtattttcagctcttgaagtttgacttacatctcttttcattacatgtctctacttaacatgctcaatctttcctgaagcttcttgaacgtggagaattagaattataataattgttttctcatccggttgactaattccatcatctctagtatttctgaatcagttttgcttgattgggttttctcctgattatagggcatattttcctgtttctttgcatgcctgggtaatcttttcttaaatcccagacatcataaatgttaccttgttaggtgcttgacgtttatattcctataaatactgttttcagacacagttaagttacttagaaacagtttgatcctcttgaggcttggttttaagttctgttaggtgggaccagagcatcatttagtctagggtgaatttcaccccactactgggctgacaccctactgagtactctcctgggtgcccagaagctgtgagattgtccagtctggctggtgggaacaggcactactcccagcccttcgtgagcatgggcactgttgctgcgaatgcttctgggtgggtctttcctcccatgcagtttgcccacccatgtgctgatcagccctctactgaatgctaggggtcgggggagatccctctgcacatctcagaaactccctttctgtgcctctcgttcttctgtcctgtggactccagctgcctcggcctcatcagactcccagttccatctcaattcagaaagaccctggctctgtctcagtcctcctccctgcaccatggcctggaaactgtctccagacagcaagctggcgcaatcgcagggctcacattgtttgtctcagggattaccgtcttgaactgtctgatgtctcatgtctgaaaattgttgatttcacatgttttgtccagatttttagatgcttcaggagggaggggaattctagtccctgttatccttcctagtgagaggtaaaagttcatcaaatatttgctgactgtcaaatatttattccataccaatgattatcgagagcc

SEQ ID NO: 78045 - DNA, 1044 bp, Homo sapiens
ctcggctgggcaggtgtggggtcagccaacttgggttggaaggaggagagaaaagagcaagaggccggccagaattcctctgcgggaaagaaattgcctctgccctgaggactctccctgagccccagtgcctgtctataaagtgggcagaccctcttcgtaaggtggtgtgaggatccaatgagggggcagacagggagtgcccggcaggtaatcaggtgcctatccacacattactctcctctttcctgtccctgctgcagccaccttgggtttggcatctgtggcttatggatcctgggcgtggctttggatcagcacttagtagggccgggcaaaggtggctcctgggcatccccctggatgccttttctgtgccggggctttggcacacaaggagcttgggggcctagggagacgaggctggcaggggtaggcgcagttggtgcgtggcaaaccgaacctgtcaattccagaagcttttggcacattgttgaagcgactagatgactttgagaagtgtctgcatgttttttccccaagtgcagttatttttgctgctgtgaaatgttctgaaatctgacagttttgttttgagtcttagcccgatgggaagacggaaaggaacactgcctcccagttctgtggcacccgcttctcggggtctcctgaggacacccagatcctggcagaggtggccaaggagaagccaggggaccaaggtttccaggggggagtgtggagtaagctaggccacggagcccctggattccctcggagcacgagacccaaggacccactgcgtgccaggccctcgtctgctgagcatgtattgagtacctgttacattcatttgtcagacatagactatgcacctactacatgacaggttcctgtgcactgaggatttattgagcacctgctatgttcattcatcagatgcagactgtgcacctacttcatgccaagccctcacccaccaggcatttactaagcacctactgcacagtgcagggctgttggagggctctccgcagaggagtg

SEQ ID NO: 78046 - DNA, 1050 bp, Homo sapiens
acactgcctacttgattgggctcaaccacgtgcagtaagtagctggtgtctggcaagagccctcaggaaacagtaaccccattaattcaaatgcacgtgcctggaacaggctctggggggccagcccgggagtcccactccatgatggccaccctggggcctggcaggctgggctggcatcccaggcccaccggatactggctgtgcaccccggccaggccacacatctctgagcctcactttcccgtgtgtgagatgaggctagaagctgctttctcttgcgtgtgtggggattggcggtgacaacacggccaggagcccaggcccagcctacgcgagcagcctcgctccaggccacacgccccactcctgacagctctgtgcagcgagttcgtgcgcgagcgggtggctgtctgccaggcgaggggcgcgggtgcccaagagggcttcactgcttctggaaagatcacaaggaaaaaccacctccgcggcgggacgctacccgcgggccgctgcggtcccgctcgcggccggcagggggcaggatgtccccgcgagtcgcccgtgtcttcgggtgtcctcaggtcaccccgcaccgctcgcagcctccgcgcctagttaaagggcgacgcactcatttctgcaaagaaggagcccagcggcccctccccggggaactctttccatcaactcggggcctaataatttacatttaatttgttagcggtttaatgtttaattttaaaagcgagatgattcattaccatattaataaataataacatttattattctcctaatgagtgtccaaaatacagaagcaattacatgttttatatattttctcgtaatttgagacaccagagcgttaattacagagactcacgcgtggaccccattctgatccagggtcctgatcctgcctttgtttcggtctctgaaccagccgccctccggggcttctgcaattccctcaattagaggagaggaagtcgtacgtgacgaagctggggctctcacagaaccccggcgccccagacccaggagctg

SEQ ID NO: 78047 - DNA, 1036 bp, Homo sapiens
tgctcactgctaccccttgccgcccaggctcaagtgatcctcttacctcagcctcccaagtagctgggaccacaggaacatgccaccacacccaacaaatttttttttttttttaatagagtctcactctgtcacccaggctggagtgcagtggcgcgatcttggctcactgcaacctctgcctcccgagttcaagcaattctcctgcctcagcctcctgagtagctgggattacaggcacccgctaccacgcccggctaatttttgtatttttattagagacggggtttcaccaggttggtcaggccggtcttgaactcctgtcctcgtgacccgcccaccttggcctcctaaggtgctgggattacaggcctgagccaccgtgcccatcctggatctggtatttttaagttcatttcccacacctcaaacccagcaaccctcctgtatagattggtcttatgcagtctatggtgttgctatgttgcttttagctttagggtcatctccccaccgccacttccattgcaagctgccaggcaactcagtggttagttctttttcttccatcaccttgttttccttcaaaccacctctgctactgacgtcctgggctagctccctatttctgttgacggtcccttggcctctttctccaataatgttggtatttgaaaaaatttacctagttttggtattttattattgttcacattgtgtgtgtgtgtgtgtgtgtgtgtgggcgcgcgcacttgcgcgtcggccacttgtaaatttctttgcttcttggctttggcctcattgaggaacagctggaatgccaagtgagcattgcatctacttgaccaaggttgatgctgttccttcacaccgtgaagtgccttcagaggatttgcagagtcaccactttcctttgccttttcttccttgtgactaattgttgaactagagcacctagggccaagggtccaggagctgcgtggacccaggcagagccagtaggtccttttgaatccatgggtagcacataattggg

SEQ ID NO: 78048 - DNA, 1464 bp, Homo sapiens
ccacctttattcttgtccatatggctctccagttgtcccagcatcatttgttaaagacgctgttctttccctggtgaatgggcttggctctcaattttattccatcaatctgtatgtctgtccttatgccagtatcatactaccttgagccagatgcacttttaaaagatccaaggctgggtgcggtggctcaccacacctgtaatcctagcacttttgggaggccacagcagattggattgcttgagcttaggagttcaagacctgcctggacaacatagtgagaccttgtctctacaaaaaatacaaaaattagccagatgtggtggtgagtgcctgtagactaagctactcaggaggctgagggaggagaatcatttgagcccagcaggttgaggttgcagtgagctgtggttgtgcaattgcactccagcctgagtgacagacagaccctgtctcaaaaaaattaaaaataaaaataaagtatctgaaaagacatacaaaactaggttttgtctgggaggacaagtagtttggtattgctggaacatcaagtgtgcatggaagtggttgtgtgaaggctggaattaaggacgtgagagacagtgactgtgtgaaggagacgcagcaagctccggagcctgcctgagtgttggcagataacggggacatgagatgtgtccatgctctcaacaagctcagaatctctttgtagaagcagacatgggattccaagcctgatggaagtgtaagggaacccccttaagaacactgaggagatggtggggcctggctgcgtgtatgagtggggaaaacattaaagagaatggcatttgagctagaactgaaggctgagtagatcaaaagctttgtgtgggggtgagagtttgggaacgggaagagggcatttcatgctgaagaaacaggcattgaaacagggcagggtcagagaacatttgagaatctgagagtggcccagcattcctgaaataaaggagagactcatctctcccatacattgagagatgagtcctggaaaaataagtgtgggggagacagcggctgagctcaaaccccatgctacggagtttgaactttctcccgcaggcagtggggagccactggcatcttgtgagcaggggaatggtctgatggacctttagaaaggtcagtccaataacagtatgaaaatatgattggaggcagctgtgctcaccactgtaccaccaacactgaaaatacgattgggagaaagatgagggaaggtgttctgattgtctggtctatagaggctggggttaatgcagggaggaataacgtgttcatttggactattttcacatacatagtagtcgagggaatcatatagggaagccccaggtccccattgcccagccttggccatcatccactgcaacccatcttgtcttatccaggcctcctcctccatatgcatggccctct

SEQ ID NO: 78049 - DNA, 1085 bp, Homo sapiens
ggattcagttaagaatcttgagatgggacgatgattctggatcatccaggtgggtccaagggaatcacacaggtcattacaagagggaggcaggagggagacaagagaaggcaatgggacaatgaaagcaggggtcagagagagatgtgaagatgctacatggctgggttggaagatgcagggaagtggccatgaaccaaggcaggcaggtggcctctagaaggtgggaaaggctggaaatagattctcctctagaacctccagagccatcacgaccctgctgacaccttcattttggcctcatttcagacctacatgccagaacggtaacatagtaagtttatgctctttggagccactgcatgtgtaacttgtacagtggtgcaaggagatgaatacggctgagtatctcacaaaatgctaggtgttccctgctggctcaccactcagtcttgaacacccaaagcaggccatctgagtgcctccccttgagccccaggaaacgctccgctggagctgttctgctgccattgtcctaggctcctggtgtgcgtgctcattcccaggctgcaccatagctccagggctggtcaacacccctgcagccaacctgcaacgctgccaactgaactactcagcagaggtggagaagagtctgaagatgcacgaagcagaggaaccaggggtcccctgtcatccacagaggccaaaggagctcaccaagggggcccgtggagttcagctgtgctctgggccccccagctgaagggctctctaggtagcaagcagtgacctggcccacagctgtttgctgcgaccactatccagcagtgacagccaacagctgctgtgtccaccgtcaagatgatttacataatgtgctcgttgcccacccttctttctgcccaaagaaagggagtctgtgtctgcatatgtgctctttaaaaaggctgtcactctctgagacagtttgcttctgtgtccccacccaaatctcatctcaaattgtaatccccacgagtcaagggagggacctggtgggaggtgactggattgtgggggcagtttcccccctgctgttcttg

SEQ ID NO: 78050 - DNA, 1709 bp, Homo sapiens
tggatgatccagaatcatcgtcccatctcaagattcttaactgaatcccatctgcagagtccctgtcgccaagcaaggtcccatattcaccagttccaggaattaggatgtggacatctttaggcgtcattatttagtctaccacatcaacctatgtggtaaatatttagcaatcaaaagtttgaaggaagatacgagaaattaggcatctttgaatctttcagtctaatattgctgaaggtgggacataagccccatactccagccactctaaggaatgatgtcttccatggagtgaaggggaatgccccagagtaagactcatgtatatgtttttctatattttaatagtgctacaaaatacaaccattgtacatattcatttgtttttgtttttgttttggaagcaaatttccgtcaggaaaaacagccttgttgctgtcccgtctacagtatctgctaaaataaaagtaccagtctctcagcccatagtgaagaaagacaaacggcaaaattcttcaaggtttagcgcaagcaataatagagaacttcaaaaactaccatccttaaaaggtaatttttatttgtcttttaaaagttaaattgtggctgttggagtgaaggagcaatgttttgatagtgtgctaatttattcctttgctgtgtttgtattttgtggggtcatcttttctgtattgaggggtttttttttttttaggttgaatgtcattaacttacttactcaattaacattttaaattccagagctattcaagataaaagtttaacaacacagtataggcataatacactaaggaaacaggaaaagctgaacatctttttatttatggtattaagctagccagtttttcttttaaattaattttcatttgtttgtcttagaactgtagcaattccgaaaggaattactccaagtacagtaattgtaaaaattatagtagaagttccctatgtttctaaagtaaggactgtagctatagtacattatggacttgctttgttatgagtcatttgaggattacctctactcaagcatttcttatatgaaattaggaaaaagtgctctttactttgaatttccccccaaatgacacagccatctctttccatctcaggttgtttaatccctaaaagtcttcctttagattttgagattgaggtgcttaaaaccttatcaaggaaaacagagtaaggaccgtaaagtcaaatgtgaacctcttaaaacctttataattactaaaatataagacagatatactaaataaaataacatttttcataccttaaatttataataatggatcttttacaattaatttccactgaatattaattcagcaaccagtccagtggctcgcgcttataatctcatcactttaggaggctgaggcagaaggatcacttgagcccaggagttcgagaccagcctaggcaacatagggagactccgtctctacaaaaaaataaaatttgctgggcatggtggcacacacctgtggtcccggctactcaggaggctgaagtgggaggattgcttgagcctgggaggccaaggctacagtgaaccatgatcgtgccactgcacttcagcgtggatgacagactgagatcttgttctcaggaaaaagaaaagtaaatatgaactcagtgagagcaggcagtctgtcatgtttatagctgtattccca

SEQ ID NO: 78051 - DNA, 1079 bp, Homo sapiens
tttaagtttcccttgtaggttttgcatgtctcttactaagctaatgcctagataatcattatcatcgctcttgtaaatagagtcttttcttccattgtgtcttctagttattagttgtttatatgaaggctattgaatttgggggccttgctttcataacctgcttccttactgaattacctgattgtttgcatcagtttttcagttgattcttttgaatattcaggtattaattagagcatctgcacataatttcacctctgtttataattgtaaactcacatgtctttctctccagttgactaataaattcagtaaaacaatttcagtaaaatgttacatagtggtggtgagagtgggcatacttgtcttgtttctgacattagtgggaacgagaggcatgatttttagcaaccgtttattatttcattctgtggataccccagtttttcagctattataaatgatactgttctgttaatcttttgttatcgttgttgttcacatctttgaacctttccttaagcttgatgaaggaggtactggatcaaagagcaggcattttcaaaaacccttaatagatattgtctacacactttccagagagtagcaccacatacagagtatgtgagatgcctgtccatcatacctctccaatgctgagatcatgtaaaagttgtagttatttgataagtagaaaaaggtatttcatatttttatttttttttaaccagtgaggttgaatatagccctcagacctgttcattgtaagattattctgaattaatgccttcatttaacatttttggactggaaggtggaagtgttaaataaagagaccttttttttttaagatacttataggaagagtaaattaatcatggacttgttttttgaggccatttttagaaaagaaaagactaggagaagtcaaagttatagcagaataatgtaggacttattatcggctaactaactagagaccctggggcaaaagagttgccgagtatttggtcttttgtgaaagaagtcattacattattgttagaatttacttgaattgtttaaaattggctttt

SEQ ID NO: 78052 - DNA, 2136 bp, Homo sapiens
atttctcagtttggggctgtggcttctgttccattaatctgccttttttgccccatcacactgtcattaattcatacagctttatagttggtaggacttgcctttctcattagtagtgttctcattcttcttgttcttttattttttgcaggtgaactttagaatacttttgctaagtacctggaaaaatagaggcccacctgaattttaattggaaatactttaaacctgtagatcagtttggggggaaattatcagcatagctgcagtatttatatttttatatttccaattcagaagtacaccttacctttattcaagtcttcttttcttccctcatattatttgtttatttatttctatcttagagtctgttttatcaatgatggccagatcagccttgggttctttaaagaactacttacatgcatagggtttcaaaagagtgtggggtaaatcactaataaaggcaagatcctttgatctgagatcattaggaaaaatacatcaaaaagtgtcttcactgtttctttgactcctattccgtatattatatataaagctcttaggagcctttcccccttatttctgtattcccactcatcagcacagttgtaggataggcacattttttcatcttatctcgtatgaaatattaaatcattggagggcaggtctctgtctccttaaagcccagatcttcaataagcatctgctcctgggctccttcctgagcccctgaacgcctcgttcctaattgtgtctgagttcatctggcatcactcagaggaggaggaggaggaggaggctggggtgtggggcagtgagagtcatcaacactgcttcctagtggtcgttggtgatcggtggccatcccctccagacagacaacccacaggtcagcagtgaaggcttagaggcaggagggcagctaagatctaaattcctcttacccaactgaaagcacgtgctctttaaaaaaaaaattaattctgctgttcagatagcagcaaagtcagagcaggtgtgaggccggcagcctgctcaggtggtgcgtgcccactgcccacttgtgttagaaatcacatcatctcctggccggccatggaatccagcactgtctgtcagctctggggaaagagggggaagggtgggatttggtttgcttttatctatttattttagttgctattgatacacacaataaaagctacattcttgtgagggaggacttgattagcagccctgaagggcggtagcagttcccttactcattgaatgtatctggcgctaaaccctcagctggaactgcgagccctagctgtatttcaggtgtttcttactctactgtgaattatgtttaggaactaaagggcttttgtatccttcacaagtggggggaagagagcaggggaattgtgtgagaaactattaaaaatgaggagccatggtttggacaaacttccttgttggtgtgaagaaaggaggaatttttttcagttccacctgccgaagaggcttttcttatagttcgttttcatttggaactactaataacactcatttttgtagggaatcatctcaccgcaccccctcatgggatcctgcaatactccatccaattcagaaataatgtttttctccttggaatagctttttacattaactgtatttgaagatagaaaatttagatctgaatagcagcttttaatagccccataaaaataagtgaaaatatctttaattttaaatttaaacaaaatatctaaaacttaaaaggtatttaatatgtcagcatatttgcaatacaaaaataaacatgctccatttcatttttttgctttcttactcccacggccaggtgatataaatatttcaatttgtgtcactttctagctatcgaatttataaagcggctttcattttctacgtaagtttttaagcttaattttttcagggaaaaaatagatctcaagaaaaaaagtgtttgggatcataagttaataactcatcctattggtaagggaagttgaataagagtccaaactaatggattagaattgtgtaatatttgcttaaccatttgttaaaaaaaaaaaacaaaaaaaaaacactgggttgccagaatcctaccta

SEQ ID NO: 78053 - DNA, 1004 bp, Homo sapiens
cttccgtgggtagttaataaatggctattgtgcttcagataagaaaagcaggaagtcctttctagcagaattcaccccatttcgctgcagacttaaccagaggaggttgggtgtgtcactgcagtttggcattttacgaactacttacagaatttgaggcttgaaagaggccttgcatgcatagttcaaagctggtttttctgctttctgctcgctctcccatccccctttcaaagctgtgctgatgtcaaaggatgtgaagtcactgcccagggaaggtattgggtgggggtaggaaggagaggcgggcctgtcgcgcctggccaagttgttcgtacgcagagtttctgttacatatgtgtggcttaatgctgcaaaggttttgtcgaggacacatctcagaattaaagatgaattgcagtcagaaaatatgcacaattgattggaaaagaacttcctttaaaaggattgttttcattcttgccgtggagcctgagagagaaatatgctccactttgaaatattgaaatctatcgtgggtcatcatttttgaaatgttagcgttttcgtggaatattaggaaatattttgcatttaaataggctctgtgttgccagttggcttttaaaattttaaatggcaacaagttttcaaggtatatagagatcactgttttaataattagtttgcttctttttatgcatattttggtttcaaaacttagcctaaaagcacaactactctagtaattaatagcggttatattgaactacaggcatcagggtagtagcctacttattcttggtattttaagatatatgaatttttttttggtcataattgggtgaaatagaaaaatgattttaagcttcatcagatcactttagaatttatagtatcagagctgtgccccaacaaaactgtttctcagaatctcttttaaggaagggtgggagcaagatttctaggtgactaataatctctatgactaaaacgccaggcca

SEQ ID NO: 78054 - DNA, 1124 bp, Homo sapiens
tcacgttgtgtcttgaaccacattgattttttttttaaaattccaagaccttattatggccagtttgtatttgttgctgttggttgggtggttggttgcttgctgtataattgtggagggaaaaagcagtgaagtgtattagcctgaaagagacttgagtttttaagaagggataactttggagacctaagactaacttctgactcaaacagtgggggtaatttctaacttcaaaatttgaagaacgcttgatttactcataaagacttttctggagcgagcatgttaatgtgagatttagcaaaatttgatttatttattgggccttagagtcttagcttaacatccattgagcagctccggtgtgccaagtgctgagcgtcattacagtgattaagttgcagcccctgtcccaaaggagcgaatggagagacccagcataggagctctgccacgagagggctaaagcaagaacacaccggcagggtgcccgggagagcaggggctggtgtcaggagcagaaggaaccaaggagggctgcaccctgggctaccctgctcactcggatggggtgggcatgcgctgtccttcccgtttatttaggaaggaggggtctttcccactgaaggagaaataacttacccaaggtcacacagcctggaagtggtggagccagaatccaaacccagactgttgtgttgttttgttttggatctttttaaaaaaatcattttaaaataggaatgttggctgcttgaagaacattttgctacaggattacagtagtggtattttccccaatgccttaccatttatttggctcggtagcctctttttgtataacagttttgtaccttgggctcatttattaatcattttacaaatatttattgatccataccacatgccaggcagggttctaatgtggatatgagcaggggctatggcccagctttcccagtttaccatccatcagggtggggaccaagtaagtaagtaaggaaaatgatcacctgatttgttgtcacgatcgctttgaccattattgtctaccaagtagtctggactttgcgattaaaatggtgaatttgcacatcctaataagtttgagtgtgaaagggaca

SEQ ID NO: 78055 - DNA, 1118 bp, Homo sapiens
ccgtgatggccaggctgctctcgaactcctgacctcaagtgatccgcccgccttggcctcccaaagtactgggattgtaggcatgagccaccacacccggcctatctgatgtatttcttagctaaatacctcatcagtggaatgagaagctcatgagaagctgtactttatttttctttcaatcctctatacgctgtagttaacgtatttcaatgaaaaacatataggagatggcttttgctgcaaggcaaaaacctgctgagcagacgttatacccaagtgcaagagtaagactaccaaaaaggtgacagactttacacaaggcggctggttgaaagagcgacacaggtgcccactccactctaggccttgctcaggcgctgtttccgctccctgtcacactggaaataggaccgccaagtggtctaaacgtgggataaatcatttctctcactcacatcttggaaagacgctggctaaaatgcatgggggaaaccagtactcccacagcaggtagaagtctggctttatttgaggcccttgaattacacataaatcaaaaactcttctagtttaaaaaagaaaaaagactaaagagatataacaggtaccgtgagtgaatctagatcagatccttgttctaaaaagtgtgaaatcaaacctattagagacattttgaaggcagctggagaaagtggagtgcagaatgatgttggatgtgtggaattactgcgaactttctaggtgtaaaaaggtgtccaacttttgtaagggacttttcttattcttagggaatgcagaatgaagtattaataagtgaaggatcgtgatctctgcaactttaaatggtaaagagaaaagtgggtaaaaagcaaatatgtcaaagcatgaacagttgttgaatctagctgaggggatatacaatatacaattattcattgaaattctatggagattttaactttttcataatgtttgagagaaataaatatatatatttatttatatatatattatatatatattatataaatatatatataatatatatatttatataatatatataatataaaaatattatatatgtatatatattttttttttttgagatggag

SEQ ID NO: 78056 - DNA, 1826 bp, Homo sapiens
gtttttgtttggttttttggttgctcaggctggagtgcaatggcgcaatcacagctcactgcagcctcaacctccccagctcgagcattccgcccaccgcagcatcctgtgtagctgggactacaggcaagcaccaccacacccagcgtggttttttgttgttgttgttttggtagagctggggtctcactgggttgctcaggctggtctcaaacccctgggctcaaatgatcctcctgctttggcctcccagagtgctgggattagaggcgtgagccaccgcacccagcctcctttttaattttgcgtgacgaaatgcagagttcacatgaagccgttctagcatgctggagtgtgatggccgtctcgaagaaaagcgcccatgtgatgtgtgagttatgagccaaaatagccactttttccaggaactttaaattatgagaatagtaatgtaaaatcatttttacttgacagaacaaaaagcagacaaactgtggatattaagacttaaatatttggctgatattttctagaaaatctatgaagtgagcttatcaattgaggggaaaacaactgcgacactgtttttggcccatggtaaaatttgagctttcaagaaaaatttgaactttggagaacttttatctgccagtgtaaatgtggcagctcccagtgccacagactcttctgctgagaggggtggtgacattagcaagtggggtttcttgatgtatacggtggaaggtcacacaccacatgcagcagtgtgttctcagtgaccaacgaacgatgctacaaacaagcgtgggtgaagagccaccaaagtgtaagacacactgccgggtgttcatgtaactgacaggttcatcaacatggtttcagattcctcattgcaactaatctttaaggaactatcacttgttgaattttagcataggcaaagaagaacatcggcaattttttgagaagcattgaaacctcccttttcccaccagacgtgtctgtctgagcctggggtgtttctttacatatacttgaaccagaatagcatatcacagcaagttgaacacagaagcatgtcggcagatccgcctgtcttctgttgagtattgaagaaacatgcaaaaatgtacaacatggccattttctcgctggtttctttttgaaaataaggttattttcataaaatattacttaacatgaagtgaacctattgctaatttaatgaataagtaaatatttttaaaattttcaagtatggtcagtatcaatggatataacccccataatcaaagctctttagggttctccatactttctaagaatgtaaataggtcttgacaccaaaaaaatggaaaacacgtggacttggaagtttttctcgaatgggctggatgtgaccctgaccctgtttttaccaagcctccttggttttttccctcttttctctaaaaaaaaaaataaaataaaaataaaaataaaaaaaaattaagtagtcagtggaatcatctaaactggtctctgggaccatgagagctgagagcatccggagcccacctaaccctgagccttcctcttgccttggtcagtttccttctttgtttttcaaatctttttttaaaagccattttcaagtaatcaattaatatgtgaatacggccccatttacattttttcttcattgcaaataaaactgaaattttccctaaccttatcccctgagattggtctaccatccccacatctcaaagtgactgctgcctggagtttgctgtgtgtcattccagaccattttctccctgtggggggtgggtgggtgggtgtgt

SEQ ID NO: 78057 - DNA, 1137 bp, Homo sapiens
attaaaaataaagcaaagtttaagaagcatgtttggtaaagagttctttggcaggaaatggggacctatcagccaagctaatagccttagctatggcatccatagtaactaagacacgctgccgatgtaaatatttatgccagcaagcagtgctgcagaacccgggccgagcagttcagagcagtgaaattaaagcatcagccgccaatgtttgatttattttgtattatccggtattccaagcattaccatcattcatctcttctagggtttttcaaaatagtttagccctaagaacaagaatcctagaagaccagtttactcggagtaattcggtaccctctcccccacagcatgatagatacccaaatgagaatagagaggctgttattgtttgtcattagcaccctggaacctttttcatcttcaaagctcctcgcaaaagggttcattaaccgtcgccctctttcctgtgagagagtaaacaagtatgattagtcctactttgacagcggtggaaactgaagcagagaggttctccaacttgtctgaggtccaagaaggagctggtgacagagaccagataccggaccagcacttgggttttctgactcacggttctgggctcacccctctctgagcatgcactgagcctgctcttgcaggtttctttatcacagggatctatctacacggtactttctgctctcagctttttacagtggtgtagagtgcagtgcagctgaaaccaggttagttgatcttatggtgtcatctagaaaaacaagagatgcagattctgggtcacgaaggtaaggttgtacttttagggtttgtggttatggatgaaattaacttatctgagccttacattgtctcactaggcacagtgcccacttgttccgtggcacagccccagagctcctgttgaaggaacagactccaggactgactttccacttgattttcggagctcgcacatcccgagagattcatgttcaagctgcattttagacatagctggcaagagtattttcgtggtaaacgtaaacttactattggtaaagattcttaatgagtaattcttaggatttagtacaaaattagatatattctttttattcgtaatgatatagc

SEQ ID NO: 78058 - DNA, 1079 bp, Homo sapiens
agctgtatttcactcactcactaatatttagaaatcacccacttggtggttggctctgtgcttagtgctaagaactggtcgtgttataggtgctgtgggtgcgtgtctgcgctggcttcaggaggagggagcaggccctgtggggcccagcaaggcctcccaggagaagcagtgtgttagctgaagtttaatgaactaattggtggtcctgggatgcagttgggaagatgggatgattcagcctgttggggtatgtgttgggggtggttgttgcactgtggtgagaaaattcctggaaaagggtgtatgtcaaaagggtgtaagtagcatccctttatgactgatgaaaggagagcagccgagagcagttaagtggaaggcaagacgcagcagtggcttctcacgccatcttcgtcactacacaaggggaagttgggctaagaataaatttgttttggttccaggatgaaactcaagagatacagaagaaactgaaagtgatacttttggcagagggataggataagagggttttcagcgtgtgtgtgtgtgtgtgtgtgtgtgtgtgtgtgtgtgttgatgaatttattacttattaaaaaaatgtaaagaaggcatagcattaaaagtgggagacatatactgataatggaatccgggcattgctatctttctgtgtcttagaagttactgctatgattttagccacttaactggctagaacagttttgaaaggccaagatcatgggtttaagatttgagacttggccaaaaggtagctttcctagtccttatcgtagagtgcacgctcccagcttttgcccagcctatttggggtgcacacgctcatcgatgagggcaacagaacacagcatgcaggcggaactgtgcaggtcagtcaccactccacctcctagccagggtgtcactccaattccatcattcaggtttcactgaactttcatgttggcatttcatttagttgaatgaaccagttttgttgtatttcagatattctcactgtgtagttagcctgttcagtttttgtaggtgaatggtaaagctgtcaaaaccagatc

SEQ ID NO: 78059 - DNA, 1032 bp, Homo sapiens
tgaggtcatagaatgcatgcttaaagccccaggcctgtcaagtcgcttggggacattcatactgaggatttattaagatattaatttggttatcaggagtctggatggggatgagaggaggggatctttattacatgctgggaaaatcagaaatcaactctaattgactacctctactctttcctctcccaagatgactttgccaaaaagctgtgagaaaaagtcctcaaatctcagagattgacttggtacttgattatatccagctcgctggtgggcctgtggccacagagcctcagaagaaggttagaaggtctggccagactttagctttgctccacctacttggcagggtcaagcctacttgccagtggcttggagaagtgttttgttttgttttgtttactttttaggagtgtattcaaagcacattcacagtaaggaaaaaaaaaatgcagcctgtgtcttcagggactgggagtctctgattccagcacagccgactgtccagcaaccccagaattggtaggctggacactgggctgctcctcatggcggtgggagcatgggctgctcagctggggccatccaaggaagcaaagatgtggtgctgtcctgtggctgggggagcaggatgaattgggataagggaagcccagggcagggtgttggcacagagctgggaggtgcattacaccgaggaactgacgtggcctaaactccacagtgacttccacctgggatcacagtttacagtcagctgagtgctcaagagaactcagtagaggggaatgttgatgattcaggtatttggttggtgatcatgttatcaagtcagacttgcagttaaggtagtgtcccagacgtttgttcagagggctccttcccacttgtcatctgtaatactggctaatgggaaacctggcccatgtcaaatttgtattaggaaccattgatttcaattcacgggctttttccattgaggaatttaaaggtcttagaagtaatattcttgttaaggcatctgaggtc

SEQ ID NO: 78060 - DNA, 1391 bp, Homo sapiens
ccatctgagcgtcgccttaacctctctgtagacctctgtccttgtctatctaatggggatgatggtagcccctctgtgtgttcttactaggattagtgggctgggaaaagttacagtaatatattaccagcatgtagaaaatacccaataatgatgaactattagtattccttaaaagaattaaaagtgaaaatagtaggaaacactagtaagataaaatacaatgggaaattaaatttttttaattacttaaggaaattcctcaatccacaagcaacaataaataagaaactgagatttcctagcagctgaaaggtttttttttttgcagttgaggctgtgaagctgggcagggtttcagctgagctgaggttggaagtccctgaccttcagctgtggccgcctacggagcagcagggagagcaaacccatggagaaccccgcggcccccaaagcatggacggagctgccagccttctcccctgcccttcttcctctactcccgacctgccagccttctcccctgcccttctgcctctactcccgacctgccaaccttagcctaaaatcagagctgctagaatcacacacactgtcgtagctggttttgtattgtaaatgagtcattctgttattttggaaacttatgtctcatgccaggatctgcagatagttctttttcaaaatattgtttagacaaaataaatttctttaaatataatatctctactttaaatgcctggggtgttgcatgcatttttctaggctagcaaagcttaaagattatttctataatttcagttacatttacctttatagatgggttactctaagtaacaaattaaacacacatggatcttctaactttggctttaaatcctaagaagagataggtaatatataaaagagtattaaaaagaaatggagagtaaaggtatatgtcgggcagatgcagtagaaaagcaagggtcatgacgtcaatgctgggcaaagctaaattgtgaagacaaaacaataatgaaacagggttattcatcacgctaaagcgtacagtccataggatgatataactaccatgaatttggcctaaatgattgaacattgaaacacataaagcgagaactgtaggggattaaagacaaaatcagtgagtgcagtgctggtgggagaggcgcctggacttcttggcccctcacaggtcatgtggtagacataagttgttattactgtgagccagtagagactttcaggtttgatggctggaaaacaaatgctcattttataagtttttttttgttttgtgttttgttttgttttgtttttgagacggagtttcactcttgttgcccaggctggagtgcagtggtgcgatctcggctcaccgcaacctc

SEQ ID NO: 78061 - DNA, 1067 bp, Homo sapiens
tctggtcttttttaccctgcctgaacctaaattctgcagatatcacctggtgtcaatgtgtccacgccctttccccagacatggaccttactggttgcctctcattccactgcccgacacggtgcctgtgatcattgctgctcagagagtatttgttgaatgaacacatgtagatggagtttatttctaacagtgctctcaacatggtttgaaagagttaaaaagcataaaaacttcctcataccaaacatataatatgaccagcgactagctgggttttttcgttttattttctttaaggaatagcctttgtttaccccacccatctccttttttcttgaatctctattcaaaataaaaatagaagaaagcttaaatgtgtttcacaataactttgggttaagcacttttgtgatcaatatactttgctttctgcttttcagatgttcctcctgctgatcaagagaagctttttatccagaagttacgtcagtgttgcgtcctctttgactttgtttctgatccactaagtgacctaaagtggaaggaagtaaaacgagctgctttaagtgaaatggtagaatatatcacccataatcggaatgtgatcacagagcctatttacccagaagtagtccatatggtaagtgattacagtttaaccagtgtgtcccagttctgatttataaacaggacaggccaagatctctgagcctaacacagtgctacccaggagaagaatcctcctgttccagaatttgtagttgtgcttgaagaatgaaaattttctttgtatcctggattgtaatgataataataggaagggaagtcagttgtcttctagggaccagtctaagtgctttgcatttattaactcatttaatcctcacaactaccctatggagtagaagtgttagaatttgtatttctatttattattttatcttctttaaatttttttaaaacatatttaacattaatatactagtgcctttttatagttcagaagtaaacattttgtccatccatgtgcaggaaaattctaatgatgggatggagttgaaata

SEQ ID NO: 78062 - DNA, 1043 bp, Homo sapiens
ccaggcatggtggcgggcacctgtagtcccagctactcgggaggctgaggcagaaggattgctggaaccctggaggtggaggttgcagtgagccaagattgcaccactgcactccagcctgagcgacagagcaagattccatcaaaaaaattaattaattaattaaaaagataaaataaaaacaagctatccgtatgtaatatagtactgtttttatcaggactcttgttggtttccagggaaaactagttgatcacattattttaatccgcactgtctgtaagtgatttgatgttgacttacacgttttatgggcatgagagtgttcttaggatctgttggccgggtcctgggggaggtctcacaccctgcacccccagatgggtgtcctgtgcttcacttagggactgatgtggggcacgttccttcttctatttttatagctgatatttacagtgtgttctggaaagttttacttgctataagggtgatgatagtttgggagaggaaagaatgtgttgaattaagagggatagtacattgaccaatggagttgcagtcaaatttatttcaagtgaggatttaaatcatgcattcccaagtactttttgaaatccagagaatgatttttctactttaaatatcagtaagctgttttttagaggtttgtttgttcttacgattttgagattttcctttgatgtttttaaattataaaagaaatacatgcttatgtgataacaaatgaaacaaatacgaaagcattttaaaaagttaatctttttcctacttcacccctccccagttctacccatctctacctccaatcagccaattcatgtttattgtattttcagaaggctgctgagaaacttttgggatgatgagtatgttcattatctgattatatgattgtttcacagatatatgcatatgttaaatatcaaattttacactttaaatatgtacatttaattgtatataaattatatctcagtaaagctgggtgttttcagatgtccaaacttgttaggtatttcttt

SEQ ID NO: 78063 - DNA, 1833 bp, Homo sapiens
ggaggctgaggggagcggatcacttgaggtcaggagtttgagactggcctggccaacatggtgaaaccgtggtgaaatcccatctctactaaaaatacaaaaattagccaggcatggtggtgcacgcctgtaattctagctactcgggaggctgaggcacaagaatcacttgaacccgggaggcagaggttgtgatgagtcgagttcgcaccactacactccaacctgggccgcagagggagacgtcacctcaaaaataaataaataaatacatagatttagtacaaaataaaaataggttataaatgtatgacatggaaacagtaatcttttctgtttatgtcactgatctgtcagtatgtgttatacaagtccaaacagactgagagaaatctaacagcccatgcctgggcgcacagccatgctgcccctaccgatcctctgtgcccctgagcagtcctttctctggaaatgatcttagctgccgactcaaaggtcgtcccactctgactgttgctttcctcatcgttgcggattgcagaggatgttggtgccattgtcacacgggtcctccctgcgtgacgcagcccttgccatttccagcattttcagctgtgaatctctgctgcgtctttcgtcatctcatccctttcttactctcattttgagcattctccttggtcttgcacccactggatagtataagacctcagaagtcatcactgtgccatcagcctttgttggtgttggttgtcattcaaagtttgacagtcaagagtccaagtaactttggtggtcaacttgcgtgcgcacctgtccaaagtgatgtttcctgctgcagttttgatccaggctctctctgaggacccacacagcttctgcgttttgaggatacggaggagctaagttaccatgggaagcggctactgttagaattacctaagactttataaaatgttgtctgtaaatattttaaatgccctgattgtaattatagaatatgtggattttagtttgcagttaacatgtttcgaacattaccaccttcctccaatcctacgggagcggaatttgacccggaggaagatgaaccaacgttagaagcagcctggcctcatctacaggtatcgggctctgggtgatagactcggagggcactggtgacacatgggaatggcctgggatccacagagcgggcgcactggtctggccagatggacctctcctcctcagtagcatgggcctcgtaaacccatatgtacaagaaaaatatttcagcagaataaagttaatgtgtgtgtttgaccactttacaacagccagtgaagatgtgtaattgtgagtatgttctcagtgaagatggccgctgtgttgatggccgttgaattgaattcaggcccagaggtcctaagccaacaatctcccagtttttgctcctcatatttaataggtgcctgctgggcccccaggtcctgcgctggccactgcctttccccagggcatttgtaaggcagaaggttggttggcaaggaggcgccagggtcggcatgagcagagcgggggccaggtgtgcgggtgggagggccatccatccgtgacaggcggcccacgctgtcccacccagcatgtctgcacagggaaagaattgtcccagctccaggaggtcatgattctgggtccacatcttagggccctcttacctggcagccccagagttcctgtgtatttggttggctctgcgccttggcattgtgggacactcctaggcgacaggctgcaaatcccccctgcagagttgggtcatggcttggtttgtggcatctgtgccctgta

SEQ ID NO: 78064 - DNA, 1063 bp, Homo sapiens
gagacagacagatggcagatgagaccccccctgccaaaacccacagccctggcccctcccatcccgtgccggcttgcacagcctgcgtcgggagcaccctgcctttccgtctgcagtcattagggcccgcagccccggcctctcccatcccgtgccggcttgcacagcctgcgtcgggagcaccctgcctttccctctgcagtcattagggcccacagccccggcctctcccatcccgtgccggcttgcacagcctgcgtcaggagcaccctgcctttcccctctgcagtcataagggttgcattccctcctgacctgcacacctgatagggcatttcggcgtgagagcctttgattttgcgtgtggctttcctttgaactccttccaagtaccccacatctcgtttgtaaaatggagcccggtgctggacatagcccagacctgacacattaactataacagagaatgatgtcactttcctaaatgttatgtttctattttatgtttcttggtatcatgattcctttttaacaagatcattacttgcctggtatacttatctatgaaaacataatatacattatttaacatacaacaggtacaatttaaatttccagtcttcttgacctaaaattaaagctctacctaacatatttctgttttcttaattctagtaggttttgttcagatagcagaatcacaaatctattgaacatctgcatttaagaagtagaaaatgggccgggcgtggtggctcacgcctgtaatcccagcactttgggaggccgaggcgggcagatcacaaggtcaggagatcgagaccatactggctaacacggtgaaaccccatctctactaaaaatacaaaaaattagccgggcgtggtggcgggcacctgtagtcccagctactcgggaggctgaggcgggagaatggcgtgaacccgggaggcggagcttacagtgagccgagatcgtgccactgcactccagcctgggcgacagagcaagactccgtctcaaaaaaaaaaaaaaaaagtagtagaaagtgttttgtacctta

SEQ ID NO: 78065 - DNA, 1679 bp, Homo sapiens
cccctcgtggactgctctagaccaatcccaggtgcacgaggcttggggcaggagaggcttctttgtttctgtaggagccctttgcggggaggacattttcctgtttcctaacatgtccctgttccctctctttgtgcccggtttattcagcagacgtgttttcagcatcaaacagatgccaggcttgctcctagccctgggaacatagtcacgagaagtccttggccctgtctttgcagtggccccatctggagggagacaggctggcacagagggtagggtgcgtgtcctggggctcccctagaagcaggcgcagtggacagagatgtctcagaggaagggagctgggtctgtcgcagatgggtgcttcagaaagatcgcacctgagacagcacggaggatgcgtgtgggtgtcagtggggaactgggcaggtagaataagaggagttcaggaatcacttctaccctttgcaggaactgtgctaaatattgcgggctttaaaattaagtaagacattggcctatgttgaaatacagcaaaaacgtaagatggattaatgaacgagtaaaagatggatgaacagatgtgcgtgtgatcaagcagatggagcacattgctcgtggtcgaatctggtggttgaaatgggtgttcactgtagaattctttccgttttcctagatgcttgaaattttccaaaataaaatattgagaaaaaaattcgtgcaagaccaagttctctgccctcgaggcatttacagctgcaggccttgaggagtttctttggttcctgaagggctgcttgctcaccacgagcagtgtttgcacaaatagatgcgcttcttgttgcctggctccatggctcctcctagagcattgttttcttattcaggttagttcagtgtctaattctaatgggaaaattgttttttctaggtttatttatgaaacagagcatcataatggcatagcagagttactggaaatattgggaaggtaagcctctgttatgggtagcaaacggctgtagatggaatttataccagagtgatccatttcattgagtccagctgcccgctttaaagcaaggcagtttaaaccattctctaaaagaattcaaatacaatttcactgaaagcaggagttggtgagctcttagattagagcacgccaaatgacaaatctctcccatttttatggttctgtacgtagattctacttcgtatacctcagtatcattactatggaaacacaattccagttatttcctcaagagcaatgttaaaaatagttaacctaagaaggtttatattagaagcttgaaagaagaatagattgtacatttggggtatcatgtaaatgctaatatttttaattacttcagttttttatatgtatatttataaaataattaacatttcaaaactttcatcatctttatccaagtaaagtttttagttgcccttttttttttttttttttttttttctttttgagactcttgctctggcacccaggctcaagtacagtggcacgatctcggctcactgcaatctctgcttccctggttcaaacgattctgctgcctcagcctcccgagtagctgggactacaggtgcccgccaccatgcctggctaatttttgtatttttagtggagatggggtttcaccatgttgccc

SEQ ID NO: 78066 - DNA, 1023 bp, Homo sapiens
aacatatttattttctctgactgctcttaactggtaatatctttgcatccagccagattatcatattgttgtacaaaagaaattaatagttcagagatttaagatggaaccagattttaatttgttgttccccactgttagatgactcgttgattgtagtctgcacaaggaccccaagaaaatcccatcatactggattgacttagcggtggttagactaaaaagactgtttcctgatttatttttcttatttttatttttcagctttctgatctatcaccaattaatgggcataaatgttaatgcccgttaatcacacaagggctttgtctgtaccgtgggtccttgtcttgctgtgggaaggtgtttaacgatgattctagaagaagcacagcagcatttttatgttgaaatgttaatgctctttctccttttactttttagctggcatactgtgtagtgcagtttttagaaaaggacagcaccctcacggaaccagtaagtactgatgctagcgcgtcttgtaagatgtgtgcatttcactaaatgtaaatattacaacatctgcttcaccaaattgccattcattcagactttttcatcttaaattgcaatactaataaacaggctcatttcattcatgggttataggttttcaaagtatagtcattttaattgcagattcctttattatagtgattattttatgtaatgagattgccaccttgtccctcgttgcactttactgtttgaacgtaaagcacttgagcggttattgtagccactaaattttagtgtgcaattcagtagtttcacatctgcttggtttgacaacatattgaactgattatgatcagaggaattatagttagggtttgaaattattgttgtactaaagaggctttaccgccttgaaaatacttcccaagttacactgtaactattttatgatcattgaatcacaagtgaacgttagattactgctgttctgtgcgtggatctgtaattttttttcagcctcca

SEQ ID NO: 78067 - DNA, 4560 bp, Homo sapiens
tcgagaggccgaggtggaagagttgtttgagcccagggggtcaaggctgcagtgagctatgaacgcaccaacttcactccatcctgagtgacagagtaagaccctgtctcaaataaataagtaaatacaaatggaagggaaaaaaagctatggaaggagagatttttgaaagtatgtatttttctttcatgaattttctttgtgcgtatttctcatatcctgtagtggctgaacaattcaccaaatgccacattgcgtttaccacagacagaggctgctcccacctaagccactgtcccagcatctctatcccgccatccactgtctgtcagcctgaccctaaccttctccaccgagggctcggtgaatgagcctcaccctattctctcttccaccgaaaagtaacacaaaagcagagaatgtttgtaaaagtttttaattcccactaatatagtaaataaagtgaatatcactttgcaagagtgagagctgttaattgcagtcctgtctaaaagagggcaagagaccccgtgccggcttcagttgggtccttccggcgtaaatgttacatgcaggactctgacttggcaccagcacaaaggaggtgcaaaccccaccaacctaggccccgatgttcccacccggggacacttcattgcttagtttcctgctgcacagataatgtaatagtaccgtcctggctttagaaagcagattcaatttcctacatgttaagaacattcagaccctcatgtcagtaaattccctcttttgaaatgcctatttatgaaaacacaaaggccattttgtcttatttcagcattgaaagcttgttaatgagatgatcaaagtataggctttggtgcaggtgtacatctcttggtagcactaaggacacctggtgtccacgtccatctcccaggcctgcaccaaagggactcctgaagccatcaaatgtccaggctcaggaatgtttaaagtaagatccacttagaagactgagatatgaaggacatgtgttgccccatttgtagcctgtaattagtatttttcatttgctaattgtgtacagtgctcaaaagctttctgggcacatgaaacactttctctgttggaagaataacaaaagctcatcagagattttacagaagtaaaactgtgttccgttttcacccacctgcctcttcagtctcatcacattttactacatggcatagtagcggctctcctttctccttggtctaccaggacaggaagggggctccccaagactcaaggctggggccactggctcgcctgccctctgcagggagcgggcagtccttgggcttccaaaggaaaactcggggccttgtgctgcacccagcagcacacagccattgttgcctcggattcacattccctgagtagacaccctcctccacagagcacgccacactgacgcagcaaaatagctgataccgatcacagctcattccaaacaatgtgaacaggaaggcccgtgtgtgaatccgatcccagaaatgataccttttccagagaaatggaatagctaaatcggttgtgttgtatagttcacaaattaacatatttctcctaataaaattccatttgacaaatgaagagaaatagatgtaggaagtgatttccatctgctgtgtccttaatagtgattccaatacacgcaaagtgtggtaggaacacaataaatacttattcaatagttttgagctaggagaaccattaaatgatgcatttttagaaataattccttttaaagacacttgtatggtagatttttatgtcagacttgaaaactagcagcacttccttttttatttttatttggctcttttggggtttttgtttgtttgttagattcttggagtacagtggcgcagtcatggctcactgcagcctcaacctcctgggctcaagcaatcctcccaccttagcctctcgagtagctaggaccacaggtgcccatcaccacaccaggctaatttttaaattttgtgtagagacaggacctcaccacggtgcccaggtcggtctcgaactcctgggctcaagcattcctcccacctcgacctcccaaagtcctgagattacatgcgtgagccaccacgcccagccttactttcctttgtttcatgaattttggagttttataaagtgtaatatcataaaagattacctgggagcccaaatgccaaagcatcaaaacaaaatttttctaaatggatgttaaatgtccacctttttaaaaaatcactgtaatgactaaaaggctggcctgctaagccatgagttggtgcgatctactgagctggaaatgactagtgagtgaaaacgaccaggcggtcccgggggccagcacttgtggcaattgcacagcacaagagtcgggtagaagccccgcggtgttgctgtgacgaggccaaagagctgctctaacgcaccggattgcacttgtacaattcagtgtgtaagcacatatatgcacttcatatgcaaatgcctgttttggattgttgtactcttttagaactaagatggctaaactctaaaaatattatgaaatctgcatggattcacattcagtattttgtactggtatgattgtggtaagacatttggaaactacaggaacatataaagaaaggttgcccagtggaaattctttctagctgtctgacttggccaaggaacataaaacatccactatccacaaactgggaaaccactgcagtccgacgggctgtgcctggcagagagctggtggcacagaccctctgggtggtgacaatcctggctacagctgccactgcagcctgctcaccgcaggcccagcactgctcaggctgttgtatctgacgcccacaggtgtgcgcacagagagcacagtacgccctgcccgggaggtcccatcgcagtacctgtggatgtgagttaataaggtcagcttaattcacatcactccttttgatatattttaacacagttgaaaacactgtctatgcatacagaagtatgtgtgtttgtgtataaacacatatggatggttgataaatttgagaaagaaatgggttgtgtacacgtggcccacagtttcagtactggctgcttccacaactaaaatgtacacatgaattgataatgctctgtgttttctccgttgatcttattctttctaaattattgtcctaacttcttatttttttttctttttttaaaaaaaggaatggactcttactgaaatggtgtttgatcagagaaagtgggttatataaactaaaattgtgtaatttctgaagtgtataaaattaagccaggcaggtggtacgtgcctgtggtcccagctactcagaggctgaaagaggaggatcacttgagccaaggagttcaagtccagcctggacaacataatgtgacccatctctaaataaattgattgatcagatagataaccagacagacagacctacttctcaaatacagaaaatcacatatgatgactgagtcactgttccctctgtaaggaagatggcaccatctccgtgtgttgccttgcagtggggccaccgcagtgaaaacacagacttcttaccatgcaggtgttggggcctcgtgggcatcagtcactccacgtgtcatttcttttgtaggtggtgatggcacttctcaaatactggccaaagactcacagtccaaaagaagtaatgttcttaaacgaattagaagagattttagatgtcattgaaccatcagaatttgtgaagatcatggaacccctcttccggcagttggccaaatgtgtctccagcccacacttccaggtatgtggggcttgggggacctgattaaattcttccagtgttcatttgggaaaggaaaagttccatgcgtagctggccatgctttgcctctcatgcaatttaaaggtaaaatccaagtttttacttgaattatacttcaaatacgatgctgtaacttgaattctatagaatacccttgagcatcttgtcccttctgccgcgatactttttctcactaagagcagtcatctggcttctctgtaaagctgtctttatcttcatgttcagtgtgcttccaagttcataaacaccctcctttccacacctgagcatcaatattgatagacaacgggtggccaaagcctcggctctgagatgctcttgctgccgaggcccttcgttcctgacactgtgtaaatctgtctccctttaccctttcaaaaaggctgagagctctgacttttgtcactgccaaattcctgtgcgagaggacgaccttggtcagagctactttctactttcttttcccaatttccttaacccttcaagccagcctcggctcatcacctcttttgaaggccacccccacacaccttcccagcctgcctgcctctgttggacgtgctagccacctgtccttttgcatcattgagcggattttattgtgcactcatcatgaacaaggtgaaaataggcacaaaataagcaagacctcccggtgcccagggagcaggccacacag

SEQ ID NO: 78068 - DNA, 1070 bp, Homo sapiens
tctccatgcgtgtcagagcctgagagctaagcattgattaagctgttttatgctcattttattttctctttcaaagctctgtgttgccattattaaaattaatttttctgtcctcagggaataagatgaaaagaaactgacatttataggaaatcaagtattgccattattgtcctctttataattttgtcttaactatatttgttcaagtttcaatgtttttaattcagtttctgagcaaggtcgtttttggctactgtcagctggagacagtgagtggagtggcctctgtggctatgtgagagccactgtgaagaaagtctcgggatgtgtggctgtcagaaaacaagtaacgcggaatgagcaggccttgcattttagaccttagggatcctgtgcgatgtgggactgttggaatatggagcagcctgagagtggagaggcgagggctcagcaggaatgcgtgctcccaggctcaccgtgcggttttctttataggacaatacatggcttgatatacaacgccctgaagctcttcatggagatgaaccaaaagctatttgatgactgtacacaacagttcaaagcagagaaactaaagtgagttgttcctttcacaagttactgtttccaggatttttttcttaatcctaagtaaacctcttccactgttttgtcctaaaacggtattcttcactcgaaagcaaaaccaagcctttcatacttggaaagcaaattaaaactgtgttataataacgtattttgaaagaacaggtgtttaaaggtagctattctccccccttgtattgccagattaatcatctttgcaaaaagtgcttatgtaagcaagaatttaacattcagaattttttcttttcttgggctataatgggcttaaaggctataatgtgtagtccattttcatgtttataaggcagggatttgaattatatcctataaggtttatcccagagagcaagaatcttcatttcaatgtagctttattctgatttaatgaactcagcgatgtgggtgttctctggaatctagtctgtcctttgcaaaatcag

SEQ ID NO: 78069 - DNA, 2890 bp, Homo sapiens
aatgggaatgctggctccttttacagtactggtccctttacactgtactgcatactcgttttttcagtggatatatgagcttcttgtcaaaattatgtgggtcccatgaagaaacatctaaccaggggaagggggaaggattgagacataagacgtacttatataagatttcttttaagaattccaatcttggacatgttaaatttttttatattttctcatgtttaaatctcagttcgtttttcatgctgtgctcagcacgtaagtgtggggaaatggagcaggggggctgcgggaggagccgctggctgggctcaacatgcctgtgccttttccccttcagtgtgttcttgtgtctgatgcatctctaacacagatgacattttactgtttttcagagagaagctaaaaatgaaagaacgggaagaagcatgggttaaaatagaaaatctagccaaagccaatccccaggtactaaaaaagagaataacatgaaaacgcccagggttacttgaatgtttttataagataggaatatatgtcttcaccatggggggggtctcgatttcactaacgttgtatatgaaaatgtctgcaataaaaagtacttttaaactttgtaaccctccttttgtacaagtacttattttgccccatatcgttttaccacagaattgacttttttcctctgctttttaaataagatctgaatcttatgcatatactgtggtaaaaagaaaacttgaatacagcctgagactgtgcctcctctctcagatatcatagatgctgtcactcaaacagcatttccctttctttttcatatgaaattagttctaaaagaaaggaaattagattggaaatagattaagtatgacgttttgatgtcctctttctttgtatgaggtttctgtaagcccagccttttatcattaaaaatcagctgaattctgccacattagcagccaaccctccttcccaccccagcagcgggtgccagtgtgctctggtgagtctgcgccgatggccggacgtcccggagctgccggcagttccagctgccggggctgccagggtccgggagggtttcctggtgtcatggtctttgggtttgatgtacgctgctgtaaatgactagagcgttatgacagtttcttcacgttctgtgtgcctgattataacagtgcctcttaaaaagaaaatctttttcagaaaatcttttgtctgaatctttgccactcttaagaattctcaagctttccttcaactctccagaaaagattttaccgaacaatgtatttcttttagtgagagatatgcatagttacctaagttggtttttagatttctctgacacttaataaaaagttatacatgaatataaagttaaaagtatatctttacctatataacaacatactggtttgtatactctgataaaactgcaatcaggaaactcaaatcaggaaaacggaatgacatttctaattgtgagcccttgagtccacctaaaacaggtagccagcatttttctagcagttatttactcatgctgacagaaatgctgttttaagattactgtctaaaactgtataatccttaattgaggtaggtagctataggcgtctccttttaacgaattgaatttatgttgaaagtgtggttaaaatactgatatttgttttaaaacatggtaacactataaacctgggcaagtttataaggcccagccctgcctgacgctgccctgcgtgtcttgctttgttctgaagagcctcaggcaaagtgggtgctgatagccctcaggattgtcaaggaccccagtacacatgcagttgaaatcagtagcctcgaaaacatgtgagaaatgaatacacacacacacacaaacacacacacacgaatcagaaggtctgattttatgtacctagaatatagagataacttattgaaaaattgcataaaattgttacattacaaatcaagagctggttgtttgtgttgacaaacatggcccagtttcactactgcacatactgtacgtaaccaatgtttcttctgaaatacgtattgttctcttttttctttttctcaacttttcctgaatgttctcaagtaactttctgtattctttttggttgctctctttgcaaacgtctgtggtggtggcaggcatgccgtggttctgcataggagctttgacgaactgtgatgctgggagcttagccctgccttgtcctcatgtctgtgttgacgccatctgtgacgcagtccccatgagtctcgtccacatgctctagtcgcatggcacatggtctcctaaacagaaaatacttcatgggtcaatacctcagagctggaaactctggcctcgtacttgcttctcattctcaggagaaaatatctaaattctgatcactgcttcccattacaacagcaacaaaaagtcaataattttgtggataatacagtctggttatttctgtagtgaaaatagttgggttttcaaagtttggttttccatctcagatctgcctgtggagaattggtttgcgggctttgtttttaaggtgggttcccagggactcgctgtgtgttccctgatgccccccgtccttgcagaccgagccttcgtccactcaaacgtgtgacagcacgtacccagcaggcgttggggacccgggaaggctgcggtgccctcaggagtgtgtcttatttgagcagttatggcaactttattggggtttttaatgtcacagatgatttaattttctaaaatcatgaaacattggcagtttctaacataaatgtgtttctcctaatccatcaaaaggggccatataatattttactactcacttcccccagcttttgtgggaatcatatgaaa

SEQ ID NO: 78070 - DNA, 1063 bp, Homo sapiens
gaaatggctttaatgacatttatgaaataggaggttacttaggaaatttactaaaatgcatgaattctgcaaattagaggtactgagtcctttgtacaagcactgcacatttcagaagaccagaatgccagtattgaacacacaggtcctcaaacgagtcacgatttttagtagcaagacatttttggcaaatttccatgataagacctacgccgtttccctgtggccagggtgccgccagcgagtgggtgaggcacacgtgcctcgcggttatcctttgacttccacctcagaagtaagcttgcttttcagatagcttagtttgtagccaacgccattgcatttctaattccaggcacagaaagatccgaagaaggaccgtcctcttgcacgccgcaagtccgagctgcctcaggacccccacaccaagaaagccttggaagctcactgcagggccgatgagctggcctcccaggacggccgctagcctccggggcgccgcgtcggggccgggcccgccagttcttttccggattctgtagaaaatacatacttcctgtgccataccaatcagttacactcaaagctttcttggaccccgttccgtaggcaataacgtgcgtccgcctcagcgcgagattaggagttcaaacaatggtgacttcccagagcccgctggcagagccgcgggttgacgacggtgtcctcgcagtgtcgccgccaccccagcgtagtccaagtcagactatttcacaaagtcagagcgataggaaagcaccctgcccttcatcttcatgttctcccaaatggaacttaggatcttttaacataggtggttctgtgataacatcagtgttttccaaatcaaaggaacgctttaaaaaataggacctattttttaagactttacagcctttgaaatggtttccacgtgattgttacgccagcagttctcgttttgtttgtttttcaatctcagtgaaatggctctttgctttcgagttctcacgcaacgtactgggcaaatgacaatcctcagccgctggtattttctaaggggtct

SEQ ID NO: 78071 - DNA, 2145 bp, Homo sapiens
taaaagagcttgctctgtctaccttgacagaaattggagttttaaaattatgtgttaatatttttatttgcagatttcgtttccgtcaacttaaacattgttgcccttcaacaaggctcttgaattaataaaattatagtctctaagaattccacattttatggaaagttagagcaaaatcattttgagttaagccagttcttagcctaatgcaaactgcagcgcctttaagcataaagtaacacaacagcattgcacggggccggcactgccgctgccttcactgaaggctgcagtgctgttctgagagcttggaggaggcaccagcgaggatgacgtttagtggagctctttctgttgaaaagagctcacgttatcaacaccttgtaaggaaaatacagtgtctgagttttcatcggtcttcacatgctgctatatattccacagagttccttgcatgtactgagcttttgttttagatggaatagcacaaggagaaaaatctttaaacttagtgctttgtctattctttatttctctcagggtggccagtattttgacttatttatcctgcttgaaagctacttgagatgtgtactgctattctaaacacgtgatctagtttctttcatctctggcataagattatataacttaatgttaagtgtcttgaggcataaaagacaaaatgtggcttattttaggatctgttttttcatcgaggtctcgggtatcctttcaaagatagtgagaagcagacactgctccttgtgcagctctggtacctcctgcccactgctgtcacttcaagccactggcaatgcttctgtcctcgtgtcttggaggaaaatcacctggggggaggggacttcttgtggtaagagcaagtgcaggtatgaaatgcgaagattgccccagctaaaagtggacaagtccgctttgtgagatgaatacttcctgagaaacttgacaagtatctctccattttaccattatgaaaactatcattaaaaaaaacagtttagatgccttctccttttgagggaaaaagggtgctttttattgtataaagcagcgtcttatgtattttgatataccattgtttgaacttccgtctttagctgatagattctcaaatatccttgattttggatgttcagtatgtttgtgagagaggtttctgggaagactctctttttgccctcgggaaaaagcaaaatatcaatgtttgggtgactgtgtaaagctcagtgtgtaagaacatctttttgtctaggttttctttctgctctttattgaagacaaacactcaccaaaaagaaaaataaaagttttcagagaaactaattttctttggcaagagtattacttaatattttggcctcctaaagtttccctagttagtactcggactcctgtgctaattgtcagcttacatatcattgtatagagactgtttattctgtaccaaactgatttcaaaagtactacattgaaaataaaccggtgactgtttttcttcataaagttctgcgtttggcatcttcactctttccaaaatgtatctgtacatcagaaatgtcactattccaagtgtctttttagtgtggctttagtatggcttccttttaatattgtacatacattgtatctttgttttatggtaataagtaataaaaatgtagacttcatattttgtacaaaatgtcctatgtacagaataaaaaagttcatagaaacagcaaatataggtaagtggcacaattatttttctttagaaaatatctgtaactttatgcattagtgaaatgttaagtaccgacatattttttaacattttgtaattcaaaactttttgttttgacattgtttatgaagagaaacttcatacacttgccatttaatatgctcttttatctaattttcaaaaactctaaaaaacggtgtatcatatggactaaataaagaacatgtgaattttattgctcatcatgaaactaaatttagccatggtgttgagcaagctggctctgacgttatcgggttcccgttaggtcagggccgcccacacacagggacgctgactgcagaggggctggccatctccatccagcccgcctggagcgctggctgcgccagatgcta

SEQ ID NO: 78072 - DNA, 1051 bp, Homo sapiens
aagtttctctggctgtgtgctattcgctgcgtccacagcagtgaagaagacagacgcagcccctgaccaacctcgccaagcccgggcgccgagccaggacgttgagccaagtccccatctcctaggactcgcagtgcggaggctgcgggccccgaccagcgccgagactacaagtcccagaagggcgcgcggcgacatcgccgggcccgccccccgcgcacgcgcggcgccgtgacgctaaggccgcgagcgagcgcgggtggctgcggcggctgcggccggcggggcggggcggggccacctggcagtggctgcctttagggcggagccggctcccgctctcctcagtctgcggtgggctagcggacggtccggcttccggcggccgtttctgtctcttgctggctgtctcgctgagtcgcggccgccttctcatcgctcctggaaggtcccgagcgcgacaccatgtcggagcccgggggcggcggcggcgaggacggctcggccggattggaagtgtcggccgtgcagaatgtggcggacgtgtcggtgctgcagaagcacctgcgcaagctggtgccgctgctgctggaggacggcggcgaggcgccggccgcgctggaggcggcgctggaggagaagagcgccctggagcagatgcgcaagttcctttcggacccgcaggtccacacggtgctggtggagcgctccacgctcaaaggtgcggggccgcggagggcagggtcgccagagccaggcctcgcggaatgcagggcctgccaggtcctccggggtcgcagatgtccccgggatgggaggagcccggcagctgcagatgacccctggatgggcagagcccggcggccgcagacgtcccgccggccgggtccccagggccgcagacgccccgcagaggccggcgcggcgcccggggctcgccctcgccacacccactgcccggcccggagcccccagggcgccccgctcctggtcgcggggaggggaaaggggtccccgtctgccgtcacccaaaacaatggggtcgctttgt

SEQ ID NO: 78073 - DNA, 2017 bp, Homo sapiens
ggtgtcccagccctgccttgtggggacccagaggccgaggcccacagagcgacggtgccagccccgggcctgcgagcatcactgttgtaggtggatgctctcacagcatccttgctgaacgggtgtatcctgattttacacctgaggaaactgaggctcaggttaagtgatttcacccaaggtcaccagctaatcttagtcctgagactagactcagtgtctcagctccccatccactgcttgttttcactgatcatacctcatatttgtttaatgcttcgatgatgttaatgataaccctgtaatatttgagtctaattttacagattaaaaaaaaaaaaaaagattcaggttaggcacctagtagggggaagaggctagagttagcgtgttccagctgtctcctcaaataatgatcgcccaccagcaaggttacattcatctaagtctggggcttgcctgcaggcaggctttctcatggattcattacaaccactttgtagcccattacaaccactttgggtgtggcgtgtccatctaagaacctaaggatgatgtccaaggttagcctctagggattggagattgtctaaaaatatttgccaacaagcttcttaaaatttcaaaaaactgtatggttctctcagtgagagaccctgtactgtctgccccatccttaacacacactgtgtttctgatggtttgtttctttcaaaggctattcttactcagaagatgcttccctgtagccttggtttcctgccagagattagcagggtgtaaaagaatatttttttcttatatccacgtggaatgttcaaggcaaataaaccatttgagcatatttagagtattaatgtttttgagggttgtttactgtgatgtttgggattatgtattcctaagtggaagccacaaaagttaaaaaaaaaaaatttatctactcttttttttttccaaaaaacatatagtcattgtagaaaatgtactatacagctaaagtaaaaatcactgggaattgtttgacccagatataatcactgtcagcatttttggtttatgtctttgtggtcatttttcaatgcatattcgtcattttattaaaatacattttaatctgcatttttaaagttaattgtattttgagtagcttgaccattgctaatccttgatatttttattgcatagtttatgtattagaatcagtgattttattttttttaccttgtgtcactctttttatgaaaaaaaatttaagttttatactttgcttctagagtgatcaccagtaattcgctttttccaggcatcttaaaattggacgttgctaaaattattggggtggggggactatgtttatgtagtacaatatctactacaaattctctctgttgtcttatgagtacctttttttctttcagcaaaacaaatatgcaggtatccaaatcttggctccataatgacttgcacttttgaaagttgactaaggaatgagactatctaaaattgaaatcctacctcatttctgtatttataacaatccttgaagtatttctaccaattcaacctgtctataatttatttttcacttacaaaaacctaaggaaagatttttaaattaatccagttttatgatagatggtctgtttgtcttattagcagcctggctacactaggacaccttagatataagtagagacccaggacttttggtaggagggctttcttcttggtggcttttatgagttagctttggcatttgtacatttaatcaaatatgtgcatccagtagttaattacagtgaaaagataggcatgcattaatgtagacaacagagctgaattatttaaactgaataaagatcaccaacaatgaagtcatgtaatttaatgaacagtagaaattacttttatttattttattccttccactttttttgtggaagtatccaaacacttgtaattgaatatagaaacatttttatgtgaaactatatatattttttatttgtttgtt

SEQ ID NO: 78074 - DNA, 1051 bp, Homo sapiens
ccagcctgggcaacatagcaagaccctatctctacagaaaattaaaaaataagccaggcatggtggtgtatgccagtagttccagctacttgagaaaattgcttgagcccaggagtttgacgctgtggtgaactaggatcacaccactttgctccagcctgggtacagagtgagaccctatctctaaaataaatcaagtacagcattactcaaagtatagaataaatgttgtgaatttaacaactcatcttgatactgaggaattggagagtttgtgggaaaaagggattaagttatagctcctcattttaaaaagagaaacctttgtatagttcctggcctgtaggaaattgtcttcctcatagtatgcttacagcatggtgacaaaataggtgctcattacttaactagccattttatgttaatgacgtttttgtagcattttttacttcaaggaccattttttggttgtgtatctccgttcggtggggtatgcttcagtttgcagctgatggaactgacatttccatgacttgtctgctctgcagcttgttcatgacctgcctgggattggctgctaggttggttggtctggatgagagcgtgtagtttgggttttttgtttgtttttggtggggaaagggttttgttttgttttgttttgtttgagacagggtctcaactgtgtcacccaggcaggagtgcagtggcccagtcatggctcattgccacctcggcctcctgggctcccagttcattttctcatttttttaatagagaggaggtctcaccatgttgcccaggctggtctgggacttcagggctcaagcaatacttccacctccgcctgccaaagtgctgggattacaggtgtgagctaccacaccccacgtgtttgtttgtttaacactccagtgtttgagacttggaattttttttttgagacagggtctcactgttgtccaggttggagtgcagtggcacaatctctgctcaccgcatcctcaacctccggtctcaagcgatccacccatctcagcctcctgagtag

SEQ ID NO: 78075 - DNA, 1363 bp, Homo sapiens
gccttccaagagctcacagccggggaggaagatacattcataagtcaaacccagaacagactcagataagtggtgtggcgcagcagagggcaaggctagacgaatgcttctcagtgacccttgggatgtttcttgatacttttcttgattggggtttgtcttgggcctggccttgatgaaaactggccatgctacattgtggtgaggagcctggacttcggaatcacaaacttctgaattctcacattgttgcttcccacccaagtatctgtgggcaagttactgatattctttatggagaaaacaaggataataatagtcacaccaaccccatagggttaaatgtatgatagctgtaaagtgcttagtaaaatgcctatcacacaggtgttgctgagtgaacggctgagcagaatattcttgagagcaggggtggaaagtgacttctgtgtttgaagcacaatgaatgagcttcctgggatgggatgctgagaacttggccatagccagcagcggctagcactgcccaccgccaggccctgttccagtgctttcatgcaccaactcagttatccttgcagaagccctggcatgctcacgctaccccacttcacagacaaccgccttgcccaaagtcacacagcaaagtcaggagtgaggaaaaaaacggataggaagggaaaaatagtgccaagtcatgtaggtgtcgatatgtcaggctgggagtagggagaaaatagtcattgtctaagcagttgataaataagaaattggaaatgttgatattaatttgatatatttattatgatttgtagaggacgtcggtgatgaaggagaagaagaaaaagaattcatttcctataacatcaacatagacattcattatggggttaaatccaataggtgagtagtacaaatattaccattatctcaggttataaatttgtgagaattaatatgaatcttttttcttttcaaactcagaaattcttactaagagaattaatataaatcttttttttttttttgagacggagtttcgctcttgttgcccaggctggagtacaatggcgcgatctcggctcactgcaccctctgcctcccgggttcaagcaattctcctgcctcagccttccaggtagctgggattgcagacatgcaccgccacgcctggctaattctgtatttttagtagagacagggtttctccgtgttggtcaggctggtctcgaactcctgacctcaggagatccacccgcctcagcctcccaaagtgctaggattacagacgtgagccaccgtgcccagcctaaaattaatatcaatcttaattgactcagacaaacacattaagaaaacactc

SEQ ID NO: 78076 - DNA, 1594 bp, Homo sapiens
atgagggttagaatttcagcagatcaatatagatttcttaagcaaaggcacaaagcacgtgatgtgtttagggaatgggacatctggtctaagtggtgtctcagggtgggaaagaggatacatagcaggaggtgaaacaggaaaagctgagtaggaccagactaaggggagcctggaatggcctcttatcaccttaaccagtgagcaacttttgtttacttagtacagtaaataaatgttacacattagtgtaagatcagatttaagtactacttatatttctagggcaggttagttttaggccaatattacgaattcaacccatgtatgagacaagttaactttgcctggtttcatgtttgttcacattctgtaaccataaccttgattcagtagctctcatgtactaaagaaagacaagcagtgcatttcactattagaaaagcaacacttcagtatattcttgtatgatttttaaattaataagcctaattaggagtgtaacttttctaatttcttgttttatttttctttttagcttggcattcattaaacgtactcccgtgattgatgcagataaacccgtgtcttctcagctccgggtccttacactcagtgaagactcgccctacgaaactttgcattctttcattagcaatgcagtggctcctttttttaagtcctacattagagagtctggcaaggcagacaggtaaaaactgtggtttgaatgttatatttcacttaatgttcacaagatagtatagaactcggtgtaaaacttgggaattgggagggtaacgctagtgagccgaggggatataaaccctgtgtattaataaatatgtgtgtcattactatttgacagacctgaaatgatgggatctctttggagaccaatagcacactaaatgttgaggtatgaaatctgtttttagggatggtgataaaatggctccttcagttgaaaagaagattgcagaactcgaaatgggactccttcacttgcagcaaaatattgaaattccggagatcagcctgccgattcatccaatgatcacaaatgttgcaaaacagtgttatgagcgtggagaaaagccaaaagttacagactttggtgataaggttgaagacccaacatttcttaatcagttacaatctggagttaaccgctggatccgagaaattcaaaaagtaagagcacaggattgaaagttatgtaaaatatgttactctttaatatctttgggaaaactgatctggattttgtaagtgaggtaaattatgtgataacttgttagtggtgccgcctcttggtcctgggactgtccagtgcaggactagccttggtctgggtggaatggtcaggggacagtgtgagattgcttgagtagtcaccctgatagagcattaatctcagcagtcgtatacctttgatttcaaatcaagccacttttgatttacagggaaggaaatctacttgaaatataaaaattgagttgtaatgcatgtgttttgttaacgatatctattctaccttgtttaaatagtgaatacccttgggtgttattttattttcaaaggtgaccaaact

SEQ ID NO: 78077 - DNA, 1582 bp, Homo sapiens
ggaggttgcagtgagccgagatcaccccactgcactccagcttgggcgacagagcaaaactccgtctcaaaaaaataaaataatagaaataaagtgcacaataaatgtaatgtgctcgaatcacctagaaactacccacccccccaccaccccccaaccatctgtggaaaaatcgtcttccacgaaactggtccctgttgccaaaaatgttgagggccactgatatagaaagcaaagcaaagcatggtaaattctctgaggctgccaccttcagcctttagagtatgtaggaattgactcatactcttaaataagcaaaaatggagcgccactagggttatcctgttaataacgtgttgttttttcaaatatgaatagtttttgtctcgctagatattttgcaacatcaaaatgttccattgtaatggcatattttagtttacttagttttgttactttatgtgaaaaccattaactctttctctgttaatataggtctaaaacaggctttggaaactgtgaatgactacaatcctctgatgaaagatttccctctgaatgatttgctgtctgccacggagctggacaaaataagacaggcgcttgttgccattttcacacatttgagaaagatccgaaacacaaaatatcctattcagagggcactgcgtttggtggaggcaatttcaagagacttgagttctcaattactcaaagtattgggcactaggaaattgatgcatgttgcttatgaagaatttgaaaaagtaagtttgaatatataagacaaccaacctcaagacattgagatgaaaatatgtcttaataataagcctcacttttgaaattatatcctaggttatggtagcatgctttgaagtttttcagacttgggatgatgagtatgagaaacttcaggtattgttgagagacatcgtcaaaagaaaaagggaagaaaatctgaagatggtgtggcgtatcaaccctgcccacaggaagctgcaggcccgccttgaccagatgagaaaatttagacgccagcatgaacagctaagagctgttatcgtcagggtcctgaggccacaggtaagatttgcattctaaaagtttgtgttttgtttttgtttttgttttgttttttgtttggtgttttttttttgttgttgttgttgagatgaagtttcactcttgttgcccaggctggagtgcaatggcatgatcttggctcactgcaacctccgccttctgggttcaagcgattctcctgcctcagcctctcgagtagctgggattacaggtgcctgccaccacgcccggctaattgtttatattttgagtagagacaggcttttaccatgttggccaggctggttttgaactggccttcaagtgttccacctgcctcggcctcccaaagtgccgggattatagacgtgagacagcatgcccagcctgtttttgtttgagacagtctcattctgttacctaggctggagtacagtgaagtgatcttggctcactgcagccttcgcctcccgggctcaagcagtcctcctacctcagcttcctgagtagctgggac

SEQ ID NO: 78078 - DNA, 2949 bp, Homo sapiens
ggaatgctttatttagtctctttttcagagagtccttctctgtaaaacatggatagtaattacatatgcctgagatttataaaacaattaaatgactaatttctttatatatatttttttctcttctgaatttatctttcattcttcttttttgttttttgagatggagtcttgctgtgtcgcccaggctggagtgcagtggcgtgatcttggctcactgcaacctctgcctcccgggttcaagcgattctcctgtctcaacttcccaagtagctgggaatacaggcatgcaccaccatgcctggcaaattgtttgtatttttagtagagactgggtttcaccatgttggccaggctggtctcgaactcctgacctcatgatccgcctgccttggcctcccaaagtgctgggattacaggtgtgagccactgcacccggcttaaaataaattttaaagccttcgtttggtcagcatttcttgattacatatctttctcctttaggtcacggcagttgcacaacagaatcaaggagaggtccctgaaccccaagatatgaaagtggctgaggttctctttgatgctgcagatgcaaatgccattgaggaagtaaaccttgcttatgagaacgtcaaggaagtggatggactggatgtttccaaagagggcacggaagcctgggaggctgctatgaagaggtacgatgagaggatcgacagagtggagacccggatcaccgctcgccttcgggatcagcttggcacagccaagaatgccaacgagatgtttaggattttctccaggtttaatgcactgtttgtcaggcctcacatccgtggggccattcgcgaataccagacccagctgatccagcgcgtgaaagatgacattgagtctcttcacgacaagttcaaggtccagtacccacagagtcaggcttgtaagatgagtcacgttcgtgacttgccccctgtgtcagggtctatcatctgggctaaacagatcgacaggcagctgacggcctacatgaagcgggtggaagatgtccttggcaagggctgggagaatcacgtggaggggcagaagctgaagcaggatggagacagcttccgcatgaagctcaacacgcaggagatctttgatgactgggcaaggaaggtgcagcagcgcaacctcggtgtctcggggcgcattttcaccatcgaaagtactcgggttcggggccgaactggaaatgtgcttaagctgaaagttaactttcttcctgagattatcacactatccaaagaagtccggaacctcaaatggcttggtttccgcgtcccactggcgattgtgaacaaagcccatcaagcaaaccagctttacccgtttgccatctcactgatcgagagcgttcgtacctatgaacggacctgcgagaaggtggaggagcggaacaccatttcccttttggtggctggcttgaaaaaggaagtgcaggccctgatcgcagaaggcattgcgttggtgtgggagtcctacaaacttgacccatatgtacagcgcttagcagagactgtcttcaacttccaagaaaaggtatgctctcatgtaatcctcaggtgtcctggtaacgaatgaagcacagtaatagcgagctcagttaaaacactagttctcccgaagaaggcatgcatggttgatgcagcatacggccatgtgagctgcaagggaggaggaccctttgtactcaccgggctatttaatggtgctgggttttagggaggccattaagtaacaacctgagtttagaaacaggtggagagctaaaggacacaggagtccaacagagagcagaatgcagttttattgctgctacagctgaaagcagagcaggctctaggtctcagccacgaaggccttacccagagcctgcggctgccagcggaccagatgcatacgacagcgaggctggctccccaggcacaggaggagcttaacagagcacgtttacttccttctcccagatttacccatcagaggccacctctcccattgagtgggagtaagggaagagaagctggggaggctccatgcattttcctttcctctgcaaggacatgcgagtggggattagtgttctcaccccagcagctaggattagctacttatggaagaactgtgcctggagcatttgtcaatgtataatatttgagaagaatgttatgtgagaataaaggaacagagtgtgagtgggtgttttaaatattaaatatttcttccttcaggtggatgatctgctgatcattgaagaaaaaatagacctagaagtccgttccttggaaacttgtatgtatgaccataagacattctcggaaatcttgaacagagtccagaaagcagtggatgacttaaatctgcactcctattccaatttgcccatctgggtcaacaagcttgacatggaggtaagggatagaatttgctagcattttcctcctttttcttctgctgaccctccagtaagcttattagtttgtcactaaaaagcatttttccttggaaattatctgtgatagttcaattcccctccaaaatctcatttaactagtgatagaactgaattgtggccaggcacagtggctcatcatgcctgtaatcccagcattttgagaggccgaggcaggcagatcgcttgagcccagaagtttgagaccagcctgggcaacatggcaagaccctgtctctactataaatacaaaaactagccaggtgtgctgatgagcacctgtagtcccagctactcaggaaactgaggcgggaggatcacttgagcccaggaggcggaggttgcaatgagccaacatcgcaccactgcactctagcagagtgagaccctgtcacacacacacacacaaaaagaaccaaattatgatactacatgtcagtactcacatcaagtttaag

SEQ ID NO: 78079 - DNA, 1125 bp, Homo sapiens
tcgtgttaccttttctagccctccaggtgtcctcctctgatgaccctgccactccccaacacccaatttagaaacagccacattctgcccccacccgtatccccgtagacaagtggggatgggtagaaggtgtggtatgtgtgcataaagcacacttaccaatccacgccttttcccactggtggacttcagagagcacaccagtggagagtgttggggaggaggatattttatagcagaggttacaggttgtgaaggattggtgattcagtatccaaagatggagaagacagcctaacaagtgatctgtggctgggagaaagtgagaaagtgagattctgagaagagagatatgaaggcttctagtccggaactgtgtatcttttatctgaaacacctaccactttctgattgacttgctttgtgagctaacttttagaagaaacactgttctctgatataacgttgtctgtagattgaaagaatattgggcgtccgtctgcaagctggcctgagagcttggacgcaggttcttcttggacaagctgaagataaagcagaagttgacatggacacagatgctccacaagttagtcacaagcctggtggagagccaaagatcaaagtgagtgcttctgtggcattctatttactaataagtgaaataacaaaactctctcgttaaaaaacacctatggaaaggtcacttagtgtggacacctggcagatgccaccttaaccaggtgatgaaggtcagcctcaccagtggcgatgtgcaggtgtcatgtgccctctgatgtgatgcgatgggaagggcaggtcacctctgcgctctttctccaaaatccctcactctcatgtgagatgttaacattggagaaagctggtggaggatatgtggaaactccttgtacttcctttgaaactctcctgtaaatctaaaataattattttaagtcctaaaaaatgaaaaattaaattttaggaaaaaaactacactggaaaaaaacttcttaccattcatgcaataaattatttcaagaactgcatgtaatccaccagaagtcagtgttcagaccatgacattgaaacgtactccactgttttaacaaaggtctcagttca

SEQ ID NO: 78080 - DNA, 4746 bp, Homo sapiens
acaaaaattaactgggcatgatggtgcacgcctgtggtcccggctacttgaggggctgaggcgggaggattgcctgagcccagaatgtcaagtgagccatgtcgccatcgcactccagcctgggtgacagagtgagaccctatctcaaaaaaacaaaaagcaaaggacttggcatggtggctcacacctgtaatcccagcactttgggaggctgaagcgggtggatcacctgaggtcaggagtttgagaccaacctgaccaacatgctgaaacccgtctctactaaaaatatataattagctgggcttgctggcgcatgcccgtaatcccagctacttgggaggcttagaattgcttgaacccgggaggcggaggttacagtgagccaaggttgtgccattacactgcagcctgggcagtaagagtgaaactctgtcttaaaaaaattttttttattgaaaaatagattgctgagtagaaatgaaacctttctttcacagaatgtcgttcatgagctaagaataaccaatcaggtaatctacttgaatccaccaattgaagagtgcagatacaagctgtatcaggaaatgtttgcctggaagatggttgtactgtctctccccaggatccagagtcagaggtaccaggtaagcctttggtgactcgaggcacacgcctctgaccaggactctcatgggctctgtgataccacttcttcatggtgcttctttagataagctcttgatgttgtttacaaactccagacatcccaggggaaagttagggaggctttttgtgccctgacctttttttccaactagttacttggcatttgtagcttggtctcagtagtttcttcgaactcctgtccatgagcatctttgggaatctcaattcctgcttctccctctcctccccaccccccactttttattaggggaattttaaaacatacacaaaagttgagggaatcaagagccccccaccacacagctttatcaatatgtggacaatgttatttatattttctttcctacctctccacccccaccagattatcttgaagcaaatctcagatataatatactcttagtatatttttagaacaaaaggaaatctcaaaagaccatttagtccccagtgtcacttctgaacagaaccagtggcttcataaaaaaagatggcacaacttctgctattgcagactcttccagaatttagtgataagacattaaccgttttcttaactttgaatataaactcagatctttaaggattttttttgaggtagttaattgcctatggctaaaatcgtggtgatgtttcacctaatgctgggcactgtccagctaatcagaaccaagctatggatattggcttctgcccttcaaggagtctacgtacaatccttagcatcattctcatcatgttactcctgtttttaaccagccgtgtttctatttgcattgttctcttgcttatctccaaatttaacaaactaaagccagcagtctcctttttccctagagcccatcccctcactctcgtttagctgttctgccctctcttctgggtcttctttcagcacctaaacgggaccccatgtcccctgcaatcttcataaggaagctcccttctcaggcactcatccagcctcctccagcactgctctgtgtgatcgcccatagccccaccctgctgactagggggcttctctgtccttgtctcacctcttaactgcaagacttgatggaggctccctcctgcgtgatgctctggactcttcagaacaccgtgcctcctggttctcctcccacctcagtggctggtctcctttctcggttcctcttttgccttccccttaaactccctctaaatgttctgttccctctccactcctgtgcactctcattgtggtctcatctagtcttgttgactttaaatgccacctgcaggctgacagctctgtgttcgtatctccagctgacctttctccctactccaggcttgtctgggcagctactagcatggcatctccacttggctatctcggagtcgcgtcacactgagcacctcttgagccctgcctccccaagtttgatcttccctcagtctttcacttctcatccttcagctcattcaggccaaaaatcatggtattgtccttgattcccattgtgtgtctcttgaaaatgaatgctgagctgtttcactggcaccactccgtacaaggtaccatcacctctcacttggattattaatattccctcctatctgttctctctgcctttgcctccctaaaatctgttttcaacacagcagccaaagcaagttttagattctaagtcaatcctgacactcttttcggagcccttgaatgacttcctatctcactcatcatgaaagtcaaagccccagtggcttgctgggcccgtgtaatgtgttgcttattatttctctgacttcagctcctgctgcttctcccttcactggctctgccccatcacactggagtcttgctggtcctcaaacatgccggtagactcttgcccctgcgccttcacatttgttgatctcaactcagaatccttgatggcaaataatcacaacttacccctctcctcctggtttctcgcaattctccccttctcagcaaggcctttcctgacgtcattactgaaaatgcagccttccccatgctgtgcccacactccctctccttctcactcttgctccgtagttctctctcaccacctgacattctgtgtgttttgcttattccctaatcgcgtctctcctcccatagagtgtaagtccctgtgagcagggatttttatctgcttgttgtacctagaacagtgcctggcacataacaggcactcagatagttaaaatgagcaaatggcttcgtgcacttttcagctgtttttgcattgccaaatttctctgttgtcattaatgttcttgtattggtttgatgagttaaatataagtaggctttctggttacttgtggccagggtaagtggatgttatcccttaaatgccattttggtcatgagcttttctttcagttcattttaattaagtaaaaggtgacacttagattaccattttcatatacactgcttgcattcatttcggctttggttggctaggtgggtgtacattacgaattgactgaggaagagaaattctatcggaatgctttaacacggatgcctgatggccctgttgccctggaagagtcgtattctgctgtcatgggcattgtatctgaagttgaacagtatgtcaaggtaagaaactcctaatttcattcaaatgtgcatatggtctattctagacacttaagagtacaagatataaagaacatggagctaaaaggtcttgactgtatgtatggttcactagatactatttgctgtttcaaagcagagagtaaatgataggatacatctttttgagttttaaccatgacgttcaagaatcttttttgatatgaaaattctgagagtctgaagtgagaatttctctaatagtggtgaaagacatgaaccttcttaatggaatgtgaacataagaggtgccagtattctacaaaatgaaaactcaaactattatttaactgtgttcttcatttgcaggtttggcttcagtatcagtgtttatgggatatgcaagctgaaaacatctataacagacttggagaagatctcaacaaatggcaggctctcctggtccaaataaggaaggccagaggaacctttgacaatgcagaaaccaagaaagagtttggaccagtagttatagattatggcaaggtgagccctgctgtctggttgaaaggtgtcacgggtagtgtaaaagcaacatttctgttagactgatattcatttgaaggataaacacgccagcaggaaagagctgatgatgtgttgtgtgctatttcaccctcaggtacaatctaaggtgaacttgaaatatgactcttggcataaggaggttcttagcaaatttgggcagatgctaggatcaaacatgacggaattccattcccagatctcaaaggtgaggacataggattctgcctctgtaaccggtctactggtgaaccccagctctgtgatgaaatactcccctctctctgaacagtcccgccaagagttggagcagcactcagtagacacggccagcacctccgatgcagtgaccttcatcacctatgtgcagtctttgaaacggaagatcaagcagtttgagaagcaagttgaggtgagctctgtgcatatttaaaaatttttggctgggcgtggtggctcacgcctgtaatcccagcactttgggaggccgaggcgggcggatcacgaggtcaggagatcgagaccatcctggctaacacggtgaaatgctgtctctactaaaaatacaaaaaattagccgggtgtggtggcgggtacctgtggtcccagctactcaggaggctgaggcaggagaatggcatgaacccgggaggcagagcttgcagtgagccgaaattgtgccactgcattccagcctgggcaacagagtgagactccgtctcaaaaaaaaaaaaaaaaattacactagatctctagtttaatttggcttctatagtattttgcattctaagagaatgacctgactcaacccttaaggcactcttttcttagtatggcccacagatcatctctgttacaacagcctgatgtgcttgttaaaactt

SEQ ID NO: 78081 - DNA, 1219 bp, Homo sapiens
tgggctctcagaggatgttgccctctggccacgatgtcttaggatggatggttttaggagaagagcacatgtgttgatcttctgtgttttgttttgtttgaggcagcatctcacctgtcacccaggctggagtgcagtggcaggatcctagctcactgcagcctcaatctcccgggctcaaacaatcctcccacctcagtctcttgagtagctgggactacagatacatgccaccatgcctggctaatttttttctttttaagtagagatgaagtcctgccatgttgcccaggctggtcttaaactcctggactcaagtaatccacctgcctcagcctcccaaagtgctgggattacaggcaagaaccactgtgtctggccagtcttacgtgttttataactataaagtgccttctctttcatggggctctaattaataatttctatcattgttatagaagaaaaaacttgatttattttttaactctcaaagctctaccgcaatggccagcgcttactggaaaagcaaaggttccagttcccaccttcctggctttatattgacaacatcgagggagagtggggagccttcaatgacatcatgcggcgaaaggactctgccattcagcagcaggtggcaaacctgcaaatgaagattgtccaggaggatcgggccgtggaaagccgcaccaccgacctgctgactgactgggagaagaccaagcctgtcacggtgagtcccgccaggtggggacgcaggagactcctcacccagcagtgtgatttggtgactttctttcaagcctaaaaggccttgctgtgactgagctttctagtattgaagactcttttcctttttgtagttaaaaaagcagatggagatagcaaatgtgaaaatatgaagcccagcttagacctctttttactcagaatggcattcagtagctggttttaaggattaaagtttttctgttcttagatcattctcttacgtagatatgcgcagaaattagagtttaatttcctgtagacaaaggccaagctttccactgctgctgctagttaatttaattttggttggatggtctctgtttttgccagtgctgccagtggattgtggggaggcaggttctgttgtcttcgtcattgtagccatttaaaccttccaccacccagaaactgccacatccacttttcttcatgcattgaagtatttatt

SEQ ID NO: 78082 - DNA, 4067 bp, Homo sapiens
tctggtgatttctcattcctctcttggctgggtaactgatgtaacaactgtgttctctggggaagttgtggctggcaggccccggaggtttgtcctcttctatcactggggatgtgcacttgaggccgagtctgtgctgcctcttctcccgccttccagggtactgaataagacaatggctaaatcaagagatgctccaccattctattttatttatgtaaaatgttcatgtaaaaattaaattcgctactgtacacacatccaaagtggacatcttgttgaatgtttccttatgaagatgtgtgcaaagaatccgaaacgtccagaagccctgcaggctctgtgcaccattttaaagcctaaatgctcatctctcctgagacattgtgctccaattctctgtgctctgactgctttcagggcaaccttcgcccagaagaggcacttcaggctctcaccatatatgaggggaagtttggtaggctgaaggacgacagagagaagtgtgcaaaggccaaggaggcgctggaattgacagatactgggcttctcagtggcagtgaagagcgcgtgcaggtatgaaccactggggagtgggtggagaatcccgctccccacccggactctgccattgactttgttcatcctcagggccctgccagattctggggtgatttctatttccaaagtcaactgctttactattctcaatcgcaggtggccttagaagaattacaggacctcaaaggcgtttggtcagaactttctaaggtttgggagcaaatcgatcagatgaaggagcaaccctgggtttcagtacagcctcgaaaggtatatcatgaaatcggtgtttgtgtacgtctattttaacagttacagactttatttaggaacgtgacaagccaagtttgtgtatttgtattgtgagttcataagatgtcatttaatgtcctgcatgtcatttacattattcgtccaaaatactgtaaaacttattttgaaaccttttttttttttttttttgagacggagtttcgctcttgttgcccaggctggagtgcaatggcatgatctcggctcactgcaacctccgcctcccgggttcaagcgattctcctgcctcagcctccctagtagctgggattacaggcatgtgccaccacgcccggctaattttgtatttttagtagagacagggtttctccatattggtcaggctggtctcgaactcccgacctcaagtgatctgctcgcccggcctcccaaagtgctgggattacaggcatgagccaccgcgcctggcctgaaaccattttttaaagaaatatttcaccatttaaagaaatgttggcaagctaaatagcatcttatgtttctctcgacagcttcgacaaaatttggatgccctcctgaaccagctgaaaagcttccctgcccggttgcgacagtatgcgtcctatgagtttgttcagaggcttctgaaaggttacatgaaggtaggtggccagtatcgcacggtgatgagtgtccattagaaacgcacctgcacagatcactttgtttactttctccacagataaatatgctggtgattgaactgaaatccgaagcacttaaagaccgccattggaaacagctcatgaaaaggcttcacgttaattgggttgtttctgagctaacccttggccaaatctgggatgttgacttgcagaaaaatgaagcgattgtcaaggatgtactgcttgtggcacaaggggagatggctttggaagaatttttgaagcaggcgagtaataggactgaacggctgctttacgttgtgtttcgggctgttacatagatctgagctatgtaaaaatggagccttgtcatctgtggtccttttggttcttataatgctgggtcccttgtgcaggtagtgaatgcccacatattgataacatgcatctttctggtttgaattcagataagagaagtgtggaatacttatgaactagacttggttaattatcagaacaagtgccgcttgatccgtggctgggatgacctcttcaacaaggtcaaagaacacatcaacagcgtctcggccatgaagctctctccgtattacaaggtgctgttgctggggaagctttccctccccaccagtggtctcccacgctttcactgtaatgccttttcactgacagttactaggtacctgttttttattgtattttttgagacagggtctcactctgtctcccacgctggagtgcagtggcaccatcacagctcactgctgcagccttgacttcctgggctcaagtgatcttcccacctcagcctccaggtagctgggaccacaggcacatgccaccatgctgggctagctttttattttttgtagagacagcatctcactatattgcccaggctggtctcgaactcctgggcttaagcagtccttctgcactggcctcctaaagtgccgggattacaggcgtgagtcaccacagccagtcaatacttgtttttttgtttgtttgcttgcttttttgttttttttttttctttttttgagatggagtctcgctctgtcacccaggctggagtgcaatggcacgatctcggctcactgcaacctctgcctcccgggttgaagtgattctcccgcctcagcctcccaagtagctgggattacagctacctgccaccatgcctggctaatttttgtatttttggttgagacagggtttcaccatgtttgccaggctggtctcaaacttctgacttcaagtgatccacccgcctcggcctcccaaaatgctgggattacaggcgtgagccaccacacccgtctacttgttgtttaaaatgtgaatcagattacttcatgagatcctgatctgcgctttttcagtgagttttggcatatctgtgagtagaagggtcagcagtttacctctccctcctgtctgcccaccaggtttttgaagaggatgctctcagctgggaagataagctgaacaggatcatggctctctttgatgtgtggattgatgtgcagaggcggtgggtctacctggaaggtatcttcacaggcagtgcagatatcaagcacctgctgccagtggaaacccagcggtttcagaggtatggcctccagccagagagccaaatttgccagcggctagtgactactctacacaaaggctgacgcatgttttaatttcatttgtagcatcagcactgagtttttggctctaatgaaaaaagtgtccaagtctccccttgttatggatgttctgaacatccagggagtacagaggtctctggaaagattggcagacctgctaggaaagatccagaaagcattgggagaatatctggaaagagagcggtcatctttccccaggtaagatccttgctttgacttggcctggagtcaagttgaatttcagttgtgcatttttccagtgatcttctttcccttctgggcctgtgtttgttagttttgacatcaaggattttgttagccaataatacatataatgattaccattcccttccctgtcatgcagtgattactgattgtacctaccttggattttttaaattgtcctaccttggatttcttaaatccttaatttaactatcatctaccctccaaggcagcttgcattacatctcttcagtgtttatctctggcagttttcttttttttttttttgagatggagtcttgctctgtcgcccaggctggagcacgtggtgccatctcggctcactgcaacctcctcctcccaggttcaagtgattctctttcctcagcctcctgagtaactgggattacaggtgcccaccaccacacccggctaatttttatatttttagtagagatgggttttcgccatgttggtcagacttgtctagaacttctgaccttaggtgagccgctcacctaagtcacctaagtgctaggattacaggcatgagccactgcacccagcctctgacagttttctaagtggcatcttttcctttctgaatagtttgcttaggctgaattggacagattcttttaaa

SEQ ID NO: 78083 - DNA, 2524 bp, Homo sapiens
gtcaggagatcgagaccatcctggctaacatggtgaaaccccgtctctactaaaaatacaaaaaaaaattagccgggcgtggtggtgggcgcctgtagtcccagctacttaggaggctcaggcaggagaatggcgtgaacccgggaggcggagcttgcagtgagccgagatcgtgccactgcactccagcctgggcgacagagcaagactccgtctcaaaaataaataaataaataaataaataaagtaacttactaaggcaaatgacatgaaattctttgcattcattgaattcctcttcaagatcttgttaggtaagtgtgtatcttttgccaagggctagaagaaattctgatgtgatctgaatttgggctggagattgccaccaccagacacatgttctttcccttcctgcagtttgaaatcttaccttgattcaccttatatgtgtatataatatttttgcaacttgagtgttattttaattttaggttctattttgtgggtgatgaagatttgcttgaaatcattggaaacagcaagaatgtcgctaaattacagaaacacttcaagaagatgtttgctggagtttcgagcatcatcctgaacgaggataactctgttgttttgggtatttcatctcgggaaggagaggaggtaaatttatgttcgtaacttttaaaacttctctcacatttttgcatacctcatttcttaaaattgtatttatttcaggttatgtttaaaactcctgtgtcaattactgaacatcccaaaatcaatgagtggctcacattggtagaaaaggagatgagagtcaccctggccaaactgcttgctgagtctgttacggaagttgagatttttggtaaagcaacttcaattgacccaaatacctacatcacttggattgataaataccaggtaatctatagtagaagtgagtgggctcgtggtgaaaacgcagaccaatctttaaaatgatcctttgggatcttgtttctgtgtctttcaggcccagcttgtggttttgtcagcccagatagcctggtctgagaacgtggagaccgcactgagcagcatgggcggaggtggagatgccgcgcccttgcactctgtgctgagcaatgtggaggtcaccctcaatgtgttagcagactctgtcctcatggagcagcccccactccgaaggcggaagctagaacacttggttagtctcacacctgactccttccttaccagttagactcttacaccctcaaccacacagttaaatggaaatcatgcttgaaaaaggtttcaggtagtatcaaggagaacagtggatggtgtatggatatcctctgagggtgggcatttggctccctgtccctgttgaaaggtaatctcaggggcatgcaggggttacgcgacatcacggtagagaggaagggatcaaccttggtcaggatctcttgctctttcctgtcatctccccagagaggtggccacagcagtgctaagctgcacggcacgggcagtgcttgctgcgagccccatggcggcacgtggcagactcctaggatagacgtcagaaagctagtcttccatgatgttttagaatggttgcagaattttaaaatatttaaagccaggtgtttctgtttctttgtttttgctgcagctctgggttctgtgtaataccatctcatgagtaacatttctctcatctctgaaagtgaatttgccttttggaacatttactgaaagccattgtaactggacctagaacctcaatttcagtttaacagtccacaaacccggagaatgcactgtattgctttagtgtagatgaacttttaaagtgactctctttcttcagattacagagttggttcaccagagagatgttacaaggtccttgatcaaaagcaagattgacaacgccaaatcttttgaatggctcagccagatgcgattttactttgaccctaagcaaactgatgtgttacagcagttgtcaattcaaatggcaaatgccaaatttaactatggctttgagtacctgggtgttcaggacaaactggtccagacccccctcactgaccgctgctatttgacaatgacacaagccttggaggccaggctggggggttccccatttggtaagttcttccacagatctggacagatggaatcatatattaaaatgtttaaagataaagctaatgatttgaatgtacttctttttgagatggagtgtctgtcgcccaggctggagcacagtggtgcgatcttggctcactgcaagctccacctcccgggttcaagccattctcctgcctcagcctcctgagtagctgggattacaggcacacgccatcacaccaggctaatttttgtatttttcatagagacagggtttcaccatgttggccaggctggtctcgaactcctgacctggtgaccccctcaccttggcctcccaaagtgctgggattacaggcatgagtcaccacgcccggcctgaatgtacttcttaatt

SEQ ID NO: 78084 - DNA, 1119 bp, Homo sapiens
gacttgcccaaggccaagcagattgtcagagtcagggtttgagccccgtgaagccagcactgaggcaggtggtatggtagtctgctcaggccaccatatccaagcagcacaggctgtgtggcttaacaatagaaatgtatttcctcacagttctggaggctggggagtccaagatcaaggtgccagcggggttcagttcccagtgagggccctcttcctggcttgcacgtggctattttgtcgccacaaggcctttcctcgggatacatgcagggagagcgctctggttcctcctcctcttcttagaagggcaccagtcctgtggatcagcggccccaacccttatggcctcatttaaccttagttatgtccttacacgctctttcgctaaagacaaacccactagggttagggcatcaacatactgatttgtggcaagggagaggggagacaattgagggcacagcaggtggttttagcgcctttcttcctctcctttccaggcaatgggccggatctttgtgggcctttgccaggtgggtgcctggggctgctttgacgagttcaaccgcctggaggagcggatgctctcggctgtgtcccagcaggtgcagtgcatacaggaagcactgcgtgaacattccaaccccaactacgacaagagtaagacacctcttcttcaaaaattacttagagaatgtagagggaaattccctagtgaactaattttctacctcttggattagaaataagcaagaatttagctcacaggagctcactgttacaggcagtgtagtgagctgtggttaaagacggaaggtaagaaacccaggccaggcgtagtggctcacgtgtgtaatcccagcactttgggaggctgaggcggacagatcacttgaggtcaggagttcaagaccagtctggccaacgtggtgaaacccatctctactgaaaatataaaaattagcctgacatggtggtgcacgcctataatcccagctattcggaaggctgaggcagggagagtcccttgaacccaggaggcagaggttgtagtgaactgagatcatgccactgcactccagcctaggcaacagagcaaaactgttcccccaaaaa

SEQ ID NO: 78085 - DNA, 3589 bp, Homo sapiens
gtgatcagtattctcttaaggcgagaatacactttgttccaaagtggctcagaggtgcttggaggtttgggttttttttattttgatgatgctaggagcaggtaattcccatgatgtaagccagtcagtgtcgcggcatttattccttttttttttttttgcacaatttgttggactgcatctctatctcgagttctccatgacactcaggtgtggtgttgcccaaataaaatagtggtctctgcctctggtggcttgacctgggacacgtgcacatgaggtacatgggaatgggtccacctgggctgggagaatgtggctggtggtccccgaagaaaggccaaagagcagcccccgaggaagcgtctacttcagctccctgggagaacgagagctttgtctgttgttttagagacattttagaatgcattttgttttttttttttaacatttctagtcttaacgctatcatctcattctcagcctctgcccccattacttgtgagctgctgaacaaacaagtcaaggtgagcccggacatggccatcttcatcaccatgaaccctggctacgcgggccggtctaaccttcctgacaacttgaagaagctgttccggagcttggccatgaccaagcccgaccggcagttaatcgcccaggtcatgctgtactcacagggtttccgcactgctgaagtgcttgccaacaaaatcgtcccgttttttaagtaagtagcctagaattcttcataatcatgtttcttgcatatgttaaatgtgtccatttaaccttaaaatttttatatgtaatgatggtacgtctttcaaaatatccatctctggtttcttgacacttgaccctattattgcttaaagtatactgttattaaagatagcctttttttcttcttttctagactatgcgatgagcagctctcttcccaaagccattatgacttcggtcttcgggctttgaagagtgtgctggtgagtgcaggcaatgtgaagagagagagaatccagaagataaagagggagaaagaggaacgaggggaagcagttgatgaaggagaaattgctgaaaatctccctgaacaagaggttcgttacaaacgttttgatcactcaaaccttatacgttatttaaatttacctttttaacatttaagccatgacttgtgagttcttcttgcagttcacatgtcttgggatggctgaaatagactgtaatgttgacccagtgagtcgagtgcacgaatgtgggcgagtggtgctcgcaccctttgttcaccaacagttactgatcacgcacctcctggggatgcagcgggcagtacttgagccatgctgcgctgctcacagcccagccctctccccgtagattctgatacagagcgtctgtgagacgatggtgccaaagctggtggcagaggacatcccgctgctcttcagcctcctgtcggacgtgttccctggagtccagtatcacaggggtgagatgactgcccttcgagaggagctgaagaaagtgtgtcaggagatgtatttgacatatggagatggagaagaagttggtggaatgtgggttgaaaaggtaacttggattgtttcactggccactgccctcacagaccctgctggctttagtgtctggtaatgacaaccgtgggcccttcgatgaaactgtccacaaaggctgtggaggtgcataatatgctttatgaagatttgcccaaggcctatttgaatttttgttgttgttgtttaaatgaagaggaaacaatacttaacctgaaaattttacatgatacagttcaatttctgaaaatgctaagtgcatgactatattggaaagttgtttatactgataaaaattctgcttaccagactttccagtgccagagatgaacaacctgaatcgctgatcaatacgtagtttacattctgtattggcttctttccttcctctatgtgattcatttaagaaaaagtttattgtttacacaagctgtgtgtgtttggcctgagagatgctgtacgggattgaacacatagctcatccattgggtctcttgttgtcctcggcgggatctgatgtgtccttgttgaggctgctcattggtgtctcctgtcccactggctccagccttcctgacttactaaagaactcgccacagtttggaaatgtttgttttacatgtgacctgtgtaacatctctccagctggggagtttcagtacttgcctttaataatccatagataggcgcttgtaaagccagctacttgggagagtgaggaaggagaatcacttgaacctgggaggtggagcttgcggtgagctgagatcgtgccactgcattccagtctgggtgacagagagagactccgtttcaggaaaaaaaaaaaaatccacacataatgtttcttgctcactttcacaagaggtggctgggcgaggagctgtccccattcctcctctgggatggtcactgtgctggtctgttgggccctgcaggttctccagctctatcagatcacccagatcaatcatggcctgatgatggtggggccctcgggaagtgggaagagcatggcctggcgtgtcctgctgaaggcattggagagactcgagggtgtggaaggtgtggcccatatcatcgaccccaaggccatcagcaaagaccacctctacggaaccctggaccccaacaccagggaatggacagatgggctcttcacacacgtgctgagaaagtacgtcttctttgatctgtgtttgtgttctcctggatatgggcgctaagtactttgctctcacaagagcagagtatacgttatttttcaaccaaagtctgagcaaattaaaggtcatttcagaaaccatcatcggtaaacatgcctaatgttaaaatcttgatttaatcagcagctattttaaaatccttcccaaccaggatcatcgacagcgtgagaggcgagctgcagaagcgccagtggatcgtcttcgatggcgatgtggatccagagtgggttgagaacttgaactcagtgctggatgacaataagctcctaactttgcccaatggagagcgcctcagtcttccacccaatgtaagtagccttttgtatgtcgtcaactgaataattccttttggccaactaaacttcgtgtgctagctaagtgcagctctggagtcatggacccagattccatggagtagtgatcattgtgtaagtaattttcaaagatagcatctcaactgctagattttttttccatttccatggctagtgagaaacattttaataggttttattgatggctttctatcatttattgagtaataagcacactctatgattatcagttaaccctgtatggtggggttgtcgttaaggtttcttaagctgttatacatctagagagctgggaaaatgagaaatttggaatggggctttctaggctgtcccttggaaaatgagtgcatgatgcaggtgcctgacaacacctactgatcagtaaacacagtcaggcccggtatggatttgcactgagtcagaccctgttctagatgctgaaaatacagca

SEQ ID NO: 78086 - DNA, 3027 bp, Homo sapiens
ttaaacaaggtggtttgccctattcttctccctgccacacacacttgtcctgcccagattcctgtagagagaatggtgaatactgtagtgatgtgagctgtaggtgttttttgttttttttacataagtgcagaaaaaatttttttgagacaggttttcactgtaacccaggctagagtgcagtggcatgatctcagctcactgcagcctccacctcccaggctcaagtgattcttctccctcagcctcccaagtagctgcaattacaggcacacgccaccatgcctggctactttctgtataggaaaattaagtttaaagtcaccctttcagtgtatatataggtaaaagaatcttaatgtccaggtttcttccaaacctatgtcattaaatctgcttaatgttttctttcaaggtgagaataatgtttgaggtacaggacttgaaatacgcgaccttggccacagtgtcgcgctgcggcatggtctggttcagtgaggatgtgctgagcaccgacatgatcttcaacaacttcctggccaggctgcgcagcatcccgctggatgaaggggaggatgaggcacagcggcggcgtaagggcaaagaggatgagggggaggaggccgcttcccccatgctgcaggtacgcccaggtgggaccccacatatcatgacctgagggtgctaggatattcagatgtggtctcgctgtgttgcccacgctggtcttgaactcctgggcccaagcaatccacctgccttggcctctcaaagtgctgggattacaggcatgagtcactgtacccagccaacttttgtgtaatcaatgttgtcttctgccagcttaaacaaggaagcccagctgtagcagctacaaatgttaaaagtcacgtatgggaaaatttaaagaattcttttcattatcttacttttctctacaaattgatgaaagactgcccttttccatgttcagtgggaaaaccaaagttcctgggaagcagggtttttgagaaccaccagggtgaaggaatgaggactggtcattgaagcttcatccaaaatgagttttccaaggtcgtatgaccttctcctgggaccaggttagaatcgatgaaactcgcctgccttttgaaagatagttaagtatcactccttccactttctagatccaaagagatgcagctacgatcatgcaaccgtacttcacgtccaacggcctggtcaccaaggcgctagagcacgccttccagctggagcacatcatggacctaacacgcctgcgctgcctgggctcgctcttctccatgctgcaccaggcctgccgcaacgtggcgcagtataacgccaaccatcccgacttccccatgcagatcgagcagctggagcgctacattcaggtcagggggcatcaggggcttcacagagctcaccactgcgccagaccacaggtctgaggacctctgaaatgctgcacctgtggggatgtgcgctctctcctaggcgaggcagagccttcgttgaggggctaggaaaggtgcagtgggtgtctgtgatgcaagaagactgggaaccactgtctttaggttaactttgctgtaagtgtctttcttttgttgttgaaattttataaaaatcaaagtttaattccctttttaatagcgatatctggtttatgccatactctggtccctgtctggagacagccggctaaaaatgagagcagagctgggtgaatacatcagaagaatcacgaccgtgcctctgcccactgcgcccaacatacccattatcgattatgaggtgagcatgcagctaccacccgtgtttctgattctcgccttgttgatttaactcatcctggaacaagctgaccatggaccttggcttcgtcttttcattttattccatttcatagaaggactttatccttttagttccatgtgttagcaaagagtgcagattaacctgaccaattacttccttgttctgaaagttcaagtttgtgttcaggtaaacaaacctcgtgaggaggcaccttggttgcagccggactcacacttccatctccgtgtgtaggtgtccatcagcggagaatggtctccgtggcaggccaaggtgcctcagattgaagtggagacgcacaaggtggcagcccctgatgtcgtcgtgccaacgctggacacagtccgccacgaagccctcttgtacacttggctggccgaacacaagcccctggtcttgtgtggccctcctgggtctggcaagaccatgacactcttcagcgccctccgggccttgcctgacatggaggtaaagaggccaggaggtgggcagcagaccttttggtgctgagcatggggttggtcttacagtgtggttttgtgtcttccctccaaaggtggtgggtctcaacttctccagtgctactactccagagctgcttctgaagacttttgatcactactgcgagtacaggcgcacacctaatggggtggttttggctcctgttcaacttggaaagtggctggtgttgttctgtgatgaaatcaacttgccagatatggataaatatgggacccagagggtcatatccttcatcagacaggtttgtttctatccacaaggcccttcctgccccacaatgtttcttgttcaagttttgctcttaatgtggtacctgtcccttccttcagatggtggagcacggaggcttttaccgtacctcagatcaaacatgggtgaagctggagagaatccagtttgttggggcttgtaatccccccacagaccctggaagaaagcccctctcacacaggtaaaacagctcggtagactgctctgcttcacacacgcacagctccaggattgctgtaaacacagcgccacaaaaacctggttttgataataaagacaacaatactgcttattgtggattcctcttgggttacttctctgtgctgtaatgccaggaaaacatgttaaaaataaaagcattggccgggcgcagtggcttacgcctataatccc

SEQ ID NO: 78087 - DNA, 1021 bp, Homo sapiens
accactgcactccagcctgggcaacagagcaagactccatctcaaaataaataaataaataaaataaaatgaaataaaagcattgatctcttggtagtgatgaactgctccagactcatctgtagagccaagatgagcctgaaataagccttggttattttttcatctttgctggtttttcaagtgttttccatcgactgttgtgtgtcagaccccaagcctgagcagcgtgtgtgtgatctcagctaacactgatgtcaagtctgcatagctgggttaggaagcgacctccagacagggccctggacagggcgactccactggcacactgccccttcctgggaggcgctgtcagggaggggcgctgagcggggctatctgtgcacaggttcctgcgccacgtgcctgtcgtgtatgtggattacccgggccccgcctccctcacacagatctacggcaccttcaaccgcgccatgctgaggctcattccatccctgcggacgtatgcagagccgctcactgctgccatggtggagttctacaccatgtctcaggtacgcagagtttctttgctcttccagaaattgttttcctctcataattaaggcactcgattggtcaggtgtggtggttcacacctgtaatcccagcattttgggaggccaaggtgggtggatcctttgagcccaggagtttgagaccagtctggacaacatggcaaaaccctgtctctacaaaaaataggtgggcgtggtggtgcatgcttgtaatgtcagcttcccaggaggctgaggtgggagagttgcttgaacctggaggcagagcttacgatgagccatgattgtgccactgcaccagcctgggtgacagagtgagactctacctcaaaataaaatgagaagtttattgaaataaagattggactttattcagagatgttattgagccgagagactttctccaaggtctgtcatcaaagtcacttttctatgcaggtgctaagactgctgacatttccatg

SEQ ID NO: 78088 - DNA, 1239 bp, Homo sapiens
gggatgagtgggagccgccaactgccctgctgtgtctccctcgctcttcatgctttgggacagctttcttgtcataggtggcagatgctttttcccagtatttaatttgcttttaagtattttcagaaggattttttgtagtttcattgtttaaatatttaaatcgttaaatataatgtatttcagcataaagtgagcagcttgaatctaactttgttctggacagttatttatccaattgttccaacattgtttactcatttggagacggagtctcactctgtcgccaaggctggaatgcagtggcgcagtctcggctcactgcaacctccgcctcctgggttcaagcgattcttctgcctcagcctccctagtagctgggactacaggcacccaccaccatgtccagctatcttcttaaatatttcagggtctaggttctttaatgtaaacatgttttgccacattttaccttttgaccacttctctgtgtcttaagatatttacgtgtaccttccatttttctcattgccataggagagattcacccaggatacacaacctcactatatctattcaccccgtgaaatgactaggtgggtgagaggcatctttgaagcgctgagacctctggagaccctgcctgttgaaggcctcattcggatttgggcacatgaagctctgcgtctcttccaagataggtaagggaagccgaggatccagttggtcccattctcccctgctctgagttcttacagctgtcgaagctggggtctttgcaggggtggtctgcctaagttagagccaggtggtgccagtggtggaaggagcagagtcagccagggcagcctcccgtctggacactggtcacagttgccccagggtaacaaagtcacagtgcgctgaatgcaccggctggcccaccactgtctgcttacacaaggcactttcataaaccttgtggctgtgaacagggtacttttttttttaaagatacatcatagaagtcaaaaaacggggcactttaataaaccttttaaactgtcaggtgggaccacaaaaggtagcagctgcctgtgataaccttaccagagcacgggttcactgctgagttaaaaggtctcccaacaactgcccagtgtgcgtgttccgtaaccaccacccctcttcctgtttctcagtctgtgttctcatcaaaggctttgcagctgcagctctggggcactggttttctctttt

SEQ ID NO: 78089 - DNA, 1053 bp, Homo sapiens
cactttgggaggccgaggcgggcggatcacgaggtcaggagatcgagaccatcctggctaacacgatgaaaccccatctctactaaaaatacaattaaaaaaaaaaaattagccagccttggtggcgggcgcctgtagtcccagctactcaggaggctgaggcaggagaatggtatgaacccgggaggcggagcttgcagtgagccaagatagtgccagtgcactccagccttggcgacagagagagactccgtctcaaaaaaaaaaaaaaaagtgagactctgtaagtaagtaagtaaataaataaataaataaaatttcaggttgcctaagctgtcatgagttcagcttttaggttcatccatgcatagtaaaggaagatgtgtgataaagactgactgcatcctttggaagagcccacagcacccacaaacatggtgaacatggtgcttcttcaccgtgccctctagttacctaaatgcacatgctgctctccccacagactcgtagaggatgaggagaggcgttggactgatgagaacatcgacacggttgctctgaagcacttccctaacatcgacagagagaaggcaatgagccgacccatcttgtacagcaactggctgtcaaaggtagcaaactcgcatcatttcagacatacttctttttctgccatccctttctaacactaacgaattctaacgaattatcttctactcaaaaatatctttaggctgggtatggtgtctcacacctgtaatcccagcactttgggaggctgaggcaggaggatcacttgatcccaggagtttgagaccagcctgggcaacatagtaagactccacctctacaaaaaaatttgaaaatttagccaggcaaggtaactcacgcctatggtcccagcaacttgggaggcttgagcccaggaagtcacagtgagctgtggtcacaccaccatactgcagcctgggtaaaagagcaaaaccctgtttcaaaaaatacttcagaaaacaaaatatcagccgggcgcggtggctcatgcctgtaatccca

SEQ ID NO: 78090 - DNA, 1051 bp, Homo sapiens
gctgaaactccatctctactaaaaagacaaaaattagccaggcatggtggcatgtgcctgtaatcccagctactcaggagtctgagaatcgcttgaacccgggagacagaggttgcagtgagccaaggtcacgccactgcactccagcctgggcaacagagtgagattccgtctcaaaaaaagaataaaaacttaaaaagagtccagcttgggtaacaaagtgagaccttacctcaaaaaaacacttaaaaaacaagaaaaatctctttgtcctaaaatgcactataaaataggctgcggttacagcagtgatgtgctacgggtttgcagtcactgatactttagggcaggaattcccaggagtatggctggctggctgctgttggggttctgacttctgtgtgagggtcgagccattggatttccagccggtggaaggtgttgcttcagcgggtttgcagtgaaagaaatctttgcttcacaaatttgttttcacattcctcacactgaaaataggacaattgtgaataacttgtgtgaaaatgtttcatatgctaaaatgctagatggagttcacctctccagaatagctgtgagttgtcctttttctctgcaaaggatgaggacgtttaccgagttacagtcttgacatgcatttcattgaggagccccaggtgatagacgtgagtaagagcttcctttaggcagctcccactccagtggaggaaagagcaggacagagggagataactcaggctgggaagagatttctgggagaatgacccttgcactggtcttcgtgtgtttaggtcttctgaatggctttcagtgaagttcagctttctccagaaaggttcaccacgtcagggagggcatacaaggcagagcgcctgataggagctgggagtagtaaggtgggtgtgttcaatattggtagaattttctatatattttaagactctaggtacccattctttttcatttacaggaaacttctccctgtggcttatcttttttttttaactctttttttttttttttttttggagat

SEQ ID NO: 78091 - DNA, 2433 bp, Homo sapiens
aaaaaaaaaaaatagggcaggccctcacacctggttcttttctggagggatctttcctgttccaaatgaaatacagaaatggcttgtcaggttgcaccaggacaataagcacctcccaccactgagattttgactgggattacattgaacttatggatgagtttgatggaactggcatttttatagtagagtgtttttttcctccatgatcatggtatgtctcttcatgtattgaggtcctcttcattgccttttggtgaagttcagttttctctataaaagtttttcatgtttttagatccattcctagtgaatttatatttttttgctatgttataaatgataccttttttgttgcatttttaacagtttcttcatggtatgtggacatacagttgactttggtctaataactaacatttttttctaagtaatttgggtattacctttttttctataggattacatcccagtagaccaagaagagttaagagattatgtcaaagctaggctgaaggtcttttatgaagaagaacttgatgttccgctggtgctgtttaatgaagtcctagaccacgtgctgaggattgacaggtgggcttttttgttgttacagccccacctctcgcctaagctgctcttgagtaagtgtgtgtgccgggtcacaccaggcctcatgctgtcctaccacctccacctcagccttctccaccaagcagcttcccccttctcttctttctaagtccagcttaaccatcctcagtttatcctaagcagaacttcattcttcctcccccagcactgcatacctgccataattatggccctttgaccttctgctggaattgcattagtctctcatgtcagtctagaggacaggaccgtgtcttactggtctttgcattcctcctggacttcacaaataacagttgctcagcaaatgtttaatatacaagttcaagttaaaacatgtccaaaatactgtagacactagatatgagtcaaaaggggaatgaggcattataagccttaacattgatcagttctcgtaatgtttcagaatattccgtcaacctcaaggccacttgcttctgattggtgttagtggagcaggaaaaactaccctgtctcgtttcgtcgcctggatgaacggtttgagtgtgtaccagattaaggtgcgtctggtcggtggcctcttaatcccagcaacagatgtgtgtgcagagctcagtgagtaggaatggacctaacttgcctctgcttctgtaggtccataggaagtacacaggggaagactttgatgaagatctacggacagtgttgagacgttctggctgtaaaaatgaaaagatagcatttataatggatgaatctaatgtgttagattctggattcctggagcgaatgaatacccttctggccaatggagaggtaattaggtgacgtgttgcgttgcattacgtgttaccgggggaccagtaagtcagcactgtgctgtttcccaggtgcctggtctctttgaaggagacgagtatgccaccttgatgacgcagtgcaaagagggggcacagaaggaaggcctgatgctggactcgcacgaggagctctacaagtggttcactagccaggttatccgcaacctccacgtcgtgttcaccatgaacccgtcctcggagggactcaaggaccgggcagctacatcaccagcacttttcaacaggtacgtgggcctttacttggctctgggtcaggaaagtcggtgtccttccaagggacaaagcctgcccctcatagctgtcctgaaacatgggcctctttctcaggtgtgtgttgaattggtttggagactggtccaccgaagcactgtatcaggttggcaaagaattcacaagtaagatggatctggagaagccaaattacatcgtgcctgattacatgccagttgtgtatgataagctgccgcagccaccatcccatcgggaagccattgtgaacagctgtgtgtttgttcatcagactcttcaccaggtgggttcagttttgagatcaacagataaaccacaaaactaaccatcatgctaatataaaactaaattgctataaaaatagaccttaaggccaggtgcagtgactcatgcctgtaatcccagcactttgggaggccaaggcgggaggatcacttgaacccaggagttcaagaccagcctgggcaacatggcgagaccccatctctacaaaaaatacaaagaaaattagccgggcatggtggtgggcacctatagtcccagctactcaggaagctgaggtgggaggatcacttaagcccaggaggcagaggttatattgagctgagatcacggcactgcaatccagcctgggcaacagagcaagacccagactcaaaacaacataaatagaccttagggcacttca

SEQ ID NO: 78092 - DNA, 1852 bp, Homo sapiens
aatgcaaggcttggcctgctaaccatgttttgctaatccttgctgtagattctgtgtgatagaagaattcagtctactcctccctcccagaagagctttgtgaaatccactctgagcttgtaggtgtcctgctgcccagcccctgcaggccatctccattgcccttggaatgtcgtccagccctggcttcccctggtagtctgatcatcttgctgtgcttcagaaatcaagggaccagagcagtttctcacatcaggcctgccttgcccctttcttgtcatttcttactaataaaaggtggaagcaggctagctaacctttctatagtaactgacatttgtgatgccttttcacataagtacacctctaaagttggtgtaatcaccatcctcagtttagagaagttaaagggcttagagaggtttggaagtgtaaggggtatctcgaaagctctaagtggctaagctgaggcccgactcgagtgttctggccccgagggccaggctccttctatcatgtcacacccatctgccaaggccaaaattgttttctgaggttaagtcacagagtttcctgaagagtgagaagatgtaactattttctgaaaggcgaatgctcggctagcaaagcgaggcggcagaacgatggccatcacccctcgccactacctggacttcatcaatcactatgccaacctgttccacgagaagcggagcgagctggaggagcagcagatgcacttgaacgtggggctcaggaagatcaaagagacagtcgaccaggtgcgtcacaggcacaaattcctcacgggagtgagctgcagtgaggacccctttccatataatttctgcatgtttctcgtctctgagtgtgggctttgctctttaggtagaagaactgcgtcgtgacttgaggataaagagccaagagctggaggtgaagaatgcagcagccaatgacaagctgaaaaagatggtgaaagaccagcaggaggctgaaaagaagaaggtatggtgtcagggaattctggcctgtaaggactgagcattttcagtctccaatgagagagtaggaaatgtagttccaaatgggtcttagggttagagagagggagggagggagagagagtgtgtgtgtgtgtgtgtgttggcagagtgaagaatgttgtttagaatttagtcagcaaattaaccaatgcttaacccatacctaagccatccctcctttctaggttatgagccaagaaatccaggaacagctgcataagcagcaggaggtaattgcagacaaacagatgagtgtcaaagaagatcttgataaggtggaacctgccgtcattgaggcccagaatggtatgtaaagactgtcagagctttgatgtctaggaagggtggtctccgtcaacattactgtggagttcaggtcactgaacattgcacatatgcttccctcaaaggttctggtttccaaaaatatcattagtaaccatctgaagctttttctgaatgcttgagattgtcttcatctctcaaagcaaagttcctacaaagctagattgtatttaccatagtgaaacccctctcataaaagaaacttcacaatataagctttgtgtcaatatacgtttttagagatctgttgataattacgtaagtatgctatttatcaatccctgacttgaatttcacccagaaatataaaatattcagtgtaactgtcttgtaattgtttctgagtgttctagctatgacccaattgctaatttaagtattgatagcagtcacttctctttttccattccttacatgcctataagatgctatagaaatagggcaacaacctgccatcctgt

SEQ ID NO: 78093 - DNA, 2710 bp, Homo sapiens
ctgcactccagcctaggcgacagagctagactcagtctcaaataaatagtaaatatattcttaatctttatggggataaagaaattaggacttgtgagacattttaaaggtaatatcctgctttttaaggaatgctagcattttgtaagatcttcataatcatttaagagatcagctacttaccctattccagagggtttaatacagaaaagtctctcatttcttagctcttctaagcagctagctgtcctttctctcattggagttggagctcctggctgttttggttcattctcaccatgctttgctctatcttctcccacccatcgaccctcatccactcctgctgccactcagctgtgaagtcgatcaagaagcagcacctggtggaggtgaggtccatggccaaccctcctgctgctgtgaagctggcgctggagtccatctgcctgctgctgggggaaagcaccacagactggaagcagatccgctccatcatcatgcgggagaacttcatccccaccatcgtcaacttctctgcagaggagatcaggtgagaaagtggaagtgccaaggtattgccagaaattgaaatcagttgttcaggccaggcacggtggctcacgcctccaatcccagaactttcggctgttcaggccaggcacagtggctcacggctccaatcccagaactttgggaggctgaggcaggtgaagtgcttgagcctaggagttagagaccaacctgggctacatggcgacaccctgtctctacaaaaaaatacaaaaatgagctgggcggggtggcatgcgcctgtagtcctagctacttgggaggctgaggtgggaggattgcctgaacccaggggatcaaggcttcagtgaaccgagatcacaccaccgcactccagcctgggtgacagagaaaaaccctgtctcattaaaaaagaagaaagaaaaaaattgttcaagtgttgagcacattttcagctttcacctgagaaccaagggtcagtctagctcatccccagtggtcagtcactggggcaatgagatgggagctggctctggtctcttccattttaattttatgaaaactcttccttgcttttgtcctgcatgtgtttagaaatatcattcgtcttttacagtgacgccataagggagaagatgaagaaaaattacatgtccaatccaagttacaattatgaaattgtgaatcgggcttccctggcttgcggccctatggtgaaatgggcaattgcacaggtgattaacacagccaggagctcccgtgtgaaaggtgacctcttttcctgtcacttaaataacagttatcaattggttcttcccagcttaactatgcagacatgttaaagagagtggagcccctacgcaatgagctgcagaagctggaagatgacgccaaggacaaccagcagaaggccaacgaggtggagcagatgatccgagacctggaagccagcatcgcccgctacaaggaggaatacgccgtcctgatctcagaggcccaggccatcaaggcagacctggcagctgtcgaggcaaaagtaagattatcatcattgatcctcagcctttcctgctgtggaagcagagattaacacacttcaacatgcgctgcatgcaccatgctggcctcggtgaattcgctctttaacatctgtaaggccccggaggacttttttcctggaaaataatacacactgagtagtcactaagtgttgttaattaggatagattgatacaaactggacacttttcagccgttgaatcccccaccagcagctccagacctgtttgctctgctgcctgagggcctcgctccgtacccagcttctgccccgctgagattctgagtcgtgtgtggtcattagttatatatgatctgggtctcatctcctctgggactgtgaacaacttgggcacgtttctaacccacccaaaaccctgcacataatgtggatgaaccgatttgcaggattcggtataaatcctgaaaggcctcatccctgagcatcttgttcggttttccttttaggtaaaccggagcactgctcttctgaagagcttgtctgctgaacgtgaacgatgggaaaaaacaagtgaaactttcaaaaaccagatgtccaccattgctggggactgtctcttgtcagctgcgttcattgcctacgcgggttactttgaccagcagatgcgtcagaacttgttcactacctggtcccatcacctacagcaagccaacatccaggtgagaatcacggggagttcaaaaaggatgtgcgagcagtgtgaggcaagctggtgtttagtgcacagttagagtcttgagaacagtcccatctgtggctgtgaagaggaggaaaggtaacggccttgcctttcagttccgtacagatattgccaggacggaatacctttccaatgctgatgagcgtcttcgctggcaggccagctccttgcctgctgatgacctttgcacagaaaatgccatcatgctgaaacgattcaataggtatgagctcgggtgccaaggagaggcatgggaggaatgtgggtggtgatcttgaatttttttcaaaatacacccttgtttgaagagaggaatagaaaatggggcgtgggcatacagtgctggcagcttggtgctcctctgatggtggggcgtgtgctgttctcgttattgt

SEQ ID NO: 78094 - DNA, 1167 bp, Homo sapiens
attagcttatttgtgtcctttcctcatttgtagaatggttcgataacagtgtcagcctcatagggctgttatgaggattacgtgacgtagtgtctgtaatttgacacggtccttggcaattaaaattctgtataatgttaatcccttgctgctgcgacatcattgatgttgatacgtgctgtctagaaggatcgtaaacatgaaaaagctattctaacagtgcaggatgctgagaggatgattgtcccagaaggaaaaagatttttaactatggccctcttggtgtatgactcaagctacctcctcatgccaatagttgttcaaaaggatgaggtgatgttagcattaagcatgtaagctttattggtaaacctgaaaacgtctccggaaaccactctcgggtggtggtaacagcctatcaatcagggtctctcatcagggactcggctaaccgtgatcctgtgctttccccattcggtgtttcaaccttctcttctgtggcctcatcctcaggtatccgctgatcattgacccctctggacaggccacagaattcattatgaatgaatataaggatcgtaagatcacacggaccagcttcctggatgacgccttcagaaagaacttagagagtgcactgagattcggtaacccccttctggtccaggttggtgttggcctttgaattcttgaaacactgcattcaagagtgaattcctttttgggggctgcctttagttttcaactttgtaagacttcattttgtatcagaaggataaagctttgcggtggttctgtaatagataaattcaacagaatcattatttgcatttaaaattctattcagtggtcgggcgaggtggctcacacctgtaatctcagcactttgggaggccgaggcgggtggatcatctaaggtcaggaattcaagaaaagcctggctaaaccccatctctacaaaaaatacaaaaattagctggttgaggtggctggcacctgtagtcccagctactcgggaggctgaggcaggagaatcacttgaacccgggaggcggaggttgcagtgagccgagatcatgccactgcactccagcctgggagacagaaagagactgtatcttaaaaaaaaaaaaaattatattcagtacagccataaaaagcaagaaa

SEQ ID NO: 78095 - DNA, 2894 bp, Homo sapiens
tggctagtgtgactaggaactgagttttaattttttattttatgtttttttgagacagagtgttgctctgtcccccagtctgaacctcccaggttcaagcaattctgtctcagcctcccaggtagctgggactacaggcatgtgccatacacccccagctaactttcgtatttttagtagagatggagtttcaccatgttggccagtctggtctcgaactcctgacctcaagtgatctgcctgcctcagcctcccaaagtgctggaattacaggcgtgagccaccgcatctggctgagtttttaattttagttcatttaaatgtaagtagccacacatagctagtggccaccacacgcaagtggcgggtggcttttgggaaggtatgcttatccagagtaggacagcaacatagcatttgggtgaagataaagttacaaagccctgaccatcaagttccacccgtgtggaatgcaggatgtggaaagctacgatccagttttgaacccggtgctgaaccgtgaagtgcggcgaacaggggggagagtgctgatcactctcggggaccaggacatagacctgtcgccatcgtttgtcatcttcctgtccacccgggatccaactgtaaggaatgggacccttccccagggaaatctggcaggatgtggttttgaaactggattaagacagactgttctgttacctattttggcaggtcgagttcccaccagatctctgttcccgggttacttttgtaaacttcacagttacccgtagcagtttacaaagccagtgtctaaatgaagtacttaaagcagaaagacctgatgtggacgagaaacgatctgatcttcttaaacttcaaggtaggatctggacctgtggcttttagatggttggtgcaggggaaggggctgaacttttaagtgactaggatgttccacgtttgtggcaaacacttctgagagcataccttttgaaggattattgcaaactctggatgttttattcatttaaggggaatttcagctccgtttgcgtcagctggaaaaatctctactacaagctctgaacgaggtgaaagggcgcattttggatgacgacacgatcataaccactctggagaacctgaagagagaggctgcagaggtcaccaggaaagttgaggagacggacattgtcatgcaggaggtggagaccgtgtcccagcagtacctcccgctctccaccgcctgcagcagcatctacttcaccatggagtccctcaagcaggtgggtgccttggccatgcagagactggcgggccccgcacagtagctccttggccgcacagaggctggcgggccctgcacagtagctccttggccacgcagaagttcagcggggtgccgagggagctgcctcaccgctgcccactgcttcctttcagatacacttcttgtaccagtactccctccagtttttcctggacatttatcacaacgtcctatacgagaacccgaacctgaagggtgtcaccgaccacacacagcgcctgtccattataacaaaggacctcttccaggtagagtgaggtcctcagccgctccctggcgggggggaagcagggtgctgcttctcttatggaacaacatcgtctcctgctcttgtcccaggtggcgtttaaccgagtggctcgaggcatgctgcatcaggaccacattacctttgccatgctgctggcaagaatcaaactgaagggcaccgtggggtaagagcactcacgcccacaggaggatgccatattgctggtggcccccaagggtttcatgatcagatacatgcttttattatttcttttattttctcttttattttctttattttattttttgagacggagtctccctttgttgcctaggctggagtgccgtggtgtaatctcacctcactgcaacctccacctcccaggttcaagcaattctcctgcttcagtctccgaagtagctaggactataggcgcaggccaccacatctggctaattttttttgtatttttagtagagacgggttttcttcatgttggcagcccagcctggtctcaaactcctgacctcaagtgatccgcccacctcggcctcccagagtgctgagattataggcctgagccactgtgcccggcctgttttctcttttcttaaatcacagctgttatcttagtgacagtgggagtgaacgtgagagaccctagctaacctgttgcacccttcgcagggagcccacctacgatgcagaattccagcacttcttgagaggaaatgagattgtcctgagtgctggctccacccccaggatccagggcctgactgtggagcaggcggaggcggtggtgaggctgagctgccttcccgcgtttaaggacttgattgcaaaggttcaggcagacgaggtgattgttctcttgaatgttcccagtaggtaaatgttggccttttcccaggaaatgtaaggaattgcatgtggtataaaacccagaatgttgtgtctgcgctctcgcgtcagactctcgctcagtcgtgggttctgccccagaggccagccctgctccatgggtgcttccactattgtctccacagcaatttggcatctggctggacagcagctccccggagcagactgtgccctacctctggagtgaagaaacacctgcaagtaagccccactgtggttttctttctggacctgaatgtaaagttgggttttgctgcttaaagggatgctttcaaaaaacacaaagttactagcctgggcaacatagtaaggccccatctctacaaaaaataaaaccttagccaggcgtggcggtgcacacctgtagtcccatctactcgggaggctaaagcaggaaggtcactt

SEQ ID NO: 78096 - DNA, 1057 bp, Homo sapiens
gcacccacccctctgtacctgtttcagcacccattggccaggccatccaccgcctgctcctgatccaggctttccggcccgatcgcctgttggccatggcccacatgtttgtttcaacaaaccttggggagtctttcatgtccatcatggagcagccgctcgacctgacccacattgtgggcacagaggtaatgtcctggtacagcccgggcttcccacgagactccatgcccacctccccagccacaggtggcagcagccctggcatctgctctcactccgggctacagtctcctcctaagaccaggaactcgctgcagattctcaactcctggctgcatggtgcccacacctctgggcccagaaagaacatcttctcaggcccctcactcggggctctcctttcccttgacaggtacacactatttgctggcactgtaataacttctgccttctttgtttgcaggtgaagcccaacactcctgtcttaatgtgctctgtgcctggttatgatgccagtggacatgtcgaggaccttgcagccgagcagaacacgcagatcacttcaattgcaatcggtaaggatgcttgaggggcttcatgggctggagccctgcaggatttgtggtgggcattgatgtccgaggctgccgctgctaacactaagtttccctgcaccaggctctgcagaaggctttaaccaagcagataaggcaataaacaccgctgtaaagtcgggcaggtaggcctgttctctttggctgaagaaagccttagtccccaggcattcaggcaggcagcctggcatgctgtgtgactctcactttgtgtgtgcaggtgggtgatgctgaagaatgtgcatctggccccagggtggctgatgcagctggagaagaagttgcattccctgcagccgcatgcctgcttccgactcttcctcaccatggagatcaaccccaaggtgggtggttgaaggagtggagacgttgcaggctggcctggcactgtgctgtcggcacgtgtgtggtggaattgaacaggcgccctcatccacacc

SEQ ID NO: 78097 - DNA, 1799 bp, Homo sapiens
tgaggtcccagaggagcagagatgcccacggagaagctgggactcagagttgtgtccccaggtggcaggcaatctcctctcccccagcacaggcccccaagaccaaacagagccctcccaggcgccaagtgaagaccgaaactcttgggcgagaggagggggattgtggcaggggtttcgttctgtcaattctgttctattttgtgccacattcacgttttctgacattcttagaaactctgtcttctctagatttcttactggctgaataaattctgatggtctcattggatgacacgtctattaatagaaaagttggcatacttttctcctagcagcagtactcatgtgaatctgctgccatcgtcaggatgtggagagctctttgtaaagctttgactgacctggcatctgcactgttcttggcgaagtgctgttttctaatgactctgtgcttggtcactttcctcaccagtctcccaacgagcgtgcccgcttgtacttcctgctggcctggtttcatgcgatcatccaagaacgcttacgatacgcaccactggggtggtcaaagaagtatgaatttggagagtctgacctgcggtcagcttgcgatacggtggacacgtggctggatgacacggccaaggcaagtgtgggccatgccaggacagacagtggacgtgtatctgggaaggatgctgcagggcgtggtgctgagaggccagactctgcgtggaagagcgagctgacccctcgtgaccgccaaagcctagctggccatggggagtgaggaggaaagctgtgcccctcgaaaggaagccccgggcctgcccgcctctgaccacacacacgaaccctgcttttcctcccccagggcaggcagaacatctcaccggataagatcccgtggtctgcactaaagaccttaatggcccagtccatttatggcgggcgcgtggacaacgagtttgaccagcgtctgctcaacaccttcctggagcgcctgttcacaaccaggagtttcgacagtgagtttaagctggcatgcaaggtcgacggacataaagacattcaaatgccagatggcatcaggtatgctgctgcctgctggaatggagacagttgtgatgtcagggcgtctggtgtcactcagaggtgacccctgacatcatttccaaatgcactggttttctaggcgagaggagtttgtgcagtgggtggagttgctccccgacacccagacgccctcctggctgggcctgcccaacaacgccgagagagtcctccttaccacacagggtaggcaacaaggatcctccccacacgcagggtgggtggcgagggtcccctcacgcggggtgggtggcgagggtccccacacgcagggtgagtgtgcactgctgtcccagggccctccctggttatgctgggtgtggctctgtcagcctcggccttcctgccagtctccagctgctcctagctccactccgaggggaggcagaggaaagaactggctcttctctgcagcatcaactcagttctagagaaaaggcttgatatttatgtaaatgagcctagaaataacatttagatgttcatctcatattgaaaagcagttactggctgggcacactggctcacacctataatcccagcactttgggaggccaaggcgggcagatcactcgaggttaggatttccagaccagcctggtcaacatggcaaaacctcgtctctactaaaaatacaaaaattaggtgagcatggtggcaggcacctgtaatcccagctactcagg

SEQ ID NO: 78098 - DNA, 1114 bp, Homo sapiens
tgaggtcaggagttcaagaccagcctggccagcatggtgaaaccctgtctctactaaaaatacaagaaaaaattagccaggcgcggtgccacatgcctgtaatcccagctacttgggagcctgagtcaggagaatcacttgaacccaggaggcagaggttgcagtgagccaaggtcacgccactgcactccagtctgggtgacagagcgagactccatctcaaaaatatatatatacacacacacacacatatatatatacatacacatacgtatatatatatacacatatatgtatatatacacgtgtgtgtgtgtgtgtgtgtgtatatatatatatatatatatatgtacacacggctgagcaccttccagattttgctgcagttcccagtgtggactcactcaccatgtggcctttacgttcaagtcccttttccctctgtgatttcttgcccgtcccctccctccttcctgctgcgactgtgggactgtggcccaggtgtggacatgatcagtaaaatgctgaagatgcagatgttggaggatgaggacgacctggcctacgcagagactgagaagaagacgaggacagactccacgtccgacgggcgccctgcctggatgcggacactgcacaccaccgcgtccaactggctgcacctcatcccccagacgctgagccacctcaagcgcaccgtggagaatatcaaggtagctgggagggtggcgggccggccaggtctcaaggtcccaggtgctgggtatggtcatggaccattgttccatggaccattggttccactgtgccggacggaacgtactcacaccggtgtcacctcagagcaggtgtccagctgagcccaggcattgggcaagatgagttggcccttttgaaatggactgaaaacaccctagaagattgtgagataggcagacagcgccacagcgagcagccgcagcccttcctccctagagagccccgagagctgcgactcgggcaggggcctcagcgggtttctgagcagcctcagcttcacacaagctcggttccaagtcacgctctgccaaagctgtccgtgaccctggacagttcggaagctctggggctctcc

SEQ ID NO: 78099 - DNA, 2450 bp, Homo sapiens
ggaggggaggagcttagaaatgctgaagaatttgtttttcttctgtgctggttcactgaatgttgaccaaaatctttacacaacttctagttttttaggggtcttccaagacgacagtgaatggggaatgtggtggtccaggatggtgacagacggtagtaggttacggcctgtgaagaatgggtgtcccccaggacagtggaaaagcaggggcaggcgggcatggggggctcatccaaagttgtggggagcccccagcatcctcctgtttgccccaaaagccctaattgccaggaacactgagccacttgtgtgacatgaggttttagccgcggttttgcttggatgtgattatggtcctccagaaagacacacctggactaatttgaccctagaaactgcacggttctgagacatgctctggaccagcctgagctagagcagatgtggtgagggcggcgccaggggcataaagtgcagcctgggaaaggcagtaggtggagccgccagccgcctgtgtgggcagccaggatgcctagcacttgcacatttgttccatctgtgctgggggagttgtgagagctgacaccctgggctctgtgtgccttggctgcagggatcttgcctcggagctggtcccactacacggtgcctgccggcatgaccgtcatccagtgggtgtccgacttcagcgagaggatcaaacagctgcagaacatctcactggcagctgcatctggtggcgccaaggagctaaaggtgaaggcgctcctgacgagtctcgggtggtcagcagctgtcctgggctggggtgggagtggctctggggaaaaacacagggcccaggtctgacctgagctccttcccctgggggctgctgctttccacagaacatccacgtgtgcctgggtggcctgttcgtgcctgaggcgtacatcactgccaccaggcagtatgtggcccaggccaacagctggtccctggaggagctctgcctggaagtcaacgtcaccacctcacagggcgccacccttgacgcttgcagcttcggagtcacgggtgagtggagtctcacagaaaatactggctctttgcaggtgacctcggtggcctgagaccattgttcccagatacatgcacttagggtgaccggctggcagttgggtggagcctctgggcgccctgtgactggggtttgtgtagctgttgtgttcacctcagcctgggttttggcttccgcctcacaggtttgaaacttcaaggggccacgtgcaacaacaacaagctgtcactgtccaatgccatctcaaccgcccttcccctgacgcagctgcgctgggtcaagcagacaaacaccgagaagaaggccagtgtggtaaggaggcactgcctttcccaggcattctgcagggacccctgcggtaacaagggcagaggcggctcctcttctatgcctgggttccacttggaacgggaaatgaggttcacagaggaaatccatttcgcacctgtccaaacctctccttgccgggccccatcagctgtcccgggcagtcttccagttttcttacttttcccttaagccaccagtaaacccctctgcttctgcaggtaaccttacctgtctacctgaacttcacccgtgcagacctcatcttcaccgtggacttcgaaattgctacaaaggaggatcctcgcagcttctacgagcggggtgtcgcagtcttgtgcacagagtaaacttttctagctgcccctttctgtaatagtgaaagttggtatttaacatttattcatttttaaaatatttggaaggtctgagcttgtgaaaagaaagtggttggtctgaggttggaggaagctgaatggaatctgacggttgggagtggtggaaattggaaggataccaggaggtatttgggaaggccaatggcgtggctcctttgaggaaataaaacactaagcatgagccggctccgcctcttctgtctccgctttcatcccagggcacagagccttgccttccatgctgcccagggagggcagcccacggcagccatgcccctccccacctcgctttcatcatgagctcgctcccgagcggccacagcactcatgaatgaagaccttggggcccttcacagacacagatgcagccagctgtggctctgaaggccctggggcccgggcaccatggttcacacctttaatcgcagcactttgggagtctgggagttaaagaccagcctcggcaacatagtgagaccccgtctctacaggaaattaaatcaggtgtggtggtgcatgcctgtagtcccagctacttgagggctgaggtgggaggatcacccaagcccaagaggtcgaggctgcagtgagctgtgatctcaccactgcactccagcctgggtgacagagcaagaccctgtctcaaaaaaaaaaaaagctgg

SEQ ID NO: 78100 - DNA, 6142 bp, Homo sapiens
gaggctgtgggggccggaccagatccctgaagcagccagggccgcgctcccgggcggccgcgctttctattccggaggcctcgggaccgctgcggtttccgcaccccgcttcaggaatgggccgggcggccgcgggctccccgaggctctgcagcagcgccagagctggcgccgcacgcgaacagagcggccccgccgcgggggtcccccgcccggccccgctgggggcgcaggcggaggaggccgccgtggcggagccgcagcccgcgcgggagggcacccggggtgttcgttggggaccgcggcgggggactgggcccgggcctgcggcggcctcccggaagcgcgcacacgctcgtggtagttgccgcgctccgaaatgaggtcatcctttgtcagccgcccttctattttcggtttacttaaacttcgcaaatctccaattcggctttaaaaatatttggagaacgcgatggaatttcgtgttgcctctgtagacgtcctgcaaggttttaaaccggcgcggtgtcgttccagatgcctgaggaaacccagacccaagaccaaccgatggaggaggaggaggttgagacgttcgcctttcaggcagaaattgcccagttgatgtcattgatcatcaatactttctactcgaacaaagagatctttctgagagagctcatttcaaattcatcagatgtaagtcacttattaacccagaatcggattttggtttcagtgtgaacttcttgggggtgctgtatgcttaaattaatattttttgttaacaggcattggacaaaatccggtatgaaagcttgacagatcccagtaaattagactctgggaaagagctgcatattaaccttataccgaacaaacaagatcgaactctcactattgtggatactggaattggaatgaccaaggctgacttgatcaataaccttggtactatcgccaagtctgggaccaaagcgttcatggaagctttgcaggctggtgcagatatctctatgattggccagttcggtgttggtttttattctgcttatttggttgctgagaaagtaactgtgatcaccaaacataacgatgatgagcagtacgcttgggagtcctcagcagggggatcattcacagtgaggacagacacaggtaggcacctgaacattcactggttaagtgagcggtggaagggtggggtgctgcaacccttggacccctggggatgcggtgaagcttacagaatttgtgtttgcccaacgatcaggaacaagctagagcacttaattagtgtaatggcatgacttggtgggcggttcttttgggcgaggcaccttgcccaaaaggttctgctgtggtggcctttgcatctgtagtaacggcaaaccttgctttatagacacgttataagggtgttaggcatggcgttgagcactaaattgaatgtattaagtcaatttttctttcttctcttgcaggtgaacctatgggtcgtggaacaaaagttatcctacacctgaaagaagaccaaactgagtacttggaggaacgaagaataaaggagattgtgaagaaacattctcagtttattggatatcccattactctttttgtaagtttttatgtaattgcagagtgaatttctgtctgtaggtgattggggtgactgtactacatccttagtccctagatctgttcaactagtctgaagcctggggaacctaagctctactacctaactctgtaaaagttcctcgggctattaagtggatgtatcaaatattgatgaaaagctgggtgcttctcaagttggctaatttagacttgggccttaggttgaaaatagtggtgcagcgctgtcgcttagttctggagtgcagcagtgatgtgatttcgtgttttcttttgaaggtggagaaggaacgtgataaagaagtaagcgatgatgaggctgaagaaaaggaagacaaagaagaagaaaaagaaaaagaagagaaagagtcggaagacaaacctgaaattgaagatgttggttctgatgaggaagaagaaaagaaggatggtgacaagaagaagaagaagaagattaaggaaaagtacatcgatcaagaagagctcaacaaaacaaagcccatctggaccagaaatcccgacgatattactaatgaggagtacggagaattctataagagcttgaccaatgactgggaagatcacttggcagtgaaggtgagtgactgatgggtgcttcaagcttgtccttagattatcatctttctccaccaccccaaatatcttctataatgcattgttcattggtacttagtgtatctgttttattacagcatttttcagttgaaggacagttggaattcagagcccttctatttgtcccacgacgtgctccttttgatctgtttgaaaacagaaagaaaaagaacaacatcaaattgtatgtacgcagagttttcatcatggataactgtgaggagctaatccctgaatatctgagtaagtatagataggaaaaataatcactgtcactgattaaagaagtactttctgggtgggcatggtggctcacacctataatcctagcactttgggaggccggggtgggcagatcacttgaggtcaggagttcaagaccagcctgggcaacatggtgaaaccccatctctactaaattacaaaaattagccccatgtagtggcaggctgaggcatgaaaacagcttgaacccccccgggaggcagaggttgcagtgagtggagattgcgccactgccctccagcctgggcaacagagtgagactgtctcaaaaatacgtcccatcatcttcaggttatctttgattttgggagtttacatagtaccagttttgtccttggaatgactcagtgcatttggtttatatttttttcagacttcattagaggggtggtagactcggaggatctccctctaaacatatcccgtgagatgttgcaacaaagcaaaattttgaaagttatcaggaagaatttggtcaaaaaatgcttagaactctttactgaactggcggaagataaagagaactacaagaaattctatgagcagttctctaaaaacataaaggttggtgtaaataaccattagttttccaattggcctctttagttttttttttttttttttaattcagaaagtctttgtaaagaacatactttgtttcagcttggaatacacgaagactctcaaaatcggaagaagctttcagagctgttaaggtactacacatctgcctctggtgatgagatggtttctctcaaggactactgcaccagaatgaaggagaaccagaaacatatctattatatcacaggtaagagaacactatgttacagtcatacacgtcgttcttacaatcttgtaggctctgtgggtgtgttttctactcaggtagcactgttacaactggtattgatctaggcaagataattaacatgaactaggtcattttctgtcttaggttctgcctaggtatctggctagcaagaaaagtcagagctagatgaaaccattcttaactgttaaaaggtctaaaagtaactttgtaatacctcaggtgagaccaaggaccaggtagctaactcagcctttgtggaacgtcttcggaaacatggcttagaagtgatctatatgattgagcccattgatgagtactgtgtccaacagctgaaggaatttgaggggaagactttagtgtcagtcaccaaagaaggcctggaacttccagaggatgaagaagagaaaaagaagcaggaagagaaaaaaacaaagtttgagaacctctgcaaaatcatgaaagacatattggagaaaaaagttgaaaaggtatgtgaatacagcatttcctgatcattgatacttctaaggtgctttcaagcttagtcatacatagcccattttcgcatgttttcaacttaaaacagaaaactatgttgtgtgtggctgggcgcggtggctcacgcctgcaatcccagcactttgggaggctgaggcagcggatcacaaggtcaggagatcgagaccatcctggctaacacggtgaaactcagtctctactaaaaatagaaaaaaataaaccaggcgtggtggcacggcctgtaatcctagccacttgggaggctgaggcaggagaatcgcctgaacccaggaggcggaggttgcagtgagccaagatcgcaccactgcactccagcctgggtgatggagcgagactctatctcaaaaaaaaaattgtgcatgtaaaacatgaaattataacctgtgctctttggatacctaatgcgacatttaagttgtatttgacagtagatagtattttggatctattgaaatttgggttctacagatttcatttcacaatgaaagtttaggaattaatctttctaggttcctagtcatcactttttgattacaggtggttgtgtcaaaccgattggtgacatctccatgctgtattgtcacaagcacatatggctggacagcaaacatggagagaatcatgaaagctcaagccctaagagacaactcaacaatgggttacatggcagcaaagaaacacctggagataaaccctgaccattccattattgagaccttaaggcaaaaggcagaggctgataagaacgacaagtctgtgaaggatctggtcatcttgctttatgaaactgcgctcctgtcttctggcttcagtctggaagatccccagacacatgctaacaggatctacaggatgatcaaacttggtctgggtaagccttatactatgtaatgttaaaaagaaaataaacacacgtgacattgaagaaaatggtgaactttcagttatccaaacttggagcaccttgtcctgcttgctgcttggaggtattaaagtatgttttttttagggataagtaaggtcttacaagagcaaagaaatgaaattgagactcatatgtcctgtaatactgtcttgaaagcagatagaaaccaagagtattaccctaatagctggctttaagaaatctttgtaatatgaggattttattttggaaacaggtattgatgaagatgaccctactgctgatgataccagtgctgctgtaactgaagaaatgccaccccttgaaggagatgacgacacatcacgcatggaagaagtagactaatctctggctgagggatgacttacctgttcagtactctacaattcctctgataatatattttcaaggatgtttttctttatttttgttaatattaaaaagtctgtatggcatgacaactactttaaggggaagataagatttctgtctactaagtgatgctgtgataccttaggcactaaagcagagctagtaatgctttttgagtttcatgttggtttattttcacagattggggtaacgtgcactgtaagacgtatgtaacatgatgttaactttgtggtctaaagtgtttagctgtcaagccggatgcctaagtagaccaaatcttgttattgaagtgttctgagctgtatcttgatgtttagaaaagtattcgttacatcttgtaggatctactttttgaacttttcattccctgtagttgacaattctgcatgtactagtcctctagaaataggttaaactgaagcaacttgatggaaggatctctccacagggcttgttttccaaagaaaagtattgtttggaggagcaaagttaaaagcctacctaagcatatcgtaaagctgttcaaaaataactcagacccagtcttgtggatggaaatgtagtgctcgagtcacattctgcttaaagttgtaacaaatacagatgagttaaaagatattgtgtgacagtgtcttatttagggggaaaggggagtatctggatgacagttagtgccaaaatgtaaaacatgaggcgctagcaggagatggttaaacactagctgctccaagggttgacatggtcttcccagcatgtactcagcaggtgtggggtggagcacacgtaggcacagaaaacaggaatgcagacaacatgcatcccctgcgtccatgagttacatgtgttctcttagtgtccacgttgttttgatgttattcatggaatacctt

SEQ ID NO: 78101 - DNA, 1050 bp, Homo sapiens
ttccgctggccctggcggctgcggaacggtcaactagaccccactagctgaagccggcatcacctgggaagcagccatgccgcccggaggccacacccgggggaggagcctgcggacgcccagtcgggtggagcacgccaggtgagcacgcctgcgcagtcgggccgtaaacaagcccaccccttccctttggcccgccctcgcagggctggcccgcgggtgggaggggcgagaaggaagaggcagggggtgggggaagagggagcaccaggaacagcgcctgcgcggtgggcgtgatccgggcacttagggcaggatgaacgctgctttccaagatggcgacggagggaggagggaaggagatgaacgagattaagacccaattcaccacccgggaaggtctgtacaagctgctgccgcactcggagtacagccggcccaaccgggtgcccttcaactcgcagggatccaaccctgtccgcgtctccttcgtaaacctcaacgaccagtctggcaacggcgaccgcctctgcttcaatgtgggccgggagctgtacttctatatctacaagggggtccgcaaggtaccgacccgggcgtcaccggagccagccagcggcgtaggcagaggccgggagcagggcggtgacagtggggccagggtgaccgagaggggtggccgtcgctcttacttttgagtgggccggtaactccactggggtactcctgaggagaggggattcaggagtaaggagggtggtggcggtggcgtttcgaaggggtgggggcagtggaaagggaccgtggggcgcgggggttctggctgggaggctcccgggggagccggctgcgtcccctccagcctggtccatcaggctctgacatggccagggagcgggcctgcgagtccccggaagaggtgaggtggccgtcttgtctgcttcgattgcctcgcctccctggagggttggaagtctcgccctgggttagagaacagggacgcaagacggcttaacaagatctctgtaaggcggaaccggggccgggaag

SEQ ID NO: 78102 - DNA, 1019 bp, Homo sapiens
taagctggttcagaggggttgtgtgagagtgcccagattaatcttgtccaacaagtcagactgtgtcccaaacagggagtgatatgctttaaaagctgctttaaagggaccatccttcttggcgggcgagttaccggtaattctgtgaaacatgtaagcatcctttaaaagtatctctttaaaagcagccatttattagagtttttctttcattggctatgtaactatgttttcactgagaattgcttatttttgagattgtagtctttgacttgatgtcatggaagagtgaggaaattaatgcatcccacagcacctccaaataggacaaggtgataaaagattaagtcgtaaatgcatgttagcatgaaaataaattgttcatattgaagagtgaacattcttcaggatttaatatagccagatccagtacaggattttcgcttgttacaagagctagggaaatgacagtggtatctaaatgtagcaaagttgtttctttgattcagggtgaatctttttttcttagtctttatgataataagtgtaccactgtatttagggtatgctgttggaagttattaagggtaaatcgcttgaccttttttttttcctcgtttggaattgcaaaagctcgaagtagtcttcagtctaggggctgaagttttactcctactcccaactttgtcactgacttgtttgggtgaccttggataagttatttaacttctatttgcacctctttaaaaagggaatgttacagtgcacgttgtaattaataatataataatcataatgaactttaaggccctgaaacactcagtagatgtaaaatatagttaaatactgactgtcaaataagaagctgctgtcttgacattgataatcagagtgaaaggaccaattttgtctcaggaaattaagtttagaattttaagttataaaaatttatatttatataaaaatacgatgtgcttaaaaactaaattcactaactagcaattattaatgtaggaatt

SEQ ID NO: 78103 - DNA, 1022 bp, Homo sapiens
tagaagagctttatgttcatgatgctgagatgaagttggggccagaagaagagtcagttgataaaagctaaagtatttttagatcctgattaaagaagaaggtaatgggttgacttgagagagaatgagcgttctgttatgggaatgctcatatgggaaatgttctgtctctttgtcaaaaactgcaggaccacctgttggtgacattggaggaattcctgctttgtgtgggagggtgaactagatgcctttaaaaaaaatttcccccccacagacttgttttagatattttactgcttcagagagggtcatgttcacaccattctccccttttgtaatttttcacacctccctggctccccttttataatttagaaagaggtttagaagtctgtaactttttgtattagatttactttgagaaatcttgtacttaatttagtaggtcacagagggttgctgaatgactggaaacttgtgtttcttttccattaagggctatttgctgacttctgaaatattgatgatttatttgactttagaattttgcatactgaggggaaagcatcttaatgtatcatttaaagcaggagatactttcatactatacctgggttctcttggctttgaagaggagggtggtcatgagatattgaaagattgcatgggtggcttgtaatcccagcactttgggaggctgaggcgggtggatcatctggggttaggagttcaagaccagcctggccaacacggggaaaccacatctctactaaaaatacaaaaattagccaagtatggtggcgcatgcctgtaatcccagctactcaggaggcaggagaatcacttgaacccaggaggtggaggttgcagtgagccaagatcgtgccagtgcactccagcctgggcaacaaagcgagaccttcccaaaaaaggaggacttcatgggtagatatgagcaatggtgagaagcacctggaatatgtcatggaagtccgtgagatagtcatgaatgccattctttc

SEQ ID NO: 78104 - DNA, 1044 bp, Homo sapiens
tagcactacagtcgttctcttctgattttcaaaatggcttatggcaacctttgatgttactcagactgctccagctagttttgattaattcattcaggctgtcagtgactcagcagcctcctggcttctttcttgtttttaaaaggagctggactttcacaatatatggaacatagttaacatattgcagctaataagtgtggcacataatgataggcatcggtgaaggggtctggaagaatgtcacacataggctgggggggggctcaggaggacatgacatctctgcttttgtgaatatgaggataggggactttttttgggtgaaagaaggaatggcaggaaaggcaaggtgtcagaagcacaggcagcagccaagggtctttggggtaatgtatgtggaggggcgggggtgataaggccacattgggcagcctgtgagtgctaagctgtaggccctgcagagccgtggcagtggtggagtgggagagtgacctaaggcttcccgaagatgtgtctggcagagtgtagggcgaattgcatgtgattggaaatgggtggaaggagactggcacagagctagagaggctgagctaagctggggaaacccaggctggatgagggccctgaagctgtcctttgggcaggggtgccaggcaggggacccaacagagcgccaagtataaagctggttggggtggggcttaaggatgggaggagtggacttaggaggtagagagtgctttgggtgtaggccaggtaagtttctggtctgcctgcattaggcacttggtagctgttagctatgccagtaaaaggatcttttacttttctggcaagactctgcaagaccggttctctcttaggtgattctcaggtggggatggggagggaagatgtgaaatttagggaaaataaaactacctttattacctacactatttccacctgattcatttaaaattatgtctaagattataatttgacacacatttttcaaaagagctctgagatatttttcataccacatcagatgcttctggg

SEQ ID NO: 78105 - DNA, 1044 bp, Homo sapiens
ttttatatttgtaggttttttttttgtttttttttttgtggctgtcttcctcgttctgagatgaatggcatgtggtgttctctcaggccaggattctctttccctgccatccgagccgctcagaagctgccttcctcagacagcctgtccgtggccatcgtcccaggccccgctgctcactcgcagcactcggctgagctgccttcagcctgccttgctgtacagcggccgctcccctccactggccgcttttctcctcgctccagtcaggactcccttttgttttgtatcatgctttgtattacacttttcaaggctctttcatgtatatattctcttatttcatcctccagacaatcccatgaggttggtagaacagagattctcatctccgttttaactgaggtgaggctgggagagtgtccgcatggcatgcaccctcattcctttgccctggggctcccagaactacttgttaccgctcaggtccagacttctacatgtgcaaggttttgagtttgctcaaagacgcctgtaattttgaggtcctcttttctactcattacttatatttgttattggaaagtccaacattagaatacttggttcgatgtcacaggcctctttggaagaaagaaatcttcagaacctgagggggcggtcagtagagaactagagccgggagccccagagggccacacagcgtgaactgggtgtcttgagggacaagttctgcttcagggttagttgtctccactggagattttcagacaagagtgggagggggtgggtttcccttatttcaccaataaaagcccagcatattgggatgccacaggacatttctcatgaagaaaagaatccttcttgaaagtggggagggcacattgaaaaatcacttttcacccaagtgagaaatcatttgcttttgactctctctccccatccccttaatggtcaaacagacctgggttccaaatccagccctgccacttacttaggtaggtatggtgacgttggtcaagttatttaacttccctaaac

SEQ ID NO: 78106 - DNA, 1968 bp, Homo sapiens
gtctgtttcagtatgacttttctaccaagtggaaaagataaggtaggcttgctgagttagaagccctgggttccaatctctacttgggaccttgcccctgaggcgcaagggtcaggctatgtgggaccccctcccttttgcattgttgcatggttttaacatcattaacttggaacaaaaacacattatagagtatggtttttaagaaataattttgtttggggaagaaaattcaaattgacaaatggcagttaaaatttggattcttttgcagttatggtacttgctattcatgcaaatcagtatccacccagggtgctcctgtttgacattgccagtggatttgataagatcttatgaaccatgccatctcttctagtttcctctgagttgactggaaacaaaacttgccatctggactgacagattgtagaggaaaagtatttaatcccattttccattaaaaaaaagttaagcagaaaatattttatttacctagatgtttttttagtatcatctgcagaagtgatttctaagtagctggatgattatttttttggtgctgagtttggggagcagcgcacaaaattggcctcctctgcactgttagcagaaattgtgaatttggaatcattgtgggtttttattgtttaggtaggggagagtgtgattggagggggcagggattggagccatgtaagggctgttagtaaacaagacccggaggcagccctggccgaggatggtacagaatgccgcttagagaacaagaaagttttgtgtgtcgtggcagggggagggcagggagttggagaccacacgtccccagaatctcagggctctgggagcactcaggctgcattggccagaactatccctgccctggtgactgggagttgcaggctggaaggcagctcctcattcttcatgatttaagcatgagttatctcatactcactttacattttatttgagaaattgctatttagaatgctaagactgtgtgtggtttaatgccagctttgcatttacagcttgaggctgaaatcgattgcccttcatagtaaggagatcctctggccatgtggatacatttttatcagattttggtcagaatgtctaagagcaagggtcaccggaggtttgttccttagagagtgccaggaatggtggtgaagtagtcatcgtgtcgtgctttgctgtggtgtgacatttacaggtttcaaggcacttttacctatggcctctacagggagggtggggagttgttcccattttacagatgaggaaatagtcaaagagcacataagtgaattgtccagatcaggtagcaagttgatgatagagttggaaccagaaattaattccagaaactcattggttacaggacccaccatgcatggttgccagatgagctcttgcccttccgggagctcacagtttagtaagaatggacagagagtactgggcacgtgtcagcacagcgatatgaacaaaataccaagggctagctgccgcaggaattctttagtatgcattttaaagttttttaaaatgttaagttcactgggggagttccaagaaatgcttttagaaagtgatgtttgatgtgggtcttaaagggtacatagtcattagaggagggtaaggaaggccttcaaagctggaggaacaactaggcatgtgaaagaacatccagtaacagcttggccacatcacagtgtgggacttggagtgtcagagttcgaagctggaaagataaattggaaccagcttgtcttataaaagccttttcatgtcacgtgaagcaatttggaactgacactggaagatgtgggggaacctttggccttttaatgaagggagtgacaggatcaaatgtgtttttttagaactcttgtcagcacttgtggaaggtggattggaatgaagaaagacagaatgaaggtagcaagaccagtgaggagg

SEQ ID NO: 78107 - DNA, 1474 bp, Homo sapiens
actgccaaattgtaacccctagttttgtgctccagatccatacatcccactatctacaggtctctcgaacttagcaagtacagaccagaacctctgatcttcccctccattccctgacaactgctcctttcccagtctcacccaacacagcaagagacacccagaaacctgatttattaatacacctttccaattcagtctccaaaaagcagccagggtacctttcaaaaacaccaatctgcctgccttgtgcacctgctcccttctaaggaatcccgtacttcaggctaagaaacaaatctggatcaggccgtaggtgatgtggccctccaatctcatgcccttacttcatgccaccttccccaggtaaaccgtccttctttcagtttccttgggctcaagggccctcatgtgctattccttttgcaggaaagctccatctccagttccttacctggttggccttcttctcacatgaggcacagcttaaaacatagcacttcgtccgagagatgtcctctgcctcccagtttaaagtagacctctgtgttggccaggcgtggtggctcacgcctgtaattccagcactttgggaagctgaggtgggtggatcacttgaagccaggagttccagactagcctggccaacatggtgaaatcccgtctctactaaaaatacaaaaattagtcaggtggcctataatcccaggtacttgggtgggtgaggcacaagaatagcttgaacctgggaggtgaaggttgcagtgagccaagattgcgccactgcactccagcctgggtgacagagtaagactctgtctcataaataaataaataaataaataaataaataaataaataaataaataaagtagacctctgtgattctctccctttcttgggcctgctctcttgcctcttacatcacaaagtgtcaccatctgtggtcaccagtgtttcgggggtggtgctattatacctctcttccctcctgagaggggtcacaggagggcaggttttgcccactgctgcagacccagtgctgggcatgtggtaggtagtcaaggtcctgaatgaatgaaacaatggccgcaactctagttcaagccctcagctctcacctggacagttactagagcctcctcactggtcttgctaccttcattctgtctttcttcattccaatccaccttccacaagtgctgacaagagttctaaaaaaacacatttgatcctgtcactcccttcattaaaaggccaaaggttcccccacatcttccagtgtcagttccaaattgcttcacgtgacatgaaaaggcttttataagacaagctggttccaatttatctttccagcttcgaactctgacactccaagtcccacactgtgatgtggccaagctgttactggatgttctttcacatgcctagttgttcctccagctttgaaggccttccttaccctcctctaatg

SEQ ID NO: 78108 - DNA, 1981 bp, Homo sapiens
atgaggctcagatgagtgagttcaggcagggtgtttgtgaagggcctgaagagcgagccttggtggatgctcagcaacgtggaggttgagagaaactcaggcttcctttcctgggaggggtggtgttggacggaaagggttccgtgggaggtgagataccaaccgttttgaaatacaaataattaattttttaggacaagcaggtaggagcatggcaacccaggcagagagtcaacatgtgtgaggctgagggttggcccgctggtcacaattacagcaatgtggcctttcagtgttcctcaccagaacacctctcagacccacctgttaccacacgtgcacacaccttcacacaccgaatccccagcatcagttactctggcctttgcctcctttctggtgcctggtacatgaaaatgtaataaatgttgggatggaaagatgagtgaaatggaattataaatttcagaaatccacctgagataaacatagatgaaaaattcccatctgggaacaagtatattttaaaagatgattttccccctgtcaattaaaaattgtgtgcatttaaaatgcttgttgatagaaaaattggaaaatagagaggtacaaagaaggtaggaaagcatcacctctaaaccgtgacgctcactgttgactttcacagtctgtgattgttttcaatgaggggacaccatagggctcacaccttccattgggggtgaaggcaaacttcaccaaacttcatctccaagtctggccctgatcaggtcagcccagtgagcatgggcaggccctgccctcttcccgctccctgggactgtcctcagtcacactggaggtccttgctggtgcatctgttcaagacccaaagaaagtcgaatgcccagtcctttctagcccctctcaggaaatcatccccagctccctggagtctctgctttccccaatcttccagagtagattttgggtttctgtttgtagcgttctgtacatatgatgcccttgaaaatgtctaatgggccattattgaaagtatcttggcgcacggttcatctgacaagctcccagatcgtggagcgtgtcctcatcatcagagctgcccacagaggagagtcacccggtcacattcagctcactgtggtgaagcaccccacaggggcgaggagtttactttttaaatttttttttttgtgtgtgtgtgtgtgtgtgtgtgtgtgtgtgtgtgtgtgtttcactctgccctgttctgaagtttgctttttataactaatggttatatatttggggaggaagagttacaaagggacagttcctatatggtaatgaatgcaaccttgttgtctgtgtaaaaatcctgattttggagtatattcacagaatagtaactttgaaggattttcaagtatgtgttaattgttggctgaaatataaaatgttaaagaacttggcatttggcttctttcgttactgacacgataccctctgctgttgcccttctcctctcgcaggctgtgaggctgaggcagacacactgggtaggtcccacgtctccttgtggcatttagatccagtcttactgaagggcatgctgaagaggagatggccctgactcctggggtatggagggacactgctgccagcccaggctgcgtggcacatcctgccagctgcaggtgcctcccaggcatggggtaaagcttagcagtgttctgtctattctgatacaaaggaatggtctgcacattttgttagttttgtttctgttgattttctaatcgaaggaaggaaatgagcccgtaatgatctactccttaaagcttgaacacagataaaacgacatccgatcccatcttaatgtggctttgaaataccctttcctaatacttcctgagccctcttcagatgcctttacatcatcagagcctttagttgccatttttgcttgtggttgcattatggcttttcaagcagctgctgt

SEQ ID NO: 78109 - DNA, 1016 bp, Homo sapiens
aagtgccatgaggagagcaggcagaagaggaaggagctgccacaggaggccagagcctcagaggacaggcctctgagacttgaggaagctgagccctagagggatggagtgcacagggagggggtggtccttaggagagagcacagggaagcagggtgggggcagagaaggtgctgagagcaaagggacaccgtaggggaggagggtgcagggcaggtgcctggtggaggaaggtgagctccaggagagagggacagggaagagacctgctccctgggccagaagggaggtgctggggaacagagacaggcagaggcaggaaggctctggtgggaagcagtggaggagagccccagtcccagtcgcagcccctccagggcaggggtacactgagagatgggcagggcaggtgctcagcgaggaggcggagggaaggcaggggaagtaacagaggtgctggcagagcagctggcctggccacagggctctccatcagtgtccaactccaaaatgctccaaggcccattcttaacaaacacgttcataaaaacacaaaaaacccaaaacgcaaataaaccttaaaagcaaaacgaaatacagacacatttctatgtacgtcaagacacctgctctgggccagtgctctgtggggatgcaggctccatgtctccactcaacgctcagcgcggccctccccatagttccagctctgcaggccaaacagaccgtgccacttaagatatgaatacaaagaaaaatcccacgaacagcgaaaacactaccatcccaaatgccatcaacagacaagattttcaaaatacactagttaaaatgaaacaagaataaaaataagtctataaccacatcaaagtgtcattttgtgaaagcaattcacactgacgctttctaaggcacttcattttctttttcttttttttcattactatcaatatgataagcaaaaatcaaaaattagtttgggggtgagtggatctgcatttcaaaatgcagatatt

SEQ ID NO: 78110 - DNA, 1023 bp, Homo sapiens
gccttggcctcccaaagtactgggattacaggtgtgagccactgcgccgggcctgtacggaggtttttttcagagtttcacacactcttcctccgctgcacctgcttccttggagatatttatttatttatttcagagacagggtctcactgtgtcacccaggctggagtacagtggtgtaatcataactcactgcagccttgacctgggctcaagtgatcctccttggagatcttaggatgttactattcgcagccaatttctgtgacattcgtggttatatttattagctgcagacctttctagctgcatactgggcaaaacccaggggtctttacacacccccgctttccatcttgccctccacccagccacattctgccacgctgcccatggtcaagtttaagacctatttgtccatggcatggacagttgtcatagcctcctaactggttcctcatcacccccaccccaccttgcattctgcacctactgctgggggatttcatgttattctgccacttccctttctagaaactgtctgtgcctccactgtctgcagcagcatccccagtagaaatacagtgccagccacgtgtgcaagtttaaattttctaattaccacattaaaatagtaaaaaccaggtgaaattaattttaagaaaatactgtattttatatatatatctccaaaatattatttcagcatataaccagtgtaaaaactataaatgagatcattgacattttttttcataccacatttttagaaccctgtgtgtgtttacactgacagcacattccacttgagaccagtgctgcgggactggggagtgcaagcgtcagggtcccagccgaagccctttagcttgggacttcacagccacagcctgagtcccagctcacaactccagaccaaattcccctcccagctcatgtgctgcgatcaagacagatgccacacatggcctggatccccacccccctggcctgctgtgttggctgggcttttccttggagcat

SEQ ID NO: 78111 - DNA, 1028 bp, Homo sapiens
gggagtggccctgcaggctggtcgtcggagccaggtgatgtgtgtctgtggaacgggagacagcatgctcgctttggggtctgatgggcccgtctgttcccctggcactggttcggctgtgtctctccgcctcggagtccttgaagttgttctctgtgggggtacacttccccaaacatcctcttagcctgatatttgctgtctttctgtccttctgtcttgctcagctgtccagcaccagcagaggaagaggcctttcttggccatcctattcaacattgaaatcactagagtccccttctccccagcacgttctcttctctccctggtttatttttctccacagcacttatcatcatcagatcacataaatttcactgtcttctcatcccacttgaacctaaatttcatgagggaaagatgcctgttttaatttatattgtatcagtgcctggcatatggtacgcactcaatactggatggatggatgggacttcaggcaagtttcttgacctctctaagcttcttttctcactgataatatggcgacaatccctgccttcctgtagggagacaggcatgactgcattttccattttccatgcgaggcaatttggtaacatctgtaaaaatcataaatgtatatatcttttggctcagttactccactgggagtttatcctgtaggtacattactcacacatgtgaaaagtgcgtgtgtgcaagggcattcattgctacatagatgtccatcagtggggcacttccacaataaaccacagtttatccaaacagttgaatactctgcagctttagaaaagaatgaggatgctgtctttgtgcccatacagactgatgtacaaatacacttggaggctgggcatggtggctcacgcctttaatcccagcacttcgagaggccaaggcaggaggattgctttgctcctgaagccaggagtttgagaccagcctggacaacatagcgacaccctgtatttacaaaaaatataaatttttaatcagctggg

SEQ ID NO: 78112 - DNA, 1046 bp, Homo sapiens
tttgatggtggagggaggtgcaaggatgatgggatggtgaacggtggattaagaggcctccactcccccatcacagctctgccagaccttgctgtgcccactgggcccagactaccccagcactcttgatcccacaaacacaactgtacctgatcgcccagggcctaagggtgtctgcagctcgctccatcactggccttgtcaggcaggcctacaccagctaactcaggcctgggaagccagactgctgtcctgattttggtacagtggctcccaattcctgcaccttacatttcaccagaaccaaatcaaatcccagtttttctaggatcacttcattgttactctatttaccatgtgtggagaaatttcaggacataaaaacttctagcagcacggttaggagtaaattttattttgggccttaaaaaacacaacaaaaaactgcatgagaactcaaaaactagtatgatcaagtaaaaacagtattgctttgcaatagtgaggtatgaacagcatttatagcaccattaaaaataaatgttactgcaatgacaaaacacattaaaaaccttcactcccgtattaagaagctgcactgtggccaggcgcggcggctcacgcctgtaatcccagcactttgggaggccgaggagggtggatcactttaggtcaggagttcgagaccagcctggccaacatggtgaaaccctgtctctactaaaaatacaaaaattagctgggcatggtagtgcgaacctgtaatcccagctgctctggaggctgaggcaggagaatcacttgaacccaggaggcggtggctgtgtgcagtgagccaagatcacgtcattgcattccagcctgggcgacaaagtcagactccatctcaaaagaaacaacaacaaaaaaaaacagtgcactgagacgaccctaagtagacacatggatgtaacttacagataacatcctgtgccaatctacttcaatccccctgtgggggcctaattaaatgttactgtgacacactggcaatggtggactgagca

SEQ ID NO: 78113 - DNA, 1028 bp, Homo sapiens
tgttgttgtttcttttgagatggagtctgactttgtcgcccaggctggaatgcaatgacgtgatcttggctcactgcacacagccaccgcctcctgggttcaagtgattctcctgcctcagcctccagagcagctgggattacaggttcgcactaccatgcccagctaatttttgtatttttagtagagacagggtttcaccatgttggccaggctggtctcgaactcctgacctaaagtgatccaccctcctcggcctcccaaagtgctgggattacaggcgtgagccgccgcgcctggccacagtgcagcttcttaatacgggagtgaaggtttttaatgtgttttgtcattgcagtaacatttatttttaatggtgctataaatgctgttcatacctcactattgcaaagcaatactgtttttacttgatcatactagtttttgagttctcatgcagttttttgttgtgttttttaaggcccaaaataaaatttactcctaaccgtgctgctagaagtttttatgtcctgaaatttctccacacatggtaaatagagtaacaatgaagtgatcctagaaaaactgggatttgatttggttctggtgaaatgtaaggtgcaggaattgggagccactgtaccaaaatcaggacagcagtctggcttcccaggcctgagttagctggtgtaggcctgcctgacaaggccagtgatggagcgagctgcagacacccttaggccctgggcgatcaggtacagttgtgtttgtgggatcaagagtgctggggtagtctgggcccagtgggcacagcaaggtctggcagagctgtgatgggggagtggaggcctcttaatccaccgttcaccatcccatcatccttgcacctccctccaccatcaaaaaaaagccctgctctggccatgtaaattatctctgtaaccccttgctgagaaaattgcacgaaggtctaatggaaatcctgccagagcagcgctgggttttaggttgttggcattagtgcaggt

SEQ ID NO: 78114 - DNA, 2072 bp, Homo sapiens
gggatgaaaatactggctgtgtccccaaggctggcttgccacgtgcctattaatttaagaggaccagccatgccgttttacggcagtaagcagtgacacctgctgctgagtaactgcccaatgcatggtccccagccctgggcccgcatgctgtgtggcgttcaggcctccgttcttcctgcctggggtcctttgttagcagcctactttctagggtctaatgttcatgcagtgagcttgcatggctcattaatttctttcccagccgttcttttaaaaatcaagtcgtcttatttctgtaattctctgtaaagatgtagcacacatggcgggcacatggcctcaaagccaccctggcagaagtcggcatgtttcttggcagattctgcccctgtgtgcccagtacccctctgagacttgagtcagggactccccacctgttaggtgaagcggtggtgttcaacttacctggggctgctgggctcctaaagggacactgttactggggcgatggtgcagtggagagcacttggcagtaggagcttctaggtagaacttgggagtcttgggacttctggatgtgttctggtgatgcgattttgcgctcagacggtccagaaagggaccgcccctgtggaaggtgttgcgctggcatccccatcacaggattgattggcaagcagggaaagagacttgtgcctttggtggggcaggtatttttgcccttcgttatttgggttttaaaggcaagactactgacatacgcctgttaaagaaacatctcggtcaggggtccaaagttagcatatggagcagagtgatggtaatgagacacacactcccgaatgaatcgtcagtgtatctctctcaacaccagcagagagggtttcgaggagatgcttatggagatgcacgtggggcggtgcatgggagtgaggcggcctcagtgggcccaggctctgttttggagttgtgtgtgctgccagccatggactgtggatttcactccccaccttcgagccgccagagcagaggggcagatggaaccagcccattacctacagtgacagtaaaggcagaggaacccgtgagggtgaggcagagccctcctggctgtgaggactcacaggcttcacctgcaggtcctcgtagaggggataccacatgcagatgcagtgacccccagattcagatgcacctactgtcaaggaagaaagatcccagcagggctgttccctccgcagtgaaccctgtgcctggcatcgtgtctggcacttagtggcccctctgcaaatatctgttggctgcctgactccctccgtgaaagccagcagcctaacaccgattttagaaagtaattctaaattaccccaaaagggccaaaacgctccttgctggcttggctgactgcaggataaaatgtggagggcctggatagacttgccccttcccatcgagaagcacacaagttttcttgctggaaaagtagacctttgagacttctccgttgtgctaacttgttctcctttgtcttcacagagactaatagacaagtcacgagttacctgtgtcaaatgggttcccggttcggaaagccttttcctagtagcccactcgagtgggaacatgtacttatataatgtggagcacacttgtggcaccacagccccccactaccagcttctgaagcagggagagagctttgccgtgcacacttgcaagagcaaatccacgaggaaccctctccttaagtggacggtgggcgagggggccctcaacgagtttgctttctccccagatggcaagttcttagcgtgcgtgagccaggacgggtttctgcgggtgttcaactttgactcagtggagctgcacggtacgatgaaaagctactttgggggcttgctgtgtgtgtgctggagcccggatggcaagtacatcgtgacaggtggggaggacgacttggtgacagtctggtcctttgtagactgccgagtaatagccagaggccacgggcacaagtcctgggtcagtgttgtagcgtttgacccttataccactagtgtagaagaagg

SEQ ID NO: 78115 - DNA, 1067 bp, Homo sapiens
tttccctcaccaacccctctcaagagcaaggacacacacaaatgtcatgaatgccacgagtcctcctgctggaagcaatgggaacagtgttacaacacccgggaactctgtgccgcctcctctgccacggtccaacagccttccacattcagcagtctcaaatgctggcagcaaaagcagtgtcatggacggggccattgcttctggggtcagcaaatttgcaacactttcactacatgaccggaaggagaggcaccacgagaaagatcacaagcgaaatcatagcatgggacacatttctagcaagagcagtgacaaactgaatctagttaccaaaaccaaaacggaccctgctaaaactctgggaacgcccctgtgtcctcgaatggaagatgttcccttgttagagccgctgatatgtaaaaagatagcacatgagagactgactgtactaatatttcttgaagactgtatagtcactgcttgtcaggagggatttatttgcacatggggaaggcctggtaaagtggtaagttttaatccttaatgctgcaccagatctagaacttgaataggtagtgacttttttctttttcgtgggaggggtggggtgtacaatgaatgtgaatgacacttcttattcttaatgtaaatctcaatgcatcagagccataattttggatactgcatgccatgtaattctgaatcatttgataatttaccttagagcatttaaaaaaatataatcaaactaattgccagccaagtcagtcatcctcctgggagtatatagagtcccaaggttagcgctcctgtattagactatttcaattttaggaaaatcatgaccatgtggggaaacaatgactttaaaatgctgaaattaaaatttatgctttaactggaatattttttgcttaactactcaattagaatattgtacacctgatcaatgtgtgttcagcacagatggccatgaattgtcatttatagtccaattttttatcttaatcataaaatgtttaggaatctatgaaatttaactttaggaacaaaacgtttagcag

SEQ ID NO: 78116 - DNA, 1141 bp, Homo sapiens
ggttcccaggtggcagcacgcggccatgccatcacactcaacagaaaccactgcgttaaggcccacgatgggcacagggtggatggcgccaccgtgacatgtttgcagatgggaagcaggcctgggaacctggcccggctttcctgggagggctgcgttaagagcacagggagctgctgcttcagctaccagggtctttacactgcagagaaagaaaagccaccaggtcttcactttgctgaatcatattcactacgcaaactggtctaagtgatcgttgtctctatatttaattacaaaggtgtacaacctaaatgcccaaaatgagttaacaagtaagataaccaccatcttgacatggaatacatagttcaaggggccatctcacccactgggaaaaccagaatttgaaaagcagctcctggtgcagcagtagagagtgagggtgaaagactgcggtctccgggggagcagcagagcctcccactgccgaggaagccacaggccaccaggtcctgggctgaggcgctagggtgggagccactgaggacgaagcctacgcacatggccagcgtcagcatcccaagagtaatcccggaaccacagctgccatccaagaacaaggagaggggaaacctgcacttccgcttcctctgcgggggacgaagcccaaacgagggccatgtcagggagaagtcggaagactcggggagtctcaggctttacgaaacaaagcgcggaggagtcacgtgcctttctgacccaatccccctcccccaccgcacctccccgcccccggcaaaaaaccaaaaaactccttttcccttgttgggaaaacacacaagcaaagtgcatctgaagaaaaggtcttcgcttatgtggcaagaggcacttctgcaatgctgttggcgtcctcggcccgcagttcccacgaactgtcaggctctgagtgaggtacgggtatcttagtacacagaacctcaatcaaagtgctacaaactgcttctttgaaaaaagatgtttattaaacaactttaattgtcataaaatgactaaaatgggttttaaaaattaaggctcttctctttctgtggattgccagaacaatgtaaaaataatatcaatcaaccctgctaaacgt

SEQ ID NO: 78117 - DNA, 1054 bp, Homo sapiens
tctggttttcccagtgggtgagatggccccttgaactatgtattccatgtcaagatggtggttatcttacttgttaactcattttgggcatttaggttgtacacctttgtaattaaatatagagacaacgatcacttagaccagtttgcgtagtgaatatgattcagcaaagtgaagacctggtggcttttctttctctgcagtgtaaagaccctggtagctgaagcagcagctccctgtgctcttaacgcagccctcccaggaaagccgggccaggttcccaggcctgcttcccatctgcaaacatgtcacggtggcgccatccaccctgtgcccatcgtgggccttaacgcagtggtttctgttgagtgtgatggcatggccgcgtgctgccacctgggaaccacagcagccttcaggtgcatctctcctggctgtgcctttcacatccctgagcactgctcctaggagtattcgtgtcctctctacctgtggaatacgggcctttgttcctaaaggtgaactgatctaaggtagccatgacagccatccttgtggacagtttccgctttggaggccaaattgggtcatgtggagagattagtgatgaacgctccatgtgcaacttttgcacctacatagttgtaaacgttcagtttcaaatgcttctgaggcattgagtatgcagtttcaaaattcaggacttagtatttggcctaaatagagagtggccgatcccaagtaagtagcatttatggtgacatttctggcgaccttgcagttctgaaggtgttgccctggacagggaagccgtgggggtgtgtgcccgagtaaccaacgtgaccgactggggactctctgatttctcccccttctttaaaattctcagtcgcagtggctgggatgaaagagggattgcaggggtacactgacaggtgacttaggagtcatttgctgataggaaccaggggtgggagaggcaagaggaggaggttatgtttcctttgaaaacaactccgaagtgtgctgtctagtatggaggcctgtgtgtgtc

SEQ ID NO: 78118 - DNA, 1017 bp, Homo sapiens
ggtgtgcccttggctgaggtttcgttccttagcagtgagaacctccacatgcgtgggtaggggtcgggtgacctggagacgcctcctccggtctggtctgggtgacaaaggtgaaggtttatagtctaccaccctggcagcagcctgcagggcccccccttgtctggagcacacccttcgccacgggctgattgggactgtcgggtgttgctttaagttaacaaggtgcacatcacagcgaccccaagtgatgtcccaaagggaggagacattagtctggccgaagtgaagtctgtggctttatatgtaaaagcactcgtatgcaactgttacctttgaaactcagatcctagttacgaactataagaacgtgcccctccagtagagggagactgtctcactgatgttgatttctttattcatttccgcatctgttacacgaacttcgtgtcataaattgctatcctttcatttgaaagtgtaaaaaatttcctgcatttttatcatttctgtatacttgagtttattagagattgttatgttaggcgacactgtataaaattgtatggatattttgagtgaaaatcaaaagtaaaattcacatgtatttccttttttatattttcatccaatttcttgacaacttgaataaatttcataaagagccttcctaacatgaaatattggtaaattaaattctttactgttgcaataattaatgaaactttagtatcagtattgttttataattttaaggaaatcatgtttgtttcactgctttgtttttttttttagctgttgccttgtcactgtcacagctaacaagacttactacatacttgatattctgaagtactgtggggctgtcctctgtatactgacattaaataaacgtgtgtgagtgaactgtaaatgtagataattttcagtagtcattttcacatctaagctttaaaaatcccagtgaaccaaaaccagaaaagtttttaaatgctgtaaaattaaggaccttgttaa

SEQ ID NO: 78119 - DNA, 1056 bp, Homo sapiens
actccagcctgggcgacagagcgagactctgtcttaaagaaaaaaaatagccatttctccatgtgtggctgcctgtcagaattaatggattctgaacccaggggtctctggagacgaatggaccatctagaggctctcagctccctaccaccccttccagggtcagtggcctccaaaaccagcctccccttttaggtggggggcagcataagcaaaatcctctttgaagttactcaagctagaaaggctttatggagactaagtggggtcccttcttcctgccccacacagtagagaggattgcagggccaagtgggtcccaggagcgggagggcctccagtgacagcccgggccggtgctggtctccatcagtgaacgggatcacgatgaaggcccactgacttgcacacgttctctctgatgcttttcttccaccttcagatcgcagcggagcccttagatggtcgtgcccttcatctgcgtggtctttccccggaagtctgaagagtacaatccttttctctgggtggcttttctcattagatgccaggttgagtggcatctgggcaagtgtggcccctcactgtcacctgtcagtggacaggttaaagctggcagaggtacgtggtccactgcccagctataactgaggtcccaagccaaactgcacggcaagtctggggcagagatgggtcccgacgtccctgggctgggcccagggttcccggctctgtggctcacgtgccgcttgtgtgatgtagagactggcttcgggtgccgtgaataaaccatggctgctttctccaggtttgctttggttcctttctgttgtggtctgtgtagtgagaatggtgggagtcttgcacgtgagcagttaaggagtgtgttcagagctggaagtcttggttctgagagcaggctagcctggtcatagttctcatcgtttccgcaccgtctctaaaaaggtgtcgctttgcaaataacatttaactcgtgttctccccagggtgagattctgccaggagcacctgccacagaggccagcattggagcct

SEQ ID NO: 78120 - DNA, 1127 bp, Homo sapiens
tgagaaggtagcaatgtcagcttgagttaaaggcttgtcatttgtaaacagtactcatcagctgaagccttcttccatgacagctaagttgtattcccagagctgaaaatgtgcacctttggggctgcactgtcgccatcttaatgttcttcataaatgaacgccacactttgatgtaatgtaattgctgctcaatagtaaatgcaaagaaatggaagtactctttgctgtgtaggaggttaaaccctcttaggtttacccaaggtcacaccagtattgtaaaatctgggtgagattccccgcccccgcccccgacagtgagcctctcagcaggagccgccctaaagagccagatgccccccaccattcttcctgctggccctggtgggttggcccccacatcccttctccacacccagctgcagcctcacggcaagactactttgttctggggctcccccgacctcggcctgggccctgctgtctctacctgtggggcctacacatgtggacagctacagccagggggtgccacggtcacaccacccaacaaagcaagaaccccccagcagagaatgccctttcaaaggtgccactgaactctatccttggagacaacccctggctccgagggactgggtgtgcggtccagaactgcggtgccctgggctcaaccctggctgaaggcgctgaacacctcccacgaggcacctgcacctttgggtcagcaaagctccaaagaacctgttctcaggtgctgagaaaccactgtctcccccaagggcaaggccagccctgcccgcccttctcttggacggtattgaggccacagtattgcacccagcagggttccaattctctaggaatggaacgcagtgatctggataggaattaaatagatgaagtggagggtttgctcccacactggcttccacatcaacagcaccagttttgaccacgtggagctgctggcggagggcgcgcatggtggctgttgcccgtccggtgttttgctggattaatgtagactgctttgtttgcagggctcattgtcatccccaagccaggccagttctccaggtggaactgtagtgtagcgacctcactgctgcgcgcacagtctcccg

SEQ ID NO: 78121 - DNA, 2187 bp, Homo sapiens
cgaggtcaggagatcgagaccatcctggctaacatggtgaaaccccatctctactaaaaatacaaaaattagccgggcgtggtggcgggcgcctgtagtcccagctactcgggaggctgaggcgggagaatggcgtgaacccgggaggcggagcttgcagtgagccgagattgcgccactgcactccagcctggacaacagagggagactccatctcaaaaaaaaaaaaaaaaaaaaaatctcaggtaaacagtgtgattagctagttcatgtcccatgttcatactcactgtagaaactgtgttatgtgtggtcacaggctttcaatgacgaaaggaggactcggagttgtatggaaacgtgatcctgaagccctgtgcagacgtgcagctgcccacagtggccacagacagctgaggctgtgaggcgaccacagagcccacgccctcctgagccatattcttgaacagcccatctcaagtgtgactggtgagggggcttcaagtaacatggggtgaaaaagacaaaacaattccataccaaccagttcaacccaaatgtacaggacaaactaagccaatttaacagaagataaacaagcggtatattcaagatagttttaatattaacttttgtgaattagaaatatcactcttaaatgatgaaaattactagtgaagtaactattttccccaattgcagaattacaatatttatacatataatacagagttgattgcattggaaacaacagtttattttacgtaaaataaacgtcaacgggtaaaaagggcatcttcacgccgcacctcagagggccatgagtccttacacccatctgcaaagtaactttccaccagcattcaactatttttaagtgcaaacaattttttaaaatctgtgattgcagcgtctgtcttcctgaattacattacgtcagaaagtaacagttttctctatgagtgcattcaaggttgtcttctgaccacctaaggtatagaaaaatcagtgcaaaaacagtgaagcactataacagctgaatttcaggggatttcttgtccaagaaacattttattttacactatgtatatatgtatatattatatatatatgaaatttaattacattgaattttagagtaaaaagcaagaaaactccatttcttattttttactgcagccccaaaagaccggtttaaaatggaaacaacttctttgggtgagcagcgggagcacggcgccgcagagtgagccggtcaccgtccacacggctatcgccgacgtccaccgcctgaggtccgccggctggcacggctcaggcgcagctcggagctcctcctcgtcactccctcgagtccaagtcccgggagactgtgcgcgcagcagtgaggtcgctacactacagttccacctggagaactggcctggcttggggatgacaatgagccctgcaaacaaagcagtctacattaatccagcaaaacaccggacgggcaacagccaccatgcgcgccctccgccagcagctccacgtggtcaaaactggtgctgttgatgtggaagccagtgtgggagcaaaccctccacttcatctatttaattcctatccagatcactgcgttccattcctagagaattggaaccctgctgggtgcaatactgtggcctcaataccgtccaagagaagggcgggcagggctggccttgcccttgggggagacagtggtttctcagcacctgagaacaggttctttggagctttgctgacccaaaggtgcaggtgcctcgtgggaggtgttcagcgccttcagccagggttgagcccagggcaccgcagttctggaccgcacacccagtccctcggagccaggggttgtctccaaggatagagttcagtggcacctttgaaagggcattctctgctggggggttcttgctttgttgggtggtgtgaccgtggcaccccctggctgtagctgtccacatgtgtaggccccacaggtagagacagcagggcccaggccgaggtcgggggagccccagaacaaagtagtcttgccgtgaggctgcagctgggtgtggagaagggatgtgggggccaacccaccagggccagcaggaagaatggtggggggcatctggctctttagggcggctcctgctgagaggctcactgtcgggggcgggg

SEQ ID NO: 78122 - DNA, 1050 bp, Homo sapiens
gagcaacaaacaccgtgtctcaaaacaaacaaacaaacaaaaaaccccaaatgtaaaaccatccttagctcacaagccacccaaaaccaggcgacaggcagatcagggtgtgagaccttggagctagagcaggaggcaggaggcgtgggcaccacagcccgcgagccctttgccgcccgcactgctcagcttgcagtcggcattcttcaggttccccctgaaggtttggcctcccccgtgggactctagtgggcagccactcccttggggtgtctgggacctggtggatgtgtcccagtcacatcttatggtcaagaaattgtattaggcaaaagcagtacaaaagagcctctttcgtttttcctaatttccataaagcagaaagcgttttatgtccaactggcctctgttctgtttcaagaaacagtccctaaagcaagaggaggaccgtcccaagagacgaggaccggcctatgtcatggaactgcccaaactaaagctttcgggagtggtcagactgtcgtcttactccagccccacgctgcagtccgtgcttggatctggaacaaatggaagagtgccggtgctgagacccttgaagtgcatccctgcgagcaagaaggtagcgcggaaccagcttctctgacggcgctgctcttcgacccagcccaggccgccactgaattttgtgtctgtaatttttctttgacagacagatccgcagaaggaccttaagcctgccccgcagcagtgtcgcctgcccaccatagtgcggaaaggcggaagataactgagcagcaccgtcgtctcgacttcggaggcaacaccaagcccgaccgggccaggcctgggtgatctgctgctgagacgccacggagggctggggatgcgcctgcgtccgtttcgcgctggccggggctctgggtgctgccctgcgccctgccgcacccgcggcccgcgcagctgcctaggatgttctgggctaatatacttgtaaaaccaccgcattctagggttttctttcattttcgttaagaatttggggcagga

SEQ ID NO: 78123 - DNA, 1063 bp, Homo sapiens
tgaagagtggtcagggcctcttggggcccacaccgtgctgccttctggtgtatcctccccaaaatgaggatgttagcagctccacggcaggagaaagaggggctggctgtccactttgcggttgatgccaaggctacaggtagtaatccttctagaagagcctggtgtgcggcccttgtaaatggtgtgaacaggatgcattctgagatggtagagcactgtggatgtcacctggcgctggaagtacctgctgaatgtgaatctaagacctgtctgccctgaggtcacctaattccggacctctggacactcctgtttgcctaactgtggaggtgacagtttgatctgaaactgcgagtccctgggtaggcagcgcttctgattcatggagccagctctgttcctggcccagagactgtcaggctgagacagaaaagaaaaaaaaaggctcctgattacagctcaggcagaaaagaagagctagtgacaactcacacagtagacaaattggagacaaagaagccagtaggccgtgtgctctgcgggctctcagtggagctgctccattctcttctccttccccgtaggaaaacagagaagcgggctctgggcagccacagaaaagctggctttccggagcaccctgtggcaccggaaccactcagtaacagctgccagatttccaaggagggcagaaagcaggtactaagcgaaatcggagccggagactgcctagctcagccgggactggatgccctcgggtggcctgtgtctctctcaggaggacgccacctgtggaggctgtggcagaccacattgtcagtcgaggcctgaacagcatgcgagttgatggctccatgtgttgggacatcagggaccccagttctatttgctcaagccctttctgccccagtagctaagaattgatgacgaatatcccatgtgagcaggcccagagaggggatgtttgcatgaacttttgtgtctgtcctgatgaccatatgcaggtgccaggttctatgccaaagcaccgtgcagacatcgcccctcagaacggccctgg

SEQ ID NO: 78124 - DNA, 1007 bp, Homo sapiens
agcgagtcctggccagagtctatcccccttcccgggtttcggcaccagaatgttaggtcatccgagagaaaggaaaaattgacctaaagtcaggcaagcaagtttttattaacctgccaccggccgcttaacagtcagaggaagcagccccaagcttacagattgaggggtttatattggggaagggagtttgagggagttcttcggtatggtcacatcccggggttgtttgctggttaattttgccacatatcaccttgtgatgtttacggtagcagctagatgaacagcaggaacttacagaagggtgtaggtaaagtttgtttatgcttcccacgatctccccttgtgcggtccagatggtttgtaattggtgaggtctgttggctctgccctaacactgaccacagtgccccttctgcccttccagtctgcagcccctctttcctggagtaaatgaactggaccaaatctcaaaaatccacgatgtcatcggcacacccgctcagaagatcctcaccaagttcaaacagtaagtattgtgttctgagagtggatgtggacccactcccctgctaggacctgcagcagggcaagcccctccctgtgcctccctcaaacccctctcaggagctcctttggctgactacaggggttcaagttcacttgagggccagtgagtggctgctcagacagagcccatcactttaagtggtctcaaaggtgagctcttccttgagcatcacagaaagatttgtcacaggctttctgagggctggggagtcaggctgtgttccctgagtaatttaaacaggacttagaagcctttgggtggaaacgttccccaagcacagagcataggtggtgagggctttctgcagccctccacagccctgctggcgggaccgacgcctggaagaggtgttcccggactcttagggtcattctggtgaagctgaggctgggagttgggacttcccagggagggcctgtgggctgaggggcaa

SEQ ID NO: 78125 - DNA, 1096 bp, Homo sapiens
aaggtcttacttttgattcttttgattttaattctggaaaattgatgataaatcatgtgaaacaataaaaagatgatagtatgacacaaaaaagttaattgcggccaggcgcagtggctcaagcctgtaatcccagcacttcgggaggccgaggcgggcggatctcgaggtcaggagttcaagaccagcctggtcaacatagtgaaaccccgtctctactgaaaatacaaaaaaattatcagggtgtagtggtggcgggtgcctgtaattccaactactcgagaggctgaggcaggagaattgcttgaacctgggaggtggaggttgcagtgggcggagatcgtaccaatgcattccagcctgggcgacagtgctacacttcgtcccaaaaaaaaaaagaaaaagctaattgcacctagacattttacaatttaaattactttctattatttatatattcttgttaagtagagaaaaagaataattttaatttttcaaaagaaattgtaaacttaggaccaaaagtgtcaaatggtatatgtgctcatggagggaggaagtggatttccaaactgttaggtgaacatggtcattgtgcagatttaaaacttaataacttaaaacacacactttgaaaattaaaatcaagtaaaattgacatcttctggaacaggggtaaactgtgatgctgggcatgtggtatgacgtcttcaagcacggtagaaagctgcgggcaccaaggcacagccagcccaggtgctgagtacagggcagctgcaggggactgtgccagccacgctaaacggcctctcctgtgaaagaagacatgtggactgtgactgaaagcagttgaactgcttcttgaactgtgatctgtccccctttaaagtggacatctccacataaacaggaaagcctagtggaacactgggttgacgagtgactcctaacattttcataatcagtgtaggctgaaggacagcgtcctggaaggcctccgaggccggctgaggctgtcagaccatgctacttgtgtgacgattgctcagtgctgttcccactgaaaccatagcacatgcgctctgaatgttcacag

SEQ ID NO: 78126 - DNA, 1143 bp, Homo sapiens
ggaggctgaggtgggaggatggcttgagcccaggaggtcgaggctgcaatgagctgattgtaccactgcactccagcctgggcaacagagtgagaccctgtctcaaaaaaaaaaaataataataactcatttgccttaatgaatggctagttcgtagttctctccaccctcgctggaggggcgtgtgctggggatgccgtcattctgcaggctacagtggcagctgtattccttcagttagtgctgagtcacagtgaatgccttggtttatcactgtgttcacttaagtttttaaaattattagtatcatatatgacattccttcttaatgagaatatttggtaaaaattaacttgtaaaaattaccttggtcaggatagctagagcagatgagggaaatgcttttggggcctgctggaattcactaaggggcatataagaaacttctgagtaactcgttaattgtactctattttacttgtttcaaactgtttgaaaacaagaatctgatgggaaccagatagtcttgggcccggaaagtttgttctggagaagcttatggagagtggctaggcagtgctttcctttgcaagggtgtggtctccagcacttcagactactgggcccacactgttgctctgatacctcatgccagcagtaacacccccaactactggcccgggaccaggacggctccctacccctagggctgtgaatagggagtttccaggaggagacccagggaggcaaggaagggtgggcacctgaagaggactcttacctgggactgaaggcatctgagaagcacagattcctggcccgcatgcccgtttgtggctccattaggtctaggttcaggccttgaaatctgctttttttttaaattttattttattgttttttgagacagagtctcactgtgtcacccaggctggagtacagtggcacgatctcagctcactgcaagctccgcctcccaggttcacaccattctcctgcctcagcctcccaagtagctgggattgaaggcgcctgccgccacgcctggctaattttttgtatttttatagagacggggcttcaccgtgttagccaggatggtctcgatctccggacctcgtgatccgcctgcctcagcctccc

SEQ ID NO: 78127 - DNA, 1568 bp, Homo sapiens
cgccaccacacccagcttttgtatttttagtagagatggggtttcaccatgttggccaggctggtctcaaactcctaacctgaagtgatcgaccacctcgggctcccaaagtgttgggattacaggcgtgagccaccacgcctggcctcttttattgttttgcttacccaactccccaacctttttcttctttctgctgataattaattatgtattttcaagacatatctgttttcaacttctagaattttgttcaaagttgggttttgctagtatttttagttaattttatctgaaatactgatttaaaatcaaaacctttactgtttcagcaattacactgtagtatttgatgtgggagtacctaatgtttactagaaatgtttacaaatgaattaaatattggattatattttctgattaaggccagaaaatttattttaaaaacttgctttcttcttcagtgacagaaaatctggttctcttgcactaatatgtgaacttatggacatgaatatttatgagctaatacgaggtacgtagaataatttgaaagctaacctaagatcctcttttaaggcttgtaattcatatatgcttagttattctcaacatcattagtcaccatagtgctgtagttatatataatacacagtacagggtcacttcattcaccaggaggcatttttctgactgctcatctactcagaacatggctgcaaacaagaaaggaagccccaggccctctgggtgcccatgtgatctgggggagagtggcgggaggcagcaggggcagctctgctgcagagcgcctgcagccagccccgccgtgggcatgtgtgtgcaggcccgctggctcaggggcctctctgctccccagatctgctgttgctcgacattctgttccatgcctcttaaggcagagctttccctccaaaatactgccctgcatgtgagggaagctcctaccattttccaggatgctcgttcatttccttttttctgaacaataaagcactgtttaagagagcatgtttgcctgaggtgacctcagtcagggctggtttgagatacttatagaggttgcctgaggggaacaggagaaaaggagaggctggcccacactgagccaattgttcctgggggtctgactaatggttgtgttagatgtcagaacaaatgaaccttgtatatctcactaagaaagcaacatagcaagtgttacattttacaaatcacattatacctagaggacagataaaaaacaactgtcctactgtcacatgagtgactacttatgacttggaaaagaattttagtgacagcatcatagatgatttagatggtgtattatcttacaatttgagccaaactgaagatgatgtgctatggaaaatttttagattgataaactatttttgtgatggaagaagacactgatgttgaagatatatatgaagagttcaaataaaattgtttttatgaagttggatagtggaaaaagcattatatcaatatttattttatatgtgacttaaaatatgtgtgtgatagtaaattactaacaa

SEQ ID NO: 78128 - DNA, 1367 bp, Homo sapiens
taatcataagttttaatgtctacttttatgtttgttaatatgtaaaataaactaccaagtattctttcaggatcttagatgggaaaaattttaacgtatgttctagctataagaaccttgattttttaatgcagcaatgaggtatgcttaacttcagtttctaatgggagaaataaaacctgattaacttgcttgaaatatttgtgagttttaaaattgtgatcctggataataagtaactctaattttgaagttgacctaaactgtgaatgagctatccatttttacctacacgatagtattgagcaagtcaacaacctacgagagatccaagcactgaggcgcctgaatccgcacccaaacattcttatgttgcatgaagtggttttgtaagtatatttggagcttgaaaagttatctaaatttgatgaaaataatctctttttaagaaagaaaaccatggtagacattttgaatatttactttgtagctcagagagtaaccatttttacttcatcttacatcacatttttatttggaaaaatgtgcatctgattcttttttttattattattttttgagaaggagtctctctctctgtcatgcaggctggagtgcagcggcgtgatcttggctcacaacaaactccgcctccctggttcaagccatctcctgcctcagcctcccgagtagctgggatcacaggcacccacaaccacgcccagctaatttttgtatttttagtagagatggggtttcaccatgttggccaggttggtttcaaactcctgacctcaggttatccacccaccttggtctcccaaaatgctgggattacaggcatgagccactgtgcccggccagcatctgattcttaattaatgtggaaatgccttcatttaggtgactccacatcataaaagcatccgtcatgcaaacagttcatctcctggagctcagttaggctgctaaggtcttgagtgtgaattttgacctactgggaaagcactgtttgtgttatttcagggattgtacattctcattctgtccctgccagttgccatttctgaacagtctcctgtagtctttcttactgtaattgataacatttctggggatttttcatttctgttctaattatagaatagtttccataaggcttatctatcattcaaaaaggcagagcacagcttgtccctcggtgcctgcctgagcctgggaagccttcttcctgacagctctgtgctgtgcttacagacctcactgaaccagggagtcaggctacagggttttgggaccttctttgctgtgggctagaatggcactgacactctgagagggtgcacctcagtgtagaagcttcgctg

SEQ ID NO: 78129 - DNA, 1040 bp, Homo sapiens
aggagcttgaggggcctgtggggccgggcgtcgtcgccttctgccgtggctcgacaggcccgggaggctccgcatgtgggccccgaatccccctcggctgtgagaagccggtgcccctgggggaagcttgaggggttggggctaggttgggaactttggggtctcggagagccgactcgagttcccgctcaggcatattttggtgcaggtgcgtggttcttacattggagtttagggagttgactgtgattcattttattttattttaaatgctggcttgaacctgacactcttttcctgaacattcggcagaaaacgggggagcgcttacagcgtggctccctgccttttcatgatactggtttagtgaccaattgagaggaaagctgggctgtgtgctttattttattttttgggtcaagcagtagtgttttataggaaccactttttaatagtagttttgaagcaaccttttagttaaaagctgttacttcaaagttgggaaatgaggtagtcattctagaaaatgtaacgggtaaaaaattttctttagtgggatttgtggattattgacaatccaagtgcaaccagctagaatgatgtttttaaaattattattactgtacagatataattgtttatggttgtgaaccagaggtgcagtaaaaattcagacctttgctgtgaaaatattatgttaggagtagttataatgttaaatttgcattgtatcctaattgtcaatggtgtacattgcataacatttaaaataattaatctcattcaccctttacaaggcatttttatttttattttattttgttggatattgtttaatgtttacctttttcattaatgcactacaaagctgtagttagaatccaaggtctacaaaagactttacacttttacttacagtgcagactatgatactgcacatattttgtactatattcatttttttcttcccatctgtttgttttgaaaattttcagatgtacaggaaagttgcaagagcagtacattgaatatttataaac

SEQ ID NO: 78130 - DNA, 1677 bp, Homo sapiens
ccataccctgctgaatatggccacagctttttgggtttggaatccaaaaatgacatatttttcgtaaagcaaaagcaaacttattcgagcttaggcagcatgatgggattgtattttgtagctaatctaatggagacgatataaattctacctgcaataatatacctttgcagcacattcttttaatactctttcagccccagctgtgtcatggaggccacaaaggcaaaccggatgcgtactttgcccctcagtagtttatgaactaacaggagatgaaacaagacccagataacttctagtcaaggccagaaagctaaagatagtgaaaaagaactgaatgtatttagagaaagggagattgttcctggctgaggacatcagaagcagctttgttgaagaagtggtatctgaactagatttgaaagggtgcgtctgagttgaaaatgcagaaggggagaggcaggttctggggcggttgggggtgcatttcaacaaccacagcagaaggcccagtgttcgctgtgggggtggtgtggatcagcagcacagaccaatggacacacttgggtcagatcgaggcccctgtctctccccatcctccctcttccccaccccacagaaatttccagttccatccaacatgctgtgccccttttcatgcatccgtgcatttacacatggatgtgtgccctttttcacctggcaaaaattcccagccttcaaaatgcccctcagagatcacagcttctgggcagcccaccacctctgggctgttcctgcctcttgattgcacctgttgtaccatgatgacatttttcctgtctgcctcacctgtctgcattccttagggaagcttgtctgccttcagaatcatcagtggagcttttgaaagggcagatcttggggcctcaccccaggagatccgattcagcaggtctgcggggactgaggtatggcaggggaaaccgcccccatctcaagggtgaggttaggacttggctcctgtgtatgtattccacccagaaatactgagttaacattagctgaattaactaaacaaagtatcaagcataatacccacagggtaagccagtgaggatagaggataaatacattattagtctggctttgccgctgtggttatcctcaaacagtagggtttagtgtatgtatgtatatgtattatgtttttgttttggggttttgttgagacagggtctttctttctcacccaggctggactgatctcggctcactacagcctcgaactcccaggctcaaatgatcctcacacctcagcctcccgagtagctggggctacatgtatgcaccatcatgcctggctaatttaaaaatgttttgtagagacagggtcccgctatgttacccaggctggccctgaactcctggcctcaagcagtcctcccgcctcagcatcccaaagcactgcgattacaggtgtgactggcagtaaaatgaaagagatggggttcttgaaggatatgcgcagtcaatctcgttgtcatttgtttcacaagtagcccaggagtcggggactcccagggctatggtgccacctctctacaattcttcatacaaagtgttggctgacctctgctatttgtactagtataacagacagacgagagacacactccagcttgatctcagtga

SEQ ID NO: 78131 - DNA, 1131 bp, Homo sapiens
agggtacagccgcttgtgagaaccgagccacagtcctgcttcctaagtgacttatgccaacctcctgctcaggggtttgtacagagaccactgccagccctccaggtggtccctgcaaagagagtcccagcccccaaggctccagatgaacagggctccatgttgacccctttgtctgcctctgacccgctggcagtaacatctctttcatccagttcagcacatccatttatttccaacttgcatacaagacatactgagaaactaaaaaaatcgttaaaagtaaagacacgttctggacgggtatctcgacctcccaaatataaagctaaagattataagttcataaaaacagaggatctggcggatggtcatctgtcagattctgatgattactcagaactctgtgtggaagaagatgaagatcagagggagaggcacgcactctttgacttatcgagctgctccctgaggcccaaaagctttaagtgtcagacttgtgaaaagtcatatatagggaaggggggactggcccgacattttaaacttaacccaggccacggccagttggaccccgagatggtgctgtctgagaaagccagtggaagcaccctccgggggtgcacggaggaaaggacgctcagcctgacctccctggggctgtccatgccagcggatccatgtgagggaggggcccgctcctgcttggtgacagagtcagcacgcggtggcctgcaggtaatgtttctgtctgggtatgtgtctttttatttggccgttctcggattgctataaagaaatacctgagaccaggtattttataaagaaaagagggttggctcacggttccatagactgtacaggaagcatggtgctggcatctgtttagcttctggggaggcctcgggaaacagagtcacggtgaaggcagagtgggagcaggcgcctcatatggccacagcaggaacaaggggcagggggaggtaccacacactcatttattttttttgagatggatcctcgctctgtcatccaggctggagcacagtggcctgatcttggctcactgcaacctccgcctccccagttcaagtgattctcctgcctcagcctcgcaagtagctgggatta

SEQ ID NO: 78132 - DNA, 1011 bp, Homo sapiens
cccagtgttctgtcattccagattcattccctgcgagtcttgaggtcttcagggttttctagagtgccttgttaaaatggagagccacaggccaggtgcagtggctcacgcctataatcccagcactttgggaggccgaggtgggcggatcacctgacgtcgggaattcgagaccagcctggccaacatggcaaaaccccgtctctactaaaaatacaaaaaaaactagctgggtgtggtggcgtgtgcctgtaatcccagctacttcggaggctgaggcaggagaattgcttgaacctgggaggcaggaggttgcagtgagccgagattgcaccactgcactccagcctgggtaacagagtgagactccatctcaaaaaaaaaaggagagccaccaaatggtagtaaacaggctataccaggagggtcccaagaggttaggctgagacgggtcccaggacacatccatctatggcttggctttcatgagacttcgctgtacatgccagctgagatttaacatttgaaaacaagacaggtcctggcttttattctggctctagccagaacctatcaactaggcacttaaaaaattatatatataaattttttttttgagacgggagtcgcactttgtcacccaggctggagtgcagtggcacaatctcggctcactgcaacctctgcctcctgggttcaagcaattctactgactcagcctccccagtagctgggattacaggcacccgccatcatgcccggctaatttttttttgtatttttgtagagatggggttttaccattttggtcaggctggtctgaaactcctgactgcaggtgatctgcccacctcggcctcccaaagtgctgggattacaggcatgagccactacgccagcctttttttttttttttgagatggagtcttgctctgtcacccaggctggagtgcaatggcatgatctctgctcactgcaacctctgcctcccaggctcaagcaattctcctg

SEQ ID NO: 78133 - DNA, 1102 bp, Homo sapiens
aaaaaagcacactgtcgattggctcttagagcatatttttaatacaaaatctgtctttgtgaatagagaatagggacgtattttttaaaattgctaccaatcccaaggagcaaggagcatcgatgctttgacttttctgcagggcaggtgacttggcctagctggttttgggtggtgagtgcagtgagtgggccatgacacagtacacgccatgttcacctgtttcccaaaatgtttaggtttttcccctccagtaaatgtgactgtctctccccgttctgaagaaagccatacaacgacggtttctggtggcaatgggagcgtgttccaggcgggcccgcagcttcaggcactggctaacttagaagccaggagggggtctataggtgctgctctctcatcccgggatgtcagtgggctgcctgtttatgctcagtcaggagagcctaggaggctgacccaggcacaggtggcagcgtttcctggagagaatgctttggaacactcttcagaccaggacacctgggacagcctgaggagcccgggtttctgcagccctttgtcatctggtggtggagcagagtccctgccgcctggggggcctggacatgcagaggcaggacacctcggcaaggtttgtgacttccacctgaaccaccagcagcccagccccaccagcgtcctgcctacagaggtggcagcccctccgcttgagaaaattttgtctgtggatagcgtggcagtggactgtgcctacaggactgtgcccaagccagggcctcagcctggcccacatggatcactattgactgaagggtgtctcagaagcctttcgggggacttgaaccggttcccctgtgggatggaggtgcactctggccagagagaactggagagcgtggttgctgtcggcgaagccatggcttttgaaatttccaatgggagccatgagttactgtctcagggacagaagcagatttttattcagacttccgatgggcttatcttgtcccctccaggtacaatagtgtctcaggaggaggacattgtcacagtgactgatgcagaggggcgtgcctgcggatgggcccgctagaaggag

SEQ ID NO: 78134 - DNA, 1048 bp, Homo sapiens
gttttttaattaaaacaaaaaacaaaagaaaaacctcaacaaaccaaaaaaactcctttcttcctttccccccctcaaaatgagagatatctgcttccacagaggaggtggaattcactctgcccattggttttagaggcctaataacagcagcttgcttcacgggtctctatgtttcatatactctgctgataaccaggtaattaaagccaagaagaaatgtttaagatgcctctgtctcctttcctcccgatacttttgcattgaatttgaaagccttgtcagcttcttaaagtaccagatgtaaacgatactaaatgcccttaataacctttaccctcctgaaaatcaactgagaaggaactacttacagaaatgggttgtaggccacgtgtggaacagagggggtcgtttactctcctccccataatggtagttttctagttcacaaattcccttggtagttgaagacagcttttccattttcacctgtattttggtctgaaagatatccatttggaatatgataatattatttgaaatctccagtctcagatttaataactctaagatttcaaagctaagaagtgtaagtctattatgataaaaattccaataactaaacactgttaactctacgtacagcaaattcccagggagatgaaggtggacagttgctatgatttcattaatttgaatgactttggtaataaaccccagatttccagtcctagagcaagaaaggtttccgagtgccatttcactaggatttccaaacagcattaatgtcttagacccaaagacctggaggaatcccaaggcaggctcttgctgcctttttttttttttctttttttttttgcgacagggtctcattctgtgtggcatgatcatgccttatgcagcctcaaccgctggcacctcagcctcccaagtagctgggatcacaggtgtgcaccaccacacccagctaattttttttaatttgtggagacagggtctcgttatgttgcccaggctggtctctaactcctgggctccagcaatc

SEQ ID NO: 78135 - DNA, 1053 bp, Homo sapiens
atcagcttttcttagaatcaggtggcaccagggagctgctgcaggactcacaggaaagagcagaggattgggtgttaaaacttggtgtcggctgggcgcggtggctcacgcctggaatcccaacactttgggaggctgaggtgggcggatcacaaggtcaggagatcgagaccatcctggctaacacagtgaaaccccagctctgctaaaagtaccaaaaaaattagccaggcacagtggcgggcgcctgtagtcccagctacttgggaggctgaggcaggagaatggcatgaacccgggaggcggaggttgcagtgagcggagatcgcgccactgcactccagcctgggtgacaaagcgagactctgtctcaaaaaaaacaaaaacaaaaacaaaaacaaaaaaacttggtgtcagaaggcatggtatcgagttctggcctcatccttcctcagctcaaccttaagcaatttcccagctgtgaaacggaaatgacaagtcctgcctcttggggttgggccaaataaaatatcaaaccttaaaagatttgggaaactacttaagtaaagtcctttaaaaattaacgttagctgaatttagtgcttgccacttccaatgtaattggagggtggttggaaggaccaagtaaaggaattaagatatttgacaatttatatatcttttcttatttcccctttttcatatttatgtatgtaaagtcaactatacttaggagttcaaaatttggtctttatagacctatgctacttaaatctgaaatcctagttacttcacccattaattttctttatccaacccttatatatctccaagtaggtgcttcacaaatactaactcacttaatcctcttcaccaagctgtgaaagtaagcccgccattgcccctattctgtgctgcctggtgtgtgcagtggggttggtttagtgtctcccacaagtagccatacacatcatgcagttacagggcttaggacagagcctggtccacactgagggaccgtcaatggcagcttgccacgtttccttcctttct

SEQ ID NO: 78136 - DNA, 1055 bp, Homo sapiens
ggctgcaggactttgtgttttctcacacccagctataatgtaccttgataaacctctgaccttatttttgttgttgttgttgttaacctgacttacgtcccatattggtggttatttggccatcgtgtgccagcactgtgccaggctggctctagggatgctgtggtgaaccagacagacccttcctgaggtcactgcctcagaaagatcatggtctggcccatgaactttaaaagggagaactaagtgcaggtgtaggggacacacaaattgaattttcaggactgccttggaaaaccagtggtggggaagatggaatgaggataaccctcttctgaaggagtgactaggaagtagcttttgttaggcatcagctatattatacccacgtgtctttttcaatagaagactggcatctactggatttttttttccaattttttcttaaagaagttacacttaagtttggggagaatttcatttcatattagccgctgtaggagttgaaaaaaatggctactggaacttagtgggaagaaaaggaaggaaacaggcatcaggcagaggcagttgattgaacttgggaagatgaggaatagatcaggaaagggttataatgaaaagctttggtgtcaagcacgaagagatttctagattcagtaatgcacagagagatcagtaaaattagaagggagtagttgatggctttgcgaattgctaaggtagaagggagctgttactcaagatgcatgttcaatttaaaatgaatgtattctttggacctggacataagagttctattgactttttgccactattttatatttagggctgtcatacttgggtgaatctagcacagtgctttgagagagagattcattcaacaaacgtgtattgagcattgattgtaccatactctttattggtcttttaaagcaccacaaagtatacagactagaagaacataggtgaagatgagaaagagtccattgaaggggagagaaaacagataatgatggtgctgtgcgataactgccatcatggagttctgtgaa

SEQ ID NO: 78137 - DNA, 1162 bp, Homo sapiens
tcaccatctcattaacacagccagcatatctgcatctgagattggcccactattctcctaatagagtgtctttcctgtttctcttttccatatcctgtccaacctggtgggcttcatagttcaggatgtgttcagtgaagccatgtctacactcactctaatccccactgatctctctctcctcatgaaaacccacaaattatcacctcattacttgtggatttgtgtcttttcactatttcatctgcctccctgtctagatcataagctacttgggagtaagaactgttttgttttttgtattctttccactcctccatggcattcactacaacataaatcatagaggtcagaacatactgaagtgcattttgagttaaaatgctcaaaagtgatcttagtgacacgtgtttactttccctgtttatttaagctccagctataatgtttacctgcctaaaagttccatgttgccagtattaaacatacttctttttgccatgactaggcattgaaaggattgtaatgctttgttctgtagcccccaggtttccctagatgacaaataaacattccttttcctgcgtgaagatagtctgtggaaaccttggccatggcatcgatatcagagcctgttacattcagagagttctgcccgttgtactatctcctcaatgccattccgacaaagatccagaagggtttccgctctatcgtggtctatctcacggccctcgacaccaacggggactacatcgcggtgggcagcagcatcggcatgctctatctgtactgccggcacctcaaccagatgaggaagtacaactttgaggtgagccttgctttgcttttcacctgagggggcacgagccatagctgacgcttaacatgcttgtgttctaggatgagataatttacttctgatttgccagaatatggccttaatacctcacccaaacaatactttaaaaccatctttagctgaagtggaatataactaaaaacattggtgtttttaactttttcctgcctccaaaaatctaacatcactttatttatttatttgagacagcgtctcgctctgttgtccagcctagagtgcagtgggacaatcatagctcattgtagcctcaaactcctggggtcaagtgatccttttgct

SEQ ID NO: 78138 - DNA, 1015 bp, Homo sapiens
gctttgcttggaaagagaataaattcaaactctgatgctgaatggggcaggcttatgatgacacattcttcggaaagattcttttttattcgttccaatcaatgcttgagataagacagatttccttgccagctccatttgccagcaaatcaatttttccctagcttactccttcacttagggttaggtccttgggattctggcttggcagagaatatcagctccagctccccatcatctactccgctctgaaaaccaaggctccagaggtgtgccagatagttacagggtagcctgtagcttcagggctagcttctgttttagtttgggggcattcttcttggttttggggtcctgtggattttccatactttcttgaaaattcagctgtgcatttgaaaggctttgttatatattgcactcagcattgccaggtgtttggagaggggtgttttgggatagctaggctattgtattgtgcaaaattaaagcctcatattctatttctatatgaactgtagttaagtgttaataatctgatgtctgggatgttttgattcttacatcaataactatgacatttattaataatcatattaaataacattaactcaagctcattggttacattacaaaggacactgatacattacaaagcacacatacaagcactgcacaccagtattgaggcttccagccccctctacatgatcatttatttatttatttatttttgagacggagtctcactctgttgcccagactggagtgcagtggcatgatcttggctcactgcaacctccgcctcccaggctcaagcgattctcctgcctcagcctcccaagtagctgagattacaggtgcgcaccactaccacctggctaatttttgtacttttagtagagatggggtttctccatgtgggccaggctggtatcgaactcctgacttcaaatgatccacccgcctcggcctcccaaagtgctgggattataggcatgagccaccgcgcctg

SEQ ID NO: 78139 - DNA, 1049 bp, Homo sapiens
ggatcactggagtccaggagtttgagaccagcctaggcaacatagcaagatcctgtctctacaaaaaataaaaaattagctgggtgtggtggcacacacttgtattcccagctacttgtaggggctgaggtgggaggatcacttgagcctgagaggtcaaggctgcagtgagccatgatcgggccactgcactcagcctgggtgacagagcgagaccctgtctcaaaacaaaccaaaaaacaaattagttaacctgtctggagctcagtcccatatttgtaaaatgtggctaactacagcaccttcccttatagaaagctgtttgaggatccagttatgcatttaaagggcttaacacattacctggcacaggaaaacaaagacaagctgctgtcctgttttctttgttgctgccatccttctcacaaggtctcgacggagtctgtcttcatcacgatttcactgccctcatgcctgttctgtttaccccttttctagactgggcccttacttaccttagcctgagctattgtgaaacactcccagcggcttcctgacttgccccactccctccttccgccgtcctgtcctgctcctaatcgtgtttgtcagaaatgcctctgactgatacactggcaaaatcagaaatcttcaagggatccccctttttcttgctgtagcttaagatctaaatctcttaacctagatcacgatctgacactagatatatttatagtccatgaaaataccctgaaagctttcaagtaccagatgaaagtgagctccttcattaccacctcaactcactgtaggcggcttttcatgtgcaacagctaagctttaagagggctgggactgtgacctactttattttgtattgttatagcagctcacttggtacccagagcaaggaggtatatttgtttcttgcatatttggcaggttgattactatataaattactctattgaagattaaaatggtttactgaagatgtcgccatatatcttagcaaggtcaaaacagttgtgtaatttttctgaatgaat

SEQ ID NO: 78140 - DNA, 1022 bp, Homo sapiens
aaaaaaaatgctcagagaagcttaacactgtgctgtttataattggagaacatttttgtgctgggttggacacttggcataaagtacatgtgggtcatttcatttttgcttaatattctcaaggtatgctctctgtgggttttgaaggtgactagacagatggaactttgtgcagggttctgcttggaaaacgagattgggaaaaccagctcttccctaactaggagtgattgtataccttttccatgtagccccagctcacagcatttatcctttttttttcttgtgtatatttttatcccttgttcatagcttcggagatttgatgtcactggtattcacaaaaatagcattacagctctggcttggagccccaatggaatgaaattgttctctggagatgacaaaggcaaaattgtttattcttctctggatctagaccaggtaaaattattttcagaaatactgttggctcttaccttcttacatttggaaaaactatatttataacttgtatttttagtcaacttgtattcttgatcatcatccctttataatctcaattgttatttgtaacatttacttttatagacttatgttttataagcttccacttctatgactaaggagttggcctactggaacattcacttttttcattccactgttgtgtattacttttacttgaaaaagaagctattatcattcctacttccttgaaaggttagtaggagtgatgccaagcacttctgaatcctaactgtggacaagtcagtgatttcaatggatggaggactctgccagccacctggcctgtgtgagatgacctcatgtgacaggaagtggcagaggaggttaggtggcagtatggtgaagatgaagaaactggagtgccaagagatccaggaactagtccaggggtgcaggcttgcacctcacagagcttgctttcaaactgtgcttctgcttcgacgcccgtgccttttccactgcacgtatggcttgatgatctgctgggtttt

SEQ ID NO: 78141 - DNA, 1046 bp, Homo sapiens
atggtttgttgttgttgtttttgaagcagagtcttgctctgtcacccaggttggagtacagtagtggcactatctcagctcactgcaaactctgcctcccaggttcaagcgattctcctgcctcagcctcccgagtagctgggactacaggcatgcgccaccatgcctggctaatttttgtatttttagtagaggcatggtttcaccatgttggccaggctagtctcaaactcttgacctcagatgatctgccgtcttggcctcccaaagtgctgagattgcaggcatgatgcatccagcctgaatacaatgttatgtgatgcgtgactgtatctgccactcatggttgttgtaaggattagacacgagagtgggatcaagtgccaggcacagtgcaggctgtgtgagtactcagtgaatggttccctgtgtgctaatggggcacacacctgtgagggtgtggtcgggcctctgttggtacagggatgacagtgtggtttgacaaaaaacaaacagtagaaagggtgaaaaatcaattattgtcttagccaaaaaattcttgttgtacttaatattaagggttgacaactgcattactttaaatcagtccatgtctgttttttgttctttctttctttcttctaattttagtactgggaaatttggtgcttgttttataccaggactctgtaagcaaagtgatctaaccttgtatgcgtcacggcccgggctccggctatggaaggctgatgtccacgggactgttcaagccacgtttatcttaaaagatgcttttgccgggggagtcaagccttttgaactgcacccgcgtctggaatcccccaacagtggaagttgcagcttacctgagaggcacctggggcttgtttcatgtttctttcaagaaggctgggtgctgagttggaatgaatatagtatctatctcctagacacagtcaaccaggtaagtgaagggacgccaccatatcttctgtgtctataggcaagagaatgtatctctataaactgttctactcagggacctc

SEQ ID NO: 78142 - DNA, 1040 bp, Homo sapiens
tgcaccactgcactccagcctggatgacagagtgagacctcatctcaaaaacaaaaccaaaaacttaccattattttgctaaactattgcaactttatttgaacttggaggatttggagggtttcctctgattctttttttttttttttgagatggagtttcgctcttgttgcccaggctagagtgcaatgaggcgatctcagctcaccgcaacctctgcctcccaggttcaagctattctcctgcctcagcctcctgagtagctgggattacaggcatgcgccattatgccaggctaattttgtatttttagtagagacagggtttctccatgttggtcaggcaggtctcaaactcccgacctcaggcgatccgcctgcctccgcctcccaaagtgctgggattaaaggcgtgagccactgtgcccggccgctcctctgattgttaaaatagcatttacagtacatttcttgaaagtcacctactttaaggcttacatcagatagtctcacatttagtggagttgctttcatggttgtggaagatggggagattgagaaaggaggaaggaaaaatcagaaaccactttactgatccctgctctccgtctgagacagtatgtgggattaatgctccaaaagacatagatttgcatagagttttagaatatttaaatctgtcatctgggacataccgtttacccttaactcagttcttccttgtaggatttatttttctctgtgcttttgacattttttggtaattcatacaagcccaaattttaatgagcaaagaatcctaatatgtgtcctcttgcggacatccacatgctttatatatttgggttcctcggggaacttgttcctcatggtggcaacaacagccatgtggaccccatcaccctcctcctcactaccattacctctgatgtcagagagggcaaattggggtgaatattccaaaacataatttgtataagaagtgaataagctctgactcttgagtttatgagctgggggcccctcagacagtgtcatcaa

SEQ ID NO: 78143 - DNA, 1025 bp, Homo sapiens
acccaggctggtctcgaactcctgagctcaggcagtcctcccaccttagcctcccaaagtgatgggattacaggcatgagccaccgcgcccagcctaaattttgttcaattttgatcaatttgaatttcaatacttacaagtagctggtggctgcctattggacagggagctctaggcaagatctgccattaagttatgtaatcttcagcaagtcgcttcacagcagagtcctcccctccagtctccagtgtacacttcattgcctgcagtctgcccctaacacatgccctcaatagaatgtgggtgcttcaagggcaggaattcctgtgtcttatggactgccatgtcccagcagctagccctgtgtctggcacacggaggatccccgataaagagaggatggcgaatggatcaaagtgggctgtggtcttgtgttgagggtactgtagctggaactgctctggccttgtgccctgtggtgtcgtgttgcagaaaagatgagtccactgcagtgggaagctcactggcccttgggcttggggacaggagacaggtactcacatgcctgttctcactctgcggtctactggccttgatgctgtgtggtaatggacttctctgtcttgagtttgttctaatggaaaattacctttccctcttccaggaaacttaattacaggtacacatgtatttttcaaatgccctttgagtaatcttaaagtatattcaaggcagagtcttagtatgaagtataactaagctgttttgttatacacaggcatctctcatttgtaaataatttgtaaattgaagcgagaaatgctgtattcttagtatttttttacttttttttttttttttttgagacaggtttcactctgtcgtgcaggctggagtgcagtggcatgatctcagctcactgcaacctccacctcccaggctcaaatgattctcccacctcagcctcccaagtagctgggactatgggcgtgcaccaccacaccctgctaaattttgagactcc

SEQ ID NO: 78144 - DNA, 2631 bp, Homo sapiens
ttacaggtgcccactaccacgcccagctaagtttttgtatttttagtagaggcaggggtttaccatgttggacaggctggtcttgaactcctgacctaaggtggcccacccgcctcggcctcccaaagtgctaggatggcttatgagcgtgaaccaccgtgcacagcccagatttcattctttgttatggctgtgtaacactgaatttttcaaaccttttactccttggttcctgttaatcctctctagctaagatgactgcaacactgaaggaaatgttattagatttctaagcattttaataattataaggaattggtttgtgacccaggtgaacatctcagtttgtcccctggtttttcttagctgccctcaaacccatggatttgttcagtacttgcatgcatagaaagcatctctttgttgggattatttgtacttaagaggtttattcttcattcaccaaatatcctttatttaaaattttttttcttgagccaaaaatatgtgtgcaagttagtctcttactaatcatatagaaccgtgccttattttgaatgttcttattctgaattagaaggtggaagcaggagcacctgtcacagctccctggaatcgacaccctgctccgaatttcctggggacagtccccagtccttgaacacagacttgctgtcgatgacctcaagtgtcctgggcagtagcgtggatcagttaagtgcagagtctccagaccaggaaagcagcttcaatggtgaagtgaacggtgtcccacaggaaaatactgaccccgaaacgtttaatgtcctggaggtgtcaggatcaatgcctgattctctggctgaggaagatgacattagaactgaaatgccacactgtcaccatgcacatgggcgggagctgctcaatggagcgagggaagatgtgggaggcagtgatgtcacgggactcggagatgagccgtgtcctgcagatgatggaccaaatagcacacagttacccttccaagaacaggacagctctcctggggcgcatgatggggaagacatccaacccattggcccccaaagcactttttgtgaagtccccctcctgaactcactcactgtgccttccagcctcagctgggccccaagtgctgaacagtggctgcctgggaccagagctgatgaaggcagccccgtggagcccagccaagagcaggacatcctaaccagcatggaggcctctggccacctcagcacaaatctctggcatgctgtcactgatgatgacacaggtcagaaagaaatacccatttctgaacgtgtcttggggagtgtgggaggacagctgactccggtctctgccttggcagccagcactcacaagccctggcttgagcagcctccacgggatcagacattgacgtccagcgatgaggaggacatctatgcccacgggcttccttcttcatcctcagagacgagtgtgacagagctcggacctagttgctcccagcaggacctgagccggctgggtgcagaggacgccgggctgctcaagccagatcaggtatgtgggttcgggtggtgggaaaagtagctgaggcttctttcttaagggtaataattgtcaagactgattattttccttctcatggaaagaaattctattcctactgcaaaatccgtaggccaactctgttttcaagtctgggtttcaggggatttccagcacagggactatgaatggcttgaactacttctgacctgttctaccctgctcagtaacctgcctccccaaccaaggtagcgtcttgctgtttcctctgaccccacaagtgcaggctggtgtaggcacttactgttagccatcgtagggcagggctgaattggcctggggccatctcagaaaaccagtgggcagaggactgtccacctgtggagtagagaaagctctgagcagtttggaggcagggagtctcctgtccttctcctcacacccctccaaggaaccatctgcaagagcacgaggccatttccagaactgctgtctcctcaacctccgaacagtggctccaaggctcccctgcgagctgtacaggaaccagtttggagtaaccagtctttgtaggtccacccagcacatgtaactaggagatgacttttaactgtccttgagcattttatattaaaagtgatttttttaaaagtgcctacttcccttagcaagtaattattactagatatatttgtttcaaaactgtgtcttgccctgtctcctactaactgtcgatgtgaggtatgaattatggctgcgcacttacagccacgtgtgctttccacagtctacgctggcttctgtcagtgctagcagtgtgacgctttgtcagtgctcaccatgtgcaggtatcccacaaagcactttagaggtttaactcttttacttctctaaacacgaactataaaataggcactcttcttgtccccattttacagaggagaaaatggaagcacagaacagctagacagcttgcacaaggtcacatagcaaatgaagggcgggccccaggaccccctcactcaccctctgtgctgtcatgcctcagaagtgaaacatgctgcttacttgttttgagacaaaacgcca

SEQ ID NO: 78145 - DNA, 1063 bp, Homo sapiens
cagacatcttagtacagggctcccctgcagcagctctgggctcacgctgccgtgcgttcaccaggtttgcctcttcaggaacgtttgaggggttgtctccaaagaacgtgaattgcttcattggatgtcaattcgtagtgtaaatgggtgttcagtttgagtttttgttttctttattaattgcaatggtaagctctgatcgtatttttgtaagctagacaaaaagtttgaaaattgagggacttttttagggatattaatatactaactcttcataaaaataatacgtgtttctctttctcattgttgctttaaagcaaccgaactaacgaagacgggcctatggatatgttagatatattccaattatttggcttcctctttaggaattctgttttaatgagctctctgctgtgggtgaacagtctactccctgactctaaaaggaaagtccattcattctttcatgctgctgttaggccattgttagtgaactggagctggtgtttcctgaacgatgttctcctgagctggaagacctcccatatctgcatggaatcatttgcttgctttttctttctttctttcttttttttttttttttgagacagagtcttgctgtgttgcccaggctggagtgcagtggtacaatctcagctcactgcgagctccacctcccaggttcgcactattctcctgcctcagcctccccagtagctgggactacaggcacccgccaccacgcccagctaatttttttgtatttttttagtggacacggggtttcactgtggtagccaggatggtcttgatctcctgacctcatgatccgcccgcctcagcctcccaaaatgctgggattacaggtgagagccactacgcccggctttgcttgttttttcttaaggttgtgttggccacgtcggcacctacgccagtggggacacttttgccttgaagcagcctggtttactgtcaggacattggaatagaagtcagacgaagccgaagctgagtctgtggcttgggacctgtctgttctctgtaacttcactgtgtttcg

SEQ ID NO: 78146 - DNA, 2545 bp, Homo sapiens
gagtagagagatggaggcactcaggggccttggattggcgggggaaggagtagagagatggaggcactcaggggccttggattggtaggggaaggagtagagagatggaggcgctcaggggccttggattccttttgtgcctactcgcttttttcttaggttattttctctcttaagagtgttcccagccattctgggtcatcagtgtgtctttcaaaagctgccacccacttgaaccatatctcttgcacagtaatttaactcagacccaaacttccttccctggcacctgctgatccgctccagggccacgtctcttctcccagccacgcctgccgggagaccctggatgtccgcagtccagacacactgggcactctgcctatgggtgctgacccccctgttctcctccttattttcagcgaaaggcaagctttagaacccgtctgcataacgctcggggatcagcagactctctgggccctggacatccatgggaacctgtggttcagaactggcattatttccaagaagccccaaggagatgacgaccattggtggcaagtaggtgttcagctctgcgccacgtgccgaggtctcccgaccttttctgcttccccttttcttacttctctcttttccttaacgatactagattaaatttaaaatactcacttttttattatttgtttgtttgttttgaaacaagatctccttccgtcatccaggcggaagggcagtggtgcagtcacggctcactgcagtcttgacttcctgggctcaggtgattctcccacctcagcctcccaggtagctgggactacaggcgtgtgccaccatgcctggctagttttttgtatttgtttgtagagacagggttttggcatgttgtgcaggctggtctcaaactcctgagctcaagagatccacccagactgggcagagtggctcacacctgtaatcccagcaatttgagaggccaaggcaggcagatcactcgagtccaggagttcaaagccagcctgggcaacatggtgaaaccctgtctctaccaaaaatacaaaaattagttggacatggtggcacacgccgttggtcccaactactcggaaggctgaggtgggagaatagtttgagcccaggagacaaaggtttcagccaagatcacaccaccacactccaacctgggcaacagagctagaccctgtctcaaaataaataaaaataaaaaagagagagagagagaaatccaccctctccgcctcccaaagtgctgggattacaagtggagccaccactcccagccaatagtattccttttttctatttgatggattagactttgctgtgtttgagtgcattagaaacataaaggacttttcatcataggaaataatttgcaaactctttgtgtaaataatgcacttaatttatttattttgatattgtttatatatttattattataggctaaataaacccagtgacatccatttgaagacctaggtaataatgatgtttaattatgaacaaatgtgctgagaaaagagcccagataataggtttgaaagcccaacccagaattaaaattgagctgtctctgcttattcagaaggcctctaagtagatggtatttcagcaaagacaggagaattttcccacgtgcttccagaaaaggaaacactataagaaacaggatgagggtataatcaagctcactgtgtgtgatttggtcccagcaagagcgcctagaatgaatttctcttttctttttcttttctttttttctggggcagagtctcactcttttgcccacactggagtgtggtggcaggatcacgacccacctcagcctcccaagtagctgggaccacaggcacatgccaccatgcctggctaattattttggtagagacaaggtcttgctgttacccaggctggtctcgaactccttggctcaagcaatcctcccaccttgacctcccaaagcgctgggattacaggtgtgaaccaccaccctcggccctagaatggattttcaaaggagtgtctactttccccttctttggtatagtttagtgttagtgttgctcccacagtctcccactgtggtaggtaagatttcactgatagtcgatggtcgtgaaatatttgatgtttcttttttttgagacggagtcttgctctgtcacccagtctggagtacaatggcgcaatctcggctcactgcaacctccgcctcctgggttcaagcgattctcctgcctcagcctcctgggtagctgggactacaggcacgcaccaccaggcccagctaatttgtgtatttttggtagagacagggtttcaccatgttggccaggttggtctcaatgtcttgaccttgtgatctgcctgcctcagcctcccaaagtgctgggattataggcgtgaaccaccgcgcccggccagtatttgatgtttctgaagtatcttgccccattggtttatgttttattgtcacctcagacttgctttgttgaaggcttgtcttgcattgactgct

SEQ ID NO: 78147 - DNA, 1265 bp, Homo sapiens
ctacaccgctcctgcccgtgtgggaatgggcaggtgagtgagctggcatctgtggccaggtggctagcgtctgctgaaaggcaaaggctgccttgtgcatttagggcaggcggcttggtgcagacaacacctcgatgacaaacatgacccctttctgcaggaagcttcctgtggctgtgccagagcagcaaggacctgtgcagcgtcagcgcccagagcgcacagtcgcggccctccacggtgcagctgcctcccgaagccgagatgcgcgcctatgccgcctgccaggatgcgctgtgggcgctggacagcctcggccaggtgttcatcaggacgctctccaagagctgccccacgggcatgcactggaccaggctggacctctcccagctaggtacggccacctcgtgagtacacctgccggtgccctgactgccctaaaccggcatcacaacgtgatgtcggacaaaactgcccggcctgtgtccaacctgtgagagttctgagggggtgtttataagctgctgaatttcaggagctcagttggccactctttcagactagacaggctctgggttttgtcccttcccctgccccttagagtttgcagggctgtcagaacccgaggagggtgtgcgtcctcaggtcaaggggccactcgctgcgagcggcttgaaggatactggtgatgcagctgccccgtcagtctttctgaatatggaacatagctttatgacctgaaaagctgaaaagatgggtgttccctatgacaggatcagtgccacgtttgtctatctcctcaggacagtacctggcggaggagagtggctcagcacacaggtgctagctctccttcagctcagccagatataggaggacctgcatccactagctcctgcttttctctgaatcttctatcaaaagccgtggagtaggctaagaaatgtagtgctatttgtaggccgggcgcagtggctcacacttgtcatcccagcactttaggaggctgaggtgggtggatcacctgagatcaagagttcgagaccagcctggccaacatggtgacaccctgtctctactaaaaatacaaaaaaaaattaggtgggcgtggcagtgcacgcctgtagtctcagctactcaggaggctgaggcaggagaattgcttgaacccgggaggcgggggttgcagtgagccgagatcatgccattgcactccagcccaggcaacagagcgagattctgtttcaaaaaaaaaaaaagaagaa

SEQ ID NO: 78148 - DNA, 1091 bp, Homo sapiens
ctgggtgacagagcaagactctgtctcaaaaaaaaaaaattaaattttaatttcaaggatgaggatgactttagcgaagtatcaaataatgaacatgatttctacctttaatttttttttttttttgagacggagtctcgctctgtcgcccaggctggagtgcagtggcacgatctccgctcactgcaagctccacctcccagcttcacgccatcctcctgcctcagcctcctgagtagctgggactacaggcacccactgccatgcccagctaatttttttgtatttttagtagagatggggcttcaccgtgttagccaggatggtctcgatctcctgatcttgtgatccacccgcctcagcctcccaaagtgctgggattacaggtgtgagccactgcgcccagcctcaattttttttttttaaatacagcttccctcttctttctacccctatacaaattaccagagcaattactgctataggattaaattaaaggaattcttaaattaaatggttggctgctgaaccaagttgtagcagttgaatatggaattttgtagtgatttattataatcctagtttttggaagaaaatttgcatcacttagcagatatttaagatgcttgtaacatttcatttcccagtacacataaatatgcattatgtcaggcattggaatgtttagcaaactaatgaaatttgtaatttaatttatcaggtcacagcatttaatgaagaactattcagtgtcagtttatgccgttaggtaacaaacaggattgtgttacgcagtaatttatacagaaaagtattttataaataaaatgtcaaataaatgccactttttgttttaaaatgatatgtttaagaaataatcctaaagggaaaatgtctgctttgtcgaataaagtaattaaagcatttttttaaaacaagagaaaaaaataaggacaaagcagggacagacaggaaaatgtcagtgtgtttgcatcagccaggctgggctgtgcttcggtagcaagccccagatatcagcgacttcacacagtgaaccgtggcccccgctccacgaagctggccctgcatct

SEQ ID NO: 78149 - DNA, 1599 bp, Homo sapiens
gtttaattctaattaagatcaagattatctgtaaatacgagttccctctctccaaatctagaatttgctggcattagtcacatgtctgaggaagctgacgatgggacccacattgagatactaatcccagggctcggtggttcagggcactgtactgacagcatcttgactgctttgcctgttgcctggaaggggtgccgtgtggcgcctggcaggtggcagagtggccagaggccattattactctcttgagttacggtgttctcaagcccagctgagtccacacagccgatgtggatggactaggacagatccgatgacttagtgtccaagttcaattgcaaatgcagcctcatttctttctttgaagtagaaaatcaaagttcatagattagatgaaagaatagtcattgtacaaaagtaattatagtgtgtgtacttttctttatctacaggagctgtaaaattgacaagcttggcatgtggaaatcagcacatctgggcctgtgattccaggggtggagtttacttccgtgtagggactcagcctctcaatcccagtctcatgcttccagcctggataatgattgagccacctgtccaggtaagcagaagttagctggtggaactcactcttcagtaagacagaaactgtgaggatgctggtactgggaaaaaggatctgcacagcctctagaggcctcccagcaaatgcggggagccatgcccccagggtctacacactctcgttcatcaacatcacaactggaattcgggatttgtgaagtttagagctgaacagactgttacagattatgagtcaacacgtatattttctctttcaaaataataatatttcgtttttgactttttactaagtgaatattattttttaaatctgcctatatattggaacctctattttataataataatgataataaatcagtacccagaagtataaagaaggtaaaagttactttgaatcttgtcatggagaaaatgctgagtgcctctcctggtttgttgaagaaattccgtttcctgtccagcccactgctggccagctcctgccatgtttcagctgaccgtgcatcccaacacagagtctgtgttctcctgacctccagcactcagctcacaaggagaagtctgatttgaatgtactatctagttacccttaaagatcccacaggcttggttcctgtgctgaatagatttctgttgaagtttataactgggggctgtggttttttgagacttatttgcccagactcctgccagcccccatttggtgactctgttgggaaacaggtgaagttgccaattgtggaggcagcagtggggcaggggggatggttcgttgttgggcagagaaaccttcagtggagtcaggaaagaggtaaagagtagggtaaatgcctttgtgcataactgtctacattttggtcatggtgaggcctcagggatgaggacaccagtggtgtccaccagccctggggagtgtggtggtgggagaacctttactgaaatcagcattcggctccagagctctgtggaggccaccactagcggtcatggccacagggaggcttctcg

SEQ ID NO: 78150 - DNA, 1384 bp, Homo sapiens
catcctgcgcaccttgcgcgacttcccggccgaggagcgggcgcgcgtgctggaccggcgtggctgcagccgcgtggagggcggtggcacgtcgctgcacgtggcctgtgagctggcgcgccccgagtgcctcttcctgctgctgggccacggcgcctcgcccggtctgcgggacggcggcggcctcacgcctctcgagctgctgctgcgccagctgggccgcgacgccggggccactccctccgccgccggagcccccgcctcagctcccggggagccgcgccagcgccgcctgctgctgctggacctcctggcgctgtacacccccgtgggtgccgccggctcggcccgccaggagctgctgggcgaccggccgcgctggcagcggctgctgggtgaggacaagttccagtggctggcgggcctggcgccgccctcgctcttcgcgcgcgccatgcaggtgctggtcaccgccatctctccaggccgcttccccgaggccctggacgagctgccgctgcccccattcctgcagccgttggacctcactggcaaaggctaggcccggagcaccctaggcgctggattttgggacaaaactatttttcagagcgttgtaccggcactttatatatattgatctctgtacggcacaatctctgcctcatctgtcgcatgcactgggggctgggcttggatggtcaggtgagttccaagtggcaggttttctgggtgcagctgggctcgggccttcagctcgctgtccagcccctgaagggagtgaggactaacctcccaccttgatctagagcctcggacaggtgtgcgtcccagatgggtgacagctgagtgccgcaggagctcggtaggtgcaggggtggggactggcatgtccaagcagcaggacagcgtataaaaaggcctggaagccaagagaacgagctctgcagcgtagggttctcacgggaggtcctgtgcggtcagccttttgcaccctgtggactccgggccagggagggcacacagggctggcaggcccgcggtggctggtgttgaggcatgaacaaattgtaccgggtatcccccaccccactctgaccaccagttcctccttggatatcactccccctgacaggcagcccacccaggcctggatttgtccctgtctcccccttttgcttttcccccatgactaatgggcaccaggtcttgctgctcctgcttctcacctctgcagtggcagcaggcccctggccccaggtgcatgccggtcagtggggttggatgtgccttcctccaggcctgccctctgtccaagcccggagtgggcttggtgggctccctggtggcccccagtgggtgccaggtggtgcccggggttatt

SEQ ID NO: 78151 - DNA, 1041 bp, Homo sapiens
tttctttttgtgcgttcgccctgccgtccgtggggagaacagcagggcgaggacgaggaggcgcacacgcacacgagtgttctgcaaacgtgcctctgcacccgggggaggccaggtcgcccccagcagggccggcgccgctgcccccttgcgcctccgaggactgcgggtggcgtcggaggtggccacacctggcctgggggcgctgggggtccctgcgtccaggtgagctgcgcctcggccaggggtaagggtggcagtgccggagagttagtgtcctgcgagcgccccggacttaggaggtccccagagacccctttctcggaacccttcccaaaggctgctccccacgcctttgctcctcctctcagcctctgggctcttgctggctcctgactgccctcccatccagaaggcgagtagaagaacgaccccccaaaaccagtcaataaaagaagtgtgttttccagagggcgcctgcctggggaagagagtctcgcgtgtggcagttggattttaggacctatttgtaaatgtgtgtatttccttttttttggaggaagagattgtgaaattgagaagcatcagaagctttagcctaacaaatgcttttcacctacaagaaagccctacaccctagaatggaacacttagttccctggctgctattctgtgtagaagcaaatttaaagtggtacaagaaaaaaaatccgatcagacaaaggaattcgtcagattttaatgcatgagattctagccagtgtctgtatgagactgtctttaaaggttgttggtatggaaaatgtttgaaagaacgtaggatttatttcagaaataaaattcaaaagagcatcttgtaaagctggagttaacaatcctccatggttggagggctttagagctggggttctgtatgtgggttataccactagtttatttgaaaagataaacgcatacatgttttttccttggaaacaagactgcagaaaattgcaatgatctagtccttgaaaaaggcgattgctctcaagctgttattaa

SEQ ID NO: 78152 - DNA, 1052 bp, Homo sapiens
gcctcggcctcccaaagtgttgggattacagtcgtgagccactgtgcctgtctgggatgtttgccatatttgtttcatcagtatatatttctttgcttgggttgagtacagggactgatgcctgtaatcccagcacttagggaggccgaggtgggaggattactggaacccaggaagttgaggctgcagaccaacctaggcaacagagtgagaccatgtcttcagggggaaaaaaaaagcgctgggcatgggcatatacctatagtctcagctactctggaggatgaggtgagaggatcgcttgagcccaggaatttgaggctgccatgagccgtcatcatgcccatgccaatgtactccagcctgggcaagaaagtcgaccctgtctcaaaactaaactaaacaaatttctctggctgaagtttagtaatttgcttttaagtgacgtttgtacattttagaaaataactttgtatattagacatcatttatggtacttaccgttttccatggtcataaaatacctagtctagtgtgataaatgccaggtgatagaggtatgcctggggcataaacctaggggcttggtgggatggggtgagatggttgaaatagtatgtagaaggaaaggctttccagagtttactcttagggtggctcttgaagggcaagtgaaggaaagacatttcaggctgagggaagacacgtttagatggagtcctgtggatggagagtgctggacttgtttgcgaagtcaggagtagtttgatatgatcagatgcttagggaggtgattggtaaagtggtggaaggtgagattgtggaacaggtaggcatggaccctatcacaagcgtcctggcttgtgtatctagctaaaggatctgtctgtctgtctgtctgtctttatattttttgagacggagtttcgctcttgttgcccaggctggagtgcaatgatgcaatcttggttcattgcaacctccgcctcccaggttcaagtgattctcctgccttagccttctaagtagctgggattgcaggcgtgcactac

SEQ ID NO: 78153 - DNA, 1124 bp, Homo sapiens
ataaaaagttgagggaaaaaaacaaaacaaaacaacttattctttgacttgggtgtgagcagcagtagcgatagggtaagcctatattggcctagttttcagctttttaaaaatatatggctagaagaggttgaaacttgtgattaaaatgagtcttttgagtgtgtgaaaagtattttcatcactttaatttttttaagtgctctagaactagctaaaatgggcaaaacgtactagaataaacatagctgaatgagttgaatttacaaactagtggaagccttctattaaacagtaatttaccttgtaatcatattaatgtctaatctgtatctttatacagaaaaacgtttcattgtgttcagttttagtttatcctttctgttgacagtggacatccattatcagttcttgactattacaaatattactgctggggaagcattcttggacctatttcttgatgcccatctagaatatatatgctaagttctgagagatcagtgccaaattattttcaaagtggtcaaactggtttacactgctaccagcaaaatgcagaatttatttgctccacatcctctccaataattgctgttgttggacttatacgtgttagaccagtctagtgtgagtataacactgtttcatataccaaggaattttgctgttttagttaggtctgttaatggcattggtgttatgaaacaaatattcccacattttaaaaagaggtgtatattgatatatgtagggatgaaatgaaataattgggatttactttaaaattcttcagcacatgtaaagcacattttgggatcagttcaccaaattgttctgtggatgcagattaaagtattgtttccgtgtttaatttactgtcctgtggttatgtaggacagtatacctacccttagaaaacacttgctgaatgtttaagagtactgggtcataatatatgaaagctgctctcaagtagttcaggaaaaagttaacacacacacacacacacacacacacacacacgcttatttttattattaaaaatagcctctaacttaccccaccatgtggacataaccactattaaagtttgcttccggatcttttcggtatgcttatat

SEQ ID NO: 78154 - DNA, 1050 bp, Homo sapiens
ttggggttggagactgacttattctgtaaagtgggattttaacaaactcccactaagaaatagctttaaaaaatttatttttttgagatggagtcttgctctgttgcccaggctggagtgcagtggcacaatctcagctcactgcaacctccgcctcctgggttcacgccattctcctgcctcagcctccccagtagctgggactataggcacccgccaccatgcccggctaatttttttgtttttgtttttgtttttgtatttttagtagagatggggtttcaccgtgttagccaggatggtctcaatctcctgacctggtgatccacccgcctcgtcctcccaaagtgctaggattacaggcgtgagccattgcgcccggccaagaaatagcatttttataaagaacgtacattttgttacctacttggaaggacggattgatgaaatcctcaggcagagtctctggcttggcttcctgtgctgttttccaccccagagagggagcgttcagatgtttactgtagtaatgtctgtacccaccaggtggcacaattgctttacttaaatgatttaagctcattttgattctcagcgaggtgtgataactcatttcttattttaataataaaagatgccacaatatttgttactgtatttttaaagagaatttttgcatgttcagttgagtgatgagagagaaattggtgtcatgtttcctctgtggtacctaatcctacagcaagagtttcaaaaatatttttttaaaaaagctctaagaaggctataagccttgtcatcagcccaccatatggtgccagcctattgctttgcatagaatatccaagatcacacagtgttctgaatatctgcagtatctagggggagggaagggtgagttaaggttactgtggcaattttcatctgcatttctcccttcttttgcacttgagacttactgagggtactagggcatttcgttcattgaattaaaatgaatatagaaacaattgaagtttagcgtccatctgtttcttacccctgctttct

SEQ ID NO: 78155 - DNA, 1039 bp, Homo sapiens
atgttgccatacttaacaaataccaccttcccttgttgctgtacctaacaagttatcaccatcctgaattgtatacttatcatttccaagaaaaatatttttattgtatgtgtaatttccaattaaaacatattgcatattgtttgaaaattaaataatttatttaaattgcttcactctttcttgatacttatacctatattaaaagacattatacctataataaaaattacatcacctgaaaaaaaagtatgtgtatattaccacagttacaaagaatagaaaaaggggcctctgacagtgtctgccacttagcgctgtagatgagttagtttgtctaaatatgaagtcgtttttacttttcttttgctggtctcatttccattttcattgttttttgtttgatctaaaattttactgatatcatttttgtaggctcttgggatgctcttctggcataaacataatatcgaaaagtcattggctgatttgcccaactttacccctttcccagatgagtggactgtggaagataaagtcttatttgagcaagcctttagttttcatgggaaaacttttcatagaatccaacaaatggtaagtagatgagaccactgagttctattttttttctcctatctaactctcttttgcagcatacttgagatagggatatcatactcaaacataaatattcccatttttgataaagttcccctttagattcagcttagtacatgctgctctgtggatgggagttttccagttacaggagtaaagcacttctagcacttcccatcctgtcgtctgtgactggaccctccccacccaccccagtccctcttgttgggactcccaaaagattagacccatacgaaggactttttttttttagacggagtctcgctctatcaccaggctggagtgcagtggcatgatcttggctcactgcaacctccgcctcccgggttcaagcgattctcctgcctcagcctcctgagtagcttgggactacaggtgcgtgccaccacggccggct

SEQ ID NO: 78156 - DNA, 1697 bp, Homo sapiens
ctgatgggttataatgatgcctcattgtactttttatttggcagttccctgatgactaatgaggttgctcaccttttcatccatttgttggtcatttggatatcctcttttgtgacatgtctactcaagtctcatctgttttttttctgtcaggttgcgtattttcttattggtttataggtgttctttaggctctgagttgttttctacaacttgtattttaaatgctgtaaatatgttttgcattctgtgactctcaatggtatcttttgatgaacagtaattcttcattttaaggtagtttagtttcttagtcttctgaggttagtgtttttgagttctgttcacctttctcaaggtcatgacgatattctctcatgttagtcttagaagtgttgttttaccttttacattttgatctagaaatgtttttctgtatttgttgttacatgtcggattaatagtcactgttttgttttcatatgagtatcaatttggtcaagtatttattgaagaaactgtcctttatcctttgcaacgcagcaggacctttgttttacatccagtgtctgtatgcatatgggtctggtttgaggttctctgttcctttaatctctttgtccatccttcaccaatacatactgtcctaactttatgtactttattaatttagttatctggtgtaatataagttctccaagattgtcttggttatccctggccttttactttccatataaaatttagaattactttatcaattttcagaaaaataattctattagagttttgattgggattgtattgcatctatagataaaaatggagaattaacatctttattgagttttctgatcagtgaacctgatatacccctctacttctataggtttgtaatttctctcaatgttgtattgttttctgtgtaagaacttaacgcatcttttgttagtcattccatgatatttggtacttttttggtgctcttgtaaaggatattgttttttaaattactttttataattatttttgcctgctatgtagcttattattttaatctgattgcatagtacatttaaactgaaaattcaacctagtagttgggtcctgtcctttcattctctctctggaattcagtttccagaaatccatcagcaagttgttgactgactatttttggtttttgctgcttttgatttatcttgatggttcccttggaaggtcaaacagtagaccaactgtcatctcatagacgcgaagagcagggcgtgctgctgtctttcttgtggtttagggaggcagcccagaccaggacccaagcacactctgtgtgctcagaggagcggcttcttcttgtggctgctggcacagctgcactctaatcttaggagaatcacttaatctttctaggcctcttttcaaatgagattaatcctggcctgcctgatctcacagaatatgtctgggctactgtgtgagagagcatttgaagttctgtttgcactggaagaactgtctcgggctgtgagctcttgttgacattgtcatcttcctttacaaggatgctcctttctccctctgctgagtgagctcctggtggttgctgtttaatatattgagaaaagaaaaagaggccttcctcttgcaccgaggtgttattgactccatagggtgagagagaaaagattctttagttt

SEQ ID NO: 78157 - DNA, 1046 bp, Homo sapiens
tgcacttctgccctgtgtagaagcggtggacagcacagtgatcttggggcgctgtgaggctgcacccgcagttctgttgtaaagactgggcctttttggtccttactgtggctgctctgttacttcagttcaatcctatgtggtagtaagcccagggatttcttctgtcttttatgtaagactccaggtaggtgttttgctgctcaggtatcacctgttaggaagctgtggatccaggactgtgtacgtgagagccctccgtcccctcctccttgggttgtaccttatctgttgctctgaacaagcaaataataaacctagttagatgcttcaaaggataccatagggatctcagaattcagctacaacagatgttagtaacgtctttactcttgggtttttgtttctttaggtttttaagttctgttttcatacctttatatagtttttatttttaaaatgaaaattattttttccttcctagatccagaatattaaacagacaaacagtgctctcaaagaaaaacttgatggtggaatagaaccatatcgacttccagaggtaggattatgttaacatcatcttagaagtcatattcaagttttacatgtttaagaatttaatatcggtgtgatacatccccagtatacatctcttggaagagtatatggacataattttatgaacccagttgatgttaaaattccgataagagaaaatgaaaggttcgttaagctcataaggacatactcatctctaaatgtaatgtgctaaaatgactcatttggatatccaggtcattcagaaatgtaatgcacgttggactacagaagagcagcttctcgccgtacaaggtagggggaagttcttctaaagagtttaggaggccggctgtggtggctcacacctgtaatcccaacattttggaaggttgacgcatttgcttgagcccaggagctcaaggctgcattgatccatgatcacaccactgcattccagcctggacaacagagggagaccctgactttaaaaaaaaaaaattttt

SEQ ID NO: 78158 - DNA, 1012 bp, Homo sapiens
tcctttcccacttctcacaagttgtaaaaacttaaccgggaaccctgagtcttctaaaggtgtatttcattttactagttactcatcgagctctgactagccaggaagtacaaaaccccaaaagaagcagacagagtgttcagctttaaaggttgggggtgctctggacctgcgataccaaaagatgaatgcagaatgtccccaaccctagggcaattgctgggtgacttcagctgttatgtgacatgtaatgggaagacagatatcaaaatgacagggtcggtcatctccagaatgtgtctagaattggctggtactttttcctactctaataatacacgaaattattgcctgctgttaaaagcctgtatgttttcttatctggataaagaggtaagtgtcacttgtggttttaaaaaaatgtttttctcttgtattttaaaaaatgctttcttacatccttagccatcaggaaatatggccgagattttcaggcaatctcagacgtgattgggaacaaatcagtggtacaagtgaaaaacttttttgtaaattatcgacgccgcttcaacatagatgaagttttacaagaatgggaggcagaacatggtaaagaagagaccaatgggcccagtaaccagaagcctgtgaagtccccagataattccattaagatgcccgaagaggaagacgaggtaaatctgaaacaaaacagtcacttctcttgtcaggttcacgcttgatactccagtttctaaagtgatgaattttttcagctatagagatttttaggtatcagctgtattagtaacttcactcttacctgtaaatagccggaatgtgtatgcattgactccagttcttggtgcctgtatattattcacatgttaatttctgggcaaatcctgaattacatcctgatttcctccagctacaaaatactctgcattatcagtttttccttaaatacagtaaaatcttgagtgacaaagacaggggagtgggggcataa

SEQ ID NO: 78159 - DNA, 1153 bp, Homo sapiens
catcacctagccatctgcatcacatctctctggacaagcagctattaccaaaaaaggcatatacttccagtcctgtgctccatctgccttaattctttgctcgttcctccatgttggcgccacttcccagagagctccactgcatctcacactctgcccacgtgctggggaagtctcacggcctgcacatctcttgtgactctgggaaccgcctctcccgccggagcccccgagccccaccaatggcagctcttcccagtcagcagcttcagagcaggcagtctccttggaaggcccgactctgttcctgcatggcctgcagtttctactttgtgcatagagtcattttcagagtcaccgcgaccctgttggccttctagaaagtttcttttgttcttttctgagacaaccacctaagtgataatacgcttttttggaaactaatatatattgccagactgcatcataacctttatcatgccaagcatcctgatgcaactcacatttccctaaacatggggtacagttatgatttataaattgagttggcttaaatctccctcttctcccttcccaagtgttacaaagatcatttactgcaactgtcgttggacactgtagcttaaagggaacgtggacctcaatgctttctgccttcaacttttcagcattgtgaccccagggtggttgccaccccatcttttcctgaccccccccacccccccacctccaagaggttcggcccacatcactgtacctggtgcttgtaaatttggaattggtgccttctccttttggcaaccatggttatcaatcctttttctgttttagtgtcttatttcttctttcaagttatttgctagccaaagatgacatcactgagattaggagacaggggagagcttgctgcagattctgacagtgcagattttaaatgtcaggatattagaatagctggcgctggtttatgaaagctgcgcgttgttccgcgttctctcggtgtgcctggccttttatgtggcactctgtatgtcagtttgtgtccttcatgtgctgatgtgattacacaaacaccatgcactctcttttcatatcagagtacaggacagagaagtgatcaatgtattggtctagtgagactgagatgaaaaga

SEQ ID NO: 78160 - DNA, 1115 bp, Homo sapiens
acacagtcgggtgctagtgtaacacaaatgccgcgttgtctgggtgtacagtgtttgtggagacgccacttcctcaaaatggtttttgattgtttttaacctataagacgttctgatgctcacaaacctctattcaacacacaaaacaaacatgaaaaggtagttagttgggttgtaacagcttactggggtggactcataaaacagtggctttctgttcatctaaagtttcctcagataccacagaccactgttaagtgtgctcattgtcactttaaatttcaacgataccctatttttgtcattctaaatatcagatgtactattggtataattgcacaccaaaaataagccaaacagtgcattacgctaactggatccctgcttttatgtgagctaaggaaagatggagccaactccaacgagggcctctttttctctcttgtctagcctgtttctaaaccgaatgatccaggattcaagcttctattgtcaagtgaaactttcctcagatggactccaggtagccaggtcacctaaacctagtggtcctgtgcgatgctctttctgccagtccctgaatctctgcagcttctcttacctgtcttacctgtagtaaagcacaattgcagtggcgtcgcattcagaagaagggaaggtcagcagaggctatgcatgttgtgtgatgatgagtgtttacagccaccttctcctaaaacgaaatttataccggggtggatagtattccattaggtagacttatcgactttgctaagtgctttttagacagcttaaaaaattttcaagattttaaaagatgtataaggttaagtttgcaaatataatggaaatgctgtatatcttttgaagtgatgaaatccacgttggaattttaaagaaaatatgttgtaataatgctgttgtaagtaatattttaatgtctctttgcctgttttctatttcagcacattcattgtggtgaatgttcatagcattataactgcttagccattgaatgataacatttgttagtggaaattggaaaatttatttgtgaaattctgcagaattcatttttctatttccaatatttgctgaggttaaataaaaatttt

SEQ ID NO: 78161 - DNA, 1904 bp, Homo sapiens
gcctcaacttcggcaaactttgtcccggaggccgggctcggggcccgagggggccggggcgcccgcaccttttcaggaaacggggcgcgcaggcctcgctacggccgtgacccccgctggcgttgaggacccggcaccccgcggggccgcgggtttcacgcggggggacgggcggctcaggggctgcgtggccgagcgcgctgcccgggccggccgggggggcccgggcgttattggaaagttggtcctgagtcattccgcctcagaggcgcctccgaccgcttggcgggcggcgcgggggtccgggtatgggcagagggcgcgaatccccctcgcgcggccgccgagggccggcgactcccggggcaccgggcggctcctggccgcgggctctgcgtcttccccgcgggcgccaggcggctctcggcgggctggccggttccacgccgccagccagccccgtgtggggacttcggtctagtatttggacccgaggagataattctgtgtggaaaattctctcccttcggttggaaacagtaacaaactggaaacggatgaggtgttatggacgtgcttggaaatgcaagaaaccttcagattacgagctgttgacgggaccagttgtatttcacgtttttcgaattaagctcagaatcagttttcagaatgacatgtgatgcgtggtgcgtggtgtgtgtgcctgtgtgtgtgtatggatataattcattcatttttgtggcgtcagaaaggttatgtcgagcgttgtagcggcttcttaatttacattcacggcatacaactgaagaggagccattatttattttttttcctagcatttgctgcgactacacactgccggagcgtttggaaatgttgtttgctgttaccctgtatttgtctataaaattcttactgtagggaatggccaagtggaccatcagttcgtcctgagatcttctcatgtctctcacgtctttgaaaatggcctgtgaacagactgcatcatatgtaggatgtctggcaaaatagtgtacagcgttcttttctcaaatgagaggaaatgtgtaccttttcgccgcgttgtgacaatgtaaatgttaagaattagtctaaagatgaaaattctttggccaaaacaagataagccttatcgatatgaaaactggaaaacatcacatgggactggaaatcctgtgagtgggtgctcatgacggaaaccctgacagaccttggattccagcatcgctggtgaaaatcagaccttatcatggataagggttaagatgtaaggtgtctcacccagacgccatctgttccagctgtcaatgcagaagccaggaaaggagagagagctggccagggagaattccagctttttttttttttttttttttttttttttgagacattcatgtgaatttctctgcgaggggaaagaagaccaattattttccttggatgctgtcccttcttttggaattaataagatggcttcactcagtgagaggctgtaaagacatttcactggaaacaggcagtaacagtggccagttgtttctgttaataccatcaaaatatccctactcttgtttgtgccttgaagaaagtccttcatttaactgagacatctgagcctgcgttgcggattctgattctctaaatactcctgcaagaatccctttaatttttcactgtgcaactcaagaaggacctttctagggtattgtcaggatacgtatgctaatgatattgtcaggttaggtgagaatgattgatcactcccttaaaatccttttttatgatgttaaagctgtactttaagaaagataaaactgccactgtggcgttgcaagtctgagctagctcaagcaaacaaaggaaattgcgttaaatttgcccaa

SEQ ID NO: 78162 - DNA, 1444 bp, Homo sapiens
cagaggatttggaaggctaccagagagaagcagccgaggcctgattgtggaaatgatgcttagacttgctttcagcaggagtgatgaagccagaatgagggaggcccagacgcccgggagaggtacaggggataggtgccatgtggtttgcaccaccgcagcaggctttgggtcccaaagacgcgaatggaaatagaagaaaatgcagttttaaatagaaaagaaaaaaaaaaccgagaaaatgttatgtgtgcttgtgtaaaatttattattcataattaaaatacaaaatggctttctcatttgagaaagcctttattgactaagttctgcacaacactattccaggaaagggggtggggagacagaccaccctagggagaaggcagagttttttactattaagcataataccttttttttttttctttcggtgaagcttattgtcggcctgtacagatgacttggagtaggctggcaggtagtgggatgtcataaatgttgatgcctgttggtttctatcaactttaggaatcaggttggaatcgatgctgcattctgtattcctcgagataagtggattgttaattgggacttgggagtctttttctcatttaattaatattcagttaatgtgccctgagttctcataatgttctggttaccgtgctgggaagagtgagacacagcacccatctgctagggtgtgatttgcagggatataggccatcttggcccctgtgcacagtgaagggacatgccagaaaccagcagatacttgactgagacagaccaggacaggagcttgtggcaggaaggataaggaaaaatgcaaatctaccatcctgccctcagggtgctaacccttcgggggagaatactttctcccaccaggaagaaaccagaaagtaaaaatgtaggatgaaatgaattagtggattgtgtagaattctggaagcgtggtgggaatccaccataagggaaagagaaagtcttctgggaagcggcgttgagttgaggcccagtgtcaggaaagctctggtatagtggggccatctggtccctcttacagggccccctcccactttgttttggtaagatgggatctgacggcttgccatcctgtcactccttgccagtagatgcagtgctggccatgctgctggtcattgggtttccagttgggaagttgcatgtgctggcctttggctcttgccaggcagggccttttgtgactgggagctcatgtgggtcatgcatactgtactgtgaagggcatggtctgtggaggggaacagagcagcaggccctaacctgggtggcaccactttgctgtccctaccatttttcattgcaggttgaaagtctccaaagtggcaggggaaggggtgtaaatgttaaacagccccttcctagcctggcatgcgcacctgtggtcccagtt

SEQ ID NO: 78163 - DNA, 1069 bp, Homo sapiens
ttttttttttgaggtggagttttgctcttgcccaggctggagtgcagtggcacgatctcgactcactgcaacctccgccccctgggttcaagctattctcctgccccagcctcctgagtagctgggattacaggcacccgccacctcgcctggctaatttttgtatttttagtagaaacagggtttcaccacgttggccaggctggtcttgaactcctgacttcaggtgatctgcccgcctcggcctcccaaagtgctgggattacaggcgtgaggtactgggcccctctgatgcttggcttctgattccagctagggtcaattgagaattattgaatcacccacactttctttgagaactttctaagtgctaggggctatgctcgttgctaaagctaaaaagtcagataggatgccgtctgatctctgttttcaaggagcttccatgtgatgaatgagccagaagaataatttcattatggcaccatgtagtaggtgccacaacagtggaacagaggctctggtgcattgtggaggcgctgtgcagtttcaacctgggttaggaggaggcgtttcccaaggaggtaactcttagggaagctagcagcaggagtggggaagcctgggctggcagggagtcgcctggcagagggcccgtgagtcggaaggggttctcctgtggctgtccttcaggggagagggtacaggaaaaggcacccggccacttctgggtgctgcctttgtgacagcctaacttctgaggcaggaattctccccattttgcagatgaggaaaaggaagagcaacaggcctgttggaccccagagttcatggtttcaccacagctgaattacagtgcagttttagattttcttcagattctaaacttcttagttttgctttcagagtagacttagttttgctgctgtagagtgctttttaaacaaattgtgtatttttcatgcagcctttcccttccatccaacatctgttttgcctatatggctgatactctaggccgcactccgttccatctctggcgtaagttcctttcttacagcagcctcct

SEQ ID NO: 78164 - DNA, 1061 bp, Homo sapiens
taaaaagggtaaaatgtctagaaactgaaatcacagtatatttgcacaaaaggaacatctatagatatctccctttttaaaaagcaattttaacatatgaatttttatatatttaaattcgtattttagcacttttttttctgttatttagcaataataatattcttcaatttgggctgggcgtggtggctcacgcctgtaatcccaacactttgggtggctgaggtgggcgaatcacttgaggtcaggagttcgagaccagcctggccaacatggtaaaaccccatctctactaaaccaaaaaaaaaaaaaaaaaattagctgggtgtggtggcacatgcctgtagtcccagcaacctgggaggctgaggcaggagaatcgcttgaattcgggaggtggaggttgcagtgagccgagatggcgctactgcactgcagcctgggtgacagtgagactgtctcaaacaacaacaaaaacaacaacaacacttcgatttattcaggcctctgttcacattttacctcttcaaaggggtcttctgaacaccctaattaaacagcccatgctgttgctgtggtcacttgccttgctttttttttttttccatagcagaaaatggttttcctttcctttttcttttttttttttttgagatggagtctcccagtcacccaggctggagtgcagtggtgtgatcttggctcactgcaacctatgcgtcccaggttcaagccattctcatgcctcagcctcccgagtagctgggattacaggtatgcaccaccccacctggctaatttttgtatttttttagtagagacagggtttcaccattgttgaccaggctggtctcgaactcctgtgctcaagggatctgcccgcctcagcctcccaaagtgctgggattacaggtgtgagcccccacacccggcctgcagagaatgtatttctattaccttaacctgtgtactaggagtgtgcctggcatatggtaggttctcaagtatttgcataaatgaaccagtatattatagcccaatgttttattgaggcaaaattc

SEQ ID NO: 78165 - DNA, 2454 bp, Homo sapiens
ttcccctcttctcaacacagacacattcatgttgtagtgccagctgtaagcataggagttgcacttaatggcttacagctggggaaaatcatggctgatagcacaccaccagtgcaggatcagggaagggaactctattcctgatgccaggacaggaaagagatgtgcttccttcatttcatgaaaaagccacagattgttccggataatggttgctgaataagaaaccaccctaaacatcagtgatttaaaacagtaatctactactacatctcatggttctgtgggctgatcaagcagggctcagctgggtgattcttctgctccatgtggccttgatggaggtaatttattggtattcatctgttggctggtccagtcatgagggtccaagagggccgtacacacatgcttggatggttggaaggccaggctcaggggatcctccctctccttgtgctctcaggtcctctgcagatggcctttctcctaaggtggttgtgcttcttacatgacaactcagaactcttagagtgagtgttctaggagaggaagtggaagctgccagtctctctctctctttcttcttttttttcttttgagatagagtctcactcttttgcccaggctgagtacagtggtaccatcatagctcactgcagcctcaaacgcctgggcagaagtgatcctcccagcccagcctcccaagcagctgggactacaggtgcatgccaccttgcatggctaatttcttagtttttaactttttgtagagacaaggtcttaactacgttgcccaggctggtcttgaactcctgggttcaaacgatcctcccaccttggcctcccaaagtgttgggattacaggcgtgagctactgtgcccagtctggagctgccagtatcttaagcctgggcttggatatcagtgtagcattattcctgccatgttctaaaaagacacagagtcctcctatatttgaggagaggggacatggaccctaactcttgatgaaaggagggtcgaagaatttgtgactgtccttgatctggtatacgcatggtggctagattccatagtgctctcagtaatatatgttagatacccatttgaaaactgttgtggattaaaatggaaatgccaactgttgtgtgttactcattttcagtgagtacattctgtgttctgaatcaataatttctaaaaaacttttggagtatacctattcataaaataattacctctataaaatgtatgtcttatcagcagccatccttgatcatgtgtttgtcaagtttttcaagtacagctttgggtccatacgttttttcttcctattactagttcattttaaaaatttgttgaaaccttcccttttattttaaataatattgtggggttttaatatttctctctgttcttaaaaaaagcttcattgagaaaatataagtaagcctatatatcctaaagttcctttcctttactctagatcattctagtaaatcccctagagacagttctggctgtttatatataaaagtgtggtataatttgacagtgtgtgcagaggtgtgtatggatgtgctctcacatagaaaccctgcctccccagcctgtctcagctgattgttgcaacactgagccgagcaaacatgatgaggtcacagagaagtgagggagtggttttaaataatgaaacaggaaatctctgtctttggctccagtggtgccccagtgttttgggattaatgagggaagagctatgtctgcctgtgttccatgagtgccccttgcttgtacctctatggagaaccccaacaaccctggctggaaagccacctaatcctgtgtttcccaagcataacctccctttgttcccaagtaagtctttcctagacacctgaacttctgtgcaacataggcatgaatgaggagagtgagctactgtggtgttatatatatacacacacatatatacatgatatgtatgcatgatatgtatatatgtgtgtgtgtgtgtgtgtgtgcatagttttcatccattgtttctgactcataagtcccatagcccttgttacagtcttttgttgtaatgttgggtgtcttgcctcctttcagctgcccaaggcaggactctaatctgactgtgagtcagaagacccttattccagagagggccctgcctcattccctagaggcaggaatgctgcacagagaggccaagataagtccgaacagacaggccttgctgggtttagatcatggttttttgtccagaaacatttctagatgattgtaagtcatgcctgtgtaatgaagccaccataaaaactcaaggacaggccgggcatggttgctcacgcctgtaatcccagcactttgggaggctgaggcgggcggatcacctgaggtcaggagtttgagaccagcctggtcaacatggtgaaaccccat

SEQ ID NO: 78166 - DNA, 1333 bp, Homo sapiens
ggcctggacttgcgactagtgtctgaagtggggatggggggtggacagccttggcgactgaaccgccaacagctttgttcacgcaattcttctgcattggcgattgttgtcaggttgtgagagcaggggaaaaacacaggttgagagagtttttccccaaacagcccctggtcgatgccccggaatgactggctgctgcatggaattgcagaggcctgagtgcctctgcttctaccgtgattcctgaggccaagacctctggtctgcatggtctgaagtctcttacgaaggtaaaatgttatgtatatattttgaataagggtacctgttcctcattctgtccttttgaattccaaaagtgtgttggcctgtgagatagcataagggacagaatcattgctctcgtgagcctttgggcttgcttccttaggcactacgtactttctcattccccattgccttcaggattctttctgtcagaatgtagtggctgtggcctgggggtgaccagcataggggccaaagaagggtaatgagtcttgaggcctacagagggtagtaggcaaggcgggagggcaagggccagggggcagcatcattcacacagttgaaaacgtgcccttggcctgtctcctctctgtgttctgcatcttagaaaatagatattgtcttgtgttaagatgaatcaatatagttacccctttttatattgtcttaagcttcttaggaactgctttgtattttagtcactcaggcttggagtgaaacatgtaatgtgtagttcaacctgaaaaaattggtctgagaggcgtcttcatagagtccccaattctatatatgatgaggtctcatcaagctttgacattctgctcttttacgtgtaacactactaatgtaaatgtttctggattgtaaagaatggtgggaagcgtagagattatctgttggtaagccagaggcaggaggaagaggaggaggaggaggagatagtggcgtccctcctgcagaaaccccgcagtggaaggacaagattgcaggaggagttagagaccagtggtctagtccccatctgtctttgtgaccttaggcaaatcattgaatctctttgaaagccttgtctccttgcatggcatatggagattatagttgctgtgaaaataaaataatcagtttttaaaaatccataaaaatgaaaaatggtatttaaggttgaaggcacttgtatttctttttctttcttttttttttttttgagatgtagttttgctcttgtcacccaggctggaggtgcagtggcgtgatcttggctcaccgcaacctccgccacccaggt

SEQ ID NO: 78167 - DNA, 1039 bp, Homo sapiens
ttgggctggatatagtggctggcgcctgtaatcccagcactttgagaggctcaggccggagggtcgcttgagcccaggagtttgataccctgtctgagagagaattagctgggcatgttagtgtgcgcctgtggtcccagctactcaggaggcggggcgagagggatccttccaggctgagatgtgagggttctttgagcccaggaggtccatactgcagtgagccatgattgggccactgcattctagcctcagtgacagagtgagactgtttaaaaaaaaaaacaaaaaaaacttcagaggagtcatatgattgacttgtgtgtgtctacgcagactcccttttctctgtagagacttacaatcttcagttctctggagcgttcttcagattcccttgctccatgactgaccttggctaggaaaataattgggccgtttttggtgcacagcagatgaaaattatcagtatgtccctagctttccactgtgaggccgccgtagcaacagaggacagtggatgtgtgacttgtaccctttcagagggccaagaacgcaatatcctaaagcagccttttctttttttattttttgagtcagggtctcactctgttgcccaggctggaatgtaatggcatgatctcagctcacaggagcatcaacctcctgggctcaagtgatcctcccacctcagcctcccaagtagctggaactacaggtgcaagccaccacactggataatttttgtattttttgtagcgacagggttttgctatatcgcccaggctggtcttgaactcctggcctcaagtaatcatcctgccccagcatcccaaagtgctgggactacaggcatgagacatcacacctaaccctgttcttgatacctggtttttgtggtcctttttttctaaaattcatatgaattttgagttctgctgtatgatatgtaatatatatgttctaatattacaaacttctaaaaatctttctgtgcaccaaaattgatcctccaggacagaaaaaatgccagtggttc

SEQ ID NO: 78168 - DNA, 1221 bp, Homo sapiens
gtaccctagggggcattttgcagtgtctggaaaccttcagaagtggggtgggggatgccactggcattggtaagtagaacgagggatgctgtgaacaccctgcagtgctcagcatatccctacagcaaagagttttcgggttcaaaatgttagttgcgccaaggttgagaaaccgtggcttggaaattgttcattcaccatactcttcttgatttctagtgaatgtatgactgttaagattttatgttttcataaggtgaggtactttctacagaaattcagtctctttagtcattaaacagcagagggcacttggaggctagagtgcccagaagtccatcaagccagtctggataaacccttcccaacatgccataatttacatcaaaactttggttagcagaatgggaatttttgagtagataccattagaaaaataaaataattttccagctgtggttcccaagttccccaaacttatgtctttagtccaagctgccccttgagcttcagcttcggacctgcatatttatttaacagctattgagtccttggtatgtgccgggcaccctcctgtgtaccagggcatggcaggaaatgatatgggcagctccctgtagtcatgaggcctgtgttctaaggcagaccttgaagacagggaagtccatgtgctgattccagaagaatagagggggcctggcagggctggggggaggtcaagagtggagtgcttcatacagctggtctcagaggggctcattgtcccggacctgcaggacaaggaggcgttttgtccacaaaccttgagagtgagtgaatggggcatgactggggccactgggtgttattgcttgaatgacacctaacctgtctctagtgaagctcttgattcctccctacccccatccagatgctagaagactggggagcatttcttggtccctcttctctcacaatctgtcgttggtgctcacttctgcaccctgttttcccacgtccctggtccccagcccaggcaagccttctgctgatgccggtggccccaacttgtctatccacttcaccccagttttctccaggcctttctccatgctgctgtcagagagatctaaacataggtggcctcctgcccttccctgaaaaccctttacggcctctgactgcattcagtgcaccctgcattcctcctgataaggtcttgcgtctccctgctgccccagc

SEQ ID NO: 78169 - DNA, 1571 bp, Homo sapiens
ctcacctgtgctgcctttcacttggaggatgggtggatgattcacagggacctgccctccttcccgcagagttggggtttttgtgtaggggatttttctgtcagttattttttcctcacctttcagagtattaaaagaactaagccattagtggtgaggcatgagggcagcgaccacagctccaggggagctctcttatccctacagctggcaaatgttccaccctgtttttatggcacacagaaaggtaggcgcatagtgatgttgttagtaagcttttgaagtagagcatggtgagttagttggcctttttacgaaaaaggaaatggaaaactagcaccatggccttggcataattactccaacatgcaaatcagtactggaaggaagttgaggcagcatacctctatgctccactagtccttaagacacgtctgaaagaaatgaaattttattttgttagaggtgaaggaatgcatggatggaatgcatggtccaggtgtttataactgtgcatttatttggcggttgttttggatggacaggaagtgggaggggagggcacagagagtcactttggccacgtccctggtttgccacaggctgatactggagcattcctaagtttcgcaatggagatggatgtgaaagaagaacacactaggccaggtgcggtggctcacacctgtaatcccagcactttgggaggctgagacaggcgaatcacctgaggtcaggagtttgagactagcctggccaagatggtgaaaccccacctttactacaaatacaaaaattagccgggtgtggtggcacatgcctgtaatcttagctactcaggaggctgaggcaggagaattgcttgaacccaggaggcagaggttgaagtgagccgagattgtgccactgcactccagcctgggcaacagagcgagactccatctcaaaaaaaaaaaaaaagaaaagaagaaccatactagtcaggtgctagagggcttccaaggcagcctccaagggaaggaaatgtctgagaagttatttaagaggatttgttggaacagaaaaacttccaaattggtctagaaggtggaccctagctatagacgcattttacaggacataatgtaaatattaaaggcacattttcagtatttggggaaaatatgtcctctgagtcgaatgaccaatggctgtttctagaaaaattttagttgtagttttaatttgattgtcttgagcatggtgatagattgactttttttttttttaagacagtcttacgctgttgcccaggctgcagtgcagtggcacgatctcagctcactgcagcctccacctcttgggttcaagtgattctcctgcctcagcctcccgagcagctgggattacaggtgcgcgccatcacacccagctaatatttatttatttatttattttgagatggcgtctcgctctgtcacccaggctggagtgcagtggcgcgatccctgcttactgcagcttctgcctcccaggttcgagagattctcctgcctcagcctcccaagtagctgggactacaggtgcgtgcc

SEQ ID NO: 78170 - DNA, 1052 bp, Homo sapiens
tccgcctcctgggctcaggtgatcctctcacctcagccccccaagtagctgggactacgagcacatgccaccaccctcgcctaatttttgtattttttgtagagatggggttttaccatgttggccaggctggtctcgaactcctgagctcaagcagtccaccctcctcagcctcccaaagtgctacgattacatgcattagctaccatacaccgattgtacaggccacaggctagccccacacaccagattttgaagattaagtgtggtttaaaaaaatgcaaaatatcctgttaataatttttgataatattacatgttgaaatgataaagtttaatgttgtgttaaataatacacagtaaattttactgacttctttttactctttaattgtagctgctaggagatttaaaattatttttgtgattctcgtatttctgttggaccagaggtattttttaatagcatgacattctgttacatggttgattatatgatgatcatatgattgtggcagtttcttgattcgattctctgttgttggacacttaggttgtttccagtcttctctgttttccacggtgctgtgatgactgacactgtggatgggtagtcatgcactcctgtgcccgctgccaggaaagagctcataaggaggacctgggaagcatttgctgcacttctgaatctagcgcatgcagactcgaccctgtgggtcgagctttggtgagaagtggttggatttggaacgtatcttgaagacgaagctgactgtctttgctgatggattggatgtatggcatgtgaggaagggggtcctttatgatctaaggaattggatggtgccatttcctgagccaggcattgccagaggcagatcagagaggaacgggtaccaagggctcagtgttggacctgttaggtttgagatgcctttttgatgctcaagtggagatgttgagttggttattggatatacaggtctgggggaattacagggaaaggggtgctggagatatatttgagaattatgaaaagctgtttgagcatc

SEQ ID NO: 78171 - DNA, 1045 bp, Homo sapiens
tggtggaggcaggcagggcctactaggcttctgaagcaacactcgccagggacattttagtgaccttttccccgtgttctcaaaacactttacaaatacaccatttgtctttaattctggcagggtggtttgggtgagctgggggtagtgctgttagccaaccttttacaatatttaacaatcagtagagattaaaagctgtttggcctctttcccattgatcacatagcctttttctttttgtacaattttagtatgattaaccctcccacccccattaaagttcttcagccttcttagtagaaagctctgtgaagtttgattcacccacggaagttacttcatggagtggaagcatttgagaaatcagatcttggctttcttcttgtggacagatcaggtggctgaggcctggagggagcttgatttgagatgagtagtttgtatgcctgactaagtcaagtagccacttacttcccttcacacttaatcaaatcctaactctctaactgaaactttgtaccatttgaccagtacctctcctttccccattcccccgctcccagcctccgtaaccactgttctactctacgcttcttcaccttctactttcttagattccacatataaataagaccatgtggtatccgtcacatatttcacttagcataatgccctccaggctcttctgtggccatggatgataatcatgtattgtatatttcaaaattgctaaagagtagatcttaaatgttttcatcacaagaaaaggaacttggtgaggtgatggatagattaactagtttgatttaatcatttcacaatgtatacatagatcaaaacatcccattgtatcttataaataaatacaattttttttgtcaattaaattttttaaaaattacaagaggctgaggtgaggttacagtgagctgtgatcatgccactgcactccagcctgggtgacggagcaagactctgtctctaaaaaaaaaaaaagtgaagttaaaaattaattaatttaaaaaaatcccaactcttccat

SEQ ID NO: 78172 - DNA, 2940 bp, Homo sapiens
ccttgggtagcttccctgttactcctcaggggcttccctggccaccctctgctcgggcccttcctgagtgttacatcagcacctttcttgcccgcacccaccaccagccacagcttgtgtttgccgtgtgagccggagcacttgtttgtcacctcacggtcttcccctccatgagggcaggcacggcagtcttgctttcattcttgctttcatgcagtctacccagctgtgggcgagatgtgtgcacatcgctcagcatgtttgtagaatgaacacatgtataaactagacttgaatggagattattgttctctcctggccattaaaggtgcttcttcctgctgctcatttacatctcaggtgttaccatctctggccagtgcctgccctgttgttgtcatctaacagtcatgggaccacacctttgtgactctcagggccagaggtgtttgggaatgtggaatttttgagatttttagaacagaaatagtgaaagtaccgtatagtataggacatcctaggcagcaccatataatcaagcacattaagatttttgcagcaaaaagtatatgaatattcacactaagtgggacagtgagactatgaatagcttcacatcagatcagggcataccgccaagtgagttatgaacatgctttcagttttcagagagctttttggattttcaaattgcagagaagggattatggacctgtcttagtgagcatctgcttgtcacgcattatgcagcgtgctgaaatacaaaggaagaaaacatcacgcctgccctcccgtgtagggggtgggtggtcaccacatgcgggtggtgagcccatgctgggagggcactcccggcaggtcctgttgttctccctgtcatctccccctttcctttgcgagcgtcctctacaggtgcggtttcaggtgagccacatggggggctggcagaaggggcactgcattgtgacgcagggtcaaatgtgtccctctcagagtgtaggaggtaaccgttctggatcgcctggatcctgcccttgggtctggctgcccgggtccaaggaggaaagggccgactccaggtgatgctgcagaccaggagcgctgccctcacttcctaaccttctgcacttgggtgccggggccccctctctgcagtcacacactctgccctcttagctgggcctagagctttaaacattaactggattcaacatacgtttttctgactttttaaatataatgagtatagttttattttaatgtttttcagatgcattttgatgtaggtaggtacctttacattttaaaaatttatttgctttctgaaatgggaccagcatatatatatatatatatatatatatatatatatatatatatttttttttttttttttttttttttttttttgacaggttcttgctctgtcacccaggccagagcacagtggtgcaatcacagcgcactgcagtgcagcctcaatctcctgggctcaagcgatcccccacctcagcctcttgagtagctggggttataggcacccaccaccacacttggctaagttttaaaaaatttttttatagagacagggtctcactatgttgactaggctggtcttgaactcctgggttcaagcagatcctcctggctcagcctcccaaagtgctgagattacaggcatgaaccaccacaccctcctggtacctgcattttgaaaatgtttcattgccaagcctgcagggaagtctgccctttttttattagaaaatgaagagctaattctgaaatatgcctactaaatatgcatatctcaagcactttaaaaggatgtagggtgaaatagtctgttcctgaagcaaatatcactgtgtgttcattccattatttccgtagcttttctgtggcttttgataagttgtgtagaatgtattaagtctcatctgaaaatgtatattaaagattgttcttttaatttaaaatgatttgtccaaggtacttgacttaatgattcaagatttaatgagccgtgacacttttagtaacaccgtctcaatctttcagattttataaaagatattaaagttttcagaaagttgagaatggtcttttgtaatgtattttaagatagttaagaatagagtttatataattaagattaggatttgtattgcaaaaactcccttcaagacgcattttgggcctttatgagcgagtaatcatgacaggacagagtggcttcacccacagttttgtggttaatatttgcaagtcgtttatttaacaaggttgaaaagaggcttcctggtgtcttttataattatccttttctggggaccaacttataaagtaaaaaatacctggtggcattatctttgcttcagatgtattatgtttatggaattggaaatgtttgatttcttagtgtgtgtgtatcagtggattatgtagtttaaaatgtttgcatctgtattgcatgcataaacatgtccgtttccaagtgtggcctttaaatactcagggttttgtggccgggcacggtggctcacgcctgtaatcccagcactttgggagcccgaggcaggcagatcatgaggtcgggagttcgagaccagcctggccaatatggtgaaacccagtctctactaaaaatataaaaattagccgggtgtggtggcgtgtgcctgtaatcctagctattcgagaggctgagacaaaagaattgcttgaaccctggaggcggaggttgcagtgagccaagattgtgccactgcactccagcctggatgacagagtgagactccatctcaaataaaataaaatacaataaaataaaagactgagggttttttaaaaggtcataatagaaaaattttatgtgttttaattgtttaaatgttttcttcgggattaaaaaaacctgaatgtattctgggaaaatgt

SEQ ID NO: 78173 - DNA, 1073 bp, Homo sapiens
tgaggtaacaacgtcttttccagttggtgtcagtgaactctgttttgggtatctacaaaagcagaaggggaggttaggatgtggctggaggaggctggttcctgggtgtaaatcctggctcttctgcttgaactgactgtgcctcagcatcctcgtctgtctggtggagccgcctcacagaggaacaagtgagttgtgcgtgtggagcaggtggctgacatgtggtgagtcctccaggaatgtggcagcagaaggaacacgttgagcaccgcagataccaccctgaccgccactgcagggcttctgtgcgggggcagctgcagagccgccgcttcaggacagcatgggagctgctggaggtcgggggagctcagggaaagggccttgctgccaggggtgggaagggagtcagtgaagacgtcctggaggagaagattccagagcctgagatgtgaagtaggttaggtagccagagacaaggcaaagaagggccattttcatcagagaacagcataacattggcagaggtctgacatgtcatttcctgttactagaattggggagtgaccagtagattctttaatttgtttattcattcgtgcagtccttcacctcacacctgttcagggtccggctgggctctggacatagggtggaagaaaaccatctgagcagaggccgcgtggactgtcacctctgtcaggggtgccagggctgccaaaggacagctgttacttatgggtggcggcgtggtgaggtcgcacaacacagagctgccctgctgtgtccatgccctggtgcctccccgtggtcaccatgtgccttgggcaaatggaggcctcaggtcccagacataggctctgtcagtggtggtggcggtggctgtacctgctccgggctgctgtgagggagggacgggctccggccacaggcgtgcaaggtccccttgcagaggacctcccgcacctgctgaggaatgtgtacagccatctggagggtgttctccccctggccctccctgtagtccagctgagtccacgtccttcagccccttttcaatgttcctttctcac

SEQ ID NO: 78174 - DNA, 1029 bp, Homo sapiens
gaattattgaagatgttctttgaagagatctgctttttctttgatttgctaaacgtagttggtttcagaggtgtagatacgcatagaatatattcatttctttaacttaagcaatgacagttacattaatctggatggaacttttcgtcttaaaaaatctcagccactggctgtagatgatgaattctaatctccttagttcttattttgcctttagaagagcattttcagatgtgtggagctctgtgtttatccgtggggtgagctgggtgctacctccagctgctgctcttcgtttatcttagagggaggccaagagtcagagcggagatttattttgcaatgaattagtggccccaaacggtattaaatgcattatgggtggtaatttatatgtccaatgccaagaaatataatgttggggttaccatggcaactgcttgcattctgaaaagcttgtgaatgggttctgaaccttctggcattggaagtgagcttttccagctgagggcctgcattcgtgattagtgtaaataaattcagctttccatatgaagcacatcctttctctttgtttaccagagtagtccattgagctcagttctttctctggtgatgtctgccttggtctcttggttcctggcaacagaatatggttgagacatagttttcaacttcaggctgaggaactagcctgtgtgtgtgtgatgacctgccacctcagtccatgcactgtgtagaaggggctggctcatctgtacctcctgagggctggcaatgcatgatgtctccaaaagcacagttgcagccgcatgtgctggtgggctcctggcacagctttctatccatctgaagggcttgtttccggtaacacttgctagggctcttcctgggaggcagccctgcctgtttccagggtatcatggggattggttttggggagggaggcccaagttagaaagacccatgtttaaaatgtcaagcttgtgaaaatgataaacgagggcctattgtcttcattgccgaaga

SEQ ID NO: 78175 - DNA, 1039 bp, Homo sapiens
ggccagacactgggagaatgttttcatgctctgtagaattcattctctttgttaataagcattgagattatagaatttaaatgttgagcttgaggatagactggccttgaggcacacagcgggcatgctgctgtggctcacctgtaggcctcagttaagaatctttgtctaatccaatccctttattttacagatgaggaaaatgaggcccaaagaagtgatgccacttggttaaggtcccagagcaggtcagaatcagacctaggatcagaaacctggctcctggctcctggctccctactcttctaaggatcgctgtcctgacagaagaggtttgctctcagttaattgatgttgttgttgttttgctttccttttgtcagaaagaggcctgtaataacaacaggcatctaatttagactctgtaatttagaattttaaaaattcttgtcttcccttcttctggttatttatagaatttctactcagtgtgctggagtcacccataggaggggcaaagggcatgacctctgcccttaacgctgtgtgctgtgatgagagatgggtgcatagccgagcctgcaaactggaatgttgggataaattctggcttgacatctccatttctgccaggctgtggtattctgtgttcttacagagaagctgcagtgcccagcagttacccaggggtgaatctgaatcaccacctgttaaatcaaggtcatgatactgtatttactaaggcaggacaacatagtaatttaggctcaacttacaagttgcaacttattacaagtaataagaggttcggcttacaaggtttgaaatacaaattgatttttttagccagattccattgaaccctggtttttaattttccaatcttgaaagaagactgagattttactgtataactcacttagggtgacattgtgttttcctaagtattctcagtgatttctcccattctccctattcttctcacatgggactttgacagagagctgcacctgggctgggtgtgtggcctccctcaccc

SEQ ID NO: 78176 - DNA, 1075 bp, Homo sapiens
ctgtgcccagccattatttgcttttagttgaatttgtgtgtttggagactgagcacttactttcaacagtgaagaaattgacttggcagcagttgctgcaggtggctgttttcggtctacctcatactgtcagtgtgtcgcccagatactatataattactcagttattttgcagtcacaacatctttgtgtgtttgtatttatttagtaattagaagaaagtttttatgttctcatagtatcttcctgtctacacagtgcatttgtttactaatttatatccatttgatacacatctaatgattgcctctgatgggtatatgtgggaacatgtacattccctactgttagctgcaaatagtgagaagtagttagagcataatgtttcacatcgaagtaatctctttttcaaagacatctctgagaatgaaaacattaagtttggcagttccgacaaactcttatagtgataaggtattagtctaattctacttagtaagaaagttattcccggagacttccatttccactatgatggaattagaggtgatttacgccccccaacccaggactagggtaaggcaagtgaggcacttgcctcagtgcagaatttaaagggacacccaaaatctcagtaatcgagattattaatattttaatgcagtgctttaaaaaaatcaaatttgatgcaaaaaaaatccatgatgaaaaacaaaattattttttactttttaagacagggtcttgctctattgcccaggctggagtgcagtggagcaatcatagctcactacagctatggtaatacagatgggtgggctcaagtgatcctccagcctcagcctcctaagtagctgagactacaggcacatgccaccacgtctggataattttttatttttttttgtagagtggtgtctcactgtgttgcccatactgatctcaaactctgagctcaagcagtcctcccgtcttagcctcccaaagtgctgagattattggagtgagccaccacgcctggcccaaaacccaaatttgaaagacaggatcagtattaatgatttttctttttgtc

SEQ ID NO: 78177 - DNA, 1018 bp, Homo sapiens
gctaatttttttgtatttttagtagagacagggtttcaccgtgttagccaggatggtcttgatctcctgacctcgtgatctgcccgcctcggcctcccaaagtgctgggattacaggtgtgagccactgcgcccagccaaaaaaagttttgaatttgctgggtgtggtggcacatgcttgtaatcccagctactggggaggctgaggtgggaggatctcttgagcccaggagtttcaaggctgtagtaagtcatgatcatgccactgcactctagcctgggtgacagaggtcgaccgtgtctcaaaaaaaaaaaaaaaaaaaaaaaaaaaaatactattataccgctgttcagttagcaggaattaaaaagtttggcaattgttgttgaaaaagttaagcaacagaaactctctcatacccttctgatgggagtgcacattacagctgctttgggaaatagtttggctttagagtataagctagcaatcatacttctaggtatgtacaccagagaaacacatgcctaaagtgattgagatagctgtaccagaaaaatcttaagtcgtgtttatatttgctccaaagcagagaccaccctcggggatgagaatggataactaaattatggtatatttactgagtagaatattacacagcaatgaaaataaactacagacacagcaacaacaaaaaaggcaaagaaaaaagcaagacaagaatatatgtagtatgattttgttattttcatctgcttctggtttttatataagttatgtttggtagggctgcacacctaggtgataaatctctaaagaaaagtttggaaatgataaaccataaaagttaaagcacagtagctcatgcctgtaatcccagcactttgggaggctgagatgggaggatcacttgagcccaggagttccagaccagtctaggcaacacagggagatccagcttcttaaaaaaaaaaaaaaaaaaaaaaaaaaaattttccggacacggtggcatcctcctgtg

SEQ ID NO: 78178 - DNA, 1051 bp, Homo sapiens
ttttgaactcctggcctcaagcagtcctcccacctccgcctcccaaagtatgctgcaagcttaagccatggcgcctggcagatctagtgttttttgaaatctcatgttttattctaacaattgatcgaaacattataatctgcttctcaatatggccatgttttatgcttttcacgtcttcaaatacagttgacactccaggaagatgaaccttatcacatttgcaacttctgccccttatacagccccggggctccagccccatgtggcaggcgtgacctaggggaagcctccatctggagaagtgctgcctgcacttggttgcatatcgagtggactgagcccttggctcctctcgctgcttcctgtccagatggcaggactctggtcgtgggccaaaagaggcacagtgtctttgcatataataaggattgaatgaatactttttaaaaatcctaactcttatgaaccaagggatactgacaatgctgggccccaaataactattgttttctcaaaggctttaagaccatgtgttatactgtgatttaatcaggttctttcctaggagtctgcctgagtcacttggtctgtgtgtctctccctccctgtcctaagggggcttttcatgtgtgactgtgttctgcctgcctgtctggtaagaatccagcctcctgttacttgcccaggatgctgactgtgggccctctcccgcagtggaacatttggcatcaggtaccaggaacagagtcagtatgctgaaatgtttgcatgaatgtggattttcagaaagctttcttatcagcagggcacacctgtctgttcgtgatctttgcccttctccctttattggcatcacttggacgatacctttaattgccctgctgggcttgatgttgagctgcttttctccatgtgtgtcgtgttttgtgctttcttgcggcaggagccttttgctttgtttatctgatgcttcccttttttggttttccccgggctttccagctcttggagcacccttttgtcagcagatgtacttttgtttccagtt

SEQ ID NO: 78179 - DNA, 1081 bp, Homo sapiens
gcagtgctgggacgccagtttttgtccctgaacaaggaggttacaaggaaaagtttgtgaagaccgtggaggacaagtacaagtgtgagaagtgccacctggtgctgtgcagcccgaagcagaccgagtgtgggcaccgcttctgcgagagctgcatggcggccctgctgaggtaggcgccctcgcccggcccgtcgcccggccccttctcagccctcggcctcaccctctccttcattcgtttctctaaaaataaacctctagaggtttaaagccctaaagaagtccataaaagcctccgggcccagcttgtgaatcctttagggaggtgcagtgggatcccacgtgtgggtttactgaggcctctgcgtgtctctgacctgccccgcccgtgtcttcccactccgtctgtagagccttggtgcccctcatatgtgttgctgtattttattgaggaacctcacagttccatggaggagatacaccaggaaatgacaagccagtcatttaagggcacgtgtgctggtgtgcaaggatgccgcagagaggagggaggatggggtcagcttaaaggactggacaggtccctacccgagcagaaacctaggccgcatgcttactcagcaggcgtgtgtggaacatgcaccgagcccatggcagccctttgctgctgagtgccagtgctggtaccgctggtggatcatgaaggcaggctggagctttactgcagaatagcatcggccagaagagcaccttgattcaccctgcaggcctcatgttttctggcattgtgctgggtgctggggtcgctgcgggatgccctggtcttggccactgccgtcagggcatgtcggcctgggaaggttgccagctcctcctcccacagcactcaagcctgggctgcacccgagccccagcctgggcacagcagccagccccctgccctgtcacctgccttcaccctcccccttctccatgcttccctctgtggtcttacccactcatcccaaatagtcagctaacctttgcccacttgggggcaaaatgacacttgagcttagtgacagcacaggagacacag

SEQ ID NO: 78180 - DNA, 1810 bp, Homo sapiens
tggtctcttatgtggtctctccatttctccagcaagcgatctatacaatgtattcagttgtgtccagttctgctcttgtcctctggtgacagctgcaccataatggccacctgctccgtgctggctcccggaaggccccagagtctgaatgtgaacctggtcctcctctgccctcatcctgaaattatgtcaaagttaatagaagatgtttagatgctccagagtgatcgttaattatcaagtctaattcattttcttttggcttaactaataaaagataacagttaatgttatttaaattgtgtctcttagtgggggcagcttcttcattctacttctagaaatcaagatggtccttaatgctttctgaagttcacttaagagttcctctcttgttttttttttttaagtggttttgccttgtccaaagtagcagcatgtggagattaagaaatattaatcctccaaaataatgatctttcattttcaggtgtttaaggataattgctgcaagagagaaattctggctcttcagatctattgtcggaatgaaagcagaggttgtgcagagcagttaatgctgggacatctgctggtgagtagcaaagggacactggaaccttttacatgaaggaattcgagtcccttacatccagctgatgaagtggtcagtaggatgtggcactttaagaccatgttgacattagtttttcaaaacacagccaaataggaaagcagtcagaaccacttgagtataagttgttatttttatgacatcattggcagaattgtcaactggtttttaaacactcccccccctacttagaatagagaaaatctgaattggattttaattttggaaggcccattaaaaccttttttcaccatgaaattctacataacttcttatttttttagttagtaccatattttagcttagaaaattatttgaactggaataaaacaaagttcttagcagatattcatttatcctggaagcagagttgacttaattcttcaacaacaatatggtttgagtaatcatgaaatagaatatgaaattcagtgtctcttggcatacttgttactctttgctgtggaaaactggtctaacagcagatgagaaacatttctttagggtttcattgcatagagattagaatctggtatttcagatttagggtttttttcccaattaagaacattgaatggtctgtcttacaggtgcatttaaaaaatgattgccattttgaagaacttccatgtgtgcgtcctgactgcaaagaaaaggtcttgaggaaagacctgcgagaccacgtggagaaggcgtgtaaataccgggaagccacatgcagccactgcaagagtcaggttccgatgatcgcgctgcaggtgcgggtcctcccattccacaggccttccactcaattcctatatgatacattccacaggccttccgctcaattcgtagataatccgttccacaggccttccctcaactcatagataatccgttccacaggccttccactcagttcatagatattccgttccacaggccttccgctcaattcatagataatccgttccacaggccttccctcaactcatagataatccgttccacaggccttccgctcagctcacagataatccgttccacaagccttccgctcaattcgtagataatccattccacaggccttccgctcagttcatagataatccgttccacaggacttctgctcagttcgtagataatccgttccacaggccttccctcaactcatagataatctgttccacagtc

SEQ ID NO: 78181 - DNA, 1057 bp, Homo sapiens
agcaaaaagccttatgccattttttggaagtcagaagcaagcattagggttaaaagctacagtgtatggccgggcacagtggctcacacctgtaatcccagcacttttggaggcctaggcagatggatcacctgaggtcaggagttcagaaccagactggccaatgtgctgaaaccccgtctctactaaaagtacaaaaactagccaggtgtggtggcgcgcacctgtaatcccagctattcaggaggccgaggcaggagaatcatttgaaccggggaggcggaggttgaacagagccgagatcacaccactgcactccagcctgggcaacaagagttaaactccgtctcaaaaacaaaacaaaacaaaactacactgtggtaaattcagagcaaagattgtgaagcattaagaaaatgggaatattttacatacagtacaagcaaaggtgacgaggggtttttaaagcaattttaactctatagaatagtaattgctgtaagattatctcaagaacatgaattaacttagagacacttcagaaccattttgctcacacatgccgggtggaggacagctcccacattttagggctgccagaagggcccctgtgtggcctctcccaaaggttgcacgtctcacattgcgcttggcactctttctttgagacaggtagattttgcattgacttcacttgatcaggatatgtccagttgggaaaatttcaaggattcttaatgtttctgcatctgtcctgacggggagctcctttagttagtattctgggagtcatctggggctaccctgggctccctggatgtgtggtacgctgatctaaggagccggctcaccttttcacctcagcatttttcaacagcctgaaattttaccactggatactgggtaacagggagaaccagcctcgcatgcccctgactgagcaagagggcccatgtggggctagggccagggactcagggtagaggagggcccagagagccactctcccccagggtgtgccctcccagcaccttgaagctgatgggtgagggcaaag

SEQ ID NO: 78182 - DNA, 1058 bp, Homo sapiens
gttagccagcatggtctccgtctcctgacctcgtgatttgcccgcctcggcctcctaaggtgctaggattacaggtgtgagccaccgcgcccggccaataatttcttatttaaaacattgttaaacctgcatttctgttgggtttctgatgaaaggtgcttttgagctatagattattcttgcccctattccagagatcctgtagattccccgagactcagaatactgataataaaaccaatttagaaaaagacccaacaccgaatttactctagtacactgaaaataacatacatcaaacccagtgtgtcagtgtgtccctggcttaacatgtaatagcgttgacactcaggtttgttattgcagtaatgacactggaagaatacattccaagtttttaaatgaacctggttctgcgcagtcttcacactgcgtttccttgccagtcacctgtcacgtgccttgtgggcgcttcctgcaggggcagccggtctgggttctgaggagcagcaagggcgtcaggctgccaggttcctaccaccttgactctgccctggctctgagaccttccttgaaggttgaccctagcagtggccgcatgggcccctcagtcccttcccgcagtgtccctcctccttagtttcgcagcagggatccattttcccctctgttgtaaatatccacctagagggaaggaccgcctttgtcctggtagactgagaagttgtagaacttagctgcgccctccaggaggatgtgctctatgagccttgggaacacatgcatgctggcacacagaagaacacattcccggctgctgcacccacacacccatcctcccaaaaagagtctgttttctgtgaagaagatctatccctagagtttcctgatgggaatttcttcaataaaagacaaaacttctgctcagtcttggggcatgataaagaaaaagaccaaactatacctcatttgtattagcctaacacatgactctaagtccttaaaatgtaatcctttccattcccttttctcttgttagggcatcataagtaattttt

SEQ ID NO: 78183 - DNA, 1053 bp, Homo sapiens
acttttggttacattaattaaagaatttcttttttaggtttccttgttgcagaatgaaagtgtagaaaaaaacaagagcatacaaagtttgcacaatcagatatgtagctttgaaattgaaattgagagacaaaaggaaatgcttcgaaataatgaatccaaaatccttcatttacaggtaagaatcttaggactacggccagatcaaagggtggaggagcttgcctgtgttccccttaagggtttcttagcaaactctttgagctgagtccttgacctttgcaagcagaaaggcaactgatttctctggcctaagtgaaggcttagaaaaggcagctggactagcacaggcccggcctgggaagccgcaggtcagcgttttcaaactgccttttctctggagagcaagcctccacccctcttccatgcctttgatctaccgttggagaaataagatgcgaagcttgtatttgttaaattagctgtttttattatttaagatttcatattgttcatgagtagttgctgtgtgcaaagtctcacttcctgcagtgaggtgctgtgcagcccagctactctgtgtgagctttccagtgacacgcgctcacccgctgggtttcactgtggaaatccacacgcacctccagaagaacaaaccagtgaacctttgctcccctgaatagaggcgatgatgtaaaggggactgatgaaatgtcgcttctcctgtcttctgtcgtcacaggtgtctgtggggtgcttgttaatagatgatcattgtagatgctctctgcacattcacttactcgtgtgcatttgtgatagcacttcccatgggtgtgtcacacaccgtggaagaatcactcatgtcactgaagggcctgaacttagacggtgtgtccctagattatctggaagagaaactacttctaatagcacagagtcatggcatctttgagaatgccttttctccaatttttgacattggagatgagtcatagtgacttgaattgcgtagggatttattaaattaatttcatttttattatattttgt

SEQ ID NO: 78184 - DNA, 1902 bp, Homo sapiens
gccaggcacggtggctcacgcctgtaatcccagcactttgggagatcgaggcaggtggatcacctgaggtcagaagttcgagaccagcctggccaacatggcgaaaccctgtccctactaaaaatacaaaaattagccaggcgtggtggcaggcacctctaatcccagctgctcaggaggctgagacaggagaatcgcttgaacctgggaggcagaggttgcagtcagctgagatggtgccactgcactccagtctgggcaacagagcgagactccgtctcaaaaaaatgaaataaaataacgagtgctggtgcagctttgctttcctaacctctctgacgttcacctgtctcattcaccaaaccctcctcacctgtggcaggcctgctggagtcccagctgagccggcatgaccagatgctgagtgtgcacgacatccgcctagccgacatggacctgcgcttccaggtcctggagaccgccagctacaatggagtgctcatctggaagattcgcgactacaagcggcggaagcaggaggccgtcatggggaagaccctgtccctttacagccagcctttctacactggttactttggctataagatgtgtgccagggtctacctgaacggggacgggatggggaaggggacgcacttgtcgctgttttttgtcatcatgcgtggagaatatgatgccctgcttccttggccgtttaagcagaaagtgacactcatgctgatggatcaggggtcctctcgacgtcatttgggagatgcattcaagcccgaccccaacagcagcagcttcaagaagcccactggagagatgaatatcgcctctggctgcccagtctttgtggcccaaactgttctagaaaatgggacatatattaaagatgatacaatttttattaaagtcatagtggatacttcggatctgcccgatccctgataagtagctggggaggtggatttagcagaaggcaactcctctgggggatttgaaccggtctgtcttcactgaggtcctcgcgctcagaaaaggaccttgtgagacggaggaagcggcagaaggcggacgcgtgccggcgggaggagccacgcgtgagcacacctgacacgttttataatagactagccacacttcactctgaagaattatttatccttcaacaagataaatattgctgtcagagaaggttttcattttcatttttaaagatctagttaattaaggtggaaaacatatatgctaaacaaaagaaacatgatttttcttccttaaacttgaacaccaaaaaaacacacacacacacacacgtggggatagctggacatgtcagcatgttaagtaaaaggagaatttatgaaatagtaatgcaattctgatatcttctttctaaaattcaagagtgcaattttgtttcaaatacagtatattgtctatttttaaggcctcatctggtctctgttttaataatttgtttgtcagaagaccctgaagtatatacctaggtcttttttttgaaagtctctaaattcagaatcattttttaatttaaagttctacaaataattgttactgcaaacattttattttaaaacgttgatagactgatatttcttggaagaaaatataaaatatcaaacactggttatcacttgtgataggaaagagaatattcaacctgttgttatttctcgttagaaatgtaaaccttcaaatatctgtcgtagttaatgacacgacttcacaattctgaacggagcctcgctcatggatgctgtgcatcattttcagatttataattgttttcaccctaaaatagggcatccgttgaactttggagttctaaacaaaatcctgtaggtgtttggattctgccccatgtgttcggac

SEQ ID NO: 78185 - DNA, 1150 bp, Homo sapiens
gtactttacagaaaccaactgagtcgtttgtgcatgaattaagccggtctgcttccccgtcaccttcgtaacaaaacaacgtcccctctcccctcgcctcgagcagtttcttcaggacaccgtggctcgggctgctccctgctgccaggcacgctggttggctggcctgggcccggctcacgtgaagggcactggctcttgtgaccacactgagccacgtgcaagccgcagccgggcctggaagcctgaccctctggttctagggcttgtcccgcggagcctgcagagctagacgttggggtgtgtccgtgatgatatgggggccaggctgggagtagggcctttctagcagggttgggtggctcagtgagggtgtggaagtgggggacccacggggcctggctttgggactagacatgccagccccagctgggctggagggagcctgagtgagccccgacatacgctgggcctttcagctcgccgtgctctggtgacacacaggcggccaggttgggatttgtgtcaattctaggagccatcaagcatgaatgtggttctgtctcctgagcgcaagcctcgccggacccctgggcgaaggcctggacttgcagatgtgtgttccctgtgcgggtggacagagggggcccttatgacccacattgcagccccattccaccaccccttcctccccagagcagtctctgccgagggacagcacctgtgtcccttcgatgccacaacagccagttgaacaggggagccctttgctcaggcagcttctcctgcctctccctcctttctccttccctgccccatccccgtgcccttcttggcctgtggcgctggggagccatggtgtggcatactggggctcctgctccttgggccacttcctcagcccgggccccacaggcccaccacctgccagggctcccactgcactggctgtggcaggaggcttccccatgaccccgtgtggcccagctcggtgaggatgcagttctaggcacagcccctgggacagccagctgcctcccagaccacgtcagcctgctccagggtcctcagtcaccctgggccaggggccacgtgtcccatggatgtcgaccatgccaacgtcacattccagcaccccttttgcttgatg

SEQ ID NO: 78186 - DNA, 1786 bp, Homo sapiens
tcagcatggtggacccacatcctacagccagaggtgatgttggacaaaggaaggggagtctggatgggtccttaaacgaccattctgtccgcagcggggtcattccttgtcagcccaagggagggccggggagtacactgatcccaacagctgggctgacacctcctttctcccctgcacggggaggattggcctgaggaccgtcaccctgtgcacagccccagtagggtggcagtgccactgtctccttgggccgttgcaggattgggcgggtgcagactccccttgcgggccccttgctcaatccccggccctcccagactcctccctctactgggggtaatttgtgtgtcagaagggctctggcagagctgtaaaatactgttttttaaaaattttagtccagatctttacttattagactgcagaaggagagctagggagagtgggggaagcccccttgcttttgtatctgtgaggtgaatgagggtctgtcacccaaatctacttctcagcccatgaccatagttctgttttccgtttgcaaatctcagtagctctgttttctccaaagtagaatgtgcgcaccggggtcctagccaggcgaggtcagtgtcggcaggctacctggtcattattgctgcctcgtccaggctgatgctgatggtcacaggcacggtggcatcagggagccgggccagcaggcggcgtgaggcggggccagcagctcactgcaagggcattttccacctgatcctggtgtgccccacatgcggtggcagggcagacgtgtgaagcctcggccgtctcggggctggcaggtgtgcgggtgaggaggccccggtggccaagcagagcctgcgtttcatttctcctgctgcactgtgtctagtctgtcttgtgaactctcaccgtgaaaagaggctagaagtccaggatcgctgtaccgctcctgtaattaggtgatgactggatttgacaacttagtcccctcagacaagtaagataccctccaacagcaaattcaatgacttaattggaaaacacacaagctggcatgatgtccggtgatttctgtaagaaatgcctgtaggagaaggtctgtgaagtgtggagggcagtgtcgacgctgcacagcatctgcagattcgcagcctcttctctgccggtgcctctgttcggttctgttacccaaaaacaaagaccaaagaaggccaatctctcatttgaccctgtctttttaatctgcctgttttaaaagttgcgtctgtagtagccgcttgctgtgaagacacatcttgacagtccaagtgattttgtgaccagtgatttgggtcctgttttccgctcttctaagaaaaaacaaaaagaccgtgagttattgcccagcaataatcatgttgttactgtgagttagcaacatgcctgacttcctgatagcattactgttttctagttttgtttattgtatattatgtgtggttttatttggtatttatttgtgttttgaggtcttgcaatgtttttgtgtttctgatgctaataactaaagtttgtaagactgtagaatgcaaaactcggagatgctaaactgtcttattagaggaaaataaatctgattatggagtctcagtctctgatcacaccgtctcttgcaggctgggccccaggtgagtggcttccctcctgccggactccccgggctgtcctctcagtggctgggcccagtatggccgcctggccaagacctgtgtggccagaggcccgtgcttggtttgctgccctc

SEQ ID NO: 78187 - DNA, 1003 bp, Homo sapiens
caggcaggagccactgcgtccggccccatctgatttcttcactacagagttgctgtcttttgtaatgataattaccatgttatttttgagtgggattagacatcaatttgtgactctcaccagcacgcctaagggccccacgaatcgctggtgtagagcgtgtgtgttttcataacatgaagggagaagagcagttgcgacagttgtccctgagcaaacatttgcatccagctgggcacgcgtgcctccccaggctagggcagcgggtgctcaccctgccctcttcctgttcacagcctgattcggactccaccaaacactcaactccatcgaatagctccaaccccagcggcccaccgagccccaactccccccacaggagccagctccccctcgaaggcctggagcagccggcctgtgacacctgaagccgccagctcgccacaggggccagggagctggagatggcctccagcgtcagtgccaagactgagcgggccctccagtgttgtccaaggaaatgtagaatcactttgtagatatggagatgaagaagacaaatctttattataatattgatcagttttatgccgcattgttcgtggcagtagaccacatctgttcgtctgcacagctgtgaggcgatgctgttccatctgcacatgaaggacccccatacagcctgtctcccacccctgacaacccgagagggcatatggggccctgccaacaccacttcctcagcagaaacccgtcatgacgcggctgcttcggaagcagacatctggggacacagcctcagtacccagtcttttccctagttcctgaaactttcctaggaccttaagagaatagtaggaggtcctatagcattcccagtgtcactagaattttgaagacaggaaagtggaggttagtctgtggcctttttttcatttagccattgcacagtcagctgcagaagtcctgctgaccacctagtcatggacaaaggcccaggacc

SEQ ID NO: 78188 - DNA, 1044 bp, Homo sapiens
tgatggccaggagccaagctacgctgaggggctgtgggggcagtgagcgtgccacccacacagagggactgagcggaagacgcacaccgctcccttgtcgtgtggcacagctgtgtcactgctcttctaaacgtggagaaagccccttaaactccaaatggccaaaggctttgcagtccttggtttcacatccgtggcaccttgggtggagttgcttctgtaagccaacagatgagcaggtgaggagcacagcgcggaccccagagctccctgcaggacgcccttagcctcgcttgcatatgccctcagaccgggctgcagaggggcttcccacgcccccatagcacgggttcctaggggtctagggtcattagtgtggagggcagacaggcagggttgttgcccagaggtcagcagtggtttctgtgtggtttttaatacctacctggaaaccggacttgccatctcctacggaagaattagcctcaccatactgaacagtcggcccctacctgaatttccaaagtgttgagcctgaattagtagctttcaggataatcacatctcatgagagctaaatgaaaaaccagactttttaaaagtcaccttcaacatctgtactgtagtattcaaaatattagttacggaagtgattgtggagcatttaaacattggattgtgtttgtttaaactttgaaatgaagatgaattccagagtgggaacatgaagtctttggtgacgtgaaccagctgagggcagtgctgccgcctctgcacttgttcaagtgccaaggcttggcctccggcccgagggcaggtgagttcctgagccactgtggctcaccccgccctgctccgtctgcgctaggttgcagccccacccacgtcacggtgtacagcgagtatggcgtggacgtctttgatgtgcgcaccatggagtgggtgcagaccatcggcctgcggagggtaaggcggcctcggtgccctcctgtgcgggcgggcttctcccggtgcagtctgtgcgtggccgcgcttactgtccct

SEQ ID NO: 78189 - DNA, 1009 bp, Homo sapiens
tggctagacaccaggcctgtgaggtgcacggccagctccacccacgggcttactgcagtgtgtcccggctccatcccgatggccacaccacagcagacatgtgtgggcagtggggctgggccgtgggcctgcggtgaggtgcaggaaggggccagtcccgctgcctcagcaccccttgtcctggactcttaccccccaacaccctgtcctcttcataggcagccagcacagggtttaaaaccacacaggatttacatttttgcaaagcgtaacgttgaagagggcccaggtcacttagtgcaatgtatttataatcttggccacacgtgtctggcgtagacacctgaagttcctcggttctccgccttggtgggtcttctctcctgcgggcacagtgcagatgcagatgagtttcagagctggtcaaaagtaattccatcacctgtaggatgcagaactgctcattctgcaccctttgctagtgccctgtgtgggtggcctcccctgcccctccccatcccttagggcaggtgttatcagccctgttggagaggaggcagctgaaggccacaggggccgcgtgctctgtatcagtcacatgtcacatctgtcaggctccagagcccatgttcttttcactagaatctgtttcactagaatcttttcactgggcatctgtttatcactgagtcagcaaactagacttcttcctgcttccttgcaagcgaatccccacatactcggcaggcaagggccttcccagaagcccgtgtggagagtggttccctgaagggcagtgtctggggctgcttttgacttggttctcagaggcctcacaggtgcatctgaaatgctccttctgagacagtttggtgaccaggccagtatcttttgtctttcttgcaaaccctgtttgatttccctttttgtattcagaagaaaagtcctgatcttgtagcctgtttggagtctgtgatagaaacagagcagaaggcttttaaaatgcatc

SEQ ID NO: 78190 - DNA, 1029 bp, Homo sapiens
tcctctgtggccggaaccaccatgtgcacctctatccgtggtcgtcccttgatggagcggaaggcagctttgacatcaagcttccggaaaccaaaggctgccagctcatggccacggccacactcaagaggaactctggcacctgcctgtttgtggccgtgaaacggctgatcctttgctatgagatccagagaacgaagccattccacagaaagttcaatgagattgtggctcccggcagcgtgcagtgcctggcggtgctcagggacaggctctgtgtgggctacccttctgggttctgcctgctgagcatccagggggacgggcagcctctaaacctggtaaatcccaatgacccctcgcttgcgttcctctcacaacagtcttttgatgccctttgtgctgtggagctcgaaagcgaggagtacctgctttgcttcagccacatgggactgtacgtggacccgcaaggccggagggcacgcgcgcaggagctcatgtggcctgcggctcctgtcgcctgtagtatgtatatgttttctgttgcatatccctgttgctgcttttcccaccgacagtcagcatgtgttcgattttgctttggtttgtcttccagtcccttagttgagtagtcacagagcatcgggagaggtgggccccatgccagcccgcagcagagagcatggttcagatctcacgtctcagaccagcagtaggcgggctcagcaacctctctccctgagcacatggggccggttcttccagaggcctcagcagaggaccccgtcggcgggcataggcccctgggcagaagggctcggcgaaccgagaacggggcgtggcattcatctctcatttaaaaggccttcctcgtgataatacagaaacttacacagtagtaaagacaagcttgaggggttttggtggccagaaaataattcacctctggtgtcttaagttacagtccctctaaggacaagtattttctgaaagtggtaggggctgtttttcaaacagttgggtcactga

SEQ ID NO: 78191 - DNA, 1033 bp, Homo sapiens
acaggaaattaccatcattgttactggaacgatggtcatttggtagcatgcgtgctcagaggctgctcacagggaggcatgatttgggccagtgtttttgagatctgcttttcctggacacattttcagaatctacttttataatgattattcaagaaagcagatttaaagtaggcagctactcgtagttttgacaaaagcagaattaacgaaaatgggaccaggaagcgatctcacggggctgtttagaaccccgccccttccgtgtcctgccgcgggagcctctgcaaggcgcccagcgaggtggagtcaggggtccctgcctgggaagcacatcagcccccgttgctcctggggtgcgtggctccagcagggccgtggtagctgcgtgcggctttggcgtttgatgacttctctcttctcttctgtttcctgtcatgaaggtgacggcctctctcttaggtgcaccttctaagaccagctcgctgctcattctgacagaaaatgagaatgaaaagaggaagtgggttgggattctagaaggactccagtccatccttcataaaaaccggctgaggaatcaggtcgtgcatgttcccttggaagcctacgacagctcgctgcctctcatcaaggccatcctgacagctgccatcgtgggtacgtcccaaaggttgtgtccttcaggtgtctgaagcaacagcacttccggcggcgctgcagtgcccatctgaaaatcagatgaaggtcacaggtccatttgggtttgtagacagtttctccatgcatgttaagaagcagacgaggccgggtgcggtggctcacgcctgtaatcccagcactctgggaggccaaggcgggcggatcacaaggtcaggaggttgagaccatcctggctaacacggtgaaaccctgtctctgctaaaaaaaaaaataaaaataaaaataaaatatagctgggcgtggtggcgggcacctgtagtcccagctacttgggagactgaggcgggagaacagcatgaacccaggaggc

SEQ ID NO: 78192 - DNA, 1056 bp, Homo sapiens
ctgtgaggtgcagtgaccaatagccatgcccagccactcttgaaagcagccccttgctgcggcaggtggccctggtgccagtcctagggggcttaccctcctgggcactgaggccatcaggtcggcgcagccgctgttctgaatggcctgggcatcctgaggcctccacgcagacgctcactcagagtccatcctgggctgagtgtccagccagtgggcagaagctcagtctgaaagccactgtgccaggcccacctctacgagactgtcgggctgcgtgtaccacagcaccctgcatggggtggacacagcgttggctgagctgccagctttccctggcaccgtctgctgccacgcatggacccctccccagcaacgccttgagccttcttgggcaaacatccctctgtccaaacagctctgccgccagcctggcagctggaaggagattgtgaacgagtgtaatggggcctggcggcctgcctggcctggtggaacgtggccactgtttgtttttattcataggtcccaaagcccacgggggtgaagaagggatggcagcgcgcatatgcagtcgtctgtgactgcaagctcttcctgtatgatctgcctgaaggaaaatccacccagcctggtgtcattgcgagccaagtcttggatctcaggtctgcgtttgggcagcactgtccttgctctgtgaatcttcctcagctatctttagccaaaaggacggtgtgttccttagtagtctttcacctcattagtacttcacctgcttcattattgtatggttgcaaaaatgggtacagcttagtcatgacttcaggcgctcacatgcgtatgaacagacatgcatacgggcctgcgtgcgcaggaacgggagcgctgtagacgcttcctgcctcgcatgtgtttgcgttgagaagtttgccacaggggaattaatttaacataagaaaaccacatgcccaagaacaagcagaagatatcccagagaaaagccacgcggcccacagccgtctgtgcgttttagagaccgcagcaggtgctggtgtg

SEQ ID NO: 78193 - DNA, 1051 bp, Homo sapiens
aacttctatgaggctacctaagggtttggcttttggactaagactcttgcagagtcagggaccaagtcgcgaggtcgtttatttggttaccatatttgatagcaactctgcagagtgctggtgtgtcactcctagtcctgatggcccggccaccgccccacggcctccctgcccacctcagccagcctcttcccccacagctctctggagtttgtgtcggtcactcccctacttcttgcaagtggtctcacccacatctgtttcctgctgaggatcgtattggtctctgctgcgcctgagcttggtaaacaggcggtcccgcatggcctgcaccacgaccctctgttcagccttggggctgctgcagttgccgctgggttcacaatgtgtccactcctgatgagggaccgtgagcctttccaggcgtttgctgttatgaactgtcctcctgtcggtgattcttgggtgtctcttggacacatgcaaggcctgtgtgcagcccaacctaaatgtggccccaggtcggcccccaagagccagttggtgctggtctccaggaggccaggagcatgagccagaaagagcactggccatgccacctcggccctctggcccagctgacctcgctttttggtagcagtgctctcccactgaaggaagtatttgttggcctctctctggctcaggctcgtaggtggttttcaccactatttgatgagccctgttagggaacacgtagaccaagaccagaacttgcacatttccaccttttcaggataatgcccaagctgtgtataaactggatcacaggcagatggatctgactctcaagagtccatggttcacctcagtgttcttgattttctccttccagccaaaagctcaccagttcagcatcaagtccttctccagccctactcagtgcagccactgcacctccctgatggttgggctgatccggcagggctacgcctgcgagggtgagtgtcgttgcagctcctggggtcagcgtgcacagccccacacccctgcagctaagggcaccagccgg

SEQ ID NO: 78194 - DNA, 1049 bp, Homo sapiens
aaagtgctgggattataggcatgagccaccgtgcctggccgctaatccctctgtgatttaaatgggaaggcatttattgttgaacagaaaaaaccctccatcaggggctgggtctgttagagcttccagactcttttgaaaattgtctttgagaaacttcttatcccacgctgcctgcatgaaacatgttggtttttactagaaacagtttgtcaccaagattaagtcaatatatcttcatgccagtgttgactgggtgggaaatgatgtttgttcctcctgtctgttacctccaaggactctctctcctcctcgtctgcatcttccctgctagccttttgggaagaagtaagtggctgccagcgctggcttcccgcagctttcactcctgttagtgcacagcctcctcaatgttcctgttcctgaatctgcatccctttgattaattaaccaactaaatgaaacgagtggggcttttacatgcctaaaattaatattctttttctcatttatctaaagatggaaccgtaacacttaacataccttgtttatggggcagatttgcttacatttttgagctttggtaattagccagtcgagctagcctttcccttgtgaatttgcagtacacagttgtgtgtgtgttttatgtgtgtatgctgccatcccatctgaatttggctccttcctcagtggcctaattaattgcaactgttggaaagtgtttatctgatttggttcattgggattctgatgtggaacacaaaatacagctgtcaatgctttaggcgcctacccagccatgtctgtgtcccatcacactgcttgctggtgctaacacttgctactcagcatacctacatgtgcgtctgtaaacagcagtggcctgtgatgataaactattagtttcaggaatacttgttgaaatagagttgtttttaagtggtttcagagtgtagctttagcttcaaataaatcactgtgaaattagaactcttaatttgttaaaacaaaacattgcttccctgtgtcataaaattttcaaggaa

SEQ ID NO: 78195 - DNA, 1011 bp, Homo sapiens
tgtctaactttggttccataaaccataaagtcttatctcaggtgtttttgtttgctgatttaaaaagactatctttcacctcaggaagattgaaaatgctaatgaaatcgctaaattttcagtagatcaaaaaaacctgttgcttggtttcccagctgtttttctgatcgaggctctctgaagagcataatgcagtccaacacattaaccaaagatgaggatgtgcagcgggacctggagcacagcctgcagatggaagcttacgagaggaggattcggaggctggaacaggagaagctggagctgagcaggaagctgcaaggtgagggcagcgccggctccggggccaggcgggggcgctgcggccaggctgcacctcacgctgtctctccatccctcagagtccacccagaccgtgcagtccctccacggctcatctcgggccctcagcaattcaaaccgagataaagaaatcaaaaagctaaatgaagaaatcgaacgcttgaagaataaaatagcaggtatgtgtttaaaagtgtgacttcttagtctctatttttggtcattactgtcttaaaagggaatttcagagtccttttcataaagtgggaaagcagaaaaaaagcttaggctttagcaagcttatttagagttctcaaattttggtcagttgtttttttttagacggagtttcacttttgtcacccaggctggagtgcagtggtgcgatctcagctcactgaaacctccacctcctgggttcaagcgattctcttgcctcagcctcccaagtagctgggattacaggcatgtgccaccacacccggctaattttgtatttttagtagagacagggtttcaccatgttggccaggctggtctcgaactcctgacctcaggtgatctgcctgccttggcttcccaaagtgctggaattacaagcatgagccactgcgcccagccccaattggcttagttctaatgatattattttatagtcaccagctagaa

SEQ ID NO: 78196 - DNA, 1011 bp, Homo sapiens
atttatttgcattgaattttgcattattgaggtttttaaattccgttttgtttcgttagagacagggttggggaccatgttgcccgtgttggccttgagctcctgggctcaagcggttctccggcctcagcctcccaagtagctgaggctacaggctcgaggcactatactcagcttgaattactgggtttaaaaaacacgatcattcatcagttttattctatgattatttcattttctgcctccgctatattttagagaaagtagttggaaatatgtgattggagatgccctagggtttccttcagcacctccttctcccctaaggtgcagtcctccgtggccgtgggcacacctgactacatctcgccggagatcctgcaggcgatggaggacggcatgggcaaatacgggcctgagtgtgactggtggtctctgggtgtctgcatgtatgagatgctctatggagaaacgccgttttatgcggagtcactcgtggagacctatgggaagatcatgaaccatgaagtaagacgttgcattttttttttttttttggtacctggctcaggcctaaagtacagagagcacaactagtgcaggaagatccgttaggaagcaacgcgagtagttgaggaagaggtgacggggtttggaccaaactggggacaggcagattggagtagacattggagagggcatccagaggcggggtcggcaccaggagatgtgggcgccagaggaaggggaaggaggttctgagggtgacccccacccccactctcaggggaaggacgctggcctgctccaagctggcttcctggagggaaggcaggtttctgtagacagacgcgtcgtctgcacaggcgcatggagtgaggcgcccgggggtagccagtggggaggtccaggtgggccctttgacctgtggctctagattcactggttaggtgccaactttgattctcaagtctgttccccagaaatcagtccctgtaaatgatcatgtgt

SEQ ID NO: 78197 - DNA, 1081 bp, Homo sapiens
cagccagcttcctccacacgtgtccctctgtccctttgtcccattcctgttttccgtggtactcagcacagagcttgcaccgtgtgagcctgcctgagacagcagtgcctatttgtgtttgcaagacctcagctcgtgtgcaggcttcatgaaggcaggggcagcgttgtcacgtgcataggtgggtgggctggagagcagtgcctggcaccaaggagatgctcaggaggggctcgttagctgggtgggcagacgagtaggaatcgtcacagggcctcgccagggtaactggggactaaacgaggggcagtgatacgacttcggctgccaccatgccagctgaatgtcacacagaggcatttgtactggatggtgacagctgttcacaagaggatattagcatttattcatctgatcaccactagttaagggctttgatctacctaatgtgttgcatggagatggttaatttgtgtgtttattttacaaacagagacattaaacctgacaatgtccttttggacgtgaatggtcatatccgcctggctgactttggatcatgtttgaagatgaatgatgatggcactgtaggtatttttgttggagattttccatttggttttgggtttggcatatagtcagaagggaagttttcaatttgaggtacaattaagaaaccaagtatattaattcagaaaatgaatccattttggagatagttgaaattttctgtttggggagttttgtttcccaaataaaaattaagttggaaagcatctttattgctttttatgtttacaaaagtaatatgtgtgccttccagaatgggagttgtcaggtttcctcaatcccaaggtggctaaaagcatgccagccctgtagcagatcgagggcgctccctgcttcttccttaaagggccctgtccaggctggtcgggtgggcaggcattaaccatgtaactgtactttctcacttgtgttggggcaggtaacttcctgctaggggtttcctctctatgggtgttgtagacctagaaatagagtcctaggtgctcagtgttacggggccagctgacactcc

SEQ ID NO: 78198 - DNA, 1028 bp, Homo sapiens
gttggagtgaacctataagtaattatctttcggctcttttatgatataatctttccaataagaactgctgataccatgtgtgatgttaactactttgcctcccttctctggtctggtgtcgtcctcacataacatgagggcctggagaattatttttaaacccataggattgatgggctattaactgtgcttctgctttgggtcactagcttttagagtgccctctccaacctcaagccctttcatcattcctcccattgattaaatacatcacttactgaagtccactctctgccatatgcacccctgaagatggcggcgtcgtggacgcatcggggcgcatgttccagaaggagggtcttgggtgacagaagagcagctgagatgccacgagccagacctggagcctgagaacctcgccatggaagactggcctgtaactgtcaggtttagtggtgactaaatgtggtattctctccccttctctttccaatttgtagtacttagtcatggattactatgtgggtggtgatttactgaccctgctcagcaaatttgaagacaagcttccggaagatatggcgaggttctacattggtgaaatggtgctggccattgactccatccatcagcttcattacgtgcacaggtaaccggcttctgatatattttatggaaaccacgtttaattgttaaaagactcctttcagagctcccaagtccaggccgtcccaagaagccatgtaggtagcgagtccccactttgagctgccgcagcacagactgatttgcccacatcaccgtcttccagccccagcagccggtggatcccagctctcattgttgcagttgtcatggtctgctgtcagccgaagccactgtgtcttttgatatttatttgacattgactcaacttctccccgtctgagaccccctccctaaaatgcctgtgctccctggggctcacgtgggccccggggtcctctgtctctaccgcccaagaccccctccctaaaatgcttgtgctc

SEQ ID NO: 78199 - DNA, 1015 bp, Homo sapiens
cagctcagtagtgggtataggacggagagggcagacacgtggggctgcccatgccatcgatacttggcagaggttgatctggtagaggagtcaggaggtgccaggtgggaggagcccagtcaggaatccacataagggtggggtgaatctaagtgtcagccacagaaatggtgcccgtgggacagcagggtgcaagtgcctcctcagcagcccttggcacttgcacggggcttgggagaggaagggatgagggatggctcagcctcagcagcctcggggtggtgcacgaggaggagcccggaaggcagggacaccgtggctggagccactgtcccaggagggaccccgagaccggcagtacgctctctggcctgcttcccagtgaacacagactgacacccctcgttgctttgcagaccgcgtgcttccgagaggagcgcgatgtgctggtgaacggcgactgccagtggatcaccgcgctgcactacgcctttcaggacgagaaccacctggtaggtcgcacagccagagactcggtcagggcattcgctccggctttattcctttatgctgtcactaaaaattcagtcagacaatgtggaactgacatttaaaaaatgtgtattggactcgataaaacggcggggcttgttttcatgcagtaattgtcaggtagaacttctttaaaatacacatgtggaagtaaggactttgtttttttctaatcactagagaagctgattcgtttgtttgctgggtttattacatttaaatcagctgggagtttgaaacactttcaatcttggattattgagaataaggaaccgcagtggggattaagccacgtggatgtttttgcctccatctcagctagggctgagtccgggagtgcctctcgtgggcctgcagtcctcctgtcttcccgcggtggggggggtgccccaggccctttcgacaggttttaggtgactcttagtctccacgctgcctgtgtatttttccgatttaaacaggg

SEQ ID NO: 78200 - DNA, 1036 bp, Homo sapiens
aatggtgcagacatcttgacgggtgttggtagtgatggcagagcttattcaagatttggtagaaactggaaagtccaagaggacttcctgaaggaggtggcacttgaattgttctttaaagaatgtggctggtggccgcgcgctgagtgctgactgtgccccacagtgtgctgggcacattaactgtcagtgctcatgggtcctcataggtgtctcaggagtccggtcctgccattaacctcctgtagtggtggaacccgagccataaaggggtgaatttgcaggagtgaaactccggagcccacgtggccggtccctttctctgtgaagaaaaggttcttgatgcaggaactggcacatgctaggtgggaaacttggctttcggtcactgctggtttcacaggctcctgggctgttaggatttcactacagtttagctccagcgtgctagccttttgttcaagaaccgcatctttgttcaactcacatttgcactgcaggttgctgttgtcaaaatgaagaatactgaacgaatttatgcaatgaaaatcctcaacaagtgggagatgctgaaaagagcagaggtaagtatggagcttgaaaagccatacaaatggggcttggggtgagcagaaagtgactgtgaagccagctggggaaaagctgcagccaccccacagccctgggcctccctgccccccggacagagcgagcactctcttttgaggaggtctcagtctcctccctggcgcctgctgctccccgcctcagcgaccacttgcttgctggacactgttcctgagagtgcaccctcgagaatgttggcgggtcctgtttactgtaaaggcaaataaaaagcatcgggagagtttcagcattgattgcagttctgctccatacacaaaaggaattaacacgtttggaccctgctcacatacagaataggtctttagattcccacctagaggatcctcacgattagaaatgaagtggaccactgcccagcaggctttgatcagctcctttttcttagttc

SEQ ID NO: 78201 - DNA, 1097 bp, Homo sapiens
agattacagtcacccgccacaacatccggctaatttttgtatttttagtagagacgagatttcaccatgttggtctgactggtttcgaactcttgacctcaggtgatcctcctgcctcagcctcgtaaggtgctgggattacagccatgagccaccgcgcctggccatatttatgtatctaaacataggaaagatttggtaaaaatacagtagtataaatcttgtgggatcactgttctgtatgtggtccgtcgtcggctgcaacagtgttacccagtgcgtggctgcaacagtgttacccagtgcgtggctgcagttgctcaggatccacatctgtgtccattggtataagtgctcactttccaaaacatgtcagatattaaatattttcaaacaaacttttttaaaagtataacttagtgcaacaccccactcaattaaatttttatatagtatgaactgattagactaaattgttggttttactgttttacttgtagctaaaccatttacacagctggtgaaagaaatgcagcttcatcgagaagactttgaaataattaaagtaattggaagaggtgcttttggtgaggtaagataaacttcattttgttaactttgcctaaattgccaaaacatcagcagcttccatttcacctttttgtgcacctatacattggtttggggatgaggtaattagtattatttggagagtttgttttttcctctctctctttctaagatgaggtctcaccatgttgcccaggctggctttgaactcctgggctcaagtgatctccccgcctcggcctcccaaggagctggggagaaaatctgaaagatagaatgaagagaaaggagactcgaaagcttctgactgacctgggagattgttgggaccaaaaatagtttcttcagatgtagttttttttgtttttgtttttgagatggacgtcttgcactgtcacccaggctggagtgcagtggcgcgatcttggctaacggcaacctttgccttctgggttcaagctatcctcatgcctcagccttccgagtagctgggactacaggtgctgacactgtgcctagctaatttt

SEQ ID NO: 78202 - DNA, 1038 bp, Homo sapiens
ttaatgatgcttaaaatactgcatttataatttgagagaaatattctcagtaaaatgaactttaaatgttttcatttttactgttttttaaatgtgtatttttaaaatgagataaggtctcactagttgagcccaggtttgtctcaaactcctggcctcaagtgatcctctcaccttggcctcccaaaacgctgggaataggcatgagccatcacgcctggccttaaatgtttttaaaaataaagtttggtatggagaattttaaatgtttcttgtttgtcctaaagcgttctccagtaccacattggaaaggaagacttagataaacattttaacagtaagagagtcgccatcttagactttttgaaagtccagtcagtccaaagggcctgtatcaatcagatgcaggagatggagacagatatgttacgctgaatactgaagctgtttgccatggcagctttgtagaatccgtacagaagttttatcagctcataaaactgctttatgacccagaaggaatgccagcaataaaacaaacgtactcatggcaaatacaccaggcgtggggctgattttcctgccgcaatgcacttccagtgaggaaactgctgtgtggtttggggcaggagcttgtagtgatttcgattcaatcttcctgttttgggtatttgtaaaaggaaactaatttttcagaaacttctagctggtatcccatgtcactcagccatcctctatttaaatattattgaaaatagtgatgagctcatgtatgaaaatgtcattcttccttttttggagtctcttgagttttttatatggtggtatttgtgtaatgagtattaataaaagtgatagtaattggtaatatttcctattcaaatttcaaagtttaaaatttcaaataggaaatttcagatacctttagaagtagagcagctgggtgcggtggcttacacctgtaatcccagcactttgggaggccgaggtgggtggatcatgaggtcaggagatagagaccatcctggctaacacagt

SEQ ID NO: 78203 - DNA, 1047 bp, Homo sapiens
caaggtcagtagttcaagaccagcctggccaacatggtgaaaccccgtctctactaaaaatacaaaaattagccgggctggtggcgcacgcctgtaatcccagctactcaggaggctgaggcaggagaatcacttaaacccgggaggcggaggttgcagtgagccgagattgtgccattgctctccagcgtgggcaacaagagcaaaattttgtctcaaataaataaaaaaagttaaggttaacagcacttcccaccatgccccatggggtgattttcttttaacatcatttaacttttatcaatgtaatgcatttacttagttttggaaactaagcggtactactgggttgtagtgcaagacagcagtccctctaccagtcgcttgctccgcgctccaacttcccacagactaccacttttaactgctctgtttctacttatcattttagttaggatcacatttagctgccagtaatggagaacaaagtgacagtgacttaaataaaatcaggttgatttctctcacgtgaagttgacgtgtcagcagtcagtgctagttggacagccttgctccaagaggcctccggggctgtggccttttcccaccctcaggccaccatctgagacggtggccatcccaccctccttcagccaagcaggccgggggtgggatgttactatagaagatccttggatattggtgggtgcttagcaatgcctgccttaaatttcatatttctgtgtagcatgctggtactgctaatttctgattttaccattttagacattgctgacttctgctgtagaagaggccttagaactgttctacattgtccctccactgcctgaaacacattcaccccttgctctttttctgtgttccaaatatgtttatataattttgtttaaattggtaattcagtgtctgcattcttattgttaggtaactgtcttcacagctaagccatgtaagatacagtttactaagggaaatagttttgtgttattggagtgaattttctttattttcttttcttataataat

SEQ ID NO: 78204 - DNA, 1089 bp, Homo sapiens
cgtcagaccaggagggaggcctcaggcttgatgctggtgtcacagaggcggaccgtgggtttccagtccccagtccgggcatcttctctcgagatgtgcttcctcttcatgaatagaattaatcctcctagtcttctgggtggttcctcatttgtggcttttctcaccatgagtgtgatagtatcttctcacggtcctcctccatggatgtgaatgcccatagctgttagtgtgggaatggccagcccaaggtgtgagtgggatgatgccaccgaatttaataagtaaggcttaactgacacggtgctaaacatctcataataaaaagtgctgggattacaggcgtgagccactgtgcccggctcaaatacatttttatcttaatgatttctctggatagaatatttgcataacatgggaacactttttaaaaataacagacttaagaaatagatcttttgagtaagatctgaattatagggaaatgttaggattgcatgataaaaattagtttaacctaatttagatcatgtagattctatggtagctgtttgatactgactataatagcatgagataggacagctgaaaccattaaacattaacaacccagccctaccttttctgtcttaaaacttcaggccgggtgtggtggctcacacctgtaatcccagcactttgggaggccaaggtgagtggatcaggagtttgagaccagcctggccaacaaggtgaaaacccgtctgtactaaaaatacaaaaattagccgggtgtggtggcacgcatagtcccacctacttgggaggctgaggcaggaggatctcatgaacccaggaggcagaggttgcggtgagctgagattgcgccactgcacaccagcctgggcaacagagcaagaccctgtctccaaaaaaaaaacaaaaaacctcttccttccatgacagttgggcttcacagtgagcagcagtgtctctcttaaatctagacttcaaagaaataaaattggatttgaagaaatagttctcacttcaggataccactgtgtgagctacctgaaaaagtttaaaatgtgcagtgaattgcccttc

SEQ ID NO: 78205 - DNA, 1183 bp, Homo sapiens
cccctcctgggtgacagcctgtctacatccccttgttggtcagagcctgaatacctactttgctgtaacaccttcaagggaattttaaggttaaggctttattttaaataaaccgtgcaagaggactttttttttttaattccaattctgctagacctttgtgatatttggaggggtagctggagctatcacttagaaactttctcatctgaattttgcatgccttctctagttcgttccggatctataatgttttaatcattggtcagctaacctattatgcttttttaggacaaaaatttgattaaaccatttaacgataattaggatcctaaagacaggtaaaagtgcagcgtgaaactcttttacttcatctctccctaacgggtgtgccggtcaagaccctcagactgtctcacctaaaaccactgagtaggaggaggaaatgcgtatgttcaggccaaacctatgaaaaccttatccttgggtcatttgcgtcactgggctaggactgttcagttcgaaccagtaatttctaatctttggggctgataaagctgatatttatacgaagaaacaaatgaaagtgttccacagtgaggcctccaggcctcctactctactctgccagattggtgactggaatttggaattttgtttacaaataaaacttaagttgcaatattctttagagggcttctgttggattactctgtagtgaaatgttacacggtatcttgtgagagcagcagtagaaagaggtcctgagatcaaggacagcctgtgatgctttatttccgtgggaaccaccattcttggttacttatagtatcagtaaattaagagtatttgctttctagcgtcctttgtcagtgacacgatttccaactgaataattaattgacttcaccgttgctttgaaagtgaggtctttggtgcatgttaaaatctgaatattttgtttaccttttctttcttttctttggagacgagtctcactgtgttgcctaggctggagtgcagtggcatgatcttggctcactacaacctccatctcctgggttcaagtaattctcctgcctcagcctcccgagtagctgggactacaggcacgcaccagcatgcccggctcatttttgtatttttagtggagaaggggtttcacagtgttggccaggctggt

SEQ ID NO: 78206 - DNA, 1041 bp, Homo sapiens
cgctcctagtctgcggcggcggcggcggggagggcgcggccgcgggcggggctgagggcggcgggggcgggccgcccgagctgggagggcggcggcgccgaggggaggagagcggcccatggacccgcggggcccggcgccccagactctgcgccgtcgggacggagcccaagatgtcggcctaggccggggcgcgacgacgcggacggggcggcgaggaggcgccgctgctgccggggctcgcagccgccgagcccccgagggcgcgccctgacggactggccgagccggcggtgagaggccggcgcgtcgggagcgggccgcgcggcaccatgtcggccaaggtgcggctcaagaagctggagcagctgctcctggacgggccctggcgcaacgagagcgccctgagcgtggaaacgctgctcgacgtgctcgtctgcctgtacaccgagtgcagccactcggccctgcgccgcgacaagtacgtggccgagttcctcgagtggggtaagtgcgcgccggcagggccggacctgcggctctgcgacccccgcgccccagcccgcgcatccccacgcccgcccatccccgcccggacagaccctgccgccctcctgcccacccagctcgtgggcttcgcctcctctcgctctggcagcgcccccaggcccgcagcccatctctctccagccgctccttgcaccctcgtccctccgctagcttttcatccctccttgccctccctaggctcgacatccgcgttcgatcgtcccgccccctcatcctgccccttggagccacatcctacgttcccactcccaccccctcccccccgccgggccctcgccctggcggcttcctagatccaccctccgagtctggatatcatttcctgcagcactcactgggatatccgcccccgcccccgcccccgcccccgcacctcgcctttggggtccggaggcagtgtggaattagttccctttccccaccccacgcttctctgcgttgtgggggcagctgggtgtgctttctgcatct

SEQ ID NO: 78207 - DNA, 1014 bp, Homo sapiens
ttgtggcagagggagggggcccggcttagaccctgagggttcctaggcccggagacaggaagtcagggttttcctggcaggaactgtgtgcacatgtgcacctgtatctccatgccaggagggtgtgtatgccatgtgtgcagatcctcctgaacccagcggtggctggggctgggacttcccaggccaagccaggccgagctgggggtgggatggcagctcctagaggatgcagtcagggaggctgggggcagaggcggggctgagaccggggcaccctgggtgcctcagtcctggggtctggccactggcctttctgctctaaggggtggaggctgagcccatgagaccttgcaatgagcctgcagtgcttccttggccatctgttgtccaggccaagcctgcagggtgccggtgggggtggggctggctctcagagaggtacttgggttctcattggccaggtcacctggctgataagtgtgtgtgtgtgtgtgtgtgtgtctgtgcacgtgtacctatgtgcaccagcccctgtcagcacccccaggatggaggcccttgcctagtctcctcactcctctcagaaagcaggacagcctggaaccatcctacttgcccccaagctcagcccccaggccctgcctgccggcccctggcccgcagccttggccagtgcctgttccctgctgcatggcccaggtctcctccctcttcagggccagctgggcttcccccagtgccaccgtggcctggggctcctgcatgtcctggggttccctctggtctctgtccctgagcttgaggtccttgagactgggtctgctctgtgaatcttctggggccccaccccaggcccaactgggagggcagagagaaaccacagagaacccacatgccccagacccgcacactctggtctgcagagatgatccactgtgtgtgtgtgtgtatatatgtatgtatgtgtgtgtgtgtgtgtgtgtgtgtatgtgtgtgtgtatatgtgtgtgt

SEQ ID NO: 78208 - DNA, 1050 bp, Homo sapiens
actgctggaggccacattcctgtccagtgaggcggtgagtctccacctgggccagggaggggcagggaggcagcagaggagaggctcggagacagacaggacatgggcagggagcttgacgggtcttccaggtgagcgaggtgagggatagtgccccagtgacctgcccctcctcctccaggccaatgtgagggagttgatggaccgagctctggagctagaggcacggcgctgggctgaggatgtgcctccccagaggctggacggccactgccacagcgagctggccatcgacatcatccaggtactgcaatctgccccagggcacacgtaccgcccgtgcacgtgcatggggagccccacgcacattccgtcctgtgtgcatacccatgcccacctcggggcaccccctctgttcccgcctgtttcctccccgtcccctgcccccttgtccaggcgagcccctgctcagctcacccaccaccaccctgcagatcacctcccaggcccaggccaaggccgagagcatcacgctggacttgggctcacagataaagcgggtgctgctggtggagctgcctgcgttcctgaggaggtgggtgtgtgcccaggatggggtccctgtagccaccgctctcagagccacggcccctccctagtgcctcaggtggggagctgagctggatccccgccctctacccctgtccctgtcattctgagccaggagttgtttcccactcagccagggcactgagagcctcaggtggtctgacctccaccaggattcaacgtgggagcctcttgcgcccaccccatcagcaaagctctcagcagagcagcctctagcttcaaagaggataccccaggagggactgagaccccgccaccccttcatacaacactcctagtctccaccacctgaattctctctgctctctccctctcgacctctgagggcttctccagccaaccacacgctcactcctacctggtctcccaactctagagagggcctgggagcagcagagatgggctggtaccctcttcagg

SEQ ID NO: 78209 - DNA, 1004 bp, Homo sapiens
ggcctggctacaaggcttcaagggaggtggcgagctccccatcagcagacagctcacacgcccctggctgcttgccctcccaggagctcatggaggccttgcacctgcacctggtgaaggagtacatcatccaactcagcaaggggcgcctggtcctcaagacggccgagcagcagcagcagctggctgggtacatcctggccaatgctgacaccatccagcacttctgcacccagcacgtaagccgctgcccacctctcccaagcccctctgaaatggctgcctcttctcccctagccctttcagggtcggagataggccgctggtgcctctctaagcccaacgagtcgctgacccgagcctctggacccctgggtccctccaaccacacccactcctgcagggctccccggcgacctggctgcagcctgctctccctacgctggccgagatcattcgcctgcaggaccccagtgccatcaagattgaggtggccacttatgccacctgctaccctgacttcaggtgagaacctggggcacctcaggaccactgtcacatcactgtggccaaggcctcacagggctggcattgggaacccagatcctggcagctgcccacgtgccagtcactgtgtgaacctcaccaggggctcattcttgtggccttcaccacagcactacgaggacaatacttcccattcccgtttcacagaggaggcctggagagctcacaggatgtgtccaaggtgacacggctagttagtgtctggctgcatggcccacactcttagctttacctgacactgcctctcacaggggagactgagaccagagaggccagcttcacccagcctggggggcctctgcggcctaggcctatgctctgggaccagggctcatattcgggagtggaggcttagcccttggctgcctgaagttctggtgggccagggacattgtttcttcctgggctgggtcctctgacatgttagggtaagtttg

SEQ ID NO: 78210 - DNA, 1001 bp, Homo sapiens
tttcagaagagaaaccatgactaatatatgggctgctttaggaagagctggtctagaatccaggtgttagacaattattttcagggctctcttctacctccctgccagctagaaacattttttattttcagataatgtatccttccaagtttgaatttgaatctttttttaaacgtagatacatttgtttaattttgtgttactgcccagatcaagtcagctcctagtacttttctattttaatgatagctgccacctcccaacaaaacccagcattcaatgttcaacagaaattctgatatgcatactatgtgcctacgagccttttaaaattgcaatgacagtgtttttatttggttctttggattaaattgtctaaagaatttattgtgaacattattgtatctctgattctgttggccttctatgaaattttacacgtcttgagacagacggatttttatctttggttctcaggttattaacatgtactgtgagaatttagattgttttagtagaactctaacccggggcacaaactggcaggcctgggatgagcagggcctctgtaggcatgtcatgctcgccagcactatgcttcaaaatacctttttccaggccgggcatggtggctcacgcctgtaatcccagcactttgggaggctgaggtgggtggatcatgaggtcaggagtttgagaccagcctcgccaacatggtgaaaccccgtctctactaaaaatacaaaaattagccgggcgtggtggcacatgccagtaatccctgctccttgggaggctgagacaggagaatcgcttgaacccgggaggcagaggttgcggtgagctgagatcgcactggagagctggagactgcactccagcctgggtaacagagtaagactctgtctcaaaaaaaaataaaaatacaaataaaaataaataaataaagtggaatgagaaaataaaaaacttgcccaaaagaatgatcaagttctctaggg

SEQ ID NO: 78211 - DNA, 1058 bp, Homo sapiens
atcttttgctattgtgactggcgctgcaataaacatgggggtgcagatatctctttgataatattgatttgatttcctttggataaatacctagtagtgggattgctggatcatatggaagatctatttttagttttttgagaaacctccatgctgttttccctaatggctgtactaatttaccttcccacccacagtgcatcagagttcccttttctctgcacccttgccagcatttgctattttttgtctttgtggttttgatttgcgtttccctgttgattagtgacattgagcattttttcatacatgtgttggccacttgtatgtctttcttggagaaatatctattgagatcgtttgtctatttaaaaatcagatttatttattttttgtcactgagttgtttgagttccttgtttattctggatattggcacctaaaaattactcttaatcataccatttgttaaatgcttatcatatcctaggagttttctaagttcttggaatacattatcttatttcccaggccctatgaggaattcgtatttccattttacaaatgagcgaaccaaggcttagtggaaaaaaattaagcaacttacccaaatcatgtacctagtaagtggcagagctaggatttaaagacagctctgtctgatcccaaagcctgttcccttaaaaattatgtggcatggcctctccagataaatacaaaaacaaacaaaactaggcattttacatatgtaatcccattctttaataatcatgtaaggagatgttgttatacccattttacaggtgaggaaagagactcaggaaggttaagcaattttccccaaagtcgcctccctaataaatgatggacagcgtttgaactccagcttgtgtgacgccaagctcattgcacaattccacttcccgtttctggatctccacctcatttggctgcattattttccccagtcaggtgctcacagtccgtgcactaatggacacttggtgcttgtcaaaaccttgctgaatgagtgcatgaattgcacacctcagtgcatg

SEQ ID NO: 78212 - DNA, 1007 bp, Homo sapiens
accctgaagtttgaagacctcacttgactgatggagcgagagccccgctaacctgcactctggtctctaaggtgcagtcatcgagaagtcctgagcggccgtgcaggtttcccgatctggaaaagagaaatgttgctgaggacaggatgaggtagataaggggctgccctttgttttggaccagttgcatttgcactgaggttagaattggcagctatgttgatttttatatcaaaatccaagatcgtgcttccataactaaaagctttataaacaacttaaaaattggcagtgttggtaggaagaaataaaggcacaatccagaattgagaggtgatttgtgtcctttagggcagggacttttataatcccgcagtgtgtaccttggtgtatagttgttaagccaagtgcacagtgccttgtgagtaccagggttcccatcagacaaactagaaaaggggatcccagacatgctgctgctgtttcactgtggagcatgacttagcagtattgaaacagatctgactttttgcttggcagcacaaaaatgatgttattttagaaactctgttggaaagtataggcatgaaactagtctgaggtgagaggcctgccttttcagaaaagttttaatgaaacacgaagtaattagcttttttgtatgtttagtggcacaatttttaatttcgttgaagtttgtaataattttaactgctttttaatatgtgtaccactcatttgtatgcaaccatggacaacttaaaaaaatacttttgtgttctttttctcccttttatttttagttaatacataataacacatttgtgggatacaaagtgatatttcagtacatgtatacaacgtgtaatgatcaaagcacagtaatcagcatatccatcacctcagatgtttatcatttctttgtgttgggaacattcagaattctctcttctagctttttgaaaatatacaatagattgttgttaagtatatttaccttgaaatac

SEQ ID NO: 78213 - DNA, 1325 bp, Homo sapiens
cgagtccgaaacagaagacgtccctgggatgaaagacccaggcctggggcttaaggtggaaaaacaactcattcctcgaggcccggagtcgggcgtcccgggagaacgggaaagggagatgagcgcccgctgcggggagaacgcggtcgggttcctctccccgaaggtggcagccgcaaaaacacggcctcgaaagcagtttcgaggacgatggctcctgcgtcccgggagtcgccatgacgccgcggcctgtcccagacccggcgagggaggggaccaaccaccatctccccctcaaggcccaaaccgacaaagaacggcccccggtaccccggccccgccaccagggccactccgggtctcgcgagacccaagggctgcgccgcgaagacctctgggaaaggcggggggaggggagaggaaggaagcgagaccggggctggaggcgggccgaggccgcgagttgagcctcaggaagcagaaggggcgcggaaagatgcgattgacgtcgcaagcgaaccaatgacgagcgagctgtggcaggcctccagccaatgggcagtgaggcctgacgcggggggcggacgctggggccgagggtagcttgagcgcggcggcggcgttgttcagtcagagcgagaacattccagaggtgagtccggtgaaggggcggccccctgcccggtgcttcccgccccctcgacccctcgggccgctggctggcggggaaggtgcactccccgaccgcccacggctcacggcgccgtctctccgcgccaggtcgcccagctccggcgctgacgggtgtggaccgcggacgtcgctgggacagcccctccccgctgctcggcggcggcacctggcccggccgctcctcgctgcgcttcgcctccgcctcctcggactcggactcgggtttatatcgcgcctcacttcatcccagtcccgggcgagcagcgttgggtttatgtctttatttgacgaaaacggtgagtcgcgggcgcggcgggccaggagatggcggccgcacaagatggcggcggccgccgcgtgaccccgccgcggcgtgtggcgcagtttgggcggacggcgggcgggcgcgggcccgggcgccggccgccccctccccgcgcgctccccggcccggcctcgccccctccccggcatggcgggagcgcgtcgcgcgtgcccgccgctcgggctgactcaggcttcagctgctgcatttgtgagtcatcgcgcgctctggggcgggggcggcccgatcccggcacccctcggccgtgtgtcgcttcccggctgtgcaccctccggggccgccggct

SEQ ID NO: 78214 - DNA, 1003 bp, Homo sapiens
gctaccgcgctccgaggcgtttccgcgggggctggcgaaccgggcagctccgcgaaggaggggggcgcgcgaccggggcgtctggccccatccccagcgcgtcccccgagagccggcggccccggagggtgcacagccgggaagcgacacacggccgaggggtgccgggatcgggccgcccccgccccagagcgcgcgatgactcacaaatgcagcagctgaagcctgagtcagcccgagcggcgggcacgcgcgacgcgctcccgccatgccggggagggggcgaggccgggccggggagcgcgcggggagggggcggccggcgcccgggcccgcgcccgcccgccgtccgcccaaactgcgccacacgccgcggcggggtcacgcggcggccgccgccatcttgtgcggccgccatctcctggcccgccgcgcccgcgactcaccgttttcgtcaaataaagacataaacccaacgctgctcgcccgggactgggatgaagtgaggcgcgatataaacccgagtccgagtccgaggaggcggaggcgaagcgcagcgaggagcggccgggccaggtgccgccgccgagcagcggggaggggctgtcccagcgacgtccgcggtccacacccgtcagcgccggagctgggcgacctggcgcggagagacggcgccgtgagccgtgggcggtcggggagtgcaccttccccgccagccagcggcccgaggggtcgagggggcgggaagcaccgggcagggggccgccccttcaccggactcacctctggaatgttctcgctctgactgaacaacgccgccgccgcgctcaagctaccctcggccccagcgtccgccccccgcgtcaggcctcactgcccattggctggaggcctgccacagctcgctcgtcattggttcgcttgcgacgtcaatcgcatctttccgcgccccttctgcttcctgaggctcaactcgcggcctcggcccgcctccagccccggt

SEQ ID NO: 78215 - DNA, 8420 bp, Homo sapiens
ccgagtatttgaatagcgaggaaaagggaggccggggcgagcctggcgttcgctcgcgctctcttgcttaatggcaaattgtgggcgagcgctgcgtttaaggaagtgctgctttgaagtaagccatggttgccgaagcaacgattagttgtagagaacagttccctaggttgcccttaaaaatgaagacgaacgggggtgtgcctgagaagtttgcttatccaggcggggtgggcggcggagagggctcgggttcgttcttcagcacttccaggatggccgcagaggcaaacctgctgattgccctcggtctgatggaatctcacggcggctgaggcagcacagcttgtgttttcttgtcaggcatttccctaccagtcacagcttagtcgaaatggaggcctttttatgttcccgcagattgtactgtgttacatgagaatggctgtttgcatgtgatctcagatgctttttaaggtggagttaagcagaagcataactaggatgtaaaaaggaggcgtttccatccagcgatgatgttaaacctggggggatttttgtgtgttctttccctttttctttcagagctgttgcgcagccattggtacctgtattggggaaacatagcatacaagcaagaagcttacagcctcagtggcgaaaattttttcatgtcagagaccgagaactcttgcagtcgtttatgtcatcccttcttctccagacagaagataccaaaaagttgcaatcaaagatctcttcatcttattgataaagccactaataagccaaaatgtctgtcaatgtcaaccgcagcgtgtcagaccagttctatcgctacaagatgccccgtctgattgccaaggtaataaactgctcttcaatttagttgatagctctttttgtagaattttgaagtttgcatttgtcaggggaaactgcacaactaaaattcttatttcctttaggttgagggcaaaggcaatggaatcaagacagttatagtcaacatggttgacgttgcaaaggcgcttaatcggcctccaacgtgtaagtaaagcttggaaaagtccacagggcatattatggatagagtcttcaaagtctttgagctgcaaaacttgttctaattgtatgctagctaattaccttacaagttaagtgaggaaccgtggtttattggttgccatgagtttacaaaactaccaggggaacgcatttaaagagtggatggctgggcgcgttggctcacacctgtaacccccagcactttggaaggctgaggcaagcggatcgcgaggtcaggagttctagaccagcctagccaacatagtgaaatcctgagtctactactaatacaaaaattagccaggcgtggtggcatgcgcttgtagtcccagctacttgggaggctgaagggggagaatcgcttgaaccccggaaacggaggttgcagtgagctgagaccacgccgttgcactccagcctgggtgacagagtgagactcttgtctcaaaaaaaaaaaaaaagtggtgttcgtacaaatgtgagtgagtagccagagatctagttaactgtaacgatccaaactcctttttcattcaaatagatcccaccaaatattttggttgtgagctgggagcacagacccagtttgatgttaagaatgaccgttacattgtcaatggatctcatgaggcgaataagctgcaagacatgttggatggattcattaaaaaatttgttctctgtcctgaatgtgagaatcctgaaacagatttggtaagtgcttttgtggttgtcgaaagaaaaagccatatacctgcttctgtgataccgctaagtcaccttcctgagaaggcagagcaaatgtaattttaaatcaaacacaaaactccagttttcgagatatttccattcttttttttaaagtaggtcactgtgtgaaaaaagttttctttgcatgtgaagctgtctgtggtttagatgtcctctgattagatattttcatgttatattatggataacatttgttatttttttggcagcatgtcaatccaaagaagcaaacaataggtaattcttgtaaagcctgtggctatcgaggcatgcttgacacacatcataaactctgcacattcattctcaaaaacccacctggtgagtcttccatgatgaactcctaagatcctaagataagttactaactgttgggaacaaaatagaaggtttttttgtaataggaatgtaagggagactgggcacggtggctcatgcttgtattccccgcattttgggaggccagggcgggcacatcacttgaggccaggagttcaagaccagcctggccaacatagtgaaacccgtctactaaaaacacaaaaactagcttagcatggtggtgtgctcctgtaatcccagctactccggtagctgaggcatgagcgtcgcttgaaccttggaggcagaggttgcactgagctgagatcgtgccactgcactccagcttgggcaacagcgactctgtctcaaaaaaacaatataaggaaccttttagtccttgtactatattttatcaaatctaagacatctttcaaaagtgtattgttaattaccattaaaggtgaaaaataggctgccaattaaactgtgccatatcaattaagacattatctgagggtagatgaagtaatgactaaaattctgctggaaacccagcaaagtttcttttactggcattgtttggtaaagagggcccccttcattaaacttgaatattgcaagcaacactctgtggcagatgatcaaaactgtctgacacaatttgagcttgctatagcaagaaagtctaacctattccggtgttctctctcccatgagacaagccgttatatagacttaaacagtgttccacctgttggctaaagctgggttgagttaatgactttgttcatgagggatgacagggatccttagggccacctctccctagtggaggcatcatcacttcatcttactctttcttagcagttacaatacccctaatattttgtgtcactccattcttagactaacattcttacgtatgaaatacatgatgaatttgatctgtgaagcctcttaggtagcattgtgtgtgctgtgtggtttttctgaggggatccataggaaaataagggcagggttttaaacgttaatgatgggcaatgaggtaatgtaagttatggggttaaatttttatttccctttttttctgtagagaatagtgacagtggtacaggaaagaaagaaaaagaaaagaaaaacagaaagggcaaagacaaggaaaatggctccgtatccagcagtgagacaccaccaccaccaccaccaccaaatgaaattaatcctcctccacatacaatggtgagtgcagggttgatggcctagtgggcactaaagttgtgtaaagtatatggcatttggttgaggtgggtggaaatgttgaaactagccttcagtgtgtaatacactaatattgtggattccaagtactgtttgttgtttgaattaaggtgaacccaattttggatggagatggacttgatgccattaacttggcaaaatctgaacctttttgttgttgtttttaaggcctttgatcaagtagctctgttttcataaacaggaagaagaggaggatgatgactggggagaagatacaactgaggaagctcaaaggcgtcgaatggatgaaatcagtgaccatgcaaaagttctgacactcagtgatgatttggaaagaacaattgaggagagggtcaatatcctctttgattttgttaaggtaaaacatttgcttggtctgtaaatcagcttcaacccagccttgtttgtgcctttagatatatgatactttagcagtgtaattaggattactctaatgcacgactttttagaactcttgttcatttaaatattttttgcgcgtgattccaggcactatgtgtcacaactgccaaattaggcaggaaaaatatgttcatcagagcagggactggctggtgtcttgagcctggcaaagtgtgcctccattgcactgaattgttttccttttctttgcagaaaaagaaagaagagggtgttattgattcatctgacaaagaaatcgttgctgaagcagaaagactggatgtaaaagccatgggccctcttgttctaactgaagttctttttaatgagaagattagagaacagattaagaaatacaggcgccatttcctacgagtaagcaaagtgctctggattcataaatgagattacagttgtgtggctttcgagatggtcatattaaccacttttgcttgtcctgtcatgcttgaaagtggggaaattgacccaccttacaagcctctgagtatctgaaagtgccatacctaggcccttacaaagtaacagggatgtttatgcattgacctttttgaacaactatggtatgggccatgcacttgcagacactcttatttgggtaatagagttgtcaacttagaacacataaaaaagattgttaacaccaaggtgtctatttgcagttttgtcacaacaacaaaaaagcccaacggtaccttcttcatggtttggagtgtgtggtagcaatgcatcaagctcagcttatctccaagattccacatatcttgaaggagatgtacgatgcagaccttttagaagaagaggtcatcatcagctggtcggaaaaggtggggaatacataggtgggctcttaaagttcacaggttttggggggtttttttgtttggttgattgtttttggagacggagtctcattctgttgtccaggcaggagtacagtggtatgatctcagctccctgaaacctccacgtcccggcttcaagtgattctcctgcctcagcctcccaagtagctgggattacaggcacctgcgatcatgcccagctaatttttgtatttttagtagatggggttttaccatgttggccaggttggtctcgaacacctgacctcaggtgatccactggcctcccaaagtgctgaggttacaggtgtgagctcctgcgcccagccgttcacaagtattgagacggctttgagatgaagaaaaaatgtcttaatatctatagctaaagttcagtgcctgtgctgtagattgtgattcgcatcatgtcagatttgtagtcataacagactgctgagactaacgtgttcactgagtacattgattctgtttgaggattcagacttgttaggacccagtcccctcagctcagtaagggggattgtataaataatcaaaagttgttaaaattcctcaactaagagacttgtactcacattttttaggcctctaagaaatatgtctccaaagaacttgccaaagagattcgtgtcaaagcagaaccatttataaaatggttgaaggaggcagaggaagaatcttctggtggcgaagaagaagatgaagatgagaacattgaggtaaacattgggggaggagggtattggatacagtgctggcatgggtgtttgagatttaaaaaggtttgtgaggagtgatataatggcagtttggggtaatttcaggtttagaatttaagatgcagtaaaatacagcctctcaataatttggaaaataatagaaagggtgatggaaactgtgttcctactcctacacattatagtctataaaaaaactttaaaaatgctcttagactggagcctgtgtaagagaacttgcagtgtttgcataacagagctgttccgtgaagaagaaatagctgcatctaggcagtttcctcctctgtgaccacaatttacattgatttgttttataaacagatttatcagcttatgttgaataaaatcattcctcttaacaggtggtgtattcgaaggctgccagtgtaccgaaagttgagactgtaaagtcagacaacaaggatgacgacatcgatattgatgccatttaaagggatggatgcaacctagcttaacagtataatgctgcaaattttcctccattatcagccagaagtgcaacatgtatgtgcaaaagctaaaatggcttaacatcatgctacactttacactaaaaatctattactgtgagtggtctgttattaagcccaatgagacatctagggagtccatacacatcagtgagcagatgtagtttgcttatttatagcatgtttctttttgaaaaactagtggtggacacatttggatcacatttatacagttataaaaataaaggtttgattttggtcgttcttcagatgtttggctctgaatgacttaagctgaagtaactggctccttactttaaatgttctgccatcatttcacctgatgagcattcttggagcctgccagatattgttaggtcctggggctgcaaagaggtcctcaacaggatgtaaagcaaacttaattgtaattaatttattcagcccattaagaaagtactaaagttttatctctgtagttcctcaaattggcatctggtaatgtacattgtgaggtagactgataatgaaatgacagtgtaacatcttaaccaagaagtaaatatgacctcagtgtcctataaataatgtaagagcaggatttgaaacttggagagctgttttctcatttcatgtacacttgccccaaattgtctttgaagtcgtgtgcattgcacgttggatgagccagggaaattattacattaacaagcattttgtgtgtacgtagtagttactttgtactgagagaacttgctttggggtgcaattaataaactgattttatttgggagaaacaaggaagggtgcacttaactagcaacctaagcatgatttttcagcttttgcccttagggtttaaattacaattccaaaatgttagacatactgtattttttcgttcagtgtggctttaattttcccctcttgcagtttgttctgtaatgccttttacatttggacacatagtttatgctttttagattttggttgctttcttgccaaaataagtgttaactgtgtttcaaacttgattttctttcctttttcttttttttttcttccagaatgtcttatttaaaaagaaagctaaaagcatacttctaagtcagagcctctattttggtgtaagacttgggatattttttacttcacattgaatatagccaggcacccaagaagtctgatggccacctgagtgcaggtgacaaggacctgacagagcccatgcagggctttagatttggacacacaagagttgataacttcctcatgaactccttgcctgatctaaactcatattatgggttctgactgtttgagtaatcatcttcaaggttaaacctcttggcagttacccttttcacaaagtgcacagtgggaatcgagaatcgatagggttaattttggagcagtggcttataccattcacctctgtttttttgtgattatttcacagataatgagaccttaataacaaataggcgtaaaaaaattttcacattgaaatgatagaaacatttgatgtaataaaacttggttggcttgatattttaaggaattgaaacctagcaatcttattggagagacaagaattggtctccagctgcctttgatcaagattcgggtgcaagtggagcaggagccatatacctggagggaatgtgctttgtcacaccaaagaggatttttttttcttcaaacttgtatgttgcctaggtttcaaattctttgccgcaaggctgatctgctttcattaactggaattctgtaggagatactggtgacctaagctaagttgcactcagcatactcagtgtcaagctaatgaggttctattataaaggttctacttttaatctgagggaaaacatgttcagggcttctagaacactaaaaaatttggcttaaaccagtgttcagtctggtgccaaacttcgaatggaatacaaattcacataatctgaactttgttcacaggttatcctaatagagtaattcttcactttgctctattgaactgtcttaaggatttgtttaaacagctaagttacttgattaaaataatgataaaattgtattttgtctttgctttaatattaaagttaacaagttttcattttataatgagatcaaagcattggaatctgccctgttttgtagccgttgctttggatttgtgttggatgtatcctgcagttacacttgccagccccactcacaaaagttgttcatttcattgggtcactggctttatttgctagtcttgtctgtgaactgagcatctgcctcagttttattacttgaaatcttggcaggtgcttaatagggaacatacatacagctatgtaactgtgaataattgtatatatctctagttaagaatgagggaatgg

SEQ ID NO: 78216 - DNA, 1690 bp, Homo sapiens
ccgctccatggtcggcgcccacagcccgcggcggcctgtcttgcgctccacttccttcacatcctcctccgcctcctcgttttcaggcgccgccggcggcgctgtgtggaggcccgcgagctgaaattcgcggtgcgacgggagggagtggagaaggaggtgagggggcccaggatcgcggggcgccctgaggcaaggggacgccggcgggccgaagcgcagcccgccgcccgcaggctcggctccgccactgccgccctcccggtctcctcgcctcggccgccgaggcagggagagaatgagccccgggacccgccgggggacggcccgggccaggcccgggatctagacggccgtagggggaagggagccgccctccccacggcgccttttcggaactgccgtggactcgaggacgctggtcgccggcctcctagggctgtgctgttttgttttgaccctcgcattgtgcagaattaaagtgcagtaaaatgtccactaggaccccattgccaacggtgaatgaacgagacactgaaaacgtaagtaacctgggcgttgtagttggcggaccttcggggtggcattcgtgctcctcgggcagtgccttgcagtcgggtgttccccccagccgaacgctctggaaatagagggcaggccgtagtcacccaggaggcagccaggtcggaccgtttcctccagaagtctgccgtgtcccgctgttcgcgggcgggtctgcgaagtacatcgattatgccggcagtctagtcggttaataaagcccaggagttgcagcgttacggatcggtgctttgagaggccaggttgccgcgcaatggattgtgcaaacgtgtgtgtcagatcactgcagtggtcagtgcttattttagccgaactctgcttttaacttggtcaggcagttcttgagagactgtcacattaataacatatgttaccggtgctgattaagagtaatcgattgggtcaagtgggcggtctcgttctttaagatggtctggaactaaatttaatcacagtcactaagtgtccactgagggatctttgcggtccccttaggaattccaaaacactagcgcgcagcctttattaaggcagtttcctttccatacaaatcttttttgaaggagttggttaaacattttgaaaagcagatgtatagtgaagctctgctctgccactcactgcctagctgagggacacccgctgggggcttcgctgtcctccttcctaaaaagagattggcttagatgagctcttaggtccctttcagcgctcacaggctatggttttataaaaggaacctttgattttgttcatgtgaaactacaaaatgccaggaacagcattgctagagaatgagaacttgtagtagaaattccattgaagaaacgtttgactctgttcgttttctaactctgttctcctctaacactgggttcaaaagtgtttcaatctagttgttgactatattctgtaaaacatctagtaaataatttgtaaagaaacttcactggcctttcattaaaagtgttatgaggtaattgctggcacgaaatgtcttctcttagggaatgcttccttgctttgagtgttttcatgctttcagtaatgtcctgagatgttgtggcctagtggagttaatgctttcattttgatcttcaaaaatgcc

SEQ ID NO: 78217 - DNA, 1429 bp, Homo sapiens
ccttggcctcccaaagtgctgggattacaggcgtgagccactgtacctggtcaaaatatgctttttaaaggcaaccaaacagtttgcatttcagtttatgttctatagttatatggagccacggatacatcctttttctatactggcaaaatgagaaacatatttttcacctgaatttcaaaggatatgacacttcgtaagcctggtaatgttattggccaaagtaccagaggcccagggctttcccagttatttaacagttactgatatgtgtgcatcatgtacttattattagttaatgcaaatagtcccccaaatttctgacctctgtgaaactgatgatgctgttgtctagtcagtcatcggttatgtgagactgaattaacctattcagcaagtgtgaatgcctaccgtgtgtatgatactgtgctaggtgctgtagaggccatatacctgggacacatagctttcctgctctttaggatttcctgctccttgcaggacaaagcagcctgagctttatgaaactagtctgtaactctcaaacttaagcaaacattagaatcacctgaagggctttagaaccgtgatcactgggccctacccctagaccttgattttacccgtagaattggaatttctaacaagttgccaggtgatgttgatgctccaggtccggggaccactcttaagaatcactatagcaggaatttctgatgtttatttattaagaaaaaaaaatcactgccttagtgtgcagtgaaggcttgctaactaaactatactccttttagattgtactgtgactatcaaaggaagatttccagaccatttaattgagttttcaggttccatgagtttaaaaaaaactgtttattaaaaattgtggttctggaaaataacaatagttgccatttggtgatcacttaactgtataccagccagcaatactttgtagagtatctcatttaaaatatgtaatatggttttatttaattagctttttttttttttaaatttcctgaggcggagtctcacactgttacctgggctggagtgcagtggcacgatctcgctcgctgcaacctccgcctcccgggttcaagcgattctcctgcctcagcctcccaggtagctaggattacaggcagccgccaccacacccagctaatttttaaattttattttattttttgagacagagtttcactcttgttgcccgggctggagtgcagtggcatgatcttggctcactgcaacctccgcctcctggcttcaagcaattctgcctcagcctcccgagtagctgggattacaggtgcctgttaccatgcccagctgatttttttgtattttcggtagagactgggtttcaccatgttggcaggctgatctggaactcctgacctcatgatcctcccacttccct

SEQ ID NO: 78218 - DNA, 1050 bp, Homo sapiens
aaaattcatttgtctcatatccattttcaaatttcaaattaaacatgaaggagaaaataaatctcttacctgggaagctttaatgtcctgtctcacacaagaagttaaaggttgtgcttggagttggtctgcaaaagtaataaggaatttgtactcacccgtctgcacctgcttgtacagaacaattggaagggcagaagttggctttgaaagaaaaggcctttttttggaggtgggaggggcatccaattttgtcttcagccgagagttcgctagcactacactctagccactcaagctgctcaactatggttggtcttgtgtacttctgtgtgcactagataagacattgtttctgtgggttatgtgggaccttgaagttcagtgttgaagctcaaacaaagcaggtgttttttctgtatttcttgttgacaggcatttgctttttgttggacctaaatattgtggggtttgtgtatggacatttgacacaaaaatctgtattggtagaatttaatataaaatcagagaagttgaattcacaggttttgttcatagaattttacataactctagtcttttttctttttttgtgatggagtcttgctctgttgcccaggctggagtgcagtggcatgatcttggctcactgcaacctctgcctcctgggttcaagtgattgtcctgcctcagcctcccgagtagctgggattacaggcacccgccaccacgcctggctaatttttgtatttttagtagaaacggggtttcaccatggccaggctggtcttgaactcctgacctcaagtgatccacctgcctcggcctcccaaagtgctaggattataggcatgagccacagcgcctggccacaatcttacactactttcctgaagggatgtgtgatggaaagagtctgggcttgaaagtggaagacaaaaatgagagtctaagactgatcgagataaagattctgaagaggtagaatggacctcataagatggagcaaaaaagaaggaacaacatataaaaggagaaattagaatttag

SEQ ID NO: 78219 - DNA, 1142 bp, Homo sapiens
attactgttagcagtgtagtatagaaggaaatcgggaatccagattctctatggatttccccctgaacagttatgtggctgtatccttatctagtgaatggtgacattagcttttcccctgctgcacgggctgtagtgaggctcaggtgtgcaggtgcacttactaacatatggaaaagttaagcactgtataaccagaaggtagcccttttactcctattttatatgacagccacgtatgcaaaatatctaatttcttcctgaacactcaattgaacttcaacacttcgtatttttcgtctcagaatttttattttcctcaaatttatattatgtggttaaattcctttgaagtgctagatactttaagattaaaattaaagtaggaatgttttttcttcaattagaagctcttagaacttggcaagtactctgtgttctctcatttccttatctttgtgtatgctgtattgcagcacacgtcacatggagatgggcgtcaagaagttacctctcgtaccagccgctcaggagctcggtgtagaaactctatagcctcctgtgcagatgaacaacctcacatcggaaactacagactgttgaaaacaatcggcaaggggaattttgcaaaagtaaaattggcaagacatatccttacaggcagagaggtaaataccagttatgcttatttctgttatgacagttgctctgtttatttccatgtaagagaaagaaaagaatatagatataggccttatttcttttttttaagatggagtctcgctctgtcacccaggctggagtgcagtggcatgatctcagctcactgcaaactctgcctcccgggttcacaccattctcctgcctcagcctcccgagtagctggcagtacaggtgcccgccaccacacccagctaattttttgtagagacagggtttcaccgtgttagccaggatggtctcgatctcctgaccttgtgatccgcccgtctcggcctcccaaagtgctgggattacaggcgtgagccatagcgcctgtaatatatagctactatgtattacatgtattacatgtcaagttctaaccacataatataaatttgtaatacatagctgggattacaggcgcacaccaccacacc

SEQ ID NO: 78220 - DNA, 1122 bp, Homo sapiens
gtttaatcggttattgtgtaggaaggcacatactttcctaacctttgtgaaatggctttctgctcagccccgttcctattaatcaaaaatacatgcattaaaaccacaaaactaactccctcctcttgttatactcatatggtacagagcctgttttgcctctttttttttttttttttttttttttgagacggagtctagctctgtcgccaggctggagtgcagtggtgtgatctcagctccctgtaacctccgcctcctgggttcaagcaattctcctgcctcagcctcctgagtagctgggactataggcgtgcgccaccatgcccggctaatttttgtatttttagtagagatggggtttcaccatgttggccaggatggtctcaatctcttgacctggtgatctgcccgcctcaacctcccaaaatgctgggattgcaggtgtaagccagcgtgcccaacctttgatgtagtttcttgcatttaggtctttgcgcctgcttttccctgtacctgaaatactctttactcttctgtttagggaacatttctgagaagtaatcattgacaaatcccctttccccaggcatgggattccataaaaatcccgatactccccttatatggcacaatttacattgtattggaattgctcgtttgtctgtctccttctctagtttgtaggctgtctccagtctgtaggggaagatgacagaacttaacacagtgcttggaacctgttaggtacttaataaatatttgctaaatgaatgcaataatactgttttttggcgggggggaggtggtgttggcaacagagtctcactgttgcccaggctggagtgcagtggcgtgatctcagctcactgcaacctcccgcctcctgggttcaagcgattctcctgccttagcctcccgagtagctgggattacaggcacacgccaccgcacccagcgaattttttgtatttttagtagagagggggtttcaccatgttggccaggctggtctcgaactcctgatgtcaggtgatccacccacctcagcctcccagagtgctgggattacaggcgtgagccaccatgcctggcctgaatgtagtaatacttttgaaggaa

SEQ ID NO: 78221 - DNA, 1048 bp, Homo sapiens
aattcaactataatggattggaaaacaagatttctgtgttagtttaacagaggagagctaaaaaagaactcaggcctgaatggttgtcaggaatttacttgggtgactatcttctcatctcagaacataaaatgtaggaattaccacagttgcaaagggagatgtttatgttggagataaaaatgctcctcccttcaaaaatgagacagtattttagataggaaaggttatttatctgattacatgttttaaaattctgagcgtaaggttatatgtcaaatcctgtccatgggctgggcacagtggcccacacctgtgatcctagcactttggaaggctgagggggaggattgattgagcccaggaggtcaaggctacagtgaactatgatcacaccactgcacttcaacctgggcagcagagcgagaccctgtctcaaaaaataaaaataaattaacaaaaaaatctggtccatgtccatctcctcttagctgctaattcaattttagattagacacagtggacaaggacaagtatggtgagagtcctgtgatttctcaccagcttcctttccacataggccgctgcttctcttcttccaaggtttttccccgcttttgcctcctggaggttgtatcctgggtgttaggagactgggttccggacacattccccacagaaggatagcaggaccttagaagatctttttctttcttttcctggtttcctcttgtttgcaagagggttgaataggatggtctctaaaatcctgttgtttttctgggttatattaacccaggccataatgataagaacctgctctgaattcacaacatgtatttatacaacagcaatttaatatttcttattctgtggaatggctaggaagctctgctggtcttggttggatggttttttgtttgtttttttttgagacagggtctcgctttgtcgcccaggctggagtgcagtgacgccatcagctctctgcaacctccacttcccaggctcaagtgattctcttgctcagcctcccgagtagctggga

SEQ ID NO: 78222 - DNA, 1619 bp, Homo sapiens
gtcttccccaaggccagaaatgatggttacagtacacatcactagagtttccttaaaataaagattaatgactagtaactatttgcctatggttttgtaaaaatgtagacattttctgaaatgcgtgtttatagctgctgtcttttataatgatttgtattttatggttgagattgggctgggtttgtagtttgcgaccacacgtgagtttcattgtctgtgaagggcagaagctttcttgttcatctttttgtgtcccctgcctctagcacactgcctggcacacagcagatactcaacagataagaattagactgcatttaggaattataaactactgggtacacattctgttaaactctatcgtaattttatcattagcactttgatccatgttacaaaacctgaagatagaaagttggattatagtctcatttgagtgagtttaccattgaaaataaaaagattgtaaacctgttgtggaaaacaatgagttgtagtaagcatacctttgacaccacttttttatactcctaattcattattagttgtgtattttatactttatatatgtctagtttgggaatttcattgggattttcaaaacttcaggggtagtagaaagaggggaaggttaatttcaggaccaaaaagctttatggagttctaatactttctgtgggcaaacaacacagagtaatgttcatagccctcacgttgtacagcctctacagtgtacaaggtgctttctcttaccagatctcctttgaccttcacagcgactccatgctgtggccaggcagtgagcgatgggctttttacccatgaggaaatggaggctgggaagtctcactgtgggcgctctgggcctggaccgccagtgctctgacagcagatagcctttctagtttgttggtcagtcacggctttctgttcccatctgttttagctacccaggtcacagagattactcatataggggcaagacaaaaacatctaagagtcatccaggtttagtagaaagaggatgggctctggaagagacagacatggagtgaatccagccagtggccctcattggccatgtgacctggcaagtaacatgtgctgagctgagcttcacggtgagcataggaaccccctctgagggctcagtgcacttggcaacattgtaagagcctttaatcatttaatcgaaggtggtggttctgtattaccttgggtttttttttttttctttttggagacagggtctcactctgttgcccaggctcaagtgcagtggcgccatctcagctcactgcaacctctgcttcctgggttcaagcaattctcctgcctcagcttcctgagtagctgggactgcaggcgcacaccacacctggctaatttttctaatttttatagagacaaggttttgccacattggccaggctggtcttgaactcctgacctcaagtgatccacctgccttggcctcccaaattgctgggattataggtgtgagccacagcacctggcctctttaacagtgttttgttgagtttattaaaacaatttccgggacatatgttttattgttgatgtgtttgccattgtgaaaagttttattaaattgg

SEQ ID NO: 78223 - DNA, 1631 bp, Homo sapiens
aaataattaatgttgtgtaaactgccacctaggcgtgcatcagctggttctgttgttttcacctccattgtatcctgagctcctacttctcaccaccactgtgcttcccactctagtccccgtcactttcatgattggtttgattattgtactgatctccctcttggtcttcctgtcccttcccgtcattggaagcctcttccccgctagcagccagtgatccttttaagaggtcagtcttttttcatctctgcttctcatctcacttgtagtagagccagagtcctcaccacggcctacaggactcttcctagcctcatgaactaccctcttcccctcattcacacttctccagccctgtggccttcttgctctttctcttaattactgtggaatcttaccccagataactacattgtccacaccctcaagtagtcagcaaaacacaagggtgtgcacacacaggctcacttgtctgtctctcctactttttctccacagcacttactgtcctctgatacactatatgtttattcatttattgccccctcccccaactagaatgtaaactctatgaggaaaaggatcttgtgttcactgctgcatctccccagaacctacctagaacagtgccttgcagttagtagacattcaggaaatatttgttgaatgaatgaatatactcaggaaatgctttgttgtcataatcctgcagtgaggatgtcctcttctaacacaaataacttcatccattttaattttctgttttaattgcttagtttttattaaagcctattgaaaacgctctttaaaataagagttatataatttaagtatagggaatttaattttaaggcttttcttcagcttaaagattttgttggtgaatttaaatgcctgtagttaaagccagcttagttcaaattccacatatttctggctaactttatatctatatttaaaaattagagcattgctaaaagtgaaacatcaatttatgggaaaattaatactcagaagtaggatttctacttacttttatttctctcacctataggtgaagtatttgactatttggttgcacatggcaggatgaaggaaaaagaagcaagatctaaatttagacaggtatgaattaatgtgtctttactatgtcaatttgataatttatctcacttaaaccctgaagcaaacaagtgtttgcctccataaatgcttataaggcctgttggatggcaggggttggccattcaattcaacaaaaattgatgaagaacttttcatacctaaggcactgtgctggaggcagccatggttctattcctagctttgtaatgggagcattagtcttatacttaaccttccctttttacaactgagccttaaaaatctagagcctttcaaaaacacctgtgattacattaattaaagccatttcagagtttttagcaagcagaatgtcagaaccccaaaattcattattagctttgtctgacataaaccaaggccaagtgtaactgaaactgttaattagtaactttacttcttgctttgtttttactctgctttttaaagagactcgggttttaataagcaggttttaagcaaacaggttacttgactctcctgtc

SEQ ID NO: 78224 - DNA, 1842 bp, Homo sapiens
tcacgcccacagcatcctcagtgccacccggcattcatttctgctgctttcatcagtattctctcccgttaacagcagtgcctgtttgagacctctttcaaggtcctcagcctctgccctcactctggcataggatgaggtttcgtatcgcacagagaaaatagaaacaccatgcagaaactctcattttctaccaggccctcaaacctagcagcacctacccccatccatcacttctttcctcctgttacaggaaagtggggtgcttctgctctgagctctgggtcctgattccctctgggggctgtgctctgtctgatgcctcttttctctccgtttgtttattcactctccttctctactggcttttcaccagcagcatttacacatgctcaagtctatatacctttttttttttttaactaaaaagccatgcctgttcctctttcagatacacgctttttctctcttccctttcatagccatatttctctaaacatttcctagattctgtgtcttaacttggcactcactttcactctccccttacgtaattgccattgacttgcttgttctctgcacccgcccctagagcattcacattcactctctcaactgcagtggccaactgtatgctgatggccccaaatccattcctacggccagagcactcttctgggatccaggacccagctgagcaaagggtgtcttcatataagcatcccttgggtgcagcaggttcaaatcctataaacatgaatgttcacttctcattcaggtgtctgatgtccctcaagtaccttactctcctgtgctacccactcagtcaccaggtccttttgctgctgtgttccaagtatctcttaagctcactcttttatgtccctgttacactatccaaggccagaccaccattatctcataggtgattccgacactactttcttatatgttcttctctgtttctagtgcctcttcctcccatgtatgttttctacactgcacccaaaatggtcttttaaggaaacacaaataagatggtcatttctctgcttgaacaactcttcattggcttcccattgctcttacgatgaaaacccaaacttctcaagtacaatcctttgtgattaagccctgaccatctccccagccccctctacacatctctatctcacatactgtctttcaatttcttgtgtgaaacatactgtgtctcacatgggttctcagactctttattctgcctgaaatacccctcatcaacacatccattatgatcagatgcaccttctggtgctttgatttcacttcatctgggaagccattcacacctttcagtgccaacccacaactccctgtgcctcttcagttatggcattttgtctcaggacagctgcttatcattctccttcttcccttctaaactgtgagctactgagggtagggctttatctgtcttgttcatcattatccatccagacactaatatagcatctgctgtggagtagccacataggaaatgtttcttaaagtgactgtgatttgtctctttttttttttttttttttttttttttgagacggagtctcactttgttgccctggctagagtgcagtggtgcgatctctgctcactgcaacctccacctcgcaggttcaagcgattctcctgcctcagcctctcaagtagctgggattacaggcgcccaccaccatgcccagctaattttttgtatttttagtagagatggggcttcaccatgttggccagactggtctcgaactcctgacctcaggtgatccacccgcctcagcctcccaaagtgctgtgattacaggcgtg

SEQ ID NO: 78225 - DNA, 2463 bp, Homo sapiens
tgttggccaggctggtcttgaactcctggcctcagatgattcgtccacctcggcctcccaaagtgctgggatcataggtgtgagccaccgtgcccagcccccatattattattatcaattgaaaaactcaaggcttttcttgatcttgggacattgatgtttaaattagtgctagaattaatctgtacttcatgtttgttattgttaatattataaaataaggagttctgacttgtctcctgtttttttctctagaaagaatgttttcacattaattaggaggtaacttcatatcattacagaaagcttttctaaaatgcctaatcctgtcataattctaattctattttggctaaatttcatttttgtcttgatgttttccctctaggctgaaaatctattgttagatgccgatatgaacattaaaatagcagatttcggttttagcaatgaatttactgttggcggtaaactcgacacgttttgtggcagtcctccatacgcagcacctgagctcttccagggcaagaaatatgacgggccagaagtggatgtgtggagtctgggggtcattttatacacactagtcagtggctcacttccctttgatgggcaaaacctaaaggtataagaagctgcacccatgtacttcactaaactaaaagaagtttcctaatattacatggcttaatatttttaacattatatcagtgcggggggtttcagggggttttttgttgtgttttgttaactaaacctaaaggttgacttactcgttttctttcctctgtacctctccaaaggaactgagagagagagtattaagagggaaatacagaattcccttctacatgtctacagactgtgaaaaccttctcaaacgtttcctggtgctaaatccaattaaacgcggcactctagaggtaatcatgtaggtggaaacaagcagtaactttggagagtctttagagtgaccttagatctttgcttgatttgtatgccatactggatatatcctgcggctttttaagcaagaattgaaacattaaaaaatattttttgagtttatgctttgaacgatagtcaatgaaatgttgaaaataaatttttgtaaatattacggttatcagaatatttcattttactctgctaatgaacagtttaccttttttagcaaatcatgaaggacaggtggatcaatgcagggcatgaagaagatgaactcaaaccatttgttgaaccagagctagacatctcagaccaaaaaagaataggtaatcactccatgcctgcatgttcatgtgtttttgtctaagtaacatatttctgttttgactcatgtctgtgcctaaaatgtgaataatggaaagttaagcacaagtcatatgaacagtttatctgttctgtcatatttaggaacgtaactacctgcagtttcctataatggcacccagtaactctgaaacaagtgcccatttatgttacaaaatatatgtaatatgtcatcttttaggtcaaatgaaaattattttaccctacaaaagaatgatttctggccgggcgtggtggctcacgcctgtaatcccagcactttgggaggccaaggcgggcagatcacctgaggtcgggaggtcgaggccagcctgaccaacatggagaaaccccatctctactaaaactacaaaattagccaggcacggtggctcatgcctgtaatcccagctactcgggaggctgaggcaggagaattgcttgaatctgggaggtggaggttgcggtgagccaagatcgcgccattgcactccagcctgggcaacaagagtgaaactccgtctcaaaaaaaaaaaaaaaaaaaaggatgatttcttacccaaacaaaacacataaactgtattatgcccttcttttagatattatggtgggaatgggatattcacaagaagaaattcaagaatctcttagtaagatgaaatacgatgaaatcacagctacatatttgttattggggagaaaatcttcagaggtaagagtaatcagaaagagctgaaataccctgtatgtaattattagtttatataaactgttttcttagtttttatcttttgaatatttgtaacatttgatacatcattttttagatttacttgcaaatagcaaatctaaatcctatgactattataagctattttaacttaacccttaatgatggatattggccaggcgtggtggctcatgcctgtaatcccagcactttgggaggccaaggcggacagatcacttgagaccaggagttcgagaccagactggccaacatagggaaactctgtctctgctaaaacaaacaaacaaacaaaaaattagctgggcgtgttggcgcttgcctgtaatccctgctccttgggaggctgaggcaagagaactgcttgaccctgagaggcagaggttgcggtgagccaggatcac

SEQ ID NO: 78226 - DNA, 1045 bp, Homo sapiens
gactctgtctcaaaaaaaaaaaaaaaaaaaaaaagatggatgttgtcataaacctggtctttcataaattaacctgtagtcattaatagcttagaaatgacgtaaagcatcagatgaagtaaatacaacatttaaagttatttgagaaagcctggaaagaaaatcataaataccttacctttagtgtctttccagccgtcagaaaactacttttgcttgagtttagggttgtcatttttgtacgttgtgattcctcctctctctgaatgaacggtttatgagaggtctgtgttaatgaaaagtttaacttcctaataagccatttgggttcgtgttgtggtttgctctgtttttctcattttctcttagctggatgctagtgattccagttctagcagcaatctttcacttgctaaggttaggccgagcagtgatctcaacaacagtactggccagtctcctcaccacaaagtgcagagaagtgttttttcaagccaaaagcaaagacgctacagtgaccatggtaagttttggagtatcccagtgccttctcttagagtccaggcaagaggtctcctagcactgggaagcattctcttgctcagagcctggcttgatgtcctttcttggcattgctttctttctttcttcttttttttttttttttttttttttttttgagacagagtctcactctgttgcccaggctggagtggagtggcacaattttggctcactgcaacctccacctcccaggttcaagcgattctcctgcctcagcctcctgaatagctgggactacaggtgtgtaccaccatgcctggctaagttttgtatttttagtagagacggggtttcaccacatttggccaggctggtcttcagctcctggccttaagtgatccacctgccttggcctcccagagcgctggaattacaggcatgagccaccgtgcctggccagcattttttcttagtgttcctgcaggtgctgccatgattacatattacttcaaggctcttatcttctttatacatgcagtag

SEQ ID NO: 78227 - DNA, 2261 bp, Homo sapiens
aggttctcactctgtcacccaagccacatgtagcctcaaactcttgagctgaagccatcctcccacctcagtctcccaaagtgttggaattacaagcatgaactaccacacacctcccacctttaatatatctaaaatataaattctcttctgccttagaaaaaacaggctgggcgcagtagctcatgcctgtaatcacagcactttgggaggccaaggtgggtggatcacgaggtcaggagatcgagaccatcctggctaacactgtgaaaccccgtctctactaaaaaaaaaaaaatatatacaaaaaaaaaaaattagttggcatgcgcctgtagtttcagctactccggaggctgaggcgggagaatcccttgaacccagtaggcagtggttacagtgagccgcgattgcgccactgcactccagcctgggcgagagagctagactccgtctcgaaaaagaaaaaacaagcatttgactctgtcttttaagattaccactggattatcatatctgaggcatatactagttatcatgttcatttccaagattctttgccctctgaatctcctgtgctgctattggagtctctatatggtttactacaggacattagtctgtcatccacatgtccctaggcacatgtccctggacacactcctcctggagtggcaggaatgactagtgacctccaccgacttcctccctgtcgcttgcatgattcctctgcttctacaccttcccctgtctactcaaactccggtttatctagaagattatgagtgcttttaaaaagatccaagataaaacttcaaaagaagtggcccataaaatctatacttttctcttccaaaaggtgatggcatctctcctacaaaagaggatgtaattcactcagatgtacaagatgaactggttcattctgcttgttacgtatgcatctaattagtttgaatctatgcagtaccaccaccttaagatgtttccaaaggacaactctaaactcttactattaaaaaaaaaatgttttaagtagaaaggagtattaagtgaaatttcaatattgaattcattgcataaggcaaacattagatataagtgggaaacatcttagaggattttactgttttacattttttaggtgaatagcaaccttagatcatcttacaaaatatggttactgtcacaaaataaaacttgaaactatattcagtcatttaaaaaatgaactctttattttagctggaccagctattccttctgttgtggcgtatccgaaaaggagtcagaccagcactgcagatagtgacctcaaagaagatggaatttcctcccggaaatcaagtggcagtgctgttggaggaaagggaattgctccagccagtcccatgcttgggaatgcaagtaatcctaataaggcggatattcctgaacgcaagaaaagctccactgtccctagtgtaagtgttgttgaactatagagtggtcttagggtggtagggttggaaccagctagacaccaggtgttcattttactcctgtggtctctcgtactggaatgccctctctactaggcagccatgcccaatcttaacttacagaaatcctacctgctgcattgtaggtatttattgttgacactctcttagttcattcttgctgctgtaacaaaatacctgagactggctaatttataaagaaaagacatttatttcttaacaattctggaggctgagaagtccaagatgaaggcaccaacaagttccgtgtctggcaagggccctgttctctgcttccaacatgatgccttggtgctggcatcctccagaggagacaaatgctgtgttgtcatgtggctgaagggacagaaggggtgaactcaccccctcaagcccttctataaaacactaatctggccgggtgcggtggctcacgcctgtaatctcagcactttgggaggccgaggtgggtagatcacgaggtcaggagttcaagaccagcctggccaagatggtgaaacgccatctctactaaaaatacaaaaattagctgggcgtggtggcaggcacctgtaatcccagctgctcaggaggctgaggtagagaattgcttgaactcaggaggcagaggttacagtgagccgagatcgcatcactgcactctagcctggcgacagagcgagactccttctcaaaaaaaaaaaaaaagatactaatcccttcatgaaggcggagccctcgtggcctaaacacctaaaa

SEQ ID NO: 78228 - DNA, 1155 bp, Homo sapiens
ggaaagacctcacagtctaacaggaagtgaatgaaaacagtgacagtgcagatggaagcctacgtgcacacacggggaggtctgactgccagtgccccaaagatgtggtgttcacactgagtcttcaaagagctctaatgatgaagagtgttggctgagttcttaccatgtgccaaggaccatgctcagtgctttttcatggattagctacattttaaggtgaaaaaaaagttgggtaattgcctaaaattacactgccaacctgaatccagctcttaatccctatctgtaacaaaatctccccagtaagtagataatatttactaaattaaattgaatccattcagcttcagaaacttttttctgtgtattgaagtatgttctatctaacctaacatattaaagaatttgcagagaagtaaacaatcttaagattattctgtaagcacgtttttccctacaaaattaacaatgatgcagccctgcctccaactccagaaaaaccctggactgaggaggctgtggagaaaccctgttgctctctgaaagcccttcattgttccattctggggactgggtgcatgaaggaccccaaggggctttgcatgtttcatcctctgaccttatgcttagtcgaagtaaaccctgtgtgaaaagtttattttggcctccaaatgccatacagtaggattattgtttccatactcctgcagttaaaattccgtctccaacgtttgttgacagttaccagagaagatgagggcattattccctgccttcatgacttctcttcccctttgctcttgtctacacacgctgcccttctgaaagtgaatcatgagtattttcagtccacccatactaaattacttacaaaggaaaaaaggtagttagcaacattattattttctcccatgagtctttgggatttctctgtagatggtctgctcaagctgtagtaaaagtgactgctctatctttgtttaaaaattatctgataaaattccatagctatggccaggcacggtggctcacacccgtaatccctgcactgtgggaggccaaagtgggcggatcacttgaggtcaggagttcaagaacagcctggccaacatggtgaaatcccatctctactaaaaatacaaaaattagccg

SEQ ID NO: 78229 - DNA, 1095 bp, Homo sapiens
attctaaattctttttgttgtccagagcatcatcctcctgcctggctgtgtatgatgattaaaaggcttgagttaaacccagggggtttcctagaggaagtagatagtaagctgtggttatgttgtagaacagtgaataaggaaatggagattgtcttgtgctcattaataacttgaacaaaagccgaaagtgggggaagataaggacgtgaggcagagagtcatacctcaggagaatgtacagcaccaggtagcattaaaggtccgcagtttaccaaagggtccagatggctgagtctaaatagaaacactggagaagccaagagaagtggaaagtccagccttctgaatgcttttaatttggctacatagcaagcatacataggatgagcgtgactttaaaaagacaatgatgttacatgtcaataaggagagcatcctatcatgcacatgattttcttggggttttgaaataaaataagtagagtcagtaaaatgggattggataggtgtagagactctgaggtggggttagtctgggtggagagaaaagagaagttagattggtagagaatagctaaatatgctatattctgttcagaacaaatttcccaggctggcatggattttccttctttgtttttggaagagcagtaagtgtacatcattcttttaacttgaacattgtttgcatcagaattgttctgacatttactttctgcagttacggtgtgaggttctgtttcttaatcctaacctatgtttgatctcattagtcaaacaaaatgtttgatcactacattttgtgacagcctaatcaaaaattctctcctccttcatccttagttccaaactgcttatcacttccctgttccataggccacttaggattgagttgatatgaggagtaacatttgttctgtaagattatggttattattcgttgaatttttagcaatatttacattctcttgttctcttttatgactcgtgtgtgtgtgtgtgtgtgtttcaacattgtcttttcttatgattaaaaactactaagaacttgagtatagcagctggggtagatagtttacagataatgattga

SEQ ID NO: 78230 - DNA, 2231 bp, Homo sapiens
ggcaaaaccccgcctctacaaataatataaaaattagccgggcatggtggcacgcatctgtggtcccagctactcaggaggctgaggcaggaggatcacctgagccctgggaggtcaaggttgcagtgagccatgatcatgccactgtgctccagcctaggggagtgagaccctgcctcaaaaaagaaaaacatattttttgatggtgataatcaagaaaccaaaaatattgctttcttaatgcacacatgaggcaggaaatctttcctgaagggctacattgtacctgtgcctctcaagtcaccagaaggccaagctgcaggtcaaaactgcgggaaaagcactttcttcctgttggcagttccattctattattattttttaattgatcttcccacttgtctgatttttccttggacagaacaggtaataactgaatatagaatccagctgatagcctcattggcttttaattggaaacccattatactgtgtggcacaattagaaagtgagaataaccccattctgaggccgagtgtgctcaggctgaagagccagcaggagtgcccgctgtgcgtgcgtggtgtgcggtgtgtgcagtgtgcagcgtgcagcggtatggcatgcaatgtgtgtgatgtatgcagtgtgcagcatggagctggcccctgtgcacacccctgcagccttgtggaagaaggtagcgctggctcagtcaaatgagaggaagagttttcataagcccggctggtgtttaaaacgtgttttggctttgttcattttatggtgttggtgttggtattggtggtcatgtactggcatgtaagatttcttttctctttccctcttctctctgcttctacattctgttcattgaggcttccaactgaatatgagaggaacgggagatatgagggctcaaggtgagggaaatgatttttacttaaaatttttttcaggtgtttacttcatttctgtggcagaggcgactattttctgaatgttccctactgtattcctgctgtctctgtaggagttacgtagagagggtggccacaagggggcgccagcctgccatgagcaccgtccagatccagcttggcctccgctctacatttgtgtttgtgttcaaagcacggcgaggccttcagccttcctgcctgggcgttaacagcctttggaggtctgggttgggtagcagtgctcagagaaataagccctcagttcatcactgacccctcacatggttctcttcacaaggaataaaagcaaagtacttaatagaatgtccatatttcaaactagatatgttttcttctaagaatggtgattatatagttgagtgttttgcttttcttttttttttttctgagacacggtgtcgctctgtcacccagtctggagtgtagtggcgtgatcagggcttactcgagttcccaggcttatgcgatcctcccacctcagcctcctgagtatctggaaccacaggcactgccaccatgctggctaatttttgtattttctgtagagatgggggtctcgccatgttggccgggctggtctcaaactcctaggctcaagtgaacctcccacctcaacctcccaaagtgctgggatgacagacatgagcccccgcacccagccttgcttttccattttgtatagttatcattgcatggatttgaggggaggcaatcaccaggtagccttaggactctatgtcccttgttctaggtctcttccacttgtgccctttttttatgccagtcaccagcaggctatttcaggtcctcattcaccgtttgtccttttggtctttctaaaagcccgcttctggtcatatgacctttctgaattaaaaccttcagtgacctccactatttcacctggccacgtccctgcgaggccctgagtggcgtggtccaggctgccccagcagccccagctctgctgccccatcaaggcagagcactagggtgagtgccaggcagcattccctctccaggcctacccatcccagccaggagcaggctctagatcctggtttgtttccccacccataataggaaggtgacataataggacctacgtgggcatcaagtaagttggggcctgaccaccacaagtgctcattaagtgccaccagctgttgtgggggtgatgacactgtgcctccagttccactcagtctgtgtactttattatgccacagacacatcctgtactttcc

SEQ ID NO: 78231 - DNA, 2611 bp, Homo sapiens
cttacattctgaatccacagggcatccacatgggtggtgtcagtcccccacagacagagaagtgtcccgttgcatttttccatctattccagtagtaagattgtgtcatttgagattttctttaactgtataattggacgtttaattaacaaaccagagaggaggaaaaacaatgaggtgggtagagcatcatgttcagcctcagggctgtacagcaaagcaattttagactgcggatgttgagtctccagttaccctgagtgccagttacagtgattcacatctgaaagaacagtactgcaggagagggacagcccagggtggatgggtggggtgggcaggagctggctggcaactccttccctgagctgggcctgcagagccctgaggagtggggcatgctgtcctttttgcctgatttccaaggattctgcttaacgaattacttcgttcattttagtaagcacaggtggctggtgaagattttccagctaggtagatctttttgtgtgtggcttatgacttttagggggtgagggaagaaaatagacgaaaatagacttagttacaaatgtgagtctgtgcaggaaaatgtggaggtcagtcgttagttgtgttgtatcaaagacgtgaatgaggaactagctgaagtgtaagaggttgattttcctgtacgattaaaaataaacctgcctctatgcatttcagtcgcaatgtatctgctgagcaaaaagatgaaaacaaagaagcaaagcctcgatccctacgcttcacctggagcatgaaaaccactagttcaatggatcccggggacatgatgcgggaaatccgcaaagtgttggacgccaataactgcgactatgagcagagggagcgcttcttgctcttctgcgtccacggagatgggcacgcggagaacctcgtgcagtgggaaatggaagtgtgcaagctgccaagactgtctctgaacggggtccggtttaagcggatatcggggacatccatagccttcaaaaatattgcttccaaaattgccaatgagctaaagctgtaacccagtgattatgatgtaaattaagtagcaattaaagtgttttcctgaacactgatggaaatgtatagaataatatttaggcaataacgtctgcatcttctaaatcatgaaattaaagtctgaggacgagagcacgcctgggagcgaaagctggccttttttctacgaatgcactacattaaagatgtgcaacctatgcgccccctgccctacttccgttaccctgagagtcggtgtgtggccccatctccatgtgcctcccgtctgggtgggtgtgagagtggacggtatgtgtgtgaagtggtgtatatggaagcatctccctacactggcagccagtcattactagtacctctgcgggagatcatccggtgctaaaacattacagttgccaaggaggaaaatactgaatgactgctaagaattaaccttaagaccagttcatagttaatacaggtttacagttcatgcctgtggttttgtgtttgttgttttgtgtttttttagtgcaaaaggtttaaatttatagttgtgaacattgcttgtgtgtgtttttctaagtagattcacaagataattaaaaattcactttttctcagtaaaatcttgcattgtctcctaatgctgtatttaacacatcctcaagttgagcagaagtaatgtgtatgaaggcttggggccacgtggaccttcgcaggggtcccagcattttgtgattaccagcatattttttctcccaaggcaataaagagagaagatggccctcatggtgacccaagaaggaagggaatccagagcagctgcagcttaaccctgggagttgtggcacagccctatggagaaacaccaggtcttgacagttctgggttggttctctgtgaagtatgtaaatttcctttctcctttcttgtgattcagtacatgaatcagacctgcagcttttgtccaacacctacatggttgtgtaggggtaatgagctcataactcattgtgttgctttattctcacagggaagttgtcacactgattggtgtgctattctgggttctgggtttgttgttggtcagagtatgaaagtctggaggccggacacagtggctcacacctgtgaacccagcacttttgggaggctgaggctggaggaacattgagtctggtagttcaggaccagcttggacaacatggtaagaccccatgtcttcaaaaaataaaaacatgggccaggggcggtggctcacgcctgtaatcccagcaatttgggaggctgaggcaggcggatcacaaggtaaggagatcaagaccaacttggctaacacggtgaaaccccgtctctactaaaaatacaaaaaaattagccgggcatggtggcgggcacctgtagttccagctacttgggaggctgaggcaggagaatggcgtgaacccgggaggggagcttgcggtgagccgagatcgcgccactgcactccagcctgggcgctagagcaagactccgtctcaaaaaaataataataataaaataaataaataataaaaacatcagccaagtgtggtgg

SEQ ID NO: 78232 - DNA, 1007 bp, Homo sapiens
tccctggtgcaacccccccgccaactcaccctagttgccagttgccactgtccctgcccagcctctggctcagggctcctaccatgattgggcaccctgaggggctcggccagctcagggagtggaggcggataggtgagccagcgggggctaggaatcctgctccccaccttcctccagctcctaagcgccaaggacgcagcctgtgctgccacctgctggccagggcctcctctgccccacccctggggatcagggtctgggacaggcctcatcctgcatctccatgcccacctggacactaaaagctgcggatcactgggctctcacctccttgggacacgaggggattgccaacctagacactggggcccaggagcagcagtggggtgcatccctgaatctgctgctgggcttggcttgtggggggtcctaagggcagggttgaagtgtccacctccctgagtgaacacctggtaggctaggggcatagggggcaggtcccctggtgcagaaggctggggggacttctgcatccagcctttggaccctagactgggccctccctggctgaccagcctgggcacaaggccagtttctggcttagccttttgctaggaaggcccgggccaggataggccgagctgtacaatcgagagtcttgggagaagggcggggacgaagggcccgaggtgagcacaggaagtgagcccctccagaaaggggaggctgagggcagtgaggaaggggtgcagacccagtggggacctgaccagcaaagccccacccccagggggccttgtcagtgctgccctcctcccgctcaacagcggcagcccctcctgctggctcagtccctctcatcacggcttgggcagagccagcctgacaatcgctggggtggtgtgggccccactccgaggtgaacacagggctgagggcatggctgggcaggcctaacacttgtgtttcaacgctccccttttcccatgttgactctcagagtg

SEQ ID NO: 78233 - DNA, 2896 bp, Homo sapiens
ggcggcaccaccccgcggcgcgggccaatggaatgaatgggctataaatagccgccaatgggcggcccgcgttgtgccccttaagagccgcgggagcgcggagcggccgctgttcgcctgcgtcgctccgggagctgccgacggacggagcgcccccgcccccgcccggccgcccggtgagtgggcccgggggccgggggcgtccgcgcccgggctaggggcgctgcgtgcaaagggggcgcgtcgcctggagcgcgcgccggaccggccgggggtccccggcgatgatggcgctccccgcgcgcgctgcggaccccgctgaccttggccgcgtcccggggggcgccggggggcccggcggcgggggcctgagtggtacgcgggagcccgggaaccccggcgtgccggtcccctctgaccccgcgtctccccgcagcccgccgccgccatgcccttctccaacagccacaacgcactgaagctgcgcttcccggccgaggacgagttccccgacctgagcgcccacaacaaccacatggccaaggtgctgacccccgagctgtacgcggagctgcgcgccaagagcacgccgagcggcttcacgctggacgacgtcatccagacaggcgtggacaacccgggtacgcgacccctcggggccggggtcccggccccccctccccccgcgcagccgcagggtcctcagcagcgcgctcgggcccggcagtgacgtcactgtccccgtcccgcgccccctcccccaggccacccgtacatcatgaccgtgggctgcgtggcgggcgacgaggagtcctacgaagtgttcaaggatctcttcgaccccatcatcgaggaccggcacggcggctacaagcccagcgatgagcacaagaccgacctcaaccccgacaacctgcaggtgcggggctgcgggcgggccgggcgggcggggccggggtcttcgggcgctcactcccgtctcgcctcccagggcggcgacgacctggaccccaactacgtgctgagctcgcgggtgcgcacgggccgcagcatccgtggcttctgcctccccccgcactgcagccgcggggagcgccgcgccatcgagaagctcgcggtggaaggtaggggccgggcgggccgaggggcggcggcggccgcgtccccctcccggcgcggtccccgcccgcttttgtttacgtcgcccgggagcggcagccgccgtcgcgctcttatctgcgcgcgcccgggttcagtttcccggagggaccgagggacggaggcccagccccgcgcccacagcggcctggggcccagggagggcgggtcctggcgcggggtcaccgcctgggaccgtcgcccgggccgtgaggactggacgcccgcagatccgggcgggtggggccctctgacgtcccccgaggtggggcacgggggcgggcgggtccgcgctgcgggctggaggggcgggcgcgggagccgagcgtcctgagcgcacccctcgcagccctgtccagcctggacggcgacctggcgggccgatactacgcgctcaagagcatgacggaggcggagcagcagcagctcatcgacgaccacttcctcttcgacaagcccgtgtcgcccctgctgctggcctcgggcatggcccgcgactggcccgacgcccgcggtatctggtgcgtgtccctctgcgccctctcgcggcgtcctccctccccgctacctccgctttccctctcgcccccctcgcgggggtggggcccctcgcggcgaggaggaggaggaggaggagggaggggccggccgcgctccgggtctgggttccgtgccgcgcctcctcctgcgccggtgaccttggccgagcaggtgcgttaagggactgggccccggcccgtgggggctcaggactcagcaacacctccccaccccgagacgtgaggtgggggcggggctctctggcgcctctccccgacggccctgggagctggagctctttgttttcttttctcactcctccgccgctgggattctaccaggggctggtgacgccaaagcttctccaggggcagggctcctacccccactgtggggggcgggtcgggctgtcctggcggtccctggccccgccccacctcaggccacagcgcatgatggcagctggggttctcctgctgtgaggcgtcccggttcccccgcccgccccgtgttggcgggtggagtcttggcagcagcctccactcctgggcatggcagggagcagcacctcagggacttgggaagttcctttggtctgggggcggcctggggcttttttctgggtatgccctgagaccagccctcccgcaggcacaatgacaataagaccttcctggtgtgggtcaacgaggaggaccacctgcgggtcatctccatgcagaaggggggcaacatgaaggaggtgttcacccgcttctgcaccggcctcacccaggtgccagggacggggcaggcccagaccccagggccccagcagggatgtgggtgccccagcatcagtccccccgggggatttccggcactggggagtctcagggcctgtaggggtttcaggcaggccttctccctcataccctcttctccgtctgcagattgaaactctcttcaagtctaaggactatgagttcatgtggaaccctcacctgggctacatcctcacctgcccatccaacctgggcaccgggctgcgggcaggtgtgcatatcaagctgcccaacctgggcaagcatgagaagttctcggaggtgcttaagcggctgcgacttcagaagcgaggcacaggtgagcagggcaggtgctgcggcttcccgtggcctttgggcagccctgtttcctccgccctgacttgctgtctccc

SEQ ID NO: 78234 - DNA, 1014 bp, Homo sapiens
ctcgggggacgtcagagggccccacccgcccggatctgcgggcgtccagtcctcacggcccgggcgacggtcccaggcggtgaccccgcgccaggacccgccctccctgggccccaggccgctgtgggcgcggggctgggcctccgtccctcggtccctccgggaaactgaacccgggcgcgcgcagataagagcgcgacggcggctgccgctcccgggcgacgtaaacaaaagcgggcggggaccgcgccgggagggggacgcggccgccgccgcccctcggcccgcccggcccctaccttccaccgcgagcttctcgatggcgcggcgctccccgcggctgcagtgcggggggaggcagaagccacggatgctgcggcccgtgcgcacccgcgagctcagcacgtagttggggtccaggtcgtcgccgccctgggaggcgagacgggagtgagcgcccgaagaccccggccccgcccgcccggcccgcccgcagccccgcacctgcaggttgtcggggttgaggtcggtcttgtgctcatcgctgggcttgtagccgccgtgccggtcctcgatgatggggtcgaagagatccttgaacacttcgtaggactcctcgtcgcccgccacgcagcccacggtcatgatgtacgggtggcctgggggagggggcgcgggacggggacagtgacgtcactgccgggcccgagcgcgctgctgaggaccctgcggctgcgcggggggagggggggccgggaccccggccccgaggggtcgcgtacccgggttgtccacgcctgtctggatgacgtcgtccagcgtgaagccgctcggcgtgctcttggcgcgcagctccgcgtacagctcgggggtcagcaccttggccatgtggttgttgtgggcgctcaggtcggggaactcgtcctcggccgggaagcgcagcttcagtgcgttgtggctgttggagaagggcatggcggcggcgggctgcggggagacgcggggtcagagggg

SEQ ID NO: 78235 - DNA, 1021 bp, Homo sapiens
gggtggaggtgctgggcgccccaccccacctcaaagatgagccgaggcctggtgcgaacagcaaggctgtggccgggggtcccctgctggctccagcccagccctgactcctgggtcctggtctctgctgaggtgggtagctgtggggatctccacaccctgcctcctaggcttcctgctctggggacacttctgggcctggaccatagtcccagggaggctgaacccggcagagcctcccctggggcccccctgctgcctttgtgactccttcctccagcgtggctcggggaacccgcgcctgcctctgggacctgtccctttccctgcgagctcccccttctgggtccaaaggctcctggctcattcatgggcccggcatctcctgccggccacgggagcccgctggggaggatgcggcatgctcagcctctgtgccctgtctaggctgttgtcacacagcaggtgcctcctctaaccccgaacctcctggcggccccgtgttagggtacagctgaggagaccaaacctcagggacgtttgaggacacttgcctgggccacatacctctacccggccctggcttccccaggtcctccctgccaggacagggacccgggctgggttctcattcactgcaggccaggccaagtgaagcccgtggctgccctggtgggaggcggcagggaggggctgtcatgctcgggctctgcttcgagtaggcgcctcctgttcccgggagcagcgacagcctctaatttcctgtgacagcagcggcccccgcaccgccccacgctgccgtgctgtcagagctgctccgggcccagagctccagcagccctgtggaaggcaggagagcagtgcccgctgtgggccaagtgagacaatggcagcgcgggcttgacccggtgcctggcacatgggagggcctggcatggctaagctgggtgacatgaacagcggcgccaggccccatggggggctgtcagttgagggccaggcccctctgccctgcagtccc

SEQ ID NO: 78236 - DNA, 1198 bp, Homo sapiens
gggctccgcacccaggtcagacagttcatgaaggtgataatatatagagaacacacacctcagactcacagcctttctccactgcaagcgtaagagactggttttatttcaagaataactaagggtatattaacacatgtatctcaaagtaacattgaattattgaagacatactgttccaatactcaaacagttcacagagaggggacaggaaccaatgtactggaaaaacacacttgtattatatgtaaaaatcgatggccaatatttctcttattaagagaaaaatacccaacaaattaaaaggtgaaaagctgtgctcaaaaaaaaaataaaaaaacccaaaaccttgcatgcacaagctaagctcagacccttaaaaaccagatagaaattgacaaagtcaaacaaaggagaaaaactagctgaacttctcaaactaaattatatcaaatatatgtgcattttagcaaaataaaccactaaactatactttgtagacatattcattacatttattttaataactacttcattataggctgactggctttcctgtgtggataaagtgtgatctgaaagcaacgctgactgaatgtaaataaagcaaacgttcccagccatttttggcatgaacatggactacagcgtttaatgcagacccaaagccacacatttttggggagtaggttttacttgcagtacagattcttttcattacagatcacaaaaatacaatacaatgtgacaagcccagtttaagaattacatgcagtagctcatattaacacaaacagctccccacgaaggccgacaagagctaaatccggtgtcaacagggttcattgcaggagtagaataatccggtacaaggaacgagaacagattgaaaccagaaacaaagccatgcctgacagtcaatcaaggtcaatctgatcatttccatgaccaattacccatgtgaacaattcaaaatgacggtggaagagctgagcaccctgtactcacacacgatgcccacagcttggcaaaaggtacacaaacacttgtttgaaaagaatgactgaaacgtctactttcaaagaacaatggacacttttaaagggaatgctgacatttaactttacaaaatgaaatttaaaatgtaagtagtactctggggaagaatatgcctgaagcgtaaccatgatttcccagt

SEQ ID NO: 78237 - DNA, 1866 bp, Homo sapiens
atgctgccgtgcgccgcgggagccagggggcgtggggccatggtggtcttgcgggcggggaagaagacctttctcccccctctctgccgcgccttcgcctgccgcggctgtcaactcgctccggagcgcggcgccgagcgcagggatacggcgcccagcggggtaagcaggggcctggggacattgggccgggaggggtgaccggaagggaagacaaacccgggcctcggggccactccctgttctgcacagccgcctcaggcctttgtccaggtgctctcgcgtcctatcccgaacagtcccgcagccccgaggctcccgcatcaacgccctcagtcggatgggactgagggtgccgccgccaccacgccggggactgttgacagccagaacctttaagcgtaacagagtcacctggcaagtttgtacctaccttatttgttcccgagaatgattattttttatttttaaagagctcttggcttaccgtgcgttttttttcgttgtgtgtgtgtgtgttttggctttgttacaattattagtgcttttcttcaagcggcgagcactttatcatcgtacttttgtagcacttcacgttgaatagttgttatttgcaaactatgtgtgggtatatgcatgttactggccaaagatccgcaaagaatgtctgtagcaagaatgtctgtggcaagcaatttttataagtggtacttttgggagggatgttttgtttaagggaggcctaggccttgattccgtctgtcagatgaaaatgttgactaacggtgtggaatgggctggagataaaatattcaagcaaagcatgcaaataccaaacaggctaatgaaggaggctggaaaacttggtttaaacaataattaaagaagtattaaaaaagtgttaattaaaaattggacgggctccgtggctcacgcttgtaatcccagcactttgggaggccgaggcaagcggatcacgaaatcaagaggtgagaccatcctgcccaacatggtgaaacgtctctgctaaaaatacagaaattagctgggcatagtggcgcgcgcctgtagacccagctactcgggaggatgaggcaggaaaatcgcttgaacccgggagacggaggttgctgtgagtcgagatcgcgccactgcactccagcctggcgacagagggagacttcatctcaaaaaaaaaaaagctaattaaaaattgcaaatgtacttgcttgtacattttcatttctgttgggctgtggctgttagtacactttcataattgtagctttgaaggtctatctagtttacaatttaaacaaggagttaccagggcaacttgccaaccagacacccaagtggctagctcagttctgtgttacagtgaccaagtccttgccttctatccctagaacatagaaacccacccagcatctctatctttgggcagaaagatagagcaggtgtctgaaaatgctctaagagagcaaacgggaaatcaaccaagacatttcccgggcgggggggattttccctagcttattttgtgaacttgtgctggaaagaaacaacagcacccaaataaggatttctctattgtcatatacacttcttttttttttttttttttttttttttgagttggagtctccctctgtcgcccaggtgggagtacagtggcgtgatctcagctcactgcaacctctgcctcccgggctcaagcgattctcgtgcctcagccttccgagtagctgggactacaggggcccaccaccatgcccggctaatttttttgtatttttagtagagacagggtttcacctgttggccaggctggtttcaaactcctgacctcaagtgatgcgcctg

SEQ ID NO: 78238 - DNA, 1061 bp, Homo sapiens
atctgaggtgtgattattgataattgaaaacttttcccaataccctgccgtgatgacttgcaatatagtcagcactggcaatttttgacagtctctacagagactgaaaacaaaaattttttttatagagatggggtctcactttgttgcccaggctggcctcaaactcctgagctcaagcagtccacctacctcggcttcccaaggtgctgggattacaagtgtaaaccaccaagcccagcccacaaatcatctttagacaaattgtctaatcatctttagacaatactgaggtgcaggccttgtgtctgttggtggtgggaaagagatggttgactagggccttaaagataataaaaataattaacgtatgtatacagcaggggtggcttcctgctgtggtcactccagcgttgggtgaaagtgttccagcctggatagctctcccatctcgttggcattcctgaaattaggagactgttttcattgactttctagtgtttgcccttctggtggattatccttcttttatattgctggatcgggtttgcggatttgtctagcatccatgtagaatagggggctggggaccctaaccctcagtaaatatgaagttcctgactccttctcagatgggaactcaaagcctttatagaactgagagttagaacaggaagcaagaacgctaagagcttgctaacatttttctcttcattattccctggtggtttccccatggtagctttgtgtcatgtacgggcacttccaggaatagggtgcaggagaaacgtctcagtgtctccccttccgaatcttggcttctggagggagagatgctggggtgggagtgctccttggtggagtactcaggagcttagtaaaagcagagggggctggagaggcaggcctggcctgcagagccagcatggagaagcctggtgtagggctctccagcctgccaatttacagttaagaagaaaggagatatgtatatatatatatacacacacatacatacatacatacacacacacatatatacacacatatatatacacaca

SEQ ID NO: 78239 - DNA, 1051 bp, Homo sapiens
gaggcaggagaatggcgtgaacctgggaggcggagcttgcagtgagccgagatctcgccactgccctccagcctgagcgacagagtgagactctgtctcaaaaaaaaaaaagaaagcttagcaaaggtggttgagtttcgggaaagggctgttattatttaaaccagaaactaggccctgtgtggtggctcctacttgtaatcccagcactttggctgagatcacgccactacactccagtctggcaacagagcgagactccgtctctaagtaaataaataaatccagattgtacattttataatactagagattcattttgtcatatgttaatccaatttactttgttaaaggtctcaagattctgccctccaagaaagtcttgccatgattggataggacccccagataaatattcaaaccttcgacctgttcacttttacatacctgaaaatgaatctccattggaacaaaagcttagaaaattaagacaagaaacacaagaatggaatcaacagttctgggcaaaccagaatttgacttttagtaaggtaagtttaagttttagatcagaacggaagggtgcggtggctcacgcctgtaatcccagcacttcgggatgccgaggtgggcagatcacgaggtcaggagatcgagaccatcctggctaacacggtgaaaccctgtctctactaaaaatacaaaaaattagcccggcgtggtggcgggcgcctgtagttccagctactcgggaggctgaggcaggagaatggcgtgaacccgggaggcagagcttgcagtgagcggagattgcgccactgcactccagcctgggtgacagagccagactcgtctcaaaaaaaaaaaaagaaaaaaaagttttagatcagaatgagaaataacacagttggccacttgagggtgctaggtgtttagtatattgctttgctatttgttacgtggtagtactgggtctcagtccatcccccgcactgtatgtacatatatgcatatagttttaaaaactaatatgtaactgtatataagaaat

SEQ ID NO: 78240 - DNA, 1029 bp, Homo sapiens
cagtggcgtgatctcggctcactgcaacctccgcctcctgggttcaagcagttctcccgcctcagcctcctaagtaggtgggattacaggtgcccaccatcacattgggctaatttttgtatttttagtagagacggggtttctccatgttggccaggctggtctggaactcctgacctcaggtgatccacccacctcgtcctcccaaagtgctggcattatgggtgtgagccactgtgcctgacctattctgtggatttataaacaaacagcgtctcccaaagtttattgaacatcttctcaaatcctgtttcaagcacaaaacttttaaccacattcagagggttttaaacgagctttgagatgggtcactagcttctcagaaaatccacatctaaacttctccagtacaccgtgagctgtgctctagccaaagaaaaatggaaagacagagaaaggagttctgagagcctttttttttttttttttttttttttaaggaaaaagaagaatttattcactcaagactaaaaactaaaggcctgggcctgagaactgaatcaggttagtgtgtttgtttgattgttttttttgctttctttgcgtttgagctagtccatgaaaagggaaaggaagggcggtgagagaggtggggaagttcagggcggtccttggcctgctttggggcagtgctcggcacacccctgtccaagttctcttgcacacccagttcccaggcatggctctccaatctcagctccctcctttctctccggattttaggtggttatgatggatgaccaacctctgacctttgactttcgtactgaggtctcagcctttgcagcttctccctccaaagcagcttttcttctgattcctgatctcagttcagtgctcaaaatagcctctccttattttctcctggtgtcagtgttaggcctgaataacatctcatgctgttcgttaaacagatgtctgctgccaaaaagttgttctgatagaaaatccaaaatcatcgaccccaaa

SEQ ID NO: 78241 - DNA, 1033 bp, Homo sapiens
cccagctggtctcaaactcctgacctcaggtgatccacctgcctcggcctcccaaagtgctaggattacaggcgtgagtcaccacatctggctaatatttgtatttttagtagagatggggtttcaccatgttggccacgctggtcatgaactcctgacctcaagtgatcctcccaccttggcctcccaaagtgctgggattataggcgtgacccactgcacctagcctattttgtatttttcagtgtacacatcttacacgtctcctctcaaatttattcctaagtcttttattatttttgatgctatcataagtagaattgttttcttgatttcatttcagactgttcattgctagtgtatagaaatacaattgatgtttgtatattggtcttgtatatatcctgcaagcttgctgaactcatttattagctctaatagttttttgtttatcctttctccttaagtcttaatgtttaagctgaaattacctttcaggtcagaaagcaacattgaatgcagaagaaatggcggacttctacaaggaatttttaagtaaaaattttcagaagcacatgtattataacaggtaggtgtttactcttttcctgaaaatttgaatagcacatccagattaggtaggagtgttttcttacctgaatttaacaacattcatgtttatatcagaggtagaagttgcaagactttatcaacttttttttttctttttttctttttttttttttttttgagacggagtttcgctctctcgcccaggctggagtgcagtggcgccatcttggctcactgcaagctccgcctcctgggttcacgccattctcctgcctcagcctcccgagtagctgggactacaggcacccgccagcacgcctggctaattttttgtatttttagtagagacagggtttcaccgtgttaggcaggatggtctcaatctcctgacctcgtgatccgcctgccttggcctcccaaagtgctgggattacaggcatgagccactgcgcctcgtcta

SEQ ID NO: 78242 - DNA, 1107 bp, Homo sapiens
gaaacagggctggagaggactccaggcgtcgccagtgggcctcactctcagcctgaggagaggcaggcctctatgaatagtttagctttaacaagggcagggaaagggcaaagcagttgaggcctggtcagttgaactcatcctcaactgggagccacttctgggccagggcaccaagcctcagtccctgccaccgtgtcacctgtgcatcctctgtttctctacagagattggtacaagcgcaattttgccatcaccttcttcatgggaaaagtggccctggaaaggatttggaacaagcttaaacagaaacaaaagaagaggagcaactaggagtccactctgacccagccagagtccaggtttccacaggaagcagatggagctcctttcacaggggctctgagaaaaactggagctgatctcaagaagccccacatcttcctaaggggccccatggcctgtttgggggcagggtaggtcctggggcactgtgggccgcctgcctgctgatgtgggctctaggccagcttgttgtcacgtacgtggtgtgaaataaagcccaagcactgggtgcccgtttcctgtgtttcgaattataccaattcaaaacagaactatttaaaaatattggccaggcacggtggctcacacctgtaatcccagcactttgggaggccgaggcgggtggatcacttgagatcaggagttcaagatcagtctggacaacatggcaaaaccctgtctctacaaaaaattagctgggtgtggtggcacgcacctgtaatcccagctgctctggaggctgaggcatgcgacgcttgaacccaggaggcggaggttgcagtgatccaagatcgcaccactgcactccagcctggaagaccaaacgagactctgtatcaaaaaataataataattaataaagttttactggaaaaaagaagtctgctgacgggaatgatgtggaagctgactgccaagcgatcggtgtgctggccgtggagtcagcaccaccctcactgtgagtcgtcagctggtgggtcctcacaggctgcgtcctgaatgcagtgcggtgtgaggacatgaaagcaaatgcaattttat

SEQ ID NO: 78243 - DNA, 1937 bp, Homo sapiens
ttgggacgtctgcaggcactgggagggtttttcccaagccgctggcagcagcgagcggagcctcgcccattgaatcagcatgccctcccggctggctgctgagtcaggcctgcggagccggcgaagccgcaggacttgacccaggcgcgctccgctgcccttcaggccgggctggaggtcgaggccctgcagccagggagatgcgccggtggctgcgtggggacagaggggggttgtctcccaccctcacagtctacaccccggcccttcccctttgcccgtctgaggcgcagtttgtgtcgagggggagcgcctggaaagtttcctcgtacagatacgagggtccaaaagccccgaggagagggaataatgagaaggggagggcgcagggttagaggtcagggtctcgaccaaaggctgtcggttttcctggaggagggagaaaggcctggccgggatcatctgattccggggcctcccgaaggcctcctagctgggttttggggggaccgaaacgagcgcatgaagctcgcgggcctgggagtggggtggggcgggagcccagtggtggcggctgcggccgggcctgcaccgtccccggccgcattctggtagggcccacagtccggctggaagggaagctgccgaagcgctcggtcatcgcggctgcggagtcggagaggccagggcctggccgcccaccccgcgagccgcgccctgccccgagcgccccacccccgtccgcgttacaaccgggaggcccgctgggtcctgcaccgtcaccctcctccctgtgaccgcccacctgatacccaaacaactttctcgcccctccagtccccagctcgccgagcgcttgcggggagccacccagcctcagtttccccagccccgggcggggcgaggggcgatgacgtcatgccggcgcgcggcattgtggggcggggcgaggcggggcgccggggggagcaacactgagacgccattttcggcggcgggagcggcgcaggcggccgagcgggactggctgggtcggctgggctgctggtgcgaggagccgcggggctgtgctcggcggccaaggggacagcgcgtgggtggccgaggatgctgcggggcggtagctccggcgcccctagctggtgactgctgcgccgtgcctcacacagccgaggcgggctcggcgcacagtcgctgctccgcgcgcgcgcccggcggcgctccaggtgctgacagcgcgagagagcgcggccctcaggagcaaggcggtgagtccccggcgtgcgccccggaccgcggccccctcctcatcctccgccccgtccctgtcccgctcctcttcggacccgccccggccgtaactctgtccccatccaggcctccttcccggtttgggtcccggcccctctccgttcccaccccggtacccgccccagttcaccgccccggccggtccgcgaccccttccaggttcaggtcgggttcttgtccccggcccttttgccagccccggctcccggcgccgcgcgtcctccccatccgcgtcccactgcaggttccggtccccggccctgcccagggccccgccctggccccgcatccccggcttggccctgctgcgggcggcggcggccgttcccggggacagctgtggaccccgggaacccgcgacaggggaggtggctgaccccgggatcgcggcgggcggggaggccggaggcccggcggggctggctttgtccgattcctcctcttccttccacccccgcctctcccggcaccgccctgagcggacgcgcctgtcattctcgcgggcggcggggggccgggtccctcccgagagctggctccgctttgcctccttggcgaccccttattttcagtaaccagatgcgaaacgtttcaggcgaccctgttcacctaggctggcgttgctc

SEQ ID NO: 78244 - DNA, 1073 bp, Homo sapiens
ggcttgcaaacattctgagaaaaaatgttgttcaccgaggctatgtgttttggaaatgccatttagatgttttgctgcttttaatctttggcattaatttcagttgctgtcataaaaaagaattaagacataaaccagaaaagtaattaaatgtgtctgcaaaggaaaaacagaaactgcagaatatggtatttcaaggtcataaattacaaatgtgcatatttattattcccctataaaatgttaattaaaaaattttcatatttacttgatgtaacagaaatgaaacctgtaatgagggatctaatttctttttcttttttcattccagaatgtatgacaacatgtccacaatggtgtacataaaggaagacaagttggagaagcttacacaggatgaaattatttctaagacaaagcaagtaattcaggggctggaagctttgaagaatgagcacaattccattttacaaagtttgctggagacactgaagtgtttgaagaaagatgatgaaagtaatttggtggaggagaaatcaaacatgatccggaagtcactggagatgttggagctcggcctgagtgaggcacaggtacgagtgagaatgactcagacgttatcaggaacttttgatggtaaaatggagacttgtttgaaataagcagtttcactaaagaagaggaaagatgattatagaataacagatccaggccgagtgcggtgtggctcaggcctgtaatccaagcactttgggaggctgaggcaggtggatcacttgaggtcaggagtttgagaccagcctggccaacatagcgaaaccctgactctactaaaaatacaaaaattagccgggcctggtggctggcgtgtgtaatccagctactaggcaggcttgaggcaggagaatcacttgaacctgggaggcagaggttgcagggagccaaaattgcatcactgcactccagcctgggtgacagagcgagactttttctcaaagaaaaaacaaaacaaaacagatcatgtgttctgtatgttaataaattactattgatttgggcctatcagaattgta

SEQ ID NO: 78245 - DNA, 1009 bp, Homo sapiens
agctgtgttttcattgctagttcatttggcatgctcttcaaaaaaataagtatttttttgtaggcattctgagcgtgtgatattctttatcataccctgctttgtagtctgtggctgaaggggaaaagagaagtaaatggcagattgtacttatatgtactttggagaaaatatctgcgagtgtaagctacagccccagccacagaatgttcgcacgggtgggagggactcttgctggacaacgtgccacagtgctgcacacgtttctgtctgctcaggttatgatggctttgtcaaatcacctgaatgctgtggagtccgagaagcagaaactgcgtgcgcaggttcgtcgtctgtgccaggagaatcagtggctacgggatgaactggccaacacgcagcagaaactgcagaagagtgagcagtctgtggctcaactggaggaggagaagaagcatctggagtttatgaatcagctaaaaaaatatgatgacgacatttccccatccgtgagtggctctgtagcaaatgtggtgctaatgtttaaaatggagtcactgggaaagtcatagaggttctgtttgccatattcttttcatattagaacatattagaacattagaacatgcaaaaatgttttgtaaatataagccacaatccagagagacaccattaccttcaacaaggtctgccccgaggtctgtcccgaggtctgccccagcttaggctctggagcttccttgcccctctgtagcttggcttccatgccatcagctgctggtctagcagtggtccaatctggccgtctgaatttggactctgggcaacctctctgccccttagggtgggtgctcttggcattgccattctctttgaaactcccctggccctctggacaccacctggctctcttgccgcctctctcatcctccccttggcttcccttgccagcttatctttctgtatctgcaggggaagaaacgatcttggttttcttcttcttcttttt

SEQ ID NO: 78246 - DNA, 1079 bp, Homo sapiens
gcaaaatgtagggaaacatgggtcacaggcctttaaagctgggaggtttcaaactgctcccagggatcctgccccagagccgattgtggtggtgaggaatctagcccctccacttctctggggatcagagatgcaccattttcacctgttgctacatatttggttcccaaataagattttattttgagtcagggttttccctgctctcctagacctccctcaaagcgcgggagaaggatctgaggcatgaaatgcagccatggcccatttcgtcaaactgtggtctgcactcaagtatttgtattctagtctaaaaagcttttcattactcctgttcaactgatggataagccagattgtcggcgatcctacatttgatgttaaaaactgatcatcttttctaagattcttagttaaaatgtatttaatattaaaaattttcaggacaggatgtgtatagcacgtgtaagatgaagtgttgtcctgggtctgttttataggaggacaaagacactgattctaccaaagagcctctggatgaccttttccccaatgatgaagacgacccagggcaaggaagtgagtgatgggtgatgcaggcatgttaccgagtgcagaagagaggtgttcctcctagaacacggtcatagcaatcagtggcagccttagtgcatgcggcctgcctggaggaagcaccaccagagcggggttgcctttggttttccaaaataatctgtgttgtgatacgggaatatgctagagcagaccctaggatacagcggcatgcacgtgcagttcaggcgtggtctgcagattcttacagggtgaagaggtcagaattacttatcctgcttgtttcatggcgccaagaggagtctcatggcactgagtggccatgttgccatccctgacactgtagtcactactcttaccctgcctgcccagacagtactaggaaaagatttaaatagcactgggggccaagtactaacttgaaccaaagttagtaaagataattttaaagaaactgactcatctggataattgtctttaaaaacccatctgaagtgaactttctc

SEQ ID NO: 78247 - DNA, 1091 bp, Homo sapiens
tctactaaaaatacaaaaattagccgggcgtggtgacagatgcctgtaatcccagctactcaggaggctgaggcagagaattgcttgaacccgtgaggcggaggttgcagtgagccaagatggcaccactgcactccaacctgtgcaacagagtcagactctgtctaaaaaaaaagaaaagaaaagaaaagaaaagctgtagtgatctacatctgaaacacttaatgtgtgtttttccatttagggatcagaataaatacaaagatgcagctaacctactgaatgatgccttggctattcgtgagaaaactttgggcaaagatcatcctgcggtttgtatatccagttctttcattcttttaatattttattttccccatatatttcttttatccaactcattttaccattaaactcaacagggaaagtttaagtgctgccttttccctagatggtgcaggtaggaggtcttcacttactcagtgctagtgacaggccagagcacacttaatttgtttatgaccccacctcaaatggatcaccaactgtattgtttgattgtaaatcaaattgcatgtccttctagaaatttttttctgaaaattatattgtcttcattaaaatctggtcagatttgcatatgaatctgttttggttggctttgtggcttccagggaaatttttaaaaagtcaggaatacgttgttgatttgtttaattttagtattctgcagtgttactttgtataatctatactctagtgaattgcgcttttcattttaactgaagtcatattgttctatccgactaagaatgctttactgtatagattgaatataaatgaatatgtggtgtataaatgtactcttatttggttatcttttaccattcttagtggttctctctgtgttgacaggtggcggcgactttgaataaccttgcagtcctttatggtaaaagagggaagtacaaagaagcagagccgttgtgtaaaagagctctggaaatccgagaaaaggtacaaaagaagggggcagtcgttttctttgagatttttgttttgtgtgtgtgtggttttttttttttttttga

SEQ ID NO: 78248 - DNA, 1068 bp, Homo sapiens
gctaatttttgtattttttagtagagatggggtttcaccatgttggccaggctggccaagaactcctgaccttaggtgatccatctgccttagcctcccacagtgctaggattacaggcatgagccactgcacccagccgcacaaatggtattttaacctggtattttttgtgattatttatcagtgattcttatcagttaattttgagccacatggcaaggaattgggggagagaaaataaaaaggggctccttatcaaattatacaggtaatattttatcatgctgtcaatctgcatgatatttctgaaatagaatggttgaatttggggtgggctggagttaaagtcagggagagcacaaaagtatcaaattaaggattaggaaccatataagatgacctgccaaattcattcatatatttaccctttcattcatttagagccccctgcttagagttggtgatttacagatcagacatgtagttcctcccactaggacacagtccactggacagactgaggaccgcagagggcacatcagcatctagaatagagagctctgggaggatatgaagtgtgggcttctgcgggccagagccagggggtgttggggatggtttctcagggaaggtcggtgttggaactgcatcttgaataattgagttaaaagtgtcctaggcagggggaggtagggaatgcagaagggagtagaaaggcagcttacctccctgaggaccacatgtgtaaaggcacaaagcggagagaactcatcacttgttcaaggtactgagggaggaggttagtgttcattcatctatctctgtgccagacccctttttcgatgcggagattacattggtgaagaagagagacaaagaatttatactcttggggcttacattgtaataaaaaatattcaaggtagtttagagaagtgattcttataaagaacaaccaggtgatgtgcctgtgagttcactaggtgaggtggggtggtatagggaagtctcctttgaggggaactgaggagaaccctgaaggataagtcgtagctagtagggagggc

SEQ ID NO: 78249 - DNA, 1048 bp, Homo sapiens
aaggatttaaatctgaaagtgtagcacagtcgtgcttatgttgaggaagatcctgatgtgacagtagggtggagaatggattggatggaagcagaacaagtgtctctaatatgctgttttttattttcaggttttggggaaggatcaccccgatgttgccaagcagttaaataacttggccttactgtgccagaaccagggcaagtatgaagaagtagaatattattatcaaagagccctcgagatctaccagacaaaactgggacctgatgaccccaacgtggctaagacgaaaaataacctggtgtgttgactgcacagcactagggagggggccaggagtgctttcgtcccaagtccaaacactttctcatttaactggagattaaaatgtatgctttatttacatctgaaagatatgaaatattttattttattttattttaaggcatcctgctatttgaaacaaggaaagttcaagcaagcagaaacactgtacaaagagattctcactcgtgcacatgaaagggagtttggttctgtagatggtaagaaatatactcccgtttcaagtgaatttaattgtataatgacttgactaatagtaatatactaatagtattagttactgtttattaagcacttaactttgtacatcactaagctaaatagtttaaatgtgtgatttcacttcactttcacagcagtcttgtgcagcgggtcaaacattaccccattttaaaagcaaggataccacaggccgggcgtggtggctcacgcctgtaattccagcactttgggaggccgaggtgggtggatcacgaggtcaggcgatcgagaccatcctggctaacacagtgaaaccccgtctctactaaaaatacaaaaacttagccgggtgtgatggcggccgcctgtagtcccagctactcgggaggctaaggcaggagaatggcgtgaacccgggaggcggatcttgcagtgagccgagatcgtgccactgcactccagcctgggcaacagagtgagactctgtctcaaaaaaaaa

SEQ ID NO: 78250 - DNA, 1018 bp, Homo sapiens
gctcacgcctgtaatcctaacactgggaggctgaggcaggtggatcacttgaagtcaggagtgaccagcctggccaacatgacgaaaccccatctctactaaaaatacaaaaaaattagctgggtgtggtggcgggtgcctataatcccagctacttgagaggctgaggcaggagagtcacttgaacccaggagctggaggttgcagcgaggcgggatcacaccactgcactccagcctgggcaacagagtgagactccatctcaaaaaaataaaaaaccacagaggcttcatgatttctagtttacttagcaggctctgttatccttcatttatagtacaggttaaatatcccattattcaaagtgctccaaagtttgaaacttttcgagtgccgacttgacactcaaaggaaattccccttagagcagttcagattttggagttttggattaaggatgctcaacctgtatgctgtgttttcttccctagatgaaaataaacccatctggatgcatgctgaagaaagagaagaatgcaaagtaagaatttattattttgagattttctaaattgtatatactgcattcaagataattattcatttgaaattatttcttataatttagggaaagcaaaaggatgggacatcttttggagagtatggcggctggtacaaagcctgcaaagttgataggtatgtctggaattgcgtttggctggaaaaaccaaaaagcagggggaaggtaattgtgttctacagggcagcttataaatgaccaatgtgtagtgttccttaagtgcacagtcccatgtttttcccgaattccaattaaaaaaaccccactaaccttgtaaatgagatcacttacatgtataaaacccactatcatgttaggttggtgcaaaggtaattgcgattttgccattacttttacttttaatggcagaaaccatacagtaaattcatgagaagcatgccagcaggcctgggaaagccagcccctcacacacagcgc

SEQ ID NO: 78251 - DNA, 1051 bp, Homo sapiens
ggctgctgtccctgggtccaggtggctcacctgtttggctgtctttccactctatttttttttttgagatggagtttcgctcttgtctcccaggctggagtgcaatggcgtgatcatggctcactgcaacctccacctcccaggttcaagtgattctcctgcctcagcctcccgaatagctgagactacagtctgtcgccatgcctggctattttttgtatttttagtagagacagagtttcaccgtgttggccaggctggttttgaactcctgacctcaggtgatccacccgcctcggcctcccaaagtgctgggattacaggtgtgagccactgtgtctttccactcttaactttcctcatcctttaagactcagcctaccattcatctattttcagaaaactctctgaactctctctagggctcccatagcacttaccatagattacttgtttcagagacatagaaaatagcttctttatttctgtacccaaaatgcctattgtaagtaagtgaacagaactctctcgaagtacttatctatgctaaaatgaatctaggtttatttataatttttttagtaagtctgctctatcaagaatgcagaaacatcaagctcaatgatacagtttgaaaaataagaaagaaagaaagaacacagaaacacagccgtcctctcggccatctgcttattgcttccctggtacatgaagcatttatcctctgccctcacaccccactgataaggaggttctgctttgctgtcttctcccgggtacttgaggggagacggcagcacgtgagcagcaacattcagagcactgttcgtcgttactgtcagcgcagaccaagtcgtctccagggaaagcatgctgataccacacagacctggcccagatgtttctgttgacagagtggccagtggtctgtgagagccgcctcagcctggatggagtgtggtgttagcctggcctgcaggggctgtctacaggacgggccagggtcatgggaggtagagctacctgagagggaagaacgctttacaatttt

SEQ ID NO: 78252 - DNA, 2330 bp, Homo sapiens
tcacagtgagatactacctcatccccactagactggctataataagcgaacaaatggaaaataggcattggtgaggaggtggagatgctggagtctcatgtcttcttgctggtgggaatgtaaaatggttcaggcattggagaagtttgatggcttatctaaaagttaaacttagaaaaccacatgacccagcagttgcagtcctaggtatagacccagaatagttgaacacgggtacacaccctgtgcaatcccagccccatcactgttcctctgaggggtcctttgtgtttccagttccccgcctccaccctcaccccctccaaggaaccactcttccaatgtttttccctccagtgattaagaactgttttttttttttttttctagcgaagtatctcagaaatacctaagaaaatcttaagtgctaatgggtcaaaccattttcccctgcctggctcacagggtcttgacaatgttcacaaacagagggtggcagaagtgctcaatgaccctgagaacatggagaagcgcaggagccgtgagagcctcaacgtggacgtggtcaagtacgagagtggccctgacggaggggaggaagtgagtatgagcgtagagtggaacggggtaagtacagtacacagcgggcacgtgctccgggaggcgcccccaagtggcgcttgccaggccttcctcctgtctcatgtgctagaccttctgcttttctcaaattaagtgccaattaagctttctgtaagttcttcacttctgctaatactgaagtctgttatttgtttaaagtggtaattttcttctcaggaatccatgaaagctgtttggcttaactttgagcacttaaatgctgattgagtgtcctggctatttaaagcatgatccctgtctggtttcattttaatattgggatcagtgtggcagataactaacttgcttctttaactcacccatttcattgctaactccagtgctcctaacttcactgaccaggctgctctagattttgttagaatgagttgaaatgctttaaagggagatgctgtttaagtggaatttgtttttagaaaacaggtcagaaacaagagcttacatggctgctctcttgatgtcctgcctcagtcctgagcgtcctgcatttcccctgagagggcgtccagatctttggggctggctcttcctggttgccagcccgccatgtgcctgagaggctgcacagggccccctctgggttttactggtttgcccctggaaattcctaaccactgctgtttatccagtggttgccaaagaccatgtggccttctggacattttttctccagtgaattttttagcacatggatttttttttttttttttgatacataagctgatgtctttggtattttacttttgtcagggagaattgaaggcggcatttgactcatctaggggcacagttggttttttgaagttgccgtagtacagtttgattagttataattctacagatgttctgccaaattgtagttttgggctttcttacaatgtaaatccttttattctttaggattttctatagctatagcaatttggtaggagctagcattctaaataaatattttataaaaaatgttagtagcaaaatttgagggagaacattctctttgactgtctatctggcagctttcttgctttggtttttctctgtgccaagacaaccaatcagcatctgctttgcccactcaaccccagttgggcagtagtctaaactgaaatcctggcccgcaggcctccctgtcgcccgcatcctgtcagaactgtgtactgtactcttctcttggttgctgtcgtatctgcatgcttcgtatagaaggacaagtcctttatctaggctgtaggagccagggtgcagattgtgatcctcttgaatgaagttctggaggaagtttctcttgagacagtatttctaggtccatgttgacatgaaatcatctgatgataaaatggtgacgattcagagctctgttaccatcttaaagatggactcggagaggaaggagaactcgtgtcccctgcagggggttcgtgggcaggtgtccccgtcaggcccgcgggctggaagtgtcgctgctggggatgaaagcagctgctcctctgcacgcctgctggtttcctccttccacgcttcctttctcactttggacacctgattctataggccatgtgcaggctgtgtatctggtgtgtcccctgatagctctgcaggtttgatggaattcatcccagggtgcgttggccacgggtgatctaccaaaacagtttgagttttaaatt

SEQ ID NO: 78253 - DNA, 3532 bp, Homo sapiens
ggccttccccctggttctcacagccaaggtcctcaggtggcaagttcagggaagcaggcagactgacccagagtggggcagacccgctccactgccaaccccaggtgctggtctgggtctgcagaggctcagggaggaggaggcagctgggtcggaccccaattctgggactcctgggcccattgcccagctgtcagctgtcagcttgctactccagcagctgcagaggggagagagagcatgagtgagcgtgtgtgcacgcgtgtgtgtgtgtgtcacatgaaatacttttgaatctgagtgaaatgaatcttctgtgttctgccaagcatttagttgaggtgtattataaactactgtagtgtagcgctgagttttgaaatgaacagcaggggctgcactgttaatgacgatacgttagcattttagcatcctttttctcaagagcagcaaaaacttatgttttcttgtcctccccacatttttgaggtgttggtaacaagtgttatttttccattttaaagatgaggaaaatgaagctcgggctggttaactgacttgctcagcgtcccatggtgagtccgagcgggcggggcgcaggccctgccgtctggcgcttctgtcgagacgtcggctttccaacctggcaggacccaggacgcattgctgcctgtggaaattaattttcttttggattatcaactgcatgtttaaaatgggctgtagacttttaaagtccgtggtttcctaaagtttctgaaatgtctaaaatgtgtttttaagagaatgaaagtcatacctgtagcctttattttggtccctatgtttttcattgcataatctccttatatacagttacttgtaaagccttttacaccaagtgtcaaggagatttctaatacgttgccaatctttacgcttaaagtgttgacatttactttgatgaccattgggaatggaccagtctggattctgtgaaatgcaccatgaggcccagcacctgctttatgctggactggtagaagcaggcagaaggtcatcccagtcctaaagccactcagaaggctgctgagacttgtgacctagaaatactgtaagccaggctgttatgcagagcctgttgcctttcctcgccgcggtttcacgtgggttttctctctcctttctgtctgacaggcctagccgcccgtgactctcacactgtctcctgcatgacgggtggcgcctcccgcagcttcccttctctctccagtgctgcccgctgtgtctagcagcctctaggatcttgtcagagctgcacctctctgtgaactggccattcctttcggtgctgctgtcctttttgggggggttcctgatttctgtatacatgtagctttgccagatatgtacttagtaatataaactgtattaataaaatccatttactgtgtaatacacgagtttaaaaattaagagcgattagctgttcactttggtaacaggtagttaagtgtcacacaaggtgttgttgcaatggcatgacggtgacctgttgacgtaactaagccttacagcaaggcatgtgccgcacgtgctccgtggtacttagagccctgggggccccgctcggactccgggtctccctaggatatgccccagtagcatttgctgtgtagtctgtgtgtgaaatttgggcattctgcttttctctactaatcttgaagtgctcagtgatttgtgtatttgtgtctttctaacttctaataaactcactccgactgacctgtgtcttggtgtctgtctgcttggtagaacttctcactctttatccatgaaacgccgcatggcacagctgctaggggtcatggggtgacagttcatctcaccaaggagttccttccaagaagaaatgctgctgtatgcacatcttcttcactctgtgttttttattttcatgttcagatactgccaagtatttcacttattaatacctgaatcaattaagatgagagctgggcactctcacctccctacaaggttgtctgaggatttttagttatttgtatagaatgggcattttatttaattttccaaccacctttgtagttaacatttaatgaaactgttctgtaaaatttactgaaggaaacagtacctccaactattgcatttagacgaaactgttaaaaggaagagcctctgtcagatccaaatggtttgggtcctgtactgtgttacttgtaccagatgcttatgtatctgttaaatgtggaagtcgattttgatgatattcttagaagctgctttaattttcctgagactttgtgtgttggcttttgtctcaaaatagcaggattcacattgcttttgggatgcgatcacttgtttgaatgagcttccttatgtccaaaggttttcatgatcattggattatctttaatgaaacttaaaaagaacaatttctagttaaagtatattcacgtacatggtaattggtggtttctgcaagactctgtcagcagtgagctgctggcaagcagggcggccttggtggagctcttatttgcacccggtgtggctcttgtgggaaggagggagaaccacctgcagcttcacgtttgttcacgtttttttcaggatggcactggatctttaaaacgcagtggttcctttagcaaactccgggcttccattagacgcagcagtgagaagctggttaggaagctgaagggaggaagttcacgagagagtgagccaaagaaccccgggtaactatctcttccagctctcccgactccctgcacgccggctgctgggccgcttctcttcctagcgcagccttcctcacccacagacttgaggaaagacactccagttggttcccgtattctcacaaccgaagggtttcatagttgccacgtaggtttttcccaggataggttgagaagtaattgggtaacttcctgttagtggctaaagggcgaatacctttaaaagaaatttatggaattttttgattctgtcacatgttctaagaaagccttagcaacgaaatgtgggcatttatattaaaatgttgagcattttgaacttgtttactctagatatgcattattttttaaattagcattagtttaaattctttaaaaattttaatcttttaaataaatcagatgttagctatgactatattaaatctcatacagtattataatagggagaaaaatggtttcaaataggatcagaacttttaagactttattataaggagattttcaaaacctcaggcttttcatatgtttaaaaaaaggtttgagtcatgggtcttagaggcttttgaaaaataacatttaagttgtcaaaggaatttggttcttaagatatcctttgtttttaatatggtgcacaaagttgacagattgtccctgccgcagtgtccagggtcacctctgggcagctgctcctggcttggacgtatttctcatgaggcagacttttgccagccactctgtgtaactctgacttcctaaatggtgaccgactttttaga

SEQ ID NO: 78254 - DNA, 1774 bp, Homo sapiens
aaaggttttgaatgccacgtgttcaaacaaggcagttcgcaagagtggtaggaagagacgttgaggattcgagttgttctttcgtttcgtaaaagggggtttgagggaaggttgtgtagctcttttaaaaagagttaatggcggccggtgcagtggctgatgcctgtaatcccagcactttgggaggcctaggtgggtggatcacttgagatcaggagtttgaaaccagcctggccatcatggcgaaaccccgtctctactaaaaatacaaaaattagccgggccaggtggtgcatgcctgtggtcccagctactcaggaggctgaggcaggagaatcactggaacccagtagggcagaggttgcagtgagccaagatcacaccactgcactccagcctgggcgatggagtgaaacttcgtctcaaaaaaaaaaaaaagttaatggccactttatagcaagaataactgagtatgtcagatgataatttacttgtgatttggtttgattttatactttgttcttgagtggttctaggtagagaaaaacctgtttgggactccagcaatgtctgttgtgggcttcattgggatgtttttgttttgtcctggttgggacattttgggggtgagttttgcctggggataaggaaattcaggtcttgcttttggtgcagttgttcggcaggggctggctgagtatctgccatgtgccaggcgctgtgctcacagcactgctgacacacgggtgggtgccctgggctttcagcctcatcccagtgtcctgtgtgaggctgtccctgtcacccctcaagcctgtgcctcagcctcacagccaccgtccttggctttcccaggaactgctgcgctcatgttcgctgtcccatgttgcatgcagttcacgttcagaattcaagtaaccctcagtatcggttgctttagctttaaaacttcaggggagtttatgttcaaaggcatccatggtggtggtgaacaacgatagtcattttatgactgtccatcatttaagttatagattatttataggctgtttcatcaagtattttaaatacatcagatggaggaaaagtaaatatatgtatacattcctgtattcctttaagtggagaaccatgactttatgttacattttgctttctaagtagaaaaatactggcttcagagtttattttactaacaataaagttgatttcccagcttttaatatagaaagataaaaaatatgacagtatatttatgcatcatcttttagcagtgagttttgagtgtctcttcatgatcccttagtggtgacgagtctgacatgagccctggagcaccctccctgaaaagcatcagactgaaggcagagcctctctgctcccagatggttccccccactttttttttttttttttttctgagacagagtcttgctgtgtcgcccaggctggactacagtggagtgatcttggctcactgcaacctctgcctcctgggcttaagtgaatcttgtgcctcagcctccagagtagctgggattacaggtgtgtaccaccacgcctggctaattttttgcatttttagtagagacagggtttcaccacgttgcccaggctggttgtgaactctgggcctcaagtgatccacccgcctcagtctcccaaagtgctgggattacaagcatgagccaccacgcctggcttttttttttttttttttttttttttttggtaggtggagtctcactcttgcgtaggctggagtgcagtggcg

SEQ ID NO: 78255 - DNA, 2182 bp, Homo sapiens
tttttaaaagtgcaagtctaaggacattttgagtttgcatatggtactttaaaagaagcattttgctgtgaaagatgcagagaagctgtggtcttttctcctgggcactaaatagagtgagacataggactccccggttacccaagcaagatgaaggcaaggtccctagagcccccagtgtcacagaggcgttggagggggctttgcttgtgcttcctgttgctggttgaccgatgtgctgatcgtttgtccttgcatgtccgtgtccgggttgcagcatgaagcgtgccagctctctgaatgtccttaacgtgggtggcaaggctgctgaagatcgctttcaagtaaggagcctaccccgaattgtgtcctaggctgcccagaccacgctggcaggtctgctgcagacccgcactcggcccctgctcggcccctgctcctgcagagggctggggacgccgccacgtttgttcctagacagacagttgtgacagtagtatttttatattctgcttaaccactgattatgtgaattatgggcatgttcacactgtgaacattctcagaatattaattaatgatctcaaatggtctttaaaaatagtttaacctaattaatgtattctgttaaagtactgtcaaagctcgaccaattactagtttgtatgattgtttgattttagcctctactaagtttataactattaataattaattgtctacttaagctgttgttcagtgttcagaagtattcaaaactctgttaacatgatgactagcgtgctgtcagtttgacactaaaacctgaagcactcggtgcagttgctcgggcctcacacagacacatcaggtttacatctgaaagtactgcctcccttccccatcacggaggccgtttgagttttcatccactccgccctttggtgtggctgtcagtgggtggccgggtgcctgtggctgctctagaacctgtttctcaggtgcctggggcccacccggcagctcgagctgttgggacttggcagtccctgcccctgtgctggtgctgagagttcgcgacagtggccaggcactgccctcccagttgtccagatccactaatcctcacagacaggccagtgccccgacctgtcccccaacactcttgggaggcagccatctcgggaaagcttttccccagcccccttctcggtggctgttaaagaggcttgtagggtgctggacatgttgcttgaagcacccctaatgacaagaggaaagaaagtctcttcattttacagggtcctgtagctgacccagtgtttgccctccagtttcttggagtttctacatgcacattgacccctgggcctctcgagtgccaacctagatttagctgtgcagctggtactgttaggcctgaggccatttgaagctggcatcatttgaagtcctggttaagtgtaatttttctatttgttttttcatgcaggaacgaaataattgtctggccgactcgcgagctctgagtgccagccacactgacctggcccactgagagccagcagggctaggtaacctgtcttgggagtgtgagaccgccccgccctgccacgcccctcaccgccctgcccggaggcgccagccgcactccttggcttcctttcctagatagtgacgtccaccaaccttggaggtgccttttcaaaacacccgggaggccgtgcctcagcattctgttactcggcctgcagccccagtgccaggagccaccccgaccgcgacccggccaggctggctcagggaggccgaggtggcgctgaggtggcttcagcacgctggggattggctcctgctcacggatgctgttgcatttcctgcctgccacctttttgccatgacaccagactctcttttaaattgtaatattgtaataaggctgtaaattaagaatctggaaacataaagtacccctttcagaacgataggcatttagtgatctatggcagtaaagcctgaagcttagcggacactggtcagtgggaagtgaattccttcccagctggagcatcttccgggtctctctttccaaggtccccatgcctgtggccctggggccccatgcccccttttgagctgtgttctcccggacgcccctgcacacgaagcccatagagacgtgtgtttcacttttttttttttt

SEQ ID NO: 78256 - DNA, 1007 bp, Homo sapiens
tgtggagagaagaagcaggcggctcccagggagtcactgtaggacaccccaggctccagccctgagaatcacctctccccaagggccagctcagcagtggggaccaggtacccagcaagcgggcctgtccccagacccagggagaggcagaacatccccccagctcagatgggggtcagtctgtggccaccatcttcggatgagaaagtggagccgctgccctggaagagctgtgtctgaaccaggctcccagctgtgccacggcccaggcagacgcgttttaaaggcccgagccccgtgtgtcggggcttctcaggcagggctgttgtgcagccgccaccgtgtcagtgggactgggtcccaggtgtccctcgcaccccttcggcactgatcgtgtaggaacaggaggaggggggcaggtggggggcagagagcacccgcagggtccgggctgggcagccgagggcagcctcttcctcgcggagccggtcagccagcagtctcaccaggagctggttagcccaggttatgccaagggctggggaaacacgttcgtcccagaacctgagaaacaggaagcaggcaagctggcgctcaggcttggtggccccgcccacttcggcccagctgtgcccctggcacctgcacagaggtgcacacaccacatggctgcactcaccccagcggcccgtgtgctgcgccctgctcctccatggcctctgtcacctggaagagcacagtccaggtcagctgcaacggctgagggtcttctcgatggttaggcacaggctgctacccgcaggagccggaggccacctcactgccacccgccccacctccagaccggctctgcttccgcatcctggctaaaaatacgagctcaggggtgcaaccctgccttggtgctcacctggttgatgcacagcacagggctctggaaggcactgctcagctcacgcagcgtggcccccagggactgcagatgcctggccctgggggcggaggcc

SEQ ID NO: 78257 - DNA, 1092 bp, Homo sapiens
agaagcttcaggctcacacaactggttcccttggccccatgtccttcctctggcccccccaggcagtcaccccttggctgtgccaacaccgtcctctgtagaggtgtcctttgcgcaggctcctgagtccttgcgggggtctgctctccttctgccatggtttcaccctctccccctcacaggtcagcagcaaccagccccctccttcagtggccccgcaccaggtactcagaccacccaaacctggccacagtgccaccaaagccagcccgtggtggccatgacctcttcagacgctcagcaaggcaggggcctgatgcccttcaggcgttactcaggcgagtcaggcctggcctgcctctgccaaggcgtggggcactctgggagaccacctgggggtcaggatggggctgtaggttgagacaccctcaaggccagtgcctcccgtgcatccaggccttagccctgtgctctgagctggcctggcctggccaaggggtggaaacagccctgtgcccaccagctcccaggagagcttccaggggaggacccccccagtgaaggcaggtgtcctcggcctccctctgggtgctgccgtggcctgtgggtgccagagccattggcatggctggcctggcctctgaccgcacagcttggtgagccatggtgatgggggagggtgacacagctgctcctggcaccaagcagtgtagttcaggccccacgggccttgccagcagctctggccagatggaggctgctaaggggcccctaggctgtccctcaagtccaaggtctgcagccacacgctggtgtcacgcccggagctctgaagacgcctgagggccgcctgcacgccctgagtgaaactcgtctgtgcttcatctccagggcgtctctggccgagcctctttttgtggaaaacgacagcagcagcagtggcctggaagacgccaccgctaacgtgagtcccacggcctgcagccccaggaagcaggcagctgggccagggagggactttgcacatgcagggactggggggagctggggatgggcaagtggtgactgctgctagctgccaggctgggcctc

SEQ ID NO: 78258 - DNA, 1038 bp, Homo sapiens
ttgtctgatctgcaggctgccaagctcctctatgaatctcgggaccagtaactctacgtggggctgagcttggagtacgtgtggtcaccaggactgagtcgcttggaacagcagagcctgctccttgcgtaccacagggattaatcctgcttgtgctgggaaatgcaactcactcatgtatttggagaaacaggagtgttcacttatctagtgcaatatgttcacagtttattaatgctttaaacagcttcatgttttagaatttgtgtattgtcaatacttaattgggggtgggagagactgagctacactactgctaaactatttttagcataatatataccatttttatgagttcgcaggtctactagaaggttctggcccatcaatattcatttcatttaattcttccacagaaccagtttgggcagtaggaactcaggcttctggtctgcagtggagcctgttcgcctctaatagccagtttacagcacttgccttagcctgtttcacagacttgtccacttaccttgtcactaatttggggcttctgggctgtgagtgatcctttgatacttcaccaaggggaacgtgggggctttgtgttttgtacttttcactcactatttcactttattaagatgactgtacagcaatttgtatataaagcttatgattaaaaactattttgaacatacggacaaggcctcgccttcctgtgtccagatcacctgaaccctcgtgccacagcgcagtctgggtccagaaagaagactcacagccgccggggtgagacgggtttattgtgcacatttacacagcgtcagcagcgtctgggctggcagcggccatgctcctgtggtcgggctgctctacaagggcgttcacttttcttcaccacactatgtacagtcagtgctccaaggtgatgggctacagtgctgcatcagtgagtctgtacacacatttttacataaattacacacgactcatacatgaaaaatagagcctaagggcctgtattttaatgagaaaaaa

SEQ ID NO: 78259 - DNA, 1206 bp, Homo sapiens
agagcctcagcatatactcttctcctccgatctcacagcctgtcatgctgctcagtgtggttctcacccctgcaagctcaaattcagttccctgaatggagtcaggtgctggaggccgtggcagcggagggtggttggggttggggctgggggtggactggtgtgagggcagaccagggccaggtagacggggctgtttggtgcctgaaggatggcagacgcctggtgtcaggaggggccgccaccaaggagcagcagctggggcagaggagctggggtcaggggccacccctctctgccgatctccctgcctgggctggctgtgaggccacctttgtcccaggcccagcctcaaggcaaggagggcgcttcactgaggtgtgaattgtacgtacaggctttttatataccaaaagtattttttgactagaccattcaaagctacccgaactatgttggaaattttttttttctcattaaaatacaggcccttaggctctatttttcatgtatgagtcgtgtgtaatttatgtaaaaatgtgtgtacagactcactgatgcagcactgtagcccatcaccttggagcactgactgtacatagtgtggtgaagaaaagtgaacgcccttgtagagcagcccgaccacaggagcatggccgctgccagcccagacgctgctgacgctgtgtaaatgtgcacaataaacccgtctcaccccggcggctgtgagtcttctttctggacccagactgcgctgtggcacgagggttcaggtgatctggacacaggaaggcgaggccttgtccgtatgttcaaaatagtttttaatcataagctttatatacaaattgctgtacagtcatcttaataaagtgaaatagtgagtgaaaagtacaaaacacaaagcccccacgttccccttggtgaagtatcaaaggatcactcacagcccagaagccccaaattagtgacaaggtaagtggacaagtctgtgaaacaggctaaggcaagtgctgtaaactggctattagaggcgaacaggctccactgcagaccagaagcctgagttcctactgcccaaactggttctgtggaagaattaaatgaaatgaatattgatgggccagaaccttctagtagacctgcgaactcataaaaatggtatatattatgctaaaaatagtttagcagtagtgtagctcagtc

SEQ ID NO: 78260 - DNA, 1048 bp, Homo sapiens
tttgtctgtttccagtgggaggtaattagcacagccagctacttctctgctgacttcctttgagaaactccccaaggtgagaaatgtctcctgtgtcccgtccttgttggtgtctgctgtgctgcctcaaggggttgcagcaaggagatgccttcacgaagccctggtcctagcctctgctgtggatgaaagtcatggacacggggaacctgtgctcaccttcagagtcggggcagcagctcagcccagaggtggagctgggctgtgaagcctcctggcagggactctaatcccttgctgttggctgtcctggttctgtgtcacacagatggccacagtaaacccagagtgaccagctcatggacagtgtcagacctcgacgtcgggcctaattatggctcctcgcggccctctgcaagcccatttgtaaaccgtatgttggctgacaagcttagtgggaagctgcgtcctctttaatatgtacaaaatcacctgtcacttgtttttccaaactgacaaaggtctgctcatcacatctagatttgaaaaagatgccacacaaacgtaatttgtccctttcttcaacagacaggtatggagtctgggtggggccacgtgtaccctcccatccttagaaagagtgtgacaccaagggacagatgctggcgtagcgcgggttttgttttggagggttttttgtttgtttttacaaaattaagatatttctgagtttattatgaggcttttagttttacaatcatactaaaagataattgttcctctataaaatgattttccttctgtacctcttgccttcttctgaagaaaggagaaaattgctttttagtccccactatggctgatttccataaaacttcctgttgttgctgggtggtttctgaagcacctggacagccacattccctgtgaccctgagaccacaggccctgtccttggggaggctgcaggtttctggccacacatcctccaggccacgtggagcaagatggcagttggtccaggggccttggaatgcctcgccaggacc

SEQ ID NO: 78261 - DNA, 1032 bp, Homo sapiens
catttttctttttgagtatataaaagtaatcataagtttcaatttttttttttttttttttttttttgagactgagtctcactctggcacccaggctggagtgcagtggcacgatctcagctcactgcaacctccatctcctggtttcaagcgattcttctgcctcagcctcccaagtagctgggactacaggcgcacaccacgcccagttactttgtgtatttttagtagagacagggtttcaccatgttggccaggctggtctcgaactcctgacctcaggtgatccacctacctcagcctctcaaagtgctggaattacagatgtgagccaccgcgcccagccttcaattttcaaagttacatttttctttcttttgttaggaacagcgtttacattttctaaagcaacaggagcgccgtcagcagcagtctatttctgaaaatgaaaagcttcagaaattgaaagaacgagttgaagcccaggagaacaagctgaagaaaattcgtgcaatgagaggacaagtcgactacagcaaaatcatgaacggcaatctgtgtacgtgcctgcaacaccccctcgacaccactctcaccaggcccagatccagtgaaacatagtctaactgcctgacaattcagtcacaaattcacaggactaaatagcaagcgtgctcaagttttgctctgttatttgcatctaaaaggatgggtgggttaggttaagtgatcttaaaattgtgtagtcccagctacttgagaggctgaggtgggaggattgcttgagcctgggaggtcaaggctgcagtaagccacgatccggccagtgctccccagcctgaatgacaatgagaccctgtctcaaaaaaaaataaaaagatctcttgcggccctcagacgcagtagaaaaatcctcttgttacgttggtaccagcggccctttggattagggtggggcgctccaagacttactcattcagagggtctgtttttcttgaataacttaacttgtatccgtgcattaagataagt

SEQ ID NO: 78262 - DNA, 1113 bp, Homo sapiens
ggattggaagcatcacatcaaagatgttactgtattttatggcttacacatctaccttttaagcttaataatacgttaccttctaaaacactttattgtctacagagcggttttacgtgcattttaagatatgaaaaacatcttcccccaaaatgtttctgtgtataccttggttatagaataatgacatgctaataagccttctaacttctgggctgagacatctaaggatagattaaggagagctgtgaagaaaggggggagtgtgggttggaagagaagggcaggatgctgagttggtgtgattgatgtccatcagcagctgctgaactaagaagccggggaagttctgctctctgaaaattgtaggccagcaagtcaggttaatactactgtgctggtttgtcattatgctataaaggcaaattgatttgttctcattatatatgcctgtgttgaagcttccaagatgtccccaggttccgtggtttgctaggaccactcaggactaagcatagagttctcttgagttgctacagtgaaaggattcagagccagatcagcaaagaggaaagacacattcgacttaggtgtcctggaagaactttttcctgtcttctcagccaagcagttttaaaatctgagtcagtttttgctttattctaggatatccagtaagttgccaagaccaattgatcctaccctcctgtgttttcttctaagagctttatagttttagctcttacatgtagttctatgatcaattttaagttaatttttgtgtatagtgtgagttaaaggattcaaattaattcttttccatgtaaatatccagttatcccagcaccatttggtgaaaagactattctctctcccactgaattgcctgacacctttgtcagatcaattgaccataaatgtgatgtttatttccagaagcattcattgctaatgtaatcacccaggcaccgttttccatatggtgcccaagactcaactgtgcctatcatctcctaggccagataacatttcaactgtctagagaaaaacttttagacttatgccaggagaggatagaggcagtcacctaggagcatggagttggggagtaga

SEQ ID NO: 78263 - DNA, 1047 bp, Homo sapiens
agggttgttgattgtatacctctttgttctttttgatttttgaaccatgggaatatactatatatttttgaattaaaatttaaagaaaataaggaaatttttttgaacacgtatacactgtacagttaaaagacctttggccgggcgcggtggctcatgcctgtaatcccagcactgtgggaggccaaggaggttggatcacgaggtcaggagatcgagaccatcctggctaacatgatgaaatcccgtctctactaaaaataccaaaaaattagccgagtgtggtggcaggcgcctgtagtcccagctactcaggaggctgaggcaggagaatggtgtgaacccgggaggcagagcttgcagcgagctgagatcgcgccactacactccagcctgggcgacagagcgagactgtgtttcaaaaacaacaacaaaaacaaaacaaaacaaaaaaacctttaacttgttaattaacagtgattatggattacttctaatatttaaaaaaatgaactcaagcaaataaaaggacaatcctttgtaaaaataatacttctttattgcaagttatcccctttatctgtattttatagtaaaggaaaatttgcccttgaatgagctactatctactttaaaatcatctttccgtagcataaggctgtcttttagaatacaccattacatctggagccaggacaccaaggctccgggctcaactcttcatctacttttaccttagaccagggtccgtcctctctgggaacatccacctgaagaggaggattagactggctgacagttgaagtgctgctttagtgctaaggatttattttaactctctacctgagttcttcagacacctataccctccctcacttatctatacttaaataaaaagtcttgccttttacttattaatatgtacataatccttaatgtcctgaggagagtggttatttttttctcactttataaagtttggaaacgggctgagtatggtggctcatgcctgtaatcccagcactttgggaggctgaggtgagagga

SEQ ID NO: 78264 - DNA, 1099 bp, Homo sapiens
aagaacttaaaatatcactgggttattgtattgaagttatataactggttgtcaacatgcgtttgtatgtgtttgcacagatggagaatactttctcagcaaaagtgtggtgggattttggtgccttgaaatgctgttgtcatagttatttcacaaactgtggttctagggctaaacagaggaatggtggtaatcagattctattgtgacactttcttggcttgattgctttgctttatttcactgcagagatagctatatgactgttgttcagactaattggtaagcaaaagctgctgttactggattttgtaaaataagaatctttggtgatatcatatagaacaatataaaactggaaaatttaggtagtttttattaaaatttatgacatttgaaatattagtgtacagttcagtacaagatcttgttagtggcattattgatgtgtttagagaaaatgttaactgaggttttagcagaatcatgatttatgccacatgttgtgattgtaattatcatagctcaagaaaatgcaaacgccatgtggtaggagcatgcccagcatgctggagaaacaaaagtaggcctgtgtggctggagcagagtgagtaagggggaaagtggaggaggtgaagtcaggtgatggagagagtagtgtaggattgatcttgtagggccttagaggctattgtaatgacaaaggagatagaaagattttttttttttttttgaggcagagttttgctcttgttgcccaggttggagtgcagtggcatgatcttgggtcaccacaacctccacctcccaggttcaaggggttcttctgactcagcctctcgagtagctgggattacaggcatgcaccaccacgcccggctaattttgtatttttagtggagatggggtttctccatgttggtcaggctggtctcaaactcccaacgtcaggtgatctgcctgcctcaaccccccaaagtgctggggttaacaggcgtgagccactgtgcccggcgagagatttcttttatcagaaatgaaacacagtgggctgggtgctgtggctcacgcctgtaatcccagcactttgggaggctga

SEQ ID NO: 78265 - DNA, 1021 bp, Homo sapiens
ttaaatgaataattgtcttgtaatggaaagagaattggatgagcatcagaagatctggggtgaaacgctggttcttccactttttagctatgtgaccttgaagaagtcaaggtctttgagcctggaattacctctaaagtagggataaaaatgtaccaatatctgagcgctgtcctgaggatcaaataggatgatgtatccaaaagtgatggttgaacagaatgtcatacaaatatttattattcttaatatggctttgaattttcaatttctaactttataagataaggcatttggaaacttccctccctaattctcactagctagattttgatgaaaggcattatggtgtttcagaattttgaaagtagttttagttaaatcctgtaatagttgattgatgcattcatactgtggtggcattgaaggatatctagaaaaattttggctggcttcgtcgttgtataatgtttaattataaatatcctgctaagaaacttggcttacattttccatatgattcattcagacatcttacctctattccacgggagtagagttttgagttcctaccttcacaggtttcctttttaagaggtttgtttagctgggaattggggcatttcttcggatttctcaaaacaataaaatactgttttttaaaaaaacaggtctattacctgtttaaaacaccgcttttgtttaaaaatgccttttagaaacagatggtatttctcttagactctcatgtatggcttttacttttgtatttcctttttgatccctaaaaatactacttgtaggactgagtccttcctctattaacacagttggagttggttgtaaatttagtaggagttttcagaaatgccattcttacttggtaatattttaaactatccaaaaatgtaaataagatttttctcgatttattgtatatttggtattcatcatgatgatgatgaatcaaaggaacgttgggtcatattttgcagtttgtgtagagcagtactgtccaata

SEQ ID NO: 78266 - DNA, 2422 bp, Homo sapiens
agaattgtgagttttcttaggtgtgaaagtggtattacattcgttttaagagatgaaggctaaaatatttaaggtatgggttcatggtatgtggtatttcattgcaccttttcaactgttctgaatatttgaaatttgtttgtaaaaaaatttggaggggaggaataaccacttggttctcagtagagcagagcagtgtggcccaatcacatgttactaagccattgattacaaagagaaaagagaaaactttatgctgcaagactaaagtttaggacattgtagaaggtaaggagccctgcaaatttgaaagggctgttagctgttcatagaacatctttggtaggaattttaccatttcttggctataagacattttctgaaagcttcctgaattgctttacctaagctacaatgccttcagctaaatgttaattttgacaaaggcatttttgtaaagcattgatatgactgcttttttttccttccttttattttagataaaagaagtaaggctttgaaaggtaagatttttgcttctgaaaatggttgggaatggaaaacagcatcatgtcttttcaggacaaggtatatcgttgttctcaattgaaatcgaaacacagttcagtatatatgtaaggtgcagttgaaatgcttcacagcttgaagtttgctatgcctgctgggaaagagaattctgaatttctgctttttatagtcaagtggatcaagtaaaacttccaggagtaatagaggaatggattaattagaggtagtcgatatcatcaccaatagggaagcacaagtgagctgtgcaagcatgctgtcctagaagttccctaatgatgtcgttttattttgtttattgttttttgagacggagcctcgctctgtcgcccaggctggactgcagtgctgcgatctcagctcactgcaagctccgcctcccaggttcatgccgttctcctgcctcagccttctgagtagctgggactacaggcacctgccgccacgcctggctaatgttttgtatttttagtagagatagggtttcacatagccaggatggtctggatctcctgaccttgtgatccacccgcctcagcctacccgtaatgatgtgtttttaatggtttggttttgttttttgggtttttttttttttgagacagagtctcgctgtgttgcccaggctggagtgcagtggcacaatcttggctcactgcaacctccgccttccaggttcaagcaattctcctgccttagcctcccaagtagctgggattacaggtgcccgccaccatacccggctaattttttgtatttttagtagagatggggttggccggctggtttcaaactcctacctcaggtgatccacctgccttggcctcccaaagtgttgggattacaggcgtgagccactgcgcctggcctttaatgtattttgaaagaaagcgccttataaatttatgccagagtgacaatgaaactgtagccatttgaatgttacacaaacccaggactggctacatgagtttgaggaggaggtgtttccctgcctctctctttgcgctgtgggtgaccactgcctgtctgctgtcattacatgaacccttaagcactctgggtgtttcatatagaaataatcctacttttcaatagtattgaaaggtgtcatttatctttttggactgttgatcaacttcttttgatacttgtttaataaattacatccaacttgttccttccttcttaaatcatatttatatatgcatctctttcaaaagcttcagcgcctgctcctggtcatcactaaccagatttacttggagtacatgtgaaagaaaacgtcagtctgcctgtaaatttcagcaagccgtgttagatggggagcgtggaacgtcactgtacacttgtataagtaccgtttacttcatggcatgaataaatggatctgtgagatgcactgctacctggtactgctttcagtgtgttccccctcagcccctccggcgtgtcaggcatactctgagtagataatttgtcatgcagcgcatgcaatcagaatctcactgagccacccatcattgtgaaataattacctcagttgtacaggacttggtgatcaggatccaggcactcacttgtattctactgctcaataaacgtttattaaacttgatcctgctacttatcttgtggcctctctgagcctcttgttttcttatttggaaaatggagatgttaattatgtaagctctaacttacagttattatgaggataaataagagaaagatttaaactatgaagtcctttagaaataaggtagcattcaatgacatagtagttgaaattataagctgtaggagaatattgcatcaggaaataatcacaaggcaaagtacataataagccaat

SEQ ID NO: 78267 - DNA, 1005 bp, Homo sapiens
aggagttcgagaccagcctggccaacatggcaaaaccctctctctactaaaaatacaaaaattagccaggcgtggtggcacgcatctgtagtcccagctactcgggaggctgaggcaggagaatcacttgaacctgggagtcagaggttgcagtgagccaagattgtgccactgcactccagcctgggtgacagagtgagactccaccttaaaaaaaaaagaggtgtgagtcccctgtgagtgcagaacgggtctgacatctgacacaggcgaggctccctagcagtcatgggaaatggggttgaacttaacaaattaaaatcttttaccagttaggtttaaagcaatcatcattctaatttttaatcactgtgttcattttcagatgcttcaaagtattattaaaaacatatggatccccatgaagccctactacaccaaagtttaccaggagatttggataggaatggggctgatgggcttcatcgtttataaaatccgggctgctggtacgtttccttatgtttgatttttctgaggtcaggaagaaaattattttcaaaaagaatcacaattcacattgtaaaggaactatgggttctaactaggtatgaacattagagctacctacagtccttcgtaaaaaatacagggagcacatgtcagctataaaagacatttggggacagtggggaattttttttttcttttcttttcttttttttttttttttttttggagacagtctctcactctgacgcccaggctggagtgcaatggcacgatcatggttcactgcagcctccacctcctaggctcaggtgatttcaggtgattctcccacctcagcctgccaagtagctaggaccacaggtgcccgtcactatgcccaacaccaccacacctagctaattttttttttgtactttttttttttgtagagatggggttttgccatgttacccaggctggtcttgaactcctgggctcaagcagtcctccaat

SEQ ID NO: 78268 - DNA, 1029 bp, Homo sapiens
gccaggcgtggtggcgggcacctgtagtcccagctactcgggaggctgaggcaggagaatggtgtgaacccgggaggcggagcttgcaatgagccgagatccgccactgcactccagcctgggtgacagagcgagactccgtctcaaaaaagagaaaaaaaaaaacctctgaaacaacagctaaagggacttgcccacagttgagagctgaccaggcagagctggtgttggagcccaggattcccaggcttccaaacccatcggtcctgtagaatgcttccttcccagtcgttgctgagagacaagggattcactccatgcctctgaactcctagtctggggcttccagaaacctcctctgggtcttgtttggatcatctgtgacatattcccaaagcagggctgttcgtttcttggaacctcacactgtcagagcattcgagtagcttgaggacaggaaatttgagggcggactatctgcaaggtgttccaggagaaggacacagtcgcatcctgcaaggtcagacctcaggccaccctcacgaccatccttgcctaaataagtcctctcatagggaagagcaggaaagcaggtgttggaggtaggttctcgtcatcaggagcatgacgtacagatttggtgtgagtgcagtcctgctaacctgctgcgggatccgagtacccgctttataggagctttctccaagtacccactttataggagtgggaagcagtgtaggaagtaagtacgaaaagcacttttaaaatgctgttaaagggctagagacagaactaaccacaatcagggcagtccctgctgtagctccggcctggcctccccattcttgcctgactcaagacactaacttagttcctggttcggtgccctgttggtgctcctctgtccagtagcttagctcccacggtgggggaggaatcgaaggggctctgcagcccccaccagctgccctcgaatcccatccaggccagttccagattctaaactgaattttcttcatattgtcaaaa

SEQ ID NO: 78269 - DNA, 1020 bp, Homo sapiens
ttgatttgccttaaattatccgtgatggatttccttcttattctgttgctgatgcaaaggtgcgagagccacacagctgggaacatttctgctgtttggtttcctgtctgccctttggcagtgtacgcggaggcaggacttgatttgtgctgggtctgcttcagccagtgacctaaaaatgtcagcttgtgttttgcgttacatggagaaggggctatggtatagacagtaccgttaggacttctggcattttttcttgtaaaatttctgtctttaagtagcagtcttcaaaatgcatgtaatcaagtaatgtaagccaatattgtctaagtaacagggcttgtttagcggcatgtgagccagggcttgaagtcttttagcaaaacgaacgtggctgcagcctttttcgtctttctaaaagaatctttgtcaccttctttcccctttgagtagctcttcctcagcttcttactcccaccctgttcctcactagaatacttgcctctccctttgtctgcatgctgtgtctgggctcagggccttctttctctcagtccagttcacaagggccatggggattctcttccccttctttcattatgttcaagaaggcctaggtatattaactgggaaaacaagaaggcatcagtaattaccatagcactgagaagaggaatggaaggaaagtgagacgtgataatggaaagaaaatccctgttttagtaaacttggcaatcactagttaggctgattagaagattaaaaagccataggtcaggcgtggtggctcatgcctgtaatctcagcaatttgagaggccgagatcaggagttcaagaccagcctgaccaacatggtgaaaccccatctctactaaaaatacaaaaattagccgggtgtggtggtgggcacctgtaatcccagctactcaggaggctgagggaggagaatcgcttgaacccaggaggcagaggttgcagtgagccgagatcgcgccactgcactccagcctgggggacag

SEQ ID NO: 78270 - DNA, 1160 bp, Homo sapiens
atgctacttctctagacatctccttcagtgggaagttcagaagatagtagggcctggaatagaattacttacagaataaatccttacacctcttacactgaggaaaggagaactccctctttgaaacttagtaattatctctccacttcggctgagaaatgtcccagaatagaatcttaccgtccccttgtacattgatgtttcctaagttctagagtaactggcttctttagaacagtagcaggctgcctagcccttgggtgctagctggttctggggtggggcggggtgggggggctgtgggtcctggggtggctctgactgtgaggtctctgtctgaggagggctgcaaggtctgtctgaggtgctgcctccctgactgctgtccccgagtgtcagtgctactgacctcgggtcctaaccttgctctggtttacctgtttgtgactgacccagcttttccaggaccagcccttgcccacccttgtgagctgcagttatgcacatcatggaatgtgtcctgtaggggtcacatggctcccggtcagtgttagactggcacatcttcttccctgtgcttgcttgctcagatgacagtgtacctgcaggcctggcaggggttgtggcaaggaggggccatgggaggctggcccagtggttctctgtgcttgaggtaggtggagaggtttctggttgtcacagtgaccttgggcacagttggcagtaaatgagcaggggcgagggtgcagaacattactctgccgtctctcagggggccctaaggagaaacactgggggccgtgactgagtgggtggtctgtggtctgttggccgatgctctttgcttcctcttaaccaggagtgatactagccccctgaggaactgcatttagcagagagaactggtttagtccccagtcccccagtggtgcctttctgtcagcagtgtcatgtgtgttgcctgatgccatgtggggggtgcccccttttttattttgtaggtacacgaacgaacagaagaaatggatttcctgctattggtagtccgcaaactcttaagaacaaattcacgttttgtgaaggtaaatttgatttcatgagtaacagacatatttaggattaagattcattgtttagttttgtttctctctatagtctgt

SEQ ID NO: 78271 - DNA, 1306 bp, Homo sapiens
gcctgtcgccaacctcgtgactttctgttatgtactgtgcattttcaagaagggtgtacttggtttctgttgcatattgggccaaggttgttttcttcagaaatatgcattggattttataatattggtcactgaatagaagtcagcatttagtcttgttctatttattctaattttttaggatagtcattcttatttagaataatgtttaaaataataacttattaagaatacactaatgtattctaaagtttttactgacatagtctggtggaagatacttaaggctttgcttaattaatatttaatgactgtttaaaaagataccttcatgctgatgttaaagtaattaatgccaaacactgtttgcacatctctcctttgaaggccgtgctggacgagtgtctagagggtactgttaccggctggtacacaaggatttctgggacaactccatccctgatcatgttgttcctgagatgttggtaattcactttggtcattgtcaaagtttatttatttatttatttatttatttatttatttatgagacggagtcttgcactgttgtctggactggagtgcactggcatgatcttggctcactgcaatctgcctcccgggtttacgcgattctgctgcctcagcctcccaagtagctgggattacaggcacacaccaccacgcccagctaattttttgtatttttagtagagacagggtttcactgtgttggccagactgatctcgaactcctgacctcgtgatccgcccgccttggcctcccaaagtgtcaaagttaattttttgtagatagttttgccaaatagtctaagtgatataatttctagtgtcatctaattttgattccagaaaaatccttgtcttgccacattccccctcactcacaatctgggctcactattgattacacatcaggctactgtctagggcgttacccacattttacagttttaatgagaggatgttttctggtatctatgggctctataataggattgtctttaaatgctgctgttttctatgtccctttataatgagtaattgtgggatcagctttttttccttcctcttttctgtgtctctccccttcctttgtcctccttcttttttttcttctttccctctccctgctttcttgctctcccacttttcagtccctcttttccttctcttttttcttccttctctctccccatctttttatttttccatctctttctctcctgttctttcttcttctctctcccttctcttctctccctccctcaatcctctccatttt

SEQ ID NO: 78272 - DNA, 1020 bp, Homo sapiens
ttttggagacagaatcttactctgccacccaggctgtagtacagtgacacaatcttggctcactgcaaccgctgccctccagtctcaggtgatcctcccatctcagcctcccaagtagctgggactacaggtctgcgccaccacgcccagctaactttgtattttttttgtagagactgggtttcgccatgttgcccgggctggtttcaaactcctgagttcaagtgatctcccaaccttggcctcccaaagtgctgggattagaggtgtgagtcaccgtgcacagccaaaagatgattcttaattagctgcagtgtttcattctgtagctgtgtttatactttacccgttgtgcacttattttctagtgttttcactgctctgatgacatatgtacctttgagacatcagatttcaatgtatttttcttaggtggctgaattatatgaagaattgaagactagaatctcacagttcaacatgcatgttgattctcggcgacctgtcatggaccaagagtatatatataagcagcgattcatcctacaggtgtgctgaagtttcctggatattttttttcctgattctttctgcttacaaggtcttgtggtcgagaaactgcttattcctgctttctgatacaaaccaaacctcaaaggagattttaggtccatagtgttcatactgcgtttgggaaccaggaaacattcttctttcatagtttgcattatttgttgagttgatgattcacctagagagtatttattgtttatttattaatatttaatggattcagacccatttctaatttccaggggagtgtttctatagagtacctgtgttatcactgcttcaggagagatccttttgttttagcttttaagaaagtgaagtgctctttatatcgttcagtgtatatagctattcccctacactgaaaatattattttaactttggaggccatggattcaaattactagtagttagctggaatgtagcgagtgagaagtgtgtcctgg

SEQ ID NO: 78273 - DNA, 1066 bp, Homo sapiens
aatggggagtgtgggtggggcttggagtgtgggcggggctgtggagtgtgggtggggctgtggagagtgggtgaggctgtggagtgtgggtggggctgtgggtgtggggtgggctgtgttgtgtgggcagggctgtgttttgtgggtggggctgtgttgtgagtggggctgtagggtgtgggtggggctatgagtgtgggcggggctgtgggtatgggcggggctggtggatgggcagtggccggcagaaacactctgggacgggtgaggagctgcagggtctggggtggagtcggcctgcccagcctggggcctgggagcatctgggaatggcagcttcaggaaagggcagggtccacgtgtcagagctgcgggcaaggctctgagttcctctcccccatgcaagctgggggtgggcgtatagggccaagtcgacttcccagatgaggacacaacgggaacagttgtcttagcctgtcccagttagtatctggggcgcggtgtgtggtgtgtgatgctacctcgagggccagcaagctccttgtgcgtggctggtgacctgctcactgccctctgtccgtccccgcccagttggagtcttagtggatttagtggagtcttggttggagtcttagtggaccacagcacctctcaaagactcttgtggtttacagcgacctgtgtgctccccctgcaggcagaaccaccccccgccccatcagcttttcttctcccttctcccccatcacaacacgctcccatgttaccggagctgcctcccctagtagggggcctcctgcccgctccagtcccaattctcacctgcttcccttacgaaccccctgctcccctgagtgggaacatctaggcttccccttcccagcagcagggtggcaggcagcaccacccaggacaggaccctccatttgtagccggcagccctcaccgggcaaggcgtgactgctttttgaggcccacgaagctgccctgcggtccttgctgcagggagcagccctgggcagcctcacaaaggccttctcggctcaggtggcccagcctgccgtct

SEQ ID NO: 78274 - DNA, 1018 bp, Homo sapiens
gggccagcctttgagcacgtcccctgcacaactgaggtgcccagacctaggaaggggggctttcgaggcctggggtctgcagggggatggggcctccctggaccccgcaacatgcccccttggctgctgggccaaacatccaggcctgacatggggcctggcaggccagacagccttgctccccactgtgtggggtcctgccccggcctcagtgcctcggtttccccctacagggatggacctgtcttgtgagccatgtgctggaactgccacttgctggggcgggtgatgggcagatggaaaggactggcgtgcatggcctgttattagggtggctgcatagggcctgaatgctgtagggaggcaggccagaggcagcagccttgtcaccaggccacgttgtacccgctgggtgtggtggcacctgtggggcctctgccaggaccgctgggtgtggtggcccctgtggggcctctgccaggaccgcggccttttggcgtcttggggagctcctggtgcccggtgctgggggcaggtggctcttctgggaaggtgcagccgtgggaacagggccttccttccaggggaggggtctggctctgcttcccacgctctccttatgtgggtgaccattccgtcccgacggcggtgggagcagacgggggagtctgggagggtgggtagcaggtactggccacacacccgttggggacagggctggatggtggtctcgtggcctggccttagctccaggggaaggggtcctaggtgggcctggatggggtggggtggtgaggctcaaccccaggccttccgatgtggcagctcaggttccttctcacccacgccctgggatctgcgggcccttgtgtgggggctggcaggggtcatacagcaccggggactgccagttccaccagatgccaaagggaggcgtgggtcccagggtgccgccttccccacctaggaggcagatgccctgcggaatgccctggtgcccagcctggcctgtgctgct

SEQ ID NO: 78275 - DNA, 1023 bp, Homo sapiens
tgggtggtctggcctctggaagtcctggcccaggaatgggcagccctcgtcagcctctgagctctgcacccacgctgctcccttcctgctggggtgaacactgtgcttggtgagactttctcagggcaggctctggaggctgccacccccaccacggtgtgtccttgtcctgcggggcctcagtttcccgcctgtgaacagtccttgggctgcgtcgtcactgttgcttcttccggcgctcagggtcacttttccttccagtgtcacagtgtctccgtttcgttcacgggcgtgccctggccatagctgcctctccaggatggagtcttctaggcaggacccgtgggctggggtggcccgaggccctccgcagggctgcactgtgctccgtggagactccccagcccacctgtccccgaccccagcagcatcccaggcctcagctgtagggctggggatgggtgggtggcccagcccggtgcccggggctgatggcaatgtgtagtcccgcctggcccggcgccaggtcactcagctcagcgcgctgcattggacctgggatggtcgtgcttgcgtccctcctgcgctggcctctgaccccatgtgatgggtgttgcctgagctttggcctctgtttctggcggaggtgccgcatgctggcccttgcctggtgccctcagggagctcttcctaaatgtcctgtccccatcttccctccccagctcatagcttcggttcacggctgtagcccggctctgccctcaaaaccctcacccctgccgccaacgtggcctccacaaagccctcgtcctccagccgcttgacctagcctgtgggggctgccctgagcaaggctgaaaggcccctcctgctctcgtccctagggccccctctccccgacccccgcaaatttgccttcaccaggaagaagtgtcaggcgacctggctccaagctttatcttccacgcctggctctccatctttttctcctgagggtgggactggggccaccccatcagccca

SEQ ID NO: 78276 - DNA, 1704 bp, Homo sapiens
gcaaaggagtttaggcttttgatagggagcacatacattaagtgataaaatagaattcacacttgaggtgagggagtggctgggagaaggagagggctggccgggctgggttcagagggatgtacaggagttcctggcctgcaggctgctggtggggtgtggtgtgctggcgcaatgtccagtgagctgttccaggtcccaggttcgcccttttctgctactgggcattccttctggaagccccggaggagtggctggtgcctagggcccagggggcacccagcttccatccagcctaagtcttggggctccctgtgaacttcctttcgcagacatggttctgttccaggtcccgggaggggcctggaagctggtaccggccatgggttgggcagggtgagccggccatgggttgggcagggtgagccctccatggtggtgaggagggatactgtctgggatggcagggcctctgtctggagtgtccctcctgggtcccggggcggcttgttctgctgacgtgccgtgcctggcctctggcctgtgccacttgggacaccctgaggacgctgggccttccagaccagcccacgtcccctcagcacggggaccccagtcctctgctagcctgggtacaaaggacgcctcgggcagtggttatcgactggacacttggggccgaatgacgcttggcacctgggtgaccgtgacctgaccaggccacggtgcccaagggggtccttggagagcttggggcactgggcccttggggaaggggccggggcgaggggtggccaggctgaagcaggctgccttccctgccttgcctggggttgcatccccccacgccgcccaggaccaggtttggcctgagggttcggggtcccacgtgtctgggaatggaacgtgcggaggtggagctcacgtttgctgggctgtcccgggcgtttaattacgtttgtgcttcattatgaggaggcctccctttctgggatttatttgagctaatgagttggaaatgccagggtagtatttcagatgagggagcgccacacatcaccgtacgtggggcaattagtgttcctgccaaatagttatcgtggtttcttctctaattacgccgctgggtgctcccaggaggctcaggggtgagagggtggggggtctgtgtccatcggtcttgaccagtgtggtcgctgcgattctggagtttgatgggggagaggcggaaagtctggcttctggaccaccatctgcctccctctctgcctccaaggagtcctgctggggcagaccgcccacacaccccgagctgggaacgtgacctcacggcccaggcaggccttccccactggcctctctgccagccctgatttctggggccttcccggcttcacaggctgggccctgggggtgcagagcccccaggaatgtgctgggctctggggtgcccaggcctgtctctcccactccgggtgccagggggcagtggtgtctctgcccttgcgttccttatacgcactctctccttccctccaggccgaggcagcggtggcggccgtggcggtggcagacacggtccgagaatgcccccccgtggccggccctgatggcttgtcgaaggcctggggccgtggtggagtctgcacgtcagccctggtcacccccaccccgggctcggtggggggctccacaggcccctca

SEQ ID NO: 78277 - DNA, 1004 bp, Homo sapiens
gggagttggcatggaggggcgtggtgtgggagcctccactgggcccttcccggcagggcctttggtcctgggacccgtggcagagcctcctctcatcctgatggtgtaaggatgcggattacaggatgtaattgccataatgcctggtaatggcaggcccagccgcgggtcagtgtcccattagcagccccacgcgggtgctgataagcttgaacatgcatcacacccagcggccagagacgagggcgtcttatcagcgccggccctggggaccgtgtggtctgattgcagagtgacggggcatatgattagggcattgtcgcacgccgtgtgccgggctgagggctgatgagcacaccatcgcgttggagcacagccagaccgcgcacgtgaccagtgtggcctcagcgccaccccaattaggtgccgagagcacggctggctgggaccctggtgggagcagatgggggtcttgcccatcctgctctggggtcccccgtgtgtgggacagcccaccccgtcacaaccggcctagtcctgaattaaagggcctgtgcggctgttctgggcacagccctgtggccgtgctcctttgggtcctgtttggcaggaggatttgaaacgtggagacttccagaaaagaaagaatagctccagtgctcagagctcccccggtccctgatgctaagccccctggtgccaaggagggttcctgacactgggaagtaagggtagggtgtcggcccccaggccggtgcgttggtgacctggagcccagcagagcggccctggctgccttttgtttgggagccgaggccggtgccgcttgccagccgcgctgcctgctgaccttgggaagttaccatagaaaccagcgcatcgggctggggacccagaggcggttctcccaaggcgggggcgctgccggctgccattacttccagcctgttaggcaccctgggtctcagcggcttctgcgaggccactgcaggtggcaggtcgtg

SEQ ID NO: 78278 - DNA, 1025 bp, Homo sapiens
gaggccgcagccgcctgcacctcatcgacctgggcagctgtgaggcggcggctggcagggccggggaggctgctgggggtcccctgtgtctgtccctgtcggccctgggcagcgtcatcttggccctggtcaacggagccaagcatgtgccgtatcggtgagtgtagggcctgggcaggtgccgaccagggtggccccttggtgacctggtaaatccgtgtctggtgtgcccggtgctgctgtggcccccagctcctcagggctttgctcctccaccacctgacaggcctcgctgcccgtgggctgcctggggccccacgctgggctggtgccggagctgggtgggaaccagactgatcccagggctgcccttggccagcctgtccccgaagctcccttcccaaggccttggcatctgaaccgcctcgacccgcagggaccacaggctcaccatgctgctgcgtgaatccctggccaccgctggctgccgcaccaccatgatcgcccacgtgtcggatgcgccagcccagcacgcagagacactcagcaccgtgcagctcgccgcccgcatccaccgcctgcgcaggaagaaggccaaggtgctccccacctcctgcccgccccatctcggggccgtctcggctcctgtgtccactgcaggcctctgctggcctggttggggtgggggtcagcaggtggcctggagcctgggtagatgtcctatgtgttctgatgtcatgaggctatgcccatgtggccctccctggggggtggggagcccagcctgaggtccctggctgcagtgggcagaatcggggcttgctgtatgtggcttgtggtggcctcactccagcctgctgcccccgcacaggccctggggtgctcaggagagccgcaccacctctgcaggggcttcctagggacccctctctggggctggagggtggagtttggggcactctggggttacacggcccttggtgtgagtcctggccactggcctgggcacacatgcttgtcttttg

SEQ ID NO: 78279 - DNA, 1026 bp, Homo sapiens
gagcgccagcctgaggattcctggactggatcccgaaggcctccctgtcaggactcgggccggctccgcagcgtccccgcaggggctgtgcttgggctgggccccgcctctgttcaccctgtgcccggctctccgttccaggtctgcagcggcggcgcctgattcccgccccactgcccgacaccactgccctgggccgtaagcccagcctccccgggcagtgggtggacctgcccccgcccctggctggctccctgaaggagccgttcgagatcaaggtgtacgagatcgatgacgtggagcgccttcagcggccccgccccaccccgagggaggcccccacccaggtagggcctttggtgggctggggtctatgacccctggtggggagcctgccgcggatggcagagtgagccatttgatgggctcgccaggcctctgggggtgtggctgggcagcccctgacctcactttctgtccacgttcctcccaggacgcaaaggtaggagcggccctgcccagcccaagcctgttgcagctccgacactccccttgggcagtgggtgggtggctggggggtcctgaggccactgctgctgtccgctggaattctcccctgtcgtggggagggtggtcctagagccgagccaggacccagacgggcatgggtgggctgccccaggtccgccccctgcccgcccttggagccccactgtgtgcctgccaaggcctggcaggtgaagggaggcgggggccacatcagggctgcttgggggtctctggggagagggtcccatgcctgagcccccgcccgccctgcctcccagggtctggcgtgcgtcagtacaaggctgcggctggcggagcgcaggcagcagcggctgcgggaggtgcaggccaagcacaagcacctgtgtgaggagctggccgagacccagggccggctgatgctggagcctggccgctggctggagcagtgtgagtcccgcccgcccacggacccagcccggcccaccgtgtgccctg

SEQ ID NO: 78280 - DNA, 1026 bp, Homo sapiens
acccgacagcaacgcaagtgcctttgaccttgatttggacttttctcccttttgcatttggtgctacagacttgagacaccagcagaagttgtgttcagcccggccccgctgcgcctgtccgggccggggctggcgccggttgtgtttgtgtccaccttgccttctttgcagccaagcagtttttgtggagtggagtgggacttacctgcacgccccaggggtctttcaggattcaggatgacttttcttttacaatggtttcctctcggcagagcccgggttgtgggggatctgtgtggggttctcaacgcagatccatcctggggtctcccgggcagggatggctgacctcgagtcccctcccttcccgagaacccgctctgtcccgagggcagctaacaagggctgagccccaggtacaggttgcctcttccacggcaggaatttttaccaaaaccacaagcaaaaaacaaaacagaccaccacgaccaacaacaaagatggggggtagggttttgtaaaggttctgttaggttcatatttttatatcattttgcccataaatgcggaatttgccgtgggaatttgaagacaaatgatctatgtttttatggttttctagggaaggtgttctgggggccgggctctctccagctgtgggaggcctgctccctctggggggcaccctgggcagggtgggggggccttgggaggcgcttcttgccaaatgcagacgaggggtgagcctgccagcgtttgcgacgtccccgcacgacaggctcatactttctgaggatcgtgcatagcataggacgtctgaacctttgtacaaatgtgtagatgacatcttgctacagcttttatttgtgaattaaagatgcatcgatggttcccacggctgccgagttcactgggcgtcggcagactcctcacgccctggtgtgccgccctctgagggtccctggggtgacgggcagtaagcgtgggaaggacacatccacggggacccagggcttcgggtgctg

SEQ ID NO: 78281 - DNA, 1097 bp, Homo sapiens
acctggcgggggcggcctgggggtggggagggctgagactgctgccacttccttgccattcctggggggccgcagggtcaccatttgctcccactgctgacctggaggaaggcagcctctctcctcggtgggctcctggttatctcagccctttggggaaacacttggtccaggttcgggaaacggctctgctgccctcaaggggaagcccatgtgcctcaccgaggaaactcccaggcggggccgttggtaacactggaaccctgaagggaccttgcatagctgggcaggaagggaccaggggcttgaggggcgcaggggtggggcctggccggccactgcacttcaggtcctgggcaggcgcctcctttctgtgccttgatttcccctcctgtagcaggagcagctgtctgctgcgtctgagctggctgatttggaataaatctctgccgtttctccagccccaggggcggcgggccatatttctcgcagcctcagcggctgtcccgcaaagctaatctgcctggcagaggggtgacactctaaatcctgtgcccaggctgatttgtgggcctgcctgtgctggtgcagggctcgctggcatctttatgaggcaggatgagcctcgctgagagccagggcaggctgggtgtgatctacagcctgggcggcccccgcctgccagcagccgccgctcacgcccactgggcagggtgctctggcccaggctgagggcagccaggtgtctgactcctgttgttcctgctccgggagccttggaattcacctgcaggaaggaggtttcacagcacacagctatccagggggcgcttcctgagcatcgtggcctgggctctgggccgggctgagctgagagggccagatgagggagacccaggtcctgcctgtagggaacccaggcttcctgggccatgggcaggcgacacctctctgccaaggcaggagggatcagtccattctggcctggaggtggctgagccaggagggcatctgcctctgagacagcctgcaaagcatcggtgctggaaatcgcctgggttccaaccccagctctgccacttcccacctgggctgcc

SEQ ID NO: 78282 - DNA, 1052 bp, Homo sapiens
gtgctgctccccagggaaggatttcacacttgtccctggaaaggcctgttgatgatggtgtgaccactggaaactgtccctaaatagctgtccgggaaatgctgctggtcgtgatgatccgtcagtcacatactttctatgtgttaggggaaataccttaaaatcttttttaaattgtcatttatttagacatttttaaaagaaaatctaagggaaaagtgctttgtttaaaatgcagggaggccatttgtttccagttataggcacattattataccactgacaaggagagaagtagcttagcattttccctccgcttctttaagaactattggggacttttggctttaaaacgggatcacttaggtcgaggcattctttgaagccaaaccgcttagaaaccagtattttgtgccaagggaagaaatctcacggaacagcaaagcacttaaatgttccactttaagaatctgaaggcacagatcgttcacatcggttccgattttacgttccatgaacgtcaaatggataaagcctccttgttgcagctgtaccaaaccagggctaacgactggttggatttcacgcttctttcaaaagctcctgtggttacaccatccttcacgtggcctttaatatccccacgtgccgcggctgcattggaacccagcgccacgctccccagtctctcgtgggttccgggcagtgagtggcagccggagggcccagggcaggtgctgcctgtcaggacctcagcctgtatgtgccgggggatgttcgtgcccaacagaggccacttgtctctgggccggggaggcaccgggtggccgtgcctgtcagggcctccttagacagtgccctctcgggccagccggcggctgcccaggtcgggaacagatatgtcgccggcgacaccattatctcccgggcgaacggcgacgtctccgcagccaggcagagcccaggctgccgtgtaattggaccattcagaagtaaattatctgcagctggaaacaagacactgccttttaactcgggcattataaggtcaa

SEQ ID NO: 78283 - DNA, 1114 bp, Homo sapiens
cccacctgcttcctgtgacctggacacagtctgagcaccccaaggtccaaagtgggagaggtggggtgggggagagggagtggggtggattggagggctgtcctactgttacagggctctgccccgggcccacctcacagtgaaggcagaggcccccaggcagcccttggtgggccagaactcaaccaggagccacactgggggcggagggcaggctgtctgcttcccattttgcagacgagggctagtgtcaaagcctagctttgaggctaacccagggcacagttgaggagggagggagagggaagcagtggccgctgagcacaccagccccgggtagtggcttttctgtatcatctccaagcccccattcagctgctgtgggcagaggccagccccagcccctcgctctgcccagcgagtggccagctgcccaacacgcatggagtcccagtgggcatggccagtggtgcaggggtttgttcgtgcctgagctgtcctggccctcgccgggtcgggggtggacgtggccagctgtgcgaggagggccagcatcccactggcctccatctccccatctgtacctgggtccttgcaggccctgggacatggcctcggtgtacagcctgcctgccccaccctctgtgcccccgggtccctgttcctgctccaggcacagctcagactgtcgcctgcacccagcctacgctgggaggaggacacagggtgggggtgagggagtagccacctgtccccacctgcctctgcttccaccttgtgcacagacatgagtggcctgagaacgggagccccttggggacacccagggcccctgcctatgcttccatgtgcagagggcccccccggctgccccttccctgggccaggccaggctgtggaggtgcaggcccaacagtgaggggctgcctgcaggagctggcagagccatgggccggacccaggaggggccacacgggcggtgctggcacagccaacccaggtcagagctacggggccctggagaacatcctggccattttacagatgagaaaactgagtccagaatgggcctggctgtcccaggcccctggcaccctcgtgtcccagcaagcat

SEQ ID NO: 78284 - DNA, 1079 bp, Homo sapiens
ccagatcttggggactgcaggtggcatgagggctggagtgcttcttgggtgtgagacgggccaggtgacagtgaggacacagccagccctcaccaaggcccagtgcgccccatgcccctggacacgtggcagtgggtggacccccatcctcacctgccttgaggccccctgtgcacagaccctccctgggccttgccggcagttggtgagccaccaggtcagtagaggtccctcaaggggctgttggcctggtggggaaggtgacacatgctggaggctcaaaggagctgggagtctgagtgtgagggaggggaatgggggtcatggtagggcaggttcagctccaggtgcctccaccgccctgcagggcctgggctgcccagaaccccggggtgctgccaggaacgcgtgcagtcctggagatccatgggttgccaagcagtggaaaaattggggctctcggaggagctaaaaatacagtgtggcagcccctgcctcctagttccggaatcctctcctgccgttctgcccacccaccccgtggaagacaagctccctccctgcacccccaccaccaacgctggctcagggcccagaagcacccagccctgtgccagtgccagaagggcgacaccacagctgcctgcccactcccaggcagcagccccccacaggtgctcatgtgcccagccagtgcctgccctacccccgccactgcttcagggtccccagagccccttggtcccaggcacagtaggcagtacctgccaccccagggctgccaggctcagggcttggcctgttcctcgtggggagcctggacccaggcagacctctcccttccctaccagtggggacttcacaggggagggggctgtcccaggcagactcagaacatgtcacagcgggggcctccaggcccattggtgctggccgagggcataggagctcccacactgtgctgtggaaggccctcctcgcctggctcctgggaggcaagtgagggagccgaggcctgggggcttcagtggctggctcaggtccctcgcgtgctgggattcaagtctgggtaccctaac

SEQ ID NO: 78285 - DNA, 1052 bp, Homo sapiens
ccaccctctgggctctctgccctcgtccacacctcggcggcaggagtcactgagtcagagatgcgaatccacccgagtggctccctacatacacctgcctagctccaagcccttcagcctcagcccagacagagcccttgaggtctggcccacacctactgatggtgtcaccctccacctcccagcgccttccctagcgcctccctccccgccctgtcccctactccagcacccaggggactcgttcccggcaggcaggcaggcccttggtctctgcctctgctcgtgttttctgcctttgcgtcctccaaggtcctgcgccgctaagcctttaagccccagctcactttcctgtcctccaggaagtctccccaggctgtgcccaaagttagtcccggtcccttgagagaaacccttgctgtgccactccatggctgctgccaggtcctaccgatgcttggggacgagctagggtgggcagtgatgggcggggctgggcccatgggggcggcagttacctgtgcaggcaagcaagccagaggcgcctcgtttctgtcggacccaggggacagaggcaggtgtaggggccagccattctcagcccgtctccccagcctgggcctggcagggcccctctatggagtcttttgtgaattgttctcagcagggtcagatgagagacacccccagaactttcacagctccagatggggtgggaggcaggggttcataggaatgaggttgtgtctgccataaacacagtaagtgctgcattgggagaaaagctgggcccagagccagtgacaggatggggcagctgcctccaagcccttccctgcagggtctggccctgtggtccaggagcagggccaggacaccgaggagtggggcacctcgttgggtcccagcccactgctgtgggccacagacaagtgcccggcaccccctggcgtctgcctgccaggcccagagccccagccctgagcccagctgcacaggcatgggaaggggtgcattggccctgctgagcctgcccactccaccctggcagc

SEQ ID NO: 78286 - DNA, 1035 bp, Homo sapiens
gcacaggacagtcccacatgtcaccagtaccacagtcgctgaaactctcatctctagggatccgtgggaatagagggggtgatggggctggacaccctggcagacaggccacagtccttagtccaccagggaggggccggctgctgacctgcaccccacactcgcccgtccaggtgagctgctccccggtgtctgcccagctcctgtcggtgctgcagggcctcctgcacctggagcccaccctccgctccagccagctgctctgggaggccctggagagcctcgtgaaccgggccgtgctcctggccagcgatggtgagggggcggggcaggggcgtaggcacagcctggtgggcagacactgaggtcttagaccatgggggggggagcctgcccttggccccaacccatcctctgcccaggggaggtggccgctttttcctgcctcttcctcaagcccccatccctccctctccggctcccttctcccttgaccctggacatcccctactgcagcccaggaatgcaccctggaggaagtggttgagcggctcctgtctgtcaaggggcgacccagaccgagccccctggtcaaggcccataaaagcgtccaggccaacctagaccagagccagaggggcagctccccgcaaaacactacaacccccaagcccagcgtggagggccagcagccagcagcagctgctgcctgcgagcccgtggaccacgcccagagtgagagcatcctgaaagtttcgcagcccagagccctggagcagcaggcgtccaccccacccccacccccacccccacccctgctccctggttccagtgccgagccccctccccctcccccaccaccccccctgcccagtgtgggggctaaggccctcccaacagcacccccgcccccacccctgccaggcctgggggccatggcccccccagcacctcctctaccaccacccctgccaggctcctgtgagttcctgcccccaccacctccaccactcccgggcttgggatgcccgcccc

SEQ ID NO: 78287 - DNA, 2048 bp, Homo sapiens
cctgcagcactggctcccctgcacgagccttgtccctccccaggatacctgtccctgatctgggggacagtccctaggaaaagcagaaacatcacaaagtcatagccaggcccaagggaaagatttgagggtctggagtactgggggttttctggaccttaattgctaagggttagagctgggggagtgggaacagggtcatccccaggtggagagtatgaccacagtggatctcactggacgtgtcccattgcaggaagcggaaaagagccaccccgacctcctgcagctgccccgggacctggaacagccctcgcaagcagcagggtaggtagctcctgccagcccgcccacctcagccaggtgggggcctgacttctgtccccaggcagtgaggtggctgcccgccagggctgggtctcacagctgcagcgcagccccggcgccacggagccctgcccaatagaacacttcccttttgggacaggaccgggtctgccgtggcctatccccttctgacttaagcgaggaaacaggcctagagtgggcaagggctggccaggtcagggtcacaccacgggcaggtctaatacagccccttcacaaggtggaccttcacgacagccgtgagcaggctcgggcctccctcattgtatagatgaggaaacggaggcccaggaaagcagtgtcacctcctgggtcacacaacccaggcaggagggcagcctgggccaccccactacacagtccgggcccctagcacggagttcttcccgggctccacctgccctggaaggttctctggctcaggagctgctcagccttggggagaactaggcaagcaggacaggctgaccgttagggtccccgcccagatgctcacagggggctgagggtcagctggaacaggcactcaaccccaacactgcacgtgcagcctcagagtacagcctgcagggtgcacagtggggtgccggggggtgcaggggaggggctcccctgtcccagcgaggctgacgtcagccgttgctgtctctgcccggccctcctcacctttcaggatcaacctggagatcatccgctcagaggccagctccaacctgaagaagcttctggagaccgagcggaaggtgtctgcctccgtggccgaggtccaggagcagtacaccgagcgcctccaggcaagtgggcacctgggcctggggctggcgggagaggctgccctgatagagtgagctgggcgagtggctgtgctgtctcctggctccagggtggatcctggggcccgagtttccccaggtgtgcatggtcagggcacaggcccctgctccttgtcagagaccaccgtcctcagggcctgtccctgtggccgtcaccctcccgcaactcagggcctcaccccgggtggtgcccgcgcggggctctcacgggactgtcacgtgcccttgcccccaggccagcatctcggccttccgggcactggatgagctgtttgaggccatcgagcagaagcaacgggagctggccgactacctgtgtgaggacgcccagcagctgtccctggaggacacgttcagcaccatgaaggctttccgggaccttttcctccgcgccctgaaggtggggcagcccggcgggacacagcctgtctggctagagtggggtcccgaggcccctggccttcctccggcaggatgggcagaggcacctttcgtcgggccgacacagccatgtgggccctgcgctgctgcggctcagggagggggacgcccaggcccatggagcccctgagggatgccacgctggggtgacggggccacatctgccagtgcaggagaacaaggaccggaaggagcaggcggcgaaggcagagaggaggaagcagcagctggcggaggaggaggcgcggcggcctcggggagaggacgggaagcctggtgaggctgggccggctgggcggggagggggtgactctgggatccttgtctgtgctccagcctccccaccacccccagccctctaggtgggctccagggtcccatgccgct

SEQ ID NO: 78288 - DNA, 2715 bp, Homo sapiens
tcagggtgctgggaatggcatggcccagtgtcccccaccctgccacagtgtagacagaccaaggacgctgaggccgggtcctgctctgagacatcagaggaggctttctggggaggaggttttgcagggcgttcaggtagacagcggaatggaggaggctgcacctgggctggctcgggggcagggtgcctgcccttcactggtgtgtccctccatccagtggccaccagtaaccctgcaggagatcccgtgggcagcacgcgctgtcccgcctctgagcccggccttgatgctacaacagccagcgagtcccggggctgggaccttgtagacgccgtgacccccggccctcagcccaccctggagcagttggaggagggtggtccacggcccctggagaggcgttcttcctggtatgtggatgccagcgatgtcctaaccactgaggatccccagtgcccccagcccttggagggggcctggccggtgactctgggagatgctcaggccctgaagcccctcaagttctccagcaaccagccccctgcagccggaagttcaaggcaagatgccaaggatcccacgtccttgctgggcgtcctccaggccgaggccgacagcacaagtgaggggctggaggacgctgtccacagccgtggtgccagaccccctgcagcaggcccaggtggggatgaggacgaggacgaggaggacacggccccagagtccgcactggacacatccctggacaagtccttctccgaggatgcggtgaccgactcctcggggtcgggcacactccccagggcccggggccgggcctcaaaggggaccgggaagcgaaggaagaagcgtccctccaggagccaggaaggtaactcagggaggggccccgggcaccgtcccacgccagggcgctggcacccagccggtccctccccttccccattgggcactgcaagttccagcggcacccaggagaggtgacttgggtgcggcacgggagaggaggcggcagtgcgtccaccgcagggcggctatgtgggctgccgcggcccgtgcaactattcctccaacctactaattccgaccttcacgccacctccgttagggagtagggggcggacaccgggcaccaggtcccaggcaagtggctgccatgtggcttagtggccagagaaccgggcagccctcagagggtgttggcatggctgtcccgggccccccagccccacccactccgagtcagggttgcttctgtgtgataagccgttgagtgcgtttcttttatttggaagcagaggttccccctgattctgatgataataaaacaaagaaactgtgtgtgatccagtaaggtatgtacgcagccggcgctccgtgggggctaacagcagctgcagggcagtggggctggagcttgctgcccacacccctccgggacactaacctggcttctctccagcccgcgtggtgcgtcagtgtggccttgccgctcccgcagccctggtggtgggcttcccgccccatcccctccctctccgcaggttacctgctcaactggtgcctcctgcaggcaggacgcaacctcagtgctggccccgggcatgcgggcctcgagagggcaggtggcagggccagccggactcccttagcaagcaggatccgggccctggggcgtgggcgggacctcctggctggcaggacaggctgaggttgctcctgtctggtgtcctggcgctaactgcagttccagtaaccctgtggctttcctgctctgtctgttggtggagggctatcttcactctaagtgtgtcaatggcgtggggccttctggggcatgtccccaggaagtctgtgaggagaccgggacagtcgcaagggcagatgctgccagggacaagtacactgcaacccccctcctgttggacagtgtcctcccaccccgaggccatgggtgggtctatggagaagcagattaccccccgcacaccgagtcttctggggggcgaccagccaaaggtcaatcagccaggtccgtccacagggctggagaggccaatgcatccagctagacaggaccagcctgcactgggtggaggaggggctagagcagagaaccagaaggtccagcccggccgatcatgagctctgtgagcccaggtcgtggcgtcttccagcacctccagccttgctcagagccagcccggtgtcggtgcatcacaaatatgctgaccgctgggcctggggcttaggctcaaggtgcacacctgaggtctgctggtgcccatcagaggcaagagcagtcgtgaccccggagaagcttctccggacagcttgtcctcgctgttggggcacggccttcaccctgggttccagcttttgcttccagggtcatcttccgagtgtggctctctggtgtgaagcacccacgtgtactttttagaaaggtgctggcatctcccttagaggctggaacttggacttgctggccctgagtgtgaggaacagtggagcatgcaggtctggggcgggcggccacatctgacaatggtccagtgaaagatggacgtgtccagtgccagctccacgctccacctggttccctcctgaacctgctacacgtgcttagcctccacccgccccagctcctgccacgcacgtggctgagggcaagaggaagaagtcctcttctctccccaactttttattttt

SEQ ID NO: 78289 - DNA, 1055 bp, Homo sapiens
atggcacaacctgctggacagtggcgatgaggggttcagggacctgggcacccagaagcgggcacctgatattgtacccagcaaaactgctcctaataatgtcattttttctctctcttacaggcctcaggcccaggcccaaggccaagtgagagagcccaggccacaggacatgctgccattctgccaagagaggctcttctgggggccaggctgggactgggccccggaaaccaaaactccgtgccttacccagccggggccctcctggagccttcttggggtgttgtggctgggaacccgacaggcaccagtgccctgccaggcctggtgccctcctggaccgcctgcacgtgccagcctcccacctgcttcctaaaggcaaccctggcccacacccgcatgcgcccggtgcagcctgccaagggccagtcggggggtgctgcgtcctgccagtgtccaccacagctctgcctgcccttcagcccagcaaggtttaatcaaaatgcaatgctttgcaagtctttactgcttggaggtggctgagttgggggccctgggcaggggtaagctggcaggcagtgccatggcaggccagggtcccctcccatggggtctggcccccgttccagcatgtccagcccctgaagttggagtggggggcggtctgcctttgctgccactgccaggcctctgccctgcagctgaaacttggccatcacatcaacagaaaacccctcccagtgccagctgcccagcgtgggcaggccctggggacaatacaggtccacctgaggggctgcagggtgacacccagcagccgctgccccctcactgcccacccagcgagggcagcctacccgagcctgccccctgccaggtgtgtgccctgaggctggcggctggatgcgtggccaataaaaagcagacctagcccggtgtgcgactgtcgtgttcagaggctgcgggagtgggcggtggacgtgggctcccacaaacatggtgagcgctggacaggccccgtgtgaacactcactgttgaggggcccccaggc

SEQ ID NO: 78290 - DNA, 1066 bp, Homo sapiens
caagctccgccctcgttgcaccgtcctgaccctcggcctcgcccccgccccctggctcttcccgcgcagccgaatgccgcgacctggctcccacccttcgtcgcttcgcgccgcataggaaccccgcccctagtctctcctcccgcctatcctgagcggcgcgcgcacaaatctctcccacggacccgcccaccctgatcctcaacctggcccctggcctttcccgcggcgtcgagtccagtacaccgacgcacgagtcccacccccgatctctccctcggcctatcccgcgccgctccgcgcaggagtcccgcctcccacttcgcccgcagcctatgacgcgccgcgtcgctccctctcctcaaacccgctctcgcccgcggatgggcgcgcagctgtgacgtcacggcgtcgttggtaaggggctggcggccggggagctgcgtagctcccggccccgcggccatgcccaagcggagctgccccttcgcggacgtggccccgctacagctcaaggtccgcgtgagccagagggagttgagccgcggcgtgtgcgccgagcgctactcgcaggaggtcttcggtgagtgtcgggcgggctgccgagggtccgctgcgtcggggcctggaacgggccgggcctcagcgtcccctctgaggcctgagcggggggctggagggccctgctttctggccccgcgttcccggaagctgggaggccgcggggacacaagctggccacgcccagggctggggtcagtgagggggatgtgaggaccccagcgttcgcccaccctgtccaacagcctgaaagaaaagggtccctgcccctagcccccgcgccctcttccacgatcccggttagtcgccgccctgcagtgagcggcacccgcctggtgctttctcaggactgtcccgtgcaggatgtcctgggagaggttggggagcggggcgtcctgcatggagtcaacccgaagagtgcccctcctgtcccaagaggtattcatggagcgcgcggccctgccaggcacggcggctttctcgggagaccaaaggcaggcaagac

SEQ ID NO: 78291 - DNA, 1936 bp, Homo sapiens
gacaagcttagtgaggcgaggccagccgtgaattgcagaaaatgagccgagtgataggagagggaacccttgcatcagacacaggtggggctgcagggccagagccttcctggaggagatgacagctaagccaggtaaggaaaggacgcacaagcattctcagcatagaggcagagcaggacccagctcgccagggcacaacacaggctggggttactgggagacagagggcacacaggaggacgatggggttcatgtgaggctagaaagactcaatggccatgcaggggcttcgttggtacacagtgaaggacgtgagaatgatttatcttcccccagagaagaccaagcgactcctgttcctcggggcccaggcctacctggaccacgtgtgggatgaaggctgtgccgtcgttcacctgccagagtccccaaagcctggccctacaggggccccgagggctgcacgtgggcagatgctgattggaccagacggccgcctgatcaggagccttgggcaggcctccgaagctggtgagtggcaccagcagccctttgtggctgtggcactgagggcaggtggtggcacgagcatttttcttgatttgcaaggtcaggcttttcctccctgggtaagcaggactctgacccagagcttggccttctggctcagaaggctcctgttatcaggaggtctcacattcaagactggaagttgttaaacagcttctaagtactgggccaaaaaagcagcagagactccccgggtatcccgtctgctttccgcctgcagccccctcagatagtcccacaaggctggaaacatgccagtcccatccctatgcagtgtggggtctcagagcatcacctgtgttgctggttagaaatgcaatccccgactctacctcaagtctggttggtgtgtctaggaggagcccaggcacctctttgttaaccagtaaggcagtgggccacactgagacccagatgggacacatggagttctgacaagcaacaggggaagaatggtccttccagcactagcctccaggtagcagagggacctggtaagggaaagagcactgaacttggagtcaactacaggcatatctcaccttggatctctgtagtaaaacgggggtcctgtgcactgtaccaggctcacgggttgtcagaaggatccagtgtaggtggggatggggtaggcaggtcagagccctctgccctcaggtatgcatggaggcaggtagcccggcagtcccggaaactccagtctccttgcagcctgacggcttggcgtttcttcctcacagacccatctggggtagcgtccattgcctgttcctcatgcgtgcgagccgtggatgggaaggcggtctgcggtcagtgtgagcgagccctgtgcgggcagtgtgtgcgcacctgctggggctgcggctccgtggcctgtaccctgtgtggcctcgtggagtaagtacttcagtccctggagctgctgagatcccatagccccagcaagccgtgatgggggacgggtgggtcacccatgtgggcccagaacacacacgtgtggcccctgatgcagtgccatctggcattgcctaacgggacatggtggcaatagatgcttggcccaactttagtggttagtaatcctctctaagggaaagctgaacctcacagatgacctgctctgtatccggctctagtccctgtcttcagccacttcctgttctgatctttgagcacccccacctcctcctcctctggtctttgagccccccctccccccgtccgaggagcccctggttggtgacacaggtgcacaccgcagcttcaccacagtcatgcgtgccgtttggttgtagaccctctcaggcaggaagtggagtgtttgtgtagtctcccatttgtgggtgggtttgctgcagctggc

SEQ ID NO: 78292 - DNA, 1293 bp, Homo sapiens
gcgtggtgtcgggcagcgtggtgcggggctgccgtcctgcctgtggggccgcagttccagctccccttccttgcaggccctgaagtactctttccagacccacgaccgcctctgctttgtcatggagtacgccaacgggggcgaggtaggggctggggctgcgggggatggacttcgcggcctgtgggccgcccatggtggggccggtccttcccggagcctcggctactctccatggcaccagacggtgctccctgctgggtgggtggtgtgatgcctgcccaggcagctgcctgctgtggggtgacttgttcctgctgagttagggcttctgagactttccaggcccccgtgccctctggtggctggtcccttccctgtgcaatgccgagacccggtctgagaaaccccagccctgcaggccatgggggcagaggcccgagccacggctgtgcctcaggttgcgcctcccgcagctgttcttccacctgtcccgggagcgtgtgttctccgaggaccgggcccgcttctatggcgctgagattgtgtcagccctggactacctgcactcggagaagaacgtggtgtaccgggacctcaaggtgcgctggcgggcaggcaggggggcagggccctgggggcctggcggcactgacctgaggccacctttcccctagctggagaacctcatgctggacaaggacgggcacattaagatcacagacttcgggctgtgcaaggaggggatcaaggacggtgccaccatgaagaccttttgcggcacacctgagtacctggcccccgaggtgtgcgccccacctgcgtgcatacgcgttgctgcgtccccacgtcctgagcacacgcaatgctgtgtcctctctgtgccccaagcacgtcacacctcccccggcagtgtcccggacaccccttgatgccgagtcctgcccatctgccacccgtgcaggtgctggaggacaatgactacggccgtgcagtggactggtgggggctgggcgtggtcatgtacgagatgatgtgcggtcgcctgcccttctacaaccaggaccatgagaagctttttgagctcatcctcatggaggagatccgcttcccgcgcacgcttggtcccgaggccaagtccttgctttcagggctgctcaagaaggaccccaagcagaggtgagggccgcccatcccagctacaggctacacctccatcccctcatccccaggctgcacctgcccctgcgccaggcggtcctggcacctcccagactacactgatagccaaag

SEQ ID NO: 78293 - DNA, 2399 bp, Homo sapiens
ggggctcagagactgaaggaaggactgtaggagtggacgatggtgggggtttgacctgacgccgggccagatgccctgtgtggctgcctcagcctggagtagagtgtctgagctggaacaggggtcctagccccactctgtgaggcgagaaactgaggcttggagagaggaagagatggggcttcccaggacctggtgggtggtatgcaaggggagctggctggtgcagcgggggctgtggtgagggccctgggaggggcagggggatgcacgcagacagaggctctgcctgcccgcagagtgccagctgatgaagacggagcggccccggcccaacaccttcatcatccgctgcctgcagtggaccactgtcatcgaacgcaccttccatgtggagactcctgaggagcggtacgtgggctgtggcggccaggccaggcacttgggcagccccagcgcttaggagggacacggggatggcggggtgctggcacctctgcctgtagccatcctcactccccagtgctcccaggccctcctcagagcccagtttggaaactggcccagtcctgcctgtggggtttgggtggggaaactgaggctggagataaaaactggctagggaccgggtgcagtggctcacgtctataatctcggcactttgggaggccgaggtgcgcagatcacttgagaccaggagtttgagactagcctgccaacatggtgaaacccccgtctctactaaaaatataaaacttagctgggtgtggtggtgcacacctgtaatcccggctacttgggaggctgaggcacaagaatcgcttgaacccgagaggcagaggctgcaggagccgagattttaccactgcactccagccagggcgatagagcaagactccgtctcaaaaaaagaaaaacccggtggagagggccagtcctccttggggggcggagtcctgcttgggaggcggagtcctgcttggggggggcggagtcctgctggggggcggagtcctgctgggggttggagtccggttgtggggacagagtcctgctggggggctaagcctgggtgtcccccacgtccaagagggcttcgtgaccctgagtgtatgtggccagaccaggtcaagtggtggcctcctcagggctgtctctgggaaccccgacagctgtggaaccacgcttgtgaggctggcgggtgggtgaaagacgtggggtggagctcctgatctggtacaggcctgcagcctcacctgacctcctgcagggaggagtggacaaccgccatccagactgtggctgacggcctcaagaagcaggaggaggaggagatggacttccggtcgggctcacccagtgacaactcaggggctgaagagatggaggtgtccctggccaagcccaagcaccgcgtggtgaggcctgtccccacttctgcctgtgcctggggctgccttggactgtggagggctgggtgggtcatggggtcccagctcggcccaggagacactcagcactccacggcatctccacctaggccggttttccatgtagggcgcagctgcttcccaggtgggtcctcttccccatgtcagaggaaaactggggttgctgagccctgccaggcttgggcaatgttaccccacccttccctgaaccccatgctctgagctggggccgcagccatgtgttccctgtaagcctggactccccgctgagcccagtaggccaccaggtgtgaagtggacgcctctcctggctctgcctccgactctggggcccctcatgccaccccacgcatgccgaccagctgggcactgttggcagcgccgcttgctgaccctggtgcctgcccatagaccatgaacgagtttgagtacctgaagctgctgggcaagggcactttcggcaaggtgatcctggtgaaggagaaggccacaggccgctactacgccatgaagatcctcaagaaggaagtcatcgtggccaaggtggggccggggcggtggggcagggtggagatgagggtgcggggtggcagctcacccagccctgctttacaggacgaggtggcccacacactcaccgagaaccgcgtcctgcagaactccaggcaccccttcctcacagtgagtgggagcccagatggggctgaagggctggggccaggtagcgactcctggggctgtctctaggggacgatgtcctgtcttcttgggcacgtgagggctttacacaccgtggactccgccgctggtgagacaggcctgccctggagggtcaggctgtggaggtgcccagtgtgggctaggggctgtgctcgctgctcccgtgtgcgggcaggtgggtggggcaggtggccctggtcttccttgcactctgccgaggctccagga

SEQ ID NO: 78294 - DNA, 1051 bp, Homo sapiens
agatgaagacaaggaggctgcagacgcctgtggtccttggggagcttctggctctgcttccccccaaggcctcctgccgcatcctgccttctccatcccctccccgtgtgctgtcccctgcttgttccccaggagtcctgccacctgtgcctggaggtcctctcctcacctcacagccctctttggtgtcagggaccccctgccccgaccctggccctgttcctctctgtgtcacatagtctgctgcctggggccgctgcttctttatccttggcaaatgtgtgtttgttgatagactgttggatctcgggctgacccaggagatgccagggccttgactgcccaggggcccaggccccagttactggggcacccatcagccagctgggcctaggcaggagtgctcccccgaggccaggtgattttcaggctgctgctgatgtcgtgccttcaggaggggcctggcagggacaggacatcaggcccagtggggcgtccagagagctgagtttgaaccctggttagccactctatcgccatgaccctttccaagagcaaggtcattgagctccttgggcctcagtttccccatctacaccagggagcggtggtgggagagagacctggtggagtggagaatggcttgtgggcggccctgagttggggtccggccagcctcagcagcctctgggctctgtcatctggcccctagcctcaggccaggagagagggtcctgtacctctacccccggctcttcctcctccatccccagtgtagtgggcgctgaggatgggaggtggcgtggatatgacatatgcccttggcaggcatagcccctcttgttgccgagagcaggtggcgtccacccgcatggccggccgctccttgcggaggaaagcctgtcctccggggcctgccgcatttcgccactcccgtccctggggtcccctgtgtgtcttgcagatgtgctgtgccaccctcctggcagggccagccccacccgcaacactggttagaggtactagctgccttcctgtccctagcagggct

SEQ ID NO: 78295 - DNA, 1139 bp, Homo sapiens
atttgttattttgcttcttttgaaaaaattatagccatcccaatgggtgtgacatggtatttcattgtggttttattttgcatctccctagtgactgatgatgttgaacattttttgtgtgtgcttgttgaccatttatctgtcttctttggggaaaggtccattcaagtactttgtttatttgtaaattaggttgtttagggagtttttgtttcggagttacagcaattctaatatgctgcatattaatatcctatcagatataggatttgcaaatatctcattttgtgagttgccattctactctttttttttttttcaggcttaattcactttacttctcttgtataaaaaccctatgttgtagccacagcaggagcctgggtccactgcacggagactctggtgtgggtcttgacgaggtggtcagtgaattcctgatagggagacttggtgaatacagtctccttccagaggttgggggtcaggtagctgtaggtcttagagatggcatcaaaggtggccttggcgaagttgcccagggtggcagtgcagccccgggctgaggtgtagcagtcatcgataccagccatcatgagcagcttcttgggcacaggtgcggagacgatgccagtgcccccgtgtgcagggatgaggcgcgccggcacagagccgcagcggcctgtcaccttgcaagggacggtgtggggcttgccgatcttgttcccccagtagcctctgtgcacagggacaatggagagcttggccaggatgatggccccacggatggcggtggccacctccttggagcacttaacacccagaccgacgtggccattgtagtctccgatagcaaagaacgccttgaacctggtgcgctggccggcacgggtctgcttctgcaccagcataatcttcaaaacctcatccttgagagaggcccccaggaaaacgtcaatgatctcagattccttaatgggcagggaaaagagatagatctcctccagggacttgatcttcatctccttgaccaagcggcccagcttggtgacaggcatccactccttatcctcagccttgcctccgcgagctccgcagccttggccctggccccgtccacggccgcgaccccggccccg

SEQ ID NO: 78296 - DNA, 1274 bp, Homo sapiens
gggcgtgaggagtgtgagctcatgctacaggtttgcagggagcgcttggggccaggagggtagggggtagacagtctgtccctgtggaggccaggaaggtgcccaccccacttgctgcaggccaccctggcgaggaggccgccatgcagcccaggctgggcctcttaacttgggtcccggatgcaccgagggctctggggctcccgtgggtgcgtgcaggggtgtgtgtgtgctcacaggctcgggtccctgccccgtacgtatccctgtctctgacaggagggggcttaggcttttgtcaggttctcaaagttgttggggtccctagaagcgtgagttggcgtccttttgcagagagggagctgaggctgggctttggaaggtcctggaaagccggtctgtccatattcttgttgtctgggggccccgtctatgctgtgagtgctgcctgagcgggggtcccagtatcttggtcccagctgcaccctggtgaaggctagtgccttttggcggcctccaggcatgaggggttcttctcagggcatgagagcctgccgagcaccggcactgacaatcggaagtttctctggccctggtttgaggtctgagtttggctttgtggggcttgcgatctggctgtttgagaacaaagagcaggggtggtgagctaaccccataggcccatcctggcctgatgtccttcctctaccccgtgtgcctgtgaacgagttgggctccctgtcctggctcatcccccagcgtggcacgtgggcccctgacccaggtggatggcactgtccagtctagccgaggggcctgcaggtgcagggagctgccctgcccactcagacgttgcctcctggatgcaacgtgctactgccgcacatgcccgggccatgccaggctctgacgaggtgggcaggcctcaggctgtggtgaggggtcctggccatgtgcacattccctggggcagacagtgtttgtctgcctctacccagggcagccccacccgatattgctgcatgtgtcctgctgtggcgggaaggtttgtgtcccctgcaattcggaggttgaagcttcatttccagcgtggtagcttcaagagatggggcctttgggaggtgagcagggcgtgaggctttgcccttgggaatgggatcagggaccttaaaaagaggccagaggaagctggctcaccccttctgcccagtggggacgcagcattcaagataccatccttgaagcagagacagggccctctccagacaccaaat

SEQ ID NO: 78297 - DNA, 2456 bp, Homo sapiens
gggccaggccggggcgggcctcaggccactgaccacggacacaggctgcctcttcctgagcgtggagggcctgcagaccagcggccctctaaccggctgcctttgtgctccacagaggatggcctgggacgtagaggcggggagccggaggggtccctgcctgtgcgcatgcggcgacggctccctcagctgcccagtgagagggctgacagccctgcgggcccagagagcagcaggaggagtgggcctgggccaccggagctggacagtgagcagcccagccgcctcttcggccaggaggagttggatcctgacagcctcagcgatgccagtgggtcggacgggggccgaggccccgagccaggggtggagccacaggacagcagacgcaggagcccccaggaggggcccacgtggagcaggggtcggcgctcaccaagggcccccggggagccaactcccgcctctttcttcattggggaccagaatggggacgctgtgttatctaggaaaccgcttgcggctccaggggatggggagggcctagggcagacagcccagcccagccccccagcacgggatggcgtctatgtcagtgccaatgggagaatggtcatccagctacggcctggacggtccccagaacccgacggccctgccccagcctttctccggcaagagagcttcactaaggagccagccagtggtcccccagcgcccggcaagcccccccacatctccagccacccgcttctacaggacctggccgctacccgggccgcacgcatggacttccactcccaggacacccacctgatcttgaaggagacggagacggccctggcggccctggaggcccgactcctctctaattctgtggatgccgagtgtgaggggggcagcaccccgaggccgccggaggacgccctgtctggggactcggacgtggacacagccagcaccgtcagcctgcgtagtggcaagagcgggcccagccccacaaccccccagcctctgcgggcacagaaggagatgtcgccatccccgccagctgcacaggacccgggaggcaccgccctggtcagtgcccgtgagcagtcctcagagaggcagcatcacccacttggcccgacggacatgggccgtggagagccggtacggcgctcagccataaggcgtggccacaggccccgagggtccctggattggcccagtgaggagcgtggccctgtcctcgcccacctacccagctcagatgtgatggcctccaaccacgaaacccctgaggccaccggggcaggacggctaggttctcgccggaaaccagcggccccaccgccatccccagctgcccgggaggagcagagccgtagctcagccagctcccagaaggggccgcaggccttgacccgctccaacagcctgtccacccctcgccccacacgggcctcccggctgaggcgggcccggctgggggacgcttcagacactgaggctgcggatggtgagcgggggtccctgggcaaccctgagcccgtgggccggccagctgctgagcaggccaagaagctgtcacgcctggacatcctggccatgccccggaagcgggccggctccttcacagggactagtgaccccgaggcagcccctgcccgcaccagcttctctggccgcagtgtggagttgtgctgtgccagccgcaagcccaccatggccgaagcacgggctgtctccaggaaggctgccaacacagccaccaccacgggtccccgccagcccttcagcagggcccgctcaggcagtgcccgatacacctccagtgagtgccagggcgggtgggaggccagggccaagacagggctgccagtgggtctgcagcatcttggatgccagctgagtgctggccgtgggcccctggtcctggcacgagaggagcctctgttcccaaagctggggtagatgtgttgctggactcacgtgcacacacacacgtgcatgggccgagggcagggcccgcagtcccctggtgtgggtagaacaccctgaccatctctggcgtggagagggccttccatcccccagggtgtgcctcagggccccgaagcccaggctggccctccccactcttcctgtactcctggctcaggcccctggtgcctttgggtccccacgccatctgcccatgggcctgaggccctaggcctggggagggctgtcccatggatctctgccgcagtactgtggctcagtgaagggtgccaagtacacctgtgccctccgctggtagctgctctaacacccttctgagcccgcaggccccatgaccagggagggagggagggctgtgagcagagtcctgccctgccccccagatgtccatgggcacagcaagcggggatggtcctctgtggccaccagagctggcctcctacctggggtggccggacatccgcgtc

SEQ ID NO: 78298 - DNA, 1185 bp, Homo sapiens
gatggatgggtgagtgggtgggtggatggatggatggatgagtggtgggtggatggatggatggatgaatggatgagtgagtgggtggatggatggatgagtgggtagatggatggatggatggatggatgagtgggtgggtggatggatggatggatggatgaatggatgaatgagtgggtgggtgggtggatggatgaatggatgagtgggtgggtggatggagggatggatggatggatggatggatgagtgggtggatggatgggtgggtgggtggatggatgggtgggtgggtgtgtggatggatgggtgggtgggtgtggatggatggatgagtgggtgggtggatggatggatggatggatggatgagtgggtgggtggatggatggatggatggatggagagtgagtgggtggatggaggggtgggtggatgcagatcttcccaggaggtgagaccgccagtacaaggagggcctcctcaaaggttttcattagaaatgaactccctcacatggtcattcagtaacagggccctctccaggccaggcgctggggaggatggggtagggagttgggtgggagtgagagtggtctttgccaagcagtggtcagtactgcaaaggcagtccctgaaaggctgtggggcaggcagggggggtcccaggaccagggtggatggcaagtgtttgttgtggaggatgctgagcttgaagcccatgagggacctggaaggaggtggccaggagcaggcggcccttagagagtggcccacactggggtggaggcgcaggcacctgaggctgtgagcagcatgaagttggtggggaggacctggggggcttggaaggatggggactggggacagggctcttgggatgcttgaggtattgggggagcatagggaagaaggctgccatcagcggaggaggctagcacagggctagggctctggacagagacactgcacctggctgagaagggggtgggtgcttccaggcctgagagcagaaggggatgtggggggcccatgtgggtttctggagttctctgccttccatggtgggtgagctggagcatgccatatgacgggggcaggaggccagggagtgctgggcgggggcctgagggccaggggcatgtgccagttggtgtcacccagaggtggagggagggcttcc

SEQ ID NO: 78299 - DNA, 1248 bp, Homo sapiens
gcctctgcctggggcccacggtgccggccctccctcttgcagctggtgcagcgcatccccgaggccagcctcaacttccagaaggtgccgcccggctcgctgaactctcgggactttgaccagaacatgaacgacagctgtgaggacgccctggccaacaagacgcggcctcggaaccgagaggaggcacggtgcccactaccgccacggagctgggtgtggggggagcaggggcggggctcctcgagggcggggccatgctgaggccgggctcttgcaggtgatcttcgataacctgatgctgaacccggtgtcccagctgtcgcaggccatccgtgagaacacagagcaccttgccgagaagatgaagtgagtcggcttcctggctgaggtggacgcccagacaccagcacagctgcatgagctgagactcagcctggctgaatccctcaagggcagcggtttcatgggtactcgtgtgcacctgtggagcagccctcccgtgtgcacgtgtatgtggctcccagcaggcagaccctgaactcagaggagccagcgcctccagggcggcccttcctccccttctcccctagccctcatcccgggcccagccctccccaccgccgagtgtcaggcacagatgggactttggtgcccttcatgcatcaggcctcagtttcccccttaggcccaggtgggctgggatgaacttcaccatggcagaggaggtctgggagaattgtgcctcagctctgtcatctctgtccttgtccccccatttctgcctccccctacctcggacaggatcctctttcagaacacagggagagcttgggaggacctggaagccaggatcaacgccgagaacgaggtgcccatcctgaagacatctaacaaggtgagcgctggggccccgtgccccttggcctgcccccagccagcctgcctttgcctggctggccccaaaccttgtcccagctcctgcacacagagccccggggcagggctgcagcccgtcagaagttgactccacctcccttcctgccacgtttccaggaaatcagctccatcctgaaggaactgaggcgggtgcagaaacagctggaaggtgagtgtggcccaagcctggggcagcaagggaggctggcagggccttgtggggaaccctgactcacagggtgggagcaggtgaactggatccgcagcctgaccctccctccccacctccagttatcaatgccatcgtgg

SEQ ID NO: 78300 - DNA, 1342 bp, Homo sapiens
gaagctcgcagcttggcctgcaccacacgccctccccttttggcttcacgccatcaggcctcaagtgggcatgggggcagggacgggcccaggaactgttgttttctcaggattctttcagctgggaacatggcaggtgagcagagcttggtgcctctgccgtggcccctgctggggcagcccgtgttgccggagcctctaagccaaagagcccgttggccgtggttggtgggggtggacgtgggggtgtcccacctggaccagactggcgtgggtgagctccacaccctgcctggcaatggtatgagagtcggacctggacagggccagctgctgggggagcggcactggggactggaggctggaagcgggtggtgtgtgtcccctgtttacttttagctgagctggggttgggtgtacgggttctgttcctctgagcctgcggcccacctgatgtttacgtgtgtgtgtgagggggggcgggggtggcaggtgtccccccctggtccccgccccaagagcctgctgtctgtatggaggaggtgctagcccggtccaccgggctgctgcccacccctgcatgccccagttgcccaccccgcctgcccctggacatgaagtggtcacgcttcatccacggctccttcccacccctcggcagtggctgtgcaatgttttaagttcacaagttcctgctcctccccacactgagctcctttgttcctccccctccagcctttgcctgggaactggtccttgtttgccgggcttctcggagggttcactgtacattcgttctcaggtggtcttgtggctgtctttcggaaaatggttattttatatgatttgtcatggaatttgttctaataaatcattcttctatcacatggcagcacgctggagcctgtcaccttggccttgtttctctatccttggtgtttggggtgggtggggccctgcacataggacagaccaggggtggctgcaattcagagatgctgccaccaggaggcggcctgggctagaaagcagcatttccagatgtttactcctaaaaaacagaagagttaatttatgaaaactgttcagtgagacagcatccgagagcgctgtttttgtttgtttgtttgtttttgagacggagtctcactctgtcgcccaggctggagtgcagtggcgcgatctcggctcactgcaagctctgcctcctgggttcacgccattctcctgcctcagcctcccgagtagctgggactacagtcgcccgccaccacgcccggctaattttttgtatttttagtagagacggggtttcactgtgttagccaagatggtctcgatc

SEQ ID NO: 78301 - DNA, 1048 bp, Homo sapiens
caatggctgagttccagcagccactgtgaggccatgaaggcagggatcctagggactgggatctgagagcctggctcccaatggcagtggagcaatgccatcatctctagcaaggccgtctctagcctgccagcccctggacctgcttagtgttcgagagtaatgaacaaccttgctgaagccactgttccttaggtgtctgtggcctgcagctgaacttgactccgattcgtaggcccgcaactggagggcctctacctcgagggagtggggtgtagatttttcctggaggtgaaggttctcagccctaccctctagcccgcccacccagctccagccgtctgtttctgtctcagatgagagggggcctctcaggacaaagaggaagtagctggaaggggaaggagccagctgcagagaggaggaggtgagctgcagagaagaggaggttggtgtggagcacaggcagcaccgagcctgccccgtgagctgagggcctgcagtctgcggctggaatcaggatagacaccaaggcaggacccccagaggtatgtgccaatgaggccagggcagctgagaaaagccaggcatggggaaagggctgctgtctgcctccctatggcctcagcctcccagcaaccccaggtccagagagtcacacagcctccagctagtcctgtagatgactcgctccgtccccagtccgtgcagctgggataagctgggccctggctctccagccaggtgacagctgggccctctacctcagcctgggactggcagccatgcctaatgccctgcagggcaggaaatctggcaccttcagccatgacctctgatgtctgcagggtcttacgctatctaccatgggaccagggggctacagccctactctgcaggggtctctcagcttgagccaacctggctggcggtcctcccaggttccattgcaggaggaggtggtgaggcgctctggggtctgtagtcctgggaggggacttggacaggctccaagtctgagatggggcctgcaagaggcagcgcctct

SEQ ID NO: 78302 - DNA, 1050 bp, Homo sapiens
aggcagcctacataggtgagcgcgatcagatcacggcgggcgggccccagggtggccaggcacgggcgagggaggcactggctttgtgaccggcgtggacacctcaggagggaggggctgctgctgaagggggacggggtctccatggagttccggggaccaggccacccgcctgtcacctggccccacagggccccagaacactgagtcaggacgcctgtccccaagtgatgaaggtggagttctaccgcgaccagctgtccctcccgcacctaagcgaggggcttccccggctggagtctgatgacagtggaggggccagctgccaaccgtccccaaacccgtagccgggcctggcgctgagcgggctgcagaggggcctgtgggagccggcgccccagtgtctcctccatcctccccgcaggcacctccaactggtcggaggattacttcagcagcacggcgggggtgggcttggtggtcacccagagccctggcgcgcagcccgcgggggccacggtgcaggagcagctgcggcagctctttgagcgggactggagttcgcgctacgccgtcggcctggacggacaggctccgggccaggactgcgtttggcagggctgaggggggcctctttttctctcggcgaccccgccccgcacgcgccctcccctctgaccccggcctgggcttcagccgcttcctcccgcaagcagcccgggtccgcactgcgccaggagccgcctgcgaccgcccgggcgtcgcaaaccgcccgcctgctctctgatttccgagtccagccccccctgagccccacctcctccagggagccctccaggaagccccttccctgactcctggcccacaggccaggcctaaaaaaaactcgtggcttcccggtgcctctgtgtgagtcccgcgcgggcggcccttcatcctcttgccaagggcccgcctctatgcgcccgcccctgcgaaactgcgccgcgcgaccgccgtggcagcgcctcagctagccccgggtccgcgagaacctggggcggggcgggg

SEQ ID NO: 78303 - DNA, 1054 bp, Homo sapiens
gatggggcagagctggaagaacaaaaacttcaagaagaaacaatcacgttttttgatgcccgagaaagtttctcccctgaagagaaggaagagggtgaactgatcgggcctgtgggcactgggctggactccagagtgatggtgacatccgcggcaagaacagagttaatcctgcccgagcaggacagaaaagctgacgatgaaagcaaagggtcaggcctgggaccaaatgaaggctgagaggtatggctcatcagtacaagagagatgcaaaaaactaagttggaaagtaaaggctacacacacatatggagcaccccatcccacagcacattacatccacctcacttcacagaacggagaacagagcagaaatgaccagaacacctttgtcaccatcacacagccctcctaaaatggaaccaaagcttcccagctccctcaaagctttggatgcaaagaaggcaccctgacttccacaagacaccagaattcacacggtactcagaggcactgctggggaagtttgttggtctttattagataaatttccagagacctgtccataatacccaacagaacatgactgtttctttgaggaaagggttataatgtctgtggtgtacaagtcgtttttggtataacttctttcctgctgctgctgcttcccggcaaacatagttttcctatttcaggcagagtgcggtatattccaggaaacactgtttcctactcacttagcttacttctttgttgaatgcctcactaatggcaagtttcaagatgttttgggtgacaatgcacacatgctgggcaaaagggtgatggccagtggctggcagctgggccagcagaagctaggacatctgtgagttgtcattctcatctatccatgtccactggcctgccagcatccgccagtgccttgccagtgtgcacggtcccacactgtggcccctgagtcccctaatgtacacgctgcagccagaatgcagatggagctggcttggctgttccctggatgggcaataaagaaagtgctgcatcccatgct

SEQ ID NO: 78304 - DNA, 1313 bp, Homo sapiens
ctcaagctgagagtcactctggcccactgaattccatgattcctgtttctcttggtcaggtatcttttcctaaattctataaaccaaagtttgtgttttcagtcccccaaatggcagttcctgagggagacctacatgcagcagtgggtgccccagtcatgtctcctcttagccctggagaaagagtgcagtgccccttgccaagcacccagctgccatccccaggcacctgtgtgtctcagggcccagaagagcttgtggcctccttgcagacatcagtagtggcccctggagaagccccttctgaagatgctgaccacgaagggaaagggagtcccttgaaaatgcctaagattaagcttccatcatttaggtggtccccgaagaaggaaacagggccaaaggtggacccagaatgcagcgtggaggactcaaaactcagcctggttttagacaaggatgaagtggccccgcagtctgccatccacatggatctgcctcctgagagggatggagagaaggggaggagcacaaagcctggctttgccatgccaaaacttgcacttcccaaaatgaaggcttctaagagtggggtcagcctgccacagagagacgtggatccttccctttctagtgccacagcagggggtagctttcaagacacagaaaaggccagcagtgacggtggtaggggaggacttggtgcaacagcaagtgccacaggaagtgagggtgtgaacctccaccggccacaggtccacattcccagtttgggctttgccaaacctgatctcagatcctccaaggccaaggtggaggtgagccagcctgaagctgacctgcctcttcccaaacatgatctgtctaccgaaggtgacagcagaggatgtgggctcggggatgtcccagtgagccagccttgtggggaggggatagcccccacacctgaagatcccctccagccatcctgtagaaaaccagatgctgaagtcctcacagtggaaagcccagaggaggaagccatgaccaagtactcgcaggaaagctggtttaaaatgcccaagttccgcatgcccagccttaggcgctctttcagggacagaggcggggctggaaagctggaagtggctcagacacaggcaccggcagcaacagggggtgaagcagcagctaaagtcaaagagttccttgtttctgggtcaaacgtggaggcagctatgtccctacagctcccagaggcagatgcagaagtgacagcttctgagagcaaatcatccacagatattctaaggtgtgatcttgacagcacaggc

SEQ ID NO: 78305 - DNA, 1575 bp, Homo sapiens
ttctttgaaaacataaaatatgaagatgctctcaaaatccttcaatattcagagccgtacaaggttcagttcaaaatcagacggcagctccctgccccacaggatgaagagtgggcttccagcgatgcccagcacggcccacagggcaaggagaaggaggtgagaccactatgcccggggggcagggccccagctggcttcactaccctgctggctgagcctgggaggggatagcactcccactccatctgtccctgggccagggccccaggcttcttggactggcaccaacagattccctctccctatgtttcaggacacggatgttgctgatgggtgcagagagacccccacgaaaactctggaaggagatggggaccaagagagactcatctccaaaccaagggtggggagaggcaggcagagccagagggagaggctctcttggccaaaatttcaatccataaagagcaagcgggggccgggaccccagaggtcacacagctcgtcagaggcctacgaacctagggacgcacatgacgtgtcccctacaagcacagacacagaggcccagctcacggtggagcgccaagagcagaaggcagggccgggcagccagaggaggcggaagttcctcaacctcagattcaggacaggctcgggacagggcccttcatcgacaggacagccaggcagggggttccagagtggggtgggccgtgctggggtcctggaagagttggggccctggggtgatagcctcgaggagactggggctgccacaggcagcaggagagaggagagggcagaacaggatcgagaagtgatgcctgctcagagcatgccattgcccacagagctcggtgaccctagactttgcgagggaacccctcaggaagggggactcagggcagccaggctccatggaaagaccctggaggggcaggcacaggagacagcagtggcccagaggaagcccagggcccagccaactcctggaatgagccgggagggtgaaggcgagggactgcagagcctggaaatcgggatcgccagactgtccttgagagacacaaccgaaggaggcacacagattggcccaccagaaattagggtgcgagtacacgatttaaagacaccaaaatttgcattttccacagaaaaagagccagaaagagaaaggcgccttagtaccccacagcgagggaagagacaggatgcgtcctcaaaagcgggtactggcctgaagggtgaggaggtggaaggagccgggtggatgccgggcagggaaccaaccacacatgcagaagcacagggggatgaaggagatggagaggaaggactacagaggacaaggatcactgaggaacaggacaagggcagggaagacacagaaggacagataagaatgcccaagttcaagataccctccttaggatggtcgccaagcaagcacacaaagacaggcagagaaaaagccacagaagacacagagcagggaagggaaggagaggccacagcaacagctgatagaagagaacagagacgcacagaggaaggattaaaagacaaaga

SEQ ID NO: 78306 - DNA, 1046 bp, Homo sapiens
gtgccctgcagctcttgtgagcatgcgtatgggctgatggggacaggcctcatgttactgtgtttgtgtttcaggggcacagggtgtgtgcatccctgcacctgtgtaacacactcatgctgtctttggggacagggccccatggctacctctggagacaaggactcggggaagggatcagaggaggcatgtctatgaaaggattcatttttgtacaatttgaatttcttatctccctccatacaaaactccagttgctgtggggcttccctatgggcgctgtgggctgtagggtgggtgctgtgggctgtaggctgggccctgtcgggaagcaggaaggccgagagttgccttttctctgtggatgtgcctggaggaactcggctgcctctgcacacagctgtgtgttggaagttctgggcccctctgaagggagggctcctggtctggcaccagcctacctgtgcccctccctgtccctgagctggggcaggtgcctaactcccaacacttgtggctgcaggaagacgcccccggcaggcaaggttctgctgggagacggagatcctggtggaagcgagattcaggggactcacggacatttttcaggatgagtcgtccagaggtgggtacagcaggagctgagggtcacagaggtgtgtcggtcctcaagggatccagccagagagtccgaggtcagagcaggcaggggaggagcaaagaggctggcagtgtgccccgtgccctggggaggaggggtgttcttgtcccccttgtcaggcctggggaagggcaggggctccagaaggctacatctggtcctggccctctccacccctccctggggtggagtctgatgcatagccaagctcctggccaggtagacctggctgtacagacctcgattttctcctccgtgcaatggggcagtgctggtgtctgttgcatattcaagctgtggggctgaaaaggccagtcagcacccaggccatggaactatggaaggtgctagactctgctagcacccaatgatgagggcactctgc

SEQ ID NO: 78307 - DNA, 1046 bp, Homo sapiens
gctgggcctctgggtacggcgctgactcagccagccctgccctgcctggctgagtgtgggtgtcaggtggtaaacagtaaacagcgttcccaggtgagagctgtctgggagtgtccctggagcagacgtggccagctttcctgcctccgtgtaaatagagtcgttttctatctttgtgaccgttaggtttttgtgtcagcctttttagggtattgcaatggggggaggcccagaaggggcctggaatcaggtccccacctttcaggcctgaggagcccctgaggcctctcccaccccatttgccggcaagtgcccctgccctggggctgggacagagccttccctgcccttgaagtcctctggcctacttgaggaccccttctctgtgtgcccacctcaggccaccctggcatcccgtggcgggggcagccctctcagctgcaccttcccacctcttcccatgccgttggggcctggtgcaggtgcaagccgttccatcgctgacctcccaggctgggtctgacccctcgctgcccctaaggcctgggctgggcctcggctgtgtgggcctgctccagactgcctgttggaggcacgtccacacccaggctatgggcacagggctggcacactgggatcccaggggggctacacgtagcacagctggttgagtcctgctggagcctcctggctgcccagagcaaagaggagtgggggctaagggcccagggtgcagcagggtgaggtgaccaggaggtgggccaggcagctggagctctggatagtgggggacttggggtcatgggactcaggtgtttctcagccaccacttgtattgaaatgacggggaaggatgggaggcttgttaaaaaaaaaagctaggccagtgcggaggctcacacctgtaatcccagcagtttgggaggctgaggcagaaggatcacttgagcctaggagtttgagactagccagggcaacacagggagaccttgtctctacaaaaaatttaaaaattagccaggcgtgctggtgtgtgcctgcagccc

SEQ ID NO: 78308 - DNA, 1712 bp, Homo sapiens
caccgcctggccgccgcgatgtgcgactgcttccacatggtgctgcccacctggcccggaacccccggcagcggtgcgcccctccccgcctgcagcccgctcccctggggcgggtgggctacgcgcgagggcgcgcgccggggcgtgtccaggggcgcgcagtgcgggccttgggggcgggggactcggagacgcctgcgggactcgcgcgtggttctgggccttcccggccgctggagtctcttctcccatgcctcgcgttctacctgtccgtggctgtaggttcctgctcctctcccggcctctgagactgtctctgtcgctcactttgtttctcggtggctgactcgtctctgtcgctcactccctctgtcactcgcggtccctgtctgtctctccttctcgctcctgccccgctcctgggacgctgtctggtcgagaggcggcctcctgggaggtgctaccgcactctggagcagggctggtgtctgcaaggggcgtgaaagccggggccgccgggacccggggcacctgcaccaggcttgccctctcacctgctttgcgggagagcagccaggctggtccaggagtctgggctctccactttggtccggggcttccaggcagggctgggctgcgtctactgtgtggctgtgtggtggggtcgctggctaggtggaggctgtggcagggctaggcctgaggtctggggcctggtgaggggcctgaatggggtcaaagtcaggccacagggtcccgcagtgctgggcaagggaaagtgggtgctacctactggcatgcccccagggatggtcagtagcctccctctgagccgcaggctacggcatgtgtacctgctgctctttgtgtgtctgtccctgcactgggcctggttccggggcctgggtgtctcagcatcttggagggcagggctgaggggggcagggcagtcccttgggcgctgggtctatgctgctgcagctgaccacacccagggcattggcagccactggccagggggttgggctggccggcactggtgcaggctggaccccactccttggggaaaacaggtcaatgctaatggtgccgacaatgctgcaggtgagaggggtgcccctggcctgggcatgccccccagctgcagcaggcactaccaaggcccctcctgtggcctgtctgtctggtgcgcacttagggtgggaggcttgtctggggggctccagagcagggaggcccctacagcacctgcttcacggtgtcgcagatgggagcccaaggtgtttgggcacagcagcgggaggatgatggctccggtgggctggaggcccctggccccctcctctttcactatgactggccctgcccacatggctgcaggtcgacctcctcagagggagaagggcagggcccccaggcatgggaccactaccctgcccccagcttccctgcacagcctttctgctctgcttcctcctcactcacgggcacccagagactcccaagctgcagggtccaggaccatctcatccaccccctgcctccacagaggcttgtgctggcttcatggttcccagcccgtctggggcagtccctccctgtgtccagcctacggaaccatccgctcttagggaataaggtcagtggctctcgctggagctttggtaggagacttgcaagatcagagaccttgggagttctgtccagcacac

SEQ ID NO: 78309 - DNA, 1147 bp, Homo sapiens
atagtaacactaatggtatgatcaattacaaatttcatttctatcacaattatttctttggaataaggtaacgttatgtatgtctttctcctaactttggtatgcttttcttcttttcttttcagcccattctcagctatgagaacattttaaagtgtgcttttcaagaaataacagtccagcaggcagctgaagacgtttccaccatagaccatttcctagaaataagcagtgaagaaaaacctggcgttgaacgtgtacataaattgtggtaatgaactgaagaaatatttcttacagcaactgcttttgtacttttgtttgataaaagtaggtgtgtgaggctttgtttttgcctttatggagagtagcatctctcctgaggtccctgccatctgtgggtcataggggtcctatgagaaggggcagcacgattggcgctccagctgtggccttccactctgagccctattcatcctcctccccagccagctcacctggagcagctggacccaagcccagctccccttgggtctcagtgccagtgctggtggagtgggtgggggcctcgcattcagtgcgagtggctggtgggcctgggcagtgggcacaggggccttctgggggacttggctgagtgggcaccggctgcctcatggttctcagccacagagttctagaaaacgttccacactctggagccccattgtcagccccaggcccagccccaggggtgctcccggtgctgcctgcagggccacaggctcctaggggaaagtgcacccgcagtcactcgcagatggccattttccagggacacactttcaactgagcattgaaagacagacagcgctcgagtggattaggccgcagtggttgagaagctcgaggtaagttggcccaaggccccagagggaggagggaagtgaaggttggggtgagctagcttccctgtccctcggtgtggtctgcggagtgggtctcccagcagccaggggagagccaggtcagcctgctgatttttgtgtctctgagcaggcctggactttcagagagctctgcagacaggccattctgggctccagccctggcccaccgtgtcctctgctggggtccaaccagcacctgccccagggtaccctctaca

SEQ ID NO: 78310 - DNA, 1094 bp, Homo sapiens
gcccatcactgtgcacatcgcactgataccacagtgacatggaggctatggtcccctgtgtggccttggcaggaaaagagacagccagggtggctgcttgcttaagacttcaggcctcccctggggacaggatttcaggtatcagtccccccagctgatgaaccagtgacaacaggcttatccaggtggttttatttagtaaaattttacaaaagtcagggctgacttcttggctctgcccttcgaagagcacagttttccttagcagataactgggggaagccacgggcccaccagaggctctcgcaggccagtggtgcgacctcctgtccacaaccgtgagggacaaaggcctgtccttgaggctgctgggcaggggcccaggcagtaagtgagggcacctgcgaggctctgaggacacagcacatctgtacaccctcatggtgccctgaccacacagcagccagggcagagtgtgacagacagagggtttctgagcggtctcaacagctgtctctctggtgacgtttcagtgccttccccttttcctctgaactcatggatttggccacaagttgctccccctggactaagcagcccagaagccatgcccagggtccatccctgggcaaccccccaccaggtgccagcagcattcacatggggcagggggcccatgagtgccacctggaccccgacagcctgtcatggcatccagaaacctctgtctccccttggctctgccaaggacacatcctccatctcctggtcagacccgagacaagcccagaacacaggacaggtcctgttggagagatcccaggaatgggcctggggtctggaaaacagctccacagacagctctggtttccacatcaacccagccaggaagaaaatgaaaaattcctcataaaggtacaaagtcctcctgattttagcaaacgtcgctattaaagagtgtcagtttgagcttgcgtggagtgaacatccttttccttggaatagtgatgtgctggccacctccgcatgagggggtcttcaggaagcggctgcatgtcatcagcctcccctgtttgctgccaggcggccccgag

SEQ ID NO: 78311 - DNA, 1056 bp, Homo sapiens
ttcaacatcccctgacccttttctcatttggggtaattgagtccctgggcttggccagcgtgcccctcgctcagctgccagggacctgcccttgctgggtggaagaaaagctggtgacagtgtgtgccattgcagcacacatcgccgactccgcgcccccttcctgattaggagaacacccagcatcagctggcgcagtgacatcaaagactacgtttcctagcctccctcgctgccagatgtggtcacaagactacgttgggcccaggaaagagggaagatggagcaggcgaactgggtgggaattccgggaattctccacacaggggacgggccgtgccctgctctccttcgctccttcctcattcctggaacacagatgtgaaggctggagatcaagttgccatctgggaccatgaggtaaggctgggggcttcccatggctgtggaggctgtcgtgccagccctgagaaagaggaaactctgtggattaggtgggttaggcatggtcgtctgggttttctggggtcacaggcagcctctccctggcctcactaggacacactatgactgttgaaaccatgactcatgattcacattgggggtatgccctggtcaaaggaacatgcgctggcaacaaggagtttcagaatgatccagttcttgggttgacacttctcaaaagcccctatcttcccctgcctcttctgtctcggggaggctgtcttcaaaatttccctaaaaaccccttccctggctgagacctggggcctcttgccttcttaccagagcagctgtcccccaacagaaacctcaggacacttccgcctttcctcttcccacttggcctgtcatccggtccccaccccctgcttgcatcactaacacccaggggtgggagaggccaggacagagccctcctccaagggagcgaacaaggagtcagaaaaggctgggaagacttcttccgagggatggaatcaccatctgagcagaggggcccggcgagacgtgaatacacagacacacctgatggagggagggatggaatcacca

SEQ ID NO: 78312 - DNA, 1929 bp, Homo sapiens
caaccagtgggccccgctcaaccccatccgcaaccccattgagcggccggggggccacaaggacgtgctctaccagtgcaagaacttcacgccgccgccgcgcagggcggacgaggcgctgcccgggccggccggccacgcggccgtcagggaggatgaggaggacgaggatctgggccgcggtgaggaggactccctggaggcggagaagttcctctcacacaaattcaccaaagatcctggccgctcgccggggaggccggcccactgggcctcaggccccaaagtggacaaccgcgcggtcaggagcatcaatgaggcccgctacgccggcaaggagtaggggcggctgccagctgggccgggacccagggccctcggtgggagccatgccgtctgccggacccggaggccgaggccatgtgcatagtttctttattttgtgtaaaaaaaccaccaaaaacaaaaaccaaatgtttattttctacgtttctttaaccttgtataaattattcagtaactgtcaggctgaaaacaatggagtattctcggatagttgctatttttgtaaagtttccgtgcgtggcactcgctgtatgaaaggagagagcaaagggtgtctgcgtcgtcaccaaatcgtagcgtttgttaccagaggttgtgcactgtttacagaatcttccttttattcctcactcgggtttctctgtggctccaggccaaagtgccggtgagacccatggctgtgttggtgtggcccatggctgttggtgggacccgtggctgatggtgtggcctgtggctgtcggtgggactcgtggctgtcaatgggacctgtggctgtcggtgggacctacggtggtcggtgggaccctggttattgatgtggccctggctgccggcacggcccgtggctgttgacgcacctgtggttgttagtggggcctgaggtcatcggcgtggcccaaggctggcaggtcaacctcgcgcttgctggccagtccaccctgcctgccgtctgtgcttcctcctgcccagaacgcccgctccagcgatctctccactgtgctttcagaagtgcccttcctgctgcgcagttctcccatcctgggacggcggcagtattgaagctcgtgacaagtgccttcacacagacccctcgcaactgtccacgcgtgccgtggcaccaggcgctgcccacctgccggccccggccgcccctcctcgtgaaagtgcatttttgtaaatgtgtacatattaaaggaagcactctgtatatttgattgaataatgccaccattccggcctcccttgttctttcggtgctgtcccttttgtattgagagtgaggttgggggagagccacgccggcagagaggcttggggcagtggggcgcgtgctgggtattggcccacgtggctgtggtggctgtagagggcgagacggttctgttgagtcggggcctgccagggcctcgaatgcgttggcatgccaaggtggtggatgcaggtttggccaaaaccttcctgggaatggggaggggggtgtctaggtgcctggcacccgaccctgactaaaacagctgaaaacagttttataaaatagtataaaattgcttacccacgaatacgtatcaaggtcttaaggaattaacaggtcaaaatttttattcattcatttattcctttgttttgcttggtcattcagaggcaaggtcagcatttgatggaggcaggagagaagcagcccttccacctggccctggagctggttttgcccctcactgcttgagccaactggaacgtggcatggtggcctcagggctgggcatggaaggccgactccaaggctgactccgagccgcctgtcagtgatgtgcaagtctttaccctgctgtgaggggtaggaggtcaactgagtcaaggagc

SEQ ID NO: 78313 - DNA, 1017 bp, Homo sapiens
gaaggtaggccccgtgtgattgccctgggttggggcgggttggggggcatgggtgacacccagccccgagggccagatgcccactgctgaccctcgagccccttctccccacagtgatcgggttcgggagatcctgctggtcccggggcactccgttcccacacggaagctcctgggtggaagactgcaacagctgccgctgcctggatggccgccgtgactgcagcaaggtgagggcagcccgtgagccgccctgccctacccgaggctggtgcacgctgaccctggccactctgtgagatcaggaggcgggtgctggggtccggatggactgagagccgtctgccctcagggacacccagggaggcgagagctcagccaggccccatgcttcgatgtgcagttgggaaaacaggcctggtctgggtcctgccttgctccgcctgccctttctgatgtcgagcttggcctgcctccctgggagccctgggtagggggtgggctgggccctggggctcacagacttgggcggtgtccctccttggcatggggcccgtgcctgcctgtgggttctcatctgtgtgcctgcatctgaccctcctgtgcgcctgcgcctgaccctcctgtgcgtgcctgcccaggtgtggtgcggatggaagccttgtctgctggccggccagcccgaggccctgagcgcccagtgcccactggggcaaaggtgcctggagaaggccccaggccagtgtctgcgaccaccctgtgaggcctggggggagtgcggcgcagaagagccaccgagcaccccctgcctgccacgctccggccacctggacaataactgtgcccgcctcaccttgcatttcaaccgtgaccacgtgccccaggtgaggggcctggtggcatctgagcttgcagaggccacacgccggcatctgctcgtggcatggcgaaagcctagccccgcagggcagggaggccctggttggctgagcagagtcactcttggtcacagagagt

SEQ ID NO: 78314 - DNA, 1048 bp, Homo sapiens
acttggccaccccgtgcacttggtggaggccgccagcgtggtgatggggccccacgttctcccccgtggtcacccccagtgaggcaccaaggggcgttccacaggaaacgctcgggtcccggctgcccatggggcccctgtctgtggccactccagccaggctgccctttgcccacctctccccccggtcgctcttcctgtgctccgtgctgacttgagccagctcagggcaggctgggcctctggcaccccaacggtagggagcccaggcccctgagcccgcgtggcctggaggggcagtctccctcccttgagctgggtcatttttgggtctgcagaggatgtggcctgaggatgaggagggtggtgggtccctggctggggaggaagggccagagcctggcagacccaggggcagcgtctgagccctgggccttgtcccaccctgaacgaggcaggcaggtgtggcctcaggtacctgacccgcctccccatgtctgcagcgctcctttaccctcatcgtggaggcctgggactgggacaacgataccaccccgaatggtgagtgagccctgggccaggtggcagctcctctcagcttcagcgtgcctgtggcagggcccagctcctctgtctgcttgggacaaagccttgctttaccctgaggatcatgtgtgctgtttccctttttgctttggctgccaggaagctctgccacgtttgggacttgcagagctgtgcatgcactctcttccccagtcctggctttgcctatgttgttctcctcttgggtgtgctcttttggggcccatggcagtgacttagtggaggggacacccttgagtgtgtctctggctttgtggccccctctgcttgtctgtactggagcatggagccttggtggccctctccctgaggcaggggctctgcagggccctgcaggggtaacgggatgacttccatgggtgaatgcagaagcacccacaggccaagggagcagctcgtgtgaaggtctgggcaggagcgggctggctgtgcagggggagca

SEQ ID NO: 78315 - DNA, 1099 bp, Homo sapiens
agtgccctgagctttggggtgccctggactgtgggtacactgggccatggggtgcacaaggctgtggggtgtactggatctagggtgccctgggcaggagggtactctgtactttgggtgccttggacctgaggtgtcctgggctttaaggtgccctggaccttggggtgtgctgggccatgcagtgctttggggctctggggtaccctgggctttggggtgccctggaactggggtgccctgggtcttggagtatgctgggccatgcagtgccctgggctgtgggatactctgggctttggggtgccctggacctggggtaccctgggctttgaggtgccctggcctggggtggaacatctattgtcttgtctgcctgtcctctggcttgtgccactgctgttgcccctgcctggggacaggaggaggggtttagacttagccttgagggttcgggctggggaggaggcaatcagatggtgggagatgaagttgggctgcgggtctgcttgtgcggtgggggtgggtcaggccgggcttgtagggagaggcttagctgggcctgcaggggtgaagcccttcccccttggcctccagagactgggcaggggcatagccctgctaggctggccttgagggagggcctgggttcctctccctgcttgccggggaacctgggcaggtgatgggtctctcacctgtccccagacccccagcccacacatcgcctattgcccctgccagcgccaggcccacatccccacatgtcccagccccgttcctagaagggcaacatgcccgccaacccccgcccaatccaggccctatagtccctcctgtgttctaggggtttggtgttgacaaaaccctgtcccagatcgtggcccgccaggcaggaaggacaggggtgagaggttgctattcgcagaggaggcaactgagtcctggaaggacaggggtgagaggttgctattcgcagaggaggcaactgagtcctggaaggacagggatgagaggttgctattcgcagaggaggcaactgagtcctggaaggacgggggtgagaggttgttattcacagaagaggcaaataagtcct

SEQ ID NO: 78316 - DNA, 1035 bp, Homo sapiens
caccccgggtgctctgtaggcatggcaggtggtgatggaggtttggggaggagtagtgtcatgctgggggcagcagggagctttgctctggggcctggtaggtggcaggcccaggggacacctgctggctgagggaggagcagggtggtggcagttggccgtgacctgggcagccagggccccaccctcagaggtgcagctggaagtcgtgcctgcctggctggcccatctctggagccaggagcccaggagcctgcctgccagcgagggtctttcttgttctgtcttggcatgtgtgtgctgggctccagggcagctgtgcggggtggtgtggctggagcatggtccccgtgacagatctgggcttatgaggagaacgggatgggtgaaggccctgtagatacaggaggtgggcctggggctgaccctgcgtctatcagctcaggaggcctgaggtcctgggccatcagaagggctgagcttttctcacctgtgaaaggggcacactgccgctttttcattgcaggtctcacgaagtcagatggggctgctggactcccagctcgggctctgcttgtgcccccagcccggctcccagacctgtccagttcctccccttcccagccttccctaccctctcctttgccccctagggaggaaggtttttacagagcccaccccctgcatccagccgccctagggctcaaggtgggccaggctgaggtctgtgcctggagctacctaagctgctcgtggcaggtgtgaggttcagcaccactctgcttcctgttttttctgagcttgggctggggatgacagggccctggcctccccaccctaccttcaggggatcctgtctgcacactggggaccacccccctccttcccacaccttcccagtagggaccaggagagctggctggtctggtatggaatgtgggcatctgggttcctgtgttgggtgggcatcggtctgttcctcctgccatggccctggggcccagagccctggggagaactcagggcatgtccgcc

SEQ ID NO: 78317 - DNA, 1016 bp, Homo sapiens
ggagccaaggagggctctgggaagtaggcatcctgcttagactcgcatcgggaagagcaggccgtggcttcagggatgcaggactggagatgctgctgactaggggtcagggtgtccgtctctgagggcctgatggggggctggactgacagcaaagttcacccaccctgtggcagggcccgtggctccctgtctctgattctggaggtgagccaggcctcttacctgccgctgcaaaggacaaggcccagggaggcagtcagcttggggcgtgatggagtgaagttggaacgtgccctggggtgggggaggcgttgcccagcctggctggcagattcctctcagcccgggccaagggccgggcctgtctccttcacaagccggcggaaaccggggctggaaaccccagacccgccacttccctcagaggcgcagccgcggccgccgccggaaatgggccatcaggaaggggtctgcgggaggtgaggggctagagggcaaggaagcagctgggtaaggtcggtctggggtgagtccccccggaggtggggaggccttgggggtggggcatggaagcccccagttctgtccctgcccctgtatgttgggtacatctcagagggcggcctctaccctgcaggcctccggctggccttggttcatggcacccgacagcccctcctgcggcgagccagggctcccccaccccctggtcatcttcccagatgcccctcagtcccgtttctccccagatccacacctggccctccccctcctgttccagaatgcagcccagcccctctgccatcctgtcctcctagcccgtggtctccctccacacacgccagtccaggctccttcccttggtgcctgacccctcctggctgccagcagcccccttctggccactgcccactgagggagggggcttcctcttacccctccccagcctgggccactgggcctggtactgaggacctcgctgccaccccaccccactctgccatgctacgggg

SEQ ID NO: 78318 - DNA, 1086 bp, Homo sapiens
aaataaaggcatcagctactgcccctcatgatccctgaacttgggcctgttagcttcaaactaaatttctgtttctccctggaaagaaatttgaactaagacattttgtaaattggtcatgtcgattgtgaggttggaggcagccagggtcagagaggctagggacggtgaggtacccaccacgagggccgcccagccagcagcacgaggttcccggatctgcacaccaccacggacctgcacacccagggagggaggctgagggagcccacactgctctcaggtgccctcgacgaggagcaaggccctgctctgggtgcatgccagtcccgggaggtggagaggagcccaagatggctcctggcggggcgcggggggctggggctggggctggagcctgagtcttctaggggggcaccaggaacagggcgggttggggggtctgggctcctgggtcccacagagaccctgggcttcatgactgtgctcttctgcagactatggctgtgatggcgatgaggacgacggctactgaagtgtggcctccaggcaggtgatgtcctggcagggggcctcgcgggtctcctcagcatcagacgggcttccaggaccgcagcaggcaggccccagcgccgagactcctggtgacaggtggcacctgtcccacagccctcgtcccatgtggaacttaccattgggattgtgtttctattcagcaagggaaaccggaccaagcgtctgcatgtgtgtgatcagatgtgggccgggtgtgtgcagggctgggtcccgctgcctgccgtcgactcatccaaggaccctccaaggctggcagtgtggtgttgctactattaaggaaacaggcttggggcagccccactgctggtccaagtgtgtggagggctgagtgtgctggccctgtgactcaggaccagctctggagtctccagcccaccctccgcaccgtcccctcctgagcagcactcggcgccagcagcctctgccagagtggaagccagagccctgcaggtgtccggcgcagccgtgggagctgaggatctggcacttgagaggcagcagctccttgaa

SEQ ID NO: 78319 - DNA, 1090 bp, Homo sapiens
acggagacctggcggaagtcaaatctgaaattcacattccagacgtggagcccgcagcctttctgatcctcttaaagtaagtccactctactggggagggacgggtgggtccgttttaggcggcctccggaggcttctgaagggaagcacacaggagctgatggactcctctcccaggcccagccccgcgatgggtgcttgggagccagcccctgacgcgggccctgcctcgcctaggtacatgtacagtgatgagatcgatctggaagccgacacggtgctggccactctgtacgctgctaagaagtacatcgtcccagcattggcaaaagcctgtgtcaactttctggagacaagtttggaagccaagaacgcctgcgtcctgctgtcccagagccggctgtttgaggagcccgagctgacgcagcgctgctgggaggtcattgacgcacaggccgagatggccctacggtccgaaggcttctgtgagatagaccggcagacgctggagatcattgtcactcgggaggccctcaacaccaaagaggcggtggtcttcgaggccgtcctgaactgggccgaggcggagtgcaagaggcaggggctgccaatcaccccacgaaacaagaggcatgttctggggcgagccctctatctggtccgaattccaaccatgaccctagaggagtttgccaacggcgctgcccagtcagacatcctgactctggaggagacccacagcatcttcctgtggtacacggccaccaacaagccccgcctggactttcccctgaccaagaggaagggcctcgccccgcagaggtgccaccgattccagtcttctgcctaccgcagcaaccagtggcggtaccgcgggcgctgcgacagcatccagtttgcagtggacagaagggtatttattgcagggctgggcctgtatggctccagctctgggaaggctgagtacagcgtgaagattgagctcaagcggctcggggtggttctggctcagaacttgaccaagttcatgtcagacggatccagtaacaccttcccggtctggtttgaacacccggtccaggttgaacaa

SEQ ID NO: 78320 - DNA, 2166 bp, Homo sapiens
ttgggtagagaagcaccaggtggggctgggtcaccaacaggactgagcaacacgggctgcagcagcagaggggcaccggctgaggctatacactcggcccatgccctctcccaggtgccaagaggggccatccctcttttcgggggtcatacaggttttccagaaaacaactgcctacagggtatgcagagtgggaggagagagacaaggggtgggagagcctgtttcaccctatagtccactcctgcaacaggctgtcccgcagcagtgtcacagctagtgacagtccccagggtccagaacgctgggcccagcagaatgctcccccgacagtctgttcatagggtaggactctgaggtgctagtgatgcattaggacatagagacaaccaggcacctggtgtttcctagggtggcccagaagccagccagcaacccaggggacagatgggcttcactggggcgcagtttgctcctaaccacatagcatgttcagcatgacaggttttctcctcgggatgggagggagctgttctgttgcatgagaaagagaataccccactgtacaactgctgtagtcatttactgacacgtgggtgttattttaggcaacctttattacagaagtccactattttaagtgactttttgccaattttagatttgaagggaaggtctcaagttaagcttggaaccacttagaatccaagagggtagcaggaagatccaacccctcaaagcaggtggcatgggtgccactgggaggggatctggggcctgtcttgagccgtaaatcttcctccacctgagacgtgcaccccactgtaccagagatgcctaagactccaatccctgggttctggctgtgtggaaaatgtctctacacagtcaagcttcagctgactacatgtcaaagagagacaaagttaagagcagcctttcatggtgtcaagaagcagttagcatcttgacttcccctccactcactcgctgacctgctgcagcctccccgggcacctcaggcatagaaaatgagctcagggatctgcccaccctggaccccagtcccgttggtgctgtccgaggagcactggaactggaaggccacctttccacactgcacttccgtcatcccctcctgcccaaagtagctgagttcgctgccgtccaggacggcactggccgtgtagaaggtgtcttgttcaacctggaccgggtgttcaaaccagaccgggaaggtgttactggatccgtctgacatgaacttggtcaagttctgagccagaaccaccccgagccgcttgagctcaatcttcacgctgtactcagccttcccagagctggagccatacaggcccagccctgcaataaatacccttctgtccactgcaaactggatgctgtcgcagcgcccgcggtaccgccactggttgctgcggtaggcagaagactggaatcggtggcacctctgcggggcgaggcccttcctcttggtcaggggaaagtccaggcggggcttgttggtggccgtgtaccacaggaagatgctgtgggtctcctccagagtcaggatgtctgactgggcagcgccgttggcaaactcctctagggtcatggttggaattcggaccagatagagggctcgccccagaacatgcctcttgtttcgtggggtgattggcagcccctgcctcttgcactccgcctcggcccagttcaggacggcctcgaagaccaccgcctctttggtgttgagggcctcccgagtgacaatgatctccagcgtctgccggtctatctcacagaagccttcggaccgtagggccatctcggcctgtgcgtcaatgacctcccagcagcgctgcgtcagctcgggctcctcaaacagccggctctgggacagcaggacgcaggcgttcttggcttccaaacttgtctccagaaagttgacacaggcttttgccaatgctgggacgatgtacttcttagcagcgtacagagtggccagcaccgtgtcggcttccagatcgatctcatcactgtacatgtacctaggcgaggcagggcccgcgtcaggggctggctcccaagcacccatcgcggggctgggcctgggagaggagtccatcagctcctgtgtgcttcccttcagaagcctccggaggc

SEQ ID NO: 78321 - DNA, 1234 bp, Homo sapiens
acttaggagggtgagacaggagaatcgcttgaacccttgaggtggaggttgcagtgagtcacgattgcgccattgcactccagcctgggcaacaagagtgaaactctgtctcaagaaaacaaacaaaaaactgcggccaggtgcggtggctcactcctgtaatcccagcactttgggaggccgaggcgggcagatcaggaggtctggagatcgagaccatcctgtctaacgcggtgaaactccatctctactaaaaacacaaaaaaattagctgggcgtggtggtgggcgcctgtagtcctgactactcaggaggctgaggcaggagaatgacgtgaacccgggaggcagagcttgcagtgagcagagattgcaccactgcactccagcctgggcgacagagcaagactccgtctcaaaaacaaacaaactaaaacaaaaaaactgcacgcgttttgcacacatggctttttaaacgtgagtttccatgtaaaggccctttggagattcctcacttgcagtgttcaggtctcattgatccctgtgtctctgggacacaaggttggggggtgtggagtttgaggtgggcaggcagaggccagcagcagatcatggttctgctgtggcttaaagagagatggtgggatcaggacgatcaagatgcaggggcctggcaggaacccagcacaggggctggggcactcatacatgacatgcgtgagtcacacctagacacactgtatgcgtgtgtacacacatgcatgtctgcacactgcatgcggatgcacacacacactacatgtgctgacacgccccccagtttggtgagcagaccccagggatccctggaacccccagaaactgtgaggaggggaaattccttcagaaggcacactctgtgagccaccagcccttgtgatggagccctcggatataatggagaagatggaagctgcgccccactggggtggatggtgaccaggaggagctgctgtgggggcccagccctcccagcgggcagggtccctgatcagaggcatcccccacaagcgctgcctctggctcttgcctctgtctcttgcctctagcgcagacaggaccctttgtgtgcggtcccttaggtctcccagtaccctggagtcagcaagcacctggaagtgccactggcgggccaggacaaggggacttgtctaagggcccacgagccgggcttggtcaggcgagggaattctttg

SEQ ID NO: 78322 - DNA, 1062 bp, Homo sapiens
ggaatgcagtggcaccatctctgctcactgcaagctccgcctcccaggttcatgccattctcctgcctcagtctcccaagtagctgggactataggtgcccgccaccacatccggctgattttttgtatttttagtagagacagggtttcgccgtgttagccaggatggtctcgatctcctgacctcgtggtccgcccatctcacccttccaaagtgttgggattacaggcgtgagccatcgcgcccggccgggaatttaacttttcttgagcaagcagagagcacgcaggtagctcactctgatccagttgctgctggtccgtcttggttcccggctgaaggatcgtggcaggacccaggtgtcccttcctggcacctcgggactgcagaacttcctgctcggctcttttgcctttcagagctgacttctgggcttggcgggcctcagcctggtgcctgtggctccaggggcggcagctgccgtaaagggactaagtgcactgtgccctgctcgcttgttgaagttgcttcctcttctcttggcagcttggcccctcgtgtctggctggctcggaagccactgaactgtaaactctatcttcccttgccaagcgagactgtgagcactaggctcctactttttttttttttttttttttgatggagtcttactctgttgcccaggctggagtgcagtggtgccatctcggctcactgcaacctctgcctcccgggttcaagcgattctcctgcctcagcctcccgagtagctgggattataggtgcccaccaccatgcctggctaacttgtatttttagtagagatagggtttcaccatattggccaggctggtctcggactcttgacgttgtcatctgcccgcctcggcctcccaaagtgttgggattacaggcgtgagccaccgtgtccagccactttttttttttttaaatggagatggggtcttgctatgttgtccaggctggtcttgaactcctgtcctcaggcaatcctggcctggcactgccagactatgacagcttattagaattggcgagaa

SEQ ID NO: 78323 - DNA, 1093 bp, Homo sapiens
gccagcccaaaccaagcccttgccagacacgccgcacctcagagccctggagagaggcacattcagccacaccgcacacgccactcagagcctaaagaagggaaacaggtagaacaggatctcatggcacatggagatcacagaaaattcacatttcagtgtccttaaataaaaagtgattggaacccacatataaaaagtgagctcagaaacttacaaggaaaagcacaaatctatattcttaaagttgctgctgtggccgtgtgatacttttcatgttctgtgggaacatttggctaagagctgcctcgtgctgtgtcctagggaggcgccacatccaccacctggggaaccagctgcagctgaaccagcactgcctggacaccgccttcaacttcttcaagatggccgtgagcaggcacctgacccgcggccggaagatggcccacgtgattgctgcctgcctctacctggtctgccgtacggagggcacgccgcgtatcctttggtttgagagcctcccagagggccccatcttgatgcttagttggctcccctcgaatattgggacttggtagttgcagtaacttggtgtttgtctttaatagaaaaacaccttactggaagaactgtttcagttgatccagggctttctgaatttggggtctccttttactggatcgaagaactggggagctgggcacctgccttcctcgcacagcccttgggcatgcagagcgagggttctgtcggtgcctgagaatcatgccctggattctccccacttgtggacctactgcgccttgggtgctgtctccacgtcccctgtggttcaggccgccctctggcctgagcaggtggggtgctgttgctgagtgggctgcagccaggcgtacaccgagtgcctgcagctgtggacaccgtgactgtgggcgatgggtggggaggccgccgaccctcagcggtgtgcagctcggccttgtgcgtggataccgtgactgcaggccgtgggtggggaggccgccgaccctcagcggtgtgcagcttggccttgtgtgtggacaccgtgaccgcaggcggtgggcgaggaggc

SEQ ID NO: 78324 - DNA, 1074 bp, Homo sapiens
aagctcagagccagcgctgtcaggtggccccaagacgcctctgagcccaggcacactctctggagggaggcgcaggcccagcaaccaactgtggtggtcctgggggaagtgctgcgaggcggcgggttcttagcccctggggaccggcgcaggtggtgcctgggccgagagtggggaggagagaggggatctgttgctctgggcagcccctctgtctcccaggcaggctctctaggtgcccacttggcatccttcctccctcgtcacagtggtgatcacagggggctggaaaccttggtggcttctcagtttccctggcacacaagtaggccccagccgccccttcctccagcttcatcttgaaagctgagctttctctctgagctgtcgttttctagtcccaaggccactgtctttcctaggtgttttgcctattaattgagaactaagcctgatacagcttcgcagtttactctggaatatttaactaaggcatcagggcaggtgaccagaggcctcaggagagtccccagagggtcctgaccttggaagccaggccccacgggggaaaccacactggtgctccagcgtcccggggcacccgagcagagactgtgcagagagaagggtgggtgaggactgaggctcagcgtggctggaggggccaggcagacggtggagttgggggccgttggcagtgccctgaggaggccgtctgctccactgaggcaaggcggggcttccctgtgagcccacatcagtgtcctgcactgtgtgtgccctgaggcttccctctgccagcaggtgatggtgatggcgcccacacaccagacatcctgggctcctgcttgcaggggtccctcctcgtcctgtgcaaggagcagcacacctcagtgtcaccagaacttgtgggggtggggagcgtttcccgtaatcacaactttcagtggcttcacagttagaacttcgaagctggggtgtccgtgagtgctgctgttttccgtttggggtcacgatgcagccggacctaatttgtgacatggctgcatgtcacctggcgctggccctggaggg

SEQ ID NO: 78325 - DNA, 1015 bp, Homo sapiens
gcttccctgagtctcctgctcagtttgaaacttttgtaatttcttcgtgacttggtagttcctgctcaggaagctcccaggctaaggaggagagagacacgctctccggaaaagttctggttctagaatagacagcaggcgagaagaggaggcggttgggggtagtgagagttctccctggggagatgggagggtgagcggaccttccaggcactggaagtggccagtatgcctggaggggaccccacgtggcattgagttgttccacccctagtcagctgcaggtgggcctctccgtgctttcctgtggctcccacagcctgcatctctgagcgtggtgttggagttgcagagccgctggacagtggggcttgccctcctggagcgcagggttgggacctcggggctttggttttgctgagtggacaggaaggatgcccacccggcacgactcttgcacctggcggggcctcccgaaggacccagtgtccatatgagacctaagggtcagcatttgcccaaggtctggggccgagcactgcagatgtgcctgcttgcctctcttctgggaagtctctggggcctcaaagccaaagccaggagcatctccccaggcctggctgcttctccattccaggtcttggcgattgccccaatgtcaggtcccacagccccacagcccttctcctgtctgcccctctgagtcactgcctcacccacagccccagaaccttcatgcgggctgttggcgctcccctgctccagcactgcagcacatagcctgcccttgctgaacctctgcagcagcttcctggggccctccgaatgagcagcaaagtctttaacccaagggaggtgggggcgtgtggcaggaggggccgggggccttatcagcccccctgtggagctgtgctctattctccaggggtctagaaagcccactctggtgtctgtggggagggtatgggtagggcgggtttcgagaagcctggttaggacaggcgggggtagatgg

SEQ ID NO: 78326 - DNA, 1050 bp, Homo sapiens
cagtgggcggcggctggctggggcagtagcctgtctccagcccttccccctgcctctgtccacgtgcaggggcgtctcctcaggacgcatgttgcctactgaccgctgccagcctgcacgagactctcacggcgggaccctgtctgccttgctcggtgctgcccagagcctgcacagtgtagctccttggcggacgttcctgtaatggaaccaggatgtcatgccaaggagtgtggtttcattttgagtggtggggaagtcgctggactatttcaagtgtgtgtatttgggagagcagtgctgctggagtggtggaccacactggaggtggagattgcctcagggtgtgcaggtggagatgggtgggaggtgtcgtgcagggcttgggacagggctttcggaggtggtctgcagtgatccagggaagatgggctgctctgagggaggggctgaggaagctgacctgggcagccagtggcctgtaggctgggcagcactcgagctggggccaaggggcagcaggacggtgcccgtagccctggaggccttggggattcggaggacctggcccatcgccgtggcctgcacggtgcgtgcacaccgctctgtccgcgcaggctgtgccctgctttcaagatgcctggaaacctctggcagctctgtcctgctgtcaacactggagtcacatgtcagtgggtctcctgctggggactggcttttgtgcaggagatggagggcagggggctacagtgcccttggactaaaggatgctttccttggatctgggcactagaaccagccctttccctctctctgcccagcattctcagcatgcgtctcaggaaggtttgatggagtgggcagctgcggtgctgtggcggggtcggggggctgctgcagagagcgggtctgcggtcagtcacagtgacgggggtctctttggaccctgtgacttgtgtgtggtggtggcaggcagtggcgttgccgagacagggtgctcaggtgcaggtgggaaggggtggcaggatggaggttgtacagtgctttccc

SEQ ID NO: 78327 - DNA, 1045 bp, Homo sapiens
gaacagaaggaaggttgggggaaagcgtatcccagctatgggcagggggtcctggggtgggcaggatttggggcggctgggcctggggctggatagggccgcgggagaggggaggcctgtgctctcacagctgggagctggctcaggactctcagatcttctctttgtggcctgtcatccctcctacctgcctgtccacaggcccacactgagtgagttccatgggagggaggctcaccctcaggggccttcaggagatgggacctctggcccggcagccaacggatgctgaggggtgcccaccatgtgcagggacagctggggtgatgtcttggagccctgtgaggtcctggggccgcccaggcagtcacaccccgccctgcaccccagggtgcaggctcccggggtgacacagtgctgggacggcacagggccgcgtcctgaggagagggcggagccccgaggctgagctgtgccttgcctcacaggttgtgcagcctgactctgaagaagctggtggtcttcaaggagctggagaaggagctgatctccgtggtgatcgctgtcaagatgcaggtgaggccgcttgtgaccccggctgtggctgggtgctgtgtaggctttccatgtgcctgggagacgagtcaggcggtgcgctactgtggggccttgtgccaaaacagcgggcagcccatgccatctccgggagcccggggggctgggaatgacaggatgctcctgggtccagtcctgtcccgcacaagggaggcaggcccggccttctgggatgtggaggtcacatgcatggggccttcccagggcagagctgccctcgagtcacctcacagtgatggacgggccccaagcacctggagccagggcttccctgctgcactcagcacccacttcctgcccactttttgtggggtggagggcgtcggtgggagaggggagcagggcactctgggaggcgagggcctagccagaactcccagcccctggtgccagggcctctctcctgaccctagtgggtcctgtgacctct

SEQ ID NO: 78328 - DNA, 1278 bp, Homo sapiens
cactgtgggaggccgaggagggtggattgcttgaactcaggagttggagaccagtctgggcaacatgactaatccttgtctcttaacaaaatacaaaaattattgtatatttttttgtggtggtacatgcctgtagtcccaggtgctagggaggctgaggctggaggattgcctgagcctaggaggtcaaggctgtagtgagttgagatcgagccactgccccacagcctgggtgacagagaccctgtctcaaaaaataaaaacaaaaaataaaaaaatgctttaagccaagcatggaggcacatgcctgtaaggctgagctacttaggaggctgaggcaggaggattgcttgagcccgggagctcaagtccagcctgagcaacacagcgagacctgtctctcaaaaccaaaaccagaagaggcttggtgcctccagatttgttctgccagacagacttgggcagcgcagtcaggtgctgctgcacctggccgtggaatctgttttgtgatcgcgttaacttcagcaggagccgctcctggtttctctctcatgtcttagggcagattcctggaggtggaacctgtgggccgaagggtctccatgtttttaaggttcttgggaaagatgccagggcacctctgagaattaccccagcctgtgcctaccacccccagactgcagggctgcaatcctgccagttttagagtgcaggagtcacggtgtctttgcctggtttcctgctgatatgcagtcctttgagctagaacaggtcttgcttaatcacagggctccaaacgaatcctgcggtcccatgagattgtgctgccccccagtggacaagtggagacagacctggccctgaccttctccttgcaggtgagtctttcaccagtggtgacgacaccctcatcactgtcccctggggagacgggcccccctcatcactgtcccctggggagacgggcccccctcatcactgtcccctggggtgatgggcccccctcatcagtgtcccctggggagacgggcacgcctcatcaccgtcccctggggagacgggcacccctcatcaccgtcccctggggcgacgggccccgtcatccctgtcccctggggtgacgggcccccccatcactatcccctggggtgacgggcacccccatcactgtaccctggggagacaggccctccccatcactgttccctggggagacgggcccccccatcactgtcccctggggagacgggcccccccatcagtgtcccctggggagac

SEQ ID NO: 78329 - DNA, 1079 bp, Homo sapiens
cacccacggggctcaggctcttggagcacgccccaccccacactcgcccacctgcccaccccacgtgggtgcccagcaccttccttctggggtcggccagggcctttcctgggagggggtgctgagggaagggccccgtgagcctgggaagggctgcagaggcttctggaagaaccatggagtccgcacacgcctccccgggtcccccttggccaggaatggaactgtcagacctcaggcctgttgggaagcctctgggagccacgagcgaatccatcagcgtggctggtgctgaggccttgctgctctcccacggcgggcctgggtgcggcctgggcctgaggaaggggctccagcggcgggtctgcagctctggcggcggctctgactctgcaccgcctgtcttgcagcaacagaacttcaagcagaaagtggtagcgctgctgcggaggttcaaagtgtccgacgaggtgagtgcgccgcgccttctgctcgcggcccccacgcctgcaacagcacctggtcgggaggaggcctctggggtctgtctccgggccacctctggttctgccgctcaccgtctgcacggccccgccagcatcgcacagtctgcgaggcgcagtgacagtggcactgcctcccgggctccaggtcacccgctgggtctctgctgaagtagaagtcgtgaataccctggaagtcggaaagtcattttcagggggatgtaaccattagtttgtgtgtttttttttttataaatagactttagtttttagagcagttttaggtttacagcaaaattgagcagaaagttcagagttcccatggacccctccccacctgacagccccccactattgacatgggccccccctccccacctgacagccccccactactgacattccatggatttttaatgttcatcttttagcttttctctaatctctgaattttctacaatgagcttgtataattttcataccgaaaagaaaaacatggctgggctcagtggctcatgcctgtaatcccagcactttgggaggccaaggcaggcagatcacttgggcccaggagtt

SEQ ID NO: 78330 - DNA, 1038 bp, Homo sapiens
cacatgattccttttgggtagcactcgggaaagggcagaatgtacaggaacagagtgagattcgcagggcctggggctgagggaggggacgcactagaggaaggcaaaggggagcctcctgggtgtggggagcactttctgtcttggttttggtggtggctgcacagtggcccacacccgtcagagctcacctgcctgcacccaggccctccgtgcaccctggcagcccagatgactgcaccagcccaggggaggtggaggaatgccacacgcaccggtacctggggaccgggggtcctcggtgatcatcccgagctccaagacagaagctggactacagccgtgctgagtggaggggtttggtggctgggtgcccgcctcctattgctcctgcagactctggggtctcgggcgcccccagtggggcaatgtgggctgctgcagggaactcacgcgtgcctggcacccgtgcaggtcctggactcggagcaggaccctgcggagcacatccccgaggcagaggaggacctggacctcctgtatgacaccctggacatggagcaccccagcgacagcggccccgacatggaggatgacgacagcgtcctcagcacccccaagccgaagctgcggtgagccctacagggcggggcggggaggaacagccatttcagatgccccggccactctgcgaccactctggcagacccatgtccagccctggagacggggtgggcagggccagctgcctcgaagcctgggaaggctctggtggctggaaggaggggtgtgcggctgcctggcaggcccaggctacggctgcactgagccaggcagctttcctttcataggccagggggtgcaagctctgggctggggaggaccgagaggggtcccccagggtgctggctgggctgggtgtggcaccccgttgtaggggatccgtctctgggggatgccctgggaactgcaggggacctccgttcactcaggtggggagtagagctcccatgctgggtgcccctccctgaggaggag

SEQ ID NO: 78331 - DNA, 1167 bp, Homo sapiens
cagagcatggatgggaggccagcctgccatggctggctcggtgggggggtctggctcggcagagggcaggtggccctgggaattggagccacccatgccctggggaccagcagccaccacctgtcttctgtgccttcgcgtgcctgggaggacacagatgtcacagatttccaaacactggtctgctcaacaaggatagtgggatgtcaaaggccacgtccaggcactcctgcctgacagctgtggacacagccagggtgctggggggccaggaggccgccctgaggcagaggtgggcctcaacacaggatttgcatcgctttatgttatttgaaatggacaagaagaggggaaagtttcaactcttctccttagaaatggaactaggcctggggcatctttaatgggatgggaggaatctgtaggtggtttcatccagaggcatttgccaggtcttctgcagagggtgggccaggagccgtccaggttggcgtctggggagggtgggtcttgccagccgccgtctcctcacactggcgctgcgaagacagggaaggcacctgctgggaccagccgcagaggctgcctcctgggagtgtgctctggaccggctgccgggcagaggctgttttacttgtgggcacactttgtggggagcactgggatcaagcctctgccctgcagggctcttgaggagatagcgctgctggtcctgggagctggtgctccaggcagacggctgggctgggcctgtggcatcctccgctgggcctgtttcctgcaagggattctctctgaatgaccctgtgctggacgacaacccaagggagggccggggccactgtgcgagcccatgttctgcacctggtgccgggctgtccctgagggccaccctgctggcctggccattctcgtcctgcccccggcgctccaggggcaacaggtgctcctctgcactgtgtgtgcacagtctccgcctgtaagacagccacttgccggcatcagactctgcagtttggggaaatgagacagaagaaacagctgagggagctgcccagagagaaggcaccagttgctgatgcggtctggctgaggaagctgggcggggaggcacctctgtccctacgtgcaggccacggggggccttgaggccaggggagaggagga

SEQ ID NO: 78332 - DNA, 1052 bp, Homo sapiens
acgttacccagatagtctggagaaaacttctgcaccctggctttggtgctgctgattaccagagagggcccaggctcttcctgggagtcccagggcactggcagctgccctaaccccagcagagcaggggtgcccagcttggtggggaagtggaaatgcaagccggacagggctgagctggctgtgtgggcgtcgggcacctaggatggcagagtgaatccctccgtggagctgtgccctctggcctgtcctcctgaccatgggtgcacagagacccctttgtccttccagcatgtcagcatgtcagaaggggcccaggcgttggtcctgggggccaggccagggctggcagtggttggagatgggtggggccgggacacacagggcagggctgtccggcagggccatccggcagggccgcggccccagggctgcgccaggttctcaggccaagagggagctgtgcccaccaggcggggctgtgccctgaggagagcttaactgtctgtttccttgctcttagccctgacgaagagtcctcccaaaagttcattccctttgtcggggtgagtactggccagctttatgtgatgggaaaccgcacacctgccaacttgtcgtttacagtcagaacgtttggggattgactcgatatattccagaaccttcccacagatacgagctggggatttgccttcccatctggcctgtctcaaagctcgcttccttccctgctggagtggggtgtggggccagaggttgttagttccccttagctctgccttgggggctgataaatggaagcagagacaggtcggtggggcgaggcctcagaacacccaggaggcttggccccacgtctcaggagaggagagactgcctgcccgggttggggagggcgcctctgtcctttaggagcccaaggccccgggagcttcccagtgctcacttgggctgcagcctgcagtgtgtgggtttcacttcctgccctgcccagggttagggctgcttctgccagccaggccatctccctgccagccctgggtctccac

SEQ ID NO: 78333 - DNA, 3883 bp, Homo sapiens
cccagtaagcctgcactgtggggtctccataggaggagctggggaagctggggccctcccaggggtcctgatcgaccctgggggctcttggcctggtttcgtaagatggagcactgcaaaaggccatgctcagaaagcaaacgcagggcagggtgggcctcgagccggggctggaggggtctccacccttgctggcctgagagatggcccacatttcttacttgtgaccgccctgctcttcctggccgccccccccaggtggctgaacagggtgattttgttgtggtgaggggccaggatgtggcctggtgtgcagcctcagctccctgggttcaggcctcagaggtagcctgtgtgcaggaggcagagccccagcccctcccagccagagcccctccacaccagggactcctccttcacctgggaccaggagcctggggcacaccccagggtgggggagagggtaggaaggtctcccattgaatcctggcttcaggctctgccccgagaagtgtctgcggtgagggtgtgagccccgggctgatggcctctgaccccggcaacaggtgggaccctgactgactcgttcagctgcccccaagctgggctgcagagcatctgtttttctgctctccagtttcttttctttttttttttttttttttttgagatggagtcttgctctgttgcccaggctggagtgcagtggcatgatctcagctcactgcagcctccgtctcccaggttcaagcagttctcctgcctcagcctcccgagtagctgggattacaggcgtgtgccaccacacctggctattttttttgtatttttagtagagatggggttttgccatgttggccaggctggtcttgaactcctgacctcaagtgatccacccgcctcggcctcccaaagtgctgggattacaggcgtgagtcaccgcgtcctgcctgctcttcctgtttctttcccaagggtcacactcagtagggagatgaaggtggaaacatccttgctgtggctttctggcctcagagcaggttttagaggaaggggccacaggctgcctagtgcatcctggctgtgggcagcccctttcctggagccctcctgcctaccccgtacctcccatctggctgcacagctccatccttagccacgcaaggggagaacatgggcagagtctccatccagcagctgggggttctggtggcactccctgtgcccctgctgctgctgggctgtgggtctgccctgcacccaggagccccacggtccatcccccacaccatgcccagcaccagggaggttgggcagacaagacctgggccatgccagccctctgtgcctcggttttcccactggttacacaggatggtcgcattttccctgcctacctcacagagctgttctgagggtgcatggaggagcactctgtcccaccaaggacaactagaaaccaaagccatctgacagccagtgcggtaagggcgggggatgtgtgtgtgaggtgtgcacaccccccgagaacctggccctggactggcctcacaggacaggaggcagccccttgtagagctagggctcagccccatcagtctcaaaggttaagccaccagtcaccaccgaggcacccctcaggcctggtggccactgtccactattacgtagacagaccccaccctcacccaggccagctgtgggccagtcccgccctgcaatctggtctgctgccttcctcttccatgttggtccccttggccactgtctctgggcatgcaagccagtgtcctggttcagtgcctcggccagagctggggcaggagaggggcctctgggtgagagctgggggtgtctctgcagggtactggcagccttgccacactgtcctcattcccagatggaaagacctgagtgcctctcgccttcctccgggaatgaattcctcatgaaaatgaccaggccacttcttccgagggccaggccgccccctccccgagacctgtcctgccgtccgcgggtgtgtggcctgtaggggactgagagctgggcttgctgggcacctctggaatctgaccctgtgggccaaagaagcaccactgtagtttctgcagacccccatgcggttcattgtgcattgtttggtttctaggatgtatgtgttgctagttttttttaatgaaaccctggattaatgtaaatagctttttggggaacggattctaatgtcacgtatgtgaccgtgtggactatttcaaggtgctgatgcaacactaataaacctggaggggccggcccccgcctgcagtgtgattctctcggccgtccaccccttgggagcacgcggcggagcagcgcctccctcccgcccgcgcgccccgtcctgggtcgccccgccccagccctgcggccccgcgcgcgcggaggtggcccggggctcagcggcatcgcgccgcttgaagggcgcagggccgaaaggggctctggccgacaaaccccaagttcaggtctgtgcttcgggagaccccggaggccgacgcccggaagggcccgtggggcggtagcggccatagacccggatatgcgccggggacccccagaccgcgcccatcccccacccgccgcaacggagcccagaacgcaggcgcggcgcagaccggaagcggaaccggtgggggcggggcttgccgtagcggacgttctggagcgaggcgccggccccttgggccccctcaagccgcggtgtactccagcggccccctgtggcctctccatccgcggcgggtctgtccctccttctgtctccgggtgcccacgtaccccccacctccgaccgccgttcccgtgtaccccgcccccccgccgaaccccagagtgcccacggcctccagcgtgtgtcctgagccttcttcccccgtccctccgcggaccccggccgcgcagaccccgcctccccaccggagagggcgggcacgtaagggctccgggctgggcctggggcgaggcctgggccgcgtggaggggaggtctcagggtcggaagcggggctgtggcaagagctctgggcctttccttcgccccgggcgtagcaaggccgggccctgagagcgtgcccgcagtgctggctgagggctgatgcccctggaacgtttgagaaggctggcagaggcgtggagtccgtgcagcaggctgccgaaggctttccaggctcccggggtggggtcggcaggggcagagaggacagttcgggaggctggtgtggagaagagctgcggcgggagctgggggatccactccacccagaggggtcagtgatgcctgacctttggctggaaggtgaccctagcagaccgcgatactgccaccatctgcccccagggactcaggtattggtgggcacgtgggtggccttgtgggccccgccccacctccccctgctcctacccccagatctcagaggtgtggacaagcagcctactagggctagagatggacagcaggaaactgtccccccgggggaagaagctggagtcgcacctctcccaagagcacaggcggcccccactgggcctgatagcagcctggggccagcccagtatccagagcagcgttcagcagggactgcagactcaggactgggtaagcggaaggaaaccctggccgaggctactctcctgtccccagcccgcctgaggccgctgtctctgaaaactccaggctggtcgtgatgagcagcctcaggggagggctgagtggggactgatgagaaacagatggctggactcaggaggctctcttccccatggccctggacgagcaccaaggtggacctgcacccttcttgcttccagaaccgtgggccgctgggctctgtagagaggtc

SEQ ID NO: 78334 - DNA, 1650 bp, Homo sapiens
gagctacggcaggactcacctgtggggcacagggagggatcaccagggaaatggcccttgtggaggatctcccctctacccccagggcaccaggggaggatctaccagggggttctggtggaagggcccacccgggaagcggcgcgcggggaggactcgggggcgccgagaggaactgtccgggaaggggcgcgcgggccgcgggcggcgcggggtcggtaacggcccgtgcggtgggcggcggcgcccgaggcccctccccgccgcccgcggccgctcctcctcttcctctcccgcccgcgccgcggccctcccgtccctgcgcggcctcggcggcctcggcggcggcggcggcggcggcggcggcagcagcgcggcccctttaaacgcctgcggcgccccccgcccccgccatcgcgcctccattttcccggccgcccgcgccgagcgccgcgcccgccccgggcccctccgccgccgccggcccggacatggccgccaacatgtacagggtcggaggtaaggccgcaccgcctttatgcccggccccgacccgcccgcagcccccacccgccgccgctgccgcctcccccgcccctctgccccgcaggccccgcgccccccgcccgccctcgcggcccccggctccttcccgaaccgccccccgccgtgctcaccccaacccaaaatggccccgcgggtcggccccatcgggggcgggcggggctcggcggcccgggggtggggggcggcccacctgttggggccgagggggcggccgcgggggtggcgggggggcgcggggcctgcgggacatccgggggtccggggccgggagcccccagcgggagcacgtggccttgggaggcgccggctgccggtctgggagcaggagttttggggctgtggggtctcccccggcccgcggccctgtgctgggactccggtgcatcccctctggggatggggagccccggtgaggggccacgttcctccctagagccctcctgcagcctggccccggggcttcccccagcagggatccctcagggggtcttcagcagggagcgagcatcccgagcacgcctctaagtccccccaaacttttccctgcctctcgctcacctcagcccattcgggaggcgctttgcaagggttggggagaggccggagggcctcctgggcaggggcttcctccgtgggcccagcctcctgttgctcgggccccccgggcctgcagctttgagccttgccctccttcgtgtgcctgggactccgtggggtctttcacaggaaggtggggggtcgtgtgcattccatcattccatcagcgcctccctccccaggactctgagacccctccctgcctgtgaccctctcgggcaggtgctcattacctttcccacctgcagcctgcgctgctggagggagctggggtcactcccgctctggcttgatccccatgcccctgaccccgagtgcccagaacactctgtgtctctcgagcgtggcttctgctgccttggacgccgtgtggtctggccggccagtcctgtgaccttggggacggtgggagccccctacatcccgtctgtgagatgggcggtcagtccgcatcagcagctctgggcctcccctgtcctctcagag

SEQ ID NO: 78335 - DNA, 1592 bp, Homo sapiens
gtgctggtcttgctgtattttgctgaatcccaggcctgtgcgggcctctgggctgattccagctgagacaggcctcctgctcagtcccccctgcggagctgatgcagggtgggctggcgagggtgctcgtggtgctggttcgtgaggacatggcctcagtgcctcccaagctgagcccctgcggtggccccaggaggcctggagcatcggggtgtcagcaccaccagcctggacttccctgggccttccagggtaagcctctgggctccggaaggttccgtggctctctgtctgtggagctggtgagaaggctggagggccagatggtttcatcgctgagggaagcgctgtactcacctgatggccgatcttggggcactcccagtgcctgctgcctgttgctgtccctgagctctggtgagctctggtattcctgtcattcctggagcaactctgtcctgtttttgagcctgcctgggcccaggaagccccaactgtgttctctgtgtagtcactgctgttggttttggagggaaagatgggggccgctgtgggcagggctggtggctggtggtggccacgtggctctgggggtgtagcatccaggctggctgctgccagtgggaaggtgtcctggggctcccggcagggtctgggcagtgctggagctgggctttgcctgggaagctgccgcctggcccccacagcttccccaagaagggcctgagcccttgggggcagctggcgtctgtgaggatccgggatgggggctgtctgctcctgctgggaacggcccctccagatgcatctccctgtccctgacccagcctgtcagtccattttggttgcagccacccctccctgatggtgtgggggcttcgcttcctctgtttattcctcgcctgagggagcagaggtgaggggatgacactgccccgcctgagccccgagtccctgggccacgggaggtgggactgggtctggcctttggtgccacaggtggcactctctctgttgctgtttgcagactacgtctactttgagaactcctccagcaacccatacctgatccggagaatcgaggagctcaacaaggtactggggggccctggtgttgctgcaggggggtagtgggtgggggctacgccagctcctgccctgtgggtggccagtgtgggtggccccctttcggggctgatcttggactggccactgcacaggcccttcagtgactccgtccactgtcacctgcaccgtggctcctccttggagatactgagtgaggggcctggtggcctcatgcaggacccagcgcagctgccctgagctgcctgcccactctacacttggtctgtgggtgctgggtcccctgaagatgccagtgtcccctggggagcccgagcggaatggtgtgattctgaaaccaaccaaaggctgcagaaagccatactcggtgcccctgccctgcccgaaccctggcagccagccctgcagggctgtgagctctgcccccacccctgaggtgtctgcatggctggaagcaccctccctggtcactcaggcagccctgcagggctgtgagctctgccccc

SEQ ID NO: 78336 - DNA, 1087 bp, Homo sapiens
gacggacagagggcggctgcccctcgccctcctggcctgggctcttggcagccgccgactcccccgctcctcttgctcttgcctgctgcttctggggctggcccggaccttgttctccctcctccttccatcttcatgccctggggagtctgggcctttagggtgcctggacttaaagggcacgtgggcaccagagtgtctgcaggggtacctgccaaggagccgccgggccgccatagggtggggcagtgggacagtgtccggcagcaggaggaggcacgcctcccaggactgggcctcctgcgtgctggcgccaggtggggctggtggggtgggccttggtctggcagtgtgcgtctgccgcggtgctgacaggggctccttgtccttcaggggaaatagaagaggaaatggagaacccggaaatggtggacctgcccgagaaactaaagcaccagctgcggcatcgggagctgttcctctcccggcagctggagtctctgcccgccacgcacatcaggtagcccccagcagctcccgccctgggcccctcgggctgccctcgcctttccagcctgcccgtccttctcttccaggggcaagtgcagcgtcaccctgctcaacgagaccgagtcgctcaagtcctacctggagcgggaggtgaggcccagcccggcctggtctgccgcagccagtcccgggccactgtttcctctacctatgacctctgctggcctgggcggcggagacgattttccctcctccctctaggcccaggctgttctggggggaagcggggattgcgtcctgactgtcacttccaggtgtcctggtgtgtggccgcccccaccctacgcgtccagagttgtgggccaggagcttggagctctttcctcttgccactgccacccagacagccagcgaggggaggtccccctggggagggtgtggctgaggcaggtgggggcaggggccacctgagtcttcgcaggagtcttggctggtctctcctgggcggtgggcagagtcctggtaggcccaccttgggggtcactgtgattatacggtgttaccaggtgattcttat

SEQ ID NO: 78337 - DNA, 1291 bp, Homo sapiens
ggtccctggcacctggggagcggtgtgcgtgggggaagtccgtgctgcccatggcccctggtccctggcacctggggagctgtgtgcctgggggaagtccgtgctgcccatggcccctggtccctggcacctggggagtggtgtgcctgggggaagtccgtgctgcccatggcccctggtccctggcacctggggagtggtgtgccttgggggagtccgtgctgcccgtggccgctggtccctggcgcctggggagcggtgtgcctgtggggagtccctgcttggccgacactgtggtcagcgcatctcctttccccagctctgtgggcaccttcgcacgggccctggactgcagcagctccgtccgacagcccagcctgcacatgagcgccgcagctgcctcccgagacatcaccctggtaagtgggcccagggcgggacaggtgagacctggggtggcccatggcccagagtggctgcgcccttcttcctaccagggcccagcacctgccccaggtattcaggacccctgcagaggtgctgtcccacctggactggcctttcctatccaccccaaactcggccagactgtgctgagggtgcagggagggttgtgctgctgggcctgcagtaggggatccttgaggtactgagggagggggtaccgtgccacaggtgcaggaaaagccaccttggcccgggtgaccctgctgtctcctgccgcagttccacgccatggatactctccacaagaacatctacgacatctccaaggccatctcggcgctggtgccgcagggcgggcccgtgctctgcagggacgagatggaggagtggtctgcatcagaggccaaccttttcgaggaagccctggaaaaatatgggaaggatttcacggacattcagcaagattttgtgagtaccgtgggtggcgatgggggagtggctggccatgcccatctccaggtaggctgcgggggtgtgggctccacatcccactctgccctgagggagcctgtcctgcaccctgattccctgtgcggagctgcatgagttctgtctcagctgcgctcggccgccatagtccttcctgtcacactggttcagcagacaggcatgggggcgctggtggggcctgggcatagagagccatgctcctgccaccattgcgtgatgaggataagggttggcccaggtgacggaggccagggtatcctcacggagactttcccttccttgctgccccctccagccccaggcttggttttgctttgtttttgactaagctgaa

SEQ ID NO: 78338 - DNA, 1548 bp, Homo sapiens
aggaggggaaggaagactcctgagtccctggcccggctgtcctctccgtggtgctctcctctccgtagcctccagcctgtctgcactgcagccccaacctgggcctagcctgctgacctctgaccttctcttttgttttaagaaacgcttgaaagcagctgaagctgagagcaagttaaagcaagtttatattcccaactagtaagtgtgccctcacagccgtcgtcctcgtggccccgggggccagggagggtgggcacagggtgctggggccaggcgggtcccaaggaaactcaagctcagaggctgggaaagttggggcagcccccgggagggcggcccagggctggggggttctggctgcagacgcagtggccatgtctctgtcgtcctggcctcctggtcagtaagggggcattgggattccagcccacaccgccagggttcagtccctgagctgggctccatgctagggggagcacgggggcctggagaacggctcagacctcagcagtggctcccaggaactgaaaggggagaaaggaagatccctgccgaggccgaggggtgcgaggacgtggttctggacaaggggtggtcagccgcggtgcctgctgggcacatgggccctcgaggtttgtgctcctgcaactcctctcgtctctcctttccctctttaagtaacaagccaaatccgaaccaaatcagcgtcaacaacgtcaaggccggtgtggtgaacggcacgggggcgccgggccagagccctggggctggccgggcctgcgagagctgttacagtaagtgccctggatggccgggggcacaccgcacgcccgcctgtgggccgtggtgcctgcgttggccctgagggctccagcatggcccagcctgcaaggggcccactgacgatgggggctgcgtcccaggggtgtggttgggagagcctcggggaacgtgtgggggtgcctggcgggtgggggcggccggcgtgggggtggcggggaatactctgacatcgctggttctgcttaagaatccgtctatttccaactttgttgtccgtagccacacagtcttaccagtggtattcttggggtccccctaacatgcagtgtcgtctctgcgcatcttgttggacatattggaagaaatatggtggcttgaaaatgccaacccggttagatggagagaggccaggaccaaaccgcagtaacatggtaaggggggggacacccgccctgcctgccatgagcctgtcggccacgcgggtcctcggcccccggtcatggcgctgtgttggggcggttgcgcccccttccgcagagtccccacggcctcccagcccggagcagcgggagccccaagtttgccatgaagaccaggcaggctttctatctgcacacgacgaagctgacgcggatcgcccggcgcctgtgccgtgagatcctgcgcccgtggcacgctgcgcggcacccctacctgcccatcaacagcgcggccatcaaggccgagtgtgagtcaccccaacgccccgcttactctgttcct

SEQ ID NO: 78339 - DNA, 1116 bp, Homo sapiens
cccctgctgggcagaggcaactcgttctgcctgtgtcattcccggcagagacccacccccgcccccccaagcctgaccccgtgaaaagcgtgtccagcgtgctcagcagcctgacgcccgccaaggtggcccccgtcatcaacaacggctcccccaccatcctgggcaagcgcagctacgagcagcacaacggggtggacggtgagtggcccccccgcccggtgagtgtggccctccccgcccggtgagtccggcccgtccccgcccgggcacccgccgtgcgtgctgacgctgtcttctctccctctctcccaccccggcgctgccaggcaacatgaagaagcgcctcttgatgcccagtaggggtaaggcctggagccgcgggcgggcgctgcgccggccccgcccgtgatgcctgtgctgtgctgctctgtgtccccgcggcgggcggcccagggcccatgcttggggcagtccacgtgagccaggccacagcccagttccccacattcctcccgacatcactggtcccttggtgaagaccccccgagcccaggcatctggccctcggccccctggccccgcctcctgtcagtggactgtcctggcacgtgtggccctggcgcccctgcctgcgctgtctgccatcgcgctgtgactgcccgcatgctgccagcctcagctcgtggggccgcccgtgctgtgcctgcaatccttccgtgcgcctgccaggcgggacagtggggagggtggtcgggggtgtctgtgtgggccgtgggcaactgagcttgtacacatgggtgccttctgtcggaggactggctcaggtgctctgtgccggttgcttggagcaggggctgcgggaccccaggccccttggggaagagcagataggaccaagcctagcatgaggaggccaggtgtgtggggcccgggtgtgcaagtgctgggcctgccagtgtggatgtgcctggagccccttcgccaggcggctttcactgacggtgctggccagggcagcagggccggtttggcgacctggaggtggatatgggtagtggctgcccagcccagccaaccctgtccccttggggcattctctcgaggctgctgggt

SEQ ID NO: 78340 - DNA, 3487 bp, Homo sapiens
ctcctttcctggggcaccctcccagccatctggtattggggctgcccccattgcctagtcctgggcccagggccagcccactctgggctggctttacttgtctgttcctaatggcagggcgtcccaggaacagccccataagagctggtagaaacaggagggagtccttgtcagcaggcatcttcgagctttttgttttgttttgtaaaaagcggttaaccagcaagttacataaaagcttatttgttcccactgaattttccacacctcacacgtgagtcccagccatgcagtgcttgtgagggagcatcaccccttgccgcctggctgggcggggccctgggctcagaggggtcagccacagaggaagcgcctgtcctgacgtgtagcggccaggacctgggcgctggagaggggccagctgggtgaagacggctcccgggggcactggcgcacacgaggtggggtctctgtccagcctgggtaggcatgagctgagctcgagtgagggccctgcctgcccacagcacggggccccagcgctctaacccggccatttgcccgtgcagcctgttgcgctgtccccacctgcggggcctgcagatggctgcgtgtggctcactaacctaaagcatgtgtttcttccctctgctgtccaccgctctggtaggcacttacctgggtaagtagtttttgtgctactggccagccctgggcgctgggccttggcttgtggcaggtgccctgaggtatggctgttcctgcttgggagcgccgcagatcaggcacctgggcccccacctgaccctgcccggcagagctaagcaaactggcagggaaaggctgacccagggctccagggccccagttggcccccaggggagtgccccaagttaggaggcaactgcaggtggggaggggctggacaggctgcttctgttccttaagggatgggcctcagctaagcagcgtttctggagctggcaggttgctccgatgcccctgggccctggcacctgactgagttgagtatgacatcctgtcctctctgagctggtcctgctgggagccgagccatcctgggaccagctcccacatgcacacgcccacacctacacacagggcagtggggaagggcagtgagtgggggagggcagcggcggtcctgggcccagctgggggtgaccaggagcatggaccccgcttcttggcccaactcccgcagtgccccttgggctcctcaccctgcactgtgggaagtcagaggcctctggcaccccatccccaagcacatgccagggtggctggggcccagccagggcagtgggtggtgacctgtttctggccggggctggcggctctctcagagccttaggaaaaagcccggcctcctggtggggcagtgccggccacagcgtggctgccctgcagaggggcttgtgccgctgctggactgacagccttgcgaggctttgcttgtctcggcacggcaggcaagtgggtggacagccccggcccctgtgcagggaggtgactgtcgggtccaaggctcctggcctcctgcctggagcccaagccaatgtgtctcttgctggccagagagctgtggggccaccaggcggcccaggacccggggatgcgaggccccacgtcccccaggcccatcctgggtgtgggctgtggcttggttggcagatggccccggcccattgtcccaaggtggctgaggccgtggtgggcggtgggagtgcaggacgcgctctctcggggcctcatttctctcctccatttctcatcaggtctggcaaaccacggacaggccaggcacatggtaagaggaacaacccatgatggggtacggtgcgctcacccatgagctctctggggtgttgggaagaggcctggccagccctgccaggtgccacgtggaagcttccaggaggcctggcaagaccagaggggctgcagcatgtgggggccatggcccctgtgccaggcccagcggtgtgcggccgaccagccctcagggctgccctgggccaggctgggggtccgtgtaactcactggggtggtggggggttggccaggcacagcacctcccagcgggagccctgcaggttgaggtggagctggcccttggctggctgcccaggaagtgcaccccctctgcagggaccaagccggaacctcctgctcaacgggaagtcctaccccaccaaagtgcgcctgatccgggggggctccctgcccccagtcaagcggcggcggatgaactggatcgacgccccggatgacgtgttctacatggccacagaggagaccaggtggggccttcccagggcaggcgggagggctccgcacagcgtcccggccctcaccaccacctctgcccacaggaagatccgcaagctgctctcatcctcggaaaccaagcgtgctgcccgccggccctacaagcccatcgccctgcgccagagccaggccctgccgccgcggccaccgccacctgcgcccgtcaacgacgagcccatcgtcatcgaggactaggggccgcccccacctgcggccgccccccgcccctcgcccgcccacacggccccttcccagccagcccgccgcccgcccctcagtttggtagtgccccacctcccgccctcacctgcagagaaacgcgctccttggcggacactgggggaggagaggaagaagcgcggctaacttattccgagaatgccgaggagttgtcgtttttagctttgtgtttactttttggctggagcggagatgaggggccaccccgtgcccctgtgctgcggggccttttgcccggaggccgggccctaaggttttgttgtgttctgttgaaggtgccattttaaattttatttttattactttttttgtagatgaacttgagctctgtaacttacacctggaatgttaggatcgtgcggccgcggccggccgagctgcctggcggggttggcccttgtcttttcaagtaattttcatattaaacaaaaacaaagaaaaaaaatcttataaaaaggaaaaaaaccaaccggtccttccctgtgtcttttgttcccagtccctctccctgactcaggccctgggccccccacccccatcgggcggccctaggctgtggctctgccgtggagctggaggcccctggaggccacctcagccaggacagccaccccagcctctgggctctgttgctctcccacctgcccacagaccttcccctgctggggcctggcgcggtgccctctgccctccccagggggcagcaagcggttgcagggcccaacccccttccccagcagagctgtgctgaaaccgtctgtgcgtctgtgtctgcggcagcggtgggccggggactgcctcccggcaggcagagctggccctgccgaagaccctgtggcttcccaccagggcagccagtgcagctgggccagcgaggccttggagtgctccagc

SEQ ID NO: 78341 - DNA, 1024 bp, Homo sapiens
agctcccactccgggctccgctgagctgggctgggccaggtttggactctgtcgggattcagtccaagcgggggcgaccttggcctctgcctcctgcttgtcccgacgcattcccttggcgccagttcccccaggagtttcacacgggggtagggtgggggcgggtgtgacacgcgagttcccgcgaacgtgagagggaccttgtgctcaagcagcccaggtgtccaggatccctgcctcctcaaggtcagaacagccctggacaggatgcaggtggtggcgggaagagggatgtctcgcaaggcggccctcggtctagcccctccggcaggcgcgctccccccgtctgggcttactcactctctgggcctgggtgcgcccttcctacccccttcctcctggctgattcgctgcccagctttctccagggtggtaaggtccctgcccacctacccaccagctgctgcacgaaggggggcagacttagtgaagcagagaggagggccgggaccaacagggcgcctgccctggtcgccccatacccagaatgcggccaggctgcagggaaggccgccactgggcttccccggctcacaggctggagggggttgaggggaggttgtattttgcccgtcccagaggggagggaccggatttggcctggagtgcttctggcgtggctgggagccgaggggcttccggctgcctctcctggagcccgctcagccctcagtctctgtcccagcgagggctgtctctgtaaggcttagggtgggagacggtccccagggcccttctgcagtccaactgcccatgactttaccccaggccgggccaggccagcctggggctctccagggtctcggccaacagtcctgtggacagcccggaaaggcctgcctgcctggcccgcccagcctctcagcggaaaacaaaggcgcttcagacccggctggcttctgtcctgcctgggaggcactgtgagggcgagggtccagaatcctgcccaccctcacaccaggct

SEQ ID NO: 78342 - DNA, 1339 bp, Homo sapiens
ctccccctttccagctgagaaggtgacgtctctgggcaaggattggcaccggccctgcctgcgctgcgagcgctgcgggaagacactgacccccggcgggcacgcggaggtgaggggagtgcaacggggcttgggggccgggcaggggcgcggggtcggggggatgagggtgagaggcgcgcctagaggggatggggggtggtgcttctgggagctgcgctgccctctcccccacggcgagccggcctgcacgttctggaagcctccaggtgatgggtcgggggagtctgtggactcctccctcagcacccaccttctgccccagcacgacggccagccctactgccacaagccctgctatggaatcctcttcggacccaagggtgagtgtagccagggtggtccacgatgtcttccctgccctccccttccctccactgttcccccgacccaccccagcggcctccctccacaggagtgaacaccggtgcggtgggcagctacatctatgaccgggaccccgaaggcaaggtccagccctaggctacagcggctctcatgatgtgggctcacctgcgccccagaccctgcaggggcccccctgcttggctctgctgggagagtgctcagccgcccagtcctgcctgcaagcccagggcgagtattggaggaggggcagccacgggcagagcaccatgcccatccccgagtctctggtgtgtctgccccctctggcatcctctgggcgtcccatgatcccttctgtgtctgcgtgtccgaatccccgtgtgaccctgtcccagcattttcccgccgaccctgcgtgtccccgtggcgctgtccgctctccctctcctgctgcccacccacctgccagtgttatttatgctcccttcgtgggtgatggccacgccctcaccatgtccctggcagagggcttccctccgggatcccctgcctggtgcccacactgcctcgcaagcgctcgccaccctcacgtggctcacctgctgttgagccttgtgctgtcaataaacggtttgaggattgcaggattgtctctgcttgtgggatggatgcaaatcccagaccagggtccctttctccggtccatgcgtgctcccagccaacacccctgggcctggctgctagtgggggtgggctcttctcctgggggtcatagtgggaggtggggccctgggatgtttctgagcaggagggagggatgggggcggggagcgtggtctccggtttgggtggtggtgcccacccagatggggaggcagtaagaacgccaggctgtggggaggtaaggaaggtgggaggcattccggggcca

SEQ ID NO: 78343 - DNA, 1070 bp, Homo sapiens
ccgtgtttgtttccaagtcattgtcatggaaaccggggcggttgttgctactgtttgtctggactgcgtcgctaggcggtgttgctggggttggctgggtgcccacggcactaacagggctcgcttggtgtctccagctccaggaagctatgccctcccagccgcctgccagccaggtgctcccttgggtgcccacagacccagatatcccctaaaagggaggggaatctggaatgggctcttctgcctttgggcgtgcctgcttctctgtccctgccttgggggctgctctgccctcaaccttcactctcttctacttggacctatgcctggccagtgaggcggctctgaaatgctatctgctccatccctccccttcagaacccctgggaaccaagtccagggatccacaaggccctggtgccccatggggctaagctcacaccccggcgctctgttgaaccgagctgtgccgctccccgtctgtacccccactgtccagtcttcccgtgtctcctggccaggtccctccaaggtatcccccactccaacctgggctggtggggccctcactggtgcccccagccaggcatctttgtggggccagctcagcctgcagctacccctgtctccacttcttctggcccctgcccgggacccccagcacccttcctccaggccctgcccagccagtgaccgcagcatcggccctgggtacccctgctcccagggtcttccctaattcctggaccccttcggactccacacagctgggactagcgcccctgaccctgaccctccacaggacttggtggggcacacctccctcccggccctgggtccagcttattgggggccggcggtagcctgagaggtggatgtgaggaaatcacccagtgccgtgggcccctagctctggaccgtggagggctgggcacaggcaagggcaggctggaggaccaggacggccaggtatgggcagcacttttcccagcgcctgatgggcttccggtggggatgtggggtccagctgccaggcggggaggctggaattccagcctctggaattc

SEQ ID NO: 78344 - DNA, 1925 bp, Homo sapiens
tgctttgcatctctttgcattttagtgatgtttggtccagtcctggcccgggcagatctggggttcgggcgggtgccggtggggtagggctgggggtgggagcggcgtttcctgctgcgggtgagccttttgcctcggaactggacccgggagacatcacagcgctgggctaggggcgcggcttgaactcgcctaaagagctgcgccctctcagtaagtccccatggccccctgcccccccgcgctccgtcctcagtcaggcccgggtcctgcctgaaggcgggggtggaccagatgatctttcttgggccctgggcctagattcgaggtccccagggtccaagtcctgggttcagagggcggggcgcgaggggcggggtctccaaggggcggggtcccggggtccctgaaaggcgcggaccaggccggatccacccagtctcgcgcctgcagcccgtgccgccccagccgctgccgcctgcaccggacccggagccgtcatgcccaagtgtcccaagtgcaacaaggaggtgtacttcggtgagcgcgcccacaccggccccgcgaggaggcgccgccgacggggcgacgaggctggggaccgctcaggaggaccgggggcgctgggtccctggggcggcgccccagcctgaaaacgcctcagcctggcccgccgcctgccccgggatgagggtggaggcccctgcgtccgagggccctggcgatctctgcctgctagtggtcttgctgtgctcggcgggctacctctggctctgagcctccccgtctctgggtcctacggtctctgccgtttcctctcaggcgcgccctgagtgggggacccgcagggctggaaggaacgcggggctggggccgcgccccccagcgctaagtggaaacagacgcggaaaccgacgcccggggcgcgatcccgggcgcccgcctccctgccccgcgcccgcgcgccccgaggggagggaggaagtgggaagtcacccctgtccccgccgagaagggctgtcgcaggctccacccttgccaccgcagaggcccggggctgaaagcaggcagccaggcccaggccctgctgacctaagccgcgacccctgaccctcggcctcgccctctagccccacccagccttcaggagcaagattcccggccgcacccgaaagtgccccggggaccagcgaccccgcgctttgtttagttgtattggctctggggattggagatgttcccctcatggagggtgctgagaccttagggtgggctgccaggctgggcggatgcgggctaagtgcacagggccttgggcagagctggctgcaagaggcgggtacgccagtggtgggtaggcgccgcgtcctgcagcgtctcaccggggcctgtctgtgcctctgcagccgagagggtgacctctctgggcaaggactggcatcggccctgcctgaagtgcgagaaatgtgggaagacgctgacctctgggggccacgctgaggtaggtgggacccaccctggtggcaggggccaggggtgatggcaccccctcacggcccttctctttgcagcacgaaggcaaaccctactgcaaccacccctgctacgcagccatgtttgggcctaaaggtatgctcccgtcatccccaccccaccccaccccacagcctcctccaccccagcctgttgactttttccaccttctctgcaggctttgggcggggcggagccgagagccacactttcaagtaaaccaggtaggtaggaccccaccccctatcctgcctcctggttccaccctcgggatggggatgccccctcccagggaggcctgaccactcgtgggccccaaaggaggccgtggacgctgcactcacgtctgtgcctgtctctctctgcacaggtggtggagaccccatccttgg

SEQ ID NO: 78345 - DNA, 1051 bp, Homo sapiens
ccaccagcgcgggactccttggagacccccccatcccacccttgcagagggtctgttgctcagctggcctttccagggacctctcaccccgtcgggcctggccttggcaccagctgctccgcttacttatgtgcctacctgtgaccctctgtgccaccttccagcctcccttttttggggagccttccccatttccctagatccaagcagtcgttcatgtccccactgtgagcctggctgaactgctgtgcctgtccagaggctgttcctcccccgatgctgctggggaagccagggcaccccactccaatcttgctgctgcttggaagctgggcggggtggggaggccatcagtgaaattgcctggcgcccccttgcaggagaccccagcggtgctgatggttgttctgcacccagcccagccccgccaacctcaggcaaggagtggctttctctgagccctctttcctcatctgggaggtgggctctgatggccgacctccctggactcatggagactcagcgttgggggaggtgcttgactgccactcagcctggggtctgcactacctgttttagatccacctgtacacacgcggctgccacagcgaccagagccttagccatctgtctgtcactgaagcagagatgctcagggacccagagggaggccagcaggtgagggcgggcaagctgctgcgggggggtgggggtgggctggggggcacagcagggggactgcccagggtgggaggggcctgggggcggggcagctcttgggcctccagcggtgggtgtctctgcatgtctgccactgatcattgccagcctgggtgacagacagcttctctgggcctctcctagcctcatgggccactcacccttcccttccacaaatcaagacgtggcacgggtgggggcccaggacgcaggagcctgggctgggcaggcagctggctaagggcaggctgttggaataaaggaacacagatctcaggtgtgagctggtggtgttggcatctcaagcaggtctcacttggtgtgtcagggg

SEQ ID NO: 78346 - DNA, 1093 bp, Homo sapiens
tcaagcgattttcctatctcaacctcctgagtagctgggactacaggcacctgtcaccacgtccggctaatttttttgtatttttagtagagacggggttttgccacgttggccaggctggtctcgaactcctgacctctggtgatccacctgcctcgacctcccagagtgctgggattacaggcgtgagccaaccacttgggctgggctctgtactgtcctgagtgacgggctggcactgtcctgctccaggtgcatatggccgggcaggagggcagaggctcagggctggtgtgacctcttcttccagacccagtcccccttctctgcctcttccctctccaatcccagagacttggcccctgtacctcatcccaggcctgcccagggggacctaggggtcagaggcggatggcctggctcctggcccctagtcttgtgtctgctggggcttcctgctcgtagcaagggcctgtgggttccagctctgcagcccaagcctgggggattgcatgcctcactcatgggcttacagggcccaacccctgacgcctgcctggcccctggtgccagctggacctgtgtccctggctgaagccgggctggcgcccacccagtcagcctgcactggcgttggcagtgctgaggcagcatccgggcgtcctggtctgcccttgtccctacctgccttgtagaggcggctcagcgaagcccaggcttctggcccctgggacccctgggttggggcagaggagaggctgccctggccccaggctgctcctgcccagtgcctctgtgggaccaccctctgtggtgggctgggggggcctggaagtgaggccccgccctctccccgaagctgtgtgcggcactggccaggtggactggggccatggctggcttccttccaaggtttctggagcgggagctgcccaaaacctggacctggcctacccaaagtgcctgcactccttctgcactcctgggatgggtcccagaaccttctggaatgatctgtggctggtatgtgagcagccaggtctgctgccgggtgactgggcagcacccttggatcctggtggggcctcagcct

SEQ ID NO: 78347 - DNA, 1022 bp, Homo sapiens
gtggatggtgaggaagcccgcgcatccctctcccggcatcccttcccacagcagcccccaggtggggcattcgggatcttcctgttttccagacaggaagaggggcttttagggaggccacagacctagtgtaggctctttctaggacttccactcgccttctggggaggctcactgctgcccccgccctcagctccatggccttctagagtgtggcctttgtgcctccctggacgtcacagttgctgagatggtggcatccagcccgctgtgggacctgggggactaccactgccctctttgccctctgtccctctgtccccttggcttggtgcacgctgtctcacttgggtctctgtaggacacggtcctgggcacctgtgccccggaggtgcctgctgcagcctcacagcccaccttcctgccctgggtccccgagcgcgggggtggcgagttggacctggtagtgcgggagctgcaggcactggaggaggagctgcgggaggctgcggagcgcaggcgggcggcctgggaggccaaggtgagtgccagcctcgctctgggcaccagcccagccccaccttcgggggatggctgacctgagggcactttggacttgctgaatcctacagttgcatttgtcaagcatggcaggggacacacttagaggcacgtaccctgagggagcgggagggcacctggtgaggagccgcagctgctgcgagacagcccccgcccctcctgcgggaggtctgttgtctgattctttgcatgagggagggaagcccgtgctgtgtgggccctgctgctcccatgcgtccgccacacatgcatcacacggtagtagtcactcctccacacctgcctgggacccgtctaacctcctggtggccacctgggcctccaccctagactcagagctgcccgcttaacctgcgcaggttcatggctgtgaacacggggctgtgttggctccatctattttctttttctgaagagttttaacttaaattgcaggcatg

SEQ ID NO: 78348 - DNA, 1243 bp, Homo sapiens
acgggccctcgtgtgggaagcctgccctggcccagcctggctgggtcttggaggagcagattccaaggccaggtggccgcagggacgatgcagatgcagagcccacgtcacatgctcgctccaggggtggggctgggctgactctggccggatcccaggcctgtggctagcagcactggggacaggaatggctggtcccttgaggaggtcgtgacaggctcagcctggtggtctggaggggactcggaaataaattgtagcagctttcctgccgctggccctccccctgccaccctgtcgggtttccctgtttgggggtgggagcgtggaggagcccctgggcagtggtggccagtgtagggctggccaggtgctggaggacatgcataccccagcactggtgagtggcaggaccacggggaggtggcacaggcctccctggagcgggattatctcggccccgccccccttcatttgggctcccgctgtgggcctggccctgggctgtgagcacagctgcccccacctccggccaaggctgtgcctggtgggtgcgccggatgggagcccggggctctgctccttcccgggaggtggtgctccgggtggggaggcacagcatggacagaggggctttgttccagaggctgctcagcaagctcagctcatccctgacaaagagccatctgtgtccgggggacgtgcctcagcctggcggaaggagggtcggcctcatggcaccccccccgccccccaccagcagacacaggtggccctgaggcctccagccctgcctgccttgccgggctcccctctcttctggggctgtcggactctgacctgaggtgggcagacgatggggcttgtggggccacctccaggctcctgccggccctgccccgaggccacgtccattccccctgccagaacatgctctcactggggcatgtgcctgagtgacagcacacacctggggctccagctccagtctcagcctgtctgggcctccttggtcccaggggtggacacgcctagaccgcctgccttcccattccggtgcatgggacccaggagcaccggcaagacctggccgtggccagcaaggcctccctttcaggagcacctctctgaccctctcatgcagctgggcctcctgtgggccaccaggatttgtgcaaatgctccctggcctgcgccaccctccggcccctccgccagctcctcctaagggctcctgccacct

SEQ ID NO: 78349 - DNA, 1027 bp, Homo sapiens
tgtctctttgtatctctgtctctctgtgtgtatctttctatctctgtctctctatatgtctctctatctctgtctctctgtatctctatctctctgtgtgtatctttctatctctgtctctctttcttgatctctctctatctctgtctctgtaactctctttatctcttactgcttctgtttctctcactctgtctctgtctctctttatctctgtcttgctctctctctctgtaactttatctctgtctctctgtttctatctctgtttttctctgtctctgtctgtatctctgtctctctttatctgtctctctgtctctgtgtatctctgtctctctgtaactttatctctgtctttttctgtctctgtgtgtgtctgtctctgtgtctttgtttttctctctgtctctgtcaatgtctctttctgtatctgtttctttctctctgtctctgtctctctatctctgtctctatctctctgtctctctgtaactcctcatctctgtctctgtgtctgcatgtctctttctgtgtctctgtttctctctctgtctctgtctctctgtgactctgtctctgtctctgtctctgtctttctctgttactctgtctctctctctgtctctctgtgactctatctgttactctgtctctgtctctgtctctctctgtctctctttctctgttactctgtctgtgtctctgtgtctctctctcgtctgtctttctctgttactctgtctctgtctctgtgtctctgtctctctgcactgttttcctggtgaaggagaagccatgtaccttcctgcatgatctgtgctcagctcacaaccaccccatgattgaggacacccctccttctagaaggttcccagctaacaggtgcagaaggagtgaagattgaaataggagaccccatcttgagaccctcccggaacagtgcccctgggccgtgtccccacttcgggacgtgggatctcggtgccaggcgtgcgctgcctgaccccgatcccgtcggcgtgtg

SEQ ID NO: 78350 - DNA, 1365 bp, Homo sapiens
ggggctggcgtcaggggcatgtgaaagctgagacgttggtgaaagggtacagagttttggttagatagaaggaattcgtttgaagatctattgcacagcatggtgacttccatgatactaatgtactatatacttgaaaactgataagagagtagattttacacgtttacaccataaaaaataagtatgtgaggtgatggacatgtttatttacttgatttaataatttcacaatgcccgcatatgtcaaaacatcacgtcatatccccataatatatgaaatagaatatgtttttctagtaagtgtgatgcctctgtttctttttctttcttttttttttttgggaacaaaacaataaacacctttattacatgggtgaagacaaaacaaggatttatttgcctttctgggccttgattttcctaagatagaactccaactctttgccctctagcacatagccatctgctcggccacactgtcccggccttgaagccatgcacgcaagaagcttgccctgctggaactgctcccccaggagactgctcattttggcattcttcttcctttcatcatatttcttctgaatttttttagatcgttttttgtttaaaatctcttcttcctcaggagtcagcttggctcccttcttgcggcccaggggcagtgcacagtgggactcgtaccactgtcggtagggcgtgctgtcgatgggcacgatgcaattcttcaccacggtcttggtacgaaccagctcgttattggatgcattgtagacaacatcgatgacccttgtttcaccagcgcagcattctgagccccaggagaaattccccacgtccagcctcggggcacagtatttcttgttacctcctcgcacacggactgtgtggatgcggcacgggtcagtcttgctgttggcagctgggcgccccaactcatacttccgcttcttgtggcagggccttctcttgcccccagctttgcggcccttgtgccagttgtcccgagaggtgcccatcgctcggcgctggctggaaagagggcctctgtttctttaacaatactttctggagattgtttttcccttgagcaatgtttcctctctgctgtatttacacagttttcctttcccatgggttgatttaagacagtgacaatttatttattctatgtctggtaatttcactgagaaacttaatgaatagccacttgaaaccatctggtgccactgagaaaccatctgaaggacacagattttctgagtgtaggccacaaccatattttaacactttttaaattcaaaatcggggtttaaattttgatattttactatggcttctttgattccctcccaagatcta

SEQ ID NO: 78351 - DNA, 1039 bp, Homo sapiens
tggctgatatggaggctgagctacatgtagaaagccaaaggaatttctgcaggacatcatcatgccaagcacagcagtaaactgagtcccagcccttttcacacgctcaatggttagatcttgggaaggaatcaaagaagccattgtaaaatatcaaaatttaaaccctgattttgaatttaaaatgtgttaacatatggttgtggcctacactcagaaaatctgtctccttcagatggtgtctcagtagcaccacatggtttcaagtggctattcattaaatttctccatgaaactaccagatacagaatagataaattgtcactgtcttaaatcaacccttgggaaaggaaaactgtgtaaagacagcagagaggaaacattgttcaagggaaaaacaatctccagaaactgttgttaaagaaacagaggccctctttccagccagtgccgagcgatggacatctcttgggacaactggcacaagtgccacaaaaccagggacaagagaaagccctaccacaagaagcggaagtatgagttggggcacccagctgccaacaccaagactggcccccgccgcatccacacagtccgtgtgtggggaggtaacaagaaatactgtgccctgaggctggacgtgaggaatttctcctggggctcagaatgttgtgctcataaaacaacgatcatcgatgttgtctacaatgcatctaataacgagctggttcgtcccaagaccctggtgaagaattgcattgtgctcattgacagcacactgtaccgacagtggtacgagtcccactatgcgccgcccctgggctgcaagaagggagccaagctgactcctgaggaagaagagattttgaacaaaaagcgatctaaaaaaattcagaagaaatatcatgaaaggaaaaagaatgccaaaatcagcagtctcctgggggagcagttccagcagggcaagcttcttgcatgcattgcttcaaggccaggacagtgtggctgagcagatgggtatgtgctagagggcaaagag

SEQ ID NO: 78352 - DNA, 1039 bp, Homo sapiens; identical to SEQ ID NO: 78351

SEQ ID NO: 78353 - DNA, 1039 bp, Homo sapiens; identical to SEQ ID NO: 78351

SEQ ID NO: 78354 - DNA, 1012 bp, Homo sapiens
cccagcactttaggaggccgaggtgggtggatcacgaggtcaggagatcgagactatcctggctaacacggtgaaacccggtctctactaaaagtacaaaaaattagccgggcgtggtggcaggcgcctgtagtcccagctacttgggaggctgaggcaggagaatggcgcgaacccaggaggcggagcttgcactgagcaagctcacttttctctaactgaaaagtagcatctccttctattatgaatgaaggcagcaaaccatagcagtattagcctacctatgactttatcaccagtagaaatcgcatactgttttcacatcagagttgtagatatttgtaaatgttgtttactgttactttaatggtagttaattggacctactgctaaatcttgttatttaatactttcataaataacatttcttgccatatcttaaacttctttaaatatttgacaactgtatctcagtataatgggattcctttgtatttattttttggctttaaaaatgttattcagagaaggggtccttaggcttcaccgggcctcactatggcataaaaaggttgggaccacctgatgtagaatgtgttcagctggacttaggtacaggggcttatgggaagacagaggagccagaggacaaggttgggagggtcaggaagaacctgtgtgctggagaaaggatgcttgcacagtctcggacacggtgattatttgcctgcctgatggtggaggtaacggaggacaaggtacactccattctggaaatgtgtagctgagtacagagcatatgggggatatggagggccatgagatgagttcacttacctgtgtgacagagttggcataagaattgcattttgtctttaatagatttcatcgtttcttggatgtcaacagccacaaaatagaaaaaacaatcgaagggtaagtcagtgtgtatatatacgcatccagaaatatatgtattttcttatagatctttttaagatagctttataat

SEQ ID NO: 78355 - DNA, 1174 bp, Homo sapiens
tactgtcatgaatatttttctagacttaaagtacactcgtctttttttaatctcatttcaggttactttcaggagtgaaaaagctctttatatttcagttgatagatgggaaggtaactgtgagaaacaatattatagtaactcatttaacacatgtaagttatttgtatttatggtaatttaagaaataggatttatgtaaactagtaatataattttagaacattttacaatattaaaattgctattgaactcgttcttgcttcctcacatgcaaaaaaaagctaacttaaaaatatttaatatccaaaaagaaaaattgagttgtgcatctttatagtacgtagaggattccttaatattgtttggaacatatttaatttcaatttgcattttctgctttttatttgtcattctgtattgtgaaagttatatactgtaattttgttttgctttaagtacatttacttatgtatgtttttaaaaatataagccataattctctagtctgttgaaattattgttcactttttcctttgtgtataaaattataaatattaatcatattattactttgtcttctactaaacatactgtttaaaacaattgcaaaagaagtattttacagcgagagggaaatgaatttgaatgtttacagaagaccacctttgaataattgcagtttgcttgtgttgtagagctgtttacgatctgtgctggaacaaatagcagcatatggccaggttgtgtttcgactccaggagttcattgatgaagtcatgggacacagttctgagagcatgctgcctggaagtgggtctgttcctaagaagtcaactgaagctccctttagaacctaccaggctttcatgtgggccctgtacaaatatttcattagtttcaaagaggaacttgcagaaattgagaagtgcatcatcaataatggtattaaatgttcttcatctttactcatactacacgtaactcataatttgaatgccacttagagtttttattatataagatttgaaagttgcctagcagataagtagttctcgtgaatgcttcttttaaaattattttaaatttatatttttaagccattcatatctctaaaaatcaaaaaactacagaagatttagaatgaaaaatctaaattattcttcctgcacca

SEQ ID NO: 78356 - DNA, 1046 bp, Homo sapiens
catggtttcaccagtgtcgcaggaacttgctttgaacaggggtgggtgtggtatattcatgtatagtttatcacatgtctagctccacatagccacttccatgttcagatcacagctgtgccatcgcctcccaggagcttgcttgtgcagccctttgtaggcacagcctccctcacccctctctgtaacattagcccattgggaggtgttttgttttacctagtgtaattttaatttgcgttcttttattataagtaaggtcaagtgactttctgtatgttttagaatcactcatcattccttttttatgaactgtcagttcctttatacattatttttctgctgagttgtctttttctctgtgacttgcaggagttcttccttagggaaattaggtccttgtggtatgagattaaaatccaccgtcctccattttgccctgcctgtccataagcctgatgatttgccagcatttatgtcacattttagatgcatgtatttttccttgctgttgagtttgatttattgatatttgcagatactacaataactcttgcaatagtggtggacaagttggcacctcgattgtctcagctcaaggttctgcacaaagtgtttagtactggagtagcagaagttccacctgatactcgaaatgtcgtccgggcctctcacctgcttaacaccctgtacaaggccattcttgaatatgacaatgttggagaagcctctgagcaaaccgtaagtgagacttctgcctaaagtgtgtgactccatgctgcacagcagaggagtgatagacagctgatggtagttctttgttgatacttgaatgatgactcgtcagacagttcagagtttttaaattaacttccaaatttaaggctgtaggaaactggcttttcagctctaattgccaagatcctcagaaggatgaggcaaggacaaggcaagctgtgagaagtacctacctgatgtgtatagatatttacaataacgctttcttacataaacactaacatgtaactaacatgacatgagatagc

SEQ ID NO: 78357 - DNA, 1232 bp, Homo sapiens
gtctctactaaaaatacaaaaaattcgccgggcgtggtgccgggcgcctgtagtcccagttactctggaggctggggcaggagaatggcgtgaacccaggaggcagagcttgcagtgagctgagatcgggccactgcactccagcctgggcgacagagcaagactccatctcaaaaaaaaaaaaattatggcaattaaaaagcaggagatataatacggtaggaactaggttttcttaacacatagaagagaagacaggaaagaaacattccagatattaaatattaatgatggaaatccaccataaatgatgggatttggatttttttttgttacatttttgtgactgcccaattttctataatgttatagaagataacctttctgatgatgaaaggaaaacctatgctgtttttattattggaacaagtttaagaggtgttaatatttctaattttagtaaatgtagaatgtaaacttgttccactaaaaacaggttacaaaacctgttgttgatccagaatcctgccttacgaatgccagagatcttagtgtcactcattttctctccattcaggttggtagaatacttgcaagctatgaggaattttttcttaatggaaggaggagataccatgtatgacttctacacgtcaatttttgataaaataagagaaaaggaaacatggcagaatgtgtcttttcttaatgtccaactccaagaagcagtaggacagcgttatcctgaagatagttcacggtaaaatatggacgccacctttatttaaattagtgtaacatgaactatgtgccagtaagtcttctatgaattacacatattattttatcctcactattcctatgagttttactaatattattttacttattagaaaatggaggccaggcacggtggctcacacctgtaatgccagcactttgggaggcagaggcggtggatcacctgaggtcaggagttcgagaccagcctggccaacatggtgaaactctgtctctactaaaaatacaaaaagcatggtggcaggcgcctgtaatcctggctatttgggaggctgaagcaggagaatcgcttgaacctgggaggcagaggttgcagtgagccaagatcatgccactgcactccagcctgggcgacaagaacgagactccatttaaaaaaaaagaaaaaattgaggcagaggctagctatgtgactctcctgctaaacaaca

SEQ ID NO: 78358 - DNA, 1022 bp, Homo sapiens
aaaaaagttgccaccatacgacctgtcagggtctgatggcctccttcacatggctggagtcagtgcttcctctccctgagctcccacacatgaggtttttcagtcctgcctcctagagaatgcccctgacctctcagaactggctcagaactccccaatgacctctgtgtctctcagcctcactcccttccaccaaaacggacttgaccctcaccagggtgacctcagaccaccagcagtgacttccaccactcatccctatgctccccgtgggtgcctcctaaacagatggactaagctttgtcttagaagggagaaagctatttactgtctggctccattttcccagcctcatgtcttgcacacatacacaccatgttctctttcctgtcttccttcgcgtttcagggatttcagaatatttctggtgtctgctagtgctgtcctcccgcccccctgtgacatagtctccagttcatgggcccggcagaggtctgctcattcctacatcccccttgtcttcgtgtgctgcactgggctgggagtccctggagggaagagagattggctttctattgcctgctcagtgcagcacctaacttagtattagtatttggtagatgcctactaagcactgagtgaatgcatacatatcaggccattaagagctaaaaattcttttttttgagacagagtcttgctctgtcacccaggctggagtgcagtggcacaatctcgactcactgcaagctccgcctcccgggttcatgccattttcctgcctcagcctcccgagttgctgggactacaggcgcccagctaattttttgtatttttatagagacggggtttcactgggttagccaggatggtctcgatctcctgacctcgtgatcctcgaggatgccaaagtgctgggattacaggtgtgagccaccgcacccggcaaagagctaaaaattctgactagtgcctgtgtcatggatcagccagttcataatcacacactgccctgtgacatc

SEQ ID NO: 78359 - DNA, 1109 bp, Homo sapiens
tttattcttcccacagtggaatctctagcgttgtcactcatggctggcatggaacaaagttaaatgtcttcagcgtaataaatatctccgactttgtcatcatacatgtacatttccaccatgtgcagctgaaaagtgaaaatatttttattttggtttatttgtaaaacttgtccacagtcagcctggcacagtcgctcatgcctctaatcccagcacgatgggaggccaagacaggcagatcacttgagcccaggagtttgaggccagcctgggcaacatggtgaaacccggtgtctaccaaaaatacaaaatgtatccagacatggtggtgtgtacctgtagtcccagctactcaggaggcaaagatgggaggattacttgagcccaggaggtcaaggctacagtgagccatgattgcactactgcagtgcaacctgggtgacagagtgagaccctgactcagaaagaaccacttgcccacagtccagacagatggattgtaggtgggttttctggagattagtagatactgtatagagttgtatacataaaattgtgtcagtagtacaaagtgtatataggctgtttactcttacatttcctactgtaagatacagatttatggtactgatacctttaaattatatcatattttgaaaatgtaattactgatattcaaaataaattaaaggacttaaaatcattttattatccttttgctgctgtcctacagtcacagaagctttttatatagagttttacatgttgtcttccctaaaagttgtcttagatgtagctgtcctagaaatgtttatattttggctgggtgtagtttctcaagcttgtaatcctggcactttgaaagactgaggtgagaggattccttgaggccagcagtttaagacctgcctaggcaacatatgagaccccatctctccaaaaacaacttaaaaattagccaagggctgggcacggtggctcacccctgtaatcccagcactttgggaggccgaggtgggcggatcatctgaggtcaggagttcaagaccagcctggccaatgtggtgaaaccccgtctctactaaaaatacaaaaaaattagccag

SEQ ID NO: 78360 - DNA, 1052 bp, Homo sapiens
gcgggaaacgctgtcttcttccctttgtgccttttaaacatgcactggattcgggtgaaagatgaaggaatggccgtcgtcgaggagcactccttaattgtttatgctgtctgtgtgttgcccaggtgcacacaggtgggaaagaaacagcccctcccaccagcctgatccctacccaacccaggcatctgccaggtgggctgatggagcttccccgagctcatctgtgtgcctggtagcccagccctgggctgaggtgcatgttctcattgtcctgagggccccacctggggcagtgggactggtggatggcacagcgggtcctccatggcccaggggtgtgggagatggagggaggcccttgggtgttctatgagcgattgagactttattctgtggaatactgggccccatctctgccttttattaattattttagcatccgaatagtttttttcatacaaatttgacagataaagacagaactgctctcccttgccctcctggggcactctggggtttcatggcgcatggtttgaaaaccacagctgtaggcagagagagccagtgaaagcgtgagcaggagagtgacaggaagagaagcagaggtgagtgcaggtttggcggtgcctgggggatcagagggaagcctgggggagggcgatgttaggaggttgtgagaccacttggtcttgggagacccctcccagaggcagcctgaccctggccgaaggggctgcagccccaaggtggggggcggaggccatgtggcgtggagacgtgctctctttcagggttccttggcacactgttttagatgtcagcacctcattgtgattttcaaacttgatttctgtttctctgttgatgaggctgttcttttgagctggttttgagtggccgcttttgaggatggaatttgaagtttttgtgcattaaagaaagcagattacctcacacctgtaatcccagcacttggagaggccgaggcaggcagatcacctgaggtcaggagttcaaaaccagcctgaccaacatggtgaaaccccgtc

SEQ ID NO: 78361 - DNA, 1068 bp, Homo sapiens
tagccaggctggtctcaaactcctgacctcaagcctcggtctcccaaagtgctgggattagagaagtgagccactgtgcccagccccaaatcacatttaaaaaaaattctgttgattcactgttctttgttttgaagcatgtgatgattgtgaggttttacaaaaatcaccctcccatctcctgggatgtctgctgtgtggagaagtgaggtccagggtctctctgggaactgggttccccaagggcagcatggggaggcactggctgatgccctgagcccgtgagcttgcagggggagtgtggcgagggctggccacatctagatgggttaaagaccaggagcctgggcggatctgcccgttttctagttggtggaagcactggtgcatgcctcctttgcctttgccccttggcctgctgtctccaactttctccagcatcttcagggctctgctggggccagcagggtccttgaccctgctcccctgcctccccagcccctgctgcctgcccacgccggggcaactctgtctgtggctccagctccatgctgcctctgtcctgcccctcaggcctaaatcggtctccagcacctcactcgcacttggaaagtggccatctgtacctctgtgcctctggccttgaccccctgggtgggcacccggcactgggtcagggcggttctcaaccttgctctgtggctgtgggccctggggcagctggcgaccccatccagcctccctccactcatttgccaatgtgtcagggtggcctccaccttaaggcagctgtgaggaccacttcttgagactgcatctgtgtggatctgaggctgaggggcagccagtgacatgtggaagaaaggaggtggacccatggagcccccagcatgccctgtaggcactgcccttcaagtgggtggcactgggaacctttgcctcctgcccaccgtgggtcccttgaagcccatctggggttccacgatccagcaggtgagtgaggtgtgcagcatgatgtgagctcagacacggagccagtctgccaccgcccggtggatgttgctcact

SEQ ID NO: 78362 - DNA, 1145 bp, Homo sapiens
caagcctttgacagtctaaagttcctcatgccctttcggaatcaacgctccttttgtggttcacttctcttctctgagagtgattttatgtttccttcatggagcctgctttctgtcagtttcaagtacaatgctttgactttttgccagtttgtactttttttttttttttttttttttgagacagagtcttgctttgtcgccctggctagagtgcaatggcatgatctcggctcactgcaacctctgcctcccaggttcaagcgattctcctgcctcagcttcctgagtagctgggattacaggtgcccgccaccacgcccagctaatttttgtatttttagtggagacagggtttcaccatgttggccaagctggttttgaactcctgacctcagatgatctgcccatcttggcctcccaaaatgctgagattacaggtgtgagccaccacgcctggccaatttgtacttttgttttcgtctgctctttcaggtattttcttgctgttagcctcaccctgactgtccattcctggtggtcctcgccctggccttggttaggcaagaagtagccacatggaaggggcttgctgctttttaaagaagtattttggaaacatccagattttttatgatgatgtccttcagcaaagggaggagatggaactaactgggagatgaatttttgttttaccttgaaagttaccaagaggaaaaaaatctctcccagttttcacttctgaaagttagaacatctgaattttacaggcgttttattggagcattttgctcagtaattttgctggaataatcagcaagattttgttactttagtgatgtagttggtaaagtgcaagtcaagtaatgatggtgcagagcaggcagtgggagctgctttcaggaaggggtctggttgcccacattgtaaacacttcggcctggagcctcactgggcagatcgtttctcatcgaggagcagtgactgcaggtgcttgaaggagggacatgggcttggctcctcactgacctgcagctttctgccctcctgcttcctctgcacagagaaatgccattgagcgtttctgcggggaagtgaggcgcctgtgccatgccgagaggaggaaggacttcgtgtcagaagcc

SEQ ID NO: 78363 - DNA, 1937 bp, Homo sapiens
gctgccgagtgtctagggagtctgaggaccccgggacaaggtgcatttatcccaggctcgcggtgcctgtggttcatgcatggtgccttatgggggtctctgcacggtggagccctgttggtgatgaggctgtgttccaaaccagtcgagagacatggccaggctctggtcatgtgggtgacttcacattcctgttggttactggggacagccagctgcgggcaggcggggcccagctctgctccgtgcggaggctgtgttctgccctctccctgcccacagcatgactcagagccacctcactgctgccctgggctaacagatgcgaactggagctcagggcagtcttctgggggtagtaatactctccagaaggcagactcctttttaactttcctgttgagctggtccattaccacatccctccatggcccccagagtaatttgtattttcatgggggctgttctgagagccttgtagttgggtgaggagatggtgtgattgtgaggctggaggtctcggcctctgggccttgctgatcacttggtggggtgttcagtgtcctgcaggccatcaggaagaccgtgtgtgactgggagacggggcatgagcccttcaatgacccagccttgcggggcgagaaggaccccaagagcggcttcgacataaaagtaccacgccgcgccgtgggaccctccagcactcaggttctcgtcccttgagccccgcctgcaccctctccctggggggacccaccctgagctgtgagcgggtggggctggtgaggcccgggttaaatgaggtcctcgctgcctgctcaggcagagaaagtggcgcctgtggtttctgctgctcctctgtttcccacccaagtgagttgggagcgtgaggagacgtgccttgattgtcagatgtgtcatgtgcactaaaaaggagtctgactccatttcaactcccatcccaaaaatgtgggcacaagtccacgtgtctgtattcattctgtgtttcttgatgggtgtttgaatgtctgtataatttttacgttgggtctgcaaatgactgtagatggggcgtgggaaactgtgaggtgctgcttgcgtgtgtcatggtcctaagctgcccactgtcctctctcctggtgtgttcaggcctccccgaggtgcttctcacgactttcacacccggtttaatccacaccgctgcgtctgtcctccgtcctggggctggtcttctccctcatctctgccggaggcttttaatctcttctgccactcttctggaaagtcaccagcaatgcacgctgctggctctgcaggagggtcagggggacggccctcggcctgtgcgtggtgccagccaccctccctgcctccctctgcgtgcgtcccgtgtccctgcctggggtgtgtgtgtcgagtgactaacgtctctctcctgcctctccctcctgtctgtccgtgtctagctctacctggtgcgcaccatggccgagtccttgggctctgccgagctgctcaggcagctcaagtctctgggcatggagaggctcttgcatgcggttaacacgtttctgaggcagtcgtgcacctacctaccccttttaacctttggtggtaagacatcatttgtttctcttgacgtttatggcacggaggcgaactgctccgctacaagttgttctttccccaaagcagcagcaacgtggccgcgtagacaggcacccggacccctcggggagctggtgcggggccctcccgaccagggcgtagcggagcagtccttctctcatgggctttttgagtttggcataactaatgtaccatgtatattttctcccccacaaatgtttccttggataatccagctttacatggtgagaaccatgctagagtccctcattgcagacaaaagtggttccaagaaaaccttgagaagt

SEQ ID NO: 78364 - DNA, 1054 bp, Homo sapiens
tgtaatctccctggcaatattctttgctctgaagttgattttatcttatattaatacagccactcctgctttcttcagcctccgcctgatctgtctgcttccattactgatcctgctttgtacccctttgctggaataaactgcagctgtaagactctgagttatgtgagtccttctagtgaattatcagatgtgtagagggtcatgagaccccccaaaacaaagagccaaaactgattacagtgacgagattagacaacactgaaggacagaaaccccacccagtgtctgtcccaggcccaagccctgcggcccgctgcaaccttgaagaaaccatctacacatcttcgcccacaccccctcctcccagcctctcctcagagcagcaccctgggctttatgtgctgggattctgtgtaatatttttggttgataacaggttcaatgtttgaaaagaagaacacgaaagtcatcagtgaaatctaatgacctcatgttacaagtgagagaattcattctcagacccgccctgactggctcaggatgacagctgtcagaggaggcatcactcaatgaacacatggtcccaggcctctggccccctgcccagtgtccggtttcccagtagactaagctcaccccaaagatgacacatccgagagacaacacagctagggtaacaaacagcagatgtgacttaactactcaggggagtgggaggaggcactacttctggggaagggcaccgtcacaaacactgtgctgtaaaagacttaagctcagaagaggaagcactctggatgtccagtcacacagctcagttcaagacagactctgctgcccgtgcctgatacagtctccagccttgttcgacaagcagagaaggtgggtcacagcacacagagccggctctggactcgccagtcgtgcaacttgggtgctctaactttcacgacactctgagccttcatctgtgaaatggggacaatcttacttatgagataaagaatactagttaatgtgctcaaaagggtgtcttactgagaagcaggca

SEQ ID NO: 78365 - DNA, 1012 bp, Homo sapiens
agcctcaagtccctataggcccagcagggcagcaggacccagcagtcggctctctcgcctcattgggtggcaattctttcgtaggggtgcccgagagcgtggtgttcaggggtctcttgtctcaactcttgcaggctgacctctgcttcctcgcctgcagacagtgaccccaacacacctcttcctggttgtaaggtgcatttgtctgtctactgcctcttcccacatggcaaatctaatccttctcaagaatttctgacttgaattcctttctgacctctccacagacagcactgtgagctccacacgcccgcactcaccaggagagccgtactcgtgccggggcaggcggcagatcttgggcatcacctccatcagcgtcttcacgtactgcaggattgtgccttgcagctgccggggagatgagacgggctgcgtcagccaccccactccgctctgctaacgcctgtggccggcgcataccctgaaacaagtctgttagcaaagagctcggtaaccagcaaggctgcaggatcgtctggctggggaataaaatccaccccgggagagagagcaaccatcaccaggtggcttcccatgactgaattcatgttctgaaactggactcctctttcaagatgaaagtggtcccggggtgccacaatgaggggagagctttgtcgccaggtgtctcctatggggatgcaccccagcatcgtgagcactgccagctccagggtcccccaggacgctgtctgtgctcctgggtgcggccccaggctcagctgtggtgaggtcagcaatcctaacaccctccaagctgccacatgttttgggacagagtccccagcgggtcctggaaggacctgtttgggtcacgggctgatggctgtgccaagtgaccaaactcttacatggtctcaagtcacagaagattaaaataataaaaaggatgaaaaattataaaaagtaagttatgtctagaaaactaaatccaggctggccaaggtgg

SEQ ID NO: 78366 - DNA, 1047 bp, Homo sapiens
cccaccacccagggaagcagtcctggtgcacaccccacttgcaacacttgaggcctgagcagccacgcagccgctggacttcacgatgccttccagtctggctcccaaccaggccacctggcctggcatggatgcccagcttgcaacagccacagccatcacggtacacgttacctgaggggtccccagtctttcaatcagtgggacaagatgcagcggggcgtactttgattctagtcttttcattttggcatcaagtctctccccctctgcagtagaaaaaatattttactatattctgctcctttgtatgaaacggtaattgcaaaggtttacatttgtttaaaaaacaaaagatttttaagttaacattatggatacagattctctttgaaaattattttacagaactggctcatttaatattttaattcaaaccggcagaaccaattttctgctcaatattcacttttcatttattgaatattccaaatgtaatcgaaagcagaaaatggcacaatgagcctgtacccatcatctgctataattatcaactcatggccactctgcttcttatatacccaactccccctgctcccatgctattgatatttggaagcaattctaagacatcatatcattgcagctctatttctcaatcttcatttaactaggttctgtacactcctcattacccctgggtatgactgaacaggcgccaaacccacaatctgcactggtccttagctctccggttgcatacagtgggcaccacccccacagagggcagtctggactccctggtgggggtcagcaggctcacctttcacatggactcgcggcaagatgttctggaaaggagccgcgtgcagcaggtcacacacttcttctaaagactagagcagagaaagagagggtcaagctaggaagggtatctcgccagagagcaatctggtgctgaaaaccaagaacttctttgccttttagcataaaataaactctgtaagtttattttatctctgtcaagagatttctgggatgatggaa

SEQ ID NO: 78367 - DNA, 1087 bp, Homo sapiens
gtcttgaggctacagtgagccgtgatcatgccactgcactccagcctgggcgtcagagtgagaccctatcttacaaaaaaaaacccaaaaagaacagtatgtgtgtcaattccgtttgctattatttttctgagaaaatataagaatcctgacattttgaaacatgaagaataaatgttgaagtgttaatagtaaaacatcctcactttgatggttgtagcctttgaagaagatggtggagagaattcgcaagttccagattctcaatgatgagatcatcaccatcctggataagtacctgaagtcaggcgacggggagggcacgccagtggagcatgtgcgctgcttccagccgcccatccaccagtccctcgccagcagctgagggcacgcgctgcactccgtaactcaacatggcatgcctttctctccgtaaactatttagtgagatttttagggactatttttcagtatctctgtacctgttaaagggggtgcttttcgatctaaaaacttaattttataaaattgacttatttttctagactaaaattgtatatgcttttggtaattaggaactcttgagaatattggctgctgattgttgccatcacgttcctacaaaattgtttttctatgggatgttctggcagctgtgtcataaaatgctgctgggttcattcattcattccataagaaacttaataccagcaaatgcattaaatcccttgccagttaccattaactgtaactatttagcttttgtttagggatctttctgatggtcttttatgagcaatcttagttctaagtcattgttcccatcccttttttgtgtgtttcagaaaatagtgaacttgattcccctgcttccactaaatccagttgtgacaaaatctaacgtgacatcagatcgaaaggttatagaaataaaactaatgagatctatttgtgttcatttatttactctaaccctgtgctgcctggcttggcaaggaactctaacctgaactcacataccaggccagctgggatggaggtcacctctaaggctgaggtgggatgggaccgtgacaccatcccatat

SEQ ID NO: 78368 - DNA, 1454 bp, Homo sapiens
aattgttgaacattcaaggccacctcatggtttctcctccctagtttctgtgtctgttctgttcccactgtccctcttgcctggtgagctagagcacttaagtcggcataaagtgctgctgcaaaaatgttaggggtataacaatttgtgaatatgaagctcgcattaatcttccagtgtgtccatctaagtaaatttttgtggttgcatttctgcttgggctgcaaaataaagctgatttttatttccaggccataccttttctccctatcaagtttattatattttgttttgcattctgtgtttaagaacaaccaaccatttgactcatgtaacttttctttgcctcctccaggttttgtggtctttgcaacccttgtggtcattgtggccttgatattaatcttcgtggtgggtcctcgccatggacagacaaacattcttgtgtacataacaatctgctctgtaatcggcgcgttttcagtctcctgtgtgaagggcctgggcattgctatcaaggagctgtttgcagggaagcctgtgctgcggcatcccctggcttggattctgctgctgagcctcatcgtctgtgtgagcacacagattaattacctaaatagggccctggatatattcaacacttccattgtgactccaatatattatgtattctttacaacatcagttttaacttgttcagctattctttttaaggagtggcaagatatgcctgttgacgatgtcattggtactttgagtggcttctttacaatcattgtggggatattcttgttgcatgcctttaaagacgtcagctttagtctagcaagtctgcctgtgtcttttcgaaaagacgagaaagcaatgaatggcaatctctctaatatgtatgaagttcttaataataatgaagaaagcttaacctgtggaatcgaacaacacactggtgaaaatgtctcccgaagaaatggaaatctgacagctttttaagaaaggtgtaattaaaggttaatctgtgattgttatgaagtgaatttgaatatcatcagaatgtgtctgaaaaaacattgtcctcaaataatgttctttaaaggcaatctttttaaagatttcactaatttggaccaagaaattacttttcttgtatttaaacaaacaatggtagctcactaaaatgacctcagcacatgacgatttctattaacattttattgttgtagaagtattttacattttcatcccttctccaaaagccgaatgcactaatgacagttttaagtctatgaaaatgctttattttttcattggtgatgaaagtctgaaatgtgcatttgtcatccccactccatcaatccctgaccatgtaaggcttttttattttaaaaaaacagagttatcccaatacattatcctgtgatttaccttacctacaaaagtggctcctgtttgtttga

SEQ ID NO: 78369 - DNA, 1062 bp, Homo sapiens
agcactggtggtttggatagagattcttttttttttttttttcctttggagatggagtttcactgtgtcacccaggctggagtgcagtggcgcgatgtcagctcgctgcaacctctgccttctaggtcctgccccagcctcccgagtagctgggattacaggatgcccgccaccatgcctgactgatttttgtatttttagtagagatggggtttcaccatgttggccaggctgggcttgaactcctgacctgaggtgacccgcgcaccttggcctcccaaagtgctgggattacaggcgtgaggcactctgcctggcctggatataggttcttaattaggatataaatgtatacaaatttgttctttattataaatttcatactgacttcttgcagtggaaagatggtaagtatacaggtgtagtgtatgatgaagcagatgattccctagaaatgtttacattttatgatgaaatgtatactttttttccttggcgaaagccagaatcttcataagttcacagtgttttagtttgatttcagtgatttaaattacgagttttattgatatttgaaaaaggaaagtagctgattaaagttctcaattttttttcctccccattttagtgccattctttcttcatactttctcaatgaaagacttaatcttcatgggaaaattgggtgtttgctaagtattctaggatctacagttatggtcattcatgctccaaaggaagaggagattgagactttaaatgaaatgtctcacaagctaggtgatccaggtaagaaaaaagtcttattagtcttactgtattttactttttaacttagtttttactttaatcgaaatttgatgagcacataaggaaagaaattgttccacctggtagaagaacaaattgtcgtcatgttccctgctccctcctatcaatcccaagcctgtgtttctactgttctttaactctgtgtttgtaagtagtgtgcgtatattgctactacttacttccttagctttaggcattatctgttttaccttttatttactgtacctatat

SEQ ID NO: 78370 - DNA, 1031 bp, Homo sapiens
tggagaaacctcgtctctagtaaaaaaaaaaacaaaagaattagctgggcatggtggtgcatgcctgtaatcccagctactcgggaggctgaggcaggagaatcgcttggacctgaaaggcagaggttacagtgagctgagattgtgccgttgcactccagcctgggcaacaagagtgaaactgtctcaaaaaaaaaaaaatattctgaagacactgagccttgactgactgttcagtcaacaaatacttattgatcatgtcttgtatgccaggcattgttctaggtgctggagatacatcagtgagaggaaaagactgaaaaatctccacccacatgaagcttacattctaggtgggagacattaaacaagataaagaagttatgtgtttatgtgcctgtgcgtgatgataaatgggaaggagaaggagtgaagtcggaaggagtgttgtgaaatggaggatagataggtttattaggatgttagatctgcagccagggccagcctcgctgaaaggtatttgggtagaagatgtaaaggaagcgagtgatctgcccatatgatatttgggggagaaacccttgaagcaggaggaaactgtaactgtgaaggccacgagtggggagcatgccaggccaattaacgtgtgatacatagccctcagtgactcccctcctggtattcacacctttctctaatcccctttcacagtgaattagtgcagttcaaaacggtgtgatccaagaataccacagaagtgatgatgtgtgtcttccgaggtgaagcagagagaggcattgcagctttttcctgattccttggattgctcactttgagagaagccagctgctgtgctctgaggacactcaggcagccatggagagctccccaggctctcactgtgccaggacctacttgccagtcctgtgagtgagctaccttggctcacctgttgtgtattaaaaaatacacaacaatagtcagttggaagggaaaaaatggatgaagagttctaaggttctggcattatc

SEQ ID NO: 78371 - DNA, 1863 bp, Homo sapiens
tacaaagttgatgtttggttatttatattgagaaaagaagtgagaagatgtcataattagttaactactcagtcctgcagttatcatcaaaatggaaacagggaccaatgcccaagtaatatccaaccttttctttaaattttgatatgtctgcagggaaggaaataagagtccatggttaggctgggcgtggtggctcatgcctgtaatcccagcactttgggaggctgaggcgggtggatcacctgaggtcaggagttcgagaccagcctggcaaacatggtgaaaccccatctctactgaaaatacaaaaattagccgggcatggtggcctggcctatagtcccagctactcaggaggatgaggcagcagaatcgcttgaacccgggaggcagaaacctctgcagtgagccaaaatggcaccactgcactccagcctgggtgacagagtgagactccgtctaaaaaaaaaaaaaagccatggttaaaatcagaatttattaaaggctgggatcttttgtccatgatagtagacgttctgactttgaacttcgacattttggcaggaaggaaagactgggcttccccagcttgaagagtatccagtttagtgaacttcggctggtgtaggttgtttctctagaaatcactgacaagtcacaagaccctgcggggtaatcaggatgattggccctgccctgactcctctatcagggacactcgtggtagctcccggtgttaagtggcgttatggtcacattccatcattctatcctggcttcatttttagacctgattggaccttatgaggagagctgccttggcaggaaacagtaccacccttctgtcttccctgtgccatctctgtggctaaacctaattcagcagtcagaaaaacatgaaatgatagcctctatggggttcagtggacagaggagaaactgtcagcatctactgcttgttcccctagtccctgatgcttggtcctaagaggtgctctcactgttcatgacgggtatgcttgtaaaggattcattcaccttggcaagataatcattaagaaattgtcagagaaatcccgagtcatgcagaaacctttatttaaaggagtaactgagatatttaaaaatctgtcattactaatagttataatttatacaagagtcttacagtcttccaaagatgtgaaatatttcttcattcacaggtcaaggtggccatgcatatcttaaggaatggttgtggtgggctggactgctgtcaagtatgtataaagaacattgcaagaaaaatatgatagctatatattaaaatatttgcatatggtattatagcctcattactagcaagttttaaaggtttaaataatctttttttttttttttttgagacagagtctcactctgtcacccaggctggagtgcagtggcgtgatcttggctcagtgcaacctccacctcctggattcaagcgattctcctgcctcagcctcccaagtagttgggattacaggcgtgccaccaccacgcccagctaattttttgtatttttagtagagacggggtttcactgtgttggtcaggctggtctcaaactcctgacctcaggtgattcacctgccttgccctcgcaaagtgctgggattacaggcgtgagccaccgcacccggcctacttttttcatttttgtgagtacttagtaggtacttatagggtacatgagatactttaataaaggcatgcaattcataataattgcattatggtatccatgggttatccatcccctcaacaatttatcctttgcaggacaaacaatccagttagtccttttttttgtttttgagatggaatcttgctctg

SEQ ID NO: 78372 - DNA, 1069 bp, Homo sapiens
tgcaccttaatgggcaaatcaaaaacattggactttttcatttcttgggagtaatatcaactcagtgtgataatgtcgtgtttaccattattgcagtctccctgcagtaatgttatcactccttatttaactatctcttgtctgtcttccttgtgaagctagagagcttagcataataaacgcttagcacataatatccagtaaatactgtttgaatggatggataaagtaattgaggggctaggtggacagggagtttaagttgctttggttaaaagccagtgtctcataacttgaagaacggaaaaacatggctagttagggtcctgactgaattgcagattagttttggaactccgaagttaaattgtgggactaaaaatcccaagatgtgctagaaagctgatctggcagttagaaccaatcataaaccttgttgctaaaaactattttttctctgctatccacactgtgctttagttcatctgtcaactgagtttatgagttggccatttggaaaaacaattgcagtcttggtaagcctctgcttcctgtctggcctcgaggattgagccctccagataccatggtcctcatgttctccaaaggccaccggtaccatactgcacgccccagcagacacctctctgcaagaattgttaccctctgataaataatgtgaaatctgccttctctcagcacatccctgaataggctaaataaataaattagcatatgcttatgtgcacctattgctaagaagaaaatgtatgggtgagaaaattttgagtttctttgtatagattattcaaaaggacacatttgagaacctgataaatgtatttccaaactagatttgtatattatgcctaattttttctgcagaatttttttttcttatcagaaagttttattaaggctagaaacatttttttttaaaatatgggatcagagtttatgaaatcagtttaaacttggttttatagcatgatcctatcttttgccataatttgaagaaatatacaggttggtgctaaatttaaataataaatattatcaatattagtaa

SEQ ID NO: 78373 - DNA, 1032 bp, Homo sapiens
cgccactgcactccagcctgggaaacagagtgagacactgtcaaaaaccacaacaacaacaacaacaacaaaaaagcccttcccctcccacacacagaataagcagaaaatcataagactctttaaaagtgtttaaaacgtcagtaggttatttttggaatttttaattctcttagtcgtggagtccttgaggataggccctttgatcatctttacaacttcagtgcctggcagataatagctgctcagtgtttgttgagcaatggtcacagttcggattactcccgagtccccctaagtaaactgggcaggtgaaccacatggagcttgggaacctagttgaagtgaaatttagaaaattttactgtttatctgtctttaatactggccctgcctcatggctaattcttaagaagaaaaaatatctctgttgcaggctctcccggctgtgatagaccttcagttacagagagagggagcagagtgggaccaggtctgagaatagtgaagcaactcattcctttcaggacattccctctgatgtcctattttcaaactgtaagtcagaatgagatcacttattttcttggtggcagaaggctgctttataatttgaaggcttgcaaattgtatgctgcttgtcatcccccagccctccacacatacaccctggtacagttccatgcatgaagaaacaaccagatcaccttatttggtgatatgcctcattctagaaagatttgtaaatcaaatttgctaccgtaaatgagtgccttttgtggggaaaccaccacagaaaacctaagtaattgtttttaaggaacttaaagagtttaccttgaagatagaacagtagttgagaattaaatagtaaagaagagaaaatgcctgtgggctggagttaattgcagaagtctttgtagcacagcttaaggtgtaccctggccttgagtggagagcaggctttgggttgcaggaggaggaggaggggagggcctgtctgagggtgtcaggtttctgtgttaggaaatg

SEQ ID NO: 78374 - DNA, 1053 bp, Homo sapiens
tgtatttttagtagagacgggggtttcaccttgttggccaggctggtctcttaactcctgacctcaggtgatccgcccgcctcgaccccccaaagtgctgggattacaggcgtgagccaccgcgcccgacctaagagctctaaagtgttaatgtaatgtgggcagccgggtgtagaagtaaagtccctttctgtgtggtcctctgcatgtgactcttttttacccctgggaggtttccttagctgtaaagtgataccttcatcttattgcgtagaagagaaatgagtagaaatgatgcatggaatagtgcctggggaggtgttcagtaagtggtagctattgttagggagagataataaaaagaatttcacatattttcagaatgtttttaataggtaaatatggtttactcatatttaaaacacatgactttgaatattacatttttttatagatggtgtaagcttcatttaaactgatttatttgattgctatacattgtgatattgaacagaaagataagacttctgcagagaataaaaggtggggtgggggtgggagaggaaatgggagatttaggtcacaggatacaaagtagcagatattcaggatgtacaacttgagaactacagctaatgaaattgtattagagattttccttcaatgagtagattttagctgcttttgtcataaaaaagtaactacatgagatgatagatatgttgatttgctctactgtggtaactgtgttagtatctgtatgtttcccataacataaatctcaaatatacacaatttgcaaagatttatctgtgttgtagaattaaatacacccctcagactagattagagcatccttaaacatttctgcatatctatttgttttatgtaaatgaagttgaaacagaactacttaaatagttctgtaatggctccagatgaaaataaattatgatctggccaaataaatgggttgcagatctgttccttgccttttgggtttgtgtatggcccatagggccccacgtgatctgacactcacctttttttttc

SEQ ID NO: 78375 - DNA, 1023 bp, Homo sapiens
tgcgcgcgaggcctcttgcgtcatttagccgcgcctaggttttccggcgccggccctaggtcccggcagcggtggtgacggcggtgccggaggttgtccttggcaggttttcctcggcgcttctccatggaggaggcggtgcgaacggcttcagccccgaatgctcgcatctcccactggacggcgacgaaggcggtggccgtgcgagcgcaggactgggcggcctgtgtgggggtgtgagccgcggtgcccaaggctgcgccggcgaggggaagccgcgcggccggccggccgactagggtgaggtcgccactccttcctttcaggcaagcgcgaaggggctgacttggtggcgagccagcccgccttgtgtcggagaagggttcttcgggcaactttcctttccgggtgttctgaagcggttttcctgtaatcctcagtgaggaaacccaccgtgaatcggattgccgttcagtcccacggaagcctggctcgttggccatgtcggggacgcatgttcattaagttcattaaaataatttcatttgtcttggtgagttttagaaggtggcttcagctgctgcggggatcataactgacagttaaacaagccttagaagtctgctgtgacgttttgagcctgactgttttaatttccttttataaaatcacggaatcctatttccctctctatacaattgctcaaaactgtgtgtttagtttggtgtttgtgcctccttaatttcttttctaggttgttagttcatttaatacaggactgcatgttaagttctgtttctagaaatcctgtgtatagccatgtgcccggttaatactttttttagtaagaggaaatatcagagtcgagagtttccattccagtaagctgcctgtcgaagcagtagttgtgctcgattgagtaggttttatgttgattggttggcaaaatgagtatgaaggctagtaaccaaattataaaacgtacttagtaactttaagtcttttgcctacttctgtgttttc

SEQ ID NO: 78376 - DNA, 1094 bp, Homo sapiens
atatgttggtgtttgttcttctttggatttcacatctgttttctggtagaagtgagcactgttcacttgtgcagtcgtcttattttccttcttcctagatgactcagctctttgtaaatgttgtgctcaacttctaggggccagttctagactttggagatgcagtgtctcccaggtgtgcacggacacctggtccgtggaaacaggtgtgatgggcacaggctgctgcccttctgtctggtcgggggattcctcttcttcaagctgctcagctaacccagaagaggggagagagtactccggtggttcccagagcccctcccgttgtgccgcttcgacctgacacctgctcgatgctgacttaggcttcctgccaccaagcaggaaactagaaagagaacatttcagtgtaaggtctgttcccgacagcatggattagcttccgtgttctgaagttgttcttttcatggtgtctgacaccgagggcgttgttcgtccatcaggcgggattggatggagtcttggtgttttgccttctcagggaccaaaaatgtatcattgactccttaacagtgaccttcctcccaaggacatatccgtgttcatttttcataggttttactcatattcataggtagattctgttaatgtgagttggaaagaaaagaccaatttgtacaccagtcacaccacaagacagtttatcatataaaatacctcaattttttgtattcctcatttccacctcacaattgtactggtgatgaattttaagggtctgtcctttagcttataggtgatgtttcacatctggccagattcttatacctccattgtatacttgaaaaggttcagaattacaggaacagcagtgagaatttggcccactaccacgactcatttgtttcattcacattcctcacgtgcaacaacataattatattttaagaaaatgtaactttgttacatcaaaatatgttgtctagtaaaaagttgatattcagtagaacaaggatcatgtaaataaacatctatttcacatgtacccaaaagcatttaaaaagcagaatccagggcccagagcatgagccagg

SEQ ID NO: 78377 - DNA, 1072 bp, Homo sapiens
gaaatgcaggccttaacttactgaactgaactttctgaaaacgtaatgtagcagtatcaatatacttttgggcataaaaatagtttcctaggtaaggggtgtgagatattcaaagaatacatgtggctaacaagtgtaatgagaaagttcatgtgtcacatgaaaatgatcatgtttgtgttgctacagcttttgtgggaaatttagtttaaaggcagctcttggtgtaccttagtatattttaatccacaattataccattgatactgagaggtgatacccgatgatcttctctataatattcttagagtaaaacaaaatctcaaaagtattaatagctcttctacccttgaaggtgactggtcctgggacagttagaatctttcaggtttacctctgttcagcagatacttcagtaggatacatagcttttcttccagtgaaacaaagttcatatcatccattgtttttcaagcacgtgacaccagcctcaaagtaaatgacatgaccagtggttgaacagtctaattttcaaatttaatatagagcatataacttctgatttgatagtatttattttaaaaaattatgttttcatcattcatttgaaaatgaaaaagccccaaagtgagaactttgggggagggcctagaacatggatagatctcttagtggtctttccaaaagtacatgtacttgaaatattttcattatcatactattctttgaaaaaaaagatgcttactgtatacttgttttcaagcatcctctaaaatcaaaggttttgatcacaatatgcagatttctcttgatagatacttaaataggctatttctctcctcttcttgggcaatgccttgttttctcctctgaatatttgcatttgaaaggattgcttcctgttctgctcattgatcaaaggtagggccaattaaggattctaaccctaacccagcaccacaaagcccccctggagcatcttcccggctggcaggaccatgccatctctgtggagaaggtgctggggagggaagtccttccagtgccacatggagtgaggccctgcccatgc

SEQ ID NO: 78378 - DNA, 1057 bp, Homo sapiens
tggccgtgctcggctgcagcatcatcgtccagttcaggtacatcaacaaggcgctggagtgcttcgactcctcggtgttcggggccatctactacgtcgtgtttaccacgctggtcctgctggcctcagccatcctcttccgggagtggagcaacgtgggcctggtggacttcttggggatggcctgtggattcacgaccgtctccgtggggattgtccttatacaggtgttcaaagagttcaatttcaaccttggggagatgaacaaatctaatatgaaaacagactagattgcaataggagcttggatggttcgaggaataggcattggaggtggtttctggccgtgattggatgtgaagtagaagaggtcctcgatcatggtgttagaattgactggatagtaacaggtggtctggtggatagcggggagcatggctcagcaccagagcagaggcccagccagccctctgcagcccaaacgtccccaacggttgcctggcaccatctctctctgatgagacgaatctcattttcatttccattaacctggaagctttcatgaatattctcttcttttaaaacattttaacattatttaaacagaaaaagatgggctctttctggttagttgttacatgatagcagagatatttttacttagattactttgggaatgagagattgttgtcttgaactctggcactgtacagtgaatgtgtctgtagttgtgttagtttgcattaagcatgtataacattcaagtatgtcatccaaataagaggcatatacattgaattgtttttaatcctctgacaagttgactcttcgacccccacccccacccaagacattttaatagtaaatagagagagagagaagagttaatgaacatgaggtagtgttccactggcaggatgacttttcaatagctcaaatcaatttcagtgcctttatcacttgaattattaacttaatttgactcttaatgtgtatatgttcttagattagaataatgcaacttcgagtatgctttaatatttcaatattcaagtta

SEQ ID NO: 78379 - DNA, 1047 bp, Homo sapiens
atggtggctcacacctataattccagcactttgggagtccaaggcaagaggatcgtttgagcccaggagtttgagacttgcctgggcaatctagtgagacccagtctctacacaaaatttttaaaaaattagctgggtgtggtggcatgcacctgtagtcccagctactccggtggctgaggtaggaggatcacttgagcccaggagttcaagcttgtggtgagctgtgattgcaccactgcactccagcctgggcaacagagtgggaggtggtctcttaaagggaaaaaaagaagaaaaagaaaatggtttttctagataaaatatctgctgttagaagaaaggtcaggtagtttggtttaaactttaatgatttctcttttttcaataaaggtccattttagcttcctatctcctgaaggaaaagctcaacatcttgggcaagttggggtgcctgctaagctgtgcaggctccgtcgtgctgattatccactccccaaagtctgagagtgtgacaactcaggctgagctggaggaaaagctgaccaatccaggtaattcctttctagcagcactgccaagaaagtttgcagtaggagtgccaacttttttaaccacgtcttcaaattggatgcttcctggcagggcagaggaaccgtgtgtccaccctgatctgttactgtagatctgtgttctctgggaacgtgcatcagtgggctgtgctcgcaggctagccctctgccctcaccctcccgcctgatcctcaggccctgcggggagcctccgtggcctggtattccttcgggttctcttctggggccttgtgcatgggcgccttcccttcccacagtggctccccttgggccaccctcccaagtctgactgccacccgcccctccccacatacctttcctggtgtaccctgcccactctatctccacctcagcacttcactccctccagcgtgaagctctgtgagaacaaagacctggcatctcttaagtttagattcctcatatagccctgtttatatatcttttgacataa

SEQ ID NO: 78380 - DNA, 1633 bp, Homo sapiens
ctatgagaaggccaaccccaatgaccgccgctttggcattctttccaattgcaaccattccttctgtattaggtgtatccgcaggtggagaagtgccagacagtttgagaacaggatcgtcaagtcttgcccacagtgcagggtcacctctgaattggtcattcccagtgagttctgggtggaggaggaggaagagaagcagaaacttattcagcaatacaaggaggcaatgagcaacaaggcctgcaggtattttgcggaaggcaggggtaactgcccatttggagacacatgcttttacaagcatgaataccctgagggctggggagatgagcctcctgggccaggtggtgggtcattcagcgcatactggcatcaacttgtggagcctgtgcgaatgggagagggcaacatgctctataaaagcattaagaaggagcttgtcgtgcttcggctggccagtctgttgtttaagcggtttctttcactgagagatgagttacccttctctgaggaccagtgggacttgcttcattatgagctggaagaatatttcaatttgattctgtagcatcgtgctgtggcatgtggtctagtctgctgaggttctgtcgtctgctattgcctgttttccctgtgttgacactcttactgctttcaggggctgttgaggcagtgcttctgttttcttgtctattctgcatatctttccccctaggattatggtgattatctgtgttaaaaaataagtccttaaagttactgttttggtgaaattaatattaatgtcagcttatggcttttttttgtcatctctgttgtcaacaggattaactcagttctagtgtagtgtttactgaatttccacacttattttgaagaccctcaagagtaaatgtggcagagtgaaaggagaagttttaattgaactagtagctttgtgctataatagccttaacaaatggacccttgcagggctttgcagctgctcatctgtttgtttacagtttgttctttccctccttccccttcaagtgcacttgttaaactgtgatgaacttgtgattttgtgttttacttgaccaaaaccaagtgtatatgtttacatgtttttatcctgtttagcttgacatgaaataatttatatttggaaatatatatttaagaattatatatataaaaatatatatgtataagagttatgtatttgaaaaaaatatataaaagaatatacatcacaatataatatttatgtttatgtaataaagtaaatacagagctgaaagctgaaggtcaaagcctaacaggattggctgttgtgtggatgtgagttgtgtgaataatctttctgtccctcgcacagaagccagtaattagcatctaatgaaaaggactgttcaagtgggtctggccaaatgtgacagatgcagatcttagaggacttacaaagcactatattggtaattcttacaatggcattaatagcttactctataaatacagaaatggttttcctatgcagtttagccaccttctcattaattctttgtaacagcaaatcctaggctcagaggcacagtgctttgtatttgatatacaaagtctctagactttcccaacaaggggcttttga

SEQ ID NO: 78381 - DNA, 1079 bp, Homo sapiens
gaagctctggaggaggccagagctctgcgggaggctaatcccactgcccactaccctcgcagcagtgtctctgaggactagcaaagtctggaggcagatgaatggtttctgaccctcaccagggctgtggaagggtgggggtgggtcattatagtattcaggatttacagtgcagtattcacgtgtaacttttaagttttcagtacagtgcttttatacctttaatgcaatgttgtattcatttgggtactattgtgtagtatttaggatgtatgcatgtttgtttatatgtaagcttggttggtgctttcgcttttgtgctacctttcttggatttttgtaccagagatgtgctaaactgatgaaatacattgagaaagtttccatcttattcttttatatgggactgatgatgtgtgttggggtagactgctcctgcagagtttggaagaagtcaccagcaaagccggcctaaccaagaaaagtcaaggcccttcatgaccttgctgggcacagaaaacaccctcgtggagtacactaatttgaactggactggtctcagtgtgagcacttggcacactttactaaacacatatacaaccccaccgtgagtcaactttaaagtaaacattaaagattcttgtgatacaatcatttttggaaaagtgtactttatcattttaacaaagcagtatggttgggaatgagacaattctctattttacagtgtatacagatacaactatttcccctaatagggtgggaaaaatcgctactcatgattactcctaaatttgtgaagtttatagttctattgtctttaaatgtaactcatgtttatttcaaaaacattcacaaatatagaaaagtatacaaaacaaaacagtaagattgtctgtaatcacatcatatgggaataaaaaacaaaaataatttccttcccttaagtttctacattttatcaaaattaatagatgtcttgtgacatctattaatatacatataacatatttataatataaaagagtgagacattgtgctaagccctaacatgtatttttctcctttaatccttgcaa

SEQ ID NO: 78382 - DNA, 1017 bp, Homo sapiens
aagctcatgtttacaaagccgcccagacctttctctgggactctcatatttaacttaattctggatatacccaggtaagcgtttcccaagaaacttgaccccaacatcccaaaaacttaaggtatctttcccttaaactggccccttctccagtacgcatccatctcacttctctcctgccctagatcttctcagcccaaacaggaaaccccgggatcgctctcccagcaggtgaagcctcgccatggaccctccccgtcggggccccgcgctgccccgcccgcccccagccgctggccaaggccgcggtcgcgcaggcgcagtgccgcgtcccgccgccgccccgccctgcccgtcgctgcggaaggcgccgcgcgcagcaacgcgcacttcctctccaggaatccgcggagggagcgcaggctcgaagagctcctggacgcagaggccctgcccttgccagacggcgcagacatgtcagaacaaagtaaggatctgagcgaccctaactttgcagccgaggcccccaactccgaggtgcacagcagccctggggtttcggagggggttcctccgtccgcgaccctggcagagccgcagagccctcctctaggcccgacggccgctccgcaggccgcgccgcctccccaggccccgaacgacgagggcgacccgaaggccctgcagcaggctgcggaggagggccgcgcccaccaggccccgagcgcggcccagccgggcccggcaccgccagccccggcgcagctggtgcagaaggcgcacgagctcatgtggtacgtgctggtcaaggaccagaagaagatgatcatctggtttccagacatggtgaaagatgtcatcggcagctacaagaagtggtgcaggagcatcctccggcgcaccagcctcatcctcgcccgggtgttcgggctgcacctgaggctaaccagcctgcacaccatggagtttgcgctggtcaaagcgctggagcccgaggagctggacagggtggcgctg

SEQ ID NO: 78383 - DNA, 1004 bp, Homo sapiens
tggagttaccctgttctttatgtattgagagaactgtttcttgtaagcattttcatcttcttccattaagtagcacatgtaatcggcaacattctggcccatgatgtgcttccggtgtacttctgcattaaattccttgctttcagaaccataaccagggaattgtttggtactgtgagggatagacaagcctccatccacagctcccttcagggcaccaaaaactttattgccagtggtagttctggcaaggcctgcatccaaatagcaggtaaaggcacttggctgaccatcaatgctttccacaatgtattcatcgccagtcacctccacttggccttcatagatcttgtccatgccaaacctactgagaagcctgcgggccagcggcaggccagtacaatatgctgcagcataatttgtcgggccaaccttcacaccatattttggcagttcgtgtgcatatgctgtgcagactatcatatccccctctatatgggcataagcaatctgacaaatgatatctctgtttgttacacgaactatcatcctgtatttgagtgtgttgtatttatttttatcctgtatcaccaagcgtttccgagtatcgtaatcagttttaccctctcatcatcgtcttctaaatttcacttggtatctcttaaagtaggccttattcttaacaactttaacaaaccccatcctgcagaacagagacccgcgtccacagctcaacagagaccagcaggcacagcggcgctggggcagggagaaggggaaagctttttaatcttcagtgggtacctggaacaaggtatctgtgtaaaatgcttttattattcaaccagactttaggctaagaaagcccattttaatgggtttattttaatattccagccctcatgctcagtcacctgtttctccagttctttaatgtttaacttatacattcattagaattataatagagggtcagtggaaactgactgttctggttgctaatg

SEQ ID NO: 78384 - DNA, 1071 bp, Homo sapiens
gcaccatttgcatgtttttttaaagtagatattttataatttaaactatgttctattccactatataagtatgtctactgtatcctaaaaatattttttgaaaccattttggaaatcaggtttactgtttttggggggaaggtgagtagggtagtggtggtatgtatgtatctacatctgcataagtgggaattttatatgtacgtgactacaaatagaggtagatatattattttaatttcattttctgattttttttaaaaccagattttctgatgtcatgggcttctaaaaggagaaaaaagtggttatagcatagattatgactgtttgaaggttaaagatcttgtaataattttaccttgttttaattagatttaaaaatccattatattaaatgtagttctaaatataaccttgacaaatagttatttcatagattgatgcagtctaccaaacaaatgcctctcttttctgtttcagggatcgcttacacctgagacgaactacagaacagcacgtaccagaggtggaagtccaagtcaaacgcagaaggactgcctcactgagcaaccaagagtgagtacagactgtgttgggaacaaatgcaagtcagaatctcctttcagattagaacaaaatatcatgcaatgaggggattaaaatgaacataattgaagaagcagacacatctaatacagaagatgtagtaaaaaagcaatgaaattcttaaccatattatcctaaaataattcaccctcttaaagattttagtataattttcttttttcctatacgtgggtaagtgcattttatctttataaaattttgtaattacccttcaacataagcatacttaaatttttctgcattattaaatcactttgtatgcttgcaaaatgtactgtgcgctgaagtgattaatttacatattcattcttgctctgtgatatttaggtgtttgtttttggttagtgcatttattctgttaaaatttaaaatacatttgtgttttttatcctgttttaagtatatatatgtggaatgtatatataggatgtatacacagac

SEQ ID NO: 78385 - DNA, 2985 bp, Homo sapiens
cataggtatttcagaaaaaaggaaaaatctgaatgaaagagtaattgagatgttgatacagagatgacttcatattaattctgaactagagagagagacactaccttaaataaggatggaaagaaaaatactaaatttgggaaaatgacgcttagtttttgaaacatttaggaattactaggtaaaataaaattcaatgactttcatcagtcctaagtgtgtcaaatgtgagagttaagaatgagggactagggaaatgtggcagtcccttggtgaggaagctagtatgagaggaaggatgtttttgaacgtgtctgtcatagtgattttcatgcaaaattgtctgcctgttttaaaacatggtagattgcagtgcagctttaacatgctttcctctgcaggctccatctactctttgaagcttctgcccagcttgcattgtttctaggagaacctgcgtcatacctttatctatagccttcccctaggtcttcagaagcatcaagttttaactgtggacattggatttggtggaacagcaatcatggtaagctgtatgataaggctgagggttgaaatgtgctgtaagggccgaaagaaatagtttgccagcatgtgcagtgatcttgggttctgaatgttagaaataaggatacatccatggatatggattctcattgcattgagtatcagctgaagatgagctgatttttttatttttatttttttcagacggggtcttgctctgtctcccagtctggagtgcagtggtgcggtcttggctcactgcaaccctgggttcaagagattctcgtgcctcagcctctttattagaaacagggtttcactgtgttggccaggctggtctcaggctcctgacctctggtgatccacccacctcggcctcccaaagtgctgggattacaggcatgagatgagccactgtgcctggccatgagaaatgtttcatgatgtgagaaaatacaggagtttttggtcatgattccaccagtggtgaaggactgtcctgcagatgatggactctcaggtcagattacaatagaaataaagagggctttgaaaatggaagggttttggcattaacagtacagagaaaagcagtctggagagagagaacaccctacatcattgtggtttggtttacttaggggagtggacagtttagagcatgcatcgtcacagagaaggataatcacctgtaaggaggtgaaaattggttcttgagatgtgaaaaaatacttcataatcctttgtggtcctccaaagagccatactaaatatggaagaatgttggtgaaaaaggagagaatatttgtttagttaaggaaaccaggcttagattatgtaagggtggagaagaaacaggagaagattagaagactagggtgttggcaagctgaacatgactcttgtcttactgcttctagactgttggcaagagtagcaagatgctgcagcacattgactatagaatgagatgtatcctgcaagatggccgaatcttcattggcacctttaaggcttttgacaagcatatgaatttgatcctctgtgattgtgatgagttcagaaagatcaagtaaggctgatttgggcaaatgggggttggacacagaggcagtgggaagggaaggccagagctggagtaagggatttccgagggtaactgaagtagttagggaaactatggtagagccagtctattgtttaacctcttgacctgatctctgaattaggtcagagtctgcatctgaactcttttaagtttgtaaaacaatcatggatttattactgggagtaaaagtatatgctatggtcagaatactcgtatttatttttaaaattgagaaaaatgctatattaattaattggttggcttctgcagcagtcttagaccaaatcttggttgaaatggagaagaacagttgttcttcatggttgaggagttgggatatggttgccatttggtatcctctctttgcctatcactgttcccattatttcagttctgtgtcacctgtcattatgatttaattatttaagtaattttttaaagaaatttccattttaatgtggaaacccaggtttcaattttgtttttcttaaaaggtatttcacaaaagaaattagtcttgttgtagtgtaacatcaaaggaacattctgtaaaagactaaagttagattagaaaatagcttcactatttacccttgtatattaactgtgtttacagatattttttggcttgtttttcagtgataactcagtaaatgtttagcatcagttgtcttaattgatacttgaggttgtataaatattttgatgagtgagtgatcactaaaatttatctcactaaaatttaattctgatttgtaggccaaagaatgcgaagcaaccagagcgtgaagaaaagcgggttttgggtctggtgttgctgcgtggggagaacttggtatccatgactgtggaggggccaccccccaaagatgtaaggaagatgtagggcaggacagaactttaatttgcagggacatcatattatgtgagatgtctgaaatcagggtagagcagacacagttcaacatggattgtcaaataaaatgtgccaggcacttaatatcaattgttggttgcctatgctattcgggattaggggatttttggtgaattattctatgtgctgggcattacctaggtaagggtaggagttggtgattcatgtttgcttggtatgtttataaaagaggtgttttcacaatttgacaaataatgtgcattttatacacaagatacctccatggtatacttgcttgtttgttcatttggacacagaactaatatgagataggtgtcatgggaaaatggtggagagaagtgatctctgatgaataagaatactgagaacttgtaaattgtttgattttaggctatgaattttcttgtttcagactggcattgctcgggta

SEQ ID NO: 78386 - DNA, 1037 bp, Homo sapiens
taatccagcactttgggaggccgaggtgggcagatcacttgaggtcaggagttcgacaccagcccggcccacgtggtgaaaaccctatctctactaaaaatacaaaaatcagctgtgtgtggtggtgggtgcctgtaatcccagctaccaggcagggagacaggagaatcgcttgaacccaggagtgggaggctgcagtgagctgagattgcgccattacactccagcctgggtgacaagagtgaaactgtctcaaaaaaaaacatgggaataatgagagaagtacattgcaacagttgtttgtaactaattggtcatttttctcatttattttctgtgtttgaataatgtgaaggtttgcatcgctttgactgtttcccgccctgccttctcaggtaatgactccacagggaagaggcactgtagcagctgctgctgttgctgcgactgccagtattgctggagccccaacacagtacccaccaggacggggcactccgcccccacccgtcggcagagcaaccccacctccaggtaagggattggtgaacacgaagacgaacttgaatctctgatgagagatagcttactgatttaagacacagcctgagagcctaagaatttggggaatatgcttccttcttctagatactggtttttaatgaaagacatagaagagtaattgtcatatagaagttatttgactctatcattgttgtctggcccatttctttagggattatttgggctaaattctaacttttctaagccattttatgaggcctttatttctaccatttttcactgtaggcattatggctcctccacctggtatgagaccacccatgggcccaccaattgggcttccccctgctcgagggacgccaataggcatgccgcctccgggaatgagaccccctccaccaggcattagaggtgagtgggagcataggggtttgatggttcagccaggcccctgaatatgtgtatcctctttttctcaatgtttctatttcctttccaggtccacctccccc

SEQ ID NO: 78387 - DNA, 3088 bp, Homo sapiens
tcaaaaaattagccgggcgtggtggcaggcacctgtagtcccagctactcgggagcctgaggcaggagaatggtgtgaacctggtggagcttgcagtgagccgagatcgcgccactgcactccagcctgggcgacagagtaaaactctgtctcaaaaaaaaagaaaaaaaaaaaaaaaagaaaatacatacatgtctcatctaaaacatggttggtcaacaactttctgatttcctgatacacattttattaaccggctccttaaatatatccatgttgcatatcatgtttgacatgctttcattgtagcttatagaataatttcaaatagaattttgggataaaaattatgctaccttaaaataggttatgaagtatttgaggtattctctttttatatgataggtaaacttggcttggaattaaaaagattttgaaagttgcttagggagctccctgcttttgtgaactcattattccttaattatgatgtcaaatttcagaagtttgttattaacataccggtattttgctttttatagattcttgtaatagaatattacaagtagaaactgatttacatagataattatgtgaaatagtgctgcttgactaggattttcatgatctcatttcaaagattagcaaaaacaccctttacctggtatgtttacctctgatactaccttcactgatttcagcaggtagtcagttataatccatggattgaagttttgatttatttatttatttatttgagacagagtctcactctgttgcgcaagctggagtacagtggtgtgatcttggctcactttagcctctgccttccgggctgaagcgattctcctgcctcagcctcctgagtagctgggattacaggtgtgggccaccacacctggctaatttttgtatttttggtagagacagggtttcaccatgttggccaggttggtctcaaactcctgacctcaggtgatccgcccaactcagcctcccgaagtgctgggattacaggtgtgagccaccgcaccccgccatgggttgaagtttttaaatgcatgttttccggtagttaatacattgcttgattctgtcttataattgcatttcagttctcttcatcttgtccatacacataataatgcttagtatataataaagcaaggtatattttcatgggatttttgtagtgggagaatgacatctgagcctgaaataggatatttgtgttgtaactttttcagtgtcatacgataccattttttgaccacttagttgatgcctctgaaaggaagagagaatcagatcgctaaaatttgatgtgtcgtcagtgtggatcctactcagtagtgtcacaacgaggctgaaaatcatattaagtgcttttaggacagaaacgtaaactgctcaggtaaaataaccttataaagagaaataagcatatattgcagaggccttggctaggttcatgatgacacaggaccttgtctgaacataatgatttcaaaatttgagcttaaaaatgacactctgaaatccagtcagtgtgcctcactagacttttcgatttcaagattttctgcagaaaatgttttgaaaactttgaatacttaaaaatggcaggtgtagtattgcactttgctagttgctcagatacccttttttatttgtatagatattctgagttcctttttttttctacatgttgtacgttgtcgaaagctaaaaggaaacttatccttggatcacggaaggcagaggcatttggtgagatggaaacaaggatgtgtaaaaatgagacgaccacctctcggattaaaaaaaaaaagtgccagagttctagggttctaagtgatgtccaggaaggaggaggaataatatttatggagcatatattatggaacacagtgagtatagtacctgcctttaaatgaatactgttggttttttaggacagttgcttttttttcttttttcttcagctgtgtgcagttgattaacttgtacagagcctatcacacaatagatgtttaagaaatattaagtgaatgaatgaggcagcattgctaatttttgtatagtgagacagtatctcacagtccaggctggagttcagtggcattaacataactcactgcagccttgaacacctgagctcaaacgatcctttcaccttatcctccagagtagctgggactacagtcgcgtgtcaacatgcctggctaattttagttttctaatttttttagagttgggatctcactatgttgcttagactggtcttgaactcctggcctcatgccatcctcttgcctcagctggtattgtaggtgtgagccactgtgccaggtactaattttttttatgttagaaaacaagtttttaggtattttatagttacttccttatgacaatatctcatcagaatctaggcctatctgatatctgactccatacgtttataccgtgtagtcagccattcccagatagaggtcatttgagttacttagtgtttaccagcacttgtttactaccttgcgatgatatttacagtgtatttttgggtatggttttggggttatttggttgttgttaaaatgcctgtaatcccggcactttgggaggttgaggcgggtggatcacctgaggtcaggagttcgagcccagcctggccaacatggcgaaaccctacctctactaaaaatacaaaaattagcctggcgtggtggcaggcacctgtaatcccaactacgcaggaggctaaggcaggagaattgcttgaacccgggaggcggaggttgcagtgagccgagatcgcgccaatggcactccattcagcttgagtgacagaggtgagactcccatctcaaggtaaaaaaaaaaaatagaaatcagcaactgctatttgagtttacaggagtgagaagtcctctcttgcatggtgagatggggaacatttaattcaatagaaatatttgagaccaggtatggtggctcaagcctgtaatcccagcactttgggaggctgagttgggtggatcacctgacatcaggagtttgagactagcctggccaacatagcaat

SEQ ID NO: 78388 - DNA, 1231 bp, Homo sapiens
ttttgatgcatgttttcagtgtactctagtcctaaaattggtttacatttaattattggggagaatagcaagttgtcgatagtatctgtggtggcattagtgtatttctgtttcagttctttggacagtttgctagtggaaatagtcattgtatttagctctgtgagacccgactggcagattgctgtctctctctctctctctctctctctctgtgtgtgtgtgtgtgtgtgtgtgtgtgtgtgtgtgtgtatgcgcgcccgcgtttgtttccttcatgtagattgctgtgtgtgtctttttcttcataattccccttaattctgtgtgctttgaatgacactgttgttgttactgttgttttatatccattgtcacataaaactcttatcatttattcttccaggccagggactgtccttatgggtagagatacactatctgcaggaatttatttttttacgtatttttactagttgatgggaaagacattgggaaagacctgggctggatttgtgatgagctgtgtttactgagcatgatgaagtaaagctcaacgtgattactctgaagtccagccttactgtcagtctaaggactcaggatacaaatactcaaaacataaattcttagactctaaatttcacatggtttttcctatcagtacaggttaaggataatggcgtgttgtaggtttttccagtgcaatacaaggaagttggttctagatcctttagtacagttaatgttttgtagagtgtgttctatgttcactgcattggtatgtctcatctttggcatgatcttggctcaccgcaacctccgcctcttgcattcaagcacttcttgtctcagcctccagagtagctgggattacaagcatgtgccaacatgcccggctaatttttgtatgcttttgtggagacaggctttgccatgtttgccaggttggtctctaagtgatccacccgcctcagccccacaaagtgctgggattacatgcgtgagccaccgtacccagccacacctttgcttatttctactatgcatttcaagtgatcatttcaagagaataagtacttaggagctcctatgctctttttttttttaaccctgttgcttgcatcacccggttccaaccctatatgaaagtttcatgagcatgtttctgtcactgaggcagcttctccatttggcatataattgagaaattgctagtttgtggctgaga

SEQ ID NO: 78389 - DNA, 1993 bp, Homo sapiens
aaatgtatatatgctgtcatgttagagagggagagtggttccctcccccacattttgatttaaaagtaaaaattaatttttattaaattgtttgggtcagtttcatgtaagaataatctctacattgaatggtatatcttggccgggtgcggaggctcacgcctgtaatcccagcactttgggaggccgaaggggccagatcacgaggtcaggagttcgaaaccagcctggccaatatggtgaaaccccgtctctactaaaaatacaaaaactagccggccgtggtagtgcacatctgtaatcccagctactcggcagtctgaggcagaagaatagcttgaacccaggaggcagaagttgcagtgagccaagatcgcgccactgcactccagcctgggcgacagagtgagactccctctcaaaaaaaaaaaggtatatcttattttctttgatgtactgaggttcatgatgcaattcattcttaagcatatactatagaatctttaaattatatggttctgtgttcatttgtggcatgacagtaaccaagacaatttagtaaataatcagcaaatgaaatatttaattttgaacatctagtatttctagatgtatagagagtctcacgaagtagattttttaagtatcttgttgtaaatttgttagtactgttgtcttttgcaattaatgtggcaatgaaattgattattgatacacaggctcttggagctaaacaaaatttatcgtgttttaatttggatattagaaggaggaaatgaaaagagactctctacattttacctgttattatatagcttaccattatatcagatatgaattgctttttttaaaaaacttagattaaatgtcatgtaaatgcatttagtctttccagatacacttcttgatatcataatttttatttcctgttaatattcaagatataaatgacttcattaaagagattttctactacctctaggaactatacaatattctgtatgtgttcccttggttgcatgacaatattcaagacaactttgtaaataatagataaaaaattttaatttttaacatctagtctttctagatgtatagagtctcacaaagtataattttgtaaataagtcattgtaaaatttcatggtttcattgtgttttgcaaatgtcttggcaaagaacttgataaaattttgggcttcttgacctatacatattttggtatctctttattgggttgtttagtgtaaggaaaaagttgaaagaatgtattttcaactttgaattgtaatcagaaagaaaatatattttaaccattgtttagtgcttctgttatatattgaaaacttcagtcttaattttttagttacattgttgatagggcattatataaatatacttctatagtcattgtaggaaatgtcttttataaggaaatatttcttctacctctgaattacacagttttgtatttacttggactgcatggcaacattcaaaaaacactttgaataacagataaaaatgacattttctaaagctctaggtttgctagatgcatgaagtctcagcaaagtataaatttgtaaatatttcattgtaaaatatcataaattgactccttcaagtgttcagtagtacaataggtaatcaataattggcctcttgggactgactgtaacgttttggtgtttgtatgttttgagacagagcaatagattgcctccatatcttttaaacattcaggtctcttgtataagaaaaataaccattgtggggtttttgtgcatcttatactaatatgaaacaaacaaaaccccctggatattttatccttagaaagatagaggaagacaggagaagggaatggtcattgtaaattagatagatatattgagtgttagaagattatttaaataattgttcttttgttatttgtactctttgcaaatttatttaaatgcatattcatgtatatcataagtatatattc

SEQ ID NO: 78390 - DNA, 1742 bp, Homo sapiens
actccaccctaggcaacaagagcaaaactctgtataaaaaaaaaaattaaaaaaattgtggaactagtgttttatttctaagcttgcagatatttctagaattccacttactgttacatctaaatgtatgctgatttttcgttaaataataagcaggtctgtaaacattttcttttctaacctctttccatatttatatgagtatagaaaaactgtggttatgaatattttttactttttgataacttttaaaaactatcagatatgtgataatcagatagatttcaagtttacttacggtgtaaattaggaaaatttttataaagattctatccagtattgatcaaaagtataaattgtgtgtctttttaagcagcagtttggcaatgacaatcaaattgatactatgtaaaagttttgaaatgttatagctggctactggggtttttatctattccagttctcgaaaatttaccaaatataggttggctgtaaaatcataactatctgaggtatctgtcaataaatcaaagattgcaatgatgatagcttctttaacatgaatgtaattctaacagtaaaaaatttctatatggaatatgttttgtagtcctaaattgatattttatatcatttttcagtgaacaagtagttgtttacaggtgtctgtgcatatgtctcaagtttttctaactaaaatattaatagttaagtctaaaaatatgaattatacgtggggcttgtcattctgacatttaatacttcagcgtggtgataatggtgatataatatactgtttgaaattgtaacacatgagttaaaatcaaaagattgataagtacatatttgtatattgctacatgacaaaaatctaggaagaatatgattcacatgaaaattctttggaaggacatgacagacttttaacagtcctgtatagtgaaaggagaatagaacgactacttctactttctgtatctgaaattttcaaaagctatttcaaaatgaacatttaaacaacaggaaattttagagacaaccactttgtgcctgtcttcatccttgacattcaacatcctaggaacaatgggctgttgtattcaacttcttattcccaacagccattatgaatggtttttgattgatctcacaaagagcatgtgctttagacattaatgcagcgactaccatgaaacagagtattggattacctaaggaaagaagcagaggatggaatttgaggtaggtgtcaaacagtgaaatttcgtttgagaaacagatgagtgaaagaaaatagtaactgaaacattcattctataaggagagtacattttaatactggcgatgctgtatttgtgggtactgactagatcaagatgttagaggaggtgtctcttgggataagttggaagttatccttcattaatttggtataaactgaaaacagattgcttctttccttttaaagtggttgagtctctgatgggtttaaagtaggcctttggggatttatagatcattcaaaattagcaggggaaattttaaatattctctgcatctttctaaaaggtgtggtttaaagttggtgagaaagtgaaatggttgctggttgaacttgattttctctattcactatgcctggctagcctaaaattatcctaatgggtatgttcaggtgcctgatttgtatctaaatgtttctgtattggatactgtttttcttaggcaatcaggatgagtga

SEQ ID NO: 78391 - DNA, 1650 bp, Homo sapiens
ttcatggttgctgttggatcatatctcaggagctggaatgacagacattattgaacaaagaaatcaggatagtggaacttaaagggcttcatctcagtgctttcataagtatgaagtgcatatatttataattttcactaatcacagggtaaatataaaattgattcattaaaaatgtttcataagaattcaaaggacatagaattttgtgaaatgtagtatttttacttaagtgccttttctctgcttctaccccacagccaattttttataaaccagttgataacataagtagtttttgggggatgatacattacttatacattttctatgtagtaaacatgtatgtgtatgtgtgtgggtgtgtgtctaattactttgttggacagattcctgtggtttggaactgctggggccaagtttatacaaaaatctacatttttgagtaaactccccatgactctagtaagtttccacagtatttgagtattctttatttcctaaagctgtacaaacatcagataatcaatatttgtaaggatcgataatataatttataatgaaattgctttatcagctattaatgttaactacatcatcttcatatagccttataactcatttgtgctattccattttcctctgttccttttattttcacttcccttgtaatgttagtctctttgtactgatttctgaagagttcatttatgattaaacatgttaacattttgtctagaattgcaaatatgttttttctcattcattttactatggtgttttattttttggttatacagaagttgtatattgaaatataatcttgttctgttttatgactttggagttttgtggttttttaaaacatgtttacattggtatcatttatttgtattgccttctatttcagcagttagtttgtcatttctttttccattaatcatcattctggtgttaatgaatgcattaaatatttaaagtactcactttgacccgtgtagttatctgttaagttctaccataaagaaaatttccaggtaaaattggctacatttctgttaacttgccttaccattttattgacactttaataattactaatgatttatactgtcttatctattccattgagttctatctcatttctcttctttttcagaatattccctctgtatacttgcatttttttctatcaattgacgcttacaattatttttgcaagttggaaaaaaatgcagtattaatttcatttgcaacaaatttaatagattaattaggagagaatagatatctttaaaattgagtcttctgtccaactgcaaggtaggtctttctatttttaatggaataataatttggggatattgctagtgcagttttttaaagtattttttaatactaggcattttttagttatttgttaatttagtgatttggattagtcattcaacttgtctaattggtatgtgaaaactttttgtatgtcttttctagtaatctttactgaatttctaaaattatgactttcttgaacaatctgtcattttaattaccttgattaaagtacatttgtaagtacttctaggatatatggaagtagaaagtatacttggcaattggactgttaattgcaatccccttaggtcatgg

SEQ ID NO: 78392 - DNA, 1786 bp, Homo sapiens
tcttactgtaacttttaagaagggcatatatctacgtagtgtcatcaccataaagataaatcaaccaagtgaaaatattttgaaactttggaaatgtataaactccaaaatcatcatcagttacatcatcaattatgtccctaaagatcccatcactctgcctcacactggggtcttgcctacttctctgttccaaaagggcacagtagtggtatcaaatctgtttcttgaggcaaatgaagtaccttgctccaaaataatcacccacagcaggcagataacctccaagtgcttcaagctgagattgagcaggaggatcccagctcatcacaactgggtggtaaatatacacttgggcccaaatggaaggaaatgcattaccctacaatgcatacccaacatgcttgcatccaggccccaaatccagcaaaacaatgctattccccttcaacatgtgttaacggaactgagatatttttccaatttaaattgtgttccccaaagtcttcattattctctagtgcctattacaatctgtgtttttatgtttacttcatgactgcctagttccctcctgaaattttaagcctcgtgagagtaagaactatctgttttctttactccactgtcctgtacatacatacttgttgaatgaatgtatgaatgccaccgtgattgcaaagtccaagggaaatgatgttgattcactgcacactgtacaggagggtgtcaaccagacttccagatttctacagaaattaccagtaaagggtagtataagaatggttcctgcatgtgaaaaatgatcttggatggagctgttgtggcattcacctgctcctcatactctcctgccactgtgcagggacagcacaacccccgtgctgctttcttgagtgtagctcatttcagaaaagcagtaaaaggaaaacccacttgtttgctttatgttcctaagaaggtggtgagtaaatcaatcacgttatcctaagaagtgacttgaattttatgaaggctcctttgtttccattgcactcctttctacccatctctactcccacctccacccccaccctcaaatcatgcttataatttccattattcaattaagggtggcttttttctcatcacaaacatctgtgtgctttaaatagcttctacataaccgaagtggaagtagtcatgtagaacagcacatggccactccaggggacatgagaagcctctgcctaaaggtagttctcccttctgtcatctgatctcacacatggcactgcaaacctgcagttatttagccatgtgctttgtgacattgatttcacttccttgggttattcttaccgtctttaggaacttaaatatttaagaaataaacaaatactattcaaagagagctgtaccattattatatgcatttaagtgaaaaactaccacttcccatatatatttatctcatgaccacctaattgataaaaacatgttaactgttatcttatattgcctcagggaaaaagtctgaatgttgattggaggcactgcaggatagccattcgatacctgcttttgtgacaataaactaaagcattggattttggtggattagggataaaaatggcttgacagatcatcttgtccagccctcagtatatagatgagaagacttaggtctcaagctctgaagcgctttgctcaggatcgctggccatttcatatatgtaacaagctcccacttcatgctcatttcacagtagcgtgtcactttcaggtcagcttccttcagtgggcg

SEQ ID NO: 78393 - DNA, 1023 bp, Homo sapiens
gggaaggcaggcaggtcagataatgagggccttatagaccataccaaggactttggacttttattttgcagacgttaagcaaagacataatcacttttcattttatatttattacaaactgaaagagcacaagtgcacatgtggtctttgcagttaagttattgccataattctaaaaaggcagataatctgaagatagaagggaggccacagtccaagacatgctagggactctgattgattcagtgctcatgcatgggaaagataagagtcaaagacaactcccacatttcaggttttgagagctggacggacagtgttgctgttaggtctatagagaagaggagtggattttgaagggaaaattattaatagtacaattgaatgatgttttagttgtgtctgagggatatccagggagagctgtcctaaggcaattaaaaatatgggtctagagaaaaacgtacacagaagataaaaatgtatgactccagcacatagaccatagctgaacctgtggctaggaaaattctcctggaaaaggcagagaggagagaaggacaaggatggaatgcatggaaatgctagcatttgagagttatacacggaacccacagtagaggcaaatgagaaaaagcaggtttgtttttgtctgctccagtagacagacaccaagctccatgagggcagagactttgtcttattcgtggctgtacctgcagtgcatagagcagactgtacatgtgctttgtggacccatgcagttactggggtgtctcagaaacttcccatcctcctccctactgtgtctttgcataaccctggctgggcctcccttttctcaatgtcaactctcactgtaactttttttttttttttttttttttttttgagacggagtctcgctcattgccctggctggagtgcagtggcggaatctcagctcactgcaagctccgcctcccgggttcacgccattctcctgcctcagcttcctgagtagctgggactacaggcgcccgc

SEQ ID NO: 78394 - DNA, 7835 bp, Homo sapiens
aataaaggagaaaggataaataaaatatatacccaaaggcacctggagttaatttttccaaatattcatttcagtctttttcaattcataggattttgtcttttgctcattactgactgcataatgtgattataccatagtttaaatagtcacttcctgttactacacacttgggttttctcaattttttactattgtagtactaatattttactatattgtaatctaatctaaatttttacgtattcagagctgttcaggataaatttgcttggaaatttttaaatcaccagaagtgatactatcctgataattaacttccaagttgtctcttaatatagttttaatgcaaatcataagcttatgttagtaccagtcataatgaatgccaaactgaaaccagtattgtattttttctcattagggagttctgggaaatcgttcattcatttacagatgaacagaaaagactcttcttgcagtttacaacgggcacagacagagcacctgtgggaggactaggaaaattaaagatgattatagccaaaaatggcccagacacagaaaggtaggtaattattaacttgtgactgtatacctaccgaaaaccttgcattcctcgtcacatacatatgaactgtctttatagtttctgagcacattcgtgattttatatacaaatccccaaatcatattagacaattgagaaaatactttgctgtcattgtgtgaggaaacttttaagaaattgccctagttaaaaattattatggggctcacattggtttggaatcaaattagtgtgattcatttacttttttgattcccagcttgttaattgaaagccatataacatgatcatctatttagaatggttacattgaggctcggaagattatcatttgattgtgctagaatcctgttatcaaatcattttcttagtcatattgccagcagtgtttctaataagcatttaagagcacacactttgcagtcttgtaaaacaggtttgagtattttctccaccttagaggaagttacttgacttctcagtgacctaacctctaaagtgcatttactgatgtcctctctgtggttttgttgtggaaagatttagttaaatgaactgtaagaattcagtacctaaaatggtatctgttatgtagtaaaaactcaatggatacagtatcttatcatcgtcactagctttgagtaatttataggataaaggcaacttggtagttacacaacaaaaagtttatgatttgcattaatgtatagtttgcattgcagaccgtctcaactatatacaatctaaaaataggagcatttaattctaagtgtatttcccatgacttacagttttcctgtttttttccccttttctctatttaggttacctacatctcatacttgctttaatgtgcttttacttccggaatactcaagcaaagaaaaacttaaagagagattgttgaaggccatcacgtatgccaaaggatttggcatgctgtaaaacaaaacaaaacaaaataaaacaaaaaaaaggaaggaaaaaaaaagaaaaaatttaaaaaattttaaaaatataacgagggataaatttttggtggtgatagtgtcccagtacaaaaaggctgtaagatagtcaaccacagtagtcacctatgtctgtgcctcccttctttattggggacatgtgggctggaacagcagatttcagctacatatatgaacaaatcctttattattattataattatttttttgcgtgaaagtgttacatattctttcacttgtatgtacagagaggtttttctgaatatttattttaagggttaaatcacttttgcttgtgtttattactgcttgaggttgagccttttgagtatttaaaaaatatataccaacagaactactctcccaaggaaaatattgccaccatttgtagaccacgtaaccttcaagtatgtgctacttttttgtccctgtatctaactcaaatcaggaactgtattttttttaatgatttgcttttgaaacttgaagtcttgaaaacagtgtgatgcaattactgctgttctagcccccaaagagttttctgtgcaaaatcttgagaatcaatcaataaagaaagatggaaggaagggagaaattggaatgttttaactgcagccctcagaactttagtaacagcacaacaaattaaaaacaaaaacaactcatgccacagtatgtcgtcttcatgtgtcttgcaatgaactgtttcagtagccaatcctctttcttagtatatgaaaggacagggatttttgttcttgttgttctcgttgttgttttaagtttactggggaaagtgcatttggccaaatgaaatggtagtcaagcctattgcaacaaagttaggaagtttgttgtttgtttattataaacaaaaagcatgtgaaagtgcacttaagatagagtttttattaattacttacttattacctagattttaaatagacaatccaaagtctccccttcgtgttgccatcatcttgttgaatcagccattttatcgaggcacgtgatcagtgttgcaacataatgaaaaagatggctactgtgccttgtgttacttaatcatacagtaagctgacctggaaatgaatgaaactattactcctaagaattacattgtatagccccacagattaaatttaattaattaattcaaaacatgttaaacgttactttcatgtactatggaaaagtacaagtaggtttacattactgatttccagaagtaagtagtttcccctttcctagtcttctgtgtatgtgatgttgttaatttcttttattgcattataaaataaaaggattatgtatttttaactaaggtgagacattgatatatccttttgctacaagctatagctaatgtgctgagcttgtgccttggtgattgattgattgattgactgattgttttaactgattactgtagatcaacctgatgatttgtttgtttgaaattggcaggaaaaatgcagctttcaaatcattggggggagaaaaaggatgtctttcaggattattttaattaatttttttcataattgagacagaactgtttgttatgtaccataatgctaaataaaactgtggcacttttcaccataatttaatttagtggaaaaagaagacaatgctttccatattgtgataaggtaacatggggtttttctgggccagcctttagaacactgttagggtacatacgctaccttgatgaaagggaccttcgtgcaactgtagtcatcttaaaggcttctcatccactgtgcttcttaatgtgtaattaaagtgaggagaaattaaatactctgagggcgttttatataataaattcgtgaagaaatgtgtgctcttcagttctcaagttttattattatggtatttattaaagttctacaattgtaataacgtatccatatgacaagttttaaagtggtaattgaaataggttatcagatatagagttgttcacatcaagtagacttttaacagagtcagaatgaacctacccttaaaattttagagaaaaaaaatcgtcggttgcacagaatagctgctctagcttgcttaattatgccgggcatgttgtcactcctcttacttttgctgccttttcattactatttaatggaatgtccctgaacaataaggaagagcaaaacatagacattttgactacagtggatacttcctctaccccaaatgttatgttataaaagtactttttttgcccaggtactctattatatattttggttttctttgaattagacctcaatctccaggaagctctggagggaaaaaaaggaaccataaactaaagtaactggttttccaaataaatgtaaacttttttaaccttttattattatagaacatttcaaacatacataaaacatgaaaacagcctgcagccaaacttttctggaccttggcagctccagcaaatgagctggtcatcctaaccctggtttcctgagacaactacttttggggatgcttgcttgtatagggagatgatagatagatagatacatatcaaaaagaaacttgaaaaaggcttcgaacagaacttgccgatgttactcatccctcctcggtacagacattctgttagaacagatggttgtaatggggcagcatcactccctattcccattaaaaacatgaccattctgagatttcaggccccttcgaggaatttttctcaagaattccatacaaactgtcagaggaagaaatgtcgtcccaagactagtccctgtgtagtcttgatccctttacctgcttactgtaattttttttctctgactttccgccagtgtctaagggccatctgtacccctcccacccttccatgagccactgtataatccaaaaacacaccttccatttgctccctcacttgtctccttttacctcaacagtgttagtgtgtaaagaattgcctggggagggtagagggttttacaagtacagagtcccaagtcttttctcccctccccgttagtgggttggcatttattaataggcactgcaagattttgatgcaggtgtggggtagatatcactgtgaaaggctactaatgcatggtagtttcaccgaaagtacagtcttcaaggatccttataatctcctcattgccaaaatcagtaacatctataaccttgacaacaccctagcttgggctgttgcttctctggctacttgtttttccatcccagtttacccagattttagatggatactcctccaattctgcttaaagtccttacctgttcttgcccagttccctctagtcaacctcagtcactcccaaagattcttccccaatcccatatcttttgctcagacctctgtctctgggatttctttgttacctcatagtcagtagtcctaaaaacaaaattcttcatcttgcatctctatcgaccgaccattctttgtttctttttaagaaatgtaaccttcaccccaatcatcaaaatctctcattcctcaattgtcacaggttgtcacttctttccccctaaacctctcccatcattccttccttctttatactgcccttacaggtcctgatcctctgactcacccggacattcttagcagctgcctaatttcactccctgactctcatctccctcttccaatccttttcattgtgctagaacactatcttgctaattttaatatcctctgcattcagtgcctccacagattgccccctcactgacctttccaatttggccttgtgttacacactttcctcgctgcattcctacccagcatcttcacttgtcatatttctcaaatactcttcatgaccagatatttaaagtacctcatccatgaagacttcatcaacccccaaagtgcctccaatgcttccgtggtagcacagcataatggggtacatttcttagttgaacagtgaggagtcactgggattcttacagagtgtcttagggtctcctcttgatactctttccacatttcagttaaggaattttcttacatctttttttcttctaataacctttgcctggagtgtaagtaaattcatgatagagactgtcatttttaaaaaaaaaaacaaaccattttgcctttcacatgttattacctccatctttctgttatcttgtcagtgttgccacctaaatgattgaaaatgaccgagcatgcagtagaatgtagtgaagtttcctatttcatccattttttgcataagtgcattggtatctgtatatccatctgcccaagcaccagttgttgaaaagactattatttccccatgaatggtcctggtacccttgtcaaagaacagttgaccataaatataagactttctggattctcagtcttactccattgccctatatgtctgtcgttataccagcaccgcactgtcttgatggctgtagcttggtagtaagtttagatttgggatgtgcaagtcctccattttttttttttttttccccaaaatcattttgtctgttttgggtcccttgcattgcatatgaatttttatatgatcattgtgtcaattcctgcaaaacagctgggatcttgatagggatttagttgaattggtagataaatttgagaaataactgctattttaatggtgttaggttttctgttccatgactgtgggatgtctttgcatttgcttaggtctttatttcagtgatgttttagagatttcagtgtgcaagtcttgacgtctttaatttttttctaagtattttactgatgccactttaattatatgattattttctaatttttatttttgtattcatcactggtgttagaaataaaattaatttttgtatattgattttgtatattgtagcttttctaaaattctttttttgtcacttagtattttttgcatatgagatcatgcatctgtgaacagaaatacttttacttcttcctttccagtctagattcctattatttcattttcttgccttagtgtgctggctagcacctccagtacaatattggatagaagtgacaagagcagacatctttttcttgttcctgattttaaggggaaagcattcagtctttcaccattgagtatgatgttagctagctgtgggtttgcttcaagttgaggaaattcttttattaaacctagtttactgagtgttttttaatcaaaaaaaaaaaaaggaggggctgtgggttttgttaaatgcttcttctgtatcaagattttcatgttgttttgtcctttattaatatgttgtattaatggacttttgtatattgaattaactttgcattcctgggataatctcagttgtccatgctacataaaccttgttctatgctgctggatttggtttgctagtattttgtttagaatgtttgcatctatattcataaggaatattggtctgtagttttcatattatatatctgtccagtttggggatgagagtcatactcctgacagaatgaattgggagctttccctgttcttaaacctactgaggtattttttaagtgaactacttggagaccttcacctgtgatcttcagatgctgggggacacagggatggtacctgactctgaaaaggctctcagggtaagacgtgtctgaactggcctgtggcagttaactaaagagtactcctaccaataatggagtcaagatgtatgtttcccataggccacgctggtcactgaaagagatgggctatgagccatcttgaaaactaccctgcacaaatggactgccggcctggagccaggcaccctgcagctgagtgccatataatgttgaagctgttgagggaggagaggttggaagctgccagcttagagaatctcagctgtggtttccagcagggtgtattccaggaaagaaagtcattccccaccctggctcaaagtaataattaacagtgactgggtaaggcaggatctttttttctaattccctcccctccagaaagggcagcaacagctcttgaatgggaaagaaggtggagggaggaaaagaaaaaccaattgccccaacactgctgtctttaagcttcccacccaaagacctcagtaagaggcagaattatgttttcaattaagagagagtttggcctcttggtgtttcaaaagtgtaggctttttaatacctagagaaactgatgatttgttgattaccaaaaagggaccagaaaagctacatagcctgagatttcatccccagaaaaacgaatccagagagcagacttgcaaaaaaaaaa

SEQ ID NO: 78395 - DNA, 1964 bp, Homo sapiens
cttcctggtttgcttaaatcaaatatattgtactctcttaaaacggttggcatttataaatagatggatacatggtttaaatgtgtctgtttacatacctagttgagagaacctaaagaattttctgcgtctccagcatttatattcagttctgtttaatacattatcgaaattgacatttataagtatgacagttttgtgtatatggccttttcatagcttaatattggctgtaacagagaattgtgaaattgtaagaagtagttttctttgtaggtgtaaaattgaatttttaagaatattcttgacagttttatgtatatggccttttcatagcttaatattggctataacagagaattgtgaaattgttaagaagtaggtgtaaaattgaatttttaagaatattcttgaatgtttttttcttggaaaaattaaaaagctatgcagcccaataacttgtgttttgtttgcatagcatattataagaagttcttgtgattaatgttttctacaggaatttgtcaatctttattctgactacattctcaataaatcagtagaaaaacagttcaaggcttttcggagaggttttcatatggtgaccaatgaatctcccttaaagtacttattcagaccagaagaaattgaattgcttatatgtggaagccgggtaagaaagcaggtgtctgcaaaaagtcatgtatcgatttattgtttgtaatgatacagtagtatagcagataactaagacatattttcttgaatttgcagaatctagatttccaagcactagaagaaactacagaatatgacggtggctataccagggactctgttctgattaggtgaggtacttagttcttcagaggaagatttgattcaccaaaggggtgtgtgattttgcttcagacctttatctctaggtactaattcccaaataagcaaactcacaaattgtcatctatatacttagatttgtatttgtaatataatcaccatttttcagagctaatcttgtgatttatttcatgaatgaagtgttgttatatataagtctcatgtaatctcctgcatttggcgtatggattatctagtattcctcactggttagagtatgcttactgctggttagaagataattaaaataaggctaccatgtctgcaatttttcctttcttttgaactctgcatttgtgaactgttacatggcttcccaggatcaagcactttttgagtgaaatggtagtcttttatttaattcttaagataatatgtccagatacatactagtatttccattttacaccctaaaaaactaagccctgaattctcacagaaagatgtagaggttcccagttctatctgcttttaagcaaatgcccttactactctactgtctacttctgtgtactacatcatccaattctgaaagacataggcttccccatcccctgctaagactggttcaagtggcagctactgatggattgcagtgagaaggcatgcaaacacgtaccttcctggaagttgtctccaaaggctattgctctaagactcaagtatataaacactagaatgaatatcaactctatctagcaataaatgttatttttatattacagttgacccttgaacaacacagctgtgaacttcatgggccctctgacatgcagattttttttctcaactaagagcagattcagtattggtgggactcagaacctgcatatacagagggctgactttcatacatgccagtttcacagggccaactgcagaacttgagcgtgcatggattttggtatacacacgtggtcctggaaccaatccctgtcacatataccaagggatggctgtatgttactttatattcatttgttctgttattttataaggttgttcgtcgtggtatgtgggaattcaccagtatttcttctttctggtgcaccgttggtcatttc

SEQ ID NO: 78396 - DNA, 1050 bp, Homo sapiens
gaccgaagtaccagaaacacttaaaaactcaaagggggacatttttatatattgctgtcagcacgaagcttttgtaagattgatttcatagagaagtgtttctaaacattttgtttgtgttttagtgaaatcttaagagataggtaaaaatcagagtagccctggctaagggtcttggtagttacaacgagtgtgcctgctcctaccacccccacccccaccttgagacaccacagaatttctcatagagcacagtgtgaattctattgctaaattggtggtatggggtttctcagcagagaatgggacatcacagtgactgacaatctttcttttataggttggaaactatttgggggactggagggatactgtctacactttttacaatttttattgataagatttttgttgtcttctaagaagagtgatataaattatttgttgtattttgtagttctatggtggcctcaatttaccatttctggttgctaggttctatatcagagtttaaaagatttattggagtatgaagggaatgtggaagatgacatgatgatcactttccagatatcacagacagatctttttggtaacccaatgatgtatgatctaaaggaaaatggtgataaaattccaattacaaatgaaaacaggaaggtaataaatgtttttatgtcacattttgtctcttcattaacactttcaaagcatgtatgcttataatttttaaagaagtatctaatatagtctgtacaaaaaaaaaacaagtaactaagtttatgtaaatgctagagtccacttttctaaatcttggatataagttggtatgaaagcacacagttgggcactaaagccccttttagagaaagaggacatgaagcaggagatagttaatagctaagtgtggttgtagtataaagcaagaagcagggtgtttcttgtattaagctgtaagcaggaacctcatgattaaggtctttatcacagaacaaataaaaattacatttaatttacacatgtatatcctgtttgtgataaaaatacatt

SEQ ID NO: 78397 - DNA, 1211 bp, Homo sapiens
tattggaaattacagatttttttcagacttaattcttaagatgttttcattgtttcacagtagcaactaaacatgtagtaaaatgatttaaattcaattaaaatttttttccttagtcatttaaaagggaagaaatcaatttttagtagtactcattccaaagattccaattttccttttttttaatcttttattttttggtggagggaggcaggatctggctctgaggcccaggctggagtgtagtggttctgtctcggctcactgcaacctccacctcccaggctgaagactcaaaccatccccatgcatcaccctctcaagtagctgagactataggcacatgctaccacacccagcttattttttgtgtttttgtagagatggggtttctccatcttgcccaggctggtcttgaactcctgagctcaagtgatctgcctgcctcagcctccccaaagtgctgggattacaggtgtgaactaccacaccgggccccaattttccaatgagtgatataaaaaaggcctccacgcaggcgcctgtagtcccaactactccggaggctgaggccagagaatggcatgaacccgggaggcggagcttgcactaagctgagtgctgctgcactccagcttgggcgacagagcgagaccgtctcaaaaaaaaaaaaaaaaaaaaaagcctccatgattggggcttgcatagtgaagaccatgtgaaattgaaagactacgaaactacttttcttttacgtattggcccataattaacatgtgtattgaatagctttgtttatctaagttcatcagatttatccaggtttatgtatttcagatcatctgattttattaggaaaatgctagaaaaatttcatggcaccattgtctaattttgaaaaaacgaacctttctttactgtgattaaaaattgttttttaggccaggtgtggtggctcacgcctgtaatcccagcactttgggaggctgaggctggcagatcacgaggtcaagaggttgagaccatcctggcaaacatggtgaaaccccttctctactaaaaatacaaaaattagctggcgtggtggtgcacacctgtagtcctagctactcaggaggctgaggcaggagaattgtttgaacctaggaggcagaggttgcagtgagctgagatcgtgccactccagcccaccctgggtaacagagcgagac

SEQ ID NO: 78398 - DNA, 1058 bp, Homo sapiens
ttagtattcagtgtatttttcttaattgaaatattttacttatgacttagtagatactaagacttaacccttgagtttctattctaataaaggactactaatgaacaattttgaggttagacctctactccattgtttttgctgaaatgatttagctgcttttccatgtcctgtgtagtccagacttaacacacaagtaataaaatcttaattaattgtatgttaatttcataacaaatcagtaaagttagctttttactatgctagtgtctgttttgtgtctgtctttttgattatctttaagactgaatctttgtcttcactggctttttatcagtttgctttctgtttccatttacatacaaaaagtcaaaaatttgtatttgtttcctaatcctactccttgtttttattttgtttttttcctgatactagcaatcatcttcttttcatgtttatcttttcaatcactagctagagatgatcgctatggaaaatcctgcagacttgaagaagcagttgtatgtggaatttgaaggagaacaaggagttgatgagggaggtgtttccaaagaattttttcagctggttgtggaggaaatcttcaatccagatattggtaaatacattagtaatgtgattatggtgtcgtatcatcttttgagttagttatttgtttatcttactttgtaaatattttcagctatgaagagcagcaaaagaaggatttggtatggattacccagaatcacacatcatgactgaatttgtaggttttaggaactgatttgtatcactaatttattcaaattcttttatttcttagaaggaatattctaatgaaggaaattatctctttggtaaactgaattgaaagcactttagaatggtatattggaacagttggagggatttctttgctttttgttgtctaaaaccatcatcaaactcacggttttcctgacctgtgaacttcaaagaacaatggtttgaagagtattgagagactgtctcacaagtatgtcatgctcaaagttcagaaacactagctgatatca

SEQ ID NO: 78399 - DNA, 1027 bp, Homo sapiens
tcattgaagagagtgagtaaagcatagtagttaagagcttgtttcctggattagtatctctgttccacaacttactgtgacttactgtgacttgaagttatttcacctttcagtatcttggggtccttatctgtaaagtggagttaatgtttccttcctcataagggtgttgtgaagattaaattagttgctatgtgtgaaatgctacaaaagtgctatatattattgttgctgtattcatggaatatttttgttctataatgctatggtaggttttcagaaaatattttagaaccaataaaataacagcaacaacagctagtacttttaagcactaactttatgcagggaattaatctaagcagttcatacattaatttattactatattattatggttattttacagatgaaataagagaggtaaagttgtatgtttgcatttacaatagaacatattgcattgcattacattcttttggcaccaaggtggggagcatagaatagagatcagtggaagtggacagacatgtaatattttatggagaataaagataaatttgcttcagttatcatttgacatgtcttaggtagagctaagactagatagaacacagggcctctcaatcctgtagaaattcaccaccacatcctttaaaaggttttacattgataaggagtcagctctcatctatgaatgttagtggggaaaagctgtagaatgcacagtctaaataccagataaccttttttttccccactttggaatacattatatttgataaaagcaagtatacctttggatgtaaaggtaaatataaacactgacttacatctttaacacctagccagttgggaactggcataaggaaactcagaatggattacatggcaatatggaatgttggcctggtcccacatttgagctaagatgttaattctaattttagtctcctcagaattctgtatactccgtagcttgaaacaggtttccaactgaaactatttttttccccaaggttatttt

SEQ ID NO: 78400 - DNA, 1105 bp, Homo sapiens
gtggacggcactgcctggctgtggtagtttcttcccacttaaaaattcatagagacaactctgggtcttggaacttctggaaaacagcagctattccaaaaatctggggattagtggtgcctgtaacatcaagtccagggagattgagcagggaaatactggaaactcaggtactcatcctaacttcctggttttccagatggggttgccatttgttccttttctttcctccacaagataattttagtgtatctgtttaagaatataagagtggccagaagacagaaagcagtcgtcagtcacatttcaccaaaatttacatttgtctcaggtgcattatcgcagagctttattgtatttctagtattagctatccctgtcattgctgctacttttttatcatcttcaagtaaaatttaatgtcaacaaaaattaaggtagttaataatactatagtatactagtaaagttgtctgacacagacaactaggaaatgtgatttttactttaaaatgtattttagttttagaatgtctaaattttagttttagaattgtctaaattcgagaattcataaagctgtagcccggtggaaaaagttatttgacatctcagaaattaaaaattgcagagattttgtgtgttttttttttttttgttactggtttgttttttttttttaatgtcagatatgtttatagtgttggagaaagattctgcattatttaagcaactcaggtggttttctagcagagacaaaagggggctttaactgcctgaagtcattattattgcttgctttctggtaccctttttatttcacttacatagttttgagacacatgaataattaatacacttaatgactgatcataaggcagccagcaccttactttacatagtttagcagaatgatagggtattttataagaatgtgagtgatgttttatgaaaggtatgttgaggtctgtctatgactatccattgttggagcagaactgcaaatgccaaagctacatactttatgtttggcttcttgaggtgagatcccttcagctgtcttcatcaaaagctatgtctagcctttaaaaggcaatgaaattac

SEQ ID NO: 78401 - DNA, 2188 bp, Homo sapiens
tttttttaagaccttgccttcttagtctttggagaacagagtactgaaacaagaaaactcacagattagtagtatttctgtgtgttctacagtgaggttttaagagctgtattatgattaatcagtacatgacatattggttcatatttataattaaagctatacattaatagatatcttgattataaagaaagtttaaactcatgatcttattaagagttatacattgttgaaagaatgtaaaagcatgggtgaggtcattggtataggtaggtagttcattgaaaaaaataggtaagcattaaattttgtttgctgaatctaagtattagatactttaagagttgtatatcataaatgatattgagcctagaatgtttggctgttttacttttagaactttttgcaacagagtaaacatacatattatgaaaataaatgttctcttttttcctctgattttctagatgtgacttacttaacagaagagaaggtatatgaaattcttgaattatgtagagaaagagaggattattcccctttaatccgtgttattggaagagttttttctagtgctgaggcattggtacagagcttccggaaagttaaacaacacaccaaggaagaactgaaatctcttcaagcaaaagatgaagacaaagatgaagatgaaaaggaaaaagctgcatgttctgctgctgctatggaagaagactcagaagcatcttcctcaaggataggtgatagctcacagggagacaacaatttgcaaaaattaggccctgatgatgtgtctgtggatattgatgccattagaagggtctacaccagattgctctctaatgaaaaaattgaaactgcctttctcaatgcacttgtatatttgtcacctaacgtggaatgtgacttgacgtatcacaatgtatactctcgagatcctaattatctgaatttgttcattatcgtaatggagaatagaaatctccacagtcctgaatatctggaaatggctttgccattattttgcaaagcgatgagcaagctaccccttgcagcccaaggaaaactgatcagactgtggtctaaatacaatgcagaccagattcggagaatgatggagacatttcagcaacttattacttataaagtcataagcaatgaatttaacagtcgaaatctagtgaatgatgatgatgccattgttgctgcttcgaagtgcttgaaaatggtttactatgcaaatgtagtgggaggggaagtggacacaaatcacaatgaagaagatgatgaagagcccatccctgagtccagcgagctgacacttcaggaacttttgggagaagaaagaagaaacaagaaaggtcctcgagtggaccccctggaaactgaacttggtgttaaaaccctggattgtcgaaaaccacttatcccttttgaagagtttattaatgaaccactgaatgaggttctagaaatggataaagattatacttttttcaaagtagaaacagagaacaaattctcttttatgacatgtccctttatattgaatgctgtcacaaagaatttgggattatattatgacaatagaattcgcatgtacagtgaacgaagaatcactgttctctacagcttagttcaaggacagcagttgaatccatatttgagactcaaagttagacgtgaccatatcatagatgatgcacttgtccgggtaagttgggctgctagattaaaaacctaataatggggatatcatgatacagttcagtgaattcattttaaaagtgactgaaaaaaatgataccatatagcataggaacacatggacatttctgatcttatataagtattatacttttgttgttcctgtgcaagtttatagatgtgttctacaaagtatcggttgtattatataatggtcatgctatctttgaaaaagaatgggttttctaaatcttgaaaactaaatccaaagtttctttcattcagaagagaatagagtgttggacaaagaccagaacaagagaaatgtggagatacccaataataagtgtggatgtgcagtcttgaactgggagtaatggtacagtaaaaccataccataaaattataggtagtgtccaaaaaattccatcgtgtaaaattcagagttgcattattgtggacttgatgaagtgaccatggc

SEQ ID NO: 78402 - DNA, 1020 bp, Homo sapiens
aaaatgtctttctcagtagaacacctgtatcaataaaccaaactttttgaatgttcatatctaattacagtgttttttgactaatttttatctatatacctgaaaaattcagtttaacatattaaacactacaggccaggcacagtggctcacgcctgtaatcccagcactttgggaggctgaggcgggcgaatcacgacgtcaagagatcgagaccaacctggccaacgtggtgaaaccccctctctactaaaaatacaaaaaaattagccagttgtggtggcgtgcatctgtagtcccagctacttgggaggctgaggtaggagaatcgtttgaacccgggaggcagaagttgcagtgagccgaaatggtgccactgcattccaacctggcaacagagtgagactccatgtcaaaaaacaacaacaaaaaacactccttggaaaaagtataggtacattctatataggattagtagactgtcagaatcacttgaagatgttccgaaagcatgacatatcaacaaaggacatgtgagtctagaatggtgatccctaggacaggccatattactgcatgcaaagcaagtctttgttaaccttatgacttgctcaggaagcaaagtgtttcatgtcctaataggatagtagtattttctgttatgttacattttaggaaattaggagttttgcattgtcttgtaagaaggtattttaaaaattttcaatgaaaataatgagaaataggtttccagtggttttatgcttttggggaagaggttactgatgtttagcaaaagatgcttatatattcttaatagaacaaacctgagaattagttcttaaagagttaaggcccataaaagaaactgtaagtgttggtactcttgtagctgggccacagatcagatccttagtatgataaaatttggtatttttgtgcttcaatttttggagaccattcaatgatcacttacattttatattgtctttcattgtgaaacatatattatagcagagg

SEQ ID NO: 78403 - DNA, 1206 bp, Homo sapiens
aattattttgaaatgaatcaccttctgcaaaacaatatagtcaaaatgacttagactctgaagctgaaagactcctggactcctattcttgtcttggttctgtactttctttgagatcttggtttcgtgatttgactccagttctatttctctctttggctgtggactgaagataatcctcaatgtcatggtattcaaatgagataacccatgtcaaagtgccccgcagtgtgtgtaataagttatcaggcatccagcaaatactagtttcttgctcacctccctattacataaaataactttaaaattagaactgaagggactcataaagctgggaaaactgaggcccagacaattgtttccctaggatcctacagctgcttagggacagaaggatgacacttaatgcagatcttctgatttttcagtctcgttctgtttgtgctgatcactctcctcctatgtagtatataaagaagtactatgtatctgacaagttttggggaggttattttagtataaaagctcacattaaaaatatctattttggtattttgacttttgtaatttttttaaaaatcagagacaatttagtaaatctcggggccattcaaatcatgtatatgaagttttataactgctattgttttccccttatagttattaatttttaatatgcaagtagcatccttactatggaaagaataaataagaaatcaaaagatggaagaagttttaaaactcacttaatcacatcatccagagaaaatgctattaatgctttgaaataacaatgggttcatcctacacctgctactttttaactgacttttgtcagttagtgatatatcaggaagactaggcagttctttgtcgaattcaaatcttgatagtttttattttattgtgtgacctattatcagttcatttaagtaatcttttattagacatgtttttttcagatatagaaacaatgcatttttgtaaaattgtcaaattattttccacaagtaggatctcattcacacggtattcgtgtttttaagactttcgatacatgttcactgttttcctccagaaaggaaatacctacttacattttcaccagggaagtcactgtagtttgggagaacatgacattatctccctttctttactgaagggtagcaatatatattttaaattttctagattctgcatttccat

SEQ ID NO: 78404 - DNA, 1639 bp, Homo sapiens
tgtcaaacgtgtatttttaataaccttgcaagagagaaaggattgaagagaaacgtgtggtggtaaggtagttcagtcagtgagagccttgacaatgacagtggtataataggaattcaaaataaatttttctggatttaagacaaatatttaggacatgaagtaagtaagactttagtgatttattgtgaagactaaagatgtttcagataatagaggtagtaattatcaaagcaaagtttttcgaggtattaagggttggaatgaaaaatacaggtgtatctctcatacaggtaatataaaaaaagaaaaatgcagatatagtgattgaccttgaataagaggaaagatgcccatctaatgaaattagaacaaggaagtaaagatggatgtgtgatattaattgtaattgtgggtgagggtggaaaaatcaagatttttttactgaaaatattggaaccttatttaaatgccggtatatattgtgaatctgcaagaaacgactataaaatgtatttctcaaatttatgtgacccaaccatgtgacttgtcttttaagctttaaaaaattgtagtaaaatacacataatgtaaaattttccatttcaccatttttaagtatttggctcaatggtattaagtatattaatattgttgcacagtcacgatcagaactctctgttttgcagaactgaaactctgtacccattaaacaataattcctcatttccttatcttcacagcctctgacaaccattattctactttgtgtctaattttgactgctctaagtaccccctataagtgcaatcatacagtttttgcccttttatgattggcttattttacttcgcagtgtcatcaagtttcatccatctttagcatgtttcaaaatttgcatcctttttcaggctgaataatgttttattgtatgtatataccacattttgcttatccatttacctgttgatgagcgctcaggttgcttccatgttgtagctattacagataatgttgctatgaacaggagtgtacaaatatctttttgagaccctgctttgaattgttttcccagaagtggaattgttggatcatatggtaattttatttttaaaattttgagaaactgccatactcttccagagcaactgtacctatttgcgtttctaccactagtgcacaaggggtccagtttctctacatccttgccatcacatattgtgtgagagtgtgtgtgtgtgtgtacttcaatagtagtcattgtagtggatataaggtagtatgttactgtaggttagtgaccacgaaactttttatgaaacattttttaataatattttgtggaatacaaggtttgtttagaggttttgagaagactgaaaacttaggaagctactgaggggaatgggtgaagaagtggatcagaagttgagagtcttgactggctggctacctgaaatcagaaaccgtatcagagtaggagaatctcattccactgagtgactagttaagattaaagactttatcacatttgaaatttaaagacttttctccaatagccagaagattatgcatggtattttagggttggatattagcagagctgatggaacagaatcattagtggcatgtgcataag

SEQ ID NO: 78405 - DNA, 1004 bp, Homo sapiens
ccaaggtattagattttagtttgaattgtctggagtagcggtagcggttggcacatttgttcttaaagggccagaaaataaatattttaggctttatgggccatgtggtttctgccacaagtcctcagctctgttcttttagtgtgaaagcagccatagatgatacctaaatgaatgagtatggctgcatcccaataaaacttcatttacaaaactacatggctggcctaagctttagtctgtctgcctagggagtagtttactgagccactaatctaaagtttaatactgtgagtgaataccagtgagtacctttgttaatgtggataaccaatacttggctataggaagttttttagttgtgtgttttattacacgtatttgactttgtgaataattatggcttataatggcttgtctgttggtatctatgtatagcgtttacagtttcctttaaaaaacatgcattgagttttttaatagtccaacccttaaaataaatgtgttgtatggccacctgatctgaccactttctttcatgttgacatctttaattttaaaactgttttatttagtgcttaaatcttgtttacaaaattgtcttcctaagtaatatgtctacctttttttttggaatatggaatattttgctaactgtttctcaattgcattttacagatcaggagaacctcagtctgacgacattgaagctagccgaatgtaagtgtaacttggttgagactgtggttcttattttgagttgccctagactgctttaaattacgtcacattatttggaaataatttctggttaaaagaaaggaatcatttagcagtaaatgggagataggaacatacctactttttttcctatcagataactctaaacctcggtaacagtttactaggtttctactactagatagataaatgcacacgcctaaattcttagtctttttgcttccctggtagcagttgtagggaaatagggaggttgaggaaag

SEQ ID NO: 78406 - DNA, 1706 bp, Homo sapiens
cggctaagagacgaggtttcatcatgttgcccaggttgaccttgaactcctgagctcaagtggtccttatgtcttgacctcccaaagtgctgagattacagacatgaactaccacacctggcatatgtcatagttttgagagtttgaattctaacctcgggactttggtaacttatttataatattctagaaatatactgttattaggatgagtagaaattcattcagacagaaactattataaattactgcaagaaaaatgtctgctagttctgcatatattcatttttctcttgattaaaaaacaatttccaatttgagtagaacaactttgctatgtttaatagacccaggacagatttattttaaggtaataatctttcaatccttcttcttctatactggattggtttaaattacttagcttgtcttatcaatggtttttaatagcctactttaatatatgtaaaaagtagtaattaatatgttacagtttggtggcaaacattttgatgccaaagttcacatattctcttgcttagggaacagaaattgggaagatagatgtagttatcatttgataatgtatttaaactctatcccatttcaggatctcaaaactttgtaacagttacatattgtacttctaagacttagatttgtttttcttcttgtgtcttacctttttgcagtaatatttttattttcctatcatcatgtcctcattttttccctctcttctctttccctgttaattttgaaagttttgctgcctacgtgtttgaaaacttctaatctgcctctcttccctcagtgccagcaggtttattttttgttttgcaagccagctctgcctccttacagtatgacatctgatgctggagggtcgcactttcaaaaatgagtcagctggtacatggggttatcatcaatttttagctcttctgtctgggagatacaagtttggaagcaatcttggggtacttacccacaaggctggtggagaccaggtgtgtcacataggtgatttgcttgctccctgggggagagggtggagtgaaatttttgcatttgtgtcacagccaagtcactgccacctccagcatgccccagtttttagttgttatgtaattttgtgcaaaattgaaaatttaaatacattgcaaagaagatctaaaataaatatttgagctgctggagtcttttttttttttttttttccttttccattcttgtccttggaatctgaatgaattgcagtgagggtaattttgagagtctgataaagaagtgaggggttgttttttgtttttgtttttgtttttagctaagaaatttagaaaacaggtttgtgtgtgtgcgtgtgtgtgtgtgtgtgtgtgtgtgtgactgattttaagattcttgttagagttgcttaaagttggaagcctaaagtcagtgagaagttcacaaatcaggactttgtaatgccaatttgaaaatttagcttttgacctcaaaaaacattttttatctagtttgggaatttctaagtgttagaaatcaatattatattgactcattcattgttgctgatgctgtttataaaagtgaatagatagggaaatactgattcatatctcgtgaaatgaaaatgaaaggctttttagtgacttagaattttaaatatttctacatgagagagcagtagtatatttagaaat

SEQ ID NO: 78407 - DNA, 3798 bp, Homo sapiens
gaaggcagggcttcttaaaatgagatctgtgtgtcatgtgaagtatatgttaaaatgcaaattcatttctgcgttcttgggttggtctgaaaaaaattaaaaaaaaaattcatttacccctacttcatgcactgaatgaaaatctttgcgagtagagcccaagtagttgcatttttagatttccccaggtaattctattatagactgaagtttgaaagtcagtctctaaaaccttaaaagttggttaattttatttcaaaatgttttatatgcagtgtattcactttctaccatcaacctctaggacactggataggtttcttaacctttgagatttgctttctttatatgtaatgcagtacatgaaaggactttatttttgttccattgaggaatgttctgattgtatacaaacaagttaagaatttacagtgataatttaggggcttgctttaagcttcaggatttttttttaagagttaagttttgatatatattaagtggttgatttaataaattataattatcgtcgtatattgaagtcctgttttgtgccaggtaggcattatactataactttttaacgcattttctctgctacaataacctgacattggagactcaagggtcagagggtcggcccaaggctgctactctagaaagtggtagatgcccagatttgtacctaacatagccgatgcttagcatatagaatttaattaaaaacaaaattgctataggtatttgaaaggattagagggatatagtcaaatagttttcatatgtgtttagcccttttggagggaggatagagtaaataaatagaaggcactaagctttatggatgaatatgggaaatatggctttgcctgctgaaagcactcaggccacagggcctgcctacctatgctttcctcatcccggcaacagcagtaatttgtttcttgatacgtttttggatgttcataattatagaaaataaatttgcctttatgatgaaatttagtacctttttttttgaaagttcatccagttgtttatgtaaaaagaattgagtgaggtgttttatattttaggttaaaaatctgtaagagcctgattttagaattcaccagctcctcagaagtttggcgaaatatggtatgtttttgttttattttttggaattcgtattgcatgtgtatcttaatgtcataataatgacagatgtgttcagcaaatttgggcccctgccatttttaaagcattgtgtcaggtgctcactaactacacttccaagactgtatgagggacccaggtagggtgctgaaaaaatttacaagagattagtgtgctatgagaggtaaaataatatgcataaaaagattgagagggcaggtttggattttgggctatgagtattaataatagctttcatttgttgttgttgttgctgctgctgctgctgctgttgtttttgagacagagtcttgctctgttgcccaggctggagtgcagtggcaccttcttgactcactgcaacgtccatctcccaggttcaagtgattctcatgccttggcctcccaggtagctgggattacaggcgtgtgccaccacacctggctaagttttgtatttttagtagagacggggtttcaccgtgttggccaggctagtctcgaactcctggcctcaagtgatccacccgccttggcctcccaaagtgctgggattacaggcgttagccaccacgcccagccatttgtgagcacattatgtcaggcactgttctgagatacttagatgttagcttgtttatccatgacagctctatggaataggtactattatcctagttctacctataaggaaactgagactcggagaggttaagtaacttgcccaagatttctcagctagtgaatgaccaaacagagacataagtccagcctggccttggagccttttgagcaccggatctcataaaagaggggactggaagagaggacttgactctagttttcaaaatacatatagctctttaattacattgaggtcaattagtcaattaaaagatattttaactttattatttttgtgtttacaagatggaaagttagacttgtttgaatcttctaattccacataccattagtctcttgagaacccaaggggaagctgtatcatgaccacattgtttattttagggaaggtggtgtttcccatatgacctcagcaatgtctaagttcttattaggcaatgtatagttaggataggagtatctgggagattgcgttatttcttacagatactataaatcccatttattggaatcccctgcaattatttttatatattcaggccaatcctcacctaatctggattttgaagccctgcgttcatagctgcataggtatgggctcaaacattcatgttttaaccgttggtattcgcagataccttgctgttttatattgggttctgaatccacactggtaaccaccttttacgcttgactattgttgctttgaggatgttaattatgaaaggtttcttcctcctaatttcctcatctttccgtagttgatgcctcagatttggcctggataggggaatcgtgaggggaaagaactagttgcacaaaatgatcttttgatactgggatatttcagatgtatggtatctttgccagaactacagtgtcagtaaagaggcctgctaaatttgaactgtgacaatcagaaaagttcagctaaggccatgtaaggggttaaaaagatatttggttgagggaggaggatatgctttcatcttttgccatactttttcatgaaattaaatcttagtagatttatggccaagaaagagtagaatatatttttatgcagtacttaaggggttttgactgatgttttttattattattatactttaagttttagggtacatgtgcacaatgtgcaggttagttacatatgtatacatgtgccatgctggtgtgctgcacccattaactcgtcatttagcattaggtatatttcctaatgctatccctccccttccccccaccccacaacagtccccagagtgtgatgttccccttcctgtgtccatgtgttctcattgttcagttcccacctgtgagtgagaacatgcggtgactgatgttaaatgactttacgtacatacagaattagtgggactagactttgtgtttatgtgtgtgtgtttatgtgtatgtatataactattccattaagcagttgccctccttggtgactgattgctctatcagcttaggaatcttttgactgaatttgtccgtatttgaaagatctcaatctgtgttctgaatctttactcatttacatatacttaaatcttgaaacccagtatagcaaaactaagccaaaacaaacaaaaaaatccatcccttgataggaagtcagtatatctgggttttagtcagtccttcaacactagttccaaaatcttgggcaagtcagttaatcactcggaggctgcttaattttttttttttttaattcttagtatattatctgtcttgattaggtaaagccaaagttgttataagactcaaggtactattgaccaaaatgcttcagaaactataacattacataaaagtacaaggaattattacattttctcaaatgaagagatcatttaagaaaaacaaaatgctggaaaatagtccttaaaaacttttctataataattactcttctgatgaattttacattgacacctaatttgaagctttgaatattattttttgaacaatgaattgggttta

SEQ ID NO: 78408 - DNA, 1607 bp, Homo sapiens
ttaaattggcatttacttatatttgtgttaatttgggaagaaatggtatctttgttcatctatgagtcacatttggaactagctcaaaggccatgggtcctgattccttttttttttttttttttttcttgtagaggggaggtatggtgtcaagaaaacatagtcaccattattacgaaaagtaaaatatggaagagatgatccctaccatcaatcagcttacaactagaggcactgacaaatgtatacagatagctgtaatgtaaggtataacataataaatataaggagaaattaataaattattttatggtattaagaatgtataataagacatgaaggagatggtgattatgtataagagtttagataaccctgtgagatacagtgtttagaatgaggccagtttttaacatggcatgataggtgggtgggggatagaggttagtaatggatagaggaccatttccgagtgaagtctcctcagaagcaaaagcattgaagtcagaaacacaaatatccagtacattatagccaatagtcaaatgatgggactagatctggtaactggtgatgatgtcatatagtgggcagtagtgctgggatggctggggtcagggccacatggcaggggcctcaaataaaatgtgaaggagttagaaatttattctgttggcatgagaaagtgttaaagcttttgaatatagaatgatatgtgtaactttgagtttttaggaagataattctagtggcaaagttgaggataaaggcaaaagggaaaccagatgaaataatggggcactgtagtaggacagtgttggtaagtttgaggaaaaaaggagtaagagatatttttaaggaaattcatagggtttgagtataaattagaaggcaagtacaagggaataagcgtggtctttagaatcagacaaattagggtttgaatcttaaccttgcatttactaaaggactgaaagctagttccctaagagaaaaattttctcttttgtaagatgcttattctataaacatttgcaagcactggaagtataaaagcaaatgatacacatgttctcttgaagtctggtctagtctgtaagaagaggctgcactggcaggttttgaccaaattgtgtagaatctcatctgacgtgattgggagctttggctttattctggaagcaactaaaagcaatcaaaaaagactggggaataatgtgagaatgtagaaatgtaggggaatttctaaggatgaattggtagcaattggtaaacaatttgatatactgggaaagagagagactctttagaatatgactgagaatcttccaatttgagcagctggactgatagtgctaccatcattacctcacagggtttttcttagtgtgtcttgtaaatcttgcttgtccctcataaagaatggttttccttttcttcagactaaggactttttattacagtacacaacttaacaccccctgtatctctccatcacaacacttaactgtgcattgttattgcataattaattgtggtttttatttgtgcccatttccttcaccacatgagggcaagaaattatgtctagtttttctacctctgca

SEQ ID NO: 78409 - DNA, 2310 bp, Homo sapiens
tctaaagctcatgttaaactcatgttctttattttcttctcagatgattcctttggcactgcatgtaacagtacaggaatttcttcctttcgtacttccaacaaatacttttttgtctcttaacagatgtgaaccataatgctgttctttagaaagcaaaggatgaagtgcacagcagtgttttctatataaagctaatgggtcataaggggaaatatgggttatttccagcttgttaattgtcttaatacatttttcctaagaattctattgtgcctctgtggttatatgcaccaatattgataatcttacagcgtgccataaataaggatttttatattatctttgctaaatattttaagtttttgttttgggaattgaaaaaatcttttgtgcatctatggtatgtgatacgtatactaatggataaatcctgtttcacacaaagattaattgggtaacatttttctttcctagttttctgaagtcagtggtcatgttgtgtgttggtgattgaaaatatgctgtttaggctgggcgccttggctcactcctgtaatcccagcactttgggaggccgaggcacacggatcacctgaggtcaggagttcgagaccagcctggccaacatggtgaaaccctgtctctactaaaaatacaaaaattagctaggcgtggtggcacacgtctgtaatcccagttacttgggaggctgaggcacgagaatcgcttgaacctgggaggcagaggttgcagtgagctgagatcacaccattgcactccagcctgggcaagcaagatttcatctcaaaaaagaaaagaaaagaaaagaaaatatgctgtttaagatcattcaaattcagtttctaagaagtgtaaagttttcctaattacttaagctgcttcattctcattcccttttgtaacacattttgccatctctgtaacatgttgaacatgtttaaagaacagagtgggagaataggaagttacgtggataaagtttggtaatcaaggtaggaatacatcctgcttcacagaatgggaatatttctgaaaagttgactgtagtattgaagaacacttaagtgtagtgtattagacgaactgagctaattttggtcttttatacacataaatcaagatttctgcatttcaaatcatgcatatttctttaaatttattgctcagtgtactgtatttcaaatattgtaaaaatgaaaagatcttgtggtcttatttaactcagtatgggataagtccttcccaccttcccattcttattccctcttttaggctgaatgaaaggctgggggagtgaatttaaaaatagatggatctcagctggagaatgggttggtcacgtatctcaactgatattaaataatttcttaaatcctggattgaagattataagaaaacagtaaatgtttgctctcagttcatttctttgttttgttttttcatgtacagttttaggcacttgtaactgctggatgcatgaactactttctagttctttcaggcctacttttagatatctgctgtggggacagtcctcaacacttaaagtaattttaaatagtgataggcagaactaggggtcagttttactgcctatgcctgtgctgaatttgacatggcattcctaggaggggaggtggaacgagggcggtgcacacattgtccatattgctagtcagtgccagattttgagaaactggggctaatctctctcttaaatggtcaagatctaattccccaaagtgctgtttcagataacctagtatttgtccaaaattgccctgctacaatagtatttatcttatatatatgtattatatatataatatatatataatcttatatatatgtattatatatattatatatataatcttatatatgtattatatatataatatatatataatcttatatatatgtattatatatataatatatatataatcttatatatatgtattatatatataatatatatataatcttatatatatgtattatatatataatatatatataatcttatatatatgtattatatatataatatatatataatcttatatatatgtattatatatatataatacatataaatatatatatatatatatatataggtttttttttgtttttcctcctgagatgtagtctcgccctgttgcccaggctggtgtgcaatggtgcagtcttagctcactgcagcctccgcctcctgggttcaagtgattctcctgcctcagcctcctgagtagcagagactacaggtgtgcactaccacgc

SEQ ID NO: 78410 - DNA, 1100 bp, Homo sapiens
tcctcctgtggcttctatgagctgagctaagtacaggacccacaaagacaagaaagatgtctgtcttttttgaatgcttatagttgagtgactttctcacatttgtgtgtgtgtgtgtgtgtgtgtgtgtgtaaaaccctatcacataatggaacttcattttcccatgcccttccaatctaagagcagttctatggactcaatacctcctacccaccagctgctactgtaaagatttacttttttactccttttaaaaagttcaaccctctggcacatgcattacttcattccttggtcccagcccaccaccccagtatctggcacgtagtgtattagtatttgtgtgtgtgtgtgtgtgtgtgtgtgtgtgtgtgtgtgtgtgtgtgtgtgtatgtatatagaatttaaaatttttactccggcagttgtcttcaaatactctaattttggggggcatgattatcattctgtcttctggcagtacatggatagatgctacctgagtaggattgtctatgaggtcagctgctccagtcattttatacaagaggaaattggagtgcaaagctttaaaatgattttcttaaagtcacccaggtgtcagaaccagaaccagagtccatgtctctagttcaggactctgcacacattggcacatgttctgtcctaccttttgggatgaatagttatacttgctttgtgattactcacccacctttttggagacatatgagtgttttgtacactattaatagaaggcagccttcacaaaatgccatctgcagatctgttatttcttctaataaaggaaatgatgtaaaattaccttaaatagaaatagtgttaattcttctggagacatattccataatccaaacacgaaatgtttgaaatacttgaagatgccatataaataagtcctttgtaaaaagataatattaaaaatttttgttttatagagatgggggtctcactgtgttgcccaggctggtcttgaactcctcagcttttactttagcttcccagtgtgttgggattacaggcatgagccacaatacctggccaagtccttttttttaatcaaatgacttattaat

SEQ ID NO: 78411 - DNA, 3233 bp, Homo sapiens
ggggggtgcccagagggcttccggaagtcccaggtttattctttcgggtcacagacagcagaaactaaaaagagggattaccctttctgtccagtcgcaagatggcgaccgagcctggtgggactccgaggggccgcaggccacctcctcttcccaatggcccgtgcgccggcggcgacggcaagcgggagggaggcggggccggcgaaggaaggaggggcggagcgcggcgccctcccgcgcgtcttggccccgccccacgtccccgcgtcccggcctggagccctcgcccggccgggcggcgcgcgctgcctgccgggatactcggcccgcccagccagtcctcccgtcttgcgccgcggccgcgagatccgtgtgtctcccaagatggtggcgctgggctcggggtgactacaggagacgacggggccttttcccttcgccaggacccgacacaccaggcttcgctcgctcgcgcacccctccgccgcgtagccatccgccagcgcgggcgcccgccatccgccgcctacttacgcttcacctctgccgacccggcgcgctcggctgcgggcggcggcgcctccttcggctcctcctcggaatagctcgcggcctgtagcccctggcaggagggcccctcagccccccggtgtggacaggcagcggcggctggcgacgaacgccgggatttcggcggccccggcgctccctttcccggcctcgttttccggataaggaagcgcgggtcccgcatgagccccggcggtggcggcagcgaaagagaacgaggcggtggcgggcggaggcggcgggcgagggcgactacgaccagtgaggcggccgccgcagcccaggcgcgggggcgacgacaggtcagtgttgccgcggcctgcgccaggcggcgctggctcccctccgtcactcggccggccttcggggcccgctgtggcgaggtcgacaccccccttccccgccccccgccgccgaggcgagtgtttgggggcgcgtggtccgaaggggctggtgccagaagtaggcccctggtggccgcggctgctgcagccgtaactgtcagtcctggctgagcgacggcgggagggttttgtcgcccgaggggacgcgagcgggcccggggcggggcgggacgtgcgaggcgtcgagatttgggcctcctaggagccaggctcttcgagccagccggggccccagacagggaagggcaggccctttccttcaaaggggagccctttctcggcgttttcaaggtttttggctctcttggggaagacatatttagccgtgtgcttggtgggttggggttttgggggtggattgatgggaagggagggcggatgaagtggtatgtcaagcccaagggttgtgcgcacaggttactctgtgttaccggccaccaggatttctgaagttgaacgtgagttattggctttgccagagactgctgtgttatatgcagacctgtatgcaagcagttggccttttttccccccccttttcagtgtagaaaatgaaaaggatgctttcctcatcttggtggtaaaggcttttgttggtaaaggtagaattgaatgtaccaaatgccttagtccgtaaaattttagaaataattttaatacagacactggtgaagcttggcaaccttgaaagagaatttagcgtctacattttttaaatgactttttatggatatgctaaattagtaacagtccaaaatctgtttgagattattaagtggcgagggtgctgttgaaaatgtaaactaatagcatatggggtttacagtgcacagttaacctcaatcatgaagaaatgtggatatgacccgtaattttggatcattttactgcctgcaatattgagagaagcagcaaattattacagttttttttgggagacgacctaaagtttaagaaatacaactgttgaaagttacctgtcagagacacaaaggtacccaatcaatcttgttgaataaattggacaagtgggataaggtgtttgtctcacacttctgatcaataagtactcttacttaagaagtgatttggtaaatcatgtaaaatttagaatttaggagagataagaaagttgtaacttggtgtgtatagtggaaatagctttgaaattagatcctgtttttaaatccaagctacttaccacatttttagtgaaatgaatacattattaatgatgctactgataagccctaaggatgaccagaagcccttttaagaaacactaatacagttgaccaaaaaataaaaaaggaaatagcttcaagaaataattttcaatctttgtgtatttataatatacacaggagaaataaaagaacagaatatgaagaggtaacttataatctttacaaaattagaatgtaaactatgctagtcttactgtgtcaatatttattaacctgcattagtttgctaagtagtatgctcactatcctctggacattgcccctgtccctgaggagcttaactttatacagagatacaaaatactgtgttttgatttcctttcagaggatttataagctacttatgttttatctgtcctaaattctgcccttttttttcccatggctgaaaaaataacttcctaagaaaggtacatactagtcagaggtgtggggaaaacgtgttctcatcccacttgtgcagtccatttaacaggatttattgggtacctacagtgtctttgacatgtaacatttaatcagttgtatttcttaaactttagataatttctatttcgatcatttctatttcaatctcctccctctcccctccaaaaaaatttactgtgtaaactgtgataatacactgtttctctcagtgtcagtcagtggaatgatccagatttataggtcatagcaaaatttttcatcccaagctcttgaaatgatgtttccaaatgtccattttcttaaatgactgctagttatgttctccaatcatgttacacatattttgtttagacttataattgtgtaggtctaaatgtagaaacattacattatgtacatatgcagctgctgaaagaaaattagttttctaatttttagatcggggtgaagacaaacttttagaagtgatctttcggtaaaatactggatgaagtcttaggtgctctttttatgttggttcaggacaaaagttttttgactgctttttgagttttcccctcactgccaaatgtaaggataa

SEQ ID NO: 78412 - DNA, 1023 bp, Homo sapiens
agaaaagcgtccagacggagagttcccaaatagagttttggcccaaaagcaacattttaccgagtcaacacaggaaaattattttaaaaggctcttgggagaacaaagatggctttgtatttggtgctgaaacccaagtaggccacatgcccttgtcctgcagatctcgtgttctccgcgttaacataaaggagttgatgagatcctcggctctggaacacagggaggtgtggagccttctgtagggtgcaggtggccagctgttcaccgcctggatctgttatccatgtaacgagtcagcaactggggaggtttagggacatggggcttttgtatgctgtcagatacatccattggggttcagagactggcacgggggccttccagcaggtgggctgtgatgccattcctgcccagcagtgctgagcaaagccagagcaggccaggcaagtcagagacacatcagcgtcacggggcttgagaaagctggaaagtgtgtttttcctgaagcgaagctgtcccacaccggattaaaccactgtaacatgcttagcaaattgaagtctcagcgtagtggccattggctgcccaagagttgaccaggagtgagcatcgcacctgcccccaggactctcgtccgccctcattctcagtgctctgcctgacgcaggatgctaagcgctgcatgcaccttaacatagtccccctgactaccacctgccacacaggcattgccagtgttatccccacattgcagatggggatgctgaggctcagagccgtgattggctgtgaactcttaagtgctggtgcagtgtaaccctgggggtctggctcccacccctcgctcctcttctctgctggtccacctcatgccccgaacccaagtgcagtggaagggcccctggacacctgcatcagctctccctgggcctcgaggtgatgctggctgagtggccttgggcatttggagcacatgtcctcaaattccagcatgcacaggacagcctgtgggttaataca

SEQ ID NO: 78413 - DNA, 1020 bp, Homo sapiens
aatgcatgaatggaggagcccagtgggcgaagcatcattcaggtattggaggggacggtgtggcggaagtgcccgagacagggaaggaggcaccagcacagaccagtgtcactggccagctgtctgcttattacccgtctccctcctcgcaggtgccgagattgctacatcccggggtgagatgtggctgtgtcctcgtgacccggatttgccaggaattatctcacctcacaaagactcagcccttggccataagagcacctggaggaaactaggttctaggcaaaacccctaaaacagcagccctactggtgttggccacaccctcatatgtaaaatgcagtttcacctaaattctgttcatgatttgttttaggcagattaatgacccccacagatgtgtacatccgaatcctcggaactgatggatgttttaggttgtagggcaaaggggaagtcaggagcttctcagtgacctcgagatagattctcctggatcatctgggtgggcccagtgtaatcacaaggtccttaaggtggaagaaagtgtcagatgagggaaccagagtgccggtggcccagtgcgcaagacttgccaccattgctggctttcaagacagagaaggcggccggccgtgagctgaggcatgcaggtagcctgcagaaaccaggagaggcagggaagcatactctccgctgagactccaggaaggagcgtggccctgccgacaccttagctgagtgggccctgtgttggaattctgacctacagaacgataacatcataaacgtgtgtggttttcagccactaggtttgtggtgacctgttactgcagccccaggaagcgagttcatgggcctagtggtcggaacacaacacgcaaggtctgggtagccccagcctacaacagggaggctcacgggcctgagagaacctgctggacgtttatcaacaaaaagcctgcagtgggaggtgctgaggaacatggtcctcaaggtttgcaaggactgaagctgggt

SEQ ID NO: 78414 - DNA, 1057 bp, Homo sapiens
gctttgttttctgtgtggcggcatgcttggttcctgctcaagaaaaaaaaatttttttgaaagaacaaataacatcaacactcaatactcatttattcacatatttaagacatttttcctgggtatcccattttaattcatccttaaaatggaactgatcttgcctccttagcctaagttcaggggaaatggatgcaaagctctgaaagtcactgatctgggtgctgtgaggtgacatcatcacaggtgacatcaccagccagccatggagaggtttgaacgaaccttccccctttctcccagacagatgtgaccaggctttatgaaaatttgtctgtaaagaggcacttttcaccacattattttaatacacttgtgttattaccagaaaaatgggaaagaaggaaataaaatttgcatcgactttccgcctccttactccacgttggttcttgcaaacagactggagttgtgtgtctgttaccccctcctttctcgcacatgttccagcgttatgcatgatgtggagcaaagctttattaataaggttgccaggaatcaccagccatagaaatgcctacctttttgagtgaacaattccatttctataaatctatcctgggaagataatctttgatgcagtcaaagatcacagtgcccgaggatagtcagtttttacaacagcacatgtaaaacacagcatgagtgctgccaaatccatataataattagatatcatggttcacttactggaatactgtgtatttattaaattatattttaagatactttctggttacatggaaatgcttatgactggataaagcaatacaaatgataacaaatacgggatgttaaatttccctctaagccctgctttagctgcatcccgtatgttttggtgtgttggatttttgtttgcgttcatctcaaagtatttcctaatttccgtgtgatttcccctgtgatccattggttatttaagagtggattgtttaatgtccacgtatgtatgtctttctcaaatttgcttcagttattgatttcatttctaagt

SEQ ID NO: 78415 - DNA, 1055 bp, Homo sapiens
ttttttctgctctaatgtttattattttttccttctaattattttgcattggctttgttcttgcttttctagttccttgaggtgtgtcattgggttatttgaagtctttctaccttttttttttacctgtaaaataagtttatcggtggtaacatgatataatttactcctgatatctgatgttacaaactttagggtccttgagatatgcagcatccttggatgtaactggcagaaaccccattatttgagctctcttaattgcttttgtgatttctttctgtttcttcccacaaagacctgttttgtgccttccacaaatgcatccaacaaatggagaaataaactgggacgctgtacattcttaaaatctacctgctttccacacaagatacatttcttaagggcttctttataagaattttccattggaatgggcaggtcctcattgctggatatctgtttatattgtgaacaacctcttctccatagcaccatatgagtcctgggatgtgtaaggctaacagcagccattacaaggtgtgtcaacttcttcctccccagaccactgcaaagagcaactatagtggccatggttccacattcctccactggttctaccttttatgtaggcatttattgccgagcttccctctttgagatgcttttgctgtatcacataggtttaggtgaaatgagtttcttgtagatagcatatagttgggtcttgtttttgttgttgtttgtttgtttgagatgaagtctcactctgtcacccaggctggagtgcagtggcgcaatcttcgctcactgcaacctttgcctcccgggttcaagtgattctcctgcctcagctcctgagtagctgggattacacacgcttgccaccatgcctggctaatttttgtgtttttagtagagatggggtttcatcatgttggccaggctgatctcaaactcctgaccttgtgatccacccacctcggcctccaaaagtgctgggattacaggcatgagccactgtgcccggccatgggtcttgttttttatccatt

SEQ ID NO: 78416 - DNA, 1030 bp, Homo sapiens
agtagataatccattggtgtttgtcccaccattggtgtattctaacaagaatgtgtccaactttgaatctcctggcttgaaagtataaaccatcacttaattcttattttaactctccacctgaaaaccagttcatatttctggccattttatgtaagcaaaactgaacaattggtgaaacattttgttactcttggaattgactctggctgtcagtgtgagccattagagtaacatcgaatcttggggcaaagaactgcccaggtgaattaaatttttccaggacactagctagtgtgccttggattgattacctcttctactgcattgaaaggcgccatgttttcctgaaatactaaattcccaacacctgggtaaacaatgaccttccagagagtggctcccgtatgcctctccctaggaccaaccccatgaacatgttttgtcacgtttgtctcatgtttctacttcacaagtcagtgagtgtgtttaaggtaagtacaggattattctagtaggaataggcgattgctgtcataatcaattctcatgttgatttcattttattgtaaagataaatttaaacccagttttgcttaagcacattgatgtaattttttggtattatttgacatgaaaaaacagcaaaattgagtgatagatacaatatgaaacttgttgatgaatgaattcaaatttattaaaaaaggagtaactgacctaaatgtgaagactgatttttttttcttccttggctatcttgtgaagatggtgtggttattttaattctagtcattcttgcacatgcccttttgggttatgctgaaagtaaaaaaaaataagcccgaagttgactgcatgtgagatcaattgaactatgacttaaaaaaacgaaaatcacaatttatcctcaacttcaaaggacaactagacacacagagatctaacttgtccctgtcttcaaataggtattttaagcaagtaatatttttatattaaaagtcagggagccaccctacctataagctct

SEQ ID NO: 78417 - DNA, 1040 bp, Homo sapiens
atctcgtatggatttctaggcctgatatccaacagaaagcatagacgtctcaggttattcgttactctaaggtaaaaccatctaggatgattttcccccttgcagttatgttatcattcttataacattgtatgttaatagaaaatatatttgcataatatgcatatatatgtatatttaccaagattttgtttcttacgcttgctatcatggcagcatgcgatgtcatattttcctttatgtgatgtaactactttctgttatctagaaattaagattgaagctaaaacacttctactgttcaatttcagaaactaagaatcatcctcatgcctttatttctgtatctgacatatttcataagcacatccaactactcctagactgactaggattctgcaggaacatgacccgtacacaccacgcgtcacccaacgacccatgaccgttctctgaggcaaaggagggcaacctgacagcaaacacagtcactgttggttccttctgatccacagcctcatcagtatttggactttttaaagctcgtagaaacaagacaaggtgcaccggtttcatagacgcaaccttaacttactatttagatgagatctttctaaagaaaaaaaaaagagatgatatattttttgtaaacaatatttctatcacaggcatccataaactgaaatgactacagttgtgcaaacaggtgtcacagtgaagttgagcatttggagaaaaaaataaaaagcaaaatttgcaggaagaactgctaaattaatactttatcccaaaatgccacgtatgcctcaccctctctgttctatccaaaaccaaggaccagagtgctccaatggtaggccccagttgtctcgatgtaggtagaggcaccaccctccccgaggatgcgtgtggtgtggactatccccatgagctgaccactacttgatttttctttggtggccgtaacaacctttaatttgtgggcatctgcaacagttcaaaacccaccatcagataaaacataatccacaaaatctcac

SEQ ID NO: 78418 - DNA, 1061 bp, Homo sapiens
ttttctatttcttatatttccttttcttaatgggttttttcaacacataataagatgactagtaatgggagtaaaaattagaaacactatttttaattttaggctgcattataaagtaaaagatagataataaatgaatcatatagcatgataatgggcccagaacggctctaagtgagagctcacaaagcttcccaggctgcagtgggagtgcctcaccatggcagcttaatgggaagaggagcatgtgataagtgagctctgctgcatttgctgaaataccagcttattagttcacagatgcatttgagtggctcttagcactctacaaagctggcatgaccttctgtgttcacatttttaatgagttcttcaaaaatattaatgcctagagaatgatataaattcaggctggattagagacccagagctgtgtttttggcataatggtgactgcatctggggagaaagggccgggatcagcatcttcactaggtagttttgccaaggaatccctgccttggaacaatgcacttgtgcccagggactgtgcctctgtctgttggctcagcatctgcctggggacctgaccacgtctgcactggcacacagacattagggcttcagcgcatttcagttgtaaattcaagcttctgtttcattttaaaagggatgtcttagtgcagctgactcattacttctcaacttcaagttatttgccactagctgtgatcacttgggagttttccacatagataccgcatatttcatggcattccatcctgccagtgtaaggaccttgtctaccggagctacaaaaatacttttatgtactctttaagatgcacatcaaatgggaaaagcctttgcctagcagaatagatctactacgtcagataattcttgggttgactaacattccgaggtctctgtctcgtggcatcttgaatggctctgctgggtccgttaccttgaaagctctccttcatccctgcctgaaggaatcctattcaaccatgaatgtctcatacaccagaggtgcatacaatgtgaaacctctc

SEQ ID NO: 78419 - DNA, 1078 bp, Homo sapiens
cccaggagtttaaggcttcagtgagctatgatcgagtcactgcactctagcttgggtgacacagtgagaccttgtctctaaaaaaaaaaaaagaaagagaagaaaaagtaaaacaatctgtgtataagtgggcccctacagttcaaacctgtgttgttcaagggtcagctgtctgttttccctgttctttattcctgatgccacttcattagtgcaggacatcagtatgggtcttgctgtcagctgtcctccatcacagccagggaagccaaggggcatctggccatggcccagccatgaactggtagagtagtgtcggcatggtaagtgtggcccacaggcagtgctgatggaaatgaccagaggcagatgtgatctacctgtcaggtccaaaggcttcaatcaaggacagttgaggggcaaaaatagaatgctggaaaccttcattctaaccaagagtttgtattccataggaatgctggctcctgcacttcagcacccttctcctttagtgtcagttttgaacctcagctatgccagtcaattcactttcctctcccttcagtgtcttgccttcctctggccagtgccagagggaaggcatcccagagaggtgagggggaaatgccagctggctgaagcaagccttctctgcagagtctcccaatgtggctccagctctgggaagtcgtagcatgcagcgagcaagttctaggtgttatttctccgcctcatgtcctgcgtcagaaggcgatctgataattgcaggctgtcattcataaaggtatatttgataatgggctgtagtgctatagaggctgagatgggagtctacggatcttcatagatgttcgccactcctcataccgttctgtttaaccttgctcctggacaaggttagaagagggtgttggattttgagccagggcatagcaggagacagccaaaaggattgcagcttttgtgacatcacatcctgtacattttaagcgacaacagtttcacagttttaaaggtgaacgtaaagcaagagaatcatgactgattaaattaccatctgttaattatattgccagtt

SEQ ID NO: 78420 - DNA, 1380 bp, Homo sapiens
actttttgagtatcgagaatagacttataataacttttaaaatgtctttgctaattctgacatttaaaaaagttttgagtttttttttttttgattcaccgatgtacttccgtattctgggttatattttcatgcttccttacttgtctggtaatctctgtttggatgccagacattgtgaattttaacttgctgagtactggatatttttgccttcctagaaatattcttgcgctttgttctttgacacagttacgttacttggaaacattttatccttttgggtcttgctaatattggttaagcaatactggagcattgcctagtctagatttaatcattactattactgaggcaagaccttctgtgtactccatctcatgccctatgaatgctgctctgtgggaacagatactgttcccagttctggaaacttcttcttaaactctgacaaattttcctctaatatttatattcctgcttctcaatgcactttgtgtccgtttttcctttttttcactgttctcataacattaacttaatgtaaaatcaaacgctcatcacactatatgaatgacgttcctttttctcttagttttattaaaattttaattatttaatctaaaatgggcaattatgtcactattatagaggttcaacatagctcactcaaaaataaatgttatgtttttgtcattgttttagttgatgaattagatttactatatcggctttctttttcacagtctttgaagctaacattttaacagatgaagtttctgacagctgagtgcagggagaataaacatgcatctgtgaacacaagccaggcgggagcctttggggagcgacaggggaaaggcaataatgagcccaaaagagggaggattagccccataaatatcgctcatctcccatcagaccctctcttaacgttgccccttccctccctcttcattctgttttatcatttgttttctctcttggatgtatactttttgtcattaaaattttttctcttttctatttttatccttttgaacatttaaagaatctcttccttttttcttgttgcaggtcccttgtcacaatgttgtttatgtttgcagagcagtaccctataaatgtgtatataattgtgattccctgagtgtggtcacaagatgatccattgaattctaatagatttcactttggaattcatagccagttcacaaaagaaatggaagaatatgtaataaagagtaaatacatcttttggcaatattttagcaaccaaaatattacccgaccctaacgttgtggagtctatgggtaaacactttattgcattttctccctgtttctaattctcagaggcaaagaggctaatgacgttat

SEQ ID NO: 78421 - DNA, 1068 bp, Homo sapiens
aagtgggcacaggagtgtgctgcctgatgaatgctcacttgcacataagctcatgcaaccagtgcccagatggaaacggggagcatgctgtctcccacccacgacatcttatggaaacagcgtgttgcggccaccagttctcactccttcctgtgccagcattgcctgtccatggcattcattcttcccaccctgttggcccctcttggagaatctttttgatgcatatctctgatgtttttccagcctctaccctacagacctccaggctggatcatcccggtagcctcttcctctctccttactcctgaacccagcattgtgtttcggggcccacagagatgactgatggcaccaggcgactgagctgccagtgttgctgatagggcctgggtctcccctctcctgtgcgtccactctctgcctgtccatcctctgcctctggtaccattctctctgcccgccacattctcagcagacggcctcacaccatgaaaaaataataaaaaggttatcaagaggaaattcctttggctgtcctcccactaccactgcccttcccctacagtcacggcctcctgggacacctttcccactgccgcaccctgcctcagccgctctcaggagctgagcgccacctggttgcccaaaccagagtcaggaggaccccgaccgtttcctcgtccttgccctcatgggcaccttgaccagcagagcctggttctcccacttcttaaaaagctgtcctttcttctacccctacctgaccctggaactcccccatggtggcatgctgcttctggccagcaacctcgcccctccgtctgccttcgctgtgcagccagcatgatgcggagtttccgaagcctgcagcccagtgtgctgcttcctgtggctggctttgggtttcccagcccgcggggttccttgaagcttccctgcacatctcctcagcctctgctccggccacgatatctgctctgtgcctcccagctgtttgctgtggtctcctcaagggcatctcctccccaccttcccgaggtggccgtgggcacagggccctggctt

SEQ ID NO: 78422 - DNA, 1029 bp, Homo sapiens
tcctggaaaggaaggcatacctgtcagtgcgtgtgcggagtcctggaacagtccgtgctgagcagggtcgttccttcactctttagttggtcccacatttgtggagcaaacactcatgggcacctgccatgtgcctagcgctatgccaaatgcttcgcatgcagagcgaagaccaggagcttgctgtgctgttgtggacatggcaggaataattacaattcagaccgatgtgcatgtgcctgcccagaggtcagtgtggtgcatgcaggcaacttgtaggaagccccacttgccaggtggcggtggggaccatgaggagatgcacagaggggcctggtgaagggcagtggaggaagcattgcagcagaggaagagcttgtccaggacaccagagggtgaagtggccccacagcatgtcagcagcaagtgtggggagaggcaggctgaagagggggtcggatctgatcacattgggcttgcgagctgagcccaagagggccacacttcagcagtgtgggagcacggaggtgtacagcttcaggagtaacaggattaagttggcatttttgaaaaatcattctggccaccttgtggaggatgatggatggtgggtggtgttctgaatatctgagatagctacagccatccaaagcctgctgctaaggaggaaaggtggattatctggatcagctggggaataactatagacgagagtataataagaaaaaaaaacacattgagcatcatattaatcttgagattgtatgcaaaatgttttgcagcgttagtatggattctttataagtattaatagaaataagctattaaggctgggcgcggtggctcacgcctgtaatcccagcactttgggaggctgaggtgggcggatcacctgaggtcgggagttcgagagcagcctgacccacatggagaaaccccatctctattaaaaatgcaaaattagccgggcttggtggcgcatgcctataatcccaactacttgggaaggctgaggcaggagaatcactt

SEQ ID NO: 78423 - DNA, 1034 bp, Homo sapiens
caatcccacagccggagcatccacacattttcaggtcccctcagggagagcttgtggggacccctgggcggatggaggagggtgaaagccttgcagaatgaagtgtttactgagatttgacatgttggggcggtctaccccctacacacacccctgcaggatcttgtttgcatcccctttgagtgccttatttgggccaatgataatattaacatttttttaacacttttctgataaaataaacagaatcttgggaatatccgcacaatgcacttcactagaatataggttccatgttgcagaagtaaggtgttcctgttcctcagcagttcgtccttcaacctcgattccgggttcccttttgaggaatcttcctcccttttgaagtagctagaaaatcctgagggattgcgtatgtgtgaaggccctatacatgtataaagaaggtttaaagagaaagaatgtaacagctcatgaatcagaaactcttggtattcctaagagaaggtatttgtggtctaagtaaaatctaattccttttggtggggagaggggaagagattgtacagttgccaatttttaaaaacctgaccgtctgggtccctggatactctgaaatgatgcctgcttgccccagtctcgtcttcctaagtcacagcacctttgaatcttcatcacatggatatttcagacactaagttctacaatgctgtgtgattgagctagggatcagagagccaggagaaaaataatgactgacaggagctgatagaggtgacaggtaagtttcactcacgtccgtgtgaagagaccaccaaacaggctttgtgtgagcaataaaggtttttaatcacctgggtgcaggcgggctgagtctgaaaagagagtcagtgaagggagatggggtagggccgttttataggatttgggtaggtaaaggaaaattacagtcaaaggggggttgttctctggcgggcaggagtgggggtcatgaggtgctcagtgggggagctttttgagccaggttgagccag

SEQ ID NO: 78424 - DNA, 1057 bp, Homo sapiens
tcatgcttagacttgggtcccatccccaggatatctcattatatatttgcagatatcctcaaatatgaaaaaaactccaaatttgaaactcttatggtctcaaacattttgaataagggatagtcaacttgttctagatttgcaacattttcaaaagtttgaaatcatttcaaagtgcagaattaaaaattaaagaatttagaagtaatttgcatgtaagcatcattaccagctacttactatgaggtcaaggttcatagcaagtaacattggcgcttttgtccaatgtggtgtgtggaggatgatgcagaggtggcagtcagtgggtggatcaataagggcaccacagtcctccccagccttcttagatcatgtgcctctgaggaggggaaggtggaggggacagcttctggggagggatggtggaattataaacttatttaaagactgtgcatcagcctgaaaagacacctgaagttacagctacttagtaccttcccagaaaaatattcagtcagttgaaactcctcacaaggctatgaaaatccagacctttgtgtgtatgtttgagggaataaggcaccttttcctaagaaccaattcattctacagatacctgtagcatgagctatgtacaaggaggggcactgtgatggggggacagcagttaattagaaatggcattgtgttcaagaaagtgacactataccaattgcctttgacaagtcatggccaacattcacatagtgtattgtgagctccatgggctgtgtcaactgaagaatgtcaagggtcataaatttggaaaggggagctttatttctcataaagggttgcagcctgcatggccattctgataggctgggaagtgtagcctcccattagaagctggaaacagatactttgagggggggcaaagggaacaagaatttatgcagactggggtggctaaatatgcatatttaatacactgtaggaggagtcatgaatatttatgaaggaagaaaggagaaccatgcacatgtgcagttagtctcatgcctctccatgggaccta

SEQ ID NO: 78425 - DNA, 1034 bp, Homo sapiens
tcagtgtctggtaatggcactgtgcccattggaaaggctaccatgtttattttcctttttttcttctctgaagaatatgtagaaatcactgaaagcaactattcatcatatgatggggaactcaattcatataaggcttctgcattttccactctgaccctaagcttggtacttcaagggatgaaagattaaaaagaaaaggaagtaacaccagataaagtccatataggaatttttttgctatgtgcttgtataaagtactggtgtacacacacacacacacacacacacacacacacacacacttattcctccctcgcccatcctgccattctacaggtgaggaaatcgaggcattctgtgagttctcctggcccatctgaaattctgactcagagtcggctccgtgctgctcccgccatctccccctccaagtacttccagcagtgcttgtgtgtgttggggaacctgggaggtgtcttatggcacattgtgcacaccagcagactctgagagtgaatgagtacattcttagtactctgctgggacaagcaggagtggccaaggctgtcctggacaacgtggggccaccaaaactgaccatcacgttagatgtggctcctattgcctgatactgtgaatgtgcttcacagcacagattaggaaaagtcctgtgaggattccaaggagggagagccaagcctcagctgtggagacagggaggcttcctggggtgcccacgggacagagggaggttgtcctggtcccttgggtgctccagaggaggaggagagaagacagacccagtgagtggaccaggtgctttcgggctgcagtggacctcagatgcaggtgctccttcagccatttctcctgccaggaacacagcccagtccccaggtcctcactgcagcgtccttgtcatctgcttggcggtatcctttgatccttgaagagccagcctgtcttccccctcatagtgaaccccctctcctattcagccagggtgaattgatcactacttctaccccatt

SEQ ID NO: 78426 - DNA, 1015 bp, Homo sapiens
tgatgtcggctcactgcaagctctgcctcccgggttcacgccattctcctgcctcagcctcccaagtagctgggactacaggtgcccgccaccacacccagctaactttttgtggttttagtagagacgggttttcaccgtgttagccaggatggtctcgatcttctgacctcgtgatccacctgcctcggcctcccaaagtgctgggattacaggcgtgagccaccgtgcctggccttgacattctttttatacagggattctttgggctatgtcttcccttccgcctgcccactcagcagtgccgtggagcagaggtggttttcatttgtttgcaagtttctggtgcaacttacttctgggccatttatgccagccattaagaggattgtctagctgcaaaatttggaagaagaggactaagataggtctcttggcgatttgctcagtgccattcaatcaagatagagtgagtctcttgatctctgtagctggaaatgtagattgcccctcattcctttgtagtcaggagaccacatccagaattagaagccatgtgtaaacgttaactaatgtatctctttttgcatttttccactgaacttaaacatctcacagaagcatttactacagatatcaaaaactttggcatgtgcggtactaacatttcacatgaataagaataagattaagatctgagaacatcacagttctttaagtgtcctaatttgtttttaaaagaggatatgaattctattgattacatcatcatcatgttttaccccagttctacaataaaagaattccttttatgtaactgctgaatccacatgccatgattcatgacactatatatatatatatatatatatatatatatatatatatatatatatatatatatatttttttttttttttttttttttttttttttgagaccgagtctctcactgttgcccaggctggagtgcaatggtgcgatctcagctcactgcaaccgccgcctcccgggt

SEQ ID NO: 78427 - DNA, 2078 bp, Homo sapiens
actaagtgtggtaagttatgaaattcaataataaatggtctcactttaagtgtgttgtaactcttagagcagatatgacaaacggttgttcacaggtaggatgtggcaagtcccattagaggaacaagtgacagaggcacacagaacagagagggagggaggaggagggacgagagaagctggctgggaggaaggaggtatttgatgtggaaactttcatgaaataaattatatttaaattgtgtgaggggtatgaatagaattctgactggcttacttgaaagaggatattctgggttaggaaagaaaatggcagagttacgaatgggtggatgagcaggatcagagatttagaaggggagattccagagacgaagttggaaaagcaagacaaacccctgtgcacctaggccgttctgcaggaggccaagggcttcacatgataatttcaggaaataaggagcctataaatggtaaaggttttaaagcaggtaattgacatgatttgagatgtggcgtaagatgactattttggccaaaaagttaatttagatagaggattagcgatggtgaggtagaatgaatgagggataactgatcttggaagattctttcttgaaattttctcctcaggttttgatagatgcatttttgaaaacgtgtatgtagtgaaataaatacaaattcaccaaagttcaaaacaaggactttgaaaaacacacgtatctcaaaatggggagagatgtgtatgcatttgttcaagagtttttttagtgtgattgcagagaacagtaacagataatacacaacaatgatgctgttgttgctttttgctttaaacaattgtagactccagtccttatctactggtagcctgtgtagatgatgcctccaaaaaatgtctctgatctcaaataaacacatatatagatcagttaagcatgtaaatgcatatctcatcattcattttggtgttttgtggaaacaatctaggaagggatttgaatgttttaatatttagcattggttttgccatagcttgcttcatggatagtggagttatgcatttccaatttttttctaaatcttttaatgtttcttttcgtacattctttttttttaaaaattagttgacctgatacttgtcaaagaaaattttgttttgtgtaacttccctcttgtttctcttagcccctgtttaaaattttagataatctataaaaattatacacggctagataattattgagatttagtttgtatatttctataagtgagattgcgtatgtccaataacactgtctgctgaaaattactgtgtgtgttataattttggtgcttaccagtggttctagggaacaataaatgtgttgagtagatagatgaagagatcaacacatgggaaaaactttgcaagtataggaaacataaaatattgaaaaacaaaacaattagggatttttaatttaaaaacagtattttaaaatatgagttttaaaaaatttattaaaatgagccattgtttgatctgttaatttggagaagttacatgtacttactttttacttcattaactatctggtattagggacataaaactagattcagactctagtgatagtaatgataattcctgtgatttaacttgcacttcgctattacttcatacttaattaatccattaaaattaactcaatcctaatgaaagtgtaactacaggactttttttttctcatttcatgtgtataaataataaattattgttttttgtttttaaaaattagagttccttttgggtaacatacaatgtgtatttttagttatcatgagacatactcatccattatgctagctgttttgtgtgcacttctcacttgttgcattttcttataaaatccatttttttaatgtgtaggtgtgaaataagtgtgcatatgaacataattttagcacatttcaagaagcagctttgtagctgtatcactactaaatggatacagtcatacccatgtacaaaaatcacacacacacacatttgcactattattttatgtttttcttctttttagaagaggggc

SEQ ID NO: 78428 - DNA, 1067 bp, Homo sapiens
tgcaggaaaggggaacgaagacagtggtctgtgcgttccaggggtgtctctgcggtttttccaaggctgcctcctggactgggagacccgggcccggcaccgccagtctctgtccgaggtgctgacaggcttccgctgcttcagagagcgggaggccgcgcctaggcgggctctcagaggagccgctctaccgggagagtcggaggctggtgacacagtgtcacttaggtcttctgtgaatgcagactggattcaatattctgacctgtgggaagcggaggtcagtaccccgaggtgcgaagcgggcttttgccaggagtgctttaggacgccagggaatcaggagaaggatggccctttcatttgttaattgagctgaaacgccgtgggatttgaaaactagtttagttttctgcggagggacactctggaaggagcatttgtaaacaatatttgttttttggaagaaattgtttggcaacttttctttcggacatacaacattgagaatacagtgagacatggttttagatccactctgtaggcttcttaactctcgtgtacgtcggaatcacgtgggcaaacttgctttaaatgcgtgcctgctagttcctcactccaagggattctgatcaagataggctggagtcttggggtccctgcatttaaaactacttcttcaaatattttgaagcgggtattttgtggacaatattttgagaaactttgcagtaagtcacagatatatgaatatatacaaataaagtaaaactatttttaaaaatagacgttagtgagatacttttaaaatacctaccactaaggatcttataggaagaaacttttgaccacgccaagctgttctcattaatttttcactgttaatctaaagcttttaaatttacaatcccatgtatttaaaaatgtacttttttccaaagtatatcacttaggacatttgtaagtcaaatattgtatcagtaaaagtgttagcaaggaacacagaaggaatgtgactgcataaattaccttacagtaaaaattaacatgtctattttactttttat

SEQ ID NO: 78429 - DNA, 1026 bp, Homo sapiens
tgagcactcagtgaggttcatgctgagagggtacaagggagtgtaaattcttcttttacttgaagcttcaggattgttctcttctcttgctagttcacatctagcctttgccaattcgtgagaagcttctggccgaactcttcatagtggtgtctggggtatctggcatgtatctgccctggctagcagctgctcacatcccatttttccttgcaggtccctccccctcttcatatttcaggttaatcagttgcatcaacacctcacttccatgatgcattcaagaaaagtttttaatttgcagtttgtgtggacttttttttattacaaaattggtagtgatactcttgcgagcttccttctggttggaagccctgaatgggaatttgaattagcaagataggagtcactttggtatattcactaaatcaaagtgtaaggtgtggagaaacacattctaaaaactgacctggtctttttctctttgcctataatgttccagtaattcaccttcacaggtgctttaagaatgactttcactttcatgcttggggtccccagaatccccccacccagggcctggacactgctaatgagcttattatttaaggtgcagtttgaacaatgtcttcttaatgaaatagtcatagattatcacaatgggctgtgctgtcttactggtccatttaggcacatgattacctgtgcctcatgctattttgtcaacaccttgtacattttcctataaacccatagccctatttcagagtccagtgtaatagatgttggataaatgatttaataaacaaggactagttggaatcacacacgtgacattatgttagtgaagctgtttattggtctgtctgctctgcaaatttatgagctaatgaaggcaagaattgtcttatttactttagagcccctatggggatagtaggctttcaatgtattttattaaatgagcaaaaaaattaaaggccttcaaaggtgggacacgcattggctcctccaaagaatcaggtt

SEQ ID NO: 78430 - DNA, 1302 bp, Homo sapiens
caatttctaatcacttcatgtttctgctcaacaggtgttggataaatacaaccctccagaccacttcctccctgagtcctacacctgtttcttcttgctgaagctgcccaggtattcctgcaagcaggtgctggaggagaagctcaagtacgccatccacttctgcaagtccatagacacagatgactacgctcgcatcgcacttacaggagagccagccgccgacgacagcagcgacgattcagataacgaggatgtcgactcctttgcttcggactctacacaagattatttaacaggacactaagatggggaaacgtcctcgtgagatgagagcctgagccaggcagcagagcgctcgctgctgtgtagactgtaggctgcctggtgtgtctgatgagaagcgtccgtcctcgagccaggcgggaggagggagtggagagactgactggccgtgatgggaatgacagtgagaaggtccgcctgtgcgcgtggaacactgtggacgctcgacttccaagggtcttctcacccgtaatgctgcattacatgtaggactgtgtttactaaagtgtgtaaatgtttatataaataccaaattgcagcatccccaaaatgaataaagcctttttacttgtgggtgcaatcgattttttttctttctcctttctttcaagtgtcgtgagtcgtcttgattgtatattggaaataactgtgtaacaaatcgtattataaatatttcaattaattttactctgaatttgtttattaaaagacttttgaacatgaaatgattagtattacttgaatgcatccagaggatatttaaaccaaaatgaaaaaccagaaggccatttggtgtcccccctcccaggtgtccccttgtagcatatgcattatgtcatctgaattgaggcctttctgtgaacagcatcataacttctatcatggaaagtgtactatatataatgtttgtgtcatgtatatgcctaaattttaattatctataaataaaacatctgacataaaagtgtaggctgagctttcttaaccagtacaaccaaaaaatcaattagttcttgatatagcagtagtaaagatttcagccaagttgagattatttttttgttaaaccaaactcaagtcacaaagaagtgattaggagaatggaagattccacgggaccagctggtggcaggggctgaagggctctggagccttcagagtttcctccgacttcctccccagccccatctgtctgcacagccttggcttctgctttcattggcctgggctgagagt

SEQ ID NO: 78431 - DNA, 1086 bp, Homo sapiens
agcagagggggccaggagtcacagatatatcacctcgaaggtccgtgcctgaatgtgtagagattgctggccaagtgagaattaacaggtggtgaataatacagtcatgagtgagggcatctgaaagtcaccaggcaggttttgacctgtagatgttgctaatagttggagctttctagaagttgggttagtttctggcaagcagcttgacaagatgatcttgaaggggctaattaccatacggtaggggcatctctgtatagggaaaagttatagaattggattgaggaccactaatcctgattgtgattctctaatgtattttgttgtcgaatattatggcccattcttagtgatttaataaaattgcaatgttttggagtcctgtcccagcaggttactttttaaagaccggctttgtttccacttggctagaacgatttctgctgaacaggactggtacattcattttactttcacgtgtgcctgagggtggaagtggtcaggcttgtgtttaatggaaagaccatctctctgatgagagaggcagaagaaatcttgggcaggtaaaatggataggaaacataatttcaattactgttcaataataaaaagtagcaaacgattaattttaccttctttttttaatccttcaaagtggtgatgataataggcagcacagaggaaaaaaacctttctttgtagggagaaaaaaagtgagaggcagggcacgtcccacctggccctgtgtgagcgttgtgcaggctgtgagcggggcatgggtgggagctggtgtgtggtaggggagcggtgggcagcagcatctggcacctgctggggctgcaggagagcaggggagtgctgagggcgtctgaaaggtacctctggtcagggaatgtgtaggcagcctcggttctggtcctggttatggtgaggatcggcctcagagagtgggtgttactactcccggtccagagcaccaaaatggactctccaggaaggtgggcgggctggtgactgggaggagaggggagtgctcctgtggagggggagccgccctgaggtccaggcagggcctctgggagc

SEQ ID NO: 78432 - DNA, 1715 bp, Homo sapiens
tgtttcacttcttttttaaagtgacaatagagctatttgactgaaagagccactgagagttgtcatgtgcagtgtgtgtgttttaggcctctgagggcagctgtaggtattgctgaagtcaaatatgaaaaaatctcaagaaatgatcgtgtaatctaaacccttaaaccataagcctgtaaccgttagcatgccttgagatgcacaggtgttcttgtcacttgatgcaggcaacaagtgttgcagcagttgtgtggcacgtggctaggaactgtcagaggtcgccacatcactgatggtggccgtatccttgctgtgcccatggccgtcatcctggaataggaggtcctgcggaaggagccacagaaaccttggcctgttcactgcatttctgagtttccctgagtttgtcatttttggtgcctgcaggtactggtagctcttgcttgtgacctggagctggacactctgccttgctgtgccgagacgcacaagtgggcctggttccggaggtactgcatggcctcccgtgttgctgtggcccttgacaaaagaacaccgttgccccgtctgtttcttgatgaggtattgcatgatattttggaatcacttttgggatgcaaaaacattatttagctatagtgtaacaagatgccaatattacgagacacagaaaaatttcgcttgccaaggaatatcaaagaaaataacacataggtgaaaatgagtgaactgacactgtgaatttcagttaaagtttatttttagtaaactacaggtagaatgatactgtctagacatttctaatatgttagacttgatgcagtcattattggttttgcccatgaaccataacattgcaatgttgctcttccctcatatttttaggcagggattccttctgtctttccttagtatttatctattttgtttgagataagtgtttgatttgtaacatcataataattttgtttaggtggctaagaaaattcgtgaattaatggcagacagcgaaaacatggatgttctgcatgagagccatgacatttttaaaagagagcaagacgaacaacttgtgcagtggatgaacaggttattatattagaaacaagcagtaatgtcgatcgtgagtgtgagaggctgtgtgcattgttcttgcccatggcaaatgctcacttgatgtgtattgtaggcgaccagatgactggactctctctgctggtggcagtggaacaatttatggatggggacataatcacaggggccagctcgggggcattgaaggcgcaaaagtcaaagttcccactccctgtgaagcccttgcaactctcagacccgtgcagttaatcggaggggaacagaccctctttgctgtgacggctgatgggaaggtaagagctctttttctatgtcacaaggtcattgagcctgaggcagttgtggctaaaggtgctgtgtggttcttagcacgtgcaaggatctgtactaaaacgtttctcaggattaatgatactgtggtatgcaggaagcagctagagttctaagatatttttgtataatctttaaattaaaaaaaaaaaaagtttaagacagttttgctcttgttgcccaggctggagtgcaatggcgtggtctcggctcactgcaacctccacctcctgagttcaagtgattctcctgcctcaacctcccaagtagctgggattataggcgcc

SEQ ID NO: 78433 - DNA, 1073 bp, Homo sapiens
gtgggcgtgggtttttctggtgctttgacagatgtctgccagtgtagttttcagtagtgttgttggatgtgagtttttctgcatccagtggaaagcctttatgggccatccctgagctgctggcagatggtccttctgaagcagaaatctggcagggttctcttggccttctaagatcctgtagatcttaggtgtagtacaccaccgctcctgtccacagcagccaggccctctgctccctcgagggcggcctactctgggccgtgctgaaccacacacataggccttttgttgggagagctagggttcttccttctgctgcctggtcacctggttgtatcagagctttcccgggaaatgtccccatggcccctggcctggtgtgtgctggacacctggaggccactcactgtatcctggctggtggggtcatttccccactgggtggtggcttctgccagggcagtgtctgcccgcctgccgcagtttcctgggtacctggtacaggggctgaatgcgtgtttgctgaagaatggtatgtattaaaatgtgaatcccaagagtgttgtgtcactgtgcacttcggcttgggagagcttggattggaggaacttgctcttcacacgtgacggaaatcattctgctttgcgtctaagaaggtttgtgttgattggatgatggagtgaagctaaccccggggtgcgctttcctcccgcaggccgagagtggtccgactggtccagcgagctgcgcatcccaggggatgagttaaagtggaagttcatcagcgatgggtctgtgaatggctggggctggcgcttcaccgtctatcccatcatgccagctgctggtaaggaaggggcttatggcgatcaaggttagatgactggctgtggattgtttctggagcaacagggacacgtgcacatgtccacgtagtgcctgacagcctgccttctgctgtgttggagtgagtgctctcacaggccctgctgaggcgtggaacagaacacagatctgtcccagccatccagctgtcaggctcacactcctcctcacctggtgtggaagga

SEQ ID NO: 78434 - DNA, 1170 bp, Homo sapiens
caatttctcaaactccaagccctccactctgccacgctgtccttgtggagctcctgagcaggacgggcagaggtggcatgcaggtgaccaggtgtggggctgttggccccctcattcatgtccttgcttcctctccaggtggcagatatgctgttggagctctgtgtcaccgagttggaggatgtggccacagactcgcagagcggccgcctctcttctcagcctgtggtggtggagagtagccacccttacaccgacgacacctccaccagtggcacagtgaagataccaggtacaggggctggccccagcggggagctgcagcctttcccaccttcagaatgatgtgattctgtaattgcttcagtagaaacaaccatctccattttataaaaagaagttacagaattgctttagaatcacttttctccccttttctaacaaactacttttgcacaataaatcatgatatagaaagtcacacaaagtaaatgtttagcttcatgataatcaggcagatgccctagtcatcatgacccaagtctagacctaacctgtggcaaattctggaagccctcagtgtatcccctgatgttcctctgagtgatgctgtcctgatattgatccatcactgacttgcatttctggacagcttctgttacccacgtgtatatcttttgtttttaacaactcaacaaaaattattaagaagaaaattgttgaggccccggcctttgatctggcgggcttcactgcagcctggatctgctgactggacacgtgtgctgctgttcagtgtgttcctcaggcccgtccttctgcaaggtgctgcccgattcggaggcccataagttccgccccttttgccagctccttagtggttgtgactcagcctcagcaggcacctcctgcctgcctgtctttgctttgtgacatcagcagtccctgaggcttattagcacccgaggctattggcccatgaggggctacaaatggtgctattctagtggaatcatttcttgcttatttgttagctggaatactttcctgtaaagaggcatttcccttcatcctgtagttagttgttcaaggtgctgtttgcctgagaaagacaagataaaagcttgattctttcttccatttaccagagaatgaattggtttcctatta

SEQ ID NO: 78435 - DNA, 1015 bp, Homo sapiens
ggggtcctcagaaaagaggcgttcccactctgaagtccacgtgaaaagtgtgtggaaagactgttattcttgaagatgctcctagtgcaagatattagcaagactttcctttagagaattggtaactggcgaggagggatccatgcctcattttagagacagagctagtgcctgacaagtgttacactctcttctgcttggagaagcatacgctatgactggcttatggatattcaattttaaattttatttatggaaacaaaattaccattactgtattttagtcagaatgaattttactttataattctataaggccaagaagcaacttacttgaaaaatgagcatactgtttttggtcatttttctttgcaaaataaaagggaaaaaattattacacttagttagagagaggaccttctgtgtgtcttgcaacaaagcagaattggattaatattaagaaaatactccttttataggtattagcaagcattttcatggttagattttcttcagaattgtagtacgctgatgccattttgaaagattgtgaaatggtttgtttttacctttaagaactcaattctttcaactaccgtggcatacgcgttaagcattttgaagtaaaaattacattaaagaaaatgtcctgaaatgttgaaaaattataagcttttttctcctcgtaaacaggtgtatgcttggggtgacaacgaccacggccagcagggcaatggcacgaccacggttaacaggaagcccacactcgtgcaaggcttagaaggccagaagatcacacgcgtggcttgtgggtcgtcccacagtgtggcgtggacaactgtggatgtggccacgccctctgtccacgagcccgtcctcttccagactgcaagagaccctttaggtgcttcctatttaggtaacacagatttgtatcttctctgagatttttctgtaggtttacagcaaccttatagatttatttaattgtgccaacacaattagaggttgtagt

SEQ ID NO: 78436 - DNA, 1051 bp, Homo sapiens
tacacctggggcctcggcgagtacggccggctgggacatggggataatacgacacagctaaagcccaaaatggtgattatacgcatttttgttgcttgcagaaagcttaccatctgaagatgtcaagagaaaataagcttcaagtctaggaaagttcataaagatgtgtgcatggttggctttatctgtgggaaaatccattgctttctccgtgcctgtgcgtgattctgtttttaaatttgtaattgagtaggtgaaagtccttctcggtcacagagtaatccaggttgcatgtgggagtagagacgcgcagaccctggctctgaccgatgaaggtgagtggctggcaggattctgtgcttctgggtgggtaggaatgatatgaaacgctggcctgaagtatatgtgtttcttaaacctaggtttggtattttcctggggtgatggtgactttggaaaactgggccggggcggaagtgaaggctgtaacattccccagaacattgagagactaaatggacagggggtgtgccagattgagtgtggagctcagttctccctggcgctcaccaagtctggagtggtgtggacatggtacgtaaacgtcctccctgtcacactgtgtgtgcttgtgcaggtgtgtgcagggaacctgggcctcgccccaggctcacccggcgtgattgtgacgtgtcctctttttacttatgcatgcatctttgtcctttaaaggatattgagttgggattagtgacaatagtacaagaagaaatttcccattgtaactgggtcattttgaaaatactagaaaaattttaggccacttacctttcctgtttgggtgagatttatgggaacggtttcttctgctgaagcctaaggataaaatggagcaaaatagccttctgaatcctttgatcctgaaaaagttaacatgtgtttcttgtaaaagcttattttattaatatgcaaaagagcaggtgcctggactggctgtggatggtgtgtcaggccttagtgccaatgtcatgacccgaggcagcttgagaaa

SEQ ID NO: 78437 - DNA, 1090 bp, Homo sapiens
ggggcctgaatgacaaggaccagctgggcgggctgaaaggctccaaggtacggcctgctccctgggacccagcagggtggggcactcggcagcagccacacctcgtgaagtttctataataactttactctctatatgttgtattgtttctttacacgaactaaaagacattatcaaattacccctcagaagcgtctctccttgaaaaatttcactttaggtataattgtcttattgcggtcttgtaaactagaaaatgaacttttgaaaagatttgacaagtgcataaatgaaaattatagactgtcaataggtgtatcttgccttccctacaataaacatttttgactatcatgaacaaaataatgtgtaaaaaggctgtagtggcccacagatgagcaaattgttgtctctgtcctccaggtgcttcgcgcctgagattcttcagggtgaagtagcttgcacagagagagaacgctttgcgagcacagagaaacaagcagaatgcacatgtgtgcgcatacacacttgccttattctctgcagggcttgttgtgggtggagagcgccatgatctcattcaccttgtcagtaaaccatgaagcttgcacgggaagccgtgccatagcctctgtgttcacaacgtccttcatcccctaggtacttggatgagaggttaatttgtattttgagttgcttaggagaaaaagaccatattttgaaaagaataggtgtaagaaatgatgcatttgaattggagttgaattcagcattccttgtattacttagtgtctcctggctgaggagccacaaagcaaattcctctaaattttattgcccagaggcactctctgtgttcacgtgagcttatgcttcctgttagtattctgtgagacatcacatcatacgttttctttattgcctgccctattgagaaactgagaaataaagttagaactcattcatttgaactctttcctttcaaggtgcaattagtttttatctgtattggagcagtcttgaattgcatttgtgtttcagtgtacctgagcttggtttgggaagtggacagtgggcagtgagctgtgag

SEQ ID NO: 78438 - DNA, 1050 bp, Homo sapiens
gaagcagcaattccttagcacctggcatcagaccatcagccaagaaaatctaacactgtcctgtgtactcttttcaagttgcaagaattggagtgttttggatgctgttgattaaacttctaacctgctgggtgtggtggctcccacctgtaatcccagcactttaggaggctgagcagggaggatcacttgagcccaggagttcaagaccagccttgacgatatagtgagaccccgtctctacaaaaaaaaatgcaaaaattagctgggcatgatggtgcaggcctatagtgccagctgttcgggaggctgaggtggaaggattgcttgagcctgggaggttgaagctacagtgaaccgggattatgccactgtattccagcctgagtgacagagcatgaccctgtctcaaaacaaacaaaaaataaataaactcctaacctgttgagggcaggtcaggagatagatgagcaaggtggaaggagcaagccctctgggaaggacaggagacgaggactttcagcttagctggccgatgatcaggttcctctggccggtgtcctgggcagagggtataaaggaagagagaagcattttacattgggacatgtgtctgtgttaaagtaactccatggtcatgtggccacatccgttttattctttctgtgggaaaataattggccaaacagctgtctagatttggggatagtgctgcaaggccagacccagcgtggctcctgggcaggtttcctcagtgtctctacagtgccatttgtagcagctgtgcgtctgtttccatggcttggaatgattcccacccatgttcacgttggtatttaagatgaaagagaaggcctggtgtatcatcgttttccaccaaaaataaaggctgaaattaagtgctagtattaaaaggtggcatggttgtatctagaaaatttgaccctccagaggacttactcctgtacatgcttgaggtttttttctattaaagcaaaattttaagagtttctgaaagtaaccataaaactttgagtgcttgaggttgct

SEQ ID NO: 78439 - DNA, 1068 bp, Homo sapiens
tcaggctttttttcctcctctcctgcatagaatgtatgaattcagatttgcttctggttagaagtttttctagtatagtctagcaaatttgtgttgcacattggagtgctgttgtgattacaccaacgcgtggaggcacctcgtgggcacacaggtcagactttaggacagggcctttctccatctcgactgtagtgttttctgtcactcacttggtgggtaaaaggaccaccctaggccaggagtatatagatacatggtttctgagtcttagagtgagacttttctctaacaatcaaagaatggcgtagaatattcttgttgctgccaggttgagggaaaattctctctcatgctacattttatattgaaaaaatctcatgtagattcaagcttcaacgatactattgtagtagctaaaatatagctgaattttgctaactgagaatgtggtttttttgtttttctaaagcactggattcgtttggagattttcccagatgttcttgttcatagattaaaaatgatcgtagatcctgctgacagtagctacatgccgtccctggttgtagtgtcaggtaattcagttagtttacctaaaaagaagtaccttctataataaagacgcctttgtttgattctttacccattttttcctaggtggaaattccctgaataaccttattgaactaaagacaatcaatattaacccttctgacaccacagtgccccttctgaatgactgcacagaggtaagtagctatgctagtgttccatttggatgatttacagatgacaagggaggtgacttggccatttctatactagcattgagcccagtttttccccgtttaaataattggttctttctgttttaaattttgacactttaaaagatacaacttattttgtacaactgaatttgctgcttatcagttcagcttgaaaaggaaacaaatttcattctcactctctttggtagcagaggtatacttggtaactgctcctagcaaaagttttcatcaggcattttaggttgctgattgcatctgaacacttcggttttca

SEQ ID NO: 78440 - DNA, 1119 bp, Homo sapiens
ggctttctctgtcccttgaaagaattaactatatctactgtggactgttccataaaaccaacctatggtattgccgggcacagaacaaagctgtgtttcactactgaagggatgattgggtttctatatcataattacttttagcttcagaacagacccttgttcaaacatctcatgatcttcggtagccattagaagatattttattaaaataccatgttttgacacatcagtttctgacctgagtaaattattcgtaggattaatttggaagtgccttggaaattttgtatacttgtagcttttgagattcattctgcctactatgctactgctattagtcttttttaaatgaagatttttatagagaaaataaaggatttcatcctctactttttaatattatagatttcacagacttatttctttttgagtaggtttatcatgttctcctgtttttttgtttgaatgtatttatttcttgcagtctactggtgctgttgtgacggagagccagacgtacaaaaaacgagctgatttcttgagtaatgatgattatgctgtatatgtgagagagaatattcaggtgagtaattgtcttaagctggagcctcgatccgtttttcattcagcaaatatttgagtatgtcctatatgccaaacatcagtggacagaggcccctgccctcagggagcctgccttctggtgctggaagacatacctgaccagtgagctcatggtacgctagaaggtgctgtgtaccctggaatgagaaagaacagactacagtaaaggggtaggagtgagggcacattacagggatgtggggctgcaatgagaaggtgacatgggtgcaaagcctacagggtgtgaagggtggctgagcaggatgggcacccagacagaggctgctgtggctgccccggtgtagccagaggacagaggggcagatgggctcaggggcagccggagagcacaagtggcctgtccacggtggacatggcgcagggatggctgttttctactagccccacttgtgacacttcctacatacctttccttgtttttcttatgtaattctcattgccatcaaactttaaaaatctaattatgtttta

SEQ ID NO: 78441 - DNA, 1027 bp, Homo sapiens
aatgattattctcagctataaaaggcttacgggtatgtgtggcatttcaggattaagcccatggttttgatgactttcagaacgtttcatttgttagtcgtattggccacactctgacagcttctgtgtcctctccagctccctgccgtggcctttaatgtgaacaacctgcccttcacagagcccatgctgtctgtctgggctcagttggtgaacctcgctggaagcaagttagaaaagcacaaaataaagaaatcgactaaacaggcctttgcaggtcagtacatggtgcttcttgatgaaatagctgccgtcttaaactcgtgtcgtttgtacagtgttcttttatgagtgaattcacggacgtactaaagtcctggggttcacgtgggctcaccatttgttgagttgcggttgggaatgtaaccctgtgttcgtggtaatgagtattttcgagtcagcttttgtcgccatgttcggagccacacttgaagaaccccatggctcacaccctcttctccgtgtcaccctttatcccggaagagaagtctgtgttcacctcttccctcctcctctccatcccagggccctgtggcccagtcaccctgttggaccatggctcacagcctgttctctgccggatccaggggcctctgtcccggaagcgcctggcttgcctgtgacattcaggatggctaagactgtgactgtagcctggcttggctttgccttccttcggttgtagaatgcggctctcctgagtttgtttccatgtttctagggagctcttctctctgctcattctttatgtcctggaagtctgtgtggcttcacccgtaactatggcgtattctgcccactcttcttgagttttctcccctcttgctcccacagacctacgattgctgcttcagcatttatgatgtaagcactttcaactctggatctcccattcacatgtctggttggaggtgcagtgcatgcaaatcaccacatgtccgaaattcagctggctttctctagtagc

SEQ ID NO: 78442 - DNA, 1579 bp, Homo sapiens
ttacctggctgtaaaataatgaatctcaaaattttcacttgattacttgcgttatgagaacagaaaataaagagaggccgggcgcagtggctcatgcctgtaatcccagcactttgggaggccgaggcaggtggataatgaggtcaggagtttgagaccagcctggccaacatagtgaaattctgtctctaccaaaaatccaaaaaaaaatgagccgggcttggtggtgggtgcctgtaatccctgctactcaggaagctgaagcaaggagaatcgtttgaacctgggaggtgggagtttgtagtgagccgagaccgtgccactgcactccagcccgggtgacagtgtgagactctgtctcaaaaaaataaaaaataaaaaaataacaatctgtagtttcctcatcagattttttttaatgcttgtcgttataaattttcttttatcagatcttagctgtgcatttgttgcaagcagtccttccatcatgggacaagaccgaaagggcgagggacatgaaatgcctcgtggagaagctgtttgacttcttgggaagcttgctcactacctgctcctctgacgtgccattactcagaggtgggtggccgtctaccttccctgtgccctggtgaagagcggcgcagtgccgtcactcaggtgggtggccgtttcccttccctgtgccctggtgaagagcggcgcagtgccgtcactcagaggtgggtggccgtctcccttccctgtgccctggtgaagagcggtgtactgccgtcactcagaggtgcgtggccgtctcccttccctgtgccctggtgaagagcggcgcagtgccgtcactcagaggtgcatggccgtctcccttccctgtgccctggtgaagagcggcgcagtgccgtcacttagaggtgggtagccgtctcctttccctgtgccctggtgaagagcggtgcagcagcttctcccctggtttcctcctcagagtccacgctgaggcggcgcagggtgcgcccgcaggcctcgctgactgccacccacagcagcacactggcggaggaggtggtggcactgctgcgcacgctgcactccctgactcagtggaatgggctcatcaacaagtacatcaactcccagctccgctccatcacccacagctttgtgggaaggccttccgaaggggtgggtttgtgttctcagaattaatttagttcaacggtgaacctgtagggattgggcagctccgtgagtgtctctgtcgagctcgctgtttggtctgcactaggcccagttagaggactacttccccgactccgagaaccctgaagtggggggcctcatggcagtcctggctgtgattggaggcatcgatggtcgcctgcgcctgggcggtcaagttatgcacgatgagtttggagaaggcactgtgactcgcatcaccccaaagggcaaaatcaccgtgcagttctctgacatgcggacgtgtcgcgtttgcccattgaatcagctgaaaccagtaggtgaacttgtgcttagttactgcatgataagggaaattgactttacactagaaccgagcaccagc

SEQ ID NO: 78443 - DNA, 1847 bp, Homo sapiens
tgggtatgtgggcgtcctccagtgtgtgtgagagcatgcgtgtattagtggtgtgctggagcgtccgcacatattgatgagagtgagtgtgttagcggtcgatgggcaagtggctgagcgtttgtgttgcaagtgtgatggtgtgttggtagcatgtggttgtgtgggtgtgtgtccatgagagcatgtaagtgggcaggtgactacattcaggtgaagtgggagtgaaagcgtcagtgcattgagccagtgtgtgtgtgagggtgagcatgagggaggcatgagtgagtgtgaggggattactgggtgtgcgaatgagacacccagtgtaagtgtaagtcagtgtaagtcagtgagggttggtgagtgtgaggaagtatgagtgggtggcagcacaagtgtgtaagtgtgcgattgagtgcgagcatttgtgtaaatgtgtatgagtgccttgtgtcagtgtgagcacgagtgatgttattgtgaatgcgtgtgagtgaatgtgagcattttgcttgtgtcagtgaatgggaggttataacagtataggtgtgagtgcaaagtgagaaagtgtgtgggtaaaggtgtgagtgggtgagtaatcggtcgttactagtgttgaggagtgtgagtgcatatgtgagtttttgtatgcattgggaggggtaagtgtatgtgagagtgcatgggagtgtgtgtcagcttgcatctgtttgtgcatacgtgtgactgggattgtgtgtgtgttagtgattgcgacagtggtgtgagtgcacctgaaagtgtgagggtgggtgtatgagtgcccatgagtgtgtctgaataacttagtatcagtgtgagtgtgaggatgcatatgagggtgtgagagtgagtgtgtgtgtgtgagcgcatgtgagtgtgctgaaggaaggcaggtgtcctcataagcttggatagctgagggcagggtgggggaggtgggagggagagcaggtcctgtggggctgtgggcggggtccctcagggggcccagcctccaagcctcagcctccattcagggagtagtggagtcctggagccaggcggagcagaggtgggcccactggtgctagaatccagtggtgtaaacctagtgaaaaactcattttgttaatgcagatgtattaaacttggattggaaactgtctctactaaaaatacaaaaaaaaaaaatatttaagtggtgcagattaaatataagcaagattgtggagatatttaaaacacgaaattaaaaatataatagatgcactgttgcaaagtactgttatttgaattatagatggttttcctattgcctagaaacaatgcatagctaaaattccctaactacttttactacacatacttagaaggttttaaaaatgcccgtagtcccagctatttggcagggcaaggcaggagaatcacttgaacccaggagttttagaccagcctgggaaacacagtgagagcccttctctaaaaaaaaaaagaaaaattgagaaatgtttcttgaactaacttaaaagctgccttccacttctcactttgaattagtttgaattaatttacaaactgcaatatatttgtaaaggagcttattttagaaaaataaaataagttgataaaaaaataaggatatatctttagggatttgtctttagggacttgttaccaagcatgtctattttccctcctgcagcttctccaaacaggctggtgtacagggagcaacaccggagctggtgcacgctggggtttgtgcggagcatcgctctcacgccgcaggtatgcggcgccctcagctccccgcagtggatcacgctgctcatgaaggtcgtgga

SEQ ID NO: 78444 - DNA, 1014 bp, Homo sapiens
attattttttttagaagccgaacaaactgaaaggaacattcaccccactgcaatgatgtttaccagcactattaacttactgcagactctttgtctgtctgctggagttcatgctgagatcatgcagagcgaagccaccaagactttatgcggactgctgcgaatgttagtggaaagcggaacgacggacaagacatgtatggaatgagagatcgagggcccagggagtcagcgctgggggccgcacgcttgtgtctgggtgttcatgtgggtgggtgtggatgtgtgtggattcctttcctgtggctgctgtaacaaagtatacaaacttgggggcttacacagtagaaattctcacggttctggcggctggaaggctgagatcaagggtggttccttctggggctgtgagggggaagctgcttgagggctctgccccagcttctggagtttactggtctctttagcgttcctcggcttgtagaggtgtcacccctatctctgccgtcatcttcacatggcattctccctgtgtgtgagtcgcctccaaatctccccttttcataaggacatcattcaacctcatcaaactgattacagctgcagcgaccctatttccaaacaaggtcacctgccgaggtacgataggggttagggcttcaacatacgaattttgcaattctgaattcaacccataacactggcctcaaacaacaaatttgttctctcagagttctggagaccagaagtcccaaatccaggtgcgggcagggccatgcttcttccacaggctctaggggaaggtccttccttactttgtccagcttctgggagctccaggcttccttggtgttgggacgcattgtgccagtctctgcctgcgtcttcacatggcccctgcccctgtgttctgcatgtccttttctgtctctgaaaggactctttgagtttctttgactctaatccaacatgatgtcacctaaattcttaccttaatgacgtctacagagacct

SEQ ID NO: 78445 - DNA, 1011 bp, Homo sapiens
ctttgtttttctattaataaaaaatatgatgaatatctttctaacttagttattttgcttttttggggggagtaattcctagaagtagagagagtagctttactgagcattttaatatcttttatatcttcctaggatatttatgtatttcatccttccgtttatcttctttttatcctatatcagtaaaatattcataatattatattgataaaacatatagtatggattgttcaaaattacgatcttcattagtactttgtgaatgttttgtgtgtattaaggggacactgtagctacttgttggctcagctattgtttttgacgctccatcaggccccagttgtgacaacgttgaggaagatatgaatgcttctgctcaaggtgcttctgccacagttttggaagaaacaaggaaggaaacggctcctgtgcagctccctgtttcaggaccagaactggctgccatgatgaagattggaacaagggtcatgagaggtgtggactggaaatggggcgatcaggtactcagagatttgatgtgaacacattagccacacattagttatcttctgcacagttctgtacgatattggtgggtggaaattggaataatccaggatgtgtcagttgattgatgacacaggtgttggttcccgagcagccgaagggagtgaacacaagtagggaatcataagtagggcatctgagcagaatcaagtctggaaagagaggcagctcttttcaggaaactcactggcatgaggctcagtttgatgggtcactggaacaagagtgtgagagtgagcaagagagtaaatctcattctgaaagttggtgtagtgaaggctctgaggcaggaagcccagatgctgcccctgtgggctgatggccatgtgctgcgaagtgccctgaagccagtagttagggatctacttcatgggcctgtggccacgtttccatcttccctcattgcaggtctcttctaaatctctgccaggtgcccccagg

SEQ ID NO: 78446 - DNA, 1042 bp, Homo sapiens
acagagctgcccactctgtggaaacccctggaaaatagttagatgtttaaagtaattgcccgtgctttctgcattacgtttattcttgtatccatgcacaagaaatgtaggtgggtgtcaatgcttattagtcagatgtttagagtaatcgcccgtgctttctgcgttacgtttattcttgcatccatgcagaagaaatgtcagtgggtttcaaaatagtcagatgtttagagtaatcgcccgtgctttctgcgttacgtttattcttgtatccatcacaagaaatgtcagtaggtgccaatgctcattaggtatccagccggttcccctgcaaaccatcaccaatgagaacccgtcaggaccgagcctggggaccatcccgcaagcccgcttcctcctggtgatgctcagcatgctcaccctgcagcacggcgcaaacaacctcgaccttctgctcaattccggcatgctggccctcacgcagacggcactgcgcctgattggtaggtctgcacccgcttgagcgcctttgggaaaatgtcaagattttgctttgatttcttttcttttcttttctttttttttttttttaaagctttttgtaaattatggtaagacacaaataggaagtgtaccattttaacgtcacaattcagcggtatcaaatacatttacgattttctagagtcatcaccactgtctagttgtagaactttttcatcactataaatgcacaccatttagccatcagtcctcactcctctgccctccagcccctggtagtcacaaatctgctttccctgtctatggatttgcatatcctggatatttcatataaatggaatcataccatttgtggcctttgtgtctgggttatttcatttggtatatatcagtactttatttttatggctgaaaaagatttcattgtatgaatatataacattttgttcatttatctgttgatggacatttgggttggttttgccttttgacttttgtgaatagtgctgctaggaacatttatatacaaatacttgtt

SEQ ID NO: 78447 - DNA, 1087 bp, Homo sapiens
tgcagtattttgattattaattgaacacattttctaattttcatagtcatttttttcttagaattttgggttacttataagtgtattttataattttcaaatatgtggatgaattttttatttattttgaatgaatttttgaaaacctatttctaatttaactgcattgtagtcagcacacatgctctataagtttatttctttgaaatctgttgagatttgctctgtggcctggcatggcccaatttggtattcatgctgcctagatttttttttaaagcattctatatttaacagaatttgtatgtgtggtattagtttcagagctaggtatgtatttctcccattgtgattgtgggtttgtttatttctgcttgtagttctttcacacagtttgttcttttcattttacctgttgattgatcaatggactgattctggtttctgtatatacagagtcattttttacaggtcagaactgtagaaataatgaggaagtgacacttatacgcaaagctgatttggagaaccataataaagatggaggcttctggactgtgattgacgggaaggtgtatgatataaaggacttccagacacagtcgttaacaggaaatagtattcttggtaagattacacttgttatttcctggttaaaagttacaacctatatcattttaagcagagtatttggcttataaatgatttctttagttttgtgccagcccccacatattttaatgtatctgtggcttcgatgtctgtcttatcaacaaattcagcacatttgaagaatttcctttgattatgcattttttgttttaatacttggaactcatttcaagttctgagttggcccaggcaaccctgggagacagtagaaggtcattatactctggtaaccctcacttttgagttaagcgcctaacttatttcctattcactgtttctcctatatctcttcaggcaagctgaattgaactcatgttgctttttccctttttgtttcagctcagtttgcaggggaagacccagtggtagctttggaagctgctttgcagtttgaagacacccgggaatccatgca

SEQ ID NO: 78448 - DNA, 1048 bp, Homo sapiens
tctgggcaacatggtgagacccccgtctgttaaaaaaaaaaatctttaaattaaattatgactttagtgttcatacacccaaaatttctaggtactctgtagtgcagggtataaaacttgacataaaaaccctgtccctccagtcacatgatacagaaagagcgcaaggacaagggttaacaggcttctgtttgagaaaattattatgggtaaaagatgtgtagatgagaatagcatcatggagcagttagtttgtttacaaagaaaaattttagtagtgaaaatgaaaatttctcaatccttcttcaaggtccagagctaatgggtgttggttccttgctgaagaagtacacagccctcctgtgcacgcacattggagatatactgcctgtggccgccagcattgcttctaccagctggcggcacttcgcggaggtggcttacattgtggaaggggactttactggtaccttttgtttcctgcttgtgtacatgtttattttaggagatagatgaaagctaaagtgtcttctttgctgatcagcatgcctgcatttactctctaaattttctgggcctcctgccctttcacctttgttttttttttttagttactgacagttctgttgttaagccagctggtatgggactcatatcactttaaatgtaattggtaatttagatttatacttccattattgacatttcaataatgaggtcaaaggtaattgtctaattttattttgacagcataataaaaattaggtacctatttaaggatcttaaaaattctgatattacctggtatgttttaactttttgaggttagagcattattttttagtgttttttccctgatgataaacatatcaataaacatttaattttctgaatagaagactcttagttcatagttctgtgattgaaatacagtgttttggaaaatatttttgtaatttaaagggttctgtttaatagctatgcctgtctcaatataaaatataagataattctttagaaatatgctaaaggacaaacatttcttatt

SEQ ID NO: 78449 - DNA, 1041 bp, Homo sapiens
atgacactgtgtttgttctttctagagggtcagatatttctatattagcctcatcagtattttaaatttcgttgtcttaatgtttacattccttaaacattgggaatgtggaagtattcctttggaagcaagatcttctgcagtttggaccactgcgcgcagctccataggcgcacattagtgaagcacgagggcatcattatctcttttgagccttccgtgcccttctgctccgttttggctgaggttgcgcttgttgcagatacattggacacacttggggagggaagccagctgcaggtcatcatgtatgatctgtgtttgtgatattaatttgtcatgatttaccccatcccattttctttttagtagaaatatcttgtttaattttgtaatcctcttctttcctgtatagaaacattgcttctcagactgtagccagattgaaagatgttgcccgtcggatttcatcatgtctggactttgagcaacacagtcgtgaaagatctgcttcattggatttgttactgcgttttcaacgtttgcttattagtaaactttatccaggagaaagtattggtcagacctcagatatttctagtaagttgcttaaaatgtgaaagtgtcttgtatgtgatcggggctcgttactttaggcttttcgacgtgtccatcctatatgcccagatgtgtagttgttatactactaaatgcaccaattttggggcttcattttgcatccacttttttgagttggacctttctataatagcctcgttaatatttttaattttgttgccttaatatttaaattctttagacatcagtaatagcatcctgtatgttcagtttagtcttacagaagatttatcagatttgttccatgtgctatggaatgctggagactggcatgatgtaggaagtaaacagtgacagcctattcatatgtcacatgggggagccagctgggtggaatgggaagaactgttggagaaagcctgggtttcagttacagctcggcttaatagtttagacattaga

SEQ ID NO: 78450 - DNA, 1050 bp, Homo sapiens
aacaagtatgtgagaattccagcttcttcttgtccttacaaagcagctggatgttgcatgtgtggggcacatcacattgggttttgtgagagccagtagcagggttaaggattttagggacttcacagaaggatgctggagagcatcagcagaggcagcctggaccttgattctgtaaaaagaagacactgtttgaaactgcacaactgagttagggtttccaacaaggcagatgggggcctgtgggtaggtgtgtgcattagccacagaggctgggatagcttggcactggggttagggctcagccagcctgtgtgtcttcacacctggtaatgagatcacttgtaaacaatttctttttatgaattacaggatattgaagccaaaaaagaagcacagaaggaaaaagaaattgatgaacaggaagcgaatgcctcaacatttcatagaagcaggactccactggataaagaccttattaatacggggatctgtgagtcttctggcaaacagtgtttgcctctggttcagctcatacaacagcttcttaggtaaatcgtagtagctgtattgtattatatgttatttatttacttttttttgtgtgtgtgacagagttcgctcttgttgcccaggccggagtgctatggcgccatcttggctcactgcaagctccgcctcccaggttcaagtgattctcttgcctcagcctctcacacagctgggattacaggtgtgtgccaccacacccgactaatcttgtagttttagtagagacggggtttcttcatggtggtcaggcttgtcttgaactcctgacctcaggtgatccgcccgccttggcctcccaaagtgttgggattacaggcatcacccaccactcccggtctatttatgtacttattatttttttttaatatttattttttaagacggaatctcgctctattgcccaggctggagtgcagtgtcatgatcttggctcactgcaacctctgcctcctgggttctagcaattctcctgcctcagcctcccaagtagctgggact

SEQ ID NO: 78451 - DNA, 1021 bp, Homo sapiens
ctcactctgtcacccagactggagtgcattggtgcaatctcagctctctgcaacctgtgcctcctgggttcacgcaattctcctgcgtcagcctcctgagtagctgggattataggtgtgcactaccatgcctggctaatttttgtattttttttttttctttttagtggagatggggtttcaccatgttggccagcctggtctccaactcctgacctcaagtgatccatcctccttggcatcccaaagtgctgggattacaggtgtgagccactgtgcctggccctattctgtttctgtattgcaaaatttgacttgctaacaggttgttgaggatttttctgttgatgctcattagagatgttggtttgtggttttctttctttgtgttatactatcttgtctgactttctatcaggggaaagctgaccttatacaaaatattggcatgtgttccgtcctttttcattttctataagggattgtgtagaattagtgttatttcttctttaaatgtttttgaatcccatctgagtctggagattgctttctaaaagattttacgccagacacagtggctcacgcctgtaatcccagcacgttgggaggccgagatgggtggatcacctgaggtcaggagtttgagaccagcctggctaacatggtgaaacctgtttctactaaaaatacaaaaatttcgtcgagcttggtgatgtgcgcctgtaatcccagctactcaggaggctaaggcaggagaatcgcttgaatctgggaggcagaaattgcagtgagccgggatggcgccattgcactccagcttgggcaacaagagcgaaactccgtctcaaaaaaacaaaaacaaacaaaaaaaagattttgcaacttcaatttctttaacagatatagaagtattcaggtgacctgtttgtttctaggaggattttcctgatttttggccctcagatgtgctttacttcatctacgttgtctgatttttacgtgtcaagttttccttagtatt

SEQ ID NO: 78452 - DNA, 1059 bp, Homo sapiens
gacttggatgtggtcaaagtccgctgtggaagtcagttttccattgctttgacgaaagatggccaagtttattcatggggaaaaggtgacaaccagagacttggacatggaacagaggaacatgttcgttatccaaaactcttagaaggcttgcaaggtgagtgcaaatgtaaacttttaaaacccttcaggacagtttctttagtaatgttttaaagttagcaggttttatgttcttaacctgacattccatgagttagcaggttttatgttcttaacctgacattccatgaatggactgtcattagaaacttttactgcctgcttggtataggtattgatactaattggaaagtgggtgtctattacaaaatgactgaaatgtaatttaaacctgttgagttgactttctgtggcaggcacccattaatcactcagcaggctggactcagtaagggttccctctgtgtggtgaggtcacctgtacttgtactgcaggcacactgagaccatgagtgtgcattgtgctgtggagccacattgggaggtgggattgggtccacttgggacaccctcatgtgaactcatccttggtgggtgattcctgcttgctcagttgcaaaggtgtccagcatgcattgtagttggaggcaagagatggaagccaaggtatgtagataagagtgccggcgccttcagtgtgggctgccggtgcaggcagagaggatgggagtctctgcaagaagaccctgagattcttctgtggtgttcttactagggatgttatgctgcaggaagttggggtgggggccatcaaaactatgatgttggagggatctttctaaggtaaaacaggacttttccgtaccacctggcctagtggttgggagatagtcttcatcctaatcgagaactgttgaagggcagacaaattgacaagaaagtaggaagaagggaaaaggcagtgtgagaggtacatcagatggactctttagggttctcttctctcaggggtgggcagcctttttcttaaaggaccagattgtatttgaagtaggt

SEQ ID NO: 78453 - DNA, 1064 bp, Homo sapiens
tcattccttctgttgcagatggaccatggttttgggacattgtgaataaagctgcagtggactttacaagtctctttttttttgagatggagttttgttcttgttacccaaggtggagtgcaatggggcgatctcacctcactgcaacctcctcctcccaggttcaagcgattctcctgcctcagcctcccaagtagctgggattacagacaccctccactatgcccacctaattttgtatttttagtagagacgggatttcaccatgttagccaggctggtctcgaactcgtgacctcaggtgatctgcccacctcggcctcccaaagtggtgggattacaggtgtgagccaccgcgcctagcctattgtacaattctttaacaaacactatttttatatttctactgggtaccatgtttggcatcgggttccaactgaacaaaaagtcatggaggtgttaggtgttggaattctctcttccttctttcacaaggtacctggaaggtgaaactggcctgatgctatgctggtctaaatttggatagtgaatttcctttgttaacattaataagaaataacaccaagaagaagggcattcatgtttgttccctttctccccaaggcctttggaggagcctaaggtgatctccgccttctctggaaagcaggccgggaagcacgtggtgcacatcgcttgcgggagcacttacagtgcggccatcactgccgagggggagctgtacacctggggccgcgggaactacggccggctgggccatggtacgtctgctctgcatgagtgggagcatgcagcaggaggtggcctcttacaggacttagtaaccgccgtcctatctgtttgaaggctccagtgaggacgaggccattccgatgctggtagccgggcttaaaggactgaaggtcatcgatgtggcgtgtgggagtggggatgctcaaaccctggctgtcactgagaacggtacgtagagctctcgccaccctggacaggcccacgaggacacgcatggcagcttccctggaggaagtgagatgagtacagtg

SEQ ID NO: 78454 - DNA, 1011 bp, Homo sapiens
tgcagtggcgtgatctcggctcactgcaagctgggcctcctgggttcacaccattgtcctgcctcagcctcccgagtagctgggactacaggcgcccaccaccaagcccagctaatatatttgtatttttagtaaagatggggtttcaccatgttacccaggatggtctcgatctctcgaccttgtgatccgcctgcgcctgcctggccctcccaaagtgctgggattacaggcgtgagccaccatgcccagcctattatttggcagtctttaaactaatgataatagggctcttctgcctttagaagaattagaactatgatttaatttgcaaatgaaagtaggtgttctccagagtgggcaacgtttagattaaaataaaggttttggttttagatttcaaggccagcttgagatgctgtgctgggttcccacagaggtggttctgcctttctccaggggtcctaggcctgtagggtggtttggtcatgttagtaatctgtgtggatccatcttacctgtggtatcataaatgtatacatgcgcagtcaatgttgtgtatgcgtgtacagcaaatttagacatttacacagtcagtttatatgctgcataaatatatagatgtatagtataactgtatcattgacattgtcatttgatgggtcaaatgagtcaataccaaaatataaagcgtgggtaaaggttaattgtgttaactttaatttttcccaccatttctgaatttttgtttacttttcctttctagcttttgtctggccctctgagccccaatgagagtttcctgaggtacctcacccttccacaagacaacgagcttgccattgatctgcgacaaacggcggttgttgtcatggcccatttagaccgtctggctacgccctgtatgcctccgctgtgtagctctccgacatctcataaggtgtgtgtgcaagaaccgtgttctccatgtgttttgtagctagtaccacttgtaggttctcatcctgggcc

SEQ ID NO: 78455 - DNA, 1052 bp, Homo sapiens
gactggttgtatgttccgtgtgtgtcgtctgcagttcccggcctgcgggcaaaggtgtggaggggctcgccagagtgggatcccgagcggcgctgtcttttgcctttgccttcctgcgcagggcctggcgatcaggtacggtccctggtgtggcgcgttgttctgcttccctaatacatcaacagactgggtttcgaactcggttcagccaccatgtgccctttggctgatcccatgtgctctctgtgcctcagtttccttgcttgtgagatgagaggctgcagaggctgtttggcttttcacatctgtgctttaaagaaaaaaaagagagtgtatgcacccccacccccacgtcaaccactaccatggaacacctgagtacagacttaattctagaaggacaagaagttagtgtattgctcatgtgacagccgtgaaacacagaattgactggagcagctgcgctagattttggcctgttgagtgagggattggaaaggtgacagtggcgtcatctctcgctgaggggtgggaagcccagcgggagagtgaggggagtgggggggctcctctgacgcgtgtgtgcgcccaggcgaggatgcggacctctgcagtgagctgttgcaggagtccctggacgccctgcgagcacttcccgaggcctcgctctttgacgagagcaccgtgtcctctgtgtggctggaggtggtggagagagcgaccaggttcctcaggtccgtcgtgacggggtgagttctttcctttcttgccttctgcacgcagacagctggcctgcttgaggctggttcttaccacccttgctttagagctaagaagcctagtaggttggtttttcacctgttttcagcgggctgtcagtgctgtgattccgggtctgggttctcagcttttcaggcgatttgatttatgatactctgactagacccaggaagctgtgatactaaatgagacggatgagagagaatgcttagagatttggccatcagtcattcgtagaggtttgagtgcttacactgtgtgtctctctgtga

SEQ ID NO: 78456 - DNA, 2910 bp, Homo sapiens
acccgccgcggcgtgatcaagagcgctccgagccaagcagtctcccgtgggagtgcgggagtgcgtgcgtgtggcggaaatcccgccttccggcgcccgctgttggccttggccgcagccagggcgctccaagtaggaagataagcgggattgctggaagcgggagagtcgggaggagcggcgaagggctcctcttccccattggctgcgcccacggagcagcctcgttgcgattggccgtacgcggggggcggcagtcccgcgtcggcccgcccctcgggccgcgagaggcgccgggatcgcgggcgccggctgagccagcggctcttgggaggctgcgtccgcgcgccggcgaggcgaggcggccgggccctgcgcgtcaggtcctggcctggggcacctgggcggccggtggcgggggcggtacgggcgcggggctggcgggcggccgagcccgggaggcgggcgtgggcgcggcggccgcaccggggcctgcgcggaccacccgcggggcagcctcgggcctctctccatctcttaagtggtggtggctgtgggtttttctgcaggcgatccttttgagtaattttttgtttcacgcacgcgccctgctgtggggtaaagcggcagattcatgctgctgtcatttgtcgttaaaacgatgggctccctgttatgtgtgtgtacttcttggatttgagggcagggggatgacattgtgacttggcttcctgtgaccgtccattctcaaggtctcgtcagcgtggtgcagaaactcggcacaccctgcttaccttggaaggaggctttcccttccccacctccctctccctccatctcttccctctttccctctctccccttctctcccctccaccagctcttctctcccccctttctgttctctctctcttttttcttttctggctttcgggagtgtctttgtaaactattaaaaagcgttaggtcttcagcgtatgtgtttacttgcaggcctgagacctgggaggaagctggagaaaagatgccctctgaatctttctgtttggctgcccaggctcgcctcgactccaaatggttgaaaacagatatacaggtggggtttgacatgtctttttcttggtgtgtttctgcttccatgtttaaatttctcgtgtaaggcttttttttagggtatgtaaggggaagtcagttgtatcttgctgaattagaggagcaggtttatttcctgtaacttaaaatgtaacagtctttatggctgtttttgtagatcgtgcgcggctgccttttaattagtttcttgcaagtgcacgaaacttgagatctattaataggcaaaatttttttcctatttattattactggttaagaaatctgccacactcctaaccatatcatggtgactgttgtttgttactgatcgtttttgagctgttgagttaactgtggaggggaaaattggagaagtaagttgcagtaattatggcctatagaaactcactcattttatgaggtcttgtgtttgtgtttctggagagacaagagttagttcagttgagctgtttgttttgtctttgtaactccttattaagaggagtgctcagattttcacatcaagaatgtgaggaaacaatgttggccttagatcctaattttttgatttaatgagataactgcaagcttgtcaggacattattaaataaataataactaatatttcgatagacaattatttacacccaatctacttttatttggaaatggcttggaaaaactacttttggaactccttatcagcagcaaaaagaagtgtttgaaatattttgtgtgtgtctgtattttcctactccctaaggttaaccattttaagtattaagtaatgtgccttgactgttcatcaaaagtcgtgtaggctgttaagcagtagttgatcatggatacttacactgaagtgttattgccccttcctaattttttttttctttttaaacaggtattgagtgttggtagatatgagagtccagtgtttagagctgtgttgcgtggccgggcgcagtggctcacgcctgtaatcccggcagtttgggaggccgaggcgggtggatgccctgaggtcaggagttggagaccagcctgaccaacatggtgaaaccccgtctctactaaaaatacaaaattagccaggcgtggtggtgtatgcctgtaatcccagccactcgggaggctgaggcaggagaatcgcttgaacccgggaggtggaggttgcaatgggtcaagatcatgccattgcactccagcctggacaatgagagcaaaactgtttcaaaaaaaaaaaagctgttgtggatgatgggattgttattcatagtgtaatgttacataagacagagtacagagaattgggtcaagaattggtgtagttactctttgggtttgtttctctttaaacatttcctttgatttagctataatgatctgttttgtcattttaagtggatgggagaggtgagagatgagtactttcatatttctgaaatcctgagattcaggcaaagttttaataattgttttatattagtgtttatgtattttgagaaactttttggagtaaaggactttacgtaataaagtgtttttcttaataattgtaatttaataactgctaaacatgagttctagtgtcttgatctaaaaccagtttaatgctgaattgagttcctatgatgggttgggcagataaacatacagtgaagcaccatttatatcttagagggcctgttgttttgatttattaagtttaatacacagtacttggtccttgttacacatttccaatatgattagaaagtctttttttttttttttttttttttgagacgcagtcttgctctgtcgcccaggctggcgtgc

SEQ ID NO: 78457 - DNA, 1005 bp, Homo sapiens
ggcacagccccagagagctcccctttatccacagccccaggccctcccaccttctgcagggggttccacagccttcttcatactctgaacgcaggctgtcttagtatgtcatgctggttatagtagtgacagtataattatgtattatatctcttatgtaatagtaatggtagtgatttgcatgtgtggagcacctgtagggtgcaggcccgctgaggacctcatgcacgctgttgtatctcattatgtcaatgagaaaactgcctttgggaatggtagtgaactttgccagtgcagaacagtaatcctagttttgaatccagatttttctaacattttatttctagtataaagagtatttattttgttttacagtcattaaaaaaaaaaatacagtcacatggttcaaaaatcaaacctaggcagagacacactgtcgcttcccctgcccaccccttccacccattttcccacctgctccctctgactttccagtctcctctgtaacctccttgttctctggcatgagtacgttcgtggtagcatgcttcattacttgtgttgcttgttttttgttttttttttttaactaaccatatatactggagtaccttatcagagtgtccctctttgtttttataaatcagcttagtcttcagtgtgtggatgtgtcttttatctatctttctttagtgagtctcttattggtggacacttgggcttattgccacaatgttgctatacaaatagtgctgagggtcgggtgtagtggctcacgcctgtaatcccagcactttgggaggtcgaggtgggtggatcacctgaggttgggagtttgagatcagcctggccaacttggagaaaccccgtctctactaaaaaatacaaaaattagcggggcgtggtgacggatgcctgtaatcccagctacttgggaggctgaggcaggagaatcgcttgaacctgggaggcagaggttgcagtgagccgagatcgcgccactgc

SEQ ID NO: 78458 - DNA, 1189 bp, Homo sapiens
ggtgctatgtctgttgttttgtgtttcaaggatcaaagttaagagaaaaaaaatatgtggttgaacttcctgcattgagtgactgaaaatattttcatctctagttttctggaaacggaaacactccaacatttgaagatggttttgatggcgaaaccactggaatgaaatgcacatcattgggcaattctgtgtgttgagtttcatccttctttgtttgtcattttaaataatttcccgacaaatctggaaggcacgtcttgtcttaactttgcaacaaggaggctggggacaggtagctgagctgtgggttgcctaagaacactctgctgtgacggggcagtgctggcctttgagcctgagctggagagagtgtgaggcccatgttttctccctgtctcctgctggggcccattttgtatcagatttgtttttcacggggtgggcatgactaggactcgtgaccactggtgggcaagtacagaggctaattttcaacacgtgccgagagactgatggctggcatcagagagtcatggaaatgccacagatgacatgggcccttcacagggatggggagagggtctgggagcttgccctccaggaaggtggctgacatggttggtgggacatgaaggtgttttccgttttgcacttgaagccaacatggattcttagcacttgttgtccctagaatcaactgcgcagagagatgcttggttctgaaactctcaggcaaggacagttctgaggaaactctcattagtaaatagtgagtcggagaacactattgacatttggcattttcagttgagatatatgtgtacagtcatgcgtcacatgacagtgttttggggaatgatagcatatatgacagaggtcccataagattattatggagctgaaaaattcctattgcttagtgacattgtcgtaaagttgtagtgcagttactttattttttaaaaaaatttaatgtagcctaagtgtacaatatttataaagtctacgctagtgtacagatggactcacccagagaaatttccagtcttgcaagctccattcatggttagtgtcctagatggggtactgtgttatatataatatatatatatgtttttttgagacggagtctcgccctgtcacccaggctggagtgcagtggctcaatctcagctcacggcaagct

SEQ ID NO: 78459 - DNA, 1048 bp, Homo sapiens
agaacacatccctgccattaagcgatgcataactgtgtgtatatgtgtgtgtgtgtgtgtgtatgtgtacgtatatatgtgtgtatgtatgtgtatatatatataaaattttttttatttggttggttttacattcctggaattgactctccagcagggcagctgtaaatatgaattcctccgaactgttgtatgcattgttaatttagtaaagtacagtttatggtttcccaccgttggtttaattgtcaactgtcttggaaaaatccattgttgcaaaaacaggaaaaccactaattgagtgaatgcgtgcatttagggatgatggatttctcaggtctctctggaagcaagtgtgtgccttgtgcaaataaaacatagtttctgtttctcagtcttttgctgtaataagtgagccatgtgctctagcatctgtctggattatccggagctggtggcagctgtcacgggtgtggtgcagtggggccaggcatgtgttaggaactggaagctctgggaagccaggctttgcctccacgtgtgagccagctgtagagcgtcactgctcagagtttgtcttgactcatcctgagaagggcacgtggagatctgtgtcccattcctcaccagccactgagttactatggatggaggagatgagatgtgtgcaactgttctgctacagtaaagcactcagtcagtgcagtcaccaggtttagggtgtgtgtgtgttttaccaacttgcctgctgggtttcagacacctggcactacctccagcctcttactgattctggctagtacttgtgaaagccgtcagctgggtgatgaatggaccgattttggccgcaggtccctgcacttcccatctggcctgactgctagattctgagcccctgaggcaggactgagtgggtcacattaatggctgattgtctcgggaatggcattgggtgaagtcgaggttttcctgacccacagctcctagtagaagtgcctttcttttgtgcatgtattgtgaagattctgcctgtgaactttctctaccc

SEQ ID NO: 78460 - DNA, 1113 bp, Homo sapiens
tttattgtttttgtaaatgctgactttcattatttttcaacatgttgctgtttgtaggtacaaagaaagctatcgatttttatatattaaatttgaaaccattgccttagtgaattctcttattttttaaaaatagatttttagttgttttcttgagtttttcctggcatgcaatcataccatctgcaaacaagaatgatttttgctgcttcctttcttgttttctattacttcttcttgcttaatcagattgggtagaacagaaggaacaattttacataatagtagaatatggcttcctaaaaataacacctttttgaaagatctatgcttttaattttgtcataaaaacttcaagcatatgaaaaaatagcttcagtatttacccattcatggctagtggtatttaatctacaccctgaccctttcccagattattctaaagcaaatctcagatcttacatcatagcctctttaaatatttcatattgtatctctaaaatataggagttctgtttttaaaaataatttcaatgctgttatcacaactaaagttaatatttgtttatgccattaaatatttgtttttgtttgcattttcccagtttacagggcgctgtttgaatggggatccaaacaaaacccgtctattgagattggtcaatgcatttcataattcttttatgtctcttttaggttgtccatccgtctcttttttctgtcttacaaatttttgttggtgttattgtggaagaatctgtcatttatcctgtagattttcctgcagtgtggattttgctgattgcatcttcatggtgttgtttaatgtgttcctctattctctgtgtcctgtaaaatagtggttgtttttagacatagaggcttgatcagattcagtttgattgggcaaaaactttcgtacatatttttgtgttgttctattgaggcacataatatctggtcatctcttttttggtgatattagcaaccattaatgatcattgtctagatctagtaattgattagaagttgccaaatggtggtgttctaatttcatcatttcttcttcattagttagctggaattcttctatgtagagaaactttccctcaa

SEQ ID NO: 78461 - DNA, 1587 bp, Homo sapiens
cctggagcctgtggaggaggatgccgagatgaggggtgaccaaggcacgcccactacgggcctcctgatgatcgtcttagggctcatctttatgaagggcaacaccatcaaggaaactgaagcctgggactttctgcggcgcttaggggtctaccccaccaagaagcatttaattttcggagatccaaagaaactcattactgaggactttgtgcgacagcgttacctggaataccggcggataccccacaccgaccccgtcgactacgaattccagtggggcccgcgaaccaacctggaaaccagcaagatgaaagttcttaagtttgtggccaaggtccataatcaagaccccaaggactggccagcgcagtactgtgaggctttggcagatgaggagaacagggccagacctcagcctagtggcccagctccatcctcttgaaaggtggattcagagggacccccgggacaagggtctgagacccaaaggcacagtttagaggattgggggaagggagaacgaacccagggagcatattgctgtaaacgcttcaatgtgtgtagctttaggatgtgtttgcaaagttttgtttttttaatgttgtgttattttgctccagattttcatctataaacaaaggagcatttgttttgattttactctttttggtataaaaaattttgctagcttagtaaaacgaattggaaaacttgactatgatctggaacagataatgcaagaaggaacacataagtaagttgctttggtgccaagaaaataaaaaagctattatcaggtctcctaactaccccagtttgtaaggaaaaataaaagtttttataaaattaaaaaaaataattgcctatatccttattatgttaacctattttatttttctatatttcgtacatatataagtattattcatggttccaagcaatgagtgtaatgtattttctcccaatagtaattgtttatattcataattattcagctctgctgctaaacacgtagttccacttcgtttttttcttcttgctactgtagttattacaataaatactgtatttttgaagcacttaagcattgtgtgttttttaaatcgtgggtcatgagagaatttcatgactggaaatcaacatcttaaagtttttgctacatattaaggtcaatgctgttttgtagaagttgtttcacttttgtgtgaaacaaaatcaggatcatgaggtgaaatatatttctcactgtggatctcaaaaaggcttataaaacaatagcgtaaccattaaccatgcctgtttgggaatcggactgtctgggttgagatcctggccccaccataactagtatatgaatttacataggttccttagtttgtatgcagatgtttcttgacctgtaaaatggttttagtccgtgatgtggagaattttatttgttattctttaatgtttttattttttattctccttggtctggagctgccactttttaaatataacttttctttatctttttttccaaatcattcctaggagagcaattcctggttcaaaagatagtcctctagtctcactctattg

SEQ ID NO: 78462 - DNA, 1051 bp, Homo sapiens
catcacattattttgtgtcaaaatacatacatgcctacctctaaaagagaaggtggcccttattttttatttttaaaatgatatagtcacaatgccgtgatcacaactaatagataccaataatttggtttatcatcaaatacctcatgttcaaatttctgtgtgcctgtttctctctttttgcattgggttgttaggtctcttaagtctctctgtctctcttctttattttcccttgctggccccagtgagcagaggccaccagagctcccatgtctcttgattatccttcaggaaataaaccacttgagatatacaattaaatggtgatatgttacagtcagtttaaaccgctctctgtggttaaggcacctgcccgttttactggttcacttatttcattttgcttttgattttagggattttaattaatttttgatttaattttgtttcataattatataagacatttactgttacaaagtcaaatctatgcagtaaagtgttttcccctgaaaattctagttatcatttctgtcctgtttgtattccttgtctccccaccccccggccctatagtaactactcttagattttcgctttgtcctttcatttctaaattataagcaagcacatgtgctgtacacatactgcatgtacgtgtgcctaccttgcacattgttccagcctttggttttataacttagtgatatcgcgtggggtcagtctgtagcagtgtataaagacatttcttattcctgtttactgcataatgcggtttatcatttgtctttcatttgtcttttttatttgcttctggtagtattcatatgtaaagatttgtattttatgtagttaagttcatcagtttttcccttattactttggactgtgagttataggaaatatttctcaactttccggttagagaggaattccatgtttttttctaatacttaaagtggggtctctctgtctccatttaagtttctaatctatttggaatcagttctgatataactggtgagaaacagatgtgtatttttctttt

SEQ ID NO: 78463 - DNA, 1028 bp, Homo sapiens
acagccttggcggggagcggaggtggggtgtgcttgcccagcatccctgtctaccccaccccagggctgtgcttgtgctctgtcccagccccatctctgctccccgctagccccactcggctgagctgctcacaggaaggaccctggcattactcctgaaaggcctaagggtcacgaggaacttcattcaagagatgatccatgtgatatgtttccaaatacagcctctagagacagctttcaagaactatccaaagacctatatgtctcctaatattcccatcagttacggaggaggagccagcatttagtaagcacttactacctacggtacgggcacttgtagccttagtggtcatcattgcgttcggatttcatgacagttctttatggtgggattatattgttcccacttaatgtagggaaaggcagccttggcaaagggaaacaacctccagaaagttatgtaatagagctgggattaaacacagacgtgtgtgtgtgtgtgtgtgtgtgtgtgtgtgtgtgtgtgtctgcgcgcgtgcgtgtttaatccaaaacacagactcctcaccatgagtttacctggctctataatgctatgcatgcagtttcttttagcagggcactcctcatttcaataaatagctctgtcctctgcctctgtcagcccctgggagtcaggcctctctgtggacgctgcactgtggatgcttggggacacgctgtctgtcccaggaccgaatgcagtctgagtgcccagtgtttctctgtggcactgaccttccaccagaggacactcctccccactccacctctggtgtggagcagtagctgggtcaactaaggcaacttacttgaagaaatgtcatcaggtgccagctcagcagtcactggagtggcccagaaagccccatgtgttatgaacatcagcaggtgcatagcagggtgctgctaataaaagtaaagacccttctataaagccccttcttctgagggtgagaggaatgtgtcccagatggtaatac

SEQ ID NO: 78464 - DNA, 1052 bp, Homo sapiens
gtatgttttttgagtgtatcggagtctccacagggtgtcatcttgattctgctgtggaaagtggacttggctttgggtttgacttgtatttttccccaatgattcttagacatttctgttctgtcatttaactttccacttaaaaatgaattctgggtaggtctaggtacatactgcaatattttatcttaataaattgtcaaggatggtgttttgtttatattatgatatttatcactctgttggtttcggacttttaaggtgatgggtctgaagagtgtcctaaaggaaaaagctccagccaccatgtagtgggtgtgatttggtgtttctcaccaggcagtctgctggttcttgttcaaagtgcaggtttctgggtgtatagggagactcgtacccccaaccccactgatgtccacgtccttcctaatcgctggaacctatgaatgtattactttacatggcaaaaggggctttgtagatgtggtgaagttatgggtttggagatggggaggttatgccgggtatctgaatgggttcaaggtagtcacaagggccctcataagggaaagagggaggcaggagagtcagagaaggagaggcgaggatggaagcagaactcaggagtgcagtggggccacaagccaagggctgagggcagtctctggaagctggagaaggcaaggaaagggactctcccctggagcttccagaaggagctcagtcctaccaacccaacccattttggacttttgacctcaaaagctgaaaggtgataattttgtattgttttaagccactgagtttttggtcattggttgcagcagcaataggaaactaacagatagggctatatctcaggtaccccaagttggactccgggggttggggctcaggcagtcttcgttttcaaccccgcttctccatgattcgtatgaacagtggaggagaggaaatcattgctctcacttctttgaaagttgttgcaggataacgattaggcctggaaagctttgagaatggaaaaataacaacagcaattaatagtatat

SEQ ID NO: 78465 - DNA, 1067 bp, Homo sapiens
gttttcaaggctttctaatgacctaacatgacagtgccagccctgggtatcatcatggaagacaccagagcttctagtttgatagatgaaaaatgttatgaatgcattattattttacttagcatttcatgaattactcatgactgctttccccacttctttgttggtgagtttgatctttaagattcaagtatttcctccactcaggtaaatagtctgaatccagcttcaaatagaaaaggtcagagagtgagcctaagaatcctaagtataaaagcacgaggcagaattcatggatgcctaaacttggaaacacacgcttcagttcttcttcatggtgtctcaaaatatcacagatcaagttacagtctctcgtgtccttttccaacctgtctatttcctctgtaaacaaagaggaatttctcttttacttcatttctttgtttctggaatcaatatgtagtacttgtgtgcatgtttcaaaacatcacacaaatggttttaactgtgatgtcattctgaaacttgcttttcacagttggtattgttttccacttccatgtgggttgatctgcataaagtcatttaactcctctatagagtgcccttctgagaacatatcccaatcttctgtgttgtgttgttgctgaccgtttagcctgtttctggtgttctgcctttacaacatgctgcaggggtgcataggtagaaacatgttggtagagcctgtctctagaagtagaattcctggggcaccttaatgtcactataatcgtcaaactgctcttcaaattgtttaaatcaatctgtactcctagtagggccaaggagagttaacattcgtctactttctctccaataccaagtattattagactttttaattttagctactgtgatggttgtgaaaaggtatctccagtggaggattcaagttttgtagggcccatctcagttcttttaacagaaagaatacaaaattgtaaatacaaatttagtcatgacagtggatatttatttggaatgaaaaaacaaatcacaatgaattataaacttaaaaatgcttt

SEQ ID NO: 78466 - DNA, 1018 bp, Homo sapiens
gaagttctagagatctgttgtcaaacagggtacatgtagttaacactatagtactgtacacttaaaaatggctaagatggtaaatcttacatgttttttaccacataaaaaccgaaacagaagcaaaacacttgccccagcactccctgctccccctatctgggctctgtttttcccccggagcactcatcattcttttgtgcccaatttaattacttaggaggtctctcccctctagaatgtagacactgcaagggtgagattgttgtttcttttgttcacggatggtcaagaacagcgccaggtattgatgaggcactttataaatgtgttgaatacaagaatgtgctccagatctggctggggccatactgcagagatgtggacatggactcggaggtgctcctggtgagagcctccttagcgtgtccatgaagctgagagcttgcatttgggtgggaatgctccttgtggaatagggacagagagtcatgggtgagacaaggctgccttttgttttcaaagtggagcacatgttcatcattggctgaatgaagttctaacagtcttgctaaaatgagaattgcctgttcaccccacgcctttttaaatgtgtgtcatgcactctcccctgtatcatggcaggtatgtgtatcaacactgtgtcttccctccacggagaaggtggaggggacatggttttgcagagggaaaaattcctcattttgtttgcttcttgctaatgttgaccaatggttttcaaactaggttccgtggaaccttagggttttaaaattccttttcaaatagagtacatccacttttagtggcttcatattttgatgcagcctaataattaatttgacaaagtgttgtgttgtgtttggctttagggtgctttgggccgggtgtaccgactagctttgtcacttggcccctttactgctgggtagttcaaagcaggcggcccttgtggtccctaagatgctttattttgccattttgaaagctcagggag

SEQ ID NO: 78467 - DNA, 1002 bp, Homo sapiens
attaatacatcttttgtatatgcgttatatgctgtattcttaccataaagtaagctggaggaaagaaaatatcattaagaaaatcatagggaagagaaaatgtatttactattcattaagtggaggtggatcatcataaagatcttcatctttgtcgtcttcccactgagtgggctgaggaggaggaggaagaggaggacttagttttgctgtgtcagggtggcagagaaggaagaggtggaggaggtggattttcaactgcagagggagtcaggagaggctggcacacttggtgtaactttgactgaaaaaaatccatgtataaatgcacctatacaattcaaacctgggtttttcagggtcagccgtagattggagattgcctgggaagccccacctgggtgaagggtttgaggggaggttggggagggatgtgtgcagaagatgggtgaccggccgggctggtctgggaggtcgtgaagagggcgggcatgtactgagcctgggtgctgcgggccagcttcgggcctgtgccatggtctgcagagattaagcatgtttggaagtccatgtagcatcactcatcctacctggtgggctaggatgctggagtgggagagggagaccccaggcgtgggaaacagcagagccattctcccgtggggtggcttcagaggcctgctaggcagcgtgggcagtgttcacatgatgacaggctgctcctctctgagtgccctcacacctctttctctcctttttcccttgtttccaggagcaagaaaccccacccccagatctctggggaggggagtattttatgaggggcaggtatccgctggcacaggtgggtgttgaagaaaagtttgtagaatgattgaagaatgactgcctaattccttaacctctctgagcctcatttgatcatttgtgaaaagggggattgacttattgctgtttccaaaccatattgcactgtggtttaggagagctagagaaaattgt

SEQ ID NO: 78468 - DNA, 1023 bp, Homo sapiens
ccacagtgagcttcgattgcaccactgcactccagtctgggtgacagcgagaaatcctatctcaaaaacaaaaacaaaaacaaatacaaaacaaaaacaccaaaaaaaaccaacaacaacacacacacatagacagaaccctcccttgggcatcgggtaaaaagtcctagtcatttgaagatatagtacactggaatgctcatagccaaattctatgctaataaacaatgaaactctgtcttaatattgttttctggaaattttttgaaataatttctaacttatagaaaagttacagaacagaaccaagaattcctgtgtctcttctcttaaattcccgaattgtaaacatgttattgcatttaccccatggcttgagcttgtgcacattgtctttctcaaggtaaaaaaattctcaattatcattagtctttttctcagtgttttgggagaaagctgtggacatgatgttgcttcacccctaaaaaactcagtgtatattctcaccactcatggatgctctttatgtactcatcataaacctctccaaattaggaaaacaacattggaagaacattgttatccaatctgtagaccccattccaatttcatcacctgaccaagtagtgtttctttttcctctctggcccagggtcctacccaggaacatgagcattccttgtgtgtcttcactctcctcagccttcctctctgtttcacgttttccacagttttgaagggcacaggccttgcattctgtaggatgaccctgaacctggatccatctgattatcctcatgggcagacttggctcatgcattcttggcaggacaatcccaaagttgatgccatgcttttctcagtgcatcgcatcaggaggcgttgatgtcagcccttctcaccattggcgatattcaccttgatcacctaacattattgctgtcctccaggtgttatcattttaaattcaccatttcccctttaattataatttgtgtaaggaagtctcagattatgccaata

SEQ ID NO: 78469 - DNA, 1053 bp, Homo sapiens
ttcttttctttctttttttttttgagacagagccttgctctatcgcccaggctggagtgcagtggcgtgatctcggctcactgcaaactccgcctcccgggttcatgccattctcctgcctcagcctcccgagtagctgggactacaggcgcccgccaccacaccctgctaattttgtatttttagtagagatggggtttccccgtgttagccaggatggtctctatctcctgacctcgtgatccgcctgcctcagcctcccaaagtgctgagattacaggcgtgagccaccgcacccggccggaaaatgtttcttttctttttaaaaacaatttacaaaaatgacattataccacccatattactctgtaacttcttttaaaaatttaatgtataacgaatattcccagccataactcattattattattttttaacacattatctttaatggctgtggagtagtccaaagtatgaattattacaagttattcagttattctcctgctgggaataatctctaccagttctatgtgtctacaaacagtgctgcttatccagcctgagatgccactgctttttttttttttgaggatagattccccaaagtggaattgctagctgatgagtattcaaattgggagttttgttagctatttctggattaattttcacaaaagaatgtaggcacatccacccacagaagcctacagtgtgtgcccctttttctgtcctcttgcagcgtgggatattagcaaggctgagcatttttattaatttcatagaagcagaaagatatttcattggatctgaatttccatggatactttattatgtgttgcaaatattttctcattttgcttaatttttgatgtcttgccagatagaaaactttaaaacttttaatatagtgcatcaattttgggagtactgacagttttatcatattaaatcttccaattcagaaacagagtatgtctcttcatttctttgttccttgttttatgcccttcagaacatgttttatggggatgtattcatggtggcaaagta

SEQ ID NO: 78470 - DNA, 1661 bp, Homo sapiens
aggagaagtctgaaaattaaaaacaaaaaacaaaaaactgttcttaatggtgtgagttagaaagaacgttttaaaaaaaatttttttagaagtgtgaaacacctttggaattgttagatgccagcagatctgctttgaaatacagcaatgtgttttgatacaaattcaatatgctgaagaaacagaagaaaattatgtctaaatatacgtatttgccctataattgcaaagcattacggatagcagtttactgaactgtaaatgacatcaacttcttttctctcataggtgatcctaaaacctggcaaaacaagtgtcttcccggagatccaaattatctcgttggagcaaactgtgtttctgtccttattgaccacttttaactcttgaaatataggaacttaaataatgtgaaactggattaaacttaatctaaatggaaccactctatcaagtattataccttttttagagttgatactacagtttgttagtatgaggcatttgtttgaactgataaagatgagtgagcatgcccctgaaccatggtcggaaaacatgctacacactgcatgtttgtgattgacgggactgttggtattggctagaggttcaaagatattttgctttgtgatttttgtaatttttttatcgtcactgcttaacttcacatattgatttccgttaaaataccagccagtaaatgggggtgcatttgaggtctgttctttccaaagtacactgtttcaaactttactatggccctggcctagcatacgtacacattttattttattatgcatgaagtaatatgcacacattttttaaatgcacctggaatatataaccagtgttgtggatttaacagaaatgtacagcaaggagatttacaactgggggagggtgaagtgaagacaatgacttactgtacatgaaaacacatttttcttagggaaggatacaaaagcatgtgagactggttccatggcctcttcagatctctaacttcaccatattaccacagacatactaaccagcagaaatgccttaccctcatgttcttaattcttagctcattctccttgtgttactaagtttttatggcttttgtgcattatctagatactgtatcatgacaaagactgagtacgttgtgcatttggtggtttcagaaatgtgttatcacccagaagaaaatagtggtgtgatttggggatatttttttcttttcttttcttttctttttttttttttttgacaaggggcagtggtggttttctgttctttctggctatgcatttgaaaattttgatgttttaaggatgcttgtacataatgcgtgcataccacttttgttcttggtttgtaaattaacttttataaactttaccttttttatacataaacaagaccacgtttctaaaggctacctttgtattctctcctgtacctcttgagccttgaactttgacctctgcagcaataaagcagcgtttctatgacacatgcaaggtcattttttttaagaaaaaggatgcacagagttgttacatttttaagtgctgcatttaaaagatacagttactcagaattctctagtttgattaaattcttgcaaagtatccctactgtaatttgtgatacaatgctgtgccctaaag

SEQ ID NO: 78471 - DNA, 1093 bp, Homo sapiens
cggtggctcacgcctgtaacctcagcactttgggagaccaaggcaggtggatcacgacgagatcaggagtttgagaccagcccggccaatatggtgaaaccccatctctactaaaaatacaaaaattagccaggcttggtggcgtgcgcctgtagtcccagctacatgggaggctgaggcagaaaaatcacttgaacctgggagatggaggttgcagtgaaccaagattgtgccactgcactccagcctgggcgacagagtgagactctgtctcaaaaccaaacaaacaaacaaaaaagaaataatattctctgcgataaccctgtcagtaaaatctgttgccagaaacttatcttgttaaagtaacttcttgattatatggagaaataaaagtgaaagcacgtaatacagtagtagtaaaagcaaagcacctgtgtattattaggaattcactcactagccatttctgaactttcagtccttcagctgtggaagaggatgaagatgaagatggtcatactgtggtggccacagcccgaggcatatttaacagcaatgggggcgtgctgagttccatagaaactggtgttagtataattatccctcaaggagccattcccgaaggagttgagcaggaaatctatttcaaggtctgccgggacaacagcatccttccacctttagataaagagaaaggtaaatgtgtttatttttctccttagttttgataacttaagagttgccctgtgtgcacttcagagcttatagtgcttggctaataatgcagcacctctctatctccagatgagtgctgtagcgaggggtgccctggggacggtgttgcaagcaagcagtgggtggcctgaagcaaggctgtggtgaccacactgcctgcttttacttttggtgtgaaataaaaaatgatggcataggacaggccacgggatgtctcacctgctgagcagcctaggctgacctaaccaaatttgtctttgaatcagtcagcctttgcgtctctggagatgggttaggtaacacccactcagaaaggctttgctgtgccttcacctgattggagaacctaaacctcttg

SEQ ID NO: 78472 - DNA, 1897 bp, Homo sapiens
tttcagaccaccaaaccgagaagatactgctcaggcagctttctatccccagaaaagttttccagataaagccccagttaatggaactgaacagactcagaaaacagtcactccagcatacaatcgattcacaccaaaaccatatacaagttctgcccgaccatttgaacgcaagtttgaaagtcctaaattcaatcacaatcttctgccaagtgaaactgcacataaacctgacttgtcttcaaaaactcccacttctccaaaaactcttgtgaaatcgcacagtttggcacagcctcctgagtttgacagtggagttgaaactttctctatccatgcagagaagcctaaatatcaaataaataatatcagcacagtgcctaaagctattcctgtgaggtaagacttatgcctttgctcaaagcattggccctgtgatttttctcatgtgagtttgttgtagtttatttgacttgggactttaaagtgatctttttaactcaacctttaaactgaagagtgttgttgcaatgaatgctgttacatagaaggtcctccaggaggtacaagatgttggtaaaataataaagctaacagtcgtgtatggttggtaggtattgtcatcatccctgttttactaagaactgaggttgagtgacagtaagcagtttgcccagggtcacagctagagtgaggtgagcctcaatttagctgctggtcatccgacctctgagcccatgcttttttttttttttttttttgagacaagagtctccctctgtcgcccaggctggagtgcagtggtgcgatcttggttcactgcaacctccaccccctgggttcaggcaattctcctgcctcagcctcctaagtagctgggactacaggtgtgtgccaccacgcctggctaaattttttgtatttttagtagaggttttcaccatgttggccagactggttttgaacttctgatctcaagtgatccatccgcctccacctcccaaagtgttaggattacaggcgtgagccactgcacccagccaggagcccatactcttaaccagccatgaccttttgtaacctcctgacctactggtaaggtgcatgtggaggacatctaaaaacattaagtatctatgttcctcattcattatttgttccacaatgatgctaagaagaaaaatagaataacctctgactgtttaaagagcagcagttagtgagatggctgagcaaatgagacaaagtgagcccacctggagcctccctgcagctcctctttcctgtctttcattccacggcgattgaccagatggattctggccatacataaaagctcatctcagcctcctacagccagttccattttcacgccaccataaagcagaagcacttgcaggcagggagaaccaaaggtcaggatggccacctgagtctgctttccaagagaaaggatggttatggcggtcactgccttcctagctctgcacatccacagatggtcaggggcggacagagctggcctctgctctgcagctcaggctgcgctctgctcccttgatgttgtgtcgtaggatgtcgtccctggcactccggtcatgctggagtgaaacggcagctaccttcatgtaattctgtttcgttggtctttctgctcacctttgagccctggctcaaaactgtactttcaggaagttgatagcctctacttttgaagcagtcattgataccacatcccctttgcctttggcgttctgtgattactaagttaatctactgtctctctttcgtggatgtttgggatatgcccatacaagggtcttcgcctcatggaaccttggaagccttgcctcctacagccagagcgggcgcttggtcctcagggaatgctgaggca

SEQ ID NO: 78473 - DNA, 1349 bp, Homo sapiens
cactgttgttgttctgcattgtagagagagacactgaggctgagaggggcaagtagcttacaagacttagagctggaagagaaacctggcctgctgctcctcagcctgagctttttcccatggcctcattgcactgccaataagtgacagattagatttgaatacagctcttctgattttgttttttgactgaatatatgtttgcacttaggataaagaagagaactgtctaatatgaatttacttaatgacttgctttcttcctcatctgctttgtatgccttctagaactttagaccatatagagttatttgttcatatgagaatcattgagatcctggactgagttcttaaaaatccctttgaaagttcttaaagtctatcatttactgttcttgaccttggtatatgtacttctcaagatgttcactgtctcggttacattgccctttgtctttctgattaactacttctaacctgctgttccctaatcatgtaatcgtttagcttattatattgtgttaaaggactcatgagccagaagggggctgccttttgagtatactctgtgaggacatgggatttgaaatatccattttaactgttgggactgctcagatcctcagtaatcacagcagttagtaattattgaccttttagtcaagataagacttacatattctacttccttcataacattaatatttaaaaaggtgttccgtttgtcattcattatctgttaggatcccagaacctcaaaaacctcaactgaagccacctgaagatattgttcggtccaatcattatgaccctgaagaagatgaagaatattatcgaaaacagctgtcatactttgaccgaagaagttttgagaataagcctcctgcacacattgccgccagccatctctccgagcctgcaaagccagcgcattctcagaatcaatcaaatttttctagttattcttcaaagtaagctatttcacctggcttttaaaaataggatgcagcatattaatcccgtgcagttcaatatattttgaagaaaaataatttaagtgtaatatatgatttctgtaggctctagtggttcagcattgtacatactttttagttctgggatgtgtgttttgtttttaaagtctgctattagatgtacatagtttttgcattcacaaagatgctaacatcacagggttttgacggaagacagtgtcaaccacaaggaccctcatcgataggtaatcatcagtcttcacttctgtacacacacctaatgatgtcatgctggttctttttcttttctgtttttattttttaaatataaatacagatgtgaggaggatcctg

SEQ ID NO: 78474 - DNA, 1841 bp, Homo sapiens
agtgtcaaaatgaagtgtaatcaatagtgcattaattttctactaaatttaatatttatctttaactcactgtttatttagtacatgctgaaacataaaagcccctacctgcattataaattttgagctttcacttaaaccagctttttccactaatcttgtctatcctgataataaatggtaaaacataccattttcacatattaaatcgtagtttaatatttaatcacagtctaataaaatagactagaattagaaacaagactttgtccttaaatgtgaattttttatacaggtgtatagaaaggatccatatcccgaggaaatgatgaggcagaaccatgttttgaaacagccagccgttagtcacccagggcacaggccagacaaagagcctaatctgacctatgaaccccaactcccatacgtagagaaacaagccagcagagacctcgagcagcccacatacagatacgagtcctcaagctatacggaccagttttctcgaaactatgaacatcgtctgcgatacgaagatcgcgtccccatgtatgaagaacagtggtcatattatgatgacaaacagccctacccatctcggccaccttttgataatcagcactctcaagaccttgactccagacagcatcccgaagagtcctcagaacgagggtactttccacgttttgaagagccagcccctctgtcttacgacagcagaccacgttacgaacaggcacctagagcatccgccctgcggcacgaagagcagccagctcctgggtatgacacacatggtagactcagaccggaagcccagccccacccttcagcagggcccaagcctgcagagtccaagcagtattttgagcaatattcacgcagttacgagcaagtaccaccccaaggatttacctctagagcaggtcattttgagcctctccatggtgctgcagctgtccctccgctgataccttcatctcagcataagccagaagctctgccttcaaacaccaaaccactgcctccacccccaactcaaaccgaagaagaggaagatccagcaatgaagccacagtctgtactcaccagagttaagatgtttgaaaacaaaagatctgcatccttagagaccaagaaggatgtaaatgacactggcagttttaaggtaaatatgtctttagtgccttggatgcatgggcacaccgtttaaaaggcttcttggctctcccctccgccattacatgatatctattctgttaattatctgttccttaggcatatttgtcttttttttttttttttttttaaacagcctccagaagtagcatctaaaccttcaggtgctcccatcattggtcccaaacccacttctcagaatcaattcagtgaacatgacaaaactctgtacaggtgagtacactttgtgctctttgtggcatagaactgaccaggaatttaaccctcttagtcaataagaaaaccttttactgtgttagtagaggagaggtgtgaataggaggagtttgtccttaaataaaaactatcagctctcctaaacagtgattctagggggaaaaaaagtagaactttatttctgacaaatctgacaaatctttatacctttagcagactttcggaaagatattctccaagcagatgattaaataaacatttttaagctctgacatttgtattatgttttttagttttaaaagtgcttttcgacatgtgaactcttagtttccagtggtgaggaaacagactcagattggttaagataactaaatcatttagtgagcatgcataaggtgcttgcccttgtgctaagcacatcagca

SEQ ID NO: 78475 - DNA, 1383 bp, Homo sapiens
gaggcctcaggcaacttacaatcgtggcggaaggggaaggaagcatgtcttatatggctggagcaggaggaagagagttggggaggtgctgcacacttaaaaaaacagatcttgggagaattctatcacaagactgtgtgagggagatggtgctaaaccattagaaaccacccccatgatccagtcacctcccaccaggcccctcccccaacactggggattacaattcaacatgagatttgggtgggaacacaaatccaaaccatatcagttgtttcctaaacataaatatattagctcttattcaacttttgaactgttgggtttatttcataggtattcttccatgtgctattctgtcagtgtgtccttgtttctgtgagcttagtttggtaacattctccctcttccccttgcttaaaagggctgaagagctagtgagtaggttttataaatctgagcagtgtcagagtttcttcgttgtcttccagggctgggccctggagtctaactttgtcctggcttaccggccactgtttccttcatccatgcccttcagatctcaaggggtgctccatgtgtctgcgtgtgtgcttgtacaatcttcttgacttttccttaccagaagtttcaagaagtagatgtgacttctccagagaaagatatccttttcaatctgccttgtacgataaaggccatctcttaaagaactactgaataaaatttgtaatttacttttatttgacccaggcggatggtgctacaagtgatgaccttgatttgcatgatgatcgtctgtcctacctgtcagctccaggtagtgaatactcaatgtatagcacggacagtagacacacttctgactatgaagacacagacacagaaggcggggcctacactgatcaagaactagatgaaactcttaatgatgaggttgggactccaccggagtctgccattacacggtcctctgagcctgtaagagaggactcctctggaatgcatcatgaaaaccaaacatatcctccttactcaccacaagcgcagccacaaccaattcatagaatagactcccctggatttaagccagcctctcaacaggtaagcagcaagcattcaacgttttgtagatagaggtgcattattaaattttagaatgtggtgattgagttaaaaatatatatgttgtcctttctccagattaagaattaatcttcaatttcaatttgagagtaccaagggcttaattctaaattttgtgtgtttgtcttaacacagcaatgtactggattttttttttttcccaaaaagtttaggacatgaggtcataattttgttattcagcacacttaaaatgtatgtctaccaatcactataaattga

SEQ ID NO: 78476 - DNA, 1058 bp, Homo sapiens
aatagatccttcctggctttgaattttggttttctatacgtccaaatggccagctttaaaataactactttctattgtcagtctttctggttttatagcaatctttgatgggaaggtctgtttattttgtctggagagttaatcatttcctcagaatacaccattgagggaagctttttttttttaaatgtcttttacctttttcagatcagtgcagtaagttttggttattagggaagattgagagtatctctggtttttattttgttctttgtacttccttgttggtttggtttttgttgtgttttgcccccgcatggtccctaccttcctctgcctggctgtggctacagatgctctgacagtgcatgctgcatgcttaggaccccccatgtcctctacccagacatacacagcctctgcaaggagagctgttaacactgagaggcagtgtctattgttctcacctatagtaatgtgtcagaactatggtttttctcattatgaaccagtctgggggatggaccatgcatacgagagcctaagaccactctgaataacatgtcagctggaactggataggaaaatgaaggtggaaacaaaccacaccactttacatgaacacactattactaatttctacttttgcagcacttgaaaggattgtagtcttcatactaaccttctatagcaacacaattctgttaacatcctttggcaggtccaatgttaatagctttcactagtgaattcttaaaatgaaagtagtctataaatgttttcccaaaatgcacaaagtatacatttgtagtatctgagaggcttttttaaaatccacaaatcttaattttctataaagtattttagtgatagtcttgtgtgctttctttgcttggttttaaaataaaggtccaactttctagctttttatgtgaggaaaaataggttatttattatcaggctagactgatgcattttgtaagccagaaaaggttgttacaacttacagcttatcttcctgtcctcttctcttcaagtatatttcatagaatagattc

SEQ ID NO: 78477 - DNA, 1050 bp, Homo sapiens
caccaaatgcagttgatcgtcttaactatgcccagtggtatccaattgttgtatttcttaaccctgattctaagcaaggagtaaaaacaatgagaatgaggttatgtccagaatctcggaaaagtgccaggaagttatacgagcgatctcataaacttcgtaaaaataatcaccatctttttacaagtgagtatgttaataaaggccttctttcagcttacaatgtctgggcaacattaagtaggccaaaatgttacggtgttcaaatactaaaacttacatgatactttcttggaaagcttcctgttgtgttaacacctgctgtttggttaaaagaaaatatacagtagcaaaatagaaatttcaaatgtttgcatcctcagataccatctttcagtaatgacgatttagctgtaagcagggttgaattaattctgacttttggcagtgctctaaccataaaactacatcgttaatttattttcagctacaattaacttaaattcaatgaatgatggttggtatggtgcgctgaaagaagcaattcaacaacagcaaaaccagctggtatgggtttccgagggaaaggtaagacatttcctattacttttttgacttgttcagtaaattatgtaactaatcagagatgcttttgagataccagtgctttctaattagatcaacatattggagaaatttggggaaagttagcttttaggtttttataatttgtgtgtaggggttatgaaagttgtttctgatggtaagagaattcttaaattttctcacctgttgaattaccactgcagtaggattgtctcctaaagaatcttaaattataatgaagagcaggttgagttctgatgctgcccctgtctggctatgaatgatgactttgagcctggcttcagtttcctcctctgaaaatgaggggatttggatggcctagatgagcatctcccaaagtgctgtcctcagcatgctcaattcaggacttgctctaagagagaaggcactatgaaggcaagcagcggatgggaaataaaccct

SEQ ID NO: 78478 - DNA, 2179 bp, Homo sapiens
tttcagaagaagttttgttttgttttgttttcttttgtttgagacaaggtcttactgtgttgcccaggttggagtgcactgacgcaatctcagctcactgcaacctccgcctcctgggttcaagcgattctcctgtctcagcctcccctagtggctgggattacaggcacctgccaccgcacctggctaagttatctgtagatgacatttcacctgaaggaagttggtggtaacccttacccataaccaaacttaggatttttagatatgggaaaagcaagtatgatgacttacaaagctctgccttaaagggtaatacattggtttaatcaggtttactccacaacagggaattcaggtagcttagttttatatcttctttgagtctaatgacagtcttttgagttgaggagttagtagcattttttttccagccaaaattcccagttgatctttcttcttaattctccagtgttcactagatttgaaattctgccctgcttgcccatggtgctttgtcttatggtagtctcattctccaaaatcatttatcttgaacctcagtgtgacttgtctttccagatctctgcctttgtctgatctctgaaacaccaaagctcttcctttcctttcaaactttccttgtgaccagagtcacaaacgttgctgtgctctgagatggttggttggaaaccagcccaagctgcatttggcacagtatacaccagtgaagacaggttgccaggatgaagccataggctgtctcacagttacagatgaacagcttcctgcccccaggttccccttctactgatgtaactaaggtctctaacccagaactccctaggcaatccactatagcaccattaccgatggttgatggacatgccaaggtattgacctcttaagccagtagtggctggttagagcttggcaaaggagcagccccctcagtttatctcagtgtgccatacaaataatattttctctggatgttacagtgtgaaaaagggtgggaagtagtgccctgttgagccatattagagccccaggcaaaagaaaaaaatgtgcattcctgtatattttttcttctttaatggctaagtttttttccagaatattaaagtagttgaaaaaatagtgaaaaaaaaaaagggaagtatgcatattaaaactcactttaagtactgcatgcataagacagtttccacaaacaaagtactatccagtccggcatatcagttgtggccagtagttgagaaactcctgtctaaccagtgaaaatttgatgtcttatttttgtcctgacataatgaatagagagtgaaccacgagacgctggaactgaccaacgtagctctggcattattcgcctgcatacaataaagcaaatcatagatcaagtaagttattaaaacttgacccatttcattatgttattgtggttttgagtgggatgggatttggttaatttgaaagtagaaggtagtttttctgagactattactgacatactataagaaaattaagcccttactgaaaagcattataatgattactttcaagagaatagttactgtaggcatcagaagatgatttttcattaccacaaaacaagtgtatgatttttagatgtaattaacagactgcttatatattatatcagtacaattcaagttgtagtttgttatttacattcataaggaatgtcaggaacattaaattcttaaacatttttattctaactgtacgtggataatactgtcagattgcggtgttagggctaagtcttaaaagtgagcttcatagaaaggtttttagaaatttggctagaaatggaattgagttaacttacaattagttttttaatatgtgctcctgagacattagaatacaaagagatctgttaccactgaaatatagtacagacttttgactttttctgaatgtgatggggtgttttgttttgttttggtttgtatttgtttttgtttttgaggtagggtcttgctgtgttgcccaggtgggactgcagtggcgtgatctcggctcactgtagcctctacctctcaggttcaagtgattcttgtgcctcagccacccaagtagctgggattacaggcgtgcaccaccatgcctggctagtttttgtatttttagtagagatagagtttctcca

SEQ ID NO: 78479 - DNA, 1052 bp, Homo sapiens
atttgtccgctcagcctgttcaaacaaagtttccagcttatgaaagagtggttcttcgagaaggtagtttattttctacagactaacctaataccctttaacgtcaatatgtttaagaaagaaaaggtataaaatatgctgtttttcatgtgaatttctctccagctggatttctgaggcctgtaaccatttttggaccaatagctgatgttgccagagaaaagctggcaagagaagaaccagatatttatcaaattgcaagtaagtagcctcaaggctaacttaaatgaggttgggagttacacctctaaagtgagtgagttctgattcactcattcaataaaaataagactttttgtcagtgaaaaattagcagtttatcccattcttttaatttggtgagaaaaccccagtgaccatgtccttgttccaccaattcttttaatgagaaaagtcaccgtttaggaaactcttggcttcatatgaaaattgcataacatacaatgtcattgaatcctcccagtcatgctctgaggtaaggagtataatatccatgttacagttgagtagcctgagacttggatggtcattgcgtggatcctttccagtttcttcagtctaaacttcctggtggccctcagtgaacaagtgacaagactcggctttgaccacagccctttcttgctccattccagctcttttagtcattaaactgacaaatacacaaatagttaaaaagggtaataaaacattgctaatattatcagctgttgttattgcagacatttataataagatagtaagtataagtattgaggctgcagtgctttgtatgccaaatacgttttgcttacagatccttgttttatttactttcttttttttttttccaagccaaactgtatccagctttattaaagatactttccataaacaatcatggtatttcaggcaggacatgggcagacaatcgttaacagtatacaacaactttcaaactcccttcttcaatggactaccaaaaatcagaaagccactataaaacccaatga

SEQ ID NO: 78480 - DNA, 1030 bp, Homo sapiens
ctcagcaacttgtaaaaagttaccttttttcatctaaactggttaaattttacacagatctttaatgtcaggacacactgaatactatttaaataaatttatacctttaactcactttatttgtttctgtttttttaaaattagagtgtattcttttctccaaagtaaaataaagtttttggtcttaaaagatgtgatattttcggccgggtgtggtgactcatgcctgtagtcccagcactttaggagaccaaagcgggcggatcacctgaggtcaggagtttgagaccaacctgcccaacatggtgaaaccccatctctactaaaaatataaaaaaattagctgggtgtggtggtgggcacctgcaatcccagctactcgggaggctgaggcaggagaatcacttgaacctgggaggtggaggttgcagtgagctgagatcgtgccattgcactccagcctgggcgacagagcgagactctgtctcaaaaaaaaaaaaagatgtgatattttcaaattaggtagactgagagtatctgtgtcctgcgtatgttattttcatattcttaaacagccaagaatgatttatgaaatcttatttattaggtaaacaacgtagattttacaaatatcataagagaagaagccgtccttttcctgcttgacctccctaaaggagaagaagtgaccatattggctcagaagaagaaggatggtgagatgctgtcagaaaatggaggagataaacctgtagagtttgaggacttacaaagggatttattccatttttaaaaaataagtcactcatagttgagtgatgaatgaatttgttaatctcaaagaaagttatgtaattctaagtcatttaggagcacagaatttcagatgattctcattagcagagcatgctaataggactaacctttatagtattctaatttaaataaaatgccatccaaccctttacaagtgatagaaagtgttgatttattagccatcagaaccatacaaaagtatatatgagcagct

SEQ ID NO: 78481 - DNA, 1033 bp, Homo sapiens
cttggagccttattttgagtccatcgtgttaggaaaattagccaatttatacttcaatttctacctttattttaaaaaatttgacttttcagttattaatagaaatgatgtgtgaattggggtggaaaaaatggaagatgtttttagccatttggaatgtaccataactctttgagagttgagaaaacattgttttacaaagtaattttataaattagttatgtaaaatagtacttgcatattaaatttgaatattccaaaactgttaatcagaaaatagtgttattaagtctgatttgaattctaacactaaattttatttagtaaaatagtggtatgagagaagttttagaaatgatggttctttatttaattctgaatatagttttcactgtagtgattgctataacgttttaagctcttcttaactgtttcaaatgaaatatctgttttaacaggcccagcatgaaattggtaaaattcagaaaaggagatagtgtgggtttgcggctggctggtggaaatgatgttggaatatttgtagctggcgttctagaagatagccctgcagccaaggaaggcttagaggaaggtgatcaaattctcagggtatgtcagtattgcaacttatgtgggttaaaaagtatttggatcaccagaaaaaggtatcaaacaacaagcttactattgtaattagattgtaatctgtaagcagtctccattgagccagttaaactttgaaagtcaaaatccatcaggtctaccttatgctggacttctcacttcccattcttgtatcttgctcttgtttactgctatattttgtgttagtaaagaatgtaacatttcatttctaccactcgtgttcatggaaataaaagaaaataagtcttatatcccgatgataatatctaccaggtagtctttggaagttcaactaaacattcagactggcaggactctgccatgggccacaacttggcagcaagcaacatcaagtgttcctctcccatatgagtcatcttgaagcaat

SEQ ID NO: 78482 - DNA, 1026 bp, Homo sapiens
gtcagggttagaagaggatttccaaagtcctatcttttgtttttgtttttgttttgctttgttttaaagagacagggcctcactctgtcacccaggctagagtataatggtgtgatcattgctcaccataacctcaaactcctaggctcgaggaatcctcccacctcagccttcggagtagctaggactataggcaacgagccacgaaacccagctaattttttttttttttttttttttttttttagtagtgacagggtcttgctgtgttgatcagggctgggaacaaactcctaggctcaagcagtcctcctgcctcagtctcccaaagtgctggcattataggcttgagctgccacacccaactgagacctggagtcttaaggactttgaggaaatatttaaagaggtttcagtacaatgggtttaggagaggaatctatgagaatgcttttgacctggctaggataccactacaaccaaggggcttggaccatttgtagtaaagctggtaaatagtttcatggagggatcaaggatgccaccagccagtgagagacctcatctgatttctcaggctcttacttttatgactagctgatgttagttccaggtcaggtaacccaatcagaaatgaataaatagtaagttctgaaagttaaggcgatctctttagttggcttaaagagactagaaatctctccttcctcaacacatttcattcatttatttgactttttgttgttgttgttgttattgttatctattagtttctaataatttggttagtattacataataaagagtatagggatttttttctacacttcttgtcagaataggtaaaatagtgtattttcttgctaggaatgtgagagtacttatgaatccctagaagggaaatatagtgggtaatttttaattacagtctgtttctatccagtcagttcttagaaggcatcctttagtatttgttttaaggaatgtcacaaggtttcaacactacactgatgctagaggtgggtg

SEQ ID NO: 78483 - DNA, 1569 bp, Homo sapiens
ttctttgaagtttttgaaactgaaactcagctgctttccctcatgcctcattaaatttgataaaaaatggatctgactgtggcttgctccttctgtgggcatgcatgactgatcattttgatataaagggtgttacagttggaatattatcaagacttactttgatctgctttaccacttggcatatctcctaggtggtattccatacccccattcagtgaagtctcagtgaagttgtcaacatttgctgtttttacttcactacttacccctcaatcctctctggtctggtatcttttccgctctgcccccaaaaatgttcacactaaatctagtggaagtttttcagtctctagcttgcttgccttttcagtatcatttcacatggttaaccactccttattttcaaaaataatgtcttctttggtagtactgtatctttctgtttttttcccccacctttctgtatcttttgcaagctcattctcctcaccctgccctttataacgttctgtcagtttctctcctagaatctttttttccacttaaggtaactttttttttcttttcctcaggttgaataacaattaatttaggcaatctcatctgctcccctgcttccagtcactgctgatgatggcagaacctctttctccagcccaaatctttacactcttgtgttccaactgttaggcatattcacttagatgttcctgtaggtccctgaaacacagcacatctcaaatgaaactcatctccctcttaaaatttttctttgtatttctcatgaagtattcagttgaatgtgtttctattgatccagtttctcaggccattcccagatgacatggtagttacccttgccttctctttttttcccatgcatgatgaatgtcctcactcctgaataccactcttatccatcccactctttctccactgcctccacccttttccaagccactgtcatctcttacatagactcatttggtctcataggttgtctcttggatccctttaagttgattctgcagatttcttcatagatcctctgtgacacttctgtcttactcttttgcccctttctttattagttctcagtctcagctacactagacttatgacttcattaggtccaccaggtttttttcttcattactttgatgcatttgttttgaacttttcagccgtcactcaccccatgcatcccctcccccacaaacatacccttcaggtttaggtctttcttaggtaaagttttaactttagtatatcttcctcagggcggccttctccttccccctagtaagtgaagaacccttgtgtttctgccctctgaactcaccgcatttgggattaccatgctaacatcctttttttcactgactgcaaattgccagagtgcaggaactatctcatttgctgctttctccctaatgcctggtacctagttcatatataccccaagaaatatttagaatgaacgaacaaactaatatacaagaaatattttggggtcatctgtgtaatggtcatttataagtgtttaatcttgaagaacagtctttt

SEQ ID NO: 78484 - DNA, 1031 bp, Homo sapiens
gaggggaaatactgaaaaaatttaggaggggagggggagtaaaatggcactgatcttaaagcaggctgagtggctgggatcttgaagaatggttgtagaatacctacattagcgaattccacagagaggcaacaatatgtagatgaaaggattgctgaacaagagcaagacttctgtaaaatgaatttacagagggcctcatcagcaaagtgtggaagtgaaggtaataataggactggagtttgtcagggcagatgattgaggggtcaagaaaaagtcatttaaatatggcaacaggatgtctcatgcaaacttagggggaatgcgagtgaaaccaggatggaactgatgaactaagatgaaggaattggaaataagatagtgaaaagtttcagtagctcaaggtgtccgacatagaagacaaggagtgatacacaaggagatcctgtagaactacagtgaggtcaagtgtatactattgtgagaaggcaaagtgtagtccacagattacagggccattcagtcagcaggtgtaatacatgtagatcgtcagcttgcagagaatgaaggaaataagtggacaggcaatacagagccagttaccagaatcattgagaaaagaacgccagagggaagaatttgcacctagactgggagtacaaattgaagagatccagagactgaaagcagtttgtgttggtgaagtacggctgagttaattagctccaacatattattgaatgttagtgcggctatagaataaattatctcttagaggtctggggcaattgtgggctttgatattgatgcattctaaaatttttaaggaagcaagttgggcatggaagtttgctgtggttttggtagcacctagagtatatttgatggcattagagtacagtgctgtcctttttattcaaaccaccaacagttgttagtttccctgtaagcttgtgattattacaccaggaagatctttctgtgtgaagtaaataaagaggtttttaggcccactcgttcttatttgtgct

SEQ ID NO: 78485 - DNA, 1022 bp, Homo sapiens
aagctgagggaggaagttgttacctttgtcctcaggcagtttgaattgtacagttttatacaaaaacatacatttctggcttaatgattctgtagccttaagaaaatgtatattgtctctttaaactactcttaagtacttcatatcctttctagggaatagtgatttctttgagattaggtaattttttaacaacctggaaaatattttgaattttttctataccggcctgtcctgagtcattgtggtaaagattcttggctctttcagaagtgtgtagcttattataatttagttttttaaaaaggtaattttacaatgttagttcaatatggctaatgtacaccttctattgtatagtgtgcacaaggcattatattctacagagatttttaggagttggcagaagttgttgaaagaagttgaaataactaatacttgattttcaaagcaattgatatttatgtaaaatgacaaagggtgtgtatgctggataagtctgtcatcttctaaatcagttgccaggatggctgatgatcacactgggctctgccagtctcctcaggacctcttctgatcaaaaataaagtcaggatctcagtgttaataatttttaattgtcttttggtttttaaagaacatgtatatagttggcgatttttaatattctgttatgtccagtagttattagagcatgcattcttgtacaaggataattctaataggtaaccatgcaggtgagtgtttatggatcacagatatattaagattgtaatttttatattttggcttctctagattgtagagtatgatataacaattatttttgtccttaatagcaatattttactgtaatttttactttaggctcctggatttggatttggaattgcaatatctggtggacgagataatcctcattttcagagtggggaaacgtcaatagtgatttcagatgtgctgaaaggaggaccagctgaaggacagctacagtaagagtgctgcttatcgtgggcactgtg

SEQ ID NO: 78486 - DNA, 1022 bp, Homo sapiens
cgtgaacccaggaggcagagcttgcagtgagccgagatcatgccactgcactccagcctgggtgacagaggcgagactccctctcaaaaaaaaaaaaaaatttttttttctgataagatatagtcaactttttaatgtttcattattaaatggtgaaggaaatcattatctaatactaaccttaactttcataaacctgcaacatggccttcctttgtttgaaatgtattgataggtagcatatttaaatcagatacatatgattaaacatataaaataacttcttaccttatgactagtggcgatgtcaatgatttggtattttttttatcatattacatttatttttattaagacttttattgtttttattggtataatttacatacagtgaaattgacccttacagttctgagttttgacaagcatatacagtcatgtaaccaccacaattaaaatacaagacaacttcaatacaaaaactttctcttaacacctatttttaatcatcccggtcccctcacgtccacttaaccaatgatatggtttctttttgtacattcttgccttttctagaatgtcatgtaaatggactcatacaacatgtagccttttgaggctgacttcttacacttagcctaatgcatttgggatttctccatgatgttactctatcagtagtttctcttattgcatagtagcatttcattgtatgaatgtataattgtgtgttcgttctccagttgtggtatatttgtgttttgcagtttccattgattatgaacaaacctctagtgtacaggtttttgtatgaacataactttttatttcttttgggtaaatacttaggaaaagacttgctgtgggtcccatggtaattatttaagttttaaagaaatggtcaaattctctgtaccatctaacaccaccactggcagtgtataagagctcccgttgttgcgtatcctcatcagcacttgatatgggttgagcatcccagatctgaaatctaaaatgcaaaa

SEQ ID NO: 78487 - DNA, 2007 bp, Homo sapiens
ttatgtgtggcccaagacaattcttcttctttcaagtgtggcccagagaagccaaaagattggacacccctgccttagataataatttattttcggccgggcgcggtggctcacgcctgtaatcccagcactttgggaggccgaggcgggcggatcaggaggtcaggagatcgagaccatcccggctaaaacggtgaaaccccgtctgtactaaaaatacaaaaaattagccgggcgtagtggcgggcgcctgtagtcccagctacttgggaggctgaggcaggagaatggcgtgaacccgggaggcggagcttgcagtgagccgagatcccgccactgcactccagcctgggcgacagagcgagactccgtctcaaaaaaaaaaaaaaaataataatttattttcctctctattgagaggctcatgacaggaggtaaaactgaagtacgctataatttgggcaggacctgtattggagctcttactgcttttattttatgatgattcttgggggagtttgggagattgttcttttttgtttttgtttcttgtgtgtatctacgtgtgtgatacatatactagaaaagctgttctttttcttttggttataaatgaagcttgagaagtaattctgtagcaaaactgaaactaggtagagtagtcatgtttgtgacgttaaagcagccatttgccaaacctattaatggttttatctgttttcctgtgacatgtatatttataattactgtgttcagaggcatttaactttcccttcgtttgtaaaacataagagatgcttttaaatgtttacgtgccattagatattttaagataataccgctccaacttttattcttttctaagtataaagttgcagaattagcttgaatactgatttcagcttgcatgaaatgaatatagagcagctgtccaaattaagttaaaaacaaaggaagttcctgtgtgtcgtttcctgtctcttaaaagcaaacaaaaaactttccataattattaaggtcctttcagagtgtctctaatattaactgtgaattttggtatttcagtgtgctgaattgttggatgttcttgctcaccttattaaggacattttcttaaaaggtaaatgatttgtttttcttttcctttatcagagcacagcaatggaggaaacagctatatgggaacaacatacagtgacgcttcacagggtaagtttgtgttgcagtaagtaatctgtgtataactcaggatactggcagctttgaaaacaatagaggaaagccagatgtcaggaagccagagggaggaggaaactttttctatattcttttgtttaaaattagagttacaataattttttattaaggtcaaaagtgagcatgattactttttcatatatccttttgagtatttgctgtttttattcctgacttaaaaagtgatttgcttttaaaattttgagtgatcagataaaagactctgtacattagtataaattattataaactgcttcaacctttctgagtatatatgcatccattgtgggagtgaagtttgaaattaaaccaggttgtatgcataataaaatcctaaaagatacttaattgatttcaaacatgttgacccaagctgttgcttaaacaattgcagatgcgagaagagagatgagtagtagtaagagatgagttcttacttggtgggactaagaactttgtccgaagtgagactgctatcaatttgaattctggttctgcctttctcttgctttagaaatggggaagtgattcagtcaccttcgaaaaccttggttttcacaagtttaaaatggaacaagttgacaccagttcatgctttaccaatttgtaaagttaagtgtctctcaaaattctctttcctctctttcaagagagctgaatctactgattactccctttcttagagaatgtatggaaagagagaatatttaaatactggccttgcactttacacttactatttctaccagc

SEQ ID NO: 78488 - DNA, 1041 bp, Homo sapiens
tatgaatatgctgctgtttagattatctttgctttcttgatagacatttgtttccaggattttgttcttggaatagtagcctttttatatctgtacacatatattactgtatatcagattcttaaaaatggaattaccgaggcaaaggctatgtgcagtttaaattctgatatatactactaaatgtttctctaaaaagactacctagaaataaatataacaaatattggtgagctactggaatcttaatgaaggacataaagtgagatctgaataaacgagatgaaacaatgtattttctggatggagacagtcactgttgtagaatttactaattttccccaagtcagtgtcttctagtgttgtattgtagaaaacttgacatattgataagaaaacctacatgataaaatgatagcgacaaaattttggaaaaagaaggccgtatcaggaaacttgttagaaattcacagtcatttaaagcagcccgtcagttcaggaaccagggaggtccagaaacatctgtgcatttatgggcttttagtaattatgatcatcagtattattgcatgtcaggtattgttctaagtgctcaatttatttaattctcacagtaaccctatgaagtgaactattatctctactttttggtgaagaaattgaaacacagagatacgataacttttaagttcatttagccagcaaggtggaaaactacgaatatgtggtaaaaaataatattgtagactattggagaaagtggcttgttcaatgtatggtgctaggactattggttatccattttttaaaaatgttttctgcctcataggctaaaaaaaatcaaaggaaatctaaatgacaaagagcaataaaaattctaaaatagaagaaaatgtagaatactacttaaaaatatgtatgtacctagattgaaaagaatcctccgtgcatgatactaaagaagtaataaaggcgggtgggtcacttgaggtcaggagttcgaggccagcctggccaacatggtgaaaccccgtctctact

SEQ ID NO: 78489 - DNA, 1082 bp, Homo sapiens
ttgcacatgtatgcttacaatataagtacctctctaaccctacagcatactagagtttgtaagagaaaaaacaagcagagctgactgtgttttggactggtaatgaaatggtatcaaggagtcttccagctgacagcctcataggccttcctgcagtcaccattgtgtcccccgctgcctacgaggtttcttcttccacagcccaccctgtgtaaatgcctggccttccttctgacagctgtgtgctgtgtgttcagacctgtactccttcaaaatacctcagaaaatatggaagtatttctaaggccttccattcaaagaagaggcataggcgctctgtaattgtttagtaacttttttttgtttatacttctcatgtcttatggcaataaatctattttaatgcttttgtacagcttggctagccaatggttcagttatctgttgctttgcaagaaactttgtggattgttgatcattctccctcttggttctgtgagtgggcagttctccctcgggtctctcttggggctgcagtccgatgacgttagggctggactcacgggaatgcccagtggggctgtatgcccaagacggctttttcacgtgcagcttggcgcctcagctgggtggccgggccagctggggccgtctcctacgtgactaacgcacttcctcataggaaggcctctccaggcggttgcgcctctcccacggcaagctttcccagaggcgcaggtggcagcagcaaggcttctgatgagcaagtctcagaaagccaatggcttcgcttctcctacgttcacagagagggggctacacgggcaaatcatagcaggttttgcccacgagggcatggtgggagtgaggggagctggaaggagatgtcatttttgattagctaccacagccggaaaaaccaactgtatatattttcccattttataacgtttgcacgtttattaatatgtctaattttatagttactctcagaatttttgaggtctcttttatctcacttcctgctttgcatacgtttttaggactgtgtgggtaatatcccaaaagttggttaaatgagc

SEQ ID NO: 78490 - DNA, 1344 bp, Homo sapiens
tgatttcttcctctatctataccacagttagaacaaacttcaaactaatgatactgggcgcgtagtctatattttttccaagcagttgaatctatactttcaccaccaagaggaagagaatgcagtggaaagttttaaaaagtgcatttctttatgaactatttctgttagtttttaattttccagttttctcacaaaataaactttcaaagttcttcatgattcaaattaaagaataaaatatgatagtaaaaatttcatttactatctggattttttcccctcttccaatttgtggaaatagagttgcattcagggttgatgacatgaactagagggttaatatttgtggcttcttttttcatattattctaaatgtttgtagtccttttatttcatcttactaagaaaataaaagcaaatgcagaattacgggctggtacaaagtatatgagaacagtatgaaaatacctgaatcataattgatgatgatgcagacatgtcatcaattgagtaatgttattaaaagtgacactttttttttttttttttgagatagagtctcgctctgttgcccaggctggaatgcagtggtgcaatcttggctcactgcatccttcacctcccaggttcaagcgattctcctgcctcagcctcctgagtagctgggattacaggcgcccgccaccaagctggctaatttttgtatttttagtagagatggggtttcaccatgttggccaggctggtcttgaactcctgacctcaggtgatccacccgccttggcctcacaaagtgttgggattacaggtgtgagccatggtgcctagtcagacgtgacacttgtttactgccaaggatcattggcagaacacaccagaagcatctgtggttttttggatctatggatagagaaggccccaaggagtggggatcaggacttgcctcctcaggcagctatacttttgcacaattttgctttggaggtgtacaaggtaatgttatattgctgactagagttgactggaccaaattataattgtgaaagcaggaacagtcaaacaaataactatgtagttgcagaatatttacaagaaactgtgtacacattgcgatcttcaggatgtcgtgcctacatctcaggattgtggtgttagaagagacacagtctctatcttcaacaataagtgatcatcattcagtagcgggtaagcgttccgtcaatgcccttctctatcacctttttcccagctgtgccattctcatcgattttcttcttgagaagtctagccactactgtcctctttatcacctttttcccagctgtgccagtcctcatcgat

SEQ ID NO: 78491 - DNA, 1060 bp, Homo sapiens
tctaaaaccagtgagctatagacaccttcaaggtcgtatccttttgtttacagctgagctagcatagctgtgtgtcctgataggacgagacagttcttaaagaaagcagaaaacaacaataatgaatactttatggaccttaatcttaaatgtcttctatccttgtcaattctctaaaggggttgaaaaatacaccatgaaaggtggtggtggagggggggttctgtgtgcgtatgtgcacacgtgcatgtgtgtgtattggcaggtggaagagtggattaagggtagggcttgaaaggaaatggctctatgatgtcacagctcactgttttgtagtggtttatcctaattgtttagttaatactgtataatgacatactaaaattaacttgagttagtttttaatctaatttatgatgaacatatattaacatttaggtacatttgctctataaatgtgggatccataagaaagaatcccatctttgaattgcaaccaaatattttagaacaagtaggtcaggttgtatggagctaatacaacttgagcaaaacttctaggactagaggaaattgtgtttgtgcaacaacgtttgcgtagggctttaaaattcatgaagctctggtagtttccattttggctttctattgtaggaagtaaatgtaattttaatagtacctttttttttcttttttaattaaggatgatgttagcctccagtgaattaaatgtaaaggagctcattacccattcaggaaatccagttctgtcttctcaagttgctctgttatgttgaatcctgtgtgtaaagatcaagtgccaacccagagcatttcatagggcttctgagaccttacaaaaatgctagagatatattatatactaatatattgatattttaagacactgaagaaagagctatgatctttttttttttttttttttgagacagagtcttgctcttgtcgcacaggctggagtacagtggcgcaatctcactgcaacctccacctcccgagttcaggtgattttgctgcctcagcctcccgagtaactggg

SEQ ID NO: 78492 - DNA, 1021 bp, Homo sapiens
attcatgtctttaggggttgtagcgtttagatacctagaaaagactacttgatgctatgtaagcctaaaagttctgcctaactattagggagcagttcgttagtattctttgggtctacaacagcatcaggaaatacacttgctattaattcagtttttttgttgttgtttttatttgtttgtttgtttgaggcagagtctccctctgtcccccaggctggagtgcaacggcccgatctcggctcactgcaagctccacctcctgggttcatgccattctccagccttagcctcccgagtagctgggactacaggcgcccgccaccacgcctggctaattttttgtacttttagtagaaacggggtttcaccgtgttagccaggatggtctcgatctcctgaccttgtgatctgcccgcctcagcctcccaaagtgctgggattacaggcgtgagccaccgcgcccagcctattaattcagttttttcagaagttacagcttttatttctgcttgttctgagctttccctttctgcatctttggtaggctctgcacacattattgttactcattcaaaactgaatgtgaagttaagggatgtaaagtgaatacaggaaaaatttcctaaatttttattattcaaatttgcattttgtgtagaaatacatataatacttataaactcacttgagtcacaaagtattaacatctcgttaaggcaaaatgaatctatttggtcctcgggaagaaagttcaatttcttttctttcttttttttttttttttttttttttttttgagacggagtcccgctctttcacccaggccggagtgcagtggcgccatctcggctcactgcaagctccgcctcccgggttcacgccattctcctgcctcagcctcccaagtagctgggactacaggcgcctgccaccacgcccggctaatttgttgtatttttcagtagagacggggtttcaccgtgttcgccaggatggtctcgatctcctgacctcgtga

SEQ ID NO: 78493 - DNA, 1039 bp, Homo sapiens
actagaatgtatgttcatgtggccgttctcggtgatgttctcggttagaagctgcgtgtgttttttcggtgatttcactagaatgtgcgttcgtgtgcctgttctctgtgatgttctcgggtaaggggtgctcttttagtctgtcatcccaagtctgttttgcaggatgttctcttgaattgcagtctgcagtgtttgttctgtagcattgcttagcagtcttttctagggacgcttggtaactctccatgcgttgcatacctcatgccttttagagttagtgttggttactttctctttcaagtactttttacctctgtttattttttaaaaacttcctctttttttcctatttgtcttaaggtagcatctactgtgtttatttgattttacactctgttttagtctccattggaatgtagttttgttttcattgtaattctgtcttcagctttatttagtttcttcattttcctaagtctgatttatgtggttctttcacgtcttgtatcatttttctaatttcactcaatttcttttgagatgatagattatagggttgacatgttttgggggcatatctttctggcctgcttttattgcctatagggatgttattttgttccttattctcactttgttttggagacacagtcttgctctgtcacccaggctgcagtgcagtggcatgattctgactcactgcagcctcgacctcccaggctcaagccatccttccccatcagccttctgagaagctgggactacaggcttgtgccaccacgcttggctaacttatttttattttttgtggagacgagtctctctatgttgcccagtcttgtctcaaactcctgggctcaagcgatcctcccagctgggcctcccaaagtgttgagaattacaggtgtgagccaccgtgcccagcctattccctttttctaacaataactttttattgtatttggtcttatacttgtatcttgctcatttttatgtgaaatcatttttcttgaacttttagaatgaggtgagattc

SEQ ID NO: 78494 - DNA, 1028 bp, Homo sapiens
aacttgccattttcccttcagtggttaatgcttttggtctaaaataagagagctattaaccctagatgcaaagattttctcctatgttttctgaagtttggtagtttcagttttgcatttaagtatataatccattttttagttaatttttgtaaaaatgtgaggttcaggctgaggttcaattttttggcctatggatgtccagttgcaccatcaccatttactgaaaaggctatccttcctctattgagctgcttttgcaactttgtcaaagatcaactggtttttgctcattttataattgcgttgcttaatttcttattgttgaattttaagagtcatttgtatattttgaacacaagtcttttgtgatttgaaaatatattctcagtctatgacttgccatttcagaatggtaatgatgtatttttctattcctaattaatagtttaaaaaatctttttatttcagtcgggtaaaagttccagaaatgtgaagtacaaagatttttttgatccagttgaaagtgatgaagacatagcaagtgatcatgatgatgatctgggttcaaacaagtggatgaaattgctgaagaagcagcagaagaactaagcatttctgaaatgtgagtatttgaaccatcctttacattgtgagctggaattgtccaatcatgtattggtacttgtggttttcacatatgtttgttttaagaagttagattctctcctatcagatattctcaagatagccagaggaaagtctgtggatttaaagggacattagagatcatttaatgaagaaaaatattactggcagtagcaatcaaacatttcttgccaggaaccttgatttggttttgtaccccaaaaatcctgttatttttgtgagattgatggtttgtattatcaattgatgaataatttattttctatatattggacacttttgttctgtttcttacatagcatgtcacttaaatgataccttctcttccgtaatacctgaatgattttggaacttctgag

SEQ ID NO: 78495 - DNA, 1001 bp, Homo sapiens
gttctggtgttttttttttttttccatgtcttaataaacaaacaaacaaaaagccctcttagccatttagaataagcatttggggccaaggggagcagagagaagtatgaagtttactttttctcttcagtagaataaaaattgctgtccattttttcaatgtgatttgtcagaataaatctttaacgtattacatgtaaataaaagaaaaaaaagtccctacaatccaaatggatatttggataattttacgaagtctatattaacactttagttctatcagcccacaataaagtcccatatccatgaagcagttgctaccctttactcactagccccagccccaacaatccccagtctgtgtcctatctttgtggatttgcctattttgcatatttgatataaatggagccttacaatacgcagcctttcatttctgacttcttgcatttagcatcatgttttcaagactgtagcatttgcttgtgcttcatttctttcttatggttgtatggtattccattgcgggaatgtaccatgctttatctgttcatccattgatggccattcaggctgtttccaccttttgactgttaatcgtgctgtgcacatgtatttgtttgagtacctgcttttaattctcttggttttacacctcggagtggttgctgggtcagatggtaattctctgtgtagctttttttttttttgagacggagtctcgctctgtcacccaggctagagtgcagtggtgcgatctcggctcactgcaacctccgcctcctgggttcacaccattctcctgcctcagcctcccgagaagctgggactacaggcacccgccaccacgcctggctaatttttatacttttagtagagacggggtttcaccatgttggccagaatggttttgatctcttgaacttgtgatccacccgcctcggcctcccagagtgctggtattacaggcgtgagccaccacgaccagccccaagctctat

SEQ ID NO: 78496 - DNA, 1049 bp, Homo sapiens
aataccattatttaatctaaatcatcactagaataaaaaattgagaattgcttcatgttgactaggcaatacttttctgaaagttttcctggtatttgaagcactcatgaccagggtaaaccccaacctactgtgcagccgaggaaggaagcacttgtatggagccaaaccatgtgtggaaccatttggagatgtacattcatttactcctgtgtatccctgggtgagctctcagccccagagcagttaagtaatgctccagtgtttaaaatagtgaatgtcatttctctttattttagatgaaaataatttgtaaaatctgacatccaaatgcttaaaaagctaaaagttatttctacattgtacatttttcagagccaaagccttggctggacagtcagtacgaatctgtaaaggccccagggctgtgttttcccgcatcttgctactgttttcgttgaccgactcaatggaagatgaagacgccgcttgtggaggtcagggacagctttcaacagtcctgttggtcaacctcggccgaatggagtttcctagttacaccatcaatcggaaaacccacatcttccaagacagagatgatcttatcaggtaagatgatgttagctcactataatgtctatatgtgtatttcacaatttagtaaaaggttttgttatttttttccagccaaagtagaaacattaagtccacagccaaaacagtttttaatctttttttgccccacttgtatacatttctatgactatagggaaaatgtagaagtgtgctgagattatggttgccaaaatccaaggaattttgagttagaactacaaaaacttctctggtttatgtttccaagtacctttggaagggagtattttttgtttgtttgtttgtcttaatttgagacaggatttcgcccaggctggagtgcggtggcatgatcaccgctcactgtagcctcaacctcctgggcccaagtgatcctcccacctcagcctcccaagtagctgggaccacaggcacatgccaccacactcagctaa

SEQ ID NO: 78497 - DNA, 1096 bp, Homo sapiens
aaattcattgatattaaaaccaaagccagatccagctcagcaaaccgacagccagaacagtgatacggagcagtattttagagaatggttttccaaacccgccaacctgcacggtgttattctgccacgtgtctctggaacacacataaaactgtggaaactgtgctacttccgctgggttcccgaggcccagatcagcctgggtggctccatcacagcctttcacaagctctccctcctggctgatgaagtcgacgtactgagcaggatgctgcggcaacagcgcagtggccccctggaggcctgctatggggagctgggccagagcaggatgtacttcaacgccagcggccctcaccacaccgacacctcggggacaccggagtttctctcctcctcatttccattttctcctgtagggaatctgtgcagacgaagcattttaggaacaccattaagcaaatttttaagtggggccaaaatatggttgtctactgagacattagcaaatgaagactaaaatagggtgttttctgaacattttgagggaagctgtcaacttttttcctctgaattaacattgctaacctaggcgtttgaatctctaataactttatatgtaagaataatagttggaatttgcactaatatttaaaaacatgttgaatcatgcttctttcacacttattttaagagagatgtaaattttgttcctgtcctctttctgtcattacaggtctggctcttgtaaccgtgatcaaactgttcatgttgtctgctacatttttgtctccatccatttttcctaccacctcctgaaggctatctgatagtcagtcacattagcagccccaggcagcagacaacaggaaagttaggaaatttgtgtttcgtgtcatttttaggagcatctgataaaacctccagcaggttttaggaagtattcatgtatttttctggttactttctgtcgtctctaattgaactcacctgatgaaggttcagtgttctggggccagaatttatgattttagatcaccttctttggaaccttagatcactgtgttttgaaatcatgagtttgcttttaacttca

SEQ ID NO: 78498 - DNA, 1050 bp, Homo sapiens
ggggcacctgaggtcaggagttcaagagcagcctagccaacatggtgaaaccctgtctctattaaaaatacaaaaattagctggacatggtgcatggtggcaggtgcctgtaatcccagctactcaagaggctgaggcaggagaatagcttgaacccggggggcggaggttgcagtcagccgagatcatgccagtgcattccagcctgggcgacagaacgagactccgtcaaaaaaaaaaaaaggagttatttttaaatggaaagggcaagacagttctcggagagacttggaaggtgaagcaggttagagacagcacatcagagtatgcatgtgacaggaggctcagagaagagggaatgctggggaaaatgtgactgttaaaattcataatgttgctttttcctacagcaaacaaaattaatggaattccctcaggagatggaggaggaggaggaggaggaggtaatggagctggtggtggcagcagccagaaaactccactctttgaaacttactcggattgggacagagaaatcaagaggacaggtgcttccgggtggagagtttgttctattaacgagggttacatgatatccacttggtaagtacaattttagcaatgttatatatggctggaagtcacttccctatgaataatcatcaaactctgttgtcattgatgactttcaagttgtggttaatggaatatttgtttttaataatgttttaataaatattttattttaaagatcaaggcttattaatataaattacggtatcccttaaaagaagttgatagtaattccttactgtcatcagtagtcagtgtttattgcattatatcttgtaactggtgttttacagttggtttgttcatatcaggatctaaagtcttcacattgaatttgcttaatatgtctcttaggccttttaatctacaacagtctcctcccacctcttttttacctactatttgttgacaaaccaggtcatttgttccctagaattttccacattgtagatattgcttgttttatccccagggtgt

SEQ ID NO: 78499 - DNA, 2206 bp, Homo sapiens
gtaagtttacttttgccgtttttttgagtcccgggaacataaagagggatatgttaataaattattttaaaaggaagatataaaatgtataacttttcatagtttctaggttttttgtcctctttttaattaaaattaatcattaaatgtgtctagatggtggttttatgcaaataatcatttaaaatatcttccaaagcaaagttaaaaccaacccccaagttctaggaattacaagtatgaaacattctagacaagcagagctcaaatgttgggtgaccttccaattattttcactaagaatttgtattaaagggtgagtaacaaataactgttacgcattttattttctctatttttttttcttttttagtaaacgaccacaagaggaagcagaaagtcctaggccccaaccagaaactgaaatttaatccaacagagttaattatttattgtaaagatttcagaattgtcagatttcgctttgatgaatcaggtcccgaaagtgctaaaaaggtaatactgttaaggtttatcaagttctgggttctgtactgtgtttactgatttcaattccgtatggcagttttcatttctcaattgctcagatgttttttaggggaagttatcagacatcttcttaagtaaagtcaaagccaagaatattaatagaactattttcttggattggtttatggctgttttaaagtgttctatataactttttatcagcttctcaaatattaaagactcttacgtggaaattagcatttttttacataaagatcattacttgtcagtttcttggttaaaaggttgaaaagttggtgatatactgtaattaaggtttggttaggcttttaattcagtactgcagaactttaccaacaaactgtaagctagacttatgttacataagatttaggtaaatatataattacgggaaaggcctagtaattattagtggtttaaagaaatattatgaattgagtgacactcaacaggggcaacacaaagctagtaactttttaactgccttatttttccacggccttccagataatgacttattaccctacttgtaagagtcaagggcatgttttccatgttttgctttgccagaggagtgaagctggtagacctaatatggcccccgttccagtctgtgctgcagcaaatgcagagtcacagactttccagtaggaagcttgcgcgtgtgtatgggaatagggcaacagtatcttagtataataggacgtggctttctctcagaatggaggcagtctttgcaccaccaagcaatgagtgcctttgttttccatggttagtcaactgactgcagtaaatcttctgttgataccaaaacaaggctggcaaaaatactgtaaggcagctgtcttcatatactttggtgaagaggtggtagatttgtttttagattgagaaccaacagtttcttcacaggaaggcaagcaggagatgaatatatgaaaatacatctgaaaatatgtgactgtctagcagagtagagtggttgtaggctcctctatgggtaaaagttttcaaatggtctgtataaccatctctcagcaagctgcattattgaaaattcaactagataactcttaaagcctctttcacctgttcgattgtgctgtttgtgattttggcattttactaatttaaagtgcctattatatagaaggactttagaattcatgatgtattagactgtacataaaatatttcagacaggttaattcctcaagcttatttatatttgtaatttaattgatcaaagcatcaaagacctgcttatgaaaaccttaagatgtgtagcatctcaagattagggacatcacagaacttgctagattgagttaggacagcatattcctaaggaagaaattgatgcaattgaccggatctctttcggaaagttcaattctccctcttttactgtatttttcagtttacactattttaatgagtggaaataataattatttggcctagttcttgaaccatctgtagtacttgttggtcatttttcatgttgaggcagtgtgctaaattttgcaagtagaaagaagggtaagatgcagtttcttgccctagagaacttaaatctagtgaagaagataaagcatgaacaaatgaaaagtaatggtacaaagtggcagcataaaatcaactacacaaatag

SEQ ID NO: 78500 - DNA, 1053 bp, Homo sapiens
taaaacacaaatattccatcaagtaatactctgaaggagcaggtgtagtttatttcttctccagaaagtcttccagcagataaataatgagaggtagtatggcataggaaaaaagtacactgaagtcagcctttctggttcaaccagctcagacccctgagctatttttgcctcagttttacgccttggagaacaatgccttgtcattactattcactttatgaccatacagtgcctggcacctggtgggcaattggtgaatgttttcactatcctcatccttgccctcatgaaacactccttctaggtcccacaaagaccgttggtattttatgacaaagtaccttacaaatatttttctttttttaaaggagaaattgtcgtaaatgaagtcaattttgtgagaaaatgcattgcaacagacacaagccagtacgatttgtggggaaagctgatatgcagtaacttcaaaatctcctttattacagatgacccaatgccattacaggtgtgttttattagtacactgtttcattctatcaggctttcaactctaagtggtacatattattatataaaacataggtatggaaaagttatagtagaagtattaggtaatgcaatgtttgggataaattatattaagatttaaagtaaagtttaagaagaatgttggaacttgctagaggagtattagtgagaggattgtaagtcaccttgctttatttatcctctgtgatcgttcattatatgtccttttcattaaggaagttattccctctgttgcagatcttttaacctgcttataaaaatgacataaagagaaaaggttgtttgctaaatgattttataaatgccacacattttagtgatttcataggtttttttgttgttgggtttttgatttttttgttttgagcctggatctcgctctgtcttgtctcccaggctggagtgcagtggcatgatgtcggctcactgcaacctctgtctgcttcctgggctcaagctatcctgccacctcagcctcctgagtagctgggactacaggtg

SEQ ID NO: 78501 - DNA, 1131 bp, Homo sapiens
tggcatgaactcgggaggcggagcttgcagtgagccgagatcctgccactgcagtccagcctgggcggcagagtgagacaccgtctcaaaaaaaaaaaaaacctgaaatcaaatactagtttgtgtggctactatcagcattgcaaaatctgactcattacttaaagccaaatcggtaaaataattagaattttgtaggtaaaaattgaacaaatgtggaaactttaaaattttaaatattatatagggacaaaatattaaaaacaccaaactttggttccatatgaaagtttaaaaagtgttttttaaactttactatgggagtcataaatattttcccttgattttgttagtgcttttcactcaacagtgtgtactaattaatcatttgtacttttcctcagagtgaacagtagaattactaagtaacccttgctccctgtgtgctctgttttagtcttagtcactctgagcatttaaaatgcagggacgaggaaacagtactcatcttgaatgagtgcctatgagctattgaactttgacttcgtttactctgaacaggcctggttcttaggctttgattcctccactctgcatactatgatttcacactcagaaacaacatggtcttagctgtaaatgtcagtgcttgctttttaattttttaaaattttttttaaatttttttttttttttttttgagacagagtctcactcttacttgggctggagtgcagtggcgtgatctcggctcactgcaacctctgcctcccaggttcaagcgattctcctgcctctgtctcccaagtagctgggattacaggagcccaccaccacacctggctaatttttcgtatttttagtagaaatggggtttctccatgttggccaggctggtcttgaactcctgccctcaggtgatccgcccgccttggcctcccaaagtgctgggattacaggcgtgagccactgcgcctggccacttttttaaaattagcttttaaatttaagatatgtgctaagaaaaggtgttactaagtatgcataaacttgaagaactttctcactgagggttatcaattctataaaatggctaaaagtcagagttttctggggaagttgtaaaccaag

SEQ ID NO: 78502 - DNA, 1050 bp, Homo sapiens
cccatcttttcttctaattcttccctttctccatttgcagttgtagttactaagggacatgtgtttatgggcaacaacagagaagaagcaagaaggatgaagagcagatgaagatagcaatgttctagaagacattctaggcataaagcattgcatggagtaggaaaaagccttcccagggatgggaagaaaggaagggaaagaggctttcttcgtcctaattaagcactcgtgaagtgcttaattggagacagcaatataatgagccagggtgaacttggcccacaagccaagacagtgagagacaaatgttctccttactcagatgatcgacatgctgtactttgtggtcatcatgctggtcgtgctcatgagtttcggagtagcccgtcaagccattctgcatccagaggagaagccctcttggaaactggcccgaaacatcttctacatgccctactggatgatctatggagaggtgtttgcagaccagatagaccgtaagagtagaattcatagtaagattctcttccctgcttctgaggcagatgatcagttccaaattaatggaagaacatgtattaatttggaaataaaaaatatttgtcactccaccataggcatcaaattattttacaaagaaataagaacaaattatggaacatggattttcagacatcagtcatttcttttattctaaaaataattcactagaattcccttgagctggacctgatggacatcgtgtcacatgaatgcagttctaatgccaatagcctagtttttcttcaacccagtatctccccaccccaggataaggctgatagtgttttccagtagaatgaactagtgaacagagcagagtaactgatacttcccaccatcctcttcttaaagccatcagagcccattttccacatagctacccatttcatacccatttcatcttcactactagagtgctattttgtattatcaaaaataatctggatgttagtagaggaaatgggctatgatcctgcacagatttctggggaatgtaggcccagc

SEQ ID NO: 78503 - DNA, 1042 bp, Homo sapiens
atctccagggtccctgagtcactgggttcctgttctgtccctcccaaggagaccatgcacagctggcatgggaagaggctgcctccaccttcctccagggaagctctttcagctcggagcctttgtggtcattcagggcaagagcaaagccagcaatgcttagttctaggccagcagcccaagggaagcctgtgctcaccacccagcacctgccaaaccctggcggtccaggcgtggagtgaaaaatcattccggtttcttgcctttccaggaacaaacgtatctgctccagatcagctgagcttggcactggcttggaaccgcgtggacatagcacgaagccagatctttgtctttgggccccactggccggtgaaactgttttttttcgattcatatcattgatcttgactttgtacaagtgacctattagtatgttctcccttgtgacatggaattcaggaaattatgtggggtttctgatgatatgatatgtaatctattaggctcattagaagatgtcactgtttaacttcaaagaaccaacaagaagtaattccacattcaaaccagtactcctgaagaaattaatcaccaaatattttatcgttgctgatgaaagtgggtttttacctttttaaagaaaaagaagaagaaataaaatagcttattaaaatttaatgcaatgcttccatccagggcaatgatttttcaaactatgttccatgaaaccctggaggcctagagaactctgtgtgtgtgtgtgtttatgtgtgtgtgtctatgtgtgtgtctgtatgtgtgtatagggtgtctgtgtgcatgtgatatgtggtgtgcctgtatgtggtatgattttgtgtaggtgagtaatgtgtgtggccatgggtggtatagtgtgtatgtgggtgtcattgggagggtattgtgtgtgtgtgatatgggatgagcagtgtgtgtggagtgttgaggagtactaatgtgtgtgtgtgacatggggatgagcgtgtgtgtgtgtgaacacacataagtctgcatgata

SEQ ID NO: 78504 - DNA, 1201 bp, Homo sapiens
atcctagcactttgggaggccaaggcaggtggatcacttgagcccaggtgtttgagaccagcctgggcaacatggcaagacttcatctctaccaaaaattagccaggtgtggtggcatgtgcccatagtcccagctactcaggaggctgaggtgggaggattgcctgagctgagagggaggttgaggctgcagtgagccatgatcatgccactgcactccagcttgggggacagagtgtgattctgtctcaaaaaagaaaaaagaaaagaaaagaaaaagaaaattgttatcacatgcctgaattccttccagccagatagaacatcccccaagtcgtaatgtttttactcttccccatacttcaggagttaaaacgactgggtggacagtgcagggcacaggtggtatgggcgaatgtggtttgtgttgcaggactggggcagggcgtgcccctcgtgggtctcgtggtggaggggggccctaacgtggtgtccatcgtcttggaatacctgcaagaagagcctcccatccctgtggtgatttgtgatggcagcggacgtgcctcggacatcctgtcctttgcgcacaagtactgtgaagaaggcgggtaggatttctgacgcgcgaggaagggcgggttcgtaactccctctttgtcgggccaaggagaaaatctaaagtggtctgcttagacattccaaacgtgtttaaatcaggaagatttgctagatctcctctcccatttcctcaggtcagcatccaggggaaccatcagaggcagggtgttcctgatggaattctctctccctcatttccaacttcatttgcccttagaaagtttgcaacaaagctggaatttaggacaagtgagaatacgatgtttgactatggttactttttgtctcctgtgtcaggatatcctcccacagcaaagtctcaaatcaaagacagagatatgtctgactcattcatatatagatttaacttgccttgttttgttctcttgcattttctttgaacagaataataaatgagtccctcagggagcagcttctagttaccattcagaaaacatttaattataataaggcacaatcacatcagctgtttgcaattataatggagtgcatgaagaagaaagaactcgtaagtgtcttgaatttatttccaaacaagctctgtggagagaattatgtttcc

SEQ ID NO: 78505 - DNA, 2487 bp, Homo sapiens
ttcccttgttggtcttaacatccaagtcctgcaggtctgatttgcgctgtgcactttgtcaggtaacaagagtgtaccagaccatgtccaaccctctaagtaagctctctgtgctcaacaactcccacacccacttcatcctggctgacaatggcaccctgggcaagtatggcgccgaggtgaagctgcgaaggctgctggaaaagcacatctccctgcagaagatcaacacaagtaagtgctggcaaaggcacgcagtcctcctgggctgatgccatcacagtggaaacaaggctgagaaggagattgattgcccaaggggattagaagattaaccttgcttcttgttaggtcaacagaaaatgactcacctagatgtcttaccttagccacctaccaaatcacattcactgggctacatggggatgctttgccccaggttcacaagttagcacgaaataaccctcagtgctcgccatggtgatggccttgcccaccctgttgcccagtggttcttgttccctgtaattagttgttattttttaagtgttttaacaggaaaacaatttctcaaagatttagtaggattctttctatttgctgataagtattatgtgattattaaatatctctgtaatgctgggcctttcatgtagactaagatggccaggtggggacatatctggagagggctgcaggagccatctgctcctgaaggggcatcatccttgctggtcctgagggggagctgtcactgtcagacgaaagctgaggtcgaactagagagaaagacgcaaacctcaaccagaagaaacaatgataacaactggttagaattacaataactggtataatctcttggagcatgtttatactccagtaattcttaacgtcaaacaattgttaaatgatctgaaagagcagtttgtttttcccattactggcaagatttttgtgggagaccatctagtcctggcgaatggtcattgggaatcatcatgtatgggactgtgatgctgcagagtgggtagaatggggatggcctactaggaaaagttgtagatttccgagaatcagatctcgaagaatacattggtcgatgactgaatgttttttgttctcacatctctaatttttctggacttgtaagtttttacaacaccccatttcacctggccatgtgacttgtgggcttccctttgtcatccttcgcctagggctctgagcagggcagggacagcaaaggggtgctcagttgtcacttcccacagcacggagcttcgaggactccagcctaagccaagaagaacctgttctactctgttgctcgaaaagaaggtgatttggccaccatattcctaaagattgaaaatatcaatccttgcttgggttggaaatctcaaaggcggagtccaggatatcttagttcatttttccaatatctcctggtcagggctttgcacaaagcagaccctcaatgcatgtctgctgaaatgaacttagctgtaattactctggtggacacagcagagttattcaacatatgtaagagtccctgactgtagaaacacctcatggaagcaaattagaaactctgaaatggctcatttgaaattctccaatcttctcttaaccaatgctggcagatttttatctgaagcccttcagagctgagaccaacgatacttccacttgcctttagttaatatcgatcaactaattcccatcacaactaatggacagctggtgaaataggctcagagtgtgatctgtcatggccagtgtggcataaaattaggaagtaggcaaatgtgcctccactcccatttccttcccattccagaatcccaacttcctggaatcttcctgccacctcttgcttcccagagccatgcctgcaggttctgccaccaaaagttagttggtacccactgtgttcttgaagagtcctattaactgatagagacagagggaggactctgggaacaggtcattaactgatgggccactagtggtccaagtggctgcgtccaagatctgcactttattccagccactgaagacagaaacgtcaacaagaacagtgtacctcatttgtatgctacttaacgtttacaaaattatttgctagccaaacacatattctgatatttttacaactgcaggagttaaaggaagcactgtgattgttcaccttttacaaatggctgtctaaggctcttggtgatttggtgattggcccagtgtcataagggagaagccaggaattgaactgcaatttccctggctggtccagatcccctttcatcatcttattcttcagggacagccatcagggtgggaatttcagaccataggctaggacagccagggggatatttttccagccaggaataccttccaatatttctcagtggtcaccttgaagtagccccaacatcaggtgggtgggttattcaggagtttaaccatatgtgagtcagaaag

SEQ ID NO: 78506 - DNA, 1039 bp, Homo sapiens
atccttttcctgttataggacaggaaactgaggcacaaagacattaaggaacataccaggcagtatggctctcaattttcactgaaggcagccaaggaatgccaaaaagactccagttatttccagctttaggccttagacatctgtaaaggaaatccctacacagttgctttggtttctgtttttgttttcccgtttctagagttaatgcaagattgctcgttatcatgagctcagactttcagtgtactttgttttaatgataaagatgagtgtgtctcacccctgatctgtagggaatgtagggactcagggcaagtgtccctaaatttcatgaatgatggtgtgctgggaagtaaaagagcctaaaatatgaccaatggctgctcacaggtgttatcagccacgtaggggatgccttgaaagaccactcctccaagtccagaggccgggtttgtgctataggaattgctccatggggcatcgtggagaataaggaagacctggttggaaaggatgtaagtgttttctctgcaaatgttggcagttttttaaaattaatgattgattttgaggtaaccgttgattcagatgcagttgtaagaataataagagagctcccttgcagcctttcccattcctccaatggtaacatcttgcaaaaccataatgcaagatcacaacccggatactgtcattgataaggtcaaggtgcagaatgtttccatcaacacgaggatccctcctgttgccctttcatatacatatacctcactccttcctacccccacctcttccttaacccctggaaacaactaatctgcaccaccccgcatttcaagaaggttctgtaaatggaatcatacagtaatgtaacctttggggattggcttttttttcactccacatagttctctgaacacgcgtccaggttgccatatgtattggtcttcattcctttttactgctggctgacatcccatgatatggaggcaccagtttctttaaccatttgtctgttgaggaacagtttggctgt

SEQ ID NO: 78507 - DNA, 1034 bp, Homo sapiens
gggcctccacaggggatttccctcccacctccttctgctccaggtggcctccctgagccacacccctaacgtgccatttccagatggtaaacaacacttgcactgcagtttatctccttggaaatccccacagctcccaccccagaaccgtgcacaaaaaatatcttcaacaggtggatatggatgaattaaggtgcaaaatgagaaccattaaatacatacttgcaagccatttctcttaaaaggtactagagctaagatccttaaagacttgcatccaccattattgcagatgactattcagatgttgtgggcagacatattgttttataaaggtataagaatggactctgatgatggcttgggaatgtattggtccaatatccacttctctctctcttccagggtcagaaatcttggatagagaaaaccttttgcaaacgggaatgtatctttgtaattcctagcatgaaagactctaacaggtaaattgaaatccacgattaagacattatccaaaccagtgcttgtctgccactattctcatgtttgtaagaggcagaaagaggagtccagaagggtggccagaatccattccccatgggagtcactaacaagggagtcactggggctccttgttactccattaacatgcaaatggcttcagaaaagagtttgtgtccaccacccaccctaatgcgaactctcatagccaactgggcccacatcattcctcttagtctcagcaagatcaaggagttgagggctttcaacaggtttccaggatattttccaggcctcttcaatagagtttcataatgtatttagatgaaaaggaatttccatcacaggaaagatctgagcggttgaatgaactagctataactttattaaaggatttggcttgtacacaaaacatccaacaattttattcacctacattaaaatgcatctgttataagctgaacagaggccttgtaaagtcatgtaagtagagattaatttaactaaaatgtctcatctctaagggcaaa

SEQ ID NO: 78508 - DNA, 1043 bp, Homo sapiens
agttccagctatgcaggaggctgaggcggggaatcacttgaacccaggaggtggagtttgcagtgagccaagatcgcgccactgcactccagcctaggcgacagagtgagactctgtctcaaaaaaaaaaaaaaagaaaagaaaaaagaaagaaagagagaaaaaatgtcttactgatagcactattcacaatagccaaaagtggaaacaacccaaattcatcaactgatgaattcatgtaatggaatattacagaggcatagaaaagagtaaagtcctgatctgcgctacctggatgacccttgaaaacatgacgccgagcaaaaggagccagacacaaaaggccacacgttgaatgattccattcatatagagtgcccagaataggcaaatccatagagacagaaagtggatttgtggttgccaggagctgggcagggtcagggaggaatgaggagtgactgctaatgggtaccggctttttttaggagtgatcaaagtgctctggaattaggtagtggtgatggtttcacagtcttggaactatatgtaaaacactgaactgcagactttaataggtgaattttagggtatgtggattatatctcgatttttaaaaaagaaagtacaaagaaaaatatcactgtctttaaagatccagctctgtttcctggactctagtctagaggaggatctctcagtgtccccagaggagagcccctgggagagaagaaggctagaaacccggaggaaagggaaccctggcccaggagaggggtcggctgtgacgacctccagcatttcctgcaagccagccctgtcaccttcctgcggatagtgatgatgaagcagaggacaataggtttcaaaggtcttccaagcatggtgtcactaggctctcacaccagcctgtggggcagatgtgaggggtatcattgtcctcattttgcaggtgacgttccacaagatgggactgaggtgaccctcagctgggccctcctacctgtgctctctgcagctaggggcaggaggctgcatctgac

SEQ ID NO: 78509 - DNA, 3342 bp, Homo sapiens
ttcttcgctctcttcttcctgtaatttttccagcgctctaaggtttaatttgtcgtaaccaaagtcagcggcggcgcttggcgatgcggggggcggtcccgggtcccgctccccgcctgcggctctttgtgggagcccccgcccatccggcccggcgggggcgcgcccggccctaggctcctcggcctcgaggctctctccggaaaggaatgccctggccgctgcccatcctccgtgctgccctctcgcctgcccacctctcacctgccctgggccggtgcggggcgggcggcacctgcaccagggcgggcgctgagcctccagcctggggatcaccgcccgcccccgccagcccagcggcaacagttcccacgcgcggcccgatactttgtagttgattcatctgtggcggttccctcccccctttttgtttcgtttttaacataaagatgaaaatattttaatggacggcaatccttccccattttggtgtaaagaattgtatgcttcctctgagctcacgtgagttcttctgtgacactcacctcttctaccttgggggcaggctcaaaacccgtctactgaatactgttgtcttgtgaccaagggtggtggtctctcatttgtaaaatagttcacatagtgattaaaaggcataaaaagaagctgcagccttggataccctagagctgaaggccccttttttttaccatttggaactgaaagggcccaaggtctgcaggtgaggctttcagatctcggactaactttccccagggaggcttttgtggccgctccaaaccacgtggcaggtgatggggtagagggtgagagcggggccatttctaggcattcggggtcagttaagggtgtgggggctcaggttgggggtgggagtcagtgtgggctcagagttcagctcgggacgcggctgcagggtgggtgtggccctgggggaggggccaggctaggctcagctcggctccaggtggatcctgagtatcgggtgggggcagcgattggggcgtggctggggttgagatccgctttgggggatgatgcccgtgctgggcaggatacttaatgtttgggaaatttttctacggcctctgtcagggtggcctgccactcggcagcaccggtagcggggaattgaggaggggggtggccgaggggaggggctcgccgtcgtgggcggggccggcttgtcagggcctcagccttgggatgtcttcctggtgggttcatctcccgcttcaggctctggccccgcgcgagcctcttgactagaatattggcgcaggggctctggagacccgggcctcccgctgtaggtggggccagtttcctcggagcgcctggaaaccgaaggcaggcaaaagagcacgggaccaaccctttgagtgtctgcagtgtgctacagtgctcgttcttgaagcagagaaactattccacccttcaggtgtgcagacatcagaagtcctacctccagggtggaagccggcctccaagttggaagtgcacagggctccggcagcggggtggcggggagttgggaagaatgcagatttccgggcccctgatgccgacctagtacacacagttccagcgtgcagttgggagtgcatgttaccggtaccccaggtgacccattatgagagttgaactgcccagaaacctgcctctggagggagtctggttcagcatctggtggagggcacccctgggaagcccatttccagccccttcccaggtgtgcagagcataagtaactggtgttcctcaagggagaagaggagcttgctgttgggggagaaaagagcatcttgcagaagggagaaacccaggcaggcctcagggatgactgagaaggcagggcacaaggtgatggctttgctgcagccgtgggctctgaggtgtccgtggtttgtgggcctctagcagcattgtggggtctctgcagtcagtgactgaggtcatgccgggccccgtactccattaggctcgggaaggtgcccccgccccacttcccgcatttccaggatccacagtaatttcatggcagagggtgaatatcacaaccaggaaggtggccagctgctctgtgctgttcctctatgtgaccagggaccggttcccagatctccctgcaacttggtgatgtctgccctgaccacctgcaaagtcttcagggacatgaggtcaagtatgtgaagaccctttgagaagtgcaagggtcagccttgactctggaggcacttgtggtcccttggccgtggctctgctctgattttccacccccactctctgaacagctgcatgctaagagctttctgtcctggttagctgtgtagcagtgtggtttcccactcccactcttccaggagttatcctgtggacacattggtctctgtcacatttaggtaattgttgatattataacaatgcgtaataacacaaaaccaagaaaaacatctttgcagctcgtgctactttattatttggccaattagaacttccgagtccagacctggaaagtttgctaagaggggcttaggggagcagcaagaccaggagcagattttcttggaacctgaggtgctttgatgcaggaattcaaggactcaccttcgataggtcaggctggggccctcttgagggcagactggttgcccagatcctgcctctggagagtcctgcgtgttgtcctgaatggggagacttggcaggcccccagcagaatggccacttggtctttcttggcagagagaccctgaatacatttctacctatttgttcccacagagaattgttttcaaaactgctctgtgccctgttttccctccagcgctggagtcaaaacatctctctgcatgctgggccctttctgggttctgggggtcccatggaaaggtgggcacagtggcgtgcccagccttccctcctgcagaacccgaggcatgtttgtggtcacctggccctgtttggggtggaggagggaagtagagtaagatcacattctgtcagccatttcctgtgataatttgggtggggttcacctgaaatttatctttacccactgaagcaaggatttgatcctgacagattattgcgacccctcccccagggcacactctggctttagagacttgtttccaagcacaccgccccttgggctccctgcaggtcctccctgatgctgctgcctgggaaagcagagcagagggcatctggcagagcagagggcatctgggtgggatctcctttacccagggcaaagccaggcttgttggtggcctgtgctttgttcagagacacacacaggccagtggctcagcacgc

SEQ ID NO: 78510 - DNA, 1057 bp, Homo sapiens
aaaccactgttaccccgcgttggtgtttttctttacagaccttctagatggatttgcacatatgcatatgtgtgtgtccacgtagacattttgaaacatacttaaataggatcctagcaagtatctcactgctggcattttgttccatgtgtttgcttaaatgaggcatcttcattctttttcacagccgcatggtattccaagatgtggttatatggctgcattgtaacttatttacccttcacttatggaaaggacagctacattgccttttttttgttttttctgctattacaagttgtgtagtagtggactctggtgtgtgtgtgtcttggtgcagaggagctggcatttctgtaggattgagacctagtggtggtattgacagggttgataagtgttggttaaatgtgttgtggagttactgtgttatgtttttcaaggaaagagaccacacttgttagtccccgctctgagggagagacctattgtgtcacgactccaccttcttgaaaatgtttccttctcccaattctccttttgcatgtgtgagaacattgagaacgtttaaaacagtaccagcaaaaccactgtcactcccgcacgcctggtggctggctctcttggccatcttcagttctggttttacagagattggaaagtgtgtggtgggcgctcagccctggagcagtaggatgggggctggtgtggcgccatctccactccccccttccccctcgctgaaagaaggctggaagctgtgctgcctgagcaaactgataggacgcagttcattaaaccagtagcctgtgtctggggcttcacatgtctggaacacagcagagatgggggcctgatccttctgagtaggtgccctgaagcccaattctcaagcttctgacagcctcctgcccttagatcctgtgtgctcccactttacacatagctttaatctgattggttactggggaagggcaaaagacatggatggcagctaaaggcaggggaagaaacaaaccagcaggttgttaacatatgcatgtgtaagtgtgtgtgt

SEQ ID NO: 78511 - DNA, 1037 bp, Homo sapiens
aggatccagttaatcacacattgcatttggttgtcctctctagtttcccttagtttaggatagtttcccatcttttggtcctttattatgttacgctggcatttgaaggcccaaagccagttgtcttgtagaacaactcacaatgtggattggtctgattgtttcccgtgatcaggtctggtttaaacaaattttggtccaaaatatggcacaggtgatactgggcacttccatcgcctcatgggggggggagggcatgggatattagcctgtcctactgcaggatcacatggttaaggtgggcggccaggctcagccccttctgtccacctggttggtttctactccatcttccagcttccttgactggagagatgttgggggttgggttcagctttggaaggcttttgaagtcaaaggaccacctggaggaggcctaggtgctcctttccccaaacagacaagacaccctgattttcttttgaatgaaaatggctccagatggtattaatagccagctcaagggtaactgtgagtgtgttcttggtcagcccacctgaatgccggccctgtggccacaggcagcctgtctcctagggctggggagggcctacggcgggtgacactctctaagtcctggtgagtctttatgtgctttcaagaaataaacaaaaattgtcctaagtccacacacctgaacctgtttttcttttctttctttcttttttttttttgagacgaagtcttgctcttgtcccccaggctggagtgcaatggcacaatctcggctcactgcaacctccgcctcccgggttcaagtgattctcctgcctcagcctcccaagtagctgggattacaggcgcctgccaccgtgcccagctaatttttgtatttttagtagagacggggtttcaccatgttggccaggctggtttcgaactcctgacctcaggtgatctgcccacctcggcctcccaaagtgctgggattacaggcatgagccaccacacccgaccttttctttcctttcaaagcc

SEQ ID NO: 78512 - DNA, 2760 bp, Homo sapiens
aatctgggatatgtaaatgtgacacacagtctgagcatttggcaggctctccatggtcttgctttgcatagtttggcctatctgctctccagacttactgccccgttgtcctcacctgcatgactgtccatgtctggtttgtttactcgtcattgaaggcatccacaggggtgccatctgcccccatgtccctctcccactaggcatgctaagtggcctgcggcagggcaggcagggactcagattccctccatcccatcgctgaggtcttacttccttcttccgcccgccttacacgtggaaggtttctcctgtgcttgtccaccagttgttgtttttgtcttctagcacggatggtgtggcagaaggaggccttggacagcagcacgttaggacccacaggggctctggccccttgcagctgtgtgttctgagggaagatgcccaaggttttattatcttttccagagcgccctttttttctgcttgcatggcaggccctttctaaaattacagtcataggttgcttaatgacgggtgcgttctgagaagtgtgttgttaggcagtttcgtccttatgtgaacatcatagaatgcacttactatgcacacctaaatggcatagcctactgcacacctaggctgtatggtgtagcctcttgcttctaggctgcaagccggtacagtatagtactgtcctgaatactgtaggcaactgtaacacaatggtaagcattttgtatctaaatatagaaaaaggtacaattaaaatggggtgtcgtcttatgggaccagcctctcgtcccacgtggactgtcattgtttgaaacgtcattatgtggtgcatgactgtactttgctgcttggcctaaggtgccagggcattctctgggtaagcctgaggggctttgcaggataccatcttttatcaaggttgaaattagttttagcactttattctgtgtcccctttgcggctgacagagcaggagcctgtcagtgtctactgtcacaggtgtagagctgctgtgttggcgagcaggtaggtggttttcctgaattactgtcaggctttagagtcttacaggaaatacagccttggctacttatagcttgtgatttgaagtttccctaatgatgggctgggtagtacacttcagcagtttgctttggacaaattgtatcattcttaagttcactcactttagcctttgagaaatttcaaagtttgtttccctgatcttcctagttgccctggattatgagccaagcgtttgaattcctttgcacatctagcactgcacatggccttggaagatggacatttatgtgagtgtgtgcacgtgtatgtgtatgtgtgtgtgtatatatgcccgtatttgcagcatgtgtgtatgtgcttgtatatgcgcatgcacacgtggtcagccatgcagccaagtctcagaacaatcgttccactggaagtaacccagtcttgaggcatctggccaggtggtgcgggctgcagcacaatgtttgtttctcccagccctatgaaccccagtggggctgcatcacttaaaggccggtctctacaagagcagggtaggaagcagcagtgcgtgcccagccgtggctgtgtaggcagaaccagccttcaggatggagggtgggaccctggagccaagccagagggtgtgtacccttggtccctgatgaggtactccatcttgggccattctgccccctggtctctctgctcctcctctgcaaaccaggggggccagcagcctgctgggatcctggccctggccgggttaatggatgggaactgagctccttggctgccaagctgaggttcagtctggccccattctcacttcctctactcccccttgtactgtgggatctgagcatttctttaacagccttcaggggtttccagcccttaggacaagcagcaggtgggtatacaggggagcagaccccaggggggcctgaggagggagggtgaaggcaccccttctttgtgctgtctgtagctgctcatcctgggagacactgtgggggaggctgtggcttccttcttccgccctctggggatgccctggcggcctgtcccttgggtgttgggaggaggtggcttggctgactgtccctgctcatggtcagggtcctcctacacagcagaactggaggtaaacactgggttgccttggcaactgggctgtgccatggctccaagtgctcctggctagagaagttcccattgtctcaagtttctaggatgggtttctattttgatttttttttttttaaattagcaagaatgactaagataccaaaatgtctgacctggtttctataatttcttaataaacatttgtcttccctttataggaggaatgttttagtgattcattgacttttcttttagacggtggcaaggccctggtgaggcagtgcgggggcagcacagaggaccccccactgccgacagctggcacgggaggctgggagagcactggccacgatccagggaccaggcatgcttacgtagacaccacacgaggattttattggctttgaggctaattaagttccatggaaaattttggggagatgcctctcccctgtggggggttcagatacccacaactggtgcttccagaagctgtctgaaggctgatgcgtctgactgagcccgaggagcgccctcccacccagtgctgcactctcccgccagaggcctggccccctccctgcaggtcagggcatg

SEQ ID NO: 78513 - DNA, 1739 bp, Homo sapiens
caacctcaaggtgaaagactcagtcaccagtcatcagaacagttctggacaagtccacctctctgaggtgggcttgaaagttgccctgcaccctgtgtcagtagtcttgggcagtcttacagggacaggagagattgtgcctgcaggtggccatgctagtcctgccgagtgaccccaccccaaggaaaggactttcggagaccaggcattctctgggtgagactccccacactgggcagtcttgggtgaggatgccggctgccctcccagggacgcagtgccctgctgggtgccccgccttccctcctgagacccaggcaccatgacaggtttcttaactgacagctctttagtagagaacagaaatcctgtttgcagcaaaacttgcctcactggatcgcttcataacagctccttcaagtggggcgagctcatcgctgcggtcggcatctcagccatcagcagcccggagaatcccactcaggacttaggtttgctatttttgtgtctcgcctgggcttcgctcgtttccacaggcattccacttcttgtttacaggagtaattgccttcatgagctttgggccatctgcggatatatgtatttttttctttattttctttcttttttggggcagcagttctatgtttgcaaatatgaggattgtttcctaaagggaagcatgaggccttcttgaggctggcctcttggctgctgagctgggccttcgcacccctttcctgctttatttccgtcttcctgtgagtgtattttgttgtatagaggcgcttcctgtggtcggaggtgaacatttggagtgactaaggagagcatggccttcctcgctctcccggcgtctgattgctccgtggacacttgtgcctgttccccaggcagggcctgcttgctggagggggtcggggccactcctggccatggagtttccgcatccccctgctggccaggctcctgtgcttggggagaggaggacgccgaggcacatactgtctccgtgctctgctcttgtggtcatgagtggcctcttctctcttctgctttgagtgactgggtgtagagtggcgcctgagctggggactgtcttgcacccttgcacagggcccgccggctcaggtgtgcagcagacaccatcctgggagaaacagcagcaaggtctggggtggccacatttgcatgttctgcagaggcagttgccttcgggatttcagacttgcccccagccgtaaggcgggatgcagtgcccacagacaaggctgggtgcacacagcctcccaaacagcatcctgcagtcttaagtctgcacacctcccaccaggtgtcggcccccagcagtgggaaggagaccagccttcaggctgctcacctgaagggagaaggcaaggaggcatgaggggtgcatccagcctccagtggggacccacaggtggcctgggtgctgatgggccctggcagagtctgtgtgcccacccatgccgtcagtctcctgaaccgcaggagcaagaactggatttcatgttaggagatgatttccaacttcaagaaatgacctggaaaagttttctacttaaactgcctgttgttgttaagagctggccagctctggctttccaacagcacgcacagccctcgggccaggctgagtcctgatgtggggatgtgcccactgactgcgggtcaccatgactccatggggaaggtctccttggagaggtctgaggctc

SEQ ID NO: 78514 - DNA, 2561 bp, Homo sapiens
cttcctgcactttcaggggggtttatttctgaaggcggaaggcaggcctcgaaccccaggtgttcttgctggtggaggaaagtggaaaacacgcaggctttgtgggaagaaaggacgccactcctcctcccgtggattgcctgtggagctgggacaggcagcttgccactcttgtcaggatgactgtggaaggtgatgtctagaagagagagcaggagcacaggcgcccctcttcagcttggttttgcactaaagggacagcagaacccagagggcctggctctgtcagcccagcctccagtgccttccgaaaggaaaaaccacgcgtggtacgtaggcacacacgcacgccgcaccacatgctttttattgaagtatacgtgtgctacagaccatttaagtacagaaaagctaaaagaagaaattaagtggcacccacagttttacctcccagacaggactgttgcttggcctggttctcactgaaaagctgccagcatagagcccaggaagcccctcctggcagccaagggtgtgaccctgcagtcacggcagcctgcctgctctggccactgatgtccgcattttttagaccctggggtcctgactgcatctcaggccgcagtgccttgggctccagtggggtgtctcggtgctggcattgtagagtttaagcaccgccccagagctgtggtggaggctcagtgtgctgctgtaacagaaatactggagatgggtggcaaataaacaacaagtttattttcatagttctggaggctggaagtccaagattaaggcgctggcagattattctgtatctggtgaggaccctcttcctggttcgtagacagctgtcttcttactataatgtcacatagtagagggagcaaagggattttctggggtctcctttctaagggtactaatcccataaggagggccctacagcctcatgacattatcaccttccagaggccccaattcctaagaccatccatcaagctgggagttagggcttcagggtatgggttttcaggaggcacaaacattcagcctatagtgcccagcgttcttgcctaaccacggaaggcagatggcgaggtagggtggggtactgtatcctctgcaggcctactcccccaactcatggcagcttttttgccccttaactttgtagggccgaagcctgtgactgtcattccatctgggggaatcccaggacccagggcaatgctgctgctgcccatttagggaggggaggctgacactgctttccccatgagccgccacctgtgcagattatgacatgtttccccagagtgtgggatggaccaatgcccgctgggccacatgggaggcgggtgccctgtcaggcagtagtggtacagcagcgctgtcttcgatggaacagccaccatgccgaggacctggggatctggagggcacttgcctcgttctgcactgacccttaacatgagtctctgggacccagtctgctccagctggtgccagcctgtggttagtcagcttgcctctgatacttcactgccctggctgcatgagtgcaagggcagtgctgtgttcttagtgcctagcatgcagtggggaggaattaggctggtgtctgcaggagaagtcctccgggcccatgtgaggcgagtatgggccaagcctgtgcccctgtgcctgtgacccaggctgggagcagggggcttcaggtcctcaggctgctttaagcctgtttctcctgggcctggagggcttcctggggagggggttcacagcttccaggtcccctcctgccactttgaacttgggtgtgaattaatgaaaagcagatgagctcagatgtccctggaattccacatgaagttgaatggtataaagtaaccagccatgtgttcttggcggaaccaaaagtactcagagtgttgctgaagctgccaagtcctcagagtagcctagcctttgccgaatttgtgcttcatgggatgaatcccatttcatgagatgatgtgcttttctccattgagtgaagccctagagaaaatggcccctaaccctcggccattccagacatggagagtagtacagcatgcggcccctgcttttaagccaatatgcccattacagggcaggaagcagccagggtctgccgcagttatggtaggatattgggcatcctggacccacggatcctggacagaaggatgaagctttgggattggggagggaggggatgagccgagcaggccccccagcgtgcagggcacctggatgccgaccacattggtccgttgttcggaacctcgccttagctctcttctgccagggcctaatgagaacaatggtctctcagctgagcaggtggacacctgtgaacttcatctcattacagatctcaaaggagggagtctatgtggttctgggcaaggatgctccactttgcttccgtcttcaccaaactcttaaaatatgaagtgtaggaaattatgcccctgcagggttcaggataaaggaaatgacacccaagccttggttctttgtacctgttccatcca

SEQ ID NO: 78515 - DNA, 2680 bp, Homo sapiens
tgtaagaagttgccttgccaaaagatcatcatttgagtgcctggcatttgtttttatttctatttgtgaaagtcaagcatgttaattaaggatgatttgagaaacaggaaagtatcaaggaaaattaatgaagaggaaaatcaataactttaatcccaccactcacaagtcaccactgttaaaacgtgggatcattccatacaagtcattttctgttctacattttcctgctttaacatcctgttaggctcataaccccaaggcactgactggtttctaacctggtctgagtggttgccccgtgtgcgcttgtcttgcactgagagctccagtgattggctgtcctgggacagccgtccacctcattattttcagggggagttcccaggagcctgcaaaggaatgtgcattttcagggcaggttgcttcttttcagaaaggaaggatgagtgtgctacccgcaagcaaggcatgagagcgcccaggtatgcaccctggcagggagagtgggcgggtggctgttggatgtctaaaagggttttgcacaccgggcgcggtggctcatgcctataatcccagcactttgggaggctgaggtgggcagatcttgaggtcaggagttcaagactactggcctggccaacatggtgaaacactgtctctactaaaaatacaaaaattagctgggtgtggtggcggacgcctgtaatcccagctactgaggaggctgaggcagagaattgcttgaacccaggaggtggaggttgcagtgagctgagatcacgccactgcactccagcctgagcaacagagtgagactccgtgtcaaaaaaaaaaaagggaggcggggggagttttgcagtgaacagaagtcactgtttaagtagagtttacacacaacaacaaaaaaagggttttgcagtgaacaaaagtcactgttggagtttacacaacagaggggtcgccacgctgccccgtacctgggagcttcagactgttccgaataggcctcccctggacactgagatcttggaggctttgtgatccagccttggatgccgggtcctgagatcttgcagtccagggaaaggtgagattgtctcacagcagaggcttgcctgctgcaggccacgctcaggggtttctacctccctcagtcccagtgtctgccctacaggctcccttggtcccgctcagaatgcacagacctgaccgtaccagtgagaaaggacaggctgtgtgagctctgcctggcccaggtgtgggctggccacgggctccatgcctgccttctccatgggccatgacgtcggccagcagcctcagcagctgctgagattagcgtctgtatgtggtgccacttggtgtgcctctggctcctggccctgtgctggccccgtggaagggcctgtcagcatgtactctctcctggggacaggagcagtatcttcagggctgggtctaccaacccggtctgtgcatttccagcctcctgtgtgcttcccagctctgaattatgaccactgggctgatttatttcttctgacatttgcaagctgttaggtggcagagatcagtgaataaaaacttaataaaaggctgtatttaatcccatgcatcctaggctgagccaagttcccttaggattgagcatcaccagatagaacccagagcccactggcattgggacctccagggtggctacttggagtttttgtggggagggcagtttcttgaccgtggagcatgacgaggctggacccacctccccgtctgtatgcagccaccatgcagcccacctaggctgtgggctctgttgatgccgccttggagtgtgcggcttgctctgggtgggccttccaggggaggagggactgcagaggtagtgacagggaagggaccctgggccagggggctgggctcaagggtggctccacatctgactttgtggcctcatttcctggtctgtcacttagggagttttgctggggcctgttaaagggggagtgcctggaggtatcaaagcaggggcttgtggccctggtcatccagtagttactgggggtgtttacagccgcctgtgctgggcctcccctggagaggaagtcacgcccacgttaagtgcgtgggaaacctgtcccaggcgttctgtaaccgtagctgcaggtgctctgggtgttgcctcctggctgtagagggcccccttgtgaagaggggagccccaggttggggggcctgggctggcaaagtccctgccatctggcctgcccacttggggctggctgtgttgggcctggtcccaccagggcttgggctgcttccagatctgttttcattttcaattccctttattgctataaaaccacttcggggctgcagagaacaagctgttgtcctcagctgacctcagattcctggcctcaattgtttgcctcttgctaattttagcttctgatcatttccactcttatcctccccccaaagggagacacagaccaagaatagctgctgggaaggggggctgtggtggctgtggccagagttccaacagtgagctggcagggctgtggagtggctcgctgtggccaagcctggggcagggggctctcggcaggcaacccccacacccttcccctctctcaccgaggactctatactgcaggcatgggcctcagaggag

SEQ ID NO: 78516 - DNA, 1020 bp, Homo sapiens
gctctcatgagtccacaggtagcaccgttcatctggagaaggccttcacttgcacaatccatgatctggaagcttctgtggcaaggggccgatatacgtctccctacttatccattgaggagcaataagggttgtgactcgggtgtgcgtgaaggagagaagctccagagcccttgtctcaggtggcttctggccttctgttggcagaaaccattggtattctattatttctgtttttaaaagggaccttgagaacggaaattttcaagtgtgttttgtaacccttagcaaaaggagagcaaacacctttatgaaattctggcatgtggtccttttaacctttccaggcagtgtactggttcatgcaaactagtgctattcccttcttagggattggggtgctgggttctgtggaagcagtcccagtggtgagctggagcttgggtgaaaggtacgtgtgtgtacatacaccactttgttacatagtgttattgcattaattctgactgtccaaagtgattcatttgatgaaggcagaaatgcagaaaggacagtcacacacaaatcccatcttcctgaggtaacctctgtttccttcctgcaattagagctctggcatatgcatttcatgtgtgcatttgagggtggggctcagccacttggtagtctgttttcttccctgtccacgttcccaggggctgtttatcagcagctcacattggtggttcagaagaacattcgagagagacagctgggctggctccgtgtgcttactctccctcgtctaccccatccaacagattgtgaagcctggttccagtaaccttggggatgacaccaaggagcgctgagccctccaccccgcatgttgtggtcttgggggagggaggcaggtaggacacagaacagggttcctgccccagtggctcctcccagctcttgctagccctcccttggcatcaggcagacctaggtagcctcaggtcttggagtcccgtacagagctgttgcagagggggt

SEQ ID NO: 78517 - DNA, 1104 bp, Homo sapiens
gtgagattctgcagatctcccctgtgactgtcaaggctggtgccccccaccccccaccccagacgtcacagccagaggcaggcccaagaggcctttccatactgtgtccctttccctacccaccacgtgctctgccctctttcttccctccctccctccttccttttctcttggtgcaagagaaaaccctttcccagtagtccacagattccctggttcctactcctcatgagcccctacagtggcacttgggatctgcatcctagtggctggatggacttggctctcctagctgccatccacctgggctaattttcagcccacagtggtgtcacaaagtggtcttatggcaggagtgtggtattcaggagcctgaagggggcttctgacgtggaattacaactctggaactgcttctgtttaaatcctttgctgaatatttgtcacccatagccttttaggtctgacccgttctaaactgctgggcctatcaaacaatttatcagggagggcccttctccaataggacagtttgcagcgtgacccaggggctctaaagccctggagccctgccctgggaacatctcctacaaagctagattggactttattgctatttttgagtttctcatcctggaagccactgcccagcacattctgaggagaatctgcctgggcgaccattgttattttaagagagctcttggggtaatatgaggaactgtgctttgaaatagggaatacagaatggggccagtaatgtgcccagagtgttgaatgtctgatttttaaattggcattattgatggctagcattttctagtttgctatggattttttgttttgaatttaactttttgaataggaaatgcatttgtgtgttttagaatctaaaagatttaagtagtttccccagggaaaattctgtcaaccttccctgttctccatctgctcagtgttcccctgggtgatctctgttcctactttcctagggaccctctctctgcacatacaggccaaggcgcacgtagatccttgctggtcatctctcctcaaccttgttttcctcactcagcttggagatctttccatatcagtttgtaa

SEQ ID NO: 78518 - DNA, 1025 bp, Homo sapiens
tgactgagaaacaggctggatgacaatccctgaggcatcaacaaaggagtggaggtagagcaggctgcttccttgccccaggcaggttccagctgcggctctagctctggcgccagccagctgaatgacagctcactctctcctcctgggcctcacttcccttacctgctcagtgggtgggtaagagcttccaacctggacttcctgcgaagccatgtgcatgtcagctccatgtggcttaataaaccactaacatttctagagacgagcaggacagtcaaatggcctcctaaggagttaggaagtccaccccccaccacagaggccaggcctttctgctacccctgaggctgtatgcctgagtttcattggaggccagcagttgatcagcccctgtgtttggccatgctgacctgctccagaacaggagggtgaacagtcttcctggagtgaaaaacattgcagtcttgaggttgggagctagaagtggccccaaaccagtgcccacagggcagagctgtccatcagtgaatgacagcccactcactggtggggaatacctggagactggggacagtggcctgggagcctgagggcaagcaatttctctttggaagcctctccctgtgcctccctttgagtctgaccagcgctgcccctgccattgcctccagatacacacccacatggacccttgcgctccagaggtctgttgtatccaagacatccctgtgagggtgatggctcatttgcctttccaggacctcccggtaggagttgcatttcttcccttctcccttccatgaaggggagctcagcgaggcttcctagagaagacccagcaggaggccggcagaagaggcccttgcggcagacgctgctctggccccagcttggtaccgggcattggaaacattgcaaaaatgaccactcaacaggcttcccacaggaggttcgcagacagaaagatctgcagtgtggtttatacaggtgcagctggagccgggtggggtgggggggcccac

SEQ ID NO: 78519 - DNA, 1056 bp, Homo sapiens
cttggggatagtggagggggccttcagccctctgcaccctgcctgcctcacaccccgccttcaggagccctctcctacggcgctagggagcactggaagcagagatgccagccctggctgagcgtagcactgcaccgtccgacctccgaggcaggggccggggtcacacctgccaggactccgcttctccgtgtcccagcagaaggcatgcaggaccctgtcactactatacctgggcctctgatggggaattctggtcttctaaaaagatgttagaaattcctggtggcacatccagttccgagtttgcccgcacgggcacttttgttggaaacagtgggcaggtcatggggcctcctcatcagagggtctgtgtgagcggctgtgcatgtggcagcgcaccatgcttcacagagaccattctgtagcaagagaccggaacattgtgacttggaccttttcaggagtggcgcggatgttacaggaaatgctgtcggagagcgcgcattctatttcctccgcagggaatgccagatagaaagttgcgggcaacacttttctcagacccaccatgtccccaactcagacttagcaaacctccagcctctccgtttcccctggactcctcctcccttttcctcctgcttctccttgtcctgcctggaggctccaggccacacccagctggtggggctgctccagtgccccatcaccggccttctcctggcaggagaggaggagcagagagctgggtcctgggctgggattcgagccctgggcgggggtcagtcaagccgtggtccagcaaactcctctgcagatggctggagtgttgacccaggcttgtggcccaggtatcaccttcccttcctcctgagagttgaggcctgtaaatacaagggcccaggacagagtgtgtgcgtgcgtgtgggtgtgtgcgcgcgtgagcacacacgcgtgtgttggggggggtggggggattggggtggactcagggtatcttgccagagatacctgttttgatgagtacctattttgatgcaaaggaacggccct

SEQ ID NO: 78520 - DNA, 1228 bp, Homo sapiens
cctactggatcctacagccatacaggaaaacagacggacacagccctttccttaaagagccctggggtcctgtcctgcaggatgctgcataggaatgggcagagatgtcctggatgggaacatggtcctggaggtgccctacctgcatcctgctgcacccccacccacgacactcgagtgcaagatcgcctcactcctaaccctgactttattcccaggccccacaccgaggcaggtgcaggattcgccatggtgcagcctccgggtacaaacatctgaggcactggcgatcccagtccttgcagcaccctgaacacagctcagaccagtgaggggtgattcagaggtggggatgggcagagagggctggccactctgcctcaggacttgacctcaagtgttctgtctccccacccggtgtgtccagaagaccagcctctttcttgccagaagcaggtgctaagatggactgcacagggtcccggcactccctcgggacccattcaggatctcagctgggcaggggtgccacccaacaggaagatgtgatctgagcaatagtgtggccttgtttctccgcttctggttgtggctgtgtgtacagggctacctattttgacttctgacaggtgtcactgattttctttcccccatttaaaaaaggtcatttagtcaaagacacagtgctagaggtttaaagggtgtaatgtgttggtcacatcacaaccagtaagaaacgcttggtaggttatccacatcttttgctgactgtttccatatacaattctggtcaccatattttccaaagctaaaatctgaggcgtgggctgatggtttttgaaatcaggattaccccaggaagaaccaggtcctattactaattttcctgattctgaggctctgaaggcttgtctgagacacattccggagacctttgtaccagaacttggatgcatagtccaccttactactgatacacgcctgagcaccctttagggcgaggcgccgcctcctgcctgctgtcctgtccctcagcatcagaagagttgaattcagcaggagacgggagcccggtgtccatgagggaagaggggtcgcgcttggtttctactgacccccatgaagatttcagacttgcagtgcggccacctggccctgccctgcctctctctttctcatacagctttaaaactttactacttttatttaaaaatgaactggatgggag

SEQ ID NO: 78521 - DNA, 1011 bp, Homo sapiens
tagatggaaccatgtgcccctgaaactcatatgttgagtttcaccccactgtgatggtattaggaggaggaaactttgggaggtgactaggtcatgcgagcagagctctcatgaatgaggttagtgccttagaaaacaagagcctgcgtagtggtgtgcgcctgtaattccagctactctggaggctgaggcaggagaattgcatgaagccgggaggcagcgattgcagtgagccgagatcgcaccactgcactccagtctggccaacaaaacgagactccgtctcaaaaaaacagaaggaaaaaaaaagaaaagagcttggagaaccccctctcctcttctgccaggtgaggccacagcaagaagactgcggtctacgaaccaggaagaggccttcaccagtcaccaaatatgctggcgccttaattttagactttccagtttctggaactgtgagaaatgaatttctgctgtttataaccaaccctggctgtgtgattctattgtaacaacctgaactgatgaaaacatcttgctaggaaatagaagtgaacttaggaggagggttagtatatgctggagtaaagccttcggtagtttggtctttttgtaaagatgaggaagctgggtaccctctggtgagggctgccaggtgtgactcacccgactaagcagaagtcaagccagccttcccaggaaggggagaggcctgctgagtaaacagaccccggaaccacaaaggggacccttggcagctatctgtatgcataagtcttatctttcatctgtgtacatgataggcaaacaaggaaaacagtcacaagacagaaggacgaagaggaacaaaagtaacagttgtccctggaagaaatagatactaaaggcaatgaatagaataagagtcataattaacatctcaagagatgtttgaggagatgttgcatccacaaaacaagaacaggaaactagagaaaggacaaatcagggaatcaaaaaagtttagagacatta

SEQ ID NO: 78522 - DNA, 1080 bp, Homo sapiens
cccagaaaagccttttgtcatctctcagatgggttccaaaaagaagcccaaaattatccagcaaaacaaaaaagagatctcgcctcaagtgaagggagaggaaatgctggcgggaaaagaccaagaggccagcaggggctctgttccttcaggctccaagatggacaggaaggcgccagtacctcgcaccaaggccggcggagcagagcacaataagaaaggaaccaaggaaaggacaaatggtgatattgttccagaatgaggggacatcaagcataagaagcagaaagctaaggaggcagaccctgccccacccaccgaggaagacatgtggtttgacgacgtggacccggcggatatcgaagctgccataggtccagaggtggccaagatagcgaggaaacagttgagtcacagtgagggcagcgtcagcctcagactcgtggaagagccggccttcggcggcctgacaagagccttagccttggactgtgagatggtgggcgtgagtcctaaaggggaggagagcgtggccgcccgtgtatccatcatgaaccagtaggggaagtgcgtttatgacaagtagtcaaaccaaccgagcccgtgacggactataggacagcggtcagtgggattcagcctgagaacctcaagcagggagaagagcttgaagttgttcagaaggaacaactgtcagaaggaacaacggtactgtcaccgcttatcttcagtgacaccctggggtgaggggctcagcaccttcctctcggggagccacattttcctcctttgtcttaggggacataacaagctctgctgggcttgagggacccagaccaggtgtctgcagtcagctcctgagacacggctggccggcacaacaggtgttacatcaggggtttcctgtggccgtttggactttgagcgtttatctaaattaaattggcccagggttggctggtgggtcacccagcagaggcttctccccatagcacgaggatgtgtcgtctgggcacggtgaccgcggttattcctggaggtcggcagacatgccgaccttgggctatttgagctggagaa

SEQ ID NO: 78523 - DNA, 1031 bp, Homo sapiens
caaggggagcatgaaaatgaagtggggcctcagaggctactctggggaggttaggaaggagagggaatcccgggatgccgctggagggcagggagggaggcagcaacagacacctgcgggcctggctttcctggcagagggagtctaacatcaaagtcttggcatatttaaggaagccagtgtcacctgagctggtggagcgagggtgagaggatttggaaaggagggcaggagaatgggagccgggcgctagggagcctcgtcctttaggcttcactgaaggtagataagcagcccctggagggttttgagccgggggctgacgcgtcttgattcacatctgacagattctggctgctggagaatggactatggggtggtaagagaagaagctggaagagcagggagaggcagttgctccagaccagggcagagagagacggctggcagggtcgtgggggtggtagtgcaggtgaggggcagtagagagacacggctatggggtacgttttgaaggcagacctacaggccttgatgatggagggctggggctctggcaggcagggaagagtccagcatggccctaagaatgttaccctgaatatgggggtagataatgttgcctgaggagatgcagacccctggaggaagggcaagaagaagaggccagcactgtcaggcaaagcccgagactgtagtgagacttgtaaagttgctgcccagatgaacatgagggtctggagtcagagagagccctgcgttggggatgcagatgtggagttagtgccctaaagtgaaacccgtgggatcccggagtgagctcctcgtaggaccctcccaccatgcccccaacctggctccatgcagtggtgagcatgagttggacacacttgtctggagcatggacagaaaacaagctttccaaagactcaggctggggccctacagtattgagggctgaggaacagaagaaggagccagcagaagagactgggaatgtgcgggcctgggaatcagggcgaaccagcggt

SEQ ID NO: 78524 - DNA, 1059 bp, Homo sapiens
cccttggtcgttcagtttcccagcagggcagggacttcatctcctactctcctggccttagctcctctttggagaatagggcactaaagagaccatggcatccttgcaagctcgcagctttctcagcctgcttcctacctgtagtcatgtggggggctctgggctcattttgtgtctggagcagtcccaggtctctgctacatgaggctcccgatccctctgccccgcaatcactcacagcccagaggcttggaatctggtgggtccctatcagctgcaggtgccagttgccatccacattcctcttggagatttcagataagtggcatttctttgctttcgtgccccccacccctgcccctctcttgacttaattgtagctggcttcaacaggaggacctacccttaagctcttttccctaaaacatcgtgtctagtttttccactgtgtgtgagtcagccttcaaacaaccataatccagggaacattccttcaggtaaaggctggatggtcctttcacattggtttcaggaccccagcactcctgcccttgtattctgactgtgaaagatgcgatctcaggtgtgtgagagcaactgcatggctcagcttctatgtatgcccccattctgtgagtagcagaaacaatcccagttccttgaagccccactccagcttctatcacccattcctatctccttaggattgcatcagaggcatattgtgtatgataaatgtggtatttcaaatcattgatgaagcacagatcatgtaactgtgtagtaacacttggtcatccatgtgaaagcaattcactagggaaaccctttaccatttgcaaatgttacttccagatgcattaaagtgtgaacatttaggagaaaaataaccccaagaactattacaaggagatatcagagaatagtatttattttacgggaagaattttctaagcaaacccaaaaccccacaagccatagaagagaaacagcacagattttatttcattaaattttcaacttctgtagggaaaatcgtttttgtaaatgaaaagacaa

SEQ ID NO: 78525 - DNA, 1067 bp, Homo sapiens
ttctccgaggctcgatttcacctgcaaaatgggaacggtgttattgactctattgagcttataaggggattccatgaggccatgtttataaaaagactagtacattgccaggcacataggaactgacaaataagggagaattgaacagattgaattgaaatagcccagaggcttacaacatctccagatgggagagggaagagtggtagagtggcacatgtggccaaggccaccccacttcttggaaaagtgaatgagtacacatccccaggacgtcaggtgatggcttaggatggggacagtgtcagggcactatgtgtctgctgccttcatccccagggttgcagaccacatgtccatagtggatgccccagaggcagagcacggacggcagaatacctttcctgtgagatactcagttctcctgcttaccatttatattggattgtgaaatgctctgtggtcacttttgttgataacatattttgataaattctctctttttagctagagggaactgttttctatacataatcctgggacaagagactttggctgtgctacttgatggagggacagtggctgaaggatgggatgatcagcctttgacccccaggaccagcagtggtcattgggggtccttgttggctttgcagcaacccactagaccctccacgaggggtctgcatggaaggatggggtttaagtaaaaattgtaacaggcctttttaatgacagaagtcttgaatgtctggttcaatatattaaacagactacattctgctttgactcattttccagtgattataagaggctggcttggatgatctcttcttaaatgtgttgccaataacattggtagccctactgattcatgaggaatctctcattagtgcaaatgtacttctgaaaggcacataaatgacactccagggaaaagtcctgtccagagatgcaccaattattgcaagatgagccatgtgctttttgcattgaatgagacccagaaaatgatatcaactgaagcaaaaatcttaccctaatgcttaacagtagaaaatgatctt

SEQ ID NO: 78526 - DNA, 1138 bp, Homo sapiens
caggctgatcatgtgtcttagaattaaggcattacagtaattcctctggtggttttccataattcccagttaaggaatcttttcaagcattctcaggtgaacgtaagtagagcctcctgactgttgtccaggtgtcactgcggaggcaggaattgggcctggatattctaggagattgatatttacagaaacattttgaaaactagaaagctttgtgaaatgctgaaactggaagtttcccaagttatgtttcatgatgttaaaatatcttccattacaaaataaaggttctttgactcaataagcttgaatgttatgtactatttttttcttaaagatgcacaatgtccattagcatgtcaaaggctctgagaaggcctgcaacatagaaattgtttatttcagtggaatccagtattcttcaaacttatttgaccaaagaatgtcctcctttacccctgacctcccccacacatttatcagacccagtgtttatggggagggtaagacacgaatgtggcatttgctgaatcttggagcagtagaatagttcttcatgtcagaaagctatatggtgtgtcatgcagtaaatcatcgtgacctaagacactttacataattacttccttttctagtcttttaaccaaaatttattgagtttctactgtacagaagcctaacaatgctggatggtagtgagtggaacactctgtgcctgatccatggacccaggtatcagcatctgcatcagcaacggcattggcatggggagggcatgcgtatacctgcacgtgcttggcctggaccattacctgctgaatggaactctattaacatgaggctggaggatctctattgagcacatgctaccagcaattcccgggctccccggcgtttgacagctgccgcatcaggtgtcttgcttctaccttctctgtgttttgggttgggttccgaaagtggccagggaagggcctggccttgagaatccatcctgagggagaatagatgatgtggcatgacctcatacctgtgtgtgtgtgcggagcttagtgcccttagaaatgacagctaaacccttatattttagaagatgtttatcacttgcatgttaagatcaagggtcctgaggaccaag

SEQ ID NO: 78527 - DNA, 1015 bp, Homo sapiens
acagcaccggctttgtgtgcgaaagaggtgtcctggggagacatcgaggagcagagctttatgtgtatggtattttttgtctttgaaacacaggctgcagagaggctgacaaagttttcagcatgtagctggaacatcctttgaacattattctccaaccccttgaaatgcatgccccacaggccaaattttttttgccccattttactctctgtagtttttacatggaaccatacgtcttgtaggttttattctgagaatttataaaattaagagtgtctttttaagtagttattgtctatggagatcttagagtcctccgttagggtacgcagccttcccctccactttgaggtcaagtctatacaaagatatttccagaaatgtgtgttacagtgcatttcccaagtgatttgccctcttggtcctgaggggtctgcctggattagagatgaagtctcttcaggctctacaattgctgatctctcttatgtaagaaagtcccggcaactgacacttgcagtgtgctatttaaagaaagttttctgtgaatctctttgcaagtgaagagaagcttgtctggttatttgtgatgtttcttctctgcccacaaagaggcagggtggccaggctgggggtgcaggctggggaatcacagtccctccacagcacctgctttgttgactggaccttcttggaacctgttttctcatctgtaaactaggtacgctggtcgaatttcttgttttctttgttgcttctttgtctgtttcctaataaataacagaaactggagggagctagggtgcggggtccgtgatgcccaagggttcccagtcaggtgcagctgggtctagggtatgcctgcccccagagagcagcgctttgggaagcccatgcctgtgtctgcctacatggctccgtttctcactatgccattttctgtctccctactgagttcctcatacacatgggagcagatgaccaccagtagctgcctcacttcagagagcta

SEQ ID NO: 78528 - DNA, 1044 bp, Homo sapiens
aaaatccagccaaaatagaagtgaataaaagtacagagcttagtataaatgggtggcaaaccttggatatgtataaacataaaaataagacaggccatctgcatgaattacagtgaaagtatgtgatgtaaatgatgtaaaccttgcaaatagtattataacttaggagagtctttggctgggtgaagggagcggatgtgtgaatatctaatggcttcatctttcttagcaaaacagttgacgatcactatgtcgaagaggctattttaaaaaatgagggtgataacttcaagacttttcataatgtttttgttatctttagaacaatcatttaggaagacatttcttacagtaaagaggcatttctctgaaatttagcagctctttctgtttggctgtcttgtctttcctttcctttcattatctttgtagtgaaaaatatgacttgccgaatgctcagtgtgttgtgggcatggaggatacctggtgagctggcattcatgcatggagcatccttgcaaagcggcaggtgttgctatggtaataaaacaggtgaagtgatggagggtcgggggtgagatgtggctcaggaaggcctctctgaggagtgcttggataagacccagatgctgagctggagccagcctggcataaggagcaggcttcagtgtcctgagcatgaaggagtctgttccagaaactgaacaaaggccttggttcagtgtccctgctttgctggtgctctaacaggtgatctgcctagtggctagtgctgcccctactatgctcttcatgccttggactgtgtcttcgtcttttcgcctacctaaccagcctgtaagattgtctggaagatgttcaatgaatgtataaagatgcattatgaatgaaataacccatgaatgaatggattctttcagggtgtcaggttaatgacatatgacagtttatgccatgaactgtttcttatttttaagtttgacattgttgaagtagacctccttttggaaacacaatgaaatccaaattttccagcatgggatt

SEQ ID NO: 78529 - DNA, 1050 bp, Homo sapiens
caaaagttgttattgtttgtttttaaatgttgctgaagtccaatttattacttttaacgtacttttaaaaaaagtgactagcgtcacatctaagaccttttcatgtagtgctaggtacaaaacatattctcctacaatttcttctaaacttttgtagttttgcattttatgtaaagctgtgatccatttttgattattttttataagacatgatatttagatcaaagttcacttttttgcttatggatgtgcaattgctccagcactgtttttggaaaggtgattcttccattgaattgctttttctactttgtcaagtatcagttggctgtacttgtatggatctatttatgttgtttaattctgttccattgatctatgtgtctgttcctctaccaatactacactgtcttgattactatagttacttaataagccttaaaatcaggtataatgatttgtctcatttaattcctctttttcaaagttattttagctattccaacttctttgcctttccataaatattttagattaagcttgtccatatttacaaaaacaccttgctgggattttgataagaatttggaaataattgacatctttattatgttgagtcatctaatctatgaatatggtatgtttctccattcatttattcttctatatctttcatcattgctttgtgactttcaatatacaagtccaatacatgttttgttccatttatacctaaacattgtattttattttatttatttttttttgagatggagtcttgctctgtcacccaggctggagtgcagtggcacaatcttgccccactgcaacctctgcctcctgggttcaagcgattctcctgcctcagcctcctgagtagctgggattacaggcacacaccaccacacctggctaattttttttttttttttttttttttgtatttttagtagagatggggtttcaccatgttggccaggctggtctcgaactcttgacctcatgatccacccacctcagcctcccaaagtgctgagattacaggtgtga

SEQ ID NO: 78530 - DNA, 1030 bp, Homo sapiens
aaattgtacagattgtcatttcaaaatgatacatttttaaaggaagagctggaaaagtagcataggtgtggaaaaatcactgtcaaaagaaataaggatcactgccagaacatgttttcaagaagactgactgtgttaaggcttaatggttggggttttttttttttttttttggagaaaaaatattttaaaaattgtcttgagttataatgctatgatcagaaaaaaaaaatgtcttgtcactgggaagactaaaccttctaagagaaattcccccagaagttggggaggtaactgttcccagcgtccaggccaccttcctagggaattttgccccttggacctcaggaaagcaatccagtgggatagacttcccgactcctcacatatgctgtgaggacagagcacaagggcagccaggcctggctgtcctccttctcatttctattgtgggatggggactagggtctgcatagcagtggtgtgagcctggatgtgtgcaggaagggagcagtgcttctaggaggcttgtgcacagcagtttctcgtccattccctcagcccttggcttcctggaaccgagagcattaattaggatgcatgtcacactggcatttggggtttttggagcaggtagcaaatataagcccatcttttggaattctgggcccaacagtggatttgggattttcttctgttctactatggcttaagtcatgagagacatgctttaaatagggaggcagcgatgtgatttacaggcactttcccagccctaagtaggtcagggttttgtcacagttttgaggagatcacaggtgagtcacagtaaatttggagagtcacgaatcttgtcagaattcagagtgcgtttgtgatattgttaaatagcataccttaattactggcctgtgcagtgtcctctctgtcccccaccagcccccattccctggagtagatagtacagtctccattgaaaccagccatcagagggattcagcttcacttccggctgtgaaaatctgatctc

SEQ ID NO: 78531 - DNA, 1075 bp, Homo sapiens
acttgaagaattcttgcaagcttgaaaataactcttgcctgattataaaggtcttgagttgcataatttcctttaaaactatatagagatatttctcctgtcttttagcacagagttatgagaaatttgaagtcagcctgttttgcctagatgttcatgtgattcttttaattcggttaatttacttgaatgtttctggatgctggtattgctgtatcactttcttttaaactaagtaaagtaaaacccttgtaattgacagagataagtcagtttatttcagaagttttcttgtattatatctatgaccttttttctgttaacaattcaagaatgttaattatatgcacattgtttcttttgtcttatatttgtcatctctttgataaagttgatatttcatattcttctccatttcatttgcttatctctggggttgattgcctttattctattatttagttgcatctaatatggttttcatccctattccatttattttaatttttatttcttcatttcttttccatgctctgattctctttctgttggtttatgatctcttctttgttgttgttgtttttttttttcctttttaggaaagtgtggtaggcaggaagacaacccctcaaagatgtcagtatcctaatcccccaaacctgtgaatatgttaccatgcatggcaggaaattggaactgaaaaatgaaatgaagttgagcatggaattaaggttgctagtcagctgactttaaaatacggagactattcctggattgtctgcataggcacaatataatcagtagggtctttcttaaaagtggaaggagggaggcagaaagatgagaaccagagtgatggcagcttcaggactttgcctgacatcattggaggtgggggaccaagagctgaagcatatgggggtttcagaagctgtaaaagaagagggaaacgtttctctttatggtgggcagaataatgaccccccagagatgttcctgtcctaattctcagaacctctgcatatgtcatcttatgtggcaagagggagttttcaggtgtgattaagtgaaggtc

SEQ ID NO: 78532 - DNA, 1048 bp, Homo sapiens
aaaatgcccattcagtcactgaatttggcaataggataggaagcagagcaggagggtatattacttcaattgtgaagcaaatgtattattcattggcacaagaaaggcatttgggaaggtgatcaaatgcatatgctttataaagtcacatgctccaaaaactttgaagagcaggtattttccgctttttgaaactattttataacagtataaacagctgaaaggaatgagctcagtctaatgtgtacccactttcatacactaacttagcgagagaaggttgaattcatttatttacttattttgtaaagtcaataaatttttattcaaggaatttcatgttttgatttcttccactgcccatcaaggtcactttagatcctctgaagagctggagtcaaaatttattttcaaaaattaccttcaagttagccctttcaaatgaaactgacatttattttaatccagttgtcctgtcaacccataattcttttattttggcttctgtcatctccttttaatatggatatactgacgaagacttcaaaattcaccagtagtctttgggatctgatttcttccaccaatttactttagggtcatttttagtgtaggtggatctgcctggttctcaatttgacaccctctctaaacatgaatgagttccaatcatattcgttcctaagtgatcaaattcaagaatagtacagatgtgtggaatatgccaatacctaaggtaaaaaagtaaattatcaggtctttactaagacagttactgaactaaagacagtttagtaactgtctttttcatacttcagcaactgtcttgtggttccttcccacagatgtaacaatagtcctgtaagtaaagtaaaatcacagagttactctatgaggcatttccaacaacgtgcaggctacaggaaaagacctatcgggatagacctcaacggaatgttgaatttaaaaagcaagtcaccaaatatcacttaagtaaaatttataaatatactaaacagcaaactacatcaatgtttctctttttcgg

SEQ ID NO: 78533 - DNA, 1009 bp, Homo sapiens
gtcacgtggagaggcgcgcgggggcgggcggggcgggggcgcgcgcccggctccttaaaggcgcgcgagccgagcggcgaggtgcctctgtggccgcaggcgcaggcccgggcgacagccgagacgtggagcgcgccggctcgctgcagctccgggactcaacatgcgctgctcgccgggaggcgtctggctggcgctggccgcgtcgctcctgcacggtaaagccactgcctccccgccctccactcctccgtgggatcccgggcacatcccgggcgcctctgtgcgccccgcgcctgggccaggtttgggatctccccgccgccggggaggggcagcgggggcgctgcgggggctgcttgtctgggctgcaccgggtgggcggcgggggacgccggcaggagggagtcgggggtacccccgccggcctgccctgagccccctgcccgggtcttctctccttaagtgtccctgcaaggcgagttccagaggaagctttacaaggagctggtcaagaactacaatcccttggagaggcccgtggccaatgactcgcaaccactcaccgtctacttctccctgagcctcctgcagatcatggacgtggtgagtcccgcctggctacagggctgccctctccccttcctgggctccgaggggctttttagacagcgtcgggcggccaggcggtggagctcggctggggcactctagttggccccaagctaggcagggccatgctctgagtctgtccccagcctgccctctcctgagtgtctcatttctcggtttcccctccagccaaggagggacctggtaaagcttattccatcaccctggccacctgtgcatggttacttgggtcccacctttctctcaggttagaaactcaagcatcctgagctgggactcagtagcaagaacaggtgaagttcactttttaatctcccttatggtgtaagtgttgacttgcattccagcattgtcaatttagccacttctagacttt

SEQ ID NO: 78534 - DNA, 1056 bp, Homo sapiens
gttagccaatctgtgtaaacttgcctattgttcctctatgctgctttggatattcaatattcatggtatattctccatacaatacaaatacttcacacaagtgtttaattcattataagtgggtttggtgtcttgtctatacggagtatcggattctattgtggagcaccctggagtgtggcagggtggggcacagggataataatgttcattgggagggagagcatgatgggaaagaggtgagagaatagccacaattactggttaaaaaagaaatagtgctaagagctacctggcaaagtggaaaaaggtaagaggtgatatttcataatcctacaaataaacagttacccgcactatcatgttgatgaatggtatatcacttaacctagttaaaattgccatcatacattgcctcctttccaacgctacactcgcctcaaatgtgttcttcctcctacagacagaatcatgctttaaaatattgaatgtatatgtgatgatgtggaaaagttatcatgagaagagctgtaggggaaggcaggttcagtctcatgtgttgcagagcagcaaaagttgctgtttatggagcagttcctcagttgctttaaagagctcaggatttgtacttgggatcttcggtgggttctgtctgtgttggtttctggatggctgctgttaggtaagtttcttaagcatcttgagccttggctttccggctaataaaatgcacactgtcagtcattgtgatcaactaaagaatatggaaacaacttgaagagaccttaaagctagatatgtgattatggtcattttcatgcagaaaccacatgaaaaaggaccaggcagcagagctaacacaccccgcaagtggtgtgtgacagggtgagaaagggacagtagccccctcttcccccatttgtccagggtcaactccagccaggctgtcacactgtttgtgtctgctccacagctgtctctcttggagtgggtgaccctgtattgcctggatgggggtgatggtgtagtagcccctcagtagaggaacaggaggaa

SEQ ID NO: 78535 - DNA, 1464 bp, Homo sapiens
cattagtccattcaggagggtggggccttcatgacctaagcatctcttataggttctgtctcccaataccatcctagtggaaattaaatttcagcatgagttttggaggggtcaaacattcaaaccattgcagttggccaggcgtggtggctcatgcctgtaatcccagcactttgggaggccgaggcgggcggatcacgaggtcaggagatcgagaccatcctggctaacacagtgaaaccctgtctctactaaaaatacaaaaaattagccgggcgtggtagcaggcgcctgtagtcccagctgctcaggaggctgaggcaggagaatggcgtgaacccgggaggcggagcttgcagtgagctgagatcatgccgctgcactccagcctgggtgacagagcgagactctgtatcaaaaaaaaaaaccaaaaaacaaaaccattgcagttatatgttttgcaggtatcttagactctttggcttattgttttactttttgacattctttcttttctccttttgtaaactttcaattgaagtatgacatgcttacagattaatggtgtcttttggtgaacagaaattcttaattttagtgtggcctagtttagaaatcctttcttctacatttagtgcttacagtgtcatattttaaaagtctttcccttccccaagttcatgaagatatttttctgtattttttagaagctttccattgttgttttagtgaatttttgttactgttttacctctcatgtttgtttataacccacctagaattgatttttgtgtataaagtgtatcacttttaagcagttttatggaaattggactggtgactaatttattttgtttttcaagagttgtgaaagggttgttagtggaattaatgcatgattgtttaactgtatcacatttggacattgtattgtccactatgcctgtgccctaatggacattttaattatttaatgtgtgtatgatatgaaaataatgtatgggtaatggaaatttttaatatttaaaaatgttgacatcacacacattatttacaaagtcagtagtaaagaagggcttatgagaagccctagcccctggccccaggtttcccatcaccatcctaagacaggtacttttaacaggctctgtttcaggtcatcactaatattttaacattctgcttatgtttctatttcttgattgattaaaatatcaaattctctggacctttactgaaattaaaatgcctttaattaaatatcttcagtatggatgttcttatttttaggagggattttgttaacaaagaaaacattaggcaaattcaatttagcagacgttatatgagcaaagaacaattcatgaatcaagcagcactcaggaccagaagaggttcagagagcttgactcagtagtgtgagcaaccagcttttataggctgaacacagaagcaaattagata

SEQ ID NO: 78536 - DNA, 1048 bp, Homo sapiens
tctattggattgcctgcccttttctgattgattttttggagtttatttcttattctggatatgagtcttttgtcagacctactatcttgctgactcagggaaaacctcagtttgttatgctgtaaaactaagaaaaaaatatggttggtgtaaagattaaattagataaaagaagtcaccgtttataaactttagactgctacacaaatatgaatttatattatccagctattttctctgcaaacaagaatttagaaatggtggtggttaggtctattgttatgtttttgcttttttttttttctcagcatctacacaaaggaaaaagaaataatgtgatgggagctctgtaaaatcacatggaatgatgttacccagtaattcacgaaagaataattgctgcagaaatgcaagatagcacattacgcattaccacgacagttgtactctaaaccagatagacgattattcagagagattgattttaaaaagcacgatcacttaaatcaaagcatgctctcaactgaagagctcagatggaaaaagaatgaagggagttaggcgcgttgactcgagggtgccttgccacaccggccttctgggattctgtggcgggctggggaccctgcctcctcctgtcttcatcccagagggagaggggagtgtagatcttgcaggagagccgtgtgtgtgagtagccacgtggtgacagccattggcactgagtgacatcgcacagattgcagcatgctcctcctcttcccacctgctgtagcagacagggcagctgtttgcatccctgtttcggaggagagaacattgaaatgcacagaagccaattgcctgctgagtcgggagcccccagggtcttttgcctgtgtggactctgctcctccatgccctcctgcccagttggggagggcaggaatagccaggggggcagcttgaggatctggaattgctgaaacccactttcacagtgcaatggtctgaatgtttttttcccccactaaatgcatatgttgagatctgaatccccaaggcgatg

SEQ ID NO: 78537 - DNA, 1029 bp, Homo sapiens
gtgcataggcttagctggaggcagaactcagggaggtgttttggaaatgtaggaaaataagctctggagtcagaaagatccaagtttgaatggctgcttctaaagtcacctcatctttctcacctttagtttatcacctgggtaggctttaccttcaggtgtatttcaagagcccgatgtgcctcctagaagttagaggttgagagaaaagcccagatctgcagggacaaggcagagtcatggccctcatggcaccactcacacagggtgcagcagctccacacagggccatggcccctttcctgggggagggaggcataacatacttgtatttgtttaaaagcatatatattttggaaacaaacctgactttaaaaacttgtattttcacctacttttatgtttttttttaagcatatgaattatttaaaaatacaaagataaatagctaaatcattagcaggcatcatttctggatggtaaggttgcagagttttaattttcttctttatacttttccatcttttttaagtgctgtataataaatgtgtcttactttggaataaatagaaaagcttaactctagggaaatgctgcttgcatatattggaagtgcttggtgcattctaatttccacacacaacaacgctctcgacagtcagatccccatgtgaataattgtctcattctttcttttgtaaaccatattatttatgctgctgctttttttttttttttgaaggatgagaagaaccaagttttaaccaccaacatttggctgcaaatggtaagttaagagaatgacaatctctcccatgggctgcaagatcttgcacccaagattcttgttctgatacctgagatgcttgcttctgagaggtcctgtttaggaaaaaaaaccaaaaaaacaaaaggccatggctgtcacaccaactccacacctgccaacaatgaatgctggctgtatgacactacagtctgcagtgctcaacacatgcacaagatcaacacataggacaaggtaatgtg

SEQ ID NO: 78538 - DNA, 1055 bp, Homo sapiens
agagagtccccaccagcaagaagccctcaccagatgcagctccttgacctcggactcccagcatccatactgtaagaaatgaattcttttctttataaattacccagtttcaggcatcctgttataagcaacagaaaacaaactaagacagtagtagttccaggtgagcagaggtaattttgctgctggagatctcagagaaggagttttgaggatgtgctgttacagcttctgtattaatcagatattcacacctgagctggagggaggctgtttctaaatcatgtgttgtgggaagagggggagcagcagcttgttttaaagcagtgagtggagccagccaacctatgtttgcatcttcaaagtcatcctccgaactgtccatctcactctcccaggtctcatcatggtcgctcttgctgtttgtttttaatttgttcattcactcaaccaatatttagtgaaggctccctcagcataatcacacactgttctgggaactaaggattcagcagtgatccagccagacccaaacccaccagagaaacagagatggggaagagaggagggaggcatgggccagattgtaggtgatcccagaaaaatgaagcaggaaagggaatagtgagggctgagccagaggtcagggagagaccaggagacagactagagggctgcaaaggaacaggccctgtgatatcaagtggagagagtgttcctgacagaaggaacagccagtgcaggggccctgtcaagaaggcttgtgaaagacttcgaaatgcaaaaaaaaaaaaaaaatagtgagggaagagaaaaaaagacacctcggttcctacagaatactaggcatggtcacaggcaccttcctggtcatctgagtctgtagtggactgtgcctgtcatggtcttcaaactagttttcaactctaacttctagaaaactgatggcaaaaccaatgattctagtccacggagaagcaaatgtgttttgctggtggaccaattcccctgttgacagattcagatcagtgtgcctggttgtctttgtatgtgtc

SEQ ID NO: 78539 - DNA, 1034 bp, Homo sapiens
taaaaagagacatatgtcttgaatatcttgctgcgattttaaaacactcatgataaaggcaaaacccttataagctctcaaagcaaaaaaaaaaaaaaaatcacaatagcaagaaacagtagcctagtagaggactactttcaaatattgaagggcaattatttttaaaataaaatattttgttgaactgaactttctgggcaaaaatgaaagcagttttaaatatgtaaagactcaagtctgaaagaattactcagaattgtattccagcaaaatgagaagaaaccaagaaagaggcaaacctggaatataatcagcactcgtgagtgatggaatcactaaaaggcatagttcagtctaattatttgatgatgttgttaaatggtttttgttggcaggggactaagaagtagaagaagtaacagcagacgtttggtgtcggccttctttggttcatgcatgataaagataaacctcgttaaatgcacaaaatgaaaaaaagtacaagtaaatatgtatgttaaatatttgaatagctatcagagtaacagaaatagtgtcataacttccagaccactagagataaaataagggaccaaaacctgaagtcgatacctctaatgcaagaacagaaaactgagaaacagtgtaagtatgaggtctctcatggatccctggcatgggtatgaacattattttaaactgaagacatttgagattaaacagatagggaaagaagctttttcagagcttacttatcagactacagcaaaaacttctgggagcgagcctggcataaatctcctttctaggggagtctttactggctggaaagaagatggaaaagaccagttgcacctgcataaacaaaactttcccacagaccttcttatctcccatttgctcccctagaaaccgatttgttcttttcatagaagcccttcctctcccctctctctccgctgtgcagtatataatctcacctttagctgtttgaagagttgcatttttctttgtgcccctgtgcccatgta

SEQ ID NO: 78540 - DNA, 1028 bp, Homo sapiens
agcatgtcatacatattgatacattgcatttttattcagttcagtgtatttttttccatttccttgagactttctctttgactcatggattatttagcaatttggcattcagtttccaagtgtttggagattttcttgtcatcttaatgctattcatgtctagtttgattccattgtgggcaaatatcacactttgtgtggtttcacttcttttaaatgtattgaggtttttcttaggctcaggatatggtctatcttggtatatgctccatgagtacttgttggtagacagtttcctaaatgccaattaagtcctgttgtttgatggtgtaagttcttttatatccttgctgattttctgtctagttgccctgtcatgaattattgagagaggagtgttgaaacctccaaatatagttgtgaacttgtctatatcttttgaaaatttccatcagttctggggtcatgtattttgaagctttcttgtttgagaaaggatttatgattgctgcatcttcttggtagactgagcttttatcattatgtaaatttatatctatctttcataattttcttttctctaagatctgctttatctgataataatatagttactcttgtgttttttgagtaatgtttgcagggtatgtgtgtctgtgatatatatatattatatatatatattcttcgttttttctttcctgcctatgatgtacttaacttttttttagaatttcttttttagaatttttagaatcttttttatttatagtgtttttgagtatgtctctttgtacacctatttcatggttgctcttgatattacattttatgtatgtaacttattacgttactgactactgatataaacatcttactggttcaagtaaagtagataaattttctcttccttcttttattgtttttttctctctttcaagaacttccttgagccatacttcttgggtgattctgctggtcactatttctcttagttttttcttcatctgaaaatgtcttgacatttc

SEQ ID NO: 78541 - DNA, 1077 bp, Homo sapiens
tggcatacttgtacatacatcttgacatagttttgtgactaaaacggtataaattccaacttagaaatggaattgctgggtttaaggctacatgtatttaaaattttgatagctattgccagattatcttctagaaactgatcgaaggatgtaactccatcaagagtacaataaaaggcccaatttctcagctttctataatagcactgggtattttcaaacttaatgtttttcccaatataattggtgaaacatgatatttacgaatattattctgattttggtttattttgtgtataaaatgggacatcttttaaaatttttttgtagttttaattttgatacatttatatattttacccagttcctaattgggttatttggctttttcttaatttgctcatgcactttgggacatttttgtcttatgtctttaaaatatttttatcatttgtctttcgatgttatttattgatttccttatttattggcatagagtttaaatttttatgttgtcaatttgtgagtatttttctttgtcgatcgtgggatttgtttccagtttttaaaagccttcctcattctgagattataaatagacttactcgcattttcttctgaaactttatggttttattggtttaccttcacatcttcagactccctggaattcatttgttgcaggacatgagggaaaaatccatactttttcctcgaaatggtggtcagcagtatcaataaatatgtaataatgcatttctaaaatacagtcatagtgttttccccagttgttcaaaatgcagccttatttgtaaactaaatttctttaagtgtttggttctgtttctgttctatttatctctatgaatgcctttcatttctaaagcattattcatactaatatcagtattttcaagtcaacactcccatcaactctgaatctctctctcatatgaatcttttttcaattagagtcacaatgaatttacagattgagtcttcctattcaaaagcatgaaatcttgtgtttaagtctaattttatgtaacttagtagtgttttatgattttgttcact

SEQ ID NO: 78542 - DNA, 1032 bp, Homo sapiens
gattataatcgttaatataattgctgtgactattcaaccttcagaaagctggtttccatccagccctggctctggggctcacaggctctgttgccacataaggaagcagcactgggcaagttcctggaccacttgcaccagcaccatagggagcatgaatccactggtgatttgtggttgttcatttatttcgtataatgagaacaaactccctgccacatttaaataaaagcctaattacatctccattgctacagatgctattactacctttctgactggctataaaagttaatgagttttttattgctttgcagagtttcaaaataaaatgcaaagtttagagatagatgctatataaggtgaggtccactctgctttgctctttttgagggaacctagaaccttaatttaatgcttttcattttagaatatggcctgctttgcattatttcccatttttttggacataagtatggcacagggattaaatataactaagcaccattgaagaaaattgcatcaaatcagctgaagataagtgaagaatgtttttatgagctacacgtttttgaaagagatacacaaggctgacaacctaataaaagtttaataatgtgtgctcacccatttgctgtgctttcaaggtcctctgcaacactgatgtgcttgggaacttccaggatggatttccaactgttagtcaccaactagcagaggttagttgtattgtgctgccagtctcatatatgtaaacctgaatttgtttttattccttcctgcattgcttgatttttaaaaattcagttactctaggaaaagaaaagccaaaataagccagaaatttatattttttattcatatttcaagaatcattctaaaagcaagtgataaagttaactaatttctctctgcatttagtacagttactttatcttcccaaagaggaaaccaaggcctggaatcaatgccatgtaggcacgtgcaggtctgtgtgctacactgtggtggcaccgcacagggcacctggaa

SEQ ID NO: 78543 - DNA, 1032 bp, Homo sapiens
tggattcaaaaactgttgagtgtgtgggttggggtcagtgcctttcctttcttttttaaaaattatttttaagttgtgaatacacataaaaactcatcatcttagtcatttctaagtatatagtccagtggcattaaatgcattcacctttttgtgcaactatcaccaccaaccatctataaaactttcatcttcttaaaatgaaattttgtacctattaaatgcaaacatgctatccccaactccttatcccctggcaaccaccattctattttctgtctccatgagactgagcactccagacacctcatgtaagtggaatcacacagtgtctgttcttttgtgcctggcttatttcactcagcataatgtcctcgaggttcatccatgttctggcgtatagaagatgtccttcctttccgaggttgggtaatgtttcattatacacatggaccacattttgcttatccattcatccacacaaggacacctgggtgacttcactttttggctattgtgaataacgccactatgaacatggagtcccctgtatttctaatcataggtattggtcttcggtttggggactcatgaaattccactcctacttctctgttcttctactgctcctccacatctttgttcttaccatgagtggtattttgtttctaataaatgaaaaagtatgatagatatgatacttcatttaatgaaatgatcaacacaaacctcgggcaaatcacttaatttcttcacaatgtggccttctcatctgtaaaacagtaatgtcattctttacctctttggcttatgaggaagataaaatgagaccatgtctgtaaagagcttagcacttagactgtcacgtagcatctgcccagcaagttgaggttggtacttggttccccacagtggggagcagggattgaggcagaactcattcatgtgggcatagggaacagatagagccacaagctcagagccagagggactgtgagggcaggtgcacccttaaagatctttaggagaaaa

SEQ ID NO: 78544 - DNA, 1599 bp, Homo sapiens
ggttgctgaacactgaaccgttagtgaggaaataaatgtttttcaagaatcacagtggaagtgaggctgaaggcccacatttcattagacagaagagcacactcctcccgtgcccctatgaaatgtaatgtctgatgaagcccagcaagaattttactgaccctttggggctttgcaatttggctgaaacaggttgtgaagtcagcagccattttcttcagccttcacaacctgaaaatctttcactcaatccagaaaggataggaatgagagggtgaggatttgtgagcgagcttctcaatcatagcaagttaaccagattcgaaatggaggaacgtgagtctctcacgcaccagtcttaggtacagattttgcatctggcttttcaacaactgtgcagaacttcagaggtcccttctctcttctgtaagccacgggtcttccagcaccagctgaccaagagccactgaatttttatatttctgatatctcatttttgataaattttttgcctttggagggttatttatgtgtttattatttctatggtgacaaaagtgatgaaggatcttatgggattttaaaagaatgccctttggaggctattctgattaccaaaaagattgaacaggagaatgggctgtttaagaaaagcccaaaagttctcatggtaactagagctgttattgacagaaggggattggagatggaggtatctctgcccaaattaacccattaacatatcaaatcctttaaaagaaaaaaaaagtcctacatgattcaatatttgagaatattttctcatacagatggtataggagggttcgggtaaaataaacagaacaacagcgaagccccaggaacccggacctcatggcgaaattcacaccctttttgagtttttgtccattctgcagctctgagggcccccccacctccacgcgcctctgtcaggttagaaagcagaagggtcttccaaggccagggcttggctggacttcagctgtgcggggatgcggagctgcaggagaggggcgccctctggtggccgctacgggctgtgctgaggccgagtggatgggaaatgggcaaaggggcctagaaaacccttcctgcagactcgcggaaggaggaaagtagggaggcatgatgagagcgctcatgagagatgagtggtaaccacagctgtggccaagccgcttttttacaagactgagattcccccagggcctcgggtcaccctggctttcctcaagacacccccgacccagccctactccctgaggtcctgaagggacctctggggtcctggttggtacggattctgcttgattcgtgtcggggttgatgcttgtcccatgtggtggttaaggatttgggacgtgaatccctggggaagttggtgtttgggacagattggaagaggtgaagaaggaaggagaggaactgttacactcagaaagggaggcagacagagtagtaaaaagaaccgggcgctcccaagctgagctgagacctggcctctgtgtgtggcgctggctatgctcccagcgaggatggagagcctgcccttggcactctctggacacttccaagggg

SEQ ID NO: 78545 - DNA, 1085 bp, Homo sapiens
tcccagcactgctgttttaatgaatgcaggatgattcagttcagatgtaccatgatttgattatcctaaagaaattacaataaccatctttacatctatatatctgtacacatccttatttatttagaaggaattcttagaaactgaattgctgaataaaggcacgttttatacgtactgcaaaatggctaagttttttgggtaatctacttcatggataataaactgcaatatggtatactaaacctgacttcttcccagcatgtcacagatccgcctccacaagttaccattctgacttcaaatgacttgcttgaacaaactcacgtgcctgatgttgactcacctatgttattgcaccatgaaagatgtggagcgcatcatgttttcacacgaattagcatggaaaggtggtaactttatagttttaccacctcaagcttttaatacctttcttgctgcaatgtattgccaaccaatgtgaaccataatagcaccgagagaaaacaggatgcaggagggaaggaagaaaagtaatattccttaaaatgtgcagcaccatgttctctaaattttgaaatactgaacaaaaagcattaacaggtttgtaaacctttaacacaaattgagttctatttcctctgctggcccctgggaagggtatgtggcccagtggtggggacctgagagttggctggaaagtcagggctctgggtctttttccatactttaaagctcagtgagcaaatttgagatcaattaagttccccatctggaaccggatgaaaaagcttgccagatccacctcacgtgataccacaatttcctatgaagattactattaaattaaggaactatgatgaagaccaactggcgtaactgcttgggtttagttatcttccagaaatgattcatgctatacgtatttaattagtttttttcagttatttgaaaggctcctttcaggaggatgttggaacacaattacatgtgacatttggctgagagcagtgactcctaggtcgtgacctgtccacctgcgtgtgcccgtagcagcattgagcaggtcttcccagaaaagccaa

SEQ ID NO: 78546 - DNA, 1940 bp, Homo sapiens
ggggtcctgattttgaaaagaggagtggaccaatcagatgtggagcgctgtttcgcgctgccatttgagcctgggctgaaactgcgggtgtgacccccccgtggtggctctgggtgtctgcggaggagctgggggcggaagcatgaggctaacggcttggcttcagtgaacgcaccgggatgtgcaggccgggaggtagaggcaggctgatgggggagggaacgagcagcctgtgagacggggtgacggcggctaccagcccgggcgggcaccgggactggaagagttgcctgagcagccggctggtccggcggccaggctagggcgggggcgagcgcccagttgagcctgctggggctggaggagcgagaagggttttcttcacatttcagagcgaaccagacggggacagtaaggtttggaggaagggggatcgttggaagtagcaagaagtggagagaatctggcaatagacgagaaaccgaaagaatcagaaagaagtctatgtgagtagctgaaagcattgggtgaccagaaagaaggtcggtgtaagtgaaggaagagtgaggtgtggctggatcaaagggctaagagaagcgggtctgtgtaagtggatgtgagtgaggatcaaggaaaagccgtggaagtggccgggggtcggggccgcagaagtgccagacggggccggaaagcagccgagcggagttcaaatttgagagcgtttggaaattggaagacttggtggcgaacgagggtcaggacctgcatcctgcctcagagagttatcgacgtatccggaatgtgggatcagaggctggtgaggttggccctgttgcagcatctgcgggccttctatggtattaaggtgaagggtgtccgtgggcagtgcgatcgcaggagacatgaaacagcagccacggaaataggggtaagttctgtgaaaagggatttaggtttaaaagaaagggcacaccctttatcatcacttactaccagatcgtgctaaaatgttcactctgtgtatcaaaaagaatggttaggtgtgtaattcagttcagatggtcgattgctgatatttaaaaagtgacattcttgttttttttcccccaaggatttttgatcattgagagaaagttgcaggattttccaacttcagcactattgacattttggattagataatttttgttaggggaagacgaaatgctgttctgtgaattgtgggatgtttagcgggatgtctgtcttttacccactagatgctggtagcatctctcagttgtgacaattaaaaatgtctccggatattgccagcttactgtatttggaacaggtagtacgttgggagggacaaaaactctacccctccacccttgttttagagtaaggttgtagagggacaagggagaccagtgcattttctacatgaatctgtagatgaagaagtatgacagaacattagaaataggcttcaaatgatgactgcatattcactaatttgggaaacagatttgctgcttggccatgtcatacttttgggacagtaaatttttttttgtatgagtaaattgagaagccagagtggaataattgagaagttgttgatgttttggtggttgaaataaagggattttgaatgagattttaatagctctgccacataatcaggaattccattgtgaaaaataagctgaatgtaaagcattttattttaaatttatgtgcctaatttatatggtacttcctagtacttggagacaagctaataaaattaatatacgttgcttttaatagtttatggtttcttaaaaaaagtgcttggagaagaaaaccactaacaaaagtaatatgtgtgcctcttaatcgctgataaactttggagaagttatttttgttggtagcaaattaatggcaatacatgtacttacatttaaaaagct

SEQ ID NO: 78547 - DNA, 2403 bp, Homo sapiens
tctgtgtgaggataccgaggaacagaatgttaatttgatccaggtcactcagctgttaagcaagagttaagatgtaaagcctggcatttttgtgtgtgcgatggctcacgcctgtaatcccagcattttgggaggccgaggcgggtggataacgaggtcaggagatcgagaccatcctagctaacacggtgaaacccccccccccccgccccacgtctctactaaaaatacaaaaaaattagccaggtgtggtggcgggcgcctgtagtcccagctactcgggaagctgaggcaggagaatgggtgaacccgggaggcggagcttgcagtgagccgagattgcgccactgcactccagcctgggccacaaagtgagactccctctcaaaaaaaatacacctgtcatttttgccttcaggagcctactctcttaagcacttactatactatactgtcttttcagcttacaatatttgtaaattaattggagccaggtgcttgaaagggaattagtaaaattttgttactgtgttgcgtcattgacaatgctgagtggtttttattgtaaatataaagttaaatataatgctcataaaacataaatacttcttggttgataacttgtgacatcaaaaaaagtacttcagcattcacagagcagatgcatgtaaactaaattaacatgtgagattatgcatacccacttaagtttgaataaccagacatttacaggcttgaatttacctttcagtgctgtggaaagcgacacatttttaagaggttcgaatgcatgcacaaagatagtggcagattctttattcttcagtgtgcaaaaacattcaagttaaccaacacacagctttactcttgggatcttcagtgtattaaaatttgaatgtgaggttttaaaaatgggtttccagctagttaaatgaagtttgacttaaatatttgcacactcctgccttgcttactgcagggcatggtttgaaaagcactcttctatagaaggtggaaaatgtattaggtataaaaataacttcttctgatgtaattttaggaagactcaatgaatgacaggaattagtgttttgcttttcaattgacttagtcttttgtgtaagtatttataaggtgaccaaaagaaagtatctagtaagtatttataaggtcattaaagcaacctatagtattttggggtaaatgttagtgttttggaccaaattctgttttaagaatttactgactaaccactaaccaaattgactttatgatcagattggaaacttgagtttactagattatttgaggggaatgacattatcttggccatctttgtactcccagcactcagcatactgtctaatatagtaattatttgttatcaaatgcacttgaaatgattatttttgtcttgatagatagtttatcatttatttctgatttttttttaatttcctgagttctttaatttgcctaaagtttaagaaaactgatattatgcctaatatttgtgttagagtaactgaatttgtcattttagggtaaaatatttggagtaccttttaatgcactgccccattctgctgtaccagaatatggacacattccaaggtaagcagagtttgaaatgaagaaggccgggtgcagtggcatatgcctgtaaccccagcattttgagaggccgaggtgggcaaatcacttgagtccaggagcttaagaccagcctgggcaacatggtgagaccttgtcgcaaaagatagaaaaattagcttggcggagcacacttgtagtcccagctactcaggggcctggggtgggaggattgcttgagcccaggaggtggaggctgcagtgagccttctagccagggaaatgaagaagaagagagtaagcatttcaaactggttttagagagtttaaaagaaatagttgattaaaacataattgtttcaaaccagcaaatgatttaatctctcataatgttaaaaatatttttttaacttttacatattttaaatttataatttgtactcattcccaggattgaattttaaagtccagtaatgagtaaatgttagaaatcacaaaaaatttttgttctgttaagtcagttttcagttctatgtgaattcttttgccacaactcagattaagtaatatactgacttaccaattcagtaataattttgacttttttttgtttgttaaaaaaatattggccaggcacagtagctcatgcctataatcccagcattttgagggccgaggcaggaggatcgcttgagcccaggattttgagaccagtctgggcaacaaagcaagactccatgtataaaaaaaattttaaagaaaaatcagctgggcaaggtggtgtgcacctgtagtcccagctacctctga

SEQ ID NO: 78548 - DNA, 1323 bp, Homo sapiens
tgttggggtgaggaaaaaaaaacctcgccctgtttttgggtgatgtaggagatgagaaaatcacccatgaagagatagtagataaaagaaggtggccttggacagagccctgggttgttccagcatgtagaggtttcacataagaggagtgagaaaaggaatttgagaaggagcaggcagggagatagcaggaaaactaaaagagtagtgaaaaagtatttttgagatgaacagggaagggatcaggtgtgtcaaatggtgatagatcgagcaatacgaggacaacacactgaccatggatttggcaaggcagaggctgttagtgagcttgaagagagctatttctttggagtaatgaggtatgagaatgattggataggggtgagtagagactgagatatgaagaagtagaggcagaaaaaaaagacaagtcttacgctctgaagggaagcagaaatgaagtaggattgagaaagataaaatttagtgtgcacattggagttgttagaagtaaaaagatgggccttggagaagaatttgggaagccagtagacaactaaaagtaacatttcatctcaaagactacagagatttgtggctttagagcctctgaaaggtacgtagtgcttggcctgctcatgtatgttagcagaggaataggatgtgatatgtatgtctagccacctgaaaaaatctctctttcagctttcttgtcgatgcttgcacatctttagaagaccatattcataccgaagggctttttcggaaatcaggatctgtgattcgcctaaaagcactaaaggtgagcatattgttgaactattaatttttcatttgagccattttctgatttggtttttaaaactgaaatatttagaactattaatatgaatagttgacagaaattgaatttgcatttttttcatggcagaagattttttttttccaaaagaaatggtatattatttctatcatgctttaaaaatttaatagggtacttttaaattcatggtccttatttctatcaagtattatgtaaaatgaaaaaaatgtgttaagttatattgttgttagccttctagaaggagtgatagagctgagtgtggtggcacatgcttgtagtcccagctacttgggaggctaaggcaggaagattgcttgagcctgggagtttgaagccagcccaggccacatagtctgtgccacatttctataaaaataaaaataaattcaaaaatcattaaaaataaagtagtgacatatattaaaataagagttaagagaaatttattaaagaaaagtgtaattagagtataacaaaag

SEQ ID NO: 78549 - DNA, 1050 bp, Homo sapiens
aaagcctttgtttactgggtttttaaaatatttctgttttgcttttcaaaatttccctctccctgctgtcagtgagcctgcttattctagacatacttgctgccttctgatacttccaactttttatgtgtaggtctgaaaatcagataaagatgttcaatttgtgtggaaaagcaaagtatgaactctaagattagcatggtttttagaatacatatttaaatatagagaggctatatatttctggttctttcttgtgttcaagccaatcatgtagatgaagggtaactattttgacttgtgtatgactgataataaggtcttcaaaatgtactacatacgttattttaactcttctgtattttcacgtttggctccatctaataaagcgtttattcacttaagatccagtgagaataagatggacagcagcaatcttgcagtaatatttgcaccgaatcttcttcagacaagtgaaggacatgaaaagatgtcttctaacacagaaaagaagctacgattacaggctgcagtagtacagactcttatcgattatgcatcagatattggtaagatgtagttgcattattaacagaatttgtttaaatgaggaaaatctctgtttctttcaaaggaactatgaaggcaactgttagaaagttggtatattactgacctcacccccaccctacagtaccggcccctcctgcaaagaaaaaaagaaaagaaattggtatattagtatctaaacatttttggggaagagtggaggaaggataataattgtcttacttgtgaacattttcatttagggcgtgtaccagattttatcctggaaaagataccagccatgttgggtattgatggtctctgtgctactccatcactggaaggctttgaagaaggtgaatatgaaactcctggtgaatataagagaaagagaagacaaagtgtaggaggtaagtggcggtcccattttatggaggtacagtgatttgctttaatcgaaagtacatttcacataaagaagcatgaactgtggtatgtgcc

SEQ ID NO: 78550 - DNA, 1903 bp, Homo sapiens
ctctactgatcttttaaatacttttattcgtgcctccatttccatggttcttgcctcagttcagaccttcatcttttgccttaacatgtaatgatttctttttccctacccttactgtacattatatgtatttgtattacatttctttctgtattgtgtcttttttattttagggatatggaagtataagtggggaatggaataaaaatatatcctttagtatttttcctattttgaaataattcctcttaaataacttaaaatttataagccgatgtaaagttacatgttgaaagaagactgcaaatattaatatgaattattggtgaaagacaagtaaatgtgaagttgtaattgcttatgccttgcatttcagattttgttagtggagcactaaataaatttaaacctaacagaacaccttctattacacctcaagaagaaagaattggtaggtatttattatatgcatttatttaaattaaaatttgtatagtattctataaaatacaattacaataataattacctaacttagtaatcaaatttagtttaatcaaatcaaatattatttttaatagtcatactgtactatacacactatgttgtgacattgctaattacataggctataatgaacccaaaattgtaggcaaaaatttttttagtctcctgtctttaatcttcttaatcatgcttttctgtttgtaatttagatgctattaagcgtgtgaaaatagttcaacctcatttttatcttaggactagaagttcattattgtatatttcaattttttattctaatttgcttgtggctgaaattattcagccagtaagagtcaacatgatcttctgttttctagagtgaagaaatgaactggttaatactcacttatgatgaaaagcaaaaataatatttagattagtttttgtttcaactccttgattgtaatttcttccttacattaatattctttaatgtatatcatatgcatcttttagtctgttagatttaagtaactgctgtctcttaagagtcttgcctctgcgacttccttattttcatttaagtaattgcagagtgttttagttaaacaacatctacttaactgatgatgtaaatatattctcattttttgtttagctctaagtaatagctttataagaagaaattatgtaaagcttttatatgttgtcaactctgcagtagaaacaagttggttttgttttgatattttttcagcccagctatctgaatcaccagtgattcttacaccaaatgctaagcgtacattgccagtagattcttctcatggtttctcaagtaagaaaaggaagtccatcaagcacaattttaactttgagctgttgccaagtaatctcttcaatagcagttctacaccggtatcaggtagcaaatagaatttatataaatggattgtaaagattaaaatgagtgcctattctgggcacagtgcaatttcatattaataataccacccttaggaactagaactttattctgttttatccaacctatgaatttttataaaaccccctgccttttaaaatagacactgtttcaatatagtgtgtgtgtgtgtgtgtgtgtgtgtgtgtgtgttatgacaacatctattgaaagttgtgataacccagagtagtagtttgggcttctggtgatagcattgatgcttaggttttatgtgattagacatcctgaatcctgctatagttacatctgggtctatagctgtggctttattgctgtcatttgttgaattgaggttgccagatgtttgatcatgtctgattcccaagtgggagcgttactattgcaggttatggtttgaaaatgagggtatttttaaagttttagactcaagtaccttttgtaaaagct

SEQ ID NO: 78551 - DNA, 1859 bp, Homo sapiens
tttctttgaccctactttctcagccacaattcaacaaattccatttgcaaaattgaaaatagattgatttctaagtttagattataacaaatatgatgcttttaaaaatatataaaggcaacattagtctgtagtccatagagtatctattcataattgtctcttttttttttttttgagacagagttttgctcttgttgcccaggctagagtgcaatggcacaatctcggctcactgcagccaccacctctcaggttcaagcgattttcctgcctcagcctcccaggtagctgggattataggtggccaccaccacacctggctaattttcttttgcatttttagtagagacggggtttcaccacgttggccaggctggtcttgaactcccgacattagctgatcaacctgccttggtcttccaaagtgctgggattacaggtgtgagccaccatgcctggccataattttcttacagatgtgataaatttgcattgttccatatattctgactgtgcctcctgcgaccattgacacattttttatttttattttttgagacggagtctcgctctgtctcccaggctggagtacagtggcatgatcttggctcactacaacatccacctccgatgttcaagtgattcttgtgcctcagcctcctgagtagttgggattacaggcatgcaccaccacacccagctaatttttgtatttttagtagagatgggatttcaccatgttggccaggctggtttgaactcctggcctcaagcaatccgcccacctcagcctcccaaaatactgggattacagacgtgagtcacggtgcctggccggacacatttttaaagtgactagactgcagccctagaataaagctacttatgtcactttagatgtataatattggcttccaaaattttctttagctaaatgcacccaaaagtttctaaggtggttgtattttttccgttttcataattgaaaaaatgtgaatgtctctgggaaactttgtgaattctttattaataactcagatgaattgagagggttcatgtttgttgaatgtgtcctgggcgtgattcaaacataaatgtatatggagcctttgttcataactattttacttctttcgtaattgtttactatagttgatttcataatataaatggtgttaaataattgagcttctgttgtaccagtaattatttgcatggaacacagcagcagccaagggattaggaatgtgttatagaataattagtttttgtttacttgccaaaaatattgaacaaattacattccggagtcaggtgggtagcagttggccagcaggtatatctcaaatactcagattccaacttgtttgccaatagcttattttttataataccattaattggtattatgtactagatactgactaaatattttatatagataacagtaatattcatcatagaagtccgttttcagagcctaaagccatttagtaagtgatggagcaaactcaagcctgtctccaaatcttgttctttttccagtctgcaatggtgcctatccctgccttgtattattaacagagtttaaagaaaagctctaatataaaagtaatgcttaagctgacctttaattggcaagtcaaaagtaaaaaatgaatgctttttcttagctgagttgggttatttgacacttgaagtttctaaccagaaattaagtgatttcggttgttgcttgggatagaaattaaggctttgaatctaattgctgctattactattttatactttaaaaggaaaatagatatgtgtggtatattacatgtggttatttttgtagttcacatcgatacaag

SEQ ID NO: 78552 - DNA, 1111 bp, Homo sapiens
caaatactttattagaattaaatgcttagtgacttatttgccatgtgcttgggtattatttcaaaacaaggttaaatacaaaggattaagcactgaactgctttattttaggttcagaaaagatcagtaagtctgaggaaaccttactaactccagagcgactagttggaacaaattaccggatgtcttggacaggacctaataattcaagttttcaagaagtagatgcaaatgaagcttcttcaatggtggaaaatcttgaggtagaaaactctttggagcctgatattatggtagaaaagtcacctgctacttcatgtgaactcaccccttccaatttaaacaataagcataatagcaacataacaagtagccctcttagcggggatgaaaataacatgaccaaagagactttggtgaaagttcaaaaagcgttttctgaatctggaagtaatcttcacgcattgatgaatcagaggcagtcatcagtaactaatgtggggaaagtaaaattaactgaaccatcttatttagaagatagcccagaggaaaatctatttgaaactaatgatttgactatagtagaatcaaaggagaaatatgaacaccacactggtaaaggtgaaaaatgtttttcagagagggacttttcaccccttcaaactcaaacatttaatagagaaacaactataaaatgttattcaactcagatgaagatggaacatgaaaaagacattcattcaaatatgccaaaagattatttaagcaagcaagaattctccagtgatgaagaaataaagaaacagcagtccccaaaggataaactaaataataaattaaaagagaatgagaatatgatggaaggtaacttaccgaagtgtgcagcacatagcaaggacgaggctagatcctctttctcacagcagagtacatgtgttgtaacaaacttgtcaaaacctaggcctatgagaattgctaaacagcagtcattggaaacatgtgagaaaacagtttctgaaagttcacaaatgacagaacatagaaaggtttctgatcacatacagtggtttaacaagctttctttaaatgaaccaaatagaataaaagtcaa

SEQ ID NO: 78553 - DNA, 1115 bp, Homo sapiens
aaatcagtgagctgtgacggtgctctttcctcttgtatagaaagtgcatcaaaagattcctctgtttcatgtatcaaatcaggtcctaaagaacagaagtccatgtcatgtgaagagtcaaatattggtgcaatttcaaagtcaagcatggagttaccctcgaaatctttcttaaagatgaggaagcacccagattcagtgaatgcttctcttaggtctactacagtttataaacagaagatcttatctgatggccaagttaaggttcccttggatgatctgactaatcatgatatagtaaaaccagttgtaaataacaacatgggcatttcttctgggataaataacagggtccttaggagaccatcagaaagaggaagggcctggtacaaaggttctccaaaacatcctatcggaaaaactcaattactaccaacaagtaaacctgtagatttgtaattggtaaatgttatacttgtcattaatgtaaataaagtgagtaattggtatgacttgcaggatgatgtacatgttagtttgtagctcaggatgattgttaagcaatagatttgctctattgaaaatgtttcatttttttcactgtacaagcaacttagatttttatttgtacaaattacttctttgtttttcttaatgatggcaatttttaaactttaattttattgtgatctcttaaagcagaggttagactttacctttctgactctgtcgtccaggctggagtgcagtggcgcaatctcactgcaagctccacttcctgggttcatgccattttcctgcctcagcctcccgagtagctgggactacaggtgcccgccaccacgcccagctaattttttgtatttttagtagagacggtttcaccgtgttagccaggatggtctcgatctcctgacgttgtgatccgcccgcctcagcctcccaaagtgctgggattacaggcatgagccaccacgcccggctagactttacctttctaaagaaattgtttactggatttataagaagttaatttttgaaaatgacatatttttgtgtgatagaaagaatggagcaagttgtgcctatttcctccaagtcagataaggtttcta

SEQ ID NO: 78554 - DNA, 1052 bp, Homo sapiens
ttggaataatgtgcttaacatagcaatttttttttcttctttttgagacagagtctcactctgtcacccaggctggagtgcagtggtgcaatcttggctcactgcaagctctgcctcccgggttcacaccattctcctgcctcagcctcctgagtagctgtttacaggcgcccgccaccacgcccggctaattttttgtatttttagtagagatggggtttcaccgtgttagccaggatggtctccatctgacctcatgatccgcctgcctcggcctcccagagtgctgggatcacaggcgtgagccaccacacccggcctaacatagcaatcttaagtctcccctatcagtatctgtggaagggatgaatactgacttgaattttagttttctattactgtataacaaattaccacaaatttagcagtttcacacagcattcatttattatttgagttttccactgctcaggagtttggtgcggattagtgttcaggtgctgaccagaggtgtcgtcttggctgcagcttgcgtcctcttccaagctcgttaaggctgttggcagaattccatttgaattatattgtaggactgagttccctttctcttgctggctgtcagccaaccaaagcccctctcagctcttagaggccgcctcaggttgtaagccacatgccttctcatagctggaaggagaatatctctttagtcttctaattataatgtaatatgatcctgggagtgactatcccatgacctttttcggataacaagggactgatatctcattatattcccagcaggtgggaatcttgggagtcttcctagaattgtatactatagctaggatgaaaactaacaaagaaaatagtccaaagatacttggggcaaaaacaacaaaataaaaagcctgggtttttcccagtctgggaccttggcattgaatttgttgggtggtctgatcatttattcatgtgagttagttattgtttcacctcatccatttatttgcattatctttgctcacactccctgatgctaattccctctg

SEQ ID NO: 78555 - DNA, 1054 bp, Homo sapiens
gaggctgaggcaggagaatcgcttgaaccctaaaggcagagattgcagtgagccaagatcgcccattgcactccagcgtgggcaacaagagcgaaactctgtctcagaaaaataaaataaaataaaatacgttcttttttataacactgactgttggacttcaaatttttcacttagaaatagagacccaaggttattttcttaataaatatcaagtggagaaagagtcctgtggatgataggctacttgaagaggcagatcctaggagcctctactctgccaagctttggccttggtaaaggagctgcagtgcctccgctttgccacagggtggcaacagttgcttcccatttgaggatggcggggtgaagcaaaccttgaactgtaggggacactccgtttctggctagtctctctctgcagttggagaaagcagtgcagctgactcttatgtgtcttgactaaaatctgtttctaggttatcctcaccctggaggaaccaatgagaacattgggcttgtaggccatctatgaatggactgggaccgcccaatgggcccatgcctttggggttgcattttgtccaccttgaacttcaatccttaaagtctctggatgattttcagtttttctctgttgagcaattgcatggatagtaatgagaaattcaaaagaaacggggaggttctttttgggaggggaaaaggataggaaagatgaacacgatgacatgtttgtgtatgtttacagtgtcctgggtatccagaaggcacttagatgtatatggcacaggagagaagtctgggagaaggaagggtttcagagtcatccccgtgttagtggtggctgatactgtaggggtggatggggtcaccctgggtgggtattgagaacaacagggcacctaagacaaaggccaggtagatgaagaagaatccacaaaggaaactgggataaatcggccagaaaggagaagaaccagaaagatagagtgtaatgaaaacaaggaaatagtgttctgagaaggggcagtggttaccactgtcaggatca

SEQ ID NO: 78556 - DNA, 1185 bp, Homo sapiens
ggcatgactacatcgagtcattctacttcttctccccttactaaaagcaggttttagttatgtaaccatgtttagagcggtctagggagtttttatccttatgccttcctcctgattggacaatggtttgcaagaacttgttaggagctgtggaaacacaaatattgggcaaaaaacttgtgtttctatataaatatttacaaacatactagactataaattctttgaggtgagggcctgtgtttatcctatccacgatggttataccctcagcatttggttcagctgacaatcttagtgggaatgtgctcaacattctcaatccacaactatttattgaatctgagtgctgtgttagacaatctatattctatgtgcttcatgtaatcaaagtgacctagacaaaatccctgcccttatgaaccttacattctagtggcaggaaatactataatgccagggagaagggagagagaaatgagaatgaagaaaaatgatgcagtgatgcatagccctctctatctctttgggatacagagagggggcgtgtgttgtggggaggaggtgggggctctattataaaaaatatggcctgagaaactgcatgaggaagagtcatcatgatttgatacatggagatagagaaaaccacagtgtcagggctccaaaaaaaaaaaatcacttccattttgggaggtaatttcagcttctttgtatttgatttggggcagtatataagtcttgggaaaaaaagaagtgactaaagcttttattttagatgaggaggacttaatgaatttgtaaaatatgctcccttttgtggggagaagtacagcagtttgcacgttgggagaacagctggctccaatacagcttggtggtgggcttcgactgaactggtcatcgcctaagtattttgtgtatttctgattacctatctctccaggagcccacgtgagcaagacaggtcttcaagctggttcaatgctcccattctgtaggcaactacaaactgtggctcactgcatgacttaacaacaactgattgagaattgtaaagtgcagcctcgagttcatgtgtagaaactgccatctgcacaaacaaaacattgagaggactaagattttaaggatactaatgcagacgtccttcttgcttcatttatttaaaaatatctatttcac

SEQ ID NO: 78557 - DNA, 3810 bp, Homo sapiens
gttcctttcagtcctgctccttctgcaagcccaagaaattcactaccatgatggtcacactcaactgccctgaactacagccacctaccaagaagaagagagtcacacgtgtgaagcagtgtcgttgcatatccatcgatttggattaagccaaatccaggtgcacccagcatgtcctaggaatgcagccccaggaagtcccagacctaaaacaaccagattcttacttggcttaaacctagaggccagaagaacccccagctgcctcctggcaggagcctgcttgtgcgtagttcgtgtgcatgagtgtggatgggtgcctgtgggtgtttttagacaccagagaaaacacagtctctgctagagagcactccctattttgtaaacatatctgctttaatggggatgtaccagaaacccacctcaccccggctcacatctaaaggggcggggccgtggtctggttctgactttgtgtttttgtgccctcctggggaccagaatctcctttcggaatgaatgttcatggaagaggctcctctgagggcaagagacctgttttagtgctgcattcgacatggaaaagtccttttaacctgtgcttgcatcctcctttcctcctcctcctcacaatccatctcttcttaagttgatagtgactatgtcagtctaatctcttgtttgccaaggttcctaaattaattcacttaaccatgatgcaaatgtttttcattttgtgaagaccctccagactctgggagaggctggtgtgggcaaggacaagcaggatagtggagtgagaaagggagggtggagggtgaggccaaatcaggtccagcaaaagtcagtagggacattgcagaagcttgaaaggccaataccagaacacaggctgatgcttctgagaaagtcttttcctagtatttaacagaacccaagtgaacagaggagaaatgagattgccagaaagtgattaactttggccgttgcaatctgctcaaacctaacaccaaactgaaaacataaatactgaccactcctatgttcggacccaagcaagttagctaaaccaaaccaactcctctgctttgtccctcaggtggaaaagagaggtagtttagaactctctgcataggggtgggaattaatcaaaaacctcagaggctgaaattcctaatacctttcctttatcgtggttatagtcagctcatttccattccactatttcccataatgcttctgagagccactaacttgattgataaagatcctgcctctgctgagtgtacctgacagtagtctaagatgagagagtttagggactactctgttttagcaagagatattttgggggtctttttgttttaactattgtcaggagattgggctaaagagaagacgacgagagtaaggaaataaagggaattgcctctggctagagagtagttaggtgttaatacctggtagagatgtaagggatatgacctccctttctttatgtgctcactgaggatctgaggggaccctgttaggagagcatagcatcatgatgtattagctgttcatctgctactggttggatggacataactattgtaactattcagtatttactggtaggcactgtcctctgattaaacttggcctactggcaatggctacttaggattgatctaagggccaaagtgcagggtgggtgaactttattgtactttggatttggttaacctgttttcttcaagcctgaggttttatatacaaactccctgaatactctttttgccttgtatcttctcagcctcctagccaagtcctatgtaatatggaaaacaaacactgcagacttgagattcagttgccgatcaaggctctggcattcagagaacccttgcaactcgagaagctgtttttatttcgtttttgttttgatccagtgctctcccatctaacaactaaacaggagccatttcaaggcgggagatattttaaacacccaaaatgttgggtctgattttcaaacttttaaactcactactgatgattctcacgctaggcgaatttgtccaaacacatagtgtgtgtgttttgtatacactgtatgaccccaccccaaatctttgtattgtccacattctccaacaataaagcacagagtggatttaattaagcacacaaatgctaaggcagaattttgagggtgggagagaagaaaagggaaagaagctgaaaatgtaaaaccacaccagggaggaaaaatgacattcagaaccagcaaacactgaatttctcttgttgttttaactctgccacaagaatgcaatttcgttaacggagatgacttaagttggcagcagtaatcttcttttaggagcttgtaccacagtcttgcacataagtgcagatttggctcaagtaaagagaatttcctcaacactaacttcactgggataatcagcagcgtaactaccctaaaagcatatcactagccaaagagggaaatatctgttcttcttactgtgcctatattaagactagtacaaatgtggtgtgtcttccaactttcattgaaaatgccatatctataccatattttattcgagtcactgatgatgtaatgatatattttttcattattatagtagaatatttttatggcaagatatttgtggtcttgatcatacctattaaaataatgccaaacaccaaatatgaattttatgatgtacactttgtgcttggcattaaaagaaaaaaacacacatcctggaagtctgtaagttgttttttgttactgtaggtcttcaaagttaagagtgtaagtgaaaaatctggaggagaggataatttccactgtgtggaatgtgaatagttaaatgaaaagttatggttatttaatgtaattattacttcaaatcctttggtcactgtgatttcaagcatgttttctttttctcctttatatgactttctctgagttgggcaaagaagaagctgacacaccgtatgttgttagagtcttttatctggtcaggggaaacaaaatcttgacccagctgaacatgtcttcctgagtcagtgcctgaatctttattttttaaattgaatgttccttaaaggttaacatttctaaagcaatattaagaaagactttaaatgttattttggaagacttacgatgcatgtatacaaacgaatagcagataatgatgactagttcacacataaagtccttttaaggagaaaatctaaaatgaaaagtggataaacagaacatttataagtgatcagttaatgcctaagagtgaaagtagttctattgacattcctcaagatatttaatatcaactgcattatgtattatgtctgcttaaatcatttaaaaacggcaaagaattatatagactatgaggtaccttgctgtgtaggaggatgaaaggggagttgatagtctcataaaactaatttggcttcaagtttcatgaatctgtaactagaatttaattttcaccccaataatgttctatatagcctttgctaaagagcaactaataaattaaacctattctttctgtgtgtgtgagcgtgcgtttgtgtttggtagtgttcctagggcagaggtggagcagggatgcacttatcatgggaagggaggtagaaaagagaattggatagcctgtgatctttggtggaatttattccttttgcctaggcctttcagaccctgcttgatttccgtaggacacttcaggttgtggcaagggagagctggtctgcaatcggaagtaccagcctcttccctagagcacaact

SEQ ID NO: 78558 - DNA, 1071 bp, Homo sapiens
ctctccatgtatagtgtgagctgccaatgcattatcttaatacatcaagaaggaaatcagatttcaggcacacattagcaattgtttgttaatgtccttggcaaacgtgtacctgctttccttcattgttctcttcaggggctttcttccactttcctcttatgaaacgaatgtgtttttgactgttaactgggttcgctttccagatctgtctttcccaaatgaaaggttagtcccatagaccactggctattcagggaaattactctctacctccccatgacatggatgataagtgttgagggatgaacactctggaaactcttagcatggattttgaattccagatttctttataggagatgtataaaaaggagtttatagcatacaaaaattatactgctcttcccagtaagggactaaaaggacatttgaaatctttacattttagatgtttttgtgaattataaatatctcctttttcctcgcttcatgctaacttgtctctagataaaatcttatttcttcatacattggaccacaaggcataaagaaggtagctcagcgccactgagattgtgttctgcataatatttggaaggcttccatttccattgaaaacaaatccatgagtgagagggaaagtctagtatcaattcttctgtttgctcgcaatgacacaaataggttttggggatctacctaagggataggtctactccaaaattattaaatttataattgtgcaattctgtaatttcccaaggcataagtaatatgaccctactgtcagctagatgtcttatcttcaaagagagtatgcattaataaaaagaacttccctttaaagaaccaatctaaaatactaaaaaggcagaaacttttaaaattagaaattggataatttttaagaatctttagagaaaacattggtttatcatagtctttttctttcattgagttttcatttagactagcatggcaagcagggtggccttggactttgatttaggggatcgtgctttggcctggaaaataagcactggcctgcatgcctagaacctgagtgaa

SEQ ID NO: 78559 - DNA, 1028 bp, Homo sapiens
attacttcagtggatggatggtcctcttactgttttccattccagagttttgcacttccaatgtgatgaccgtagtccctacatgacagtgacaggcaccgttctagcttgcatggagccagccacctctgcagagtggtacagaaaatggttttatttccaaaatctctccccttcatctctcccattgtggtacaacccattttgtaccaaaaacagtttgaccactaatatcaagaattctacaaaggtttttcctttttacctataatttcatttcttgtatcttttatctttgtatcttgtatctttaggtcatttcctaaagaaatgaccctcaacctagaataagtttgtatggacacagatgtggctcaagcctgactccccatgagaataaggtagaaaggatttcactatccaactacaggagaattaagtgagctatggcatgcctacctgatgaaattttatatggctgttaaacatgcttgtggagtttgtgaaataacaggagaatgtgtgcatgatatgttaatagaaagaatcaaaatacaaaaaaattctttatcaaatataagtaaggcaacccccataaaatgatggaggggcaaggagcgcgataccgaggcccagaccctgaaagagaaagtatgcaagtcttagatggtgactgtgttttggtcatggtgtcatgaccgatttgttttttctgctgttttaaaaatgtttttcaaatgtctttgtgtgtatatgttaccttcctaatactttttagaagttagtcgctgctctcctcccgaagatgagttcccttccccttcagaggcccggtacctccatgcctgggctgcctgcctaggacccctgccacacagtccacctcgatgccagagcttgcagtatgtgcctttttcttccatgttaacacaactttcctacctattgtttttgaaatcccctacctcctaaaccaatcttagaaatacatttctactaaagcattaaattattcttgacaatgtttt

SEQ ID NO: 78560 - DNA, 1063 bp, Homo sapiens
atccagcaccttctgattcacacccattggtatgccccaaagatgacttgtctaattgctagcatgtgtaaatcaaatggggacttcaaatgtaagtactttcatgtgttcccctcttccatttttcatgggagtggagtgtccaagatcaggacgacctgacaattttctctttgattcatgaggcaaaatagaacctggcccatgccatagccgacctcattgccaataagtccaaaaagagattgtgaaagacaagaaagcacttcaaagtcacaagtccaaatttaggaatagcagaggagcattgctatgattcttactcagacatccaataaaaaagcttttttttttctcattgatgctttggaatttcaactgaaagtgacaattgggaagtataatgtacttttgtttaccatatctcttaggaagctggaacagaaaagagtgttttccccttgccggaaccacaggatttctttctggcctcccaagtcaagtttgaagacctcataaaagatttgagaaaactgaagaggcaactagaaggtaataggaactgttctgctattatgataatagctaagattacttttaaaaaatgttttaagaggattatttaggtctggttcatagagtgggattggtgcagagttcagcaatggtacactacagctttcaggaaactttccttctctacacagtgtgtagaggcactgtattttcaaattcttctcttttattagtgttgatcatttgtttcttatatccatatctcgttatatctacattttctaacatttagtagttataacattattaatgataatagcagtaaccatttactagatgcttactgttgtctcatataacaatcttaataagctggaactacactaaacccattttacagatgagaaaaatgaggcttagagaagttaagttcacacagccagtaatagacagatttactgagctctaatcaagtctaatcaagtctgtctaattagaactcacattttctagtttctagtttctagaacttacacattagctagtt

SEQ ID NO: 78561 - DNA, 1090 bp, Homo sapiens
tctttcggtatagaaagaagtaggcttcagctttgttcctatgtaaaaccatttttggtgagagatggcaaaattccttggtaatgacgttatgagttgaccaagactttcagaaatatcagttaatcatcatctcaacaccaaaatgaaataaatggctgttagtagattttctccttttctgaattcatgtccaactgtttccacccattttcatttataccccttcctctggtggttggcctggagagtatgtcgctctttccaacttagttttgcaaagggaacaagtgcccaaccactcagacagtgagctactgtgtgtaggtcagtactcacctttagcttttaagatctgtcttgccacatttttaaggaaactttaggttgtctacttaatgagtgcctgctttgttctaaatactgagttgtaaactatgtctatgtgtgtaagttaatgtgaaaaagtaaacaaatatctggagaatgtgatcattatagaccattatgtaactcactgagcaaaaatagtagcaatatcactttagtaagagatttttttttaaatcacttgtctgtagacatttgcctcaagtcttcagtttgcttagcctgtataaatacacctttagagaatgctgcattatgagggagtttattgcataatttttctcgtgtgttaaagactggggctttccatttgggtttagtctcttgtttgggcagcaggagatagataacttgtttagtatacttgtgttaactttctgttcccgaaggaatttctataccatgcatttattcatcatgctagaactcctttaaaaaacagccctgttgtcaacaatggaaaccatgcccttggaattccttgagtctacctatgtgacaccttttataattgttgagattgttaggtaaggaatgttcccaaagtgggtctttttcagctgtctttttattttccttgtgattatatgtgaaggtagatgacacattttcttttttacagatttttacatgagttagcccagattcctaattttgctgaacgtgcccagtgcataatcttcagatctgtcttttctga

SEQ ID NO: 78562 - DNA, 1135 bp, Homo sapiens
ggattatagtaggctctgattttttttttttagtcaaatgaggatttaatatatgtagcagtagcaatgtattttgaaagtcaacaggactgtacacatataaggtttttgatttgggttttaagtggacataaccagcagaattgtcaggctctcttgagaagacaacacaggagagtcagaattcccatgattgttcattgttttggttcactgactgttaggctacaaaaacatagattgaaccacattctcttaagtaatggtatttcccaggaagctgtctagggctctatagtgtactgtggtcaccagttcaaaagatgattcgtttcatatttatgtcccctgggaccttaagtttcttacagaagatttccatagtctaatagtctaggcttggtggcatcaccaattccttgctcattttcacatctttatatgtatcaggagctacttagtacaagtgggtcggaacttctcacgtttccactagtaaagctttcgttaataaaccagaaagtacacaaataccaggccattgggagctaattatgcacttgaatacttggaggtcagcaaggtatagaggcagaaagagggagttccaagtctgaagctctttaacagttgcttagtacaagcctcagtggaataatctgtaaaatgaggatacagtggttcatgttaaagaactttgtcaaaggcagtaccttccagatgctttgtgttgttaccatgagctcaggactaagcacatggttgccgcttgttagctcacagtagagataagcttcattcaactgaaatagttggataaattgagaaagtaagtgactcaatgccaaaataagtggtacagacaatgagtgcttacgaaatttggaaaaagggacgttgttgactagaaatgaaagagctgcgagttcatataatttagggctgttctaagagtaaggaaacaaattctaagaacaatattcccccagcctccttacagaggaagagatgggggattcaaaagtagagctcaaatagctgtacttctgtgtccagctgcgtgtacttgttaggtccatttgcattgaatctcaaacttgagcatgcatcagaatcacccagtgggcttgcatcc

SEQ ID NO: 78563 - DNA, 1140 bp, Homo sapiens
gcttgtatttgttggttcagtttatgagcggtgtgcctgtgtgcacacacatgcgtggaagagacagagacagaaagtgagtgttttcaaagtataaaatggagggagcgatctgatcttgggtgacgccgaaaatagtttagttgaagactgacttctttccacattgtgatcattatgattacaaattagttaactaattaattgggcttatgtaatggctaataagtttaatggtaagtgcttgcaagaatgacttaatcggagagcattcattgattctctaatacgttgttccagtattttgagaatagaattatcaggtgtggattctggctctctaggaacctaaactatatttggtgactaagacatgggattatgtacatgtaaggcagttctcttaggcatcctaggacttggtaggcctttttatttttcagacttctggctgataccctaaccttcccaggccaatattattagaaataatacaactaatttaatctccataagttctaggctcagtatcaatctcttgatattgcttctgctacctctgaattttcttttactttttagattttatttttaagatccttccgtggaagaggagaaacttcagtggaatacttggcattggccctaagttcatctgtttatctacttcttttacctgtcctttcctctctactccattcctttcccagtccctgggggacagatcagtagtcatgctcacctcttagactcctctgcctgtttctggggggatggtacaaagctcttcccctaaacctaggctcaaagcctcagagtggtttcaggctaagtccccagagctagttagcaatgtcactataatagtgctctgtagtgtctttcttttttgccctatcctttctgtccacactattcaagtttttgctacctcttgcccattacaatagattctaaattagtcttttcaaattttgactttttgtgtgtgtaatataattttgtccaatttactcctccattcataactgctcaacagctctctcctgtataacaagtgtattacaggttcatcgtggcattcaaaattctacaaggttttaccccaaactatgtttggagtgtatctttctagtccct

SEQ ID NO: 78564 - DNA, 1095 bp, Homo sapiens
agtcaagtaatcctatcaaactttgctttcctgggctggaccagactatatctagtccatttgcaaaacattattacatacccgctttgtgcaagaggcttacatcagtcacttaaggaaataaaaagaagaataaaacaggctacgtacaaatcattctcaaaaccaccgtcagccgaaacctggtgagccaacccaaccctacctacctgtggcatctcccacacttcggatgaccagatttactttggctaatcttaacagactatacaaggtatgcctttctcaccaccgtgtcccatgcttcttgctcagaggtgctccctcagtcaaagagaacaactcccttaaataactctgcctgtctttttactcattagaagcccttcgaacagcaagtgcattctttgtttatatgggcatggtacacttggagagagaagtgttcagggttgaaaaatggctggagagctgagagaatcctgcatgttctttctacttaaccctggtcttgtgaaaagccatctcttacccggagggggaattttccctgttgtatgagaccctgaccccttgcatgtgccctaaagcaggcacatagtttttatgtgtgcctgttagtttgaatttgtgatactgatctgctttttgtccctgctgacggttattatatcttaatgggcgaaacactactctaatgatccttgtgtatataattcttgtggtacagagcaggcaccagaggaccacataaaaatgtttgcctcaatttccctgcaaaaaagaagcccagaaaccagacttgaccaagtaacagatttttaaaggtaaaggaatctaataaaattaccagcttttcacagcgtgtgtctacttccttttgacatattgtgaggtgtaggtgaaatattctaaccgaactgacagtgtgagtgggacaactaaggagggaaggagataaaagtaaaaaccaccagcagtgattgatattgcagtagcaatgagctgttggggtctcccctttgtggacttgacacttcacctttctgacaccatctgcaggagtgttagtataatgagacctatacagatgga

SEQ ID NO: 78565 - DNA, 1112 bp, Homo sapiens
tctaaggccccttcgtacagttttctcatctgtaaagaaagagtaatattaatgtctgcttcaaaggtggttgtgaaaattaaaatgtagtatgtgaaatgtttggcctggggcttggcacatcaatggtgctttcactatgctattaccaccatcattgccaccatgagaactgggaataagaataatgaaacatcctccagtgtcatcccaaaggaaagcaagaggttgaattttaaccagaagcctcatctctcattcacttatggttcctggaccccaggggctgctagttacaatccatttcccctatttgtgtgtgcgtggatgtgtgtgtgtgtgtgtgtgtgtgtgtgtgtgtcccactggggcgcagctatgcagttaaagcaaatgaattttagccagattctcagagatgaattccttcagtgtgtaccaagaaaaaaccacccaatgcaaggaaaagtttaaaatgtatctccattttctagttctatttgtattttgctttcatggtaacctgtgtttgtgatacaattttaagaatgccagctattggcaggtaacataatatcacctttttaaatctttggagagcatgatagtctataaataaataaacatatgtagaatgaccgattttggtaatgtgaggctcttaaaatatgaagttattttaggttggtttctttattaacaaatagactgcattaactttcatacagtacttgattaaattttatcaacataatgcatgaatagaatttaaaaagtcaagcaatattaagactttaaaaaaaaaagcaaaagttctccaaatctcaataaaatttcaaggaatttttcatacagatcacatctgctgatcaaaatgaaattaagttaggaatcgtgtcaataacaaaaagataactaacagtattgaaaactacattttttaaacttttaagtccaggggtacacgtgcaggtttttacatagataaagttgtgtcatgggggtttgttgcatagattatttcgtcacccaggtattaagcctagtacccattggttatttttcctgatactcaacctcctcccaccctccaccttctaataggccccagt

SEQ ID NO: 78566 - DNA, 1039 bp, Homo sapiens
tagtaagttccagacaaatccgggcaaaaaaaggtcagctgatttacatagaatgtattcccatgcaattagattcatatgagatggaggtaagcctgctttgtagccaggctggctttttaaatgccatctatagaagcagaagacttgtttctacctgaatggcaaaaggaaaatctgtatattccaaagccaacttcagtttgcctctttcaggaaggcttgcctgaactcaccagaatctcctctgaatgctttcttatgcaggatcgtattaaatttacttttgttctttattgcttcttagattgctattactctttttgtttctctccagatgcttgaaaacatgttgtttactcatagaactattcacttctgttttggtgaatgaatatttgtttttaaacatcaaagcatttggtcatttattatttcttttcttataatagtttgcctgttcaacaaaggagtttaaggcagttagtacttgataacatttattttgtttctctgtctgagggggaaaataacacttcatttaaactctttaagttttctgaacagggtggttgccattgccccatggaatccgtgcacttgtgtagtgcttgcttttctctgtaagtggaggcaaaaaattgggtctactgagctttgtggtaatatgcagcttagagttttcagtgagctttgtgtcctaccttagagctgaggttttaagttttaaagaaaatagcaagctgaattgatgccagaaaactccaaacctgcctcctataatctttgctccatgcctgtggccagatttccaacatcaagatggatcccttggtctcttctgagagtcagatgtttgttttctttcctcttgaaaatgaaagtggttttagaggtggtgagcagctgaggagtttcagcattgaaggccaactccttcagctggatcatggaatggttcccatatgagaagaccaggaggatacttgccagataggtctttttataatgactgaacaagagaaagtgctgggtacat

SEQ ID NO: 78567 - DNA, 1016 bp, Homo sapiens
cctgtcacagtctcaaattggttatcttctcagcctttatatgatgcccatttttacacatcatggaaatgccacaggctgagggaggagcagcttgggtgcccccaggaatccgaatcccaggatttctagtcctaaggagtttctgtagagctctatctttgatcgtagctaatgacaattacttttttggaaatacgtctgtgtgtgttttaatgttctatagtatattttgactttaacaaatgcgtaacataaaaagcttttctccaagcattattagagttttatgtgtttttttagaaaaatgaaattaaaaaatggattagagaaagatttcattgtattacattccttcctgttttggttcttatggttaacttgtcattttctcttttaagccaaaatgctacaccaaccttatgggactccttagaagaacctgacattcgggaccccagtgaatttgagtatttattctccaaagacacaactcaacagaagaaaaaacctctgtcagagacttatgagaagaaaaacaaggtcaaaaaggtactgagtgattatggcaaagctgtaattatatattatacagggaaatggtatatatgtgtgtgtgtgtgtgtgtgtgtgtgtgtgtgtatcgtatatacacacacacacatacctatacatatatgtgtgtgtatcataggaatttattacatattctgtgtgtgtgtgtgtgtgtgtgtgattcataggaattcattacatgctgttggtgctttccctggtttcatgaaatgtttcagaaggttttgagtggcagatggcaaagggagccaatagttcatgaaatctgtgcctgctattttggccatatcttctgaattttcaaaatttaatctggactttttcagccattaattctgttgaaataaaaataaaatttaatttgtagttagtgaaagtagtctacaggttatatggaaaataggttttatttataaattcattcatttaacaagtatttc

SEQ ID NO: 78568 - DNA, 1010 bp, Homo sapiens
aagagacattctggaagactgggagaacagctctaagccagaggagctctaaacctatttttttctttatagttttcttttttgaaaccaacccgaaaagttgtaaaacagatagatattcaagcatgtccaaaactttattaaaagttttgtgtttgatatgcaaattgggtaagagttcttaagtaatagatgtactttaagccttaatccatgaaaattatctcccgtgagctcaggctggttgaaattgtgctttgactcctgcctgtttaggtccctggaaaattcagagtgcaatttacacctttatggattcttaaaagaatgtctctgtatttccctgcatttatgtgggccatgctacagtggcaccatgatggtattattgagtttctaaattcttaagtttgttcttaataaactcattactttctttccctctgaattttcctataggcacagtttgaacttcgggcatttcatatccggggcgagcatgcaatgataacagcgagactagaagaaaccattgaaaatctgaaacacgagctagaacacagatggcgagggggttgtgaagagaggaaagatgtgtgcatttccaccgatgatgactgccctccaaagaccttcagaaatgtgtgcgtccagacagacagagagaccttcctcaagccctgtgaaagtgaaagcaagacaaccagaagtaatcaattagtacccaaaaagctgaatatctcctctttaagccagctctcacccccaaatgaccacaaagacatccatgcagcactccagccaatggagggcatggcatcaaatcagcagaaggcattgcctccgcctcccgcatccatccctccccctccgcccctcccctcaggacttggatctttgtctcccgcacctccaatgccacctgtgagtgctgggccaccgctaccacctccgcctcctccaccgccacctctacctccaccttcaagtgctggacctccaccaccccc

SEQ ID NO: 78569 - DNA, 1021 bp, Homo sapiens
gtgtaattccacatgcatcttgatgttccaagtatcattaaacatctagtaatcagaacaaatgttctgccaaattccgtttattattttaactggttaaggcattgagcactctagatttatacatgtataattaaaatttctattaaaaaataaacctagatgggagatttacatttttcttaatctatgtttacacaaagaagagatctgtttttaaatattacatcagatctttgtgaattcaaataaatcagtgtgacactttgccaaaactatttgtaaaaatgatgggtattgatgccctgtggtcagggaatcttctctgtggggttttagaatttgcttgttactcaaaaatacccttattccggttctcactgttgttttcaagcatataagcttagcctcaacggatacactttatcatttgtacactgtcagcccttatatgtcctcaattgcaagtattccacatgaaacaagtgcagctccagaaacttctgcctcttcctggatagatccataactggatatttttggtaagcttaattgcctgtatacaggaactcaaaaagagccttgccaccacaaagaataaatctataacccctattatcgtgggtgctgtttcaaggctctttttgttgctcagcgtattttcatgacccctcttcccatcatcttgttgtctctcagtgaaaaataactcctaacatttggatgcacatggacgaaaacacctgcattggccccttaatgttattgaagtgggaatatatttagaactataaaaattcttaccaattaaaatgtgatgtgcattcacagttatggcaatattaatatctttattttgacccatttgagatcaattgatcgactgtcatctgggccctgtccatattgtaagataagtcagttgggaggggcactaaacaaaacaaacttccatgtctgtgtggagatagacctgtcaatttggacttaagagtgccagatttgttgaaaagaatgtagt

SEQ ID NO: 78570 - DNA, 1055 bp, Homo sapiens
gacagattgttgtatctgtttttaactaatgttctttgggttgtgggatgcaagacaaagaaccagccaatagtgacatttcctttacgggaatctttttcgtttaccccatttatcacatgcatatttcctaattgaggggaaacttcactgagcgatggcctctggcaggccccctgctcattgtgcaatgcagtcacatttctagtttggtaactcccactgcaaaatgatccagggatcaatgccaaactgaaaattaacttacattgtacctttttgtccccaagagaatgaaatggtatgctggcctccattaagacttgtagacttcctcattttactgtggccaacacattccactcatccatttctaatagtttacacattgctgttgaaacagaattgagtgcagactctatttgagctgatacaacgaaatttataaaggcataaatcccaagcctgttccatttttttgtattcttcattatcaacacaatacatttaaatctcttaattcccagataatactgtgagggaaagggaataatttgtaggccaataaacaaaactttcacaagtatgaaatgtgatgatttcataaaacccttatggtattcccctaagtgctgatattagtgtaattcattactgagatgccaaaaaggaaaaaatagacaatattgagaaatatgttaattcatcattttagtgtgactgtgaaatgttgtgaggttactagatttactggtttactagtgttgagattcctcttgggcgactggctacctagaatccggtaggtacatttggacttgaattttcatggaaaaggagccctttgtctcagccttcaagatactgtcttgccttcagacaattcagatatagaaggaggctgttgtagaatgttgattgctcatttgtatcatgggggccaatgatggttttagacatttccttcatgcaccatcagccttcaatcatttctgctgagtcttaacccctgaacatgagtcaatacaggtggaccaagacagttttctttttat

SEQ ID NO: 78571 - DNA, 1005 bp, Homo sapiens
gacctaccttactttcccaccaggcatgtactttttgggagaaaattgtttaatacatgcctgggttaaaaaattttcttcttttaaagcacaattacatggttacttgaatttgcggaacacaacaacgttttacggagtagaaacacaaaattggaatatgacaagaataaataagacttagcttattcactttttttggtgactataggtcagagttttcaatcttttaggtttcacctaagaacattgcacttaattccgtggacaagggataatttgtttcactgtgtagttaactgtaaaagttcccaggccctttcctgcacttccagagtagtattctttatttgtctgttctttgtctattggcctgactgtattgtgctccttgaaagtagagatcgtgtcctcttcatattgtttgcttgcagtacacttttggtaaatgaataaatgaattaattggtaacacaatgagagagacctaattaagttctagatttttcttattgtggctctaagtctactgctttctttttgttttcaaattcctaaaattcaaacaaacagaaaaacaaaaatttggccgggtgtggtggctcacgcctataatcctagcactttgggaggctgaggcaggcggatcacttgaggggtcaggagattgagaccatcctggccaacatggtgaaatcttgtctctactaaacatacaaaaagaagctgggcatggtggctgacacctgtaatcccagctactcaggaggctgaggcacgagaatcagttgaacccgggaggtggaggttgcagtgagccaagattgcgccactgcactctaccctggcgacagagcaagactatctaaaaaacaaaacaaacaaaacaaaaccaacttgtcaactatgtactttactgggaaatggtgtaatagacaaatgatttctacctttgtatcatatagaactacatgtaatactggaaatgagggaatgagtttctcc

SEQ ID NO: 78572 - DNA, 1091 bp, Homo sapiens
acacttggtatatctgccacattgtactaataaaaggaaaaatgtaaaggagctttgttggatgagtcctgctacagtgagtctcccggtgctgcaaacagtggacgataaggcatcctcattcagaatgagaaggaagctctttcccgacactgatgcagcctgcacctaacctttccagagcaggctcttctcgctcactgccctgtactttactgagggatcagatagctcaggggtatctcctgtttctgttctaggattccagtcagatcgagctgctgaaggaactcttggatctccttcaggacatggtggtgatgcttctgtccctcctggaaggttgggctgtttggtataactaggccttcacacaactgtaattggtctgagcactaaccttactgatcatgcagattatccttctggcaggtcactgatgccatatgacattggtcagaaagccaaattttcagaaacgaaaaataaaatgaggggcacctggtctgacggacgaagcctgaaatcaattgattttctatcaataggaaagccagaatgaactggggaaaacctccaagctttgctcttccctatcctctccctctccccattgcttttcaacacatctggctgccagtgtgtatgccagccatctagttgggcaccctcctaggtctaaggggatcaaagggacaccatgtatccctatgtgtccctgataatctaataatgaaaccacttcccaggccccaggccatgttaaaggcagtggtgtggccacctccttcttccctttgtttctttcccccttggctcctagtggtgtagtctttatggcttgctgctccctcctacatcatcacggtcagagaagagctgactaatttggcacaaaagtcttctaaaaatagctacctgacaagtgacatgatagcttgggtttatttgtatatttgtatgtctttttgaacctgcctcacagggaatgtggtaaatggcaccattggcaagcagatggttgacacactggtagaatcatctaccaatgtagaaatgatcttgaaattctttgacatgttcttgaaact

SEQ ID NO: 78573 - DNA, 1021 bp, Homo sapiens
ccccctttatgaagtgtactagttcagtggtgatacctggctccatcacctctgccctctcagcctccatagtgtcatcatggataccaaattgggttgggtcaggcatgtcacccaggatcttggtcactctgatgttctttgccccttctaccaggccccctccaaacactgtgctccagaggatctgaaagattcctcccaggatggtgaagagcaactggaatagccccacgaacagcatccagaaaaaggagaagagcaccttcaccagctccttcgcagtcatctttttcacgttcctgtactgcttcctgaggttcttcagggttgctctcttcaggaagtcggtgacattcctcttcacagaggcacaggccatagcaaatgcagaggccggctcaagagacccgtcttcttcctcttcacccgcaatttctaacacgtaagaagaatcttcatcttcttcctcctcttctggcctgtcagctgaatcggattcagagatctgagatgctaactgcatttcaaagatggtgtcctcacagaagttcacaaacagctccatcttttcctgctccccaccttcattgacaacatcaaaaatgaactgtcgcttagattccttcacctggggcttctcccactgagtgcgactggattcactgatctcaaaataaacacgctcaatcttcttggccccacccatgatctcgatgcgtcctaggtagggttcgaagtaatttagcacactttctgctgggtccaacagacacttcaggcgggaatcgtttggcatgtgttcagaaagatttgtcaataacacagccacattaaaccctatgtccttggctggctcatggaaccggtctacaaaatcaacgtaattaaacatgtcattctcatcagcttctgcacacgacaggagaaagtcaatctctgactgcgtgtactgtttttgcccttccatggccttctggaattcttttttggagataattcctttaccatctgggtcata

SEQ ID NO: 78574 - DNA, 1009 bp, Homo sapiens
caacagtactcatttttatgtatgagaagatagaggactgggagtttaagtggcagagctgtgagttcaacccaggcagcttggctccagaatttgcactttcatagttgcaatagagtccttagtgtagcccagggcataaggtctctgcagcacagtagctggacttcctacatgacacaatagttcactgagggaagaaaggaccacaatataggaaagtatttcctggactcttcctgggaagaagatggcttgctgtacttaaggagacttcctactcaagagaaggaagaaaaaaatgtaatgagaaaagcagtgagaaaaacacaattatgatgtagcagaactagatctggacttgggacaccaaaaattgaatgacagaagattgacataactgtagtggttgtgaatatggccccaaggaaccacgcctcctggaattcatgcctttgtgtagtgcctctcccctctaccatgcagcagtgcatctgggatggccatgtgacttgccttaaaccacagaatgcaatggaaatgacactgtaccagttctgggcctaagacctaggaaggcttagcagcttccacctccatgctctttttggaaacccaagccatcatgcaagaagtctagctaccctaccggacagatcatgtggaaaggccacgtggagaaggagatgctctgaatctccctggagagaaagagggagacagagagaggcccagctaccccagctgagcccatccttccagttgtccccctgtggagctgccaggcatgggaatgtgccatcttggccattccagcccagctgagctcgcagatggctgcaaatgtagcgcctttacatagaacagaggaactgcccaaatgtgccagtcatctcacagaatcacagagataaatagttgtcattttagaccactgagttttagagtggtttgttatgcagcaatggataactgaaaactaacacatcagtaagctttcttctgagat

SEQ ID NO: 78575 - DNA, 1072 bp, Homo sapiens
aataacaagttacttgaacctattgggtgctagggacttcctataaaacttaaaacagaatgtatagagtgtatagattttattacctgataactcagaccctgtaactgttcatttacaagaaaaaaaataaaatgctgggctctgctccccagcctagctcttcccccttctctctctattttgtagcttagagagtcctcatctttcgagatagatagggtctcaaccccgttgcccaggctcgagtgcagtggtatgatcttggctcactgcaacctccacctcccaggctcaagacatccgcctcagcctcctgagtagctgggacaggtgtaccactaatttagcaccagctaatttttttttttggtagagaaggggctttgctgtattgcccaggctgatctcgaactcctgagctcaagctatccacccaccttggcctcccagagtgctgggattacgggtgtgagccactgggctgagccctcatctttctttaggctagagcaggctcagcctttggagaaggcattgtcagaagtggcaaagataacatgtttttgctgggggatgagtttaagtcaaaaacatgagttttgtttttttatttattgagacagtctctgtcacccaggctgaagtgcagtggcgccatcttggctcactgtagcctccacctcctggattcaagtgattctcctgcctcagcctcctgagtagctgggactacaggcacctgccaccatcctgggctaatttttgtatttttagtagagacagggtttcaccgtgttggccaagctggtctcaaactcctgacctgaagtgatccacctgccttggcctcagcctcccaaagtgctggaattagaggcgtgagccatcacacccggcctcaaaaacttgagttttaaaaagataactttactgtgcccttcctcatgagtatttatcatcaattcccattaagagaatatacatcttaatggaggttaatgagcccatggccacgtgtctgtacccatgggttatagaccagtggaaggatgctgtcctttgggttgga

SEQ ID NO: 78576 - DNA, 1029 bp, Homo sapiens
gcattgcacatgaggtgcctttgctagatggtgagagctaaggaatacatttatgtgtacatatatgtacatatactgatatgaactacatgcatgcatacatgtatctctacctacacttttaaaaaaaaatcatgagttcataccagtatttctagttctcgtccatccccacagggatctttcttgccttctcctgctccatgtttgtatatccctttcatgatgagaaccttgtcactcagcagtatcaatgcattcaagtgtgtgttcaatcctataactcatctagtatggtttccctatatgcctgttaaaaaggaatttatattttcttctagtacttgagcttcatattttatatttagatcctggaggcatttggagtttattcctctgtattgtgtgaggaatgggtccaattttatctttctccaaattgctatacggttgtaccagtcctatgtattaaaaaggtcatctttgtgatttgagatgtacttttatcataggttaggtacaggtctatttctggacttacttctttggcatctgtgcgcatacgtgctacacactgttttaatcacaggcttttaatgtgttttagtatttctcatggctcttccttttcagtgtgttcctagctgctactgtatgtttatttttacattcaaactttataaagaaaaactataaaaccactgtaaaagagctcatagctattgggggggggttatattaaatttatacattaacttagaactgacattccactcctcccattcctcaaatgtaagcaccttctatgggtataattctattcatctgctcctccctgctctttgtgctattgttaacttctacgtatgctgtgaacctgactttacaatgttgttatttttgcttacatgatcagttgtcttttaaagaaattatggaagaacaatgatattttatatccacatatttcccattttcagcccttttcatggatttctgtagatctgagtttccgcctggttatatcca

SEQ ID NO: 78577 - DNA, 1047 bp, Homo sapiens
agttttttttttaattctgtgaagaaagtcattggtagcttgatggggatggcattgaatctatagattaccttgggcagtatggtcattttcatgatattgattcttcctatccatgagcatggaatgttcttccacttgtttgtgtcctctttatttcgtagagcagtggtttgtagttctccttgaagaggtccttcacatcccttgtaagttgtattcctaggtattttattctctttgtagcatttgtgaatgggagttcactcatgatttggctctcttgtctgttattggtgtataagaatgcttgtgatttttgcacactgattttgtatcctgagacgaaaagtcttattttctaatataaatgttgggatgcttagggatctatgtgttgttgaaatgaagtgtttttttttttttttctctttagcctcttatggacaagggtgtatggcctgtccaacttggtgttttgggcatatgtagatgtcttcgtatagtgccctattaggcattcagacatacttattggttgattggtaaattcttgtccatgctgttttcctcagttggatagtttcagttccacatctagttcaacaatctcagaagattaggtaaagttgtgtagttattacaaaaaatgcatatttaatatctattttttcatttatgctgttttgggagccagtttttaaaaaagacgtaatactctttcattatttatgcggtttcctatctttttggagaatcattgtaattttattgccattgagtatgttggtatctgactcagaaagggaagaaatactgaaattacagtggatgagacttaatttctcatttcctgcaaccaagttactacaggtgtcccaattatggataagcatctatctagacagataaagtaggatagatttaggagtcatcttctaatagtttggggaataggttgcaaggtatattgctctctttgctaatgctttgcctcctccaactccctctatctatacctttgaacctggagtgattttttttccc

SEQ ID NO: 78578 - DNA, 1025 bp, Homo sapiens
actagaagcatggatgttcttgcactcttgctttcctttctccatacgaacttttcagtccatcagcttcctttctgtagaagatgaaggcatttcttctgtcctcctcatgcttttgtaacccatgcttctggtaccctgttttttgaatagtgaggtaaaaatccagaaggaagtacggctttatcatgtctctggacggtgagcgtacttggcatgaatgaagagctgataggagctattcaaaccagacagcaaactgatgggatgacgctgccatacataaaaaactcattaattacttcccctgctggacagcagtatatcctgaaaggaagaaagaaaggagcagatgatgatattcgttttgataggtgttctctgtttgaacagcttgtcattgagaagagaatccaggaaaagctgcagcttcagagtgtgatcaggtagaatgggcaagagttatttgacagacagttaagtgacgtattttgggaggaaaaagagggcttagcatggaggtagctggaataaggttccaaaatgcttttgaaaatgttcattttttcctgttagtctttttggctagaagcttttttttttttttttttttttttttaagctttgctaggcattattcacagacatgttgctgagttattttctcatatggttttccctaaagatggaaaataatttttaaaagtctttgagatagaaagagtatactgtgagttttaaatatttgtagcagagaaaaggctgccttttttttttttcctaaatgtatgcctgtttttatacatcttttgggcatatgcgttttgttgctttggagtaaagcattataagtcctcatttgatacaaacttttaacagggtcttcattaaagcttttccttaagttagatgaaatccatattagctgtataaaagaatagatttttaaatgtcaatttcataatttttgcacttcagtttttaaatttaaaattcaaatttttaaaactgcacttcagtttaaa

SEQ ID NO: 78579 - DNA, 1068 bp, Homo sapiens
aaatgtttaacagtgtgagcagaatgcactggatcaatattgaagaaaacgtggggaaaatattatgtgcaagtctgtaaacactatttttagagatacaaataaaaacgaaataaccagactgcagtttggtcagtatagttgttgtctgtgcatatttttgcttaaaactattatatattttcttcaatttaattttatgaaaagctattttgggtaggaaattttaattgtaatgacattggaatttcttccctcctctgttccttgtgccaacaattagactgaagggaaaagaaaggatattactctagcagcctgtacttttaaattaaacctcgaaccttttctttccatgaggcaacaagacagttttatttgtcctcattgattcagctcatttttttccctcttcttgtatggtatatagtttgtgccaatatagtctcatattacaaaggcaatatagtagaagaagattcttccctttgatatttaaaacatctgaaataacacaaacagaactataaattaaaaaatttgttctggctgacagggctaaaaaaattttcaattggataaccaaaaaaataaaaacaaggaaaactccgataacaaaaaaacttttccttgtagctgaatattgaatattgggcctaatttgattttcttttttctttttttttgagacggagtcctgatctgtcgcgcaggctggagtgcagtggcgcaatctcggctcactgcaagctccgccccccgggctgacgccattctcctccctcagcctcccgagtagctgggactacaggtgcccgccaccacgcccagctaactgttttgtatttttttagtagagacggggtttcaccttgttagccaggatggtctcaaatcttctgacttcgtgatccccctgccttggcctcccagagtgctgggattacaggcgtgaaccatcgcgcccggcctgattttctttttaaaaaccttcaaaagataagagcagaatttgtgtgctaaactgctagtctccagcgccattttgtgttttctgttgttttgaag

SEQ ID NO: 78580 - DNA, 1102 bp, Homo sapiens
gactccgtctcaaaagaaaaaagaaaagaaactgaagcataggacaactttcgccaaggttttgtttgtttgtttgcccgttgcttttaatgtcatttttcgggagagttgatttgggaattagcaagtaagaaaagactaagctgttgatcagtagtagctaaacatgattttcatttttccaggacagatgggagttttgtggttcatgatataccttctggatcttatgtagtggaagttgtatctccagcttacagatttgatcccgttcgagtggatatcacttcgaaaggaaaaatgaggtgagggcacctgatttaatttttgccaaaagctaggctactgaataccttagtatatattccttttagaattaatagtttagatggaaaattctttttatttaaactacagctattccttaaaacacttaaaatatcctcgtttatttaatctgaacattgaaaaaattgtaaagttgagcttcttgctctggcttaaaatttattttaaagctcctaatatgattacataaagaaaaggtaagattacttactataggagctaaagtgctatgaaagttataattgaaatatgattattaagttggaaataatttaacttttctaaattagaaatactattcatcacctgtttttcactgggatattttgataatacctcttattacctatttgatacttcattgatctggaaatttctgtggtcctttctttatggaatcttttatgttcaatggaaatatagtatttctagggaaaacaattgaggtgaaaagaactatagtctaatttagactgtgagtgtggaatagcaaaacctatttgaagttgaaacatttgtatagtatctatagtcttcagagtcagcttcccattataatagaacacatttatttatttattttgttgtctcatggcaatagcatcctctttggtcaaatctgaccaggaaatatatgaagcaactcctaagtggtaatgtctcttctttaagctatcaaatatgactatgttgcagtaataaagcacaggtcatgcaaaggcaaaaacaatttctggaggtggaggactaataa

SEQ ID NO: 78581 - DNA, 1064 bp, Homo sapiens
gcatactggcggtagtctgtaatcccagctactagggaggctgaggcgggagaatcacttaaacccaggaggcggaggttgcagtgagcagagatcacctcactgcactccatcctgggtgacagagtgagactctgtctcaaaaaaaaaaaaaaaagaaagaaagaaattggttcagtcagggtcccattaagaagtagaagatgcactcaaattagagtaattcaaggataatttaatgaaggcatcaaacagtgtagtcatggtgttgggaaacagccagattgtgcagtaccctggagcttacatcctcaaggttattatcaccacctctaatcctgaaggaagaggagagtagaggttactggaaccttgaagggaagaaaggcctgcattgaaagacacaaaccagtcccttaacacagccagtcagaggtggcctgtcagtgagaggtctggggggaaaatagactaagctcattttctttccttcctccagtctgcaaagaggagaaaggtagagagtggatctagagggcaaatggaacatgtccaggccaggcataagttaacttttttacatttcaattctggcttagtgtgctctggagtgacactttttcatcttacttttttttttttttttgagacggagtctcgatctgtcacccaggctggagtgcaatggcacaatctcggctcattgcaacttccgcctcccaggttcaagtgattctcctgccccagcctcctgagtagctgggactacacgcgcatgccaccacacccagctaatttttgtatttttagtagagacagggtttcaccgtattagtcaggatggtctcgtcatcttgctttttagtaactgttgtggatatcatcagtatcagttattcctttaactatgaaagagcctatgaggatttaagaagcattattttaatatattattatgatatcgggaattctctgatacagttggtcattttagaaccatttgttttcctgaaacataaactttttttcccccctcagaatagtagtttctcatttttcaaaca

SEQ ID NO: 78582 - DNA, 1049 bp, Homo sapiens
ttctggatggtgtttctcccgaagccagtctcgtcatcttttactcccgtgaggtccttggcctccgtggctgccgcagcaacacacacttgactttcacttcatgggcagtccccttcataggcacttgacacaggctctgtgcgccgtcttccaatccagagtgccgggagttaagggcagtacttccgccttacttccgcctcgctagtcgatcggccatgatctcttccctctggttggatcccacagcttatgacagaaacgggcgcgcagtgatgacaacatcaagccgccagcggcggcggtggcggccgggagactgggagggcttccggggctgccggtctgagtgcagagctgctgtcatggcggccgctctgtggggcttctttcccgtcctgctgctgctgctgctatcgggggatgtccagagctcggaggtgcccggggctgctgctgagggatcgggagggagtggggtcggcataggagatcgcttcaagattgaggggcgtgcagttgttccaggggtgaagcctcaggactggatctcggcggcccgagtgctggtagacggagaagagcacgtcggtttccttaagtgagcatcctgagggcagcgggaaaaaggctgggatggaggccggacagggaccccaccaggagagttaagtgtcaggacgggacaacgtcgctgtctcagactgaaggggagggtgccgctaacggtctatgccgggagaccttgggaggcagtcggatgctttccctttcctggtcctgtacctctggaatgagcatggcaggcgctcaccccctgccatggtcagagcatggagtcagttatttccaaccttattttggccccatgtggggacgatcattcctgggccctggggacaggtggacccttattagtctcttgttggattcttttatatctcatctggtttccctagaacctagtcgttttttgcattcacttcagtcttttggtagcttgttattatgtagaaagatgcgacacaagtgggaattctcaaaac

SEQ ID NO: 78583 - DNA, 1047 bp, Homo sapiens
ttggcactatttacatgaatcttgagatgtgagaattggttgtaagtatctctgtccatttgggggaatcacaaataccaacattgaactctaagggctactgaggaattaaatcctaatgcctctaaatttactcggtacacatcatgtcctaaccttaaccatggttgtgtgggttcaaagctaggtttctgacctttgaaacagtagttttctcaaacttagaacatttctatattttgcaaagttgttcacacaattaatattaatggataactaattggagtaatgattattagctactgaatgctgataatagaagtcatatttaaatgcttacttagttacttaagttagtcaaggactctgaaaaaataaggtttaagttaacagtgtcatcagtcattcccagttatcttcttatttaagaacaagatggtaatgcagttgcctttgtttatttaaatagaaaaaattaaatcaggataaaatgacccaactacagtgatgtatttggacacactacttcttatctttcaatatagacttttatttctggattaccatagatggaaatagtattactggacatatgttggtaggtatttacttctgtgtttttctttttcctttaatttcgaatacttctagctacaaaaattgtcataaaactttgcaacacactatacctccccccttttttattctataacagaattatagaataaaaattcaggccaggcgcagtggctcacgcctgtaatcccagcattttgggaggccgaggcaggtgaatcacctgaggttgggagttcaagaccagcctgaccaacatggagaaaccttgtctttactaaaaaatacaaaattagccaggcgtagtggcacatgcctgtaatcccagctactcgggaggctgaggcaggtgaatcgcttgaacccaggaggcagaggttgcagtaagctgagatagcgccattgcactccagcctgggcaacaagagcaaaattcctactcaaaaaaaaagaattatccctccctgaaca

SEQ ID NO: 78584 - DNA, 2562 bp, Homo sapiens
catttagcacttagcaaatatatattgagcacatactatgtgccaggccctgtgctgaacaaatgcagataaaagcactgaacaaggcacgtcttttaccctcaaaaggtcacaaaaggaaactaaggcaaattaagcaacaacaaaaaaaaatggattgtttatgtttgtatttactgtactgtctaatgaaatgtttttgttttatcttctaaggatgtagatgcttatttattacagttacattgagagatttcatctactaaagagcatttggtttttcaaaacatccctgaactgtataatttacaaaaaaaaaaagtctcgtctgagaactgtgaactgtggaagaaatcaaaactattttttcttttaaaaagccacgtaatgaaaccactaatgaaatcccagcaatctgcttcacattgaagtggaaaaatatccaaaaggagcagcttcaatttcattgaggtgaaagtgcactatgaagattgttcacctttgctgcatttgggagttatatggttatttggtaacattaagaactactggattttaatgcaatcctgcataaaaatataatttatactatgtgaaaaaataagacaggacttaccactaggaaccaccaagaccaatcatcattaacttttttaagattgtgttttattaaaaaaaaaaaacacttaaatgtgtgcagctattttcttatgttgaaaagactgaaagtttaaaacatgaaaaaaatcaatattaaacattttttgttcacactgagatactgtgtatgtaaaatgccttaattattaataagccaatgtgttatgataccaatatctgttttaaaaaactaaaaccaaccatgcttctggcatgataaaatcatggaattaaatcaggggtttacattcttgtagagtgttcttgaaacactctctgcaccatttttaaaacttgagaatagttttagtatctctgatattttttgccagaatcatcatgtcatgtatgaatgtgttatccctatctaaggaaaaaggtgaatatgtttttgtatgaatgtttaactggaaatgtccatggacttggctaatttatatttactttttattgtacatagatttctaatatttttcattcctgtatcatttaaacttccttcatttgagtaaattcactaaatatttctattttttgcttttttaaattctgattttatatgaattctaattctttttcactacatatgttttaaagagttacatacagtgatttagaatggtttacagttaatgctgatcttgtattttaaattccaacactttgtgtcactacctcctctaatggttagtatgatatgctagcagactgtatgaggtctttttttaaaataccacttttagtgtcagtgaaccaaattctggaatgtcttaacagctctaaatcttacttgtcttgaaaatgattggggtttaataccactgctggtggttcacacatcatcccatccttaatatgcctgacaggcatctgagcaaaggtttttagtaattgaatttctctgcagtagtccttcaagcacttgaatgtaaacctttagcatttattcgtttaatgactactgatacgaatctcaagcagatttcttgctcttaaaagttatgtttcactgagttctggttttgtgtagctatattttatatagctagatattcctcacagtgaacatgaattgtaataattggttatttccttaagtctttagattataataatttcagattattgcacgtctgtgatttgagaggtgagttatttaagaggccagttttcaggacatgggaatttgaattgtaaacctgttatctctgtgaaacttttaacatgataaaatataacctttctttgtgcttattcctgtagttatcactgtcttatgtagcagtttgaaccagttaacttggttggagtatggtgctaaagaggccgtggacaggagtttgatgcttttgtaggttcattaactttacatacacacaaaatgtttttatagctgtcgattgcaccttccgtcaggtatccatctcagaaattcaggaagatggtatgtatagcttagcataaacctttcgcctcaaatggaaagattactcaatgggtatatgtgatactgtagacttttaatctaacatttaaaataatagattcaaaataagatatctaaaatactgtgtaatgtttagtttcaaagtattaagtaatattacatcagatatttttcacatttttctctgggtcagatcattgactaaacagtatcttcaaaaatcaaacttcaataaatcagacttcagaaaaattaagtacaaatgacatatagtaagaacaggtattatcttggtaacatttatacctaaatttaggttttttgaaggcatgtagataatactttatcttacatactcagagctatataagtcagcagagtttttagctgacaaagattattgagtagcatatactcctaatttctgttcttggcctttgcagtttccttagtac

SEQ ID NO: 78585 - DNA, 1057 bp, Homo sapiens
aaaaaatttctcagataccttcaaaaaaaagaagcaaaatgatatatcaaccaagtttgttaccactgtgtgggattttactctatagaattcttttttttttttttttttttttgagatggaatctcgctctgtcgcccaggctggagtgtggtggcgcaatctcggctcactacaagctccacctcccaggttcacgccattctcctgcctcagcctcccgattagctgggactacaggcgcccaccaccatgcctggcaatttttttttttttttttttttttttgtatttttagtagagacagggtttcaccatgttagccaggatggtcttgatctcttgacctcatgatccacctgccttggcctcccaaagtgctgggattacaggcgtgagccactgcgcctggcctatagaattcttaatgatgaaaatcttatgaacatatcaatctcctagaaagtttttgttgttgttttaggtttttagagcatacatgacgtattaccttgctctaaagggttgttgcattctgtatagaagaactaaaaaatgattgttccttatgactgaaatttgctttcaatcagaattttttttgttgtttttgttttgagactgaatctcgctctgtcgtccaggctggagtgcagtggcacaagctcagctcactgcaacctctgcctcctgggttcaagtgattctcctgcctcagcctcccgagtagctgggattacacacatgcctggctaatttttgtatttttagtggagacgggatttcaccacgttggccaggctggtttcgaactcctgacctcaagtgacccacccacctccccctcccaaagtaatgggattacaggcgggagccaccacacccggccacaatcagttttttacaaagggaaaagctttattgtgaatatgactttaaggtaccatttattattggggacaatattgagtgattaaaagttcaatgcgaagttccttatgatgagactttcttacaaaattaaaccatcaattaatttgtaattttttgagtatag

SEQ ID NO: 78586 - DNA, 1121 bp, Homo sapiens
atctctacaaaaaataaaaataataagccaggcacagtggtacgtgcttgtggtcccagatacttgggaagatcactttgaacccaggagttggaggttgcagtaagctgtgattatgcaactacattccagcctgggcaaccgaatgagacccgtttcttaaaaaaaaaattactaaaaataaaaagtaaacatcccttttgagtgggaatttgaagcattactttcctcattgtattcaagtctctcagatgttaccttagggaagccttctttgaccaacttattttaaaatacctatttctccactccctatctcgctttcctgttttatttttctccatagcacttatatcaacctgctctatatgtcttatgtcttgttatttgtttattgcctgtctctgtcccaccccccaacccccacagttgctcacacactggaatacaagccctgtgtctttgttcattgctgtatccacagacatgactcattgtagatactgacattgttaaatgaatgaatttctcaaaagcggtgtgaataatcataatatgaaagtaaataaggaaatcagctctctaaggcaatgctattctttttatactctcaggatagaagatcttggcgttgtggtagattgccttcctgtgctcaccaattggtaaaaacaatatttttcagaaaaaaaataagattaaaggaggtcaaattatggcccatccatatttttataacttggtatttattttagtttacaggaagaaaaacaatatatctcacttggctgctgtgttgacttgttgcctctagtaaagtcactacttaaaagcaaatttgaagagtaagtgctaatctgaatcttgattcatttttctttttcagcatccttgattttgtgctttgtgagtacatagtagattgggctccatgagacatgcaaggtttctgttttcaagaagctaatagtacaattaggaaaagaatatgaaatgactaaaggacaattataaaagcatctctaaacaaattacatgaaatatacttttgtgtaatagatcatgaaggtaacaattttttaaaagggaagggaccaatgtgtgtgtgtgttttttgggag

SEQ ID NO: 78587 - DNA, 1029 bp, Homo sapiens
tgtttatatgtgtacttaatttgtctttgtctagaaaatggtctggaaagatacatatcagtctgttaactgtgattatttctgcggagtgatattggatgtttttgtgggcaggcagagagtttttactttttatcttacatagttctgtgttaaacacattagaacaggaaaatgacacttcattacttaacaataaatagataaatttaaatgatactacaacacttgtcaaaaactgagtttttgtgattctcctgccattcagttggtaatgactagcctacatgtttacatttttcttttatccatgttataaattaagtcctagtttataggtcagctaaaaataattttataaattattgggttttaaaagaaaaatggtagctagtgaaaagtataaatgggtcttaaatttgttcagatcatttgtttactgtggtcaactgcagtattcctttttgtgggctagtaaaaggagttacttttgcatgatttttaactatgtctaccagaacgatttaataaaaaaatagtttcataccctgtttcagtgtgctttttaacaaatcagattattgcctttcaggtttctcaggaccatgaaacaatggcccaagttttgttcagcaggaatatgagattgaatgtagctttaactttctggagaaagagaagtataagtgaacttgtagcttatttgttgaggtaagtgtgaccttttatcctctttgttcaatcactttttttctgagacaagttcttgctttgtcatccaagttggagtacagtggcacaatcatggctcactgcagcctcaacctgctgagttcaagcagccctcccacctcagcctcctgagtagctgagagtacaggtgcacatcaccacacctggctattttttaaaaaaattttttggaagacatgaggtcttatgtttcccgggctggtctcgaactcctgagctcaggtgaaccttcttcattattctaaactgcctatatgtagcttcagtagagacagt

SEQ ID NO: 78588 - DNA, 1111 bp, Homo sapiens
agaattaagatttttaaaattctatttatttctaattttagtggattacaatcaccaaatatagcctattaattctctgtttaaaaacttttaaaggatttcatatggttctttttcatttaagaaaataaattctttttacagaacagttggacaaactgtgaaaagcccagataaacttcgtaaagtgatctatcgcagaaagaaagttcatcatccctttccaaatccttgttacagaaaaaaacagtcccctggaagtgggggctgtgacatggcaaataaagaaaatgaactggcttgtgcaggccacctgcctgaaaaattacaccatgatagtcgaacatatttggttaactccagtgattctggttcttcacagacagaaagcccatcatcaaaatatagtgggtttttttctgaggtaagtcttttctctaactcatatctagtttaactttgttcctgttataatcttgatttttttctttgccatattccactagcagaataatttgtcacctattgaatgtagacttatttgagtcatagtaactccctgagacaattttctagattaaccaaatttgaattaataatttattccatttctctaagatgggatgaaatgcttagcaggctgctaaaactatccagaatgacaagttagccagtagagatttaaaggaagggaaaaggagaaatcttgcctaaaaaagtggagcactaggccggacacagtggctcacgcctggagcccgaggtgggtggatcacgaggttaggcgtttgagaccagcctggccaacatggtgaaaccctgcctctactaaaaatacaaaaattagccgggcatggtggggggcgcctgtaatcccagctactcagaaggaggctgagacaggagaatcgcttgaacccgggaggcagaagttgcagtgagttgagatcacaccattgcactccagcctgggcaacagagcgactccgtctcaaaaaaataaaaataaaaaggacaacatctgcaggcagatcacctgaggtcgggagttcgaggccagcctgggcaacatggtgaaacaccctgtctctacaaaagtacaaaaatgagc

SEQ ID NO: 78589 - DNA, 1140 bp, Homo sapiens
ttttaaagtttaacttcctcattctttacacctccttgccctagtttcagtaaacaacccccttctagcctttatactcacatatttagagtccttagtcatccttagtcacctgctctgtccttagtcatccttagtcacctgcactgtaaccatccttcctgcctaaactgctcaccccgccactctgcctcatacccagatagcctatcagaattagtttagactgtgcggtccaaccctagccaataggggaatgacacagtagtagggactagctgcattagggataagaaccccttctcctcccatgcccggtatgctcttgcgaccactccaggcacgattggcacccttctgcagaagtaaattgccttgctgagaaagctttttgccggagtgctgattcttctttgcggcaccaagcatttgtttctaacatcaactatctactttcatttttcaggttaagaaatctccaaaacagttggctgcttacataaataggtaagagtttctttaaagtttgtggggaacaacaaatatgaaagctgggtaaggatgacaataagggaaaaataagcattcttttatcataataataattaacttattgtcaaacagcttctttatgccagtatctgcactaataaacacatcaatattgtctctgctccttacaacagtcctactctatagcctactctatagataacattaaccctaacagttgatgagaaaacttaagatcagataagttaaatgatttgttcagaatcatatagctagaaaagtggtaagaatgacattcattctcagatctgcctaacttctaaaggcactttctacaaaacgactggttttcaaagtgtgatttgaggacctgcgggtccctaaagaccattcatggaatttgtgaagtcagaattacttccatagcaatactaagacattgactgtcttcattttcattctcttgtttgagggtacaatataatttttcaagaagctatatgccatttgatatcacagtagattgaatggagaagcagaaatgagaacccagctgtcttttgttaaaccagatattagagatatataaaaatgtaaaacagtaccattcttctcactttttaaaaa

SEQ ID NO: 78590 - DNA, 1407 bp, Homo sapiens
ttggtcaggctcatctcaaactcctgacctcaaatgatccacccacctcggccgcccaaagtgctgggattacatgtgtgagccaccgctcccagcctagagctgtttaatcctttgatttggcagccattgtagtagattatatagaaagatcccttttcatttttctggtaggtgacagctactatgtaaagagaatttatccctccaattccttctacatgcttctgtttttctaccttcttaggacaatacactaagggtattagcaaacactgtattgtctttaagaaaatatgcactatatccaatgttcaggatagttatatacagttagtgtattggcctcttctcaatcttttattctcttaagaccttatttcttttgttcctttttttcattaaaaggcaatgataattgccagtttctataatcactgtcttcaacccttaataccatttcagattcttcacttttttgtgtattatcaaatagcacttcaaaagcgcatagaggcctgaccattgctttaaagtagttttagttacattgtcaaatgctcttggtggaaaagggataatcctgtattgttgccccaacaaaggtgctgtcaaatatatgagacatgaaacaaaatggaatttgtagtgtataaatcctttgcaatgagactttaccattacaattatgatttccttcactccctttaaagctttattgaagtataatttatataccataaaattcacctgtcttaaatgtacataccaaaatgtacaatttactgattgtaagtatattgtaagtgtacacagaattgtgcagttgtcaaccccagtataattatagaacatttccatcatcccaaaaagaaaccttgtgcctatatatacaattattcccactcccatcctagcctaagacaaccacgagtctgctttctatctctataaattttatttttatagacattttcatttaaattgaatcatataatatgtggtctttcatgtttggcttctttcacttaacatagtattcaaacatgttgtatatgtattggtactactttttttttttgagatgaagtttcactcttcttacccaggctggagtgcaatggcgtgatctgggctcactgcaaactccgcctcccgggttcaagtaattatcctgcctcagcctcccaagtagctaggattacaggcgcctgccaccacgcccagcttattttttttctgtttttagttgagacggggtttcaccatgttggccaggctggtttcgaactcctgacctcaggtgacctgcccacctccgcctcccaaagtgttggtattacaggcgtgagccaccacgcctggccacttcattcctttttgatgctgaataaaattccatacaga

SEQ ID NO: 78591 - DNA, 1467 bp, Homo sapiens
gggctatagttctgacagtggaagaaggaagatctgaatggatctgtgaaatattttgaaggaaggttttttgtttgttttgctttggtttggttttttttggagacgggtctcactatgttgcctaggctggtatcgaactcctgggctcaagtgaccctcccgcctcagcctcccaaagtgctgggattacaggtgtgagccactgtgccctgcctgaaagaagatttgagaaaacttggtgatttgttagaaggaaggagaaaggagtcaaaataactcccatgtttccagtctgagagaattttgccagtcatttcaaatgtgatagctaggaagggcagcaagttggtttgacattgaagagatttagatgtgttgacttggacctagcagtggctgaccgaggagccaaatacaaagaaattaaagaagacctgggtcgagagaaataactgaagccatgaaagcatatttcttcaatttcagtagagagaggagctgctggaggaaaaggaaccagaaaaatggtaagggaacaaggagagtcaggacaactgtgtcgtatgaacagaaagagtcagggaagggccctgaagtgacgaaagagctaaatggtgatgaagaatgagcaatgtctttagagttggcttggctgactttgatgagcatcatcagtgctataaaggctcctatataggtttaattcaagacgcattttttttttcagatgagagagcaaaataaaagcaagattacaaagagttaaagagaaaatggaagctaaaaagcactcattgtagaaatttggcaggaaagggaagcagagaaagagtataggagttgatcacggaaatctgatcatgtttgaaagcagaagggaggaataagttcaaagggagaaatcaaagatttttaaaaagggtttgtgggagcaaagtccaaattgaggtgagaaagcaagaactgagaaaattagatgaagctgtcctaattttggaaaagttaaaatagattcttcttatgaaatattacctccatgtattggcatttccaccttttttgcttgtttactataagggagttatacgattaagccatgttttataagatagtgatctcattaagttaaaatatttatttcttcagattataaaaataattcgtgtttgttgtagaaaatagaaaaacatgttaagtgatggtgggggggagcacccataatcccaccaacaataaataatttctgttaatgttttgatagaccttttttgattggatagatcttacctatatctcttttgaaaaacctggatcttactatgcatttagttttctattctgctttttaaaatactgttgcttgccaggtgggatgttgtgtgcctatagtcttggctattctggaggctgaagtgggagaatctcttgagtccgggagtttgaggccagcctgggcaacctatg

SEQ ID NO: 78592 - DNA, 1953 bp, Homo sapiens
aataatcgtattttattgtctgcaggtttttctttcttttggagtgaggcaaggtaaatacataaatgtctttaatagatttaaaaaagtgagattcagctgtttccaaggttatagagctagttaagtgggaaagctgggaatttgaacatggatctgtttgacctaatctttttagctgcaccagcctttaaaaattcggatgagtctttaattttttacccagattgtaagttgtgatacctacctgcatagtaagtagaaagctttccagagagctgggaggggcaggaggagcctggaggcctttgcaaattaagttttaactcccattggcctgacagcacttaccccacatcattgcatacaaagggtactgagggcatccccagtctgcagggtcagacccagcccacacagctgagaggagcaaacaaaaccggtagagctggccttggtagtcgccagtcaaaacgaaaattccagatactttgaggaatgtttctggcacctccaggattgaagagtaaccagtttcctggagacaaaagaatggatgtgggccaaggggcgccatatttctcagctctgtcaagcaaatgccaggtatccaaggagtctagtgaaaagccatggatagctgtgtgccccaatttatttttaagtcagattattgaggtatcctttccgtgagttttggcagttgtgtaattaccaccacaatcaaaatacagaacatgtccctctcctcaaaatgtttcctcttatcctttttagtcagcttccttccctgtctctggcaatcactgatatttttcttatccatatttattttctagaatgtcatgaaaatgaagttatgtaatatgtagcctttcgaatctggcttctttcacttagtataatgcatttgagacttatccaggttgtcatgtttattagtagttcattcttttttattgctgagtagttagtcatttgtatagaaaaaaatcatgaataaaccagtctaggatggtaaacatttacctcaggtggggtgaacatatatcccaatattcgtgggactgatctgatttatgcctattgtcccagcataatttttaatagtaactcctttcactctcaaaagtgtcctagtttggatgataaattctatggtcactctaaatgagggcatactgagatgtgattatatttcatttgctttacaatgctgtcaaatttgccttccagaacaccgtaattgtatatgtttatatttcttataagtattattggtgataatagcagtaataacttacgtgtaatctcattttgattttcacaatattctcattttgcatttgagaaaacagatttagaatagaataaatgatctgccaaaaatcatgagctagaaagtgatgaaaactgtatcatctgtttatacattcagcccttaatctctcatattaattgggaggcattacagtgtattcgttaagaatataggcaatggatacagaacacctgggttccagtgcagactcttacttgttttcgttgtttaatctcgggcaaattatttaatctttttatgcctttattttcttacctatagaaagaggataatatgtcttcagtgcctacacctggcatatggtaaatttttgataaagtctatctgttatttttaatgatactgttaacactatcgtagtggaatctttccccagcaaaaccctttctcctccccatccatatatatatatatatatggatatatatatatggactatatatatgtgtatatatatggatatatatggacatgtatatatgtatatatatggatatatatatggacatatatatgtgtatatatatggatatatatatggacatatatatgtgtatatatggacatatatatgtccatatatatggatatatatatggacatatatatgt

SEQ ID NO: 78593 - DNA, 1322 bp, Homo sapiens
cccagctactagggaggctgaggcaggagactctcttgaacctgggaggcagaggttgcagtaagccgagatcatgccactgcactccagcctgggcaacagagcgagactccgtctcaaaaaaaataaaataaacctcattcttttatttaaaaggtaatattttttactggtaaaaattgataaaaataagccaaagacaacgattcaatcttaatctcatagaaaaataaacagaaaaaaggaatgtaataccactatttagaaataacccttatcctttcattcttttctctgtgctacatatgcacatatagaaacatacaacaaatttaggaactgatattaaagtttgctaataccacgaatcatgtttcttacaccaaaggcaacttgcctcataggtgatgtttgtgtataacttgataatagctaacatttacggagtgatttacagacattgtggtaagtggattatttaatcctcacagcattattctgaaaataggagattaggtaacttgcctaagatggtacataactaataaatggttaaaacaggacttaaacccaggtagtctgactctaggacttatatttctctgtcacaccatactgcctagtcttttcagtttaaacgtaagaaaaatacaacttcacattaaatttttcaaaagcaaactaaaacatgacattgttcatcgtttgtcagattttcaaaggtaaaaacgttgacaagacagaatcttgtgttatcatggatgcaaatagtggttgttctccacctctagtagcaggagtctaagttggaaaaacctttgtagagagcagcagtctatctctgccacatttgccaagcttcttagttcccaatttagtgaagacagcaattggaaataggaatttaaaatatattgtttccatgaaattaattgtaatgctttgggtagtctggacaaaggcaaatgcctgaaaaactgtatatcaaataaggtgtagattagaaagctaaacataaatgaagtaaaactgtaacagtttaggattttgtactgataatgtatcaagttcttgagccactttaagcccaaactataaattatagatgatgcatcatacattatgtttagatttctttctttctttctttctttttgagacggagtctggttttgttacccagggtggagtgcagtggtgcaatctcagctcactgcagcctctgcttcctgggttcaagtgattctcctgcatcagcctcccgagtagctgggattacaggtgcctgccgccacgcctggcaggttttcgtatttttaata

SEQ ID NO: 78594 - DNA, 1109 bp, Homo sapiens
aaaacttattgagtggttattctgtacttgaaatggttatacttaaactaatacctccttgacaaggaataaatttcaaaagcaaaatcacttagtaagaaatcagcagtttatacttatctatagcagagcttttaaatgtcattcatcagttacaaagctttcgattgcctgtatgcccaacagggtggtagacccaattggctatacaaaagaaatgtgccgcaagaatgacactatggactttggggacttggtagaaagagagtgggagggggatgaaggatagaagactacacattggatacagtgttcactgctcaggtaatgggtgcaccagaatctcggaaatcacccctgaagaactgattcatgtaaccaaacaccacttgttccccaaaaacctattgaaataaaaaataataaaaataaaataaaaaatgtgccaggacaaccaaccttagggagattaatctagtttgggttatgagattaacaacaaaaaatatatatgacactcttcgttagtacagtggatgaatgcagaactgaactgggtaaagcttctgcgaaaaactaacaattgcaggatttatgtagggcactgaacagaagggtggatggtggggctaggcagggttggtaatcccaacactttgggaggccaagacaggaggatctctggaagccaggagttcgagagcagcctaggcaacatagcgagaccatatctctacaaaaaatttaaaatattttgccaggcatggtggcatgtgtctgtagtcccagctacttgggaggctggggtgggaagatcgcttaagcccaagaggtcaaggctacagtgagccgagattgtgccactgcacttcagtgcagccacagaactggtgtggctcacacctgtaatcccagcactttgggaggccaacggtaggaggaaagcttgagcccagaagtttgagaccagcctgggcaacataccaagactccatctctacaaaacattttaaaattagggccagtgggtcatgcctgtaatcctagcactttgggaggctgaggcaggtggatcacaaggtcaggagatcgagaccatcctggctaac

SEQ ID NO: 78595 - DNA, 1018 bp, Homo sapiens
gtgcaatcgctcggtctcagttcactgcaacctccggctcccggatccaagcgattctcctgcctcagcctcctaagtagctgggattacaggcgcccgccactaagcccggctaatattttgtatttttagtagagacggggtttcaccatgttagccaggctggtctcgaactcctgacttcaggtgatccgcccaccaattcttaacgctgagtcagtatgggctttccttcagccccataaagtgcacctcagaggtcagggaacacataacaaggacattcaaaaggggagcgcgcggaagtggctttaggaagcactaagtcttgcctggttttttttcctccctgcttttctaaatccaaacccggactcctcaacccacagcaccaccaatttccagggcggaaatgacgtcgtattcacgcgccggaagtgcatttgcagagtgagacaaagcggagaacgctggtgggcctgttgtggagtacgctttggactgagaagcatcgaggctataggacgcagctgttgccatgacggcccaggggggcctggtggctaaccgaggccggcgcttcaagtgggccattgagctaagcgggcctggaggaggcagcaggtgaggcacctgggcaagctgtacatcactgttcatcccagaactgcaccagagtaatgagacctgagccctcaggcataactctgaaaaagatgggtggcacacagacatcacctggggaggtagcggcttttctgccgtggaagtttctctgctcaaacaatgcttacatcagtcctcctgataagtcaaaggactgaggaacatacgagggggcttggtctaatctgagtaggtgcatctgaagatctttattcctatgattggtagatcaggaaatgtgggataagaagtatcggaggttgcagctttagtttcttggtttggttttttaggggtcgaagtgaccggggcagtggccagggagactcgctctacccagtcggttacttgg

SEQ ID NO: 78596 - DNA, 1048 bp, Homo sapiens
ttgcccaggctggagtgaaatggcacaatcttggctcaccgcaacctctgcctcctgggttcaagcgattctcctgcctcagcctcccgagtagctggaattacaagcatgtgccaccacacccagctaattttgtattttcagtagagacggggtttctctactgaaactgatgttggtcaggctggtctcgaactcccaacctcaggtgatccgcccgccttggcctcccaaagtgctgggattacaggcgtgagccactgtgcccaaccaggatccagtatcttaaaggcccatactgtaaaggtcagcctgcctaggaattctgccacatttacacacacccctggccaaagtaatattttttttttccatgtagaacaaattatgggcagaaagtaaagttagttttagaagtgctgtttgtggttggagaattgtaaaaatcttttaaagggataagggaattagtggcttttaatataaccactgcttcagcccgaaacacaaaatcactgttacatggaaaactggttattaggccagatttatattcatgtctgtctagagtatttcatgtgtgtatgtgttgcttacgttgtctgtctccaaagtctctcatctcttttaatcactgcaaataaagcaatactgaaaacttgagagaatgcaccttaggggaaggggctatttcaagacagaaaacaaaggaaatacctgccttttgaataagatcccgcttttgagtcttacctatgactttaccagggtagattagaaatacacatcctcctgctgaccctctgccttcaatagctatctatcttaaaagctgaagtttgaactgcagcatctgcttgacaggtgccaggttccttcggcagggggacgatcactctatatatcttccgttgcctcagattcctgtggcccaaggatcccaccaatcctcgttccccctaaacatgctaacaaaaatcccttatcgtgggtattaaaataataacagttacactgtatgcatatttatgtgctccttttgtctggt

SEQ ID NO: 78597 - DNA, 1052 bp, Homo sapiens
tgggagttgtaaataatgcttctaccatctgtaggaagtaacagaaaaaaagacttaagatcctatccgctttgccatcctcagtgggcctggaggttgaagcaagcaaagggaacaaatcaaaattactcaatttctttctttctttctttttttttttttttgagatggagtctccctctgtcgcccaggctggagtgcagtggtgcaatctcggttcactgcaagttccacctcccgggttcacgccattctcccgcctcagcctcccaagtagctgggactacaggcgcccgccaccatgcccgactaatttttttgtatttttgtagagacagggtttcaccgtgttagccaggatggtctcaaatctcctgacctcgtgatccgcctgcctcggcctcccaaagtgctgggattacaggcgtgagtcactgcacccggcccaaaattactcaatttcttaagctatattgaagggttttctctgtccttacaggtcaaatgaataatttgtgacacctaggtcagcttgctccatgtcctatttagtaatcaaagaagagtggcactatttatgactaataaattgaaattcaaaaacagccatgaatacaggcaagaaaagtttctctaaataactattctgtaaaagaaatgaagatttcacatacttgaaattactgctcagccagccacataagtagtttccctatgcttgtaagccagatgtttgatcagtatattagtaaataaaaagctgagcttacacaagtatttccttggcacactgaactttctttttgaaacatatcactctgttacccaggctggagtgcagaggtgcaatcctggctcactgcaacctccgcctcctgggttcaaatgatcctcctgccttagccttccgtgttgctgggatcacaggcatgcaccaccatgcccagctaatttttgtatttttagtatagacaggttttcaccatgttggccaggatggtctcgaactcctgacctcaagtgattcacctgccttggcctcccaaagtgct

SEQ ID NO: 78598 - DNA, 1637 bp, Homo sapiens
agaaagaaaagaaaaaggtttaaaaagaaaaagacaaaccgaactggcagaaaaatctgacttgagcagcttcacttagaaattacttgggttctctctaggaatcttgttagctgccctattgtggcttttcttcttctttcatcatttttatcttatttagagtaacacttctaggttttcccattttttaaatacacaaatgggagtctggtattatgtatgcaaaaggactggatctctggttacttcacagggttaaattcaatccaaagttcagacttttctgaatatataataattaagcagctaattttgtagctctatgatcagataacctcagattatgatgatgccaggttttaagtttgtgctcttcttttgcctgtctccttgacaagttttgaagacatggagttcctagaggtgcttaccgagggactagagcgagtcctacttgtccggggtggtggcagtgaagtgatcaccatttattcataacctactctgaatgaccgtgcttgacctgttttcttaaaaggcctacgtcctccatggaagtgccagctcattactaccactcccactcaactagaagcctgtgttctgtacacatcatactgaactcttgatgagctgagcctcaagtacctgtgtaaaagagctcccatctgatctgcagtcattacagaaaaagcaaatattccctcaacatcagaacaatgctcaagtctttcaagccacgtctgagcagtcaaaggcaaattagaattaacaagctgagccaataaatgaattggtaaaagggatgctagaaattcaactgaagaaaaaaagcaagtcaagtacgtattcagcattaaagatgaatctcagaagtcatggttcaatgttgacactgtgaggataacaactagagacagcttcatcttactaaagaatttatggtcaagtatatttggacctattatcctcggcaagccaagatgcaaacattttttagctatatttctttagtatacccactgctgtaattttatattaggatactaacttgaaacatggctgcagcctctacttcttcaaaaacatccccccaaaataccagatttaaatatccaaatactgtgtcagtgtatacttcaactgttttgtttctcttaactcaaaacccattctgtcattgtaacacaggcagtgttaccatggaaattgtttttggtaaggtaaaaattatttctttcaggttcctttcaaatggccgaactaagagaactccaaaaggaagctattaacatttactgaaatagtctgtggttctctatacaacatggacaaaacatacaagctgttgtctaagaaatgcaggtcatggtgcacattaatcaacaggttcttctccccccgcccccacccccgcgcctttttttatgccctcttattaagcacaggtcaaaaaatcttaaggaacaaatactaggaaaactggctaaacatccttccctgaaagcactggaccatcttttaaagggcacatctagcaatggaattggaagttctagagccacactctttctttagtgccaacgttactgagcggctactctccttacctactttactaaaatggcatacag

SEQ ID NO: 78599 - DNA, 1202 bp, Homo sapiens
catcaatccaatccgtgctctctaaagtctgtcactgaaagggatgatactgggctgggcatggtggctcacgcctgtaatcccagcacttttggaggccgaggcgggtggatcaagaggtcaggagttcaagaccagcctggccaagatggtgaaaccccatctgtactaaagtacgaaaattagccgggcatggtggcacatgcctgtaatcccagctactcaggaggctgaggcagagaagtgcttaaacccaggaggcggaggttgcagtgagccaagatcacgccactgcactccagcctgcgtgacagaggaagactctgtctcaaaccaaaaaaaaaagggatgatactatattgttttcaaggatgacaaattccttctcactctgtcagttattccactataacccattactgcttcaaaataaccaaagatgaagcataagagaaaatttggtagaataacttgtgttggaccttcttcctcaggcacaattggtgaaagaccgaaactcaatgctacgattgaccagcattggctctgatgaggacgaagagacagaaacctatcaggagaaggtgcacatgacttggacaaaagacaagtacatggcatcccggggacaaaaagcgaagtcaatggaaggattccaggacctgcttaacatgcgtccgtaagttttcccactcccaagtttatcataaaattacctaatcagtggcacaaatgtgactttgcctggacacacaggatggagtctgttcatttcaccctgaatctagccacctcattattgtttgcctgttcatactggctcccaatgaacactgtacacaagctaaccatcccctctatccacatagttcacctccatactgtgttcttactataaaataagccaacagagaatgagaaaacccagatattaatatcataaagaaaccattttagcctgggcacagtggctcacgcctgtaatcccagcactttgggaggcagaggcgggtggatcacctgaggtcaggagttcgagaccagcctgcccaacatggtgaaaccctgtttttactaaaaatacaaaaaaaattagccgggtatggtggtgggggcctgtaatcccagctactcgggaggctgaggcaggagaatcacttgaacctgggaggcggaggttgctgtgagctgagattgtacca

SEQ ID NO: 78600 - DNA, 1044 bp, Homo sapiens
gagagcctagttcttagccgcatcactgatttaatctgtgcctttgcaaaaatcattccattttccataccattattcccagggtggagtaagagtaaatgagatgatatctccaaattggtttgactaaataaaggaagagtaatgcaaatacaagtgtcatgaataatcaccattaaaatgtcaaaaagcatatgggaatgggagaggcgaaaaagaaaacatacctgagaaaattctaaagtgaaactgaatcatcatactgagtttctggtaagatgagtcagggcatgactggggctgaggcaggaaggagatcgtgttcacaatagtgaatcaccctggtcaactgagaaagaatgttgaatattcactttgtagagatccctgttcccagttttttggtatggtgcaaaggaacaaaagcagaacagaggaaaaagcagagaaactacatgtagacaaccagctacagaggcaaaaatacgtagtaagcaaaaagacaaaagatcatgaaattcctttgggataattttaactttttggacttttctgtagatgatatagtattatgaagactttggaaaaaggtgggggatataatatggagaaggaacaatgggttaaaatgtccagagtgaaccagttcagtgttgcggtcctgtgtctctttcagaccataaagcacctaatggaggcagagaaggtaaaaggattctgccagctggtggtggccgccaagctgagagagggcatttcccacctcatccagtcatgtggccttgggggcatgaagcacaacacggtggtgatgggctggcctaatggctggcgtcaaagcgaagatgcccgcgcttggaagacttttattggtactaaccatttctcatacaaacctaaaggcccaagtcgagggtatatagttaaatctctgtcacccccagcctcctaaagtagagactatgccattgctgaagcatagtcttataaggcaacctgaaaaactattggtagtaatacccagattctacctacccccttcag

SEQ ID NO: 78601 - DNA, 1051 bp, Homo sapiens
cgagaccatcctggctaacatggtgaaacctcgtctctactaaaaatataaaaaattagctgggcgtggtggcaggcgcctgtagtcccagctactcaggatgctgaggcaggagaatggcgtgaacctgggaggcagagcttgcagtgagccaagattgtgccactgcactccagcctggtgacagagtaaaactctgtctcaaaaaacaaacaaacaaaaaaaaaactatgtttttatttatgtgtgttttattgtgcaatgtgtgtgtatacatgtgctcatgtagaagcaaacacacctttagaaactgtataaatgaggagcctgattttgaatgtttgggtagaaaattaattatcttttttttttcatactgctgctgcttaaattcccatttttcccactgcagagaatctttggagtaattacctacccaagggagagatcatcgaaaagccttcagccaaatcttctgatgtcttaggcagcttaaaccatgaatatgttcttgttgacatcaccacctccttcacgcttctggtgggaatcttctttccctctgttacaggtaaacacataggctgttgtatattttagaagctgtcagacccacggagtgatttttctcaggaggcagaattctcagggttcctagatttgcttctactctttgctatcagtatcaatatcaaagtgtccaagaagttaacttggttttttcccccttatctctaaaggtatcatggctggatcaaacagatctggagatctgaaagatgctcagaagtctattccgattggtactatccttgccatcctgaccacctcctttgtttgtatcctttttatggatccagtctgagtcttagtcataggagcatccagtagaactagatgatcagtatttttatcctggtaacaaagatacctgctttctatcacttcacttcttgccagattatctgcctacctcatatagaaaattcaaaaaagaatttataggagtatttagcagctcattttactgacagaagaaagtgtctactga

SEQ ID NO: 78602 - DNA, 1029 bp, Homo sapiens
ccaccactctgccacctcatccaagaggttcaagtccaatggggaaaaagtaaaataaagtttatcttttttgatatcttcatccctatgaaataaaatgcttctcatatctctcttcactgagacatattgtttactatttaaagtagtgatagtagagtcagggttaaagatcatcattataattactttatataaccctatgaataaaattaataatttgttcctttcctttctttccatttggaaatgtagttattcagaacagcatgtagaccaaaaaaaaaaaaaaaatccatgacatcccatttctgaaggcatttcagatcctattagaaactaggctaattccccagtcattttctctctcagctttgctttcttttgtgaaagtaaatgcaaacgaatacagcctttttacttaattattttgaaataacctaattttctcctttatttttacctaacaggtctatatcgtcccccgagctgccatctttcacagtgatgacgcactcaaggaatcagcagccatgctaaataacatgcgtgtctacggcacagctttcttggtccttatggtattagtggtatttatcggcgtacgctatgtgaacaagtttgcctcacttttcctggcctgtgtcattgtgtccatcttggccatctatgctggagccatcaagtcttcttttgctcctccacacttcccgtacgtgtctgtctctctgcctagccatccttattgggtagtaattgaaaatatctggtggtgtgataattttaagtcagaatttcatagagtctctctgagattttccctctcagataagcccagttagacttccttcctcatctaggcaggaagcctaccagcaaactatgtcccgttcatcctctttcttatgtcctaagcatagaactagtagctgtaaccatcatttaggttcagatattagatttttttctccctgataattgtacataatctttttttattatacacattttgaactattcataaagggc

SEQ ID NO: 78603 - DNA, 1090 bp, Homo sapiens
gccaccatgcccaactcaatgtaccaattttttttttttttttgagatggagtctccctctgttgcccaggctggagcgcagtggcgcgatctcggctcactgcaacttctgcctcctgggttcaagctgattctcccgcctcagcctcccgtgtagctgggattacaggcacgtgccaccacacccagcttatttttgtatttttagtagagacggggtttcaccatcttggccaggctggtctcaaactcccagcctcaggtgatccagccaccttggcctcccaaagtgctgggattacaggtgtgagccactgcacccggcctacctgtgaaatattttttcatttaatttgaagttttctggtagcaagattattttgatacttatgttcagtgttctttgtagctcatttcttccatgtcactggctttataggaagaaatggacaccagaccgaaggtgtcttccctcctcaaccgcatggccaattacactaatctgactcaaggagcaaaggaacatgaagaggcagaaaacatcactgaagggaaaaagaagcccaccaaggtgaggcctcagaataacaaggaatacatagaaagagccctgtatataagaaagaaggaaatacctaaggcaccattctgtgttcagcagctatttattaaatgcttgagaggtgcctggaactgttctgggcaccagcgtcatagcacaaagaaaacatatgatgcagtctaaattctgatgtggggatacagtccttaagctgttttaactgccaaagtatataacatattaagtgttgataaattcccgagcaaaaaattaagcagagtagagagactgaaattggcaagggatccagagtggagggcgttgctacttacataggttggacagggaaagcctttctgacaaggtgatatttgaggagagatctagctgatgggagggagtgagctatgtgggaaaagagcattcagggagagggaatagcttttcaagagaagagtgtccatacccatctgctgatgccatctgtctgttgtgaagttgttgggttttttaaacaccaaacatcag

SEQ ID NO: 78604 - DNA, 1025 bp, Homo sapiens
agacagctgtggaggcagagagcttttactgtcattatcagcagcaatagtgtgtaaaggagactacatctaacacagtattataccctgagtatatactcaatatctttttttcctcctaaacttaggtgactttaagagtagagtctcggctgggtgcaagtggctcacgcctgtaatcccagcactttgggaggctgaggtgggcggataacttgaggccaggagtttgagaccagcctggccaacgtggtgaacccctatctctattaaaaatacaaacaaattagctgggcatggtggtgcgtgcctgtactcccagctacttcaaggctgagacaggagaatcgcttgaaccagggaggcggaggttgcagtgagctgagattgcgccactgcactccagcctgggcggcatagcagctccatctcaaaaaaaaaagagtcttcatgggctggaattccaaaagaatagcgtctctaggggtcttgattattgttaaggaaaggaatgacccatgtttacttctcagagttttctttttgttcctgctggagagttttattttgttccatattctccaagcagtgctgattgagttctaagattaaatttgaatatgaaaatgggttatattaataccgaagcaacctgcacttatctggtgctgatgtttcttcgtcagaaaccagtgagaaactaacttggtctacttttttttttccagacgacggacataagaaagctcgaaatgcttatctcaataattccaattatgaagaaggagatgaatattttgataaaaatttggcactctttgaggtaatattttggagaaaactatggactgagactttaggaacagagatctcatgatagccatattttaccccatttggtttaaaaattttacaagctggataatttaatgttaaaagaaaatattgtaacttgttattatagtaaattttgtctgtgtaatctaattatagtgagtaactattaaatcaaattgttatgtagt

SEQ ID NO: 78605 - DNA, 1266 bp, Homo sapiens
tataaatgtatcaaattttttgatacaagaatagtgactcaaactattattatcacatgactgtatcgttataaatcaatgtgtatatcagtgctaagaattcaaccacattactttgatattttccacagtactattgtactacaaaatgtttagaattccaagaaatatgcccagctacctaaattctaatttgtcgccatgactctttttagcatataattgttattatgtctgttgaggatcattctgtggcttatctcaattttctgtgatatagtattattcctattgcatagatggtaaattaaagctaagaagtattgactcattttcccaaggttacactaataacatgtggtagagctagtatctcacctgagctttacctgcttcccagttctgtgttatcttttcactctgcctcatgtctgcgctctgggatagttgcacagctgtcatagtgggctctgtcttcagcatcatcctggaggttccctttgcctttcctgtaaaatggaacaatcatgatagtacttacagcataggatgagattgctgtaaatgagataatacaggtaaaacgtttaggtgtctatcacatacataccctaataagtgctaactgttgataattctttctattgttgttatgtctactaggagacttttattggtcccaaaattattcatgacacttgtatttattataaatccataatttaaccaaatattacacaaattgatgtaatatgaatagggaaagtagagttgtgtctataaaagctaacgtggattatttagcaggtcattaaacacttatttaaggctgggtgtggtggctcatgcctgtaatcctagcactttgggaggggaagcaaaaggatctcttgaggccacaagttagagaccagcctgggtgatatattttgtctctaccaaataaattagccagttatagtggtgcacaccagtaatcctagctactcaggagactgaggtgggaggattgattgagcccaggagttgaagattacagtaacctaagattatgtcattgaactcaatcatgagcaacagaacaagaccctgtatcttaaaaataaaattaaaaaaaaggtatttagggccaggtgtggtggctcacaactgtaatcccattactttgggaggccaaggtgggtgaatcacgcggtcaagagttcgagatcagcctggccaacatggtgaaaccccctctctactaagaatacaaaaattagcctg

SEQ ID NO: 78606 - DNA, 1032 bp, Homo sapiens
gaacgttgtcactaaatgaaataccagcatgcttgccataaatagagtataaattaaaaatagatacaataaagcagctaatcttgttagatactgttgccaagcttaggctctgactaagcctgttaaaaaagagattagcaacatttgaagagattttaaagatattctagcacaaacatttttaaaaatgatatttggcaaagtgcttccaactttcagttagctgggttaatggcaggatgaggggagaaggtagaatcagttaaaacttatcaagatgtttagtagaaaatgaacttaataaacatttgtagttaaattttcaaaaatttgattcttatggagttatcagaagtatacaaataacacaagtaaaacagtttggttactaaaattttttttcaaatatcaaagtagaagcatatctacttttctatgtggatgttctttatctcttcttaatttctctaccttcagtcctgactctctgttggattccataaccacatgagctttcctttaccttctctgtgttctgccatgctcttggcaaaaagggatggggcagtcttacctgggtcggcaatgtttgtgaactctgctgcattagcaacgcatcgatatggccatctgtggtcactgtgtagttccatgcaccagatacctactctgactatttgtaattatttcatacatgccttgttgtgatcttgtgccttagataattatcttccctggataattaaaagttatgtatattaccattattcattcttgtacctaaattttaggaacaaccagtatgatatagtagacaaatcagaatccaagttcaagcgagtcttttttgaaatttacactcagtttgccttggatgaaccattgagcctaatcttgctttagctttttaatatttcctatctgtatcacagggttatcatgagaaccaaaagaaatatgtgaaaatattttaaaaactgtaaaatgttactatgtgtaagttactattattaccatcattctttctta

SEQ ID NO: 78607 - DNA, 1076 bp, Homo sapiens
caccatctcagctcactgcaacctccgcctcccgggttcaagcagttctcctgcctctgcctcccgagtagccaggattgcagatgcccaccaccatgcctagctaatttttgtatttttagtagaaacggggtttcaccatcttggccaggctggtctcaaactcctgaccttgtgatccacctgcctcggcctcccaaagtgctgggattacaggtgtgagcggcctatttttgttctttccttcttgagtcccacagtatttgtacttaaactgtaataattttattgtttcataattgtgtatttttcccctctgaacttcttgagagcaaatggtcactgtttttgatatccatagtgcctagcatgtacctgacatatagtaggcattcagagtcttggttgaattaatattaataactactactgctgtcctagacagttagccttagagatgtttgcacatggacagaccgccgtggtctattaatgagtctgcctgcctgtctctaatatatctagcatttatttctttttgcatttttgtactcatgtttccttgcctaaaatactgctttcatttttagacttctacatagagaatttcagttgttttccatctcctttagactcctctatttgccttccaagattttcctaatatgacccaatcttcccaagcaaatctttccagacatgtgctgtatttattcctcctctgtgattttgagccctccatgatttttaaggttttcaaaaatcctccttcaagttcacactgccttgatcaatgttgcacgtctccctgtggaccctcacactgcttcctgctagtgagatgatccaagaccacagctgaggcctggctttgccatggttccattggctttattggctacaccaccttgggcaaatcatttcagctttctctgagctagtttctttatgaatataggaataattcttcttcacatggttgctgtgcagtttttatgtgatgatagtaggaaattttccctaaattcagtcttttagagactacctttgtaatctttctatttttatggatcatc

SEQ ID NO: 78608 - DNA, 3246 bp, Homo sapiens
atggcataggttaacaaattgattataagctggtaaatttaaagaatcgagaatttcttgctttggccaggctgaaagaggaaacaattttacccagaaaatgtcatcaacatttcagtaaaaataccaactaccattgttgagcatggtgagtagcagagccagtgttcaaaccaggcactggtttgtggcttatttaatcctcacaacaatcaggacaggtaaccattatcaccatgttaaaaatgaggaaagtgaggtgccaaaaaattaggaagattatttaagtgacagatttggaattcaaaataagggctgtgtagctctaaagccattatttttcgccacaccacgctgtttctactttaaacatatatgtaattatttgtgttttctgaactaggctgctctgttttttcagtagttactagttcttcttaagctctattatcttcatggatttaacaaaattaattgaaagttaactgcttcttctaccgttttgttttggattgcttttttatttcgcatagagtatttacaaatgtagaatattctttcaaatggcactaaaaattgagaaatctgaacttgacttaatccaacaatctggtttgttttttttttttttttttttttgtcaggtggacagtgtctggcttccttgctcaggctgaagtgcagtggagtggtctcggctcactgcaacctccgcctcccaggttcaggcaattctcctgtctcagactccagagtagctgggattacagacatgcaccaccatgcccggctaattttcatattcttagtagagacagggtttcaccatgttggccaggctggtcttaaactcctgacctcaagtgatccacccacctcagtctcccaaagtgctgggattacaggcatgagccaccgtgcccaacccttaatccaacagtctttagtagctctccactcctcacatttctaggaagatgcaattatcagcgagatagaaataagagacttaacaattcgcaggagacttgtaccagtctaactaatggaaatttagatctgcatgcttaaagactaagggttagtgatggaaaaaaatgggcatatggagcaagtgaaataattgaattttaatatcactgaaggtaggtaagatatttttaatatattaagaaaaattatatttcattttcatggaaatgaagctgagtaaaaactaaattctttctagagaaaaatactaatataggtagaatatagacatggcaaagattaaatatggtacataaataacaaatgattttaataaattctaaagcctcatatggtaaattagatctcatttattttcctgtattctttccatcaacatgtaaccttttgtgacagaagattctgatggttatattagaaacagtgaacctatagtaaaagccctaaaagttgtctccatcttccccttacttcattgccttcgttcatatttttttcttcatctcaactttcttctcttctgctgtttcctgcctacagtaaaaaaaattacatatacccacattcagtttcattacttcaagaccaagttcatacttatttcctccaagatgactttcctaatcttctactccaactttgattatatcattaattggtattaatgggtggacatggtgactcatgcctataatcccaacactttgagagatggaggctgtagaccaggagtttgagaccagcctgagaacatagtgagacctcatcttcaattttaaaaataaaagaaaaatgtaaaaaacaaagaaaaataattggtatttatcagcagtcaaatattcttgcagtaacactgtaattatattttatctcttcacctgtattgagggtgagacatagtgttttaatatttttctgaaaattacatattttattttttattgtggaaatttcaaattcggaaaagtttagtgaacttcctgttcatgtctgttacctgtaggtattcttctttattttttagatatgctttatatttagggatgtcaatccctttgggaaataaattccaaatgtttttccccatcggtatttttttatcgaggtgcagttgacataaagttaactgtacatctttaaggtgtatattttgttgatgaattttgacatttatatgcccatgaaataattataatgaagatagtgaacattttcgtcacccccagaagtttctttgtgccctttatgccccactcacctaattccttggtccctaggcaaccactgttctctttttctgtcaccaaattagtttgcatttcctagaattttatataaatgtaatcatacagtatgtactccttttggtctgactgcttttatataacaattattttcagagtccatctaatcagtttcctttaattttgacttccattaagatcttccttatttcttaaattttttcttcagaacttaatacttagggcagtagttgaaaacaatgcagtccacagatgtttggactttacagtggcactttaaatttttgacttacatgccaagattttaatgcttttaggattagtctgtaaacaggactgacttttcagagtgagttctgggaaggtggctacttgaatatctcactatccctccattcctgcttccagcctgtatctgtcaatcttgagtgaagtggctcctggatctgatgaacagttggtgcaattgaggccatgggctgtgtgagaactctgtcagggagagttggtacaggacttttcctctagacaagagcctggaaaatctcaggataagcataagaatggcaaatccaggaaagaacttggtttggtagatatccatgaattcctggagggaaggagaaaaggaaagagccatgggtctgagatcttcccatccctgtggctggcatatgtaaggagacctgagagcagggaggcttcctcctgggcctccacaagggctggtggcttgcctgctgcagcactgcctacccacaggggtagagactgctttgcctttccattttcttgagactgctaccgcttgtggtcctccaacaactaaatctcatcccccatgaggtgacaaagataaacaacccatctggggaagccaggcaacctgaaagagaaaaaccacttagaataaacaatatattgagttagctaaatagaaatgctggaggaggctgggcacggtggctcacgcctgtaatcccagcac

SEQ ID NO: 78609 - DNA, 1115 bp, Homo sapiens
cttgcctcaggccacatggtgagtagcagagccaatgttcaacttataaattctttgtgctctccactataccatgatgccaaatcctagctttttactaataagaagagattactttatatcttaatgtgcctgagccacagattttgatgtgagcattatcgaaactgtgatttttaaaaataggaccaatataacaaagttttactgattattgcatttacttaatcagatatgaatttccattcattcatttatttaaatatttatttccactgcttcacttggctagcctaaaaatatatgtattaaaaaataaaaataaatattatggttagtatttttgtgaaataattgttcgagattttctcccctgctcctcaaatcttatattgcctatggattaggcagatttgaattgataaacttgccttcactggacacagattgccatttagaagattttctctcctttaaaataaggttctaaggaaatttttagaaatggacctatagcacaatagagagaggaacctgtactggtattgaagagcatctccaaacagtaactcacaagtaatacaaatggtaggagagcaaactatgagacaaatttctattaaatgaggtttaaattttattgagaatccacaggatgttagactattaactaaataattgttacccatgaaagcttatgttctaaaaaaggtgatttggctgggcttggtggctcatacctgtaatgccagcactgtgggtggccaaggtgggcagatcacttgagcccaggagttcaacaccagcctggacacgggacacacacacacacacacacacacacacacacacacacacacacacacacttgagcccaggagttcaacaccagcctggacacggggacacacacacacacacacacacactcttgagcccaggagttcaacaccagcctggacacggggacacacacacacacacacacacacacacacacacacacacttgagcccaggagttcaacaccagcctggacacggggacacacacacacacacacacatacacacacacacacacacacacagttgagcccaggagttcaacactag

SEQ ID NO: 78610 - DNA, 2409 bp, Homo sapiens
attagctgggcatggtggcacatgtctgtagtcccagctactcgtgaggctgaggcaggagaatcgcttgaacctgggaggcggaggttgcagtgagctgagatcgcactactgcactccaggctggacaacagggcgagcgagaccctgtctcaaaaaaaaaaaaaaaaaaagttaactgttctctaatctttcttgtgtgaaatatgagggcagaggttgagatcatgacatgcagataagaatgacaacttcagtgaaggaaatagaggagcaagcggtagacagtagttcactgtgaattctgtccagtctccaggtttcagcagctttgggaagcaggctaaactgttcttggggttcttcaggttaataacaataagcaagggtggagtgcttaatccttttaagtgaatgataaacactgtggaaggcgtgtcttcaagcgccccactccctcagggctgtaggtcacgtgagcttaaagtacttcccgaatcccagccactgtctcttgtaggcagggatcacagtctgaaacgacagcaaggaagaggtaggcagggaaaactaactggaaggaagtttaaatacagaaagagcaaagtattatctaactataacaatgccacattttactgtgactaaggtagaggacccagaggagggggcagcggcttcgatctctcaagagcctagtttagcagacataaaagcccggattcaggattcagatgaaccaggtgagtacgcaacttgggagcttttggaacctataaaatgtttcatgaaagaagtaactaggatatcaaaattcaaaatgccttctttaggacagagaaaagtgttgtggttgaggtgtttttcagttacttatttcactcccctgtgtatctgatagcttctcttacttttctcacacactggattgtttttccccacaatgagttctgtgttcattaccaacaggtgaaactgaatcagtggcaatgtttgaagagttttcaagcaaaaagaaagacacagaagtcaatttatgtggaatttagaattcactttttcctcacagtttagattatatctggaaaagactttaaacccaccgagtggatgacatttaaacttagcagtttacataatattatataaagagggagcatggttcagtagttttgtaccgtggactttgactgtacttgtgatttctcaggttattcagtattttacctcagtttaccagcttaaactataattcaataatgaatggtctaagaattttttaatggcagaacaaaagtacaagagatggtcattgtggtgactagcatagcatcaggttaaaaaaagtatttgatgaatgtgattatccctattattttctttaaatggtaacagttcacacttgctagaggaattgtggttttgaatttttaaacaagcaattaaatctttgttaatattatagtattaaatatagttgtaatttgaagccccttatttttcaagtctgtaaatcgtgagcagcgtctttagttatatgaattaagaataagggaataagctctcaaaattacttttattttattttatttatgtttttggagatggagtctttctctgtcacccaggctggaatgcagtggggtgatctcggcttactgcaacctccgcctctcgagttcaagcgattcttttgcctcagcctcccgagtagctgggattacagatgcctgccaccacgcccggctaatttttgtatttttagtagagacaaggtttcacctttttggccaggctgatctcaaactcctgacctcaagcgatcccccgcttctgcctcccaaagtgctgggattacaggtgtgagccactgcgtccggcctcaaagttacttttaattccgtgattctgtgattctcactttcctttatagcatgtaacacattgcaattccttggtgtcaatagcggttggttatctttttcttaaaaccattcgagaatttttatgaatcttgtttgaagatgcaaacttttaaggaaaatgttccttttgttttttccttctagtgagataatttattaggggaatatcagaaaaaagattttatgtaaactctttgtccgcaaggttattttcattttgctgaataggatgatggaaagtggaaagcaagtttaatctgctttgaacttgaatatgattctctacaactcaacttcagctcaattaggttctgtctcaggcctgtgtgtatttatttatttacttattttttacttaatcccaaatgtgatagtaaggctaatgtgtatttgaagctgcaccttctttgcttatgttttccacccttacagtttaatccctttaggcttttgtctttgctgttgtcttcgttaatttcataag

SEQ ID NO: 78611 - DNA, 1065 bp, Homo sapiens
tgatccgtccacctcagcttcccaaagtgctgggattataggtgtgagccaccacgcccggcaaaggcacgagttttaagtgaacattggcagagttttgataaatgcatgcacctgtggaatcctaaaccccatcaagatgtagaatattaccatcactctaggaagttctttcaggcccagtcccagttaatctgtatttccattcttccagatccagccattgtcctgctttttctgcatcataggttagttttgtctgttctaaaaccttataaaagtggattcacatattatgtactcttctgtttaaagcatctttcacctagccgtaatgtttttgagattcatgcatgttgttgaacatatctagtttattcctttttattgctgaatagtaatcctttgtatgactatatcacactttatccattctcttgtgaatgtatacctaagatgtttccagtttttggatattatgaataaactgttgtgaacatttttgtgcaagtccttttgtgggaatatattttcatttttaagggtaaatacctatgagtggaattgccagattataggggaaagtgtgagacccttttccatagtggttgtactaatttatacccccaacaacagtgtatgaaagttctttttgttccacagtcttgccaaatttggtgtttttggtcttaggaattttagccatcttggtgagtgtagtgataacctcattgtgatagtgtattgtactttaaatagctatttctcacatcccaccttctttaatcactctccatgcacatcacacacctcagctttactagttttctctcagctttttctgtactactttaactttgccttcaattttctatgcccctgcacttttatatatagttcaccgtaggagagaacctgtgcagccaaaccagtgctattaagaaccaatgaaataaaatttaggtgagtgtatatgagttttctttctttgaaacatactctatgttgcctacctcagggcattagaggttttaaagttgagtttcaccacttacaatggtgact

SEQ ID NO: 78612 - DNA, 1032 bp, Homo sapiens
aacttttaggaagttgaaaaagtagctgggcaggtggtggtgtgttgtgttctcaaggttcattctctaattatagtgcattggacgtataatcctagttttgtattgcctttgagtctatagttaatttggataataagactgtgagctccttgggcaggaacagtgtcttgctctccatttcattcctatttcttggcacttagtgggcactcaaatattattgagtgaatgcatgatcctttcagcctcagttaaagcatgagattttcctgaggctttaacttggagaactctttgcctttcttactctacaatatgatgaatccaccagaaaataatgtcttttatatatttataaatatataaatcaccaaccaaagaggtagcactggcagctatgaacacagacattcagttactcagggtttcatttctgatgtatgacatttaattcttctatttttagttttagcctccaaattcattatatattcaccactgataacatttcataaaaatgcattttcatagacagtttcaagtcaagatttaaaagacttaagctgtaagtccttaccatcccatgatagttggtctttaccaaagtaattgatgcattcaattcttttaataattttatacatagtaaggcaaaatttagaatttgtgatcttttttatatttttcactaatatttcctgtctcagttgcagagggataagagggtttgctgaatatgataaataaggaaaatgtgtatacatcttctacttaagaatgagactatacctttcaggctctgctatagtagtagccctaaatgtaagtggtgaacagctcattctcctgtaagatgtttatagcattttctaacacagaactattcagagtgtagtacgagacagtgctggcccatgagctgtttattatttgtgaggagataagttcagaaattgagtttttagaaacttgcatagcagtttgatagaacaaatttatgtctgtcaaatctaataataacaaattggg

SEQ ID NO: 78613 - DNA, 1043 bp, Homo sapiens
aatgcagtgtgtgaacttggtttggattctgatgtgcataaaacaattgaaaaaagatacttttgagacgagtgggggaaatttgaacatgtacatgatattaatattaaggaattgttaattttcttatagatgtttatgacattgtgataatgtaaagctgttatctataaagatatatattgaagtatttacaggttaaatgaaatgtactccagctccttcctccccactcctccccaaaaaagttggggagagatagacaaaacaagattagcaaatgtttataatttgttgaagtagagtaaaaggtacattttactatttcttagcttttatctttgaagatgtctgggaactcctgagctcaagtgatcctctcacttgggtctctcaaagtgctaggattgcaggcatgagccaccatgcctggccaatttttaaaaaggttaaattacaattaaaggattttcttttgagtgtgtcctagaatgctgtagatatttgattaaatatcagtgatcaatacagtgattacctcaacttcttgtctttgatcttcggtggtctcttctgtgtcctcactaagtctttccatcatgagcccaaattcttttgttctcagtggcatgtttctagattccagattctcataaattttgatattacctttactggaatggaaggaaatgaaagaaggtactcctgcaaacctgggaaccttatgaaagttatgctttcccattttaaagctgttagaagaaggggaatgtttctaatgctgatgtttaaggcaacttataatgctgtaagcttttgaattatggctgctgcttcttttgcccttcgtgtctaacatatacttctggactactaagaactttgtgcaaattctaaaaaggcactcctttgtgccctgagccatcatgacttcactggagaagggcaagctggatttcaaccctcttccccttgcccttctggcttaatgccctcgtgcactgtctacacagctgtagctggtgagcttgttgtttcagaat

SEQ ID NO: 78614 - DNA, 1048 bp, Homo sapiens
ttcattactgggttctttatccaagatgaccatctatggatctggaagatcataatcatataattatgattataatagtcatcaggaaccaaggcatctctttgtgagatgcttaggaactctttggaataatagcatagtggctctttgcagtagtaatttggtatgtgggaaggtgtatgacaagaaggaaggcaaatgtatattttaacttcctcatttttgtcttcttagaaatgaaatgggtattttggttaaaagtgaatatcaaagaatgtaatcgttttcagcacacagaatcctaaattttaaaatttagtgagttggatatgtgttctgtagccatcattggctatttcagtctgctttaagactggtttcatggagtagttactggtcgtatcttagcagctttcctccaagacttcgaatgtgtattgcaaaattcttttttgaaatctgtatttttatggagaccttgacacaagtagctaagcccactcagggtgatggtgggtagacctaatgtgctattctgtcaaatggaagacttctgaaaaggcttttagggcctgattcccatgtaatttattctctctgagctttagatggaaagtctgatgattagagttagcaggtagcacacaagccactcctggctcatgttgactgctacagacctttagcttcctaaaccagtttgtgtgtgtcagctggcttggttttatttgaggtactgggaagaggtgatggaagagagagaagagagaaaatggggagatcataacattttttggactctgaaatttaaaagtttgagacctgtactgctttatatatttagttttatgctgtgttgtaactaatgtaatcttttaatgataaaaatttcccttaaagactcttaaaataatattccacccaagtttgaaaaccatagcctcacccactgacttgtgaaagcaaggcttactcaccattttccggtgtcaggaaatattgttccttttaacctaaagggttcaggaaaccagaatgattttagttc

SEQ ID NO: 78615 - DNA, 1310 bp, Homo sapiens
cccggggctgggggaggccaggtcacgtaactgctgctctggcgtcgggccggggagggggcgccagccccggcagcgcgaaccctgcgcgcgccgcggctctgaaacagttaccggctagtaaacaacagctgcgcgcgcacccgcatcagctggcgccgggatactgcacctgcgacctccttctccctcaccctgctgcccagtcaggccagcctgcgtggccgtctcctcctctactgggaccctgaggaagaacgacgagggggtgacctgcgccggggcgggggtaggggagaacgcgcctccggcaaagggggtggctcgtcctgtcacacgcaggagaaacctagcgagcggaccgtggctcagtggactagctacgacttgccacgactctgagctgcagtccgaggtgtcttgatccgctaacctcctcccagaccccgaggacctttctgctaggagaagagcgggcgcgccacccccaccgacctctcggagacaggaatccgctctgcccctgcatcctcctctgctcacccttctctcagtagtgtgggttatttttcccgttatgcatgtgcacctttcccaccagacccaagtggattgtcgacatcaaaaacaccgggtggctttgcatacacctccccccagccagacctgtggggtattcacctgatacacaacaggtggccgggtgtacaccttttagcaatctgatccacgctatagtcgcctgataaaggtttgcctgcacgcacttcgcccaactagaaccgtgggacactcaccagataaaggactacctcgacaggaaactgggggctgaggggagggaggcttcatctgctgccctgagaccatggcactgagccttcagccccggaccagaggggttagctaggtagctcttcattctgaaggaaagaagtcacacaagattggcattgttttgtctttttgttttttgtttttttctctcttaaaaaatatattcacctattggtgatgcactttctaggacagtcggcttgaattctgagtagaagtattcttagttggggctttttgtgtggtgtgaatcaaggttattgaaatgtgttatttttcaagttatcttttgtattgcagtcaaaagtagctagcgtaagaggaagattttgcgaggttccccccactttttttgttcttaaaaagaacaaaatgcatcctccagaaaccaccaccaagatggcttcagttcggttcatggtgacaccgacaaagatcgatgacattccaggtttgtcagacaccagtccgga

SEQ ID NO: 78616 - DNA, 2646 bp, Homo sapiens
accagtttcataaaataactttacgctctttcgctttacggaatattgatactcaacatgcattctttaccgccaacgctttgaaatggagcaggggaactggatgtaaaagaggggagggaagaaaacctcttctttcttccctagggtaaaggggctctgaatcctggagcccttgtttcttcaggcattgaaaactcactgctcctgaaatgggtgtgtatcttgagacaaagacaggcttctatacgtcaatattctatccacatccatccctacccccctctaacgccgtgtacctagcacacagtagggacactccacgtgttttagcctgcaaagttgcaagtagggccccaagccaagccctgctctcgtgcgcccccttctggctagctgaaaacaaggcaaaaattgactacattttccggagtgccaggagagagagacttccggttatgcaggaaggaaattgacgaacacgtgacgcggtcgggcggaccactgcagactgagcggtggaccgaattgggaccgctggcttataagcgatcatgtttctccagtattacctcaacgagcagggagatcgagtctatacgctgaaggtgaggagagaaaacagggtgtaaataggcatggcgagaaatgtagatgggaggagtgggtgaggtcatacgtggagttacctagctgggtgcggggaaccagaaagtccagaaccgaggtggggaagaaccgggaccgcgcgactcattttttaattaaaagaaaaaattctggcggggcgcagtggctcccgcctgtaatcctagcactttgggaggccgaggcgggtggattgccttagctcaggagttcgcgaccattctgggcaacactgtgaaactccgtttctactaaaatacaaaaaattagccgggcatggcggtgtgcgcctgttatcccagctactcgggaggctgagacaggagaatcgcttaaacccgggaggcagaggttgcagtgagccgggatagcgccattgcactcacttttcctttttttttttttttttttttttaaagacagggactcgctttgttgcctaggctgtagtgcggtggtgcggtctcggctcactgcaacctccgcctcctgggctcaaacaatccttctgcctcagcctcccgagtagttgggactacaggcgtgcgccaccatacccggctaatttttggttttggggttttttgtttggttggttggttttgtttgtttgtttgttgtagagacgaggtttcgccatattgcccaggctggtctcaaaccatcctcccgcctcgacctcccaaagtgccaggattacaggcgtgagccaccgcgctcggcctttttaaattttatatttctctatttatttgtacaactttttgagttgaccattgcatcttctattttcatgtttgccctttttcgcgctggccccaccccatttcatcactcctgtactgacatacattctgtgttcctggagcagaaatttgacccgatgggacaacagacctgctcagcccatcctgctcggttctccccagatgacaaatactctcgacaccgaatcaccatcaagaaacgcttcaaggtgctcatgacccagcaaccgcgccctgtcctctgagggtcccttaaactgatgtcttttctgccacctgttacccctcggagactccgtaaccaaactcttcggactgtgagccctgatgcctttttgccagccatactctttggcatccagtctctcgtggcgattgattatgcttgtgtgaggcaatcatggtggcatcacccataaagggaacacatttgacttttttttctcatattttaaattactacaagattattaaagataaaatgatttgaaaaactcttattttgtgagttgttggaggaaaggattggcagtatttttttaaagggagggagatgataaaggagagtaccccagagagttgcaacaataccacttggaagaaaaacttcagtcctgctgttgcaagagtggtcatgtgctgttcatgataggagggtattggggaagaaagattaagactttcacagctgtcagcattcactgaaaaatacctctgttgtcacttaacgtaatttcttgtcccttgaaataagattttgattaaaaatggaagagtacttgtaaaagtaataggcatattacagacagaggtcagtgaattgaaagtcagaagaccagtatttgctttttgtataactttgagaaagttacttaacctgtttagtctgatttttctcctgattaacttatctttgaactcaaattgatttagtggtgggcctttctttttttttcttttgagacagagtctagatctgttgtccaggctggagtgcaggggtgcagccttggctgactacaacctccgtctcccaggttcaagcaattctcctgcctcagcttcccaagtaactgggattacaggtgcacgccaccacacctggctaatttttgtatttcttttagtagtgacagggtttcgccatgtcggccaagctggtctcaaactcctcacctcaagtgatccacccacctcagcctcccaaagtgctgggattacaggcatgagt

SEQ ID NO: 78617 - DNA, 1052 bp, Homo sapiens
gactcaaagtcctctggctcacagcctctcagccctgcagcattgtggatgtggaggtatggctcccgtgggggcggtgggagaagtacatctcagactcctgaaaccttgggaaaagagggtgggagtggtcatacctcactttgaggttctgataagaattgtgtgtgtctgtgtttcagttccttcctgtgtatcaccccagccctgaggagagcagggaccccaccctctatgccaacaatgttcagagggtcatggcacagtgagtgccccacaaactatttcctggagcagttgcacagggcaaaggaaccacaggggcgtggagggggcgaggttttcaggcaaagatcgaggagcaggcagtgggaagggctcttgaacagctgagacagaggcagggagatttaaaggggcctgatctactccagtcagcgggccagggtcaggaaccaaccctcagaagtttcttctgcttccttaccctccatcccatccctcttcatcctgtagggctctgggcattccagccaccgaatgtgagtttgtagggagcttacctgtgattgtggtgggccggctgaaggtggcgttggaaccacagctctgggaactgggaaaagtgcttcggaaggctgggtaagtggtcttggaaatgagggtatgagcagtgtcacagagagagagagagagagaataagaaggggagaaatgagaaggaagaaggaaaatcttaaaaatgaaaaaaactgggaagaaagataatagaataaataaaaggaagtggggaataaatggaaggatatgtaataatgcaggtgaaaaaagtaagaaggggccgggcacggtggctcacacctgtaatcccagcactttgggaggccaaggcgggtggatcacctgaggtcaggagttcaagaccagcctgaccaacatggcaaaaccccatctctgctaaaaatacaaaatttgccgggtttggtggcacatgcctgtaatcccagctacttgggaggctgaggcaggagaattgcttgaacctgggaggt

SEQ ID NO: 78618 - DNA, 1482 bp, Homo sapiens
tcctaggcccaaagtggaaagatctgtgcacctggtttctgttgggcataggagctatttatggaataagatgtgggggaggaggacctgtctctaacctactgtacatcaagcacagcgccctgcactttcgcatgcattcttattaaatcctctaagtgctagatgctttttatggctttcggttttataaatggggtagggaccaactgaaagacaggaaaataaggcccttgatgccattaatcttttatcctcttgccctcattggtatcttcatcccaccttgggtcccagtcccctctcctgttcccacaccacctgtcacatgcaagggatgatggctgtctgctcctgggtctatgctttgtggaagaaggatgctgtggagggagcatatccaagctctaaagtggcattctctcccaccctttgcagttctgcctcctgggggcattgctggcccccatccgagtgcttctggcctttatcgtcctctttctcctctggccctttgcctggcttcaagtggccggtcttagtgaggagcagcttcaggagccaattacaggatggaggaagtaagtgagggatcagcccccagagaccctacttctcttccctgctgtctattcggctccctctttgagaagaagaaaagagagcattctgaaactattctgtctagcttgggtagatgagatgagtcagccaagctcagacgtggttcccagacctcacctctaagtaatgtgccctgataggtcccaaagtggccagagaccttggccccttggtcacatcctatttaagggtaaaagaggggtgccctactttcccggtgtctgaacctgggggcgggtgagggttagaaccactgcttccgctgatacccagccttgccctggcaggactgtgtgccacaacggggtgctaggcctgagccgcctgctgtttttcctgctgggcttcctccggattcgcgttcgtggccagcgagcctctcgccttcaagcccctgtccttgttgctgccccacactccactttctttgaccccattgttctgctgccctgtgacctgcccaaagttgtgtcccgagctgagaacctttccgttcctgtcattggaggtgagagagttcaaagggggtgaagggcagggtgacaactctgggcaaaaaaagtcaggaatggagacactggagtgaagaactggcctcaaagtggggagggactgttggcaagtgaaatataaattaacaccattagtcaaccagtcttagattctgagggctgggacagagagaaggtgttggagggagttctggtcagttctctaaaaggacaactactataaagggattgtcccagggcaaagataacaggccaggcacggtggctcgcgcctataatcccagcacgttgggaggccaaggcgggcggatcacctgaggtcgggagttcgagaccagcctgacca

SEQ ID NO: 78619 - DNA, 1053 bp, Homo sapiens
ccctcggccggcgccctgacaacgcgggcgggctgggctgcgccgcctgctccccgcccctcggccgcctgcaccgggcggggcccgggccagagcgccgccgccgccgctgctgcagcagcagctgctctgcagagtggtggccggggccagggccggggtgccctccctcccaccttctcccgccatgagccagggaagtccgggggactgggcccccctagatcccacccccggacccccagcatcccccaaccccttcgtgcatgagttacatctctctcgcctccagagggttaaggtaatgtgtggggagcgggcgtcggaaggacccgtgaggataggaaaatggggccatttgagccctggcaaaggtgggcttggggatccacgagaaggagatggctgagaggcttgcggagcgggagtccgggggtgcgcacgtgggggcggccgcggttgggcaaggagtcctggagaggacgctgcgggcttgggcgatagacaagctcgaagatgtggaaaaactgagtaggtggggatggagggctgcaggggaccctggggttggagagatgaaggacgctggggaatgcggattacattctgcagagcctgatggctaggatggagttagagtctacgggaagccgggggtgggggcgggggcgggggcgtgccgagtattcctccgaggcatgacttagagggaagacgtttctgggccgggagcctgcgaccctgtgcccttcctacactccctcttcccactccctccaacccccctccaccccgcactgcagcacctcccggtgggggcagggaggctgagagggaggttggctacaggaagtggagggccgcgccagcctaggggagctgggaggtggtgtggggagggagtgtccaaggtttctgctgtcatcacctccccggaggcaggctccaggggctaggtttgcttacctgcttcttccccaaggcagcctatggagtcatcctggctcctggcagcctctctcccttgcagagtggggccgagctcttgtctcc

SEQ ID NO: 78620 - DNA, 1159 bp, Homo sapiens
caaagtgcccagcgggccaaggcctctctcaatggggctggtatctattctggctgttgcactctgaagatggaatacgcaaagcctacacgcttgaatgtgttcaagaatgatcaggatacttgggactacacaaaccccaatctcagtggacaaggtgaccctggcagcaaccccaacaaacgccagaggcagccccctctcctgggagatcaccccgcagaatatggagggccccacggtgggtaccacagccattaccatgatgagggccacgggcccccccgacctcactacgaagggagaaggatgggtccaccagtcgggggtcactgtcggggcccaagtcgctacggccccccagtatgggcaccccccaccccctcccccaccacccgagtatggccctcacgccgacagccctgtgctcgtggtctaaggcttgcatcaatctaagatgaactgtgacctagtcttcaatgtcttctgcttgtatggcaatgtggagaaggtgaaattcctgaaaagcaagccgggggcgccatggtggagatggctgatggctacgctgtggaccgggtcattacccacctcaacaacaacttcatgtttgggcagaagctgaatgtctgtgtctccaagcagccagccatcatgcccggtcagtcatacgggttggaagatgggtcttgcagttacaaagacttcagtgaatcccggaacaatcggttctccaccccagagcaggcagccaagaaccgcatccagcaccccagcaacgtgctgcacttcttcaacgccccgctggaggcgaccgaggagaacttctttgagatctatgatgagctgggagtgaagcggccatcttctgtgaaagtattctcaggcgaaagcgagcgcagctcctctggactgctggaatgggaatccaagagcgatgccctggagactccgggcttcctgaaccattacctgatgaaaaacccaatggtccatacccttacactctgaagttgtgtttctccaccgctcagcacgccttctaattaggtgcctaggaagagtcccatctgagcaggaaggtatttctctttcctttatgccattttttggtttttgtttttgttatttgcaaaagatcttgtattccttttttttt

SEQ ID NO: 78621 - DNA, 1237 bp, Homo sapiens
gcgagcgcgaggtgcccggtcccgactgccgcttcctcaccgtggcgcacgacgacggccgctggtcgctgcagtccgaggcgcaccggcgctccttcggcggcacggaggaccgcctgtcgtgcttcgcgcagacggtgtcccccgccgagaagtggagcgtgcacatcgccatgcaccctcaggtcaacatctaccgcgtcacccctaagcgctaggcgcacctgagcgcgccgccggccgacgagatcgcagtggaccgcgacgtgccctggggcgtcgactcgctcgtcaccctcgccttccaggagcagcgctacagcgtgcagaccgcggaccaccgcttcctgcgccatgacaggcgcctggtggcgcgccccgagccggccactggctacacgctgcagttccgctccggcaatgtggccttccgcgactgcgagggccgttacctggcgccgtcggggcccagcggcacgctcaaggcgggcaaggccaccaaggtgggcaaggacgagctctttgccctggagcagagctgcgcccaggtcgtgctgcaggcggccaacgggaggaatgtgtccacgcgccagggtatggacctgtctgccaatccggacgaggagaccgaccaggagaccttccagctggagatcgaccgcgacaacaacaagtgtgccttctgtacccacaggggcaagtactggacgctgacggccactgggggcgtgcagtccaccgcctccaccaagaatgccagctgctacttcgacattgagcggcgtgaccggcgcatcacactgcgggcgtccaatggcaagtttgtgacatctaagaagaatgggcagctggccgcctcggtggagacagcaggggactcagagctcttcctcatgaagttcatcaaccgcgccatcaccgtgttgcgcggggagcacggctttatcggctgccgcaaggtcggggcaccctggacgccaaccgctgcagctatgacgtcttccagctggagttcaacaatggtacctacaacatcaaagactccacaggcaaatactggacggtgggcagtgactccgcggtcaccagcagcggcgacactcctgtggacttcttcttcgagttctgcgactacaacaaggaggccatcaagatggacgggcgctacctgaagggcgaccacgcaggggtcctaagggcctccgcggagaccgtgcaccccgcctcgctctgggag

SEQ ID NO: 78622 - DNA, 1044 bp, Homo sapiens
agagattccagttacactacacgcccagggctcccagcccccaaccgtcccttagccgcttccagagaaataaggctcagagccgtctgaggtcagaagaaagaggtgccagactcgccccgtggcagacaagagggcaggggcatctgaaatccctcccagggccaggccgcagccgctgacccgaggggagtagggaaccagggcggaggggagactgggaagtccataggggcgacaggtgggggcaccgttttctctggggtttccagtttgaaaggcaagggggcttgcctcccgcccgggggagcccacctggaggagaaggggttagcagggagggttggaaggagccgccacgtgggcaggaaccgggaagggcgggcgggccctagtactcccagagcgaggcggggtgcacggtctccgcggaggcccttaggacccctgcgtggtcgcccttcaggtagcgcccgtccatcttgatggcctccttgttgtagtcgcagaactcgaagaagaagtccacaggagtgtcgccgctgctggtgaccgcggagtcactgcccaccgtccagtatttgcctgtggagtctttgatgttgtaggtaccattgttgaactccagctggaagacgtcatagctgcagcggttggcgtccagggtgccccgaccttgcggcagccgataaagccgtgctccccgcgcaacacggtgatggcgcggttgatgaacttcatgaggaagagctctgagtcccctgctgtctccaccgaggcggccagctgcccattcttcttagatgtcacaaacttgccattggacgcccgcagtgtgatgcgccggtcacgccgctcaatgtcgaagtagcagctggcattcttggtggaggcggtggactgcacgcccccagtggccgtcagcgtccagtacttgcccctgtgggtacagaaggcacacttgttgttgtcgcggtcgatctccagctggaaggtctcctggtcggtctcctcgtccggattggcagacaggtccataccctg

SEQ ID NO: 78623 - DNA, 1060 bp, Homo sapiens
atcgtattgaagtttgttatttatagaaatgcagaagtttgggctctgctccaaacctattaaatctaaatctacattgcaacaaagtccccaggtgattcacaggcactttgtagtttgagaagcactgtactaagattactgtgttgtcttcacatgaatgaggctataatgtagaattaccagtgaatgtgactaatgttttctgacaagggacctctgcttacaaggtccctgggcatggtgcccagaactggaaaaaaaaaaaaaaaaaaggaaatgtttatatgtatgtgtagaggggaaaattgcccactagttctctatttcccattttgatcatctgctagagtatctaaaggggaggggagcatttaccccagaatgtctcctctagtgcatccacctatgggcctggccatgtccaaggaatctttgaagaaacaagcaagaactgcacactaccattgaaatccttctggtcctgacattttgaaggaatgattgcttcatagggaaattaaacccagaaagtcaagtcagttatatttttgagtgactagtgtttgctcagctctaccaggctgtgttgaatatggtacagactctcattttatgatgtatcctactgcatcaggacatttgtgtcaatgtcaggtgatgaggggaaatgaaagtgatgagacgatgagaggagtgaaataccaaggacgcgatactaggaaacccaggtctatttgttatcagagtaaggatcaagccagatagcctgttatgtaatttctccgataaaagattttgaaagcaggtgctgtgggcatctgtatggggaatcgcactcatagaattattttcatttgtaaatatttggtatcaggccaagcaagggaaagaagctttactgtattaccatctttcctggaaaagattgatttttctctctcccttaggggatatgaggtatgatacctgcaaccaaaataagctggctgttaagtgctctctccttaactattgtccaagcaatgtacatcactcttgcctagatgagtgaccatac

SEQ ID NO: 78624 - DNA, 1069 bp, Homo sapiens
taaattatttctaacttcatgctctttaaataacttttcactttgagattgaatcctccttttttggggtatgttttttaccttaatgattttctaaattgttcctatcataagaaaggataagactttataagcattttattaataactataaataggaaagttgttaatctctattttagggtggtttaaaaagaagtgcaaattctgtattttcttgatttgctttactaccttacctacacttatagagcagtgtttcttagattgttgtcagaagctacagaagaatcagctcattccacccagaccttctgaatctgaatctatagggctggagcctaggtacctgcaatttaacagtctaccccagatgattctgatagacaccaaaatcttaaaaagagcatttgaatattcaccctcttgactcatagtatatgtgttaaataaaagtaaatgttagcctcttactttttagaaaaatataagtaggacaaagagtgttaatattttctttctgaattatcttaagaactgtctttggagcatacacagtcttagaaactgctgtttcagactgtgttgacttttctctctagtcaaataattacttatcttgtactaattcttttatattagatagtaaactaaaacccatacttaacttaccagcccaaaattatattaaaagctggcaactcttagctcttctagtctctaacctttctaaatttcaatggaatcactattcttcatgaagtctttttttttttttaatgggagtcacgtggccagcaggcagagcgtgctgacctgggccccctttttattaattctatttaagtctttttttaacattcatgaagtcttcattggactcttcacacttgcattttatgtcctcttactgttaggtcttccagaccctaattgtgcttattcataagattaagaaatgggtttatgttgaagtgttaccttctagggttgttttactagatacttaacgttcttttttccttcttctagaatggagagagaccatctcatgaagtacaaataataa

SEQ ID NO: 78625 - DNA, 1017 bp, Homo sapiens
tctatcaggtaagaaaaaataggaagcttataagtttattttgcatttgctggctgacatatgcctaaatcagtgatacttaaccatttggccgttgagaaaaggaaagttggaaccccaccttacacatagcatatgaaaaatcgatttcagattgattaaaaatacatgcactaaagaaactaaacaaactagaaactactagaagaaaatattaatgaatatacagtgttggagtgagaaaggtcttcctaagcttgttacaaaagcagaaatcataaagaaaaatagcgattggagaaaagatttattttcagtatttaaaatttatttcaatatttaacaaacaagttgaattctgaatatatttatagaactcataaattgttttaaaaaatcaagactaacaggaaaatatgaatatgcaattcatattttataacaagtataaatcactgaattacattttcacttctataacaatgctcagtgttgggataggtttggggaaactttattctcatacaatgctagtaggaaaataatttggtggacaaattgtcagcatgtatgaaaagcaatgttctcacatctaggaatttatcctaaaaaaataattgggcaagtttggaaagacttgtatgcttcatgttcatcactgcaaattattctggaaatgagaaacaacccaaatatctgtcagtagggattaattgcattattacatattccatataaaagaaatactagatagccactaagaatgataacattgtatttactaacaggaagaatgtttatgctatattaagtggaaaaaagttgcaaagtatatctacagtatctcattttaaaaaggagctgcaatacatacatatagaaatacatacagataatctatacaaaatgacctggcagcatatacatcaaaatatagtctttggttggtagcatttggggttattttaatttttttctttttttctctctctctttacagcaaaatatccaatatag

SEQ ID NO: 78626 - DNA, 1086 bp, Homo sapiens
gggttccaggagatgcctcatatacctgtgaaactgcaggctatttcttcttataccaggtaagatattaagggtttttgaatcatacttcatcataatatgaaccccagttggaagctggaatgagttcttgtgatccttcatgaaagcttatttttttgagtagattagaatgtatggtattgcaagtgctatatttatgaatgttaagtgtattttgtattatcttcagttttcttttctaaataactttgcttgatgactcattctgtgaaagaccaatgttgctactttttacatttttttctttctattggcaaagttctagtcactcttttttctttttttactgtagaaatacaactaaataaatattctagctagccagtggcaacaaagtacagttaacttttattgtatacattaatcaactaatgaaggaaaacattcttccttcaaatttccagaaataaattatgtcttacaactaattgcacagtgggtcttgaagttaaaggcttctgacttcaacataaagatgtacttttacttttgttagggtaaattttggaagtgtgaaaaccaatgagaaatagccaaataaagtgaataaaactaaactttaatagtcagttggattattaataattttaaatggactaggacataattggctaatgaagatttttgtataacttcatttgttctctttgttctaatgccaattgtatattttagatataaattataatattgtaagctcattgtaagtggatatcacaaaccaattaagtccattcaaaatgagcagctttcatggtttcttgtgaagcagggaaaatacataatatagtctacattagattcaagactgtttaggacttgcataaaggagtaaagatcagcttaaatgcttttttgacacaaaattacttggctttcagtgaaaataatgtttaaaagtgggaaaaataacctataaattaagaaggtttatgtaataaatttgggaagaatgaacttgaggcttcacagtgtaaattggcagttttcaacatttaagaatcatatcaggaaagttgttta

SEQ ID NO: 78627 - DNA, 2783 bp, Homo sapiens
acattgagagatatataaaagcaatcttttatttctactggagagggtcaatgtgaaaaagctaagactatttggatatatggttagatatttggattaaattaaattgctattttttccttctacactaaactagaacttttacttggagattataagcattaacccttactgggagcatttttcttcatttagtagaatgaatattcctgaaagactaaggtctaaagtgcattgatactggattaaatttcaaatccatgtgaaatgtacacctgtattacatgaagggactgtattctactttagtcattctgaagctgtcagaaatgagggaagaacaagtaacatttattagatctggtataaaatgagacaggcaactctgagaacatcctgaagcatattatgaaatttgcatggtagtcaaaacctctgaaagttttttctcggagtttatgttaacagtggtgacttcagttgaccagtctttgagttggtatatacagaagcactgtgtttttggaatgccaaatatcagttactctggtgatcattaacttttaatttgtaaagttttaaaaataatactcttcagttcatttgcctgacatatttttatatattttgaagtttataaatagtaaacttatccaatatactgaatatatgttatacataattatataataacatattacataacatattggacataatgcatctaatatactgaatttgtgggagttgaagggggatcaatttggactttgtcttgataaaagaaacaaattatgaaaagaagtttttttcttctgtttataaaatttgttctgtaaaaacctattgtaaattcttaaaatgaacagaataattcatgtgttgttttaacatattttttactgttttgtcataccttgatatggctttctacagttatcctctactttatgattgatttgtatagcacaatcattgaaaagattaatttgcaaaaatagacacataattcactgcttgctaaacacctgccttggttttttgaaattcaaatcatttcccttgatgcccatcgaattgattgttttccttcagttaactgttttgtttgccagatcttcatttgcatgtataattcaagtagttcttcaaaatcactgtaattcacaatgaaatcatgtagttttttctgggattatagtgtgcaagtttgtgggggttttgttttttgtttttacttttattcaatctatgtggttcttgagtttgaatagtgaaggtttggatagtgagtaacaccatgtaatctgctctgttgggtactgagttttggatgatgagtatcaagagtttggatagtgggggatttttctgaaaatttatgttaaatctcttcagtttcagagctcagattgctagaattttgatggtaaaggatatctgtatctacattatataacctaggtgtttataagactggatgctgacttcacaggcagggttggactagtgaaagtgagatgtttgaatggcggcttatttttaaatagtaccttaattagtgagtctttccatactatgaaacttttgcctttctgtaaaaccttgtaactgcggaagttcagataatgaatactaggattcgagggaaccctaattatgaacatttcacagatagaaagtagtgacttttaaatgactttcatcagaatagtttgcaataaatgagtgctctgctctttattatattgagaacattagactttcagactaagatttgaaagatgcaatttatgtttccaccttctggtcctcttaatgtattctaccaacacactcactgccttcttattgtctttctccaactgcaaaaactttttcagttctctgtaacccaaggaaatgctgttgaatgaaatgaaactcagtgtggttgtttattttaggagttgttacaactcggaagaaatagcatctgagccaatgcctttctcgtttcataaattaaaagcagatgtttaataggtgggtggttttatggtttctagttatccatacagccaaatagacatagatggcaatatcagaaatcaatataaatactatttgattaaattataaatggcctaatataaggctgatttccttctgtgtttcaactttgattctttctaaatgttagtttttgctacgtttaaaggtgccgtcacccttcttgctttattgtctaggccctaaaccagttgtttgagaaaatcatggcattagacattgatgagcgccacctactgcgtcttggtcatggagaagaagagctggagacagagaaagatttcagcaggtgagcaaatgggagtgagtaacagtgtaaaaaaggattttttattttcttttcatttcttttattaaagaagaagaaagcaatgaatactgaaacttaattctgaaaggttctaacttaacttactaagactatatgttgagctagaaatatggtcatgatgtccctcagttccagttgtgtatggttatgccattttgtcttcaaatatacaattatgttaatgaagagaatgatcttgttaatctttttaacagattgccttttgctttctatttattgaggtaatttttcatgctgccagttcaaaactgtacaactttaaatgattcctttttcacatcttattcaggaatttaatttgcatatattttaggtgccaattaggaggttgatttatttattgaaatagaaattacgggaggctgacgcaggagaatcg

SEQ ID NO: 78628 - DNA, 1024 bp, Homo sapiens
aagatattttacctggagatagaattgtgggttgatagttcttccttttagcactttaaatgttattacacttccttctgacttccatgttttctgatgacaaatccaaagtcattttaaacatctttttgtaatatgtaatgcatcatttttctgtggttgctatcaggacttttttttttctttgctttttgtttttaaccatttaattgtggtatatctgggcttggatttctttggggttattctgttggggttcactgagctgcttgaatctgtagatttatgtcttttgccatatttaggaaattttcagccatgatttttctaaaattttgtctatgccatactctttttcctttctgtcttagaatttgttgacatgagtgttagacttgttaatgttctatagattcatgagtctctatttttttaatctttttttctgttattcaggttgtgtagcttactgatctatctcaaagttcaccaactcttcttctatcctgttcattctgttattgggcccatctactgaatttgttaattttatctttcaggtctgtacttcacgttttctaacaatgtgtgataactgtgatgacttagtagtttgctatgtgttcatcttctttttaggttgtgggcccacctggtacaggcaaaacagatgtggcagttcagatcatatccaacatctaccacaacttcccagaacagaggactctaattgttactcattccaatcaggtaaatgactgtgtgtgtgtgtgtgtgtgtgtgtgtgtgtgtgtgtgtgtgtgtgcacgcatgcgcatgcacatgggtatgcaggttaggggttgagggggaggtaagtgtgggacacaataagttcctcttcaagaaatctagtttcattattctttgttctccatttttctgagcctggcctacctgttccctaatatattctggcatgcctaagtctcagctggtttgtggctcacattccttcccttatttgggaatgcattagctcctg

SEQ ID NO: 78629 - DNA, 1023 bp, Homo sapiens
ataaaacactttacaatgcacatgagataatatttaatgtttctttaaattctcccgtaattctccgttaactgggtgacttttttaaatttgaaaactcccaacacacgttagggcttgtaactcgaccattttcagagtttacatacagatatcgttcctttaagccagaaatgtttcttactcctctgattatcgtgcatacaatgtcatgcaccagataggtactcagtaaatccttgttaattgcaaaaatgaacagaagttttggtcttgtaggataacttttccagtaagaagtggaaaagggaagaaaaggaaagatgcggatgtggaagatgaagacaccgaggaagcaaaaaccttaattgttgagccccatgttattcctaataggggtccttatccttataatcaacccaaacggtaattttactacctattataattgtaatgatgaacaatagtttgccatttcaactggattaggaatgtttttaaattttctgtttcttttaaaactccacaaaactcctgtttctgaaccctctttctttctattctgtcagtcagctgaataactgacattttaggccattctgtagtcataatatttcaaaaagaaacattttcaggtactatgagaaataaatgttagaggtctaccttaatttgagcaaagggttcttacttcatgagcctgtgttacatatagcagtagccctaatgcatgtgtgccataactagtaaattggcattatatttagtattagaatggaaactagaactttggcactccaaatgaggtctgggatgggctaagtcccgaaaaataactataattccattttaattgtctgtgttgaggggtagaggtgaagggagtcattcagaagagattgagagaactggggtaaatacagagcagatatttagaccactggtcattgttgtctaaatttgtattatacaaagcatcatttatctgtaccaactttttatttactcttatttgcagtaata

SEQ ID NO: 78630 - DNA, 1051 bp, Homo sapiens
ccctgaattccttcatatggattagtggtaaggcactgagtatacctatgggtggtagcccacagattactttcttgcctagaaattagaaaacacacagctttcaactgtatatatatatatatataataataggccaggtgtggtggctcatacctgtaatcccaacactttgggaggtgaagttgggaggattgcttgaggccaggaattccagaccaccctgggcaactgagacctcatctctattaaaaaaaaaaaaattagcaagattggtgtgtgcctacagtcccagctattcgggaagctgaggtgggaggatcacgtgaacccaggagtgtgaggctgcagtgagctatgatcacaccactgcactctagcctgggtgagacagagcgagactctatcccaaaataataattaattctacattttaaatatacgtatcctttatacacccaaacctagtctccctccatactttcctaatcctatttatggcaaagacatttttctactcctgcatcttgaaatctcagcattatttttgaatctttttactcccataaaactcctgctatatctcagagattctgccttgaggatagttttttggattttttttttgtttttgagatggagtcttgctctgtcgcccaggctggagtgcagtggcgcgccgtctctgctcactgcaagctccgactcccgggttcacgtcagtctcctgcctcagcctccggagtagctgggactgcaggcgcccgccaccacgcctggcaattttttttttgtatttttggtagagacagggtttcaccgtgttagccaggatggtctcgatctgctgacctcgtgatccacccaccttggcctcccaaagtgctgggattacaggcgtgagccaccgcgcccggccaaggatagttttttcgctctgtcacccgggctggagtgcagtggctccatcttggctcactgcaagctctgcctcccgggttcacgccattctcctgcctcagcctcctgagtagctgggactacaggcgcc

SEQ ID NO: 78631 - DNA, 1465 bp, Homo sapiens
aatgtgcttctggttgtgggtgactttagcattaaagaactatggaatataaagagggaaaaattccaggagttactgagaggaagtattttctttaagggtttgttctatattgttttttttactgctgtgtccacctgagtctggttttcatcctactcaataggagtcaaatggtaaatttatttatgtcattctgtctaagcgaactcttaacggataaactgttcttgctaagtttggtcttttgtttaactcagtgtgtggtatcagctgaaaatatagctgttgattcagtctagccaagcacctgtcagccagcggaaaatagcttcttgctctgaaacactcgggaattctggattagtgcagccagctctgcattccagtaagtgcaaatgttggagatgtcatactgacacaatctttttctgtccttttactgacaggctgtgctggagactattcggaacctgatgaatactgattgtgtggtacctgactggctgcacgatatcattttaggttatggggacccaagtagtgcacattattcgaaaatgcccaatcagattgccacccttgatttcaatgatacatttctctccattgagcatttaaaagccagcttccctggtcataatgttaaagtaactgtagaagaccctgctctacaaataccccctttcaggtaaagtcagaactgggtacgctcctctccagcattctgtagtcaatgtacgttatgccatcaggattgttagctaaagtgagttttgagtactatatttggattttgttttagcagtccctaccttcaccatacaatcactgggataactttattatatttgaatctatttcttactgcagaagttgttttaagaccacagtaaaagtagtctaatacctaataagggatcaataaatacttattgtctgaagagaactatataaatatatttatagcatttgactaaaatatgtcttggcagttatgcatagtctggtatgtttctcaactaatgcagctgtgtgatgttgaactttgtttttaggaaaaaaatctttttttcttttaactttgcgtgctttcacaaatttgaaatgttcataatatagctgggtatgatggctcatgcatataatcccagtgacttcagaggctaaggcgggaggactgcttgaggccacgaattcaaaaccagcctgggcaacatagcgagaccccatctctaaaaaaattcaaaaaagtagctgggcatggtggcgcacacctgtaatttcaggaactcaggaggctgaggcaggaggattgtgtgaacccaggcgtttaagtctgtagtaagctatggttgtgccactgtactccagcctgggtgacagaggaagacctcatctctaaataaataaaataaatacaatagtcatatttaatcttaaattaggtctggtcttaaaattt

SEQ ID NO: 78632 - DNA, 1054 bp, Homo sapiens
gaggaaataggagaagggaatggaaaatggatggaataagcataaggccacataatggaaccaaagttcgaggtctaagacccccccttccccccaccccccccaaaaaagaggagatatgtcagagaggaaagaaaaggctctgggctttcaaccattagtatcctacatttctgtgtatgtgaaatttcttttcatgctggttatactaggtatggaatgtggaaggatgagaaaagtgatgaacctctgtcaaattaaggaattaatgaatagaaaactatgccttaaattctaaaatacatatatttaattagaaaatatttattgaatacttactatatgtaaggcagtagtgggagctatgagtgacaaaagtaaagataagttctttgacttctaagtactcctattttagttgagtgtgtgtacaaattattgcaagtcatggtgttgcatcgtaaacattacatgactgctatggaaggaaatagtaagaatttagagaaagaagaaaatactttcagcatcttagaatttgaagtgggtgagtggagggcattctactttgggaagaatggttggagttaagcctgaaccatttactcaccatttctagaaaagaaatactgttaacttattttgatatttgaaaaatacatattttatttaacaaactttttcaaattgtccaggacctgaacccagacccaatcttagaggagaatcaaggacatttagagtgtttttggatccaaaccagtatcaacaagatatgaccaatactatacaaaatggagcagaggatgtgtatgaaacttttaatataataatgaggagaaaaccaaaggaaaataactttaaggtaatttgggggtatgtaactaaaagtactatgtcataatttaagtaacttttatgacataaatacagagatatttggttagaggaagatttgttaagaaaaaaataatgactgcttttatttttactataagcaatcctcttaaacttttaacaaaatgatgaaatataaaaatttaaagaaattgat

SEQ ID NO: 78633 - DNA, 1050 bp, Homo sapiens
cactgatagatagtttaaactgatattaaaaacctgctaaatatgctatagatggattatatgccagccatatttttggttacttattaagattgttaaaaataagaatgatgacgaacatccaattttggagctgtagcatgacttggagggcttattcagtaatatattcatggcatgaatgtttctaattttaatataaagaagttttcatttcaattaatgctatgaaatattgagtattaaagattatagaaaagcccataattgtgttacaatgcgataataatcattggtcactcaacggtatctctctaccaaagataagaggtagagaggcaaataagaatttgcctacaaaagactgaaaacaatgaaattctaataaatgaaaatgtctttatatcttaccaggtcttcgtaagcatgatgtatgctttttaattaccgtacgtcccacaaaaccttatggcactaagtttgaccggaggagaccttttattgagcaggttggcctggtttatgtcagaggctgtgaaattcagggcatgctggatgataaaggacgtgtcattgaagatggtatggtgacctatatttttgaaagagtatgtgtatagaatgataaatttctttgcctttttccctttttgcttcttaggtaatattttttagttcttttacctactaaattgacacaaaggattttgtatcaaatatgtgtagggtacctaccgtgcagttttagatataggtaacatggtttctcactgtgtcacacaggctggagttcagtggcacaatctcggctcactgcaacctctgcctcctgggttcatgcgattctccagcctcagccctgctagtagctgggaccataggcacgtgcgaccatgcccggttaatttttgtagagatggggtttccccatgttgcccaggctggtctcaaactcctgagatcaagcactccacttgcctcggcctcccaaagtgctgggattacagacatgagccgccaccacacccagacagtttcagaacttctatg

SEQ ID NO: 78634 - DNA, 1065 bp, Homo sapiens
tgattagaagttaatatccaaaatatgtaaggaactcataatactcaatagcagaagaccaaataacccaataaaaaatgggtgaaggacttcaatactattttttgtaggaagacatacaaatgacagatagatgaaaaggtgttccacatcacaaatcatcaagggaatgcataccaaaaccacaatgagatattcaaacctcacacctgttagaatggctgttatcaaaagtcaaaagataacaagtgtttgcaaggatgtggagaaaagggaactcttatacactattggtgggaatgtcaattagtgcagccattatggaaagcagtatggaggttcctcaaaaaattaaaaaacagagctatcatatgatccagcaaacccacttctgaatgtttatccaaaggaaataaaatcactgtcccaaagagatgtctgcactcttgtgttcattgcagcattattcacaataaccaagatgtggaaacaacttaagggctgaatggataaagaaaatgtgaaaatgtggtgtgtgtgtacatatataaaaacacacaatgggatatgattcaccttttaaaaagaaggaaatcctttttttgacaacatggataaaccaggagtacattatgctaaatgtattaagccagatacagatagacaaaaactgattatctcactttacatatggaatctaaaaaaggcaaattcatagaagcagtagaagggcagttatcaggttgtaggtggggaaaatggggtcatgttggtcaaagggtctaaactttcagttacaagatacataagtttggagatctaatgtaaagtatagtgactataattaatgttttatgtacttgaaacttgacaggatagatcttaagtattcttaccacacacacaaaaaatgctaactgtgttggtaatgatatcacagtgtatacatagtttaaaacatcacattgtattccttaactatatacaatttttatttgtcaagtatacgtcaataaagctgaaataaaactaagtgtgctggattatttatttctttgataaaat

SEQ ID NO: 78635 - DNA, 2407 bp, Homo sapiens
ctcacccctaattcttaatagccaacatttattaatctggttttaacatctgtgtgaaaacaaaaataagttgttatcagatatgctgcatttcaggcattcattagattcttatagttttgaggtgccagttttttaatacagagaacaaatatctgattaaaagaataattcaggccgggtgcggtggctcacgcctgtaatctcagcactttgggaggccaaggtgggcagatcacaaggtcaggagttcgagaccagcctggccaacatagtgaaaccctgtctctactaaaaacacaaaaaattagccaggcatggtggcaggtgcctgtaatcccagctactcaggaggctgaggcaggagaatggcttgaatctgggaggcggaggttgcagtgagacgagattgtgcaggtgacagagtgagactccgtctcaaaaaaaaaaaaaaattgaaatatggatgtttttttccttttcaggttgtcttgctcttcccaaattgaatttgcagtttttgactcttcatgactacctgctaaggaactttaacctcttccgcttagaatcaacttatgaaattcgtcaggacattgaagatagtgtcagcagaatgaagccatggttagtaaattggttccacctgtaatgaagagatgcaaacagtgactgataaacttctgtcagaaaccttataagtatatttagaaataatatactgagacaaaagtgccctctaaaataggagatatttactctttgagacatttttaaatgtgaattaacatacatcaaaagtgctaaaatataaaccacatatctgggtacttgggaatgggagtgggagactggggataagggagaagaagtcgtcatgctcaagaagggaagggggaaatgtagagggagtaggtcagaccttacttaaaggccgattggaaggctaggggttggccaagcaggcccgtactaggtcagaacagtttaagtcctggaggaagcttatgataaaggggtgtaccattaatccacctactcttgtcactgttgccacagtattctcaggcagcctctctaggggaatggacagaggattagggctgttgctgcacattgcccggggtggtacattagaaaatctctgtctctctacccatagattctgtggaagaaagtaaatcaccaggatttacttttagggccagttgagttggtcttgttatttgaggaattcttctgcataaactccactccccacctgctagctcatgtctgaaattcctttagctaagaaaagtctttcattctggtaattgtagcagctctgcattacaagaatttgtaaggttaatttggttttatagatatggctgacttgaggcaaatgctctttattcactatttcattcacaatttcatcaagtatgaaattgatggatgtaagttatacatcacaagtgattataaatgagtaaaatactatgagatggatttttattacattatataataggacaccatgtatacatacacgattatactgcattttatgtgaaaagctgaacagctttggaatgtgaactgattcaggtatcttccaggcttctgcttactaattatggagagctaccacagacactgtgattatgatctattttttcacttccatgttttatttcatagagagttctattttttaattaattgttatgtgaaaagttattctgggtgagactataaaatacaacacaaagcatttttgacttaataatcagttgagtcagtaggcaggcaaacactgtgaaatttgtatacccactggctgatcattcctgcccacagctttgctgaaattgttgcccattgtttgcaccctaggggagtgcttgatcagaaaacttctttacaatttatggttaccttgagtttatatgctcagattctgggcctaattttggccattttgcagactagcgatttattaactggcagttcaacaaatagaattcatttatattttacttaaatgccaagtgcaacaaaaatactttgagttcttttggtctgttaataaaaaaaattttttttaattataccattttctggctggggaagaaaatgtcacttcttggagttaattcattcacactggtaataatagatttttctaaatttacatttttaatgcccatcattgaaaattattaaaaatgtcgaaacctaaaagggggccaggcttctttctgtttcatgtatcttgaagatgaaaaccagcagaggcatttttactcattacatggttccaatgattatgttttcagggtgctgaagcccactaaccagcagtaagagaggatgtgcttaagggccagaaatctatactttttaatgcttcaagtagatt

SEQ ID NO: 78636 - DNA, 1027 bp, Homo sapiens
ggttcgaatggatttaatttaaaaattgctcctttaaattgttattttaaatgactgtatatgtatgtctcagaaaaccagggttccagttctaaccaaccattctagctttacacctttatcaggtcattttctctgatcatgtttttctacctagaaaatgaagatctagaatagatgctctcaaaggtcttttccagctaataatttctatacttctgttatttcagggtttggattatgggcatatgctagctgaaaaagttccagttaacatttctgtatatattaatcacaaaagtattcacatttcttgctttacattaagctttccgttttcctgtacactacaaataaataaatggatttttatgtaagcatttgtaggatgccttctatagatctggcactgggtgttagtcactgctgtaagtttttaaactaagtagcaacaggaaacctaaaattatctttgttttaattgaaaccaacttgacaggatggttttagttggcaaaatggtagaccatttcctggcattagaaaaaaagcttttactctgaaaatatttcatgccccaaggttgtaattatttaaaaacaaaaataaatgtttgtaaaaatagtatactatgctcataaatagtatataataagctagtgatttaaaaggtatttttattgttctttgtgtcattggcattctaatgttaaagtaatacatgtacagtggaaaaaaataataaaaattacctctctaattttcagtgcactttaaaggtgtgtgtgtgtacatatacgtatgtgtgtgtttatacatacgagaaaactctcagaagtttagaatgtaaagacaataaggaaagtgaagcaaaacctgatataaaactgccttctagtttttatatctctaagttttttcaaaatctaatttaatacagatttttaaaggttaatacttttaaaatatctttgcaaacctgatttttaaaatgtgcttttgacccaagctagatcttttattttct

SEQ ID NO: 78637 - DNA, 1045 bp, Homo sapiens
ttataagcaccagttgatggggatgaaaacataaggcacgtataaataattaatactaagttaaaaagtggcaagtgctataagagagaatatgctgatgtggacatttccttatttacttgtgatcgctgttttttgtgcattgtttcagactcatatttttcaaaccttagtgattatgctaagtgttgatgcatatatttttcagacttagctctttaagttttgaaataaaaaattaattgattattgagcttacaatcttgatttgtatttttattaacaagagctagagttgaataattttttaaaatatcgttattcatttcttaattttcagggtttgtcatgttattttcaggttttatcagattgctctattttgtactcatatattagaaaactagcaaatagttgatctaatccttatccttgtaaactttgaggctactggtaatttaataacacatctcttcttcaggcacgattggaattagaattaaaaaagacacctaagctaagaaaattctggaacttgattaaaaagaatgatgaaaagatggatccagaagcaagagaacagtatgttggcagagcttcatttcatgttggcttattatgctggattgtggaccttagatgatgttgactggtttgttgtttccctttatatagtgctgagtgcaaataaattattataataagtgcttttacctagactgtcattaagaatattttccacaaagatctaaagcagaagccagagcatcatgcttttcttcttttccttctttctgtgctgctaagtatatatagttgacccactgtttttctccctgcctattgtccgtctccctcatggatggttctcaattttctccactatcttcaggctattaatataacttctctttctttttcttactccttcactctttttttatttttttgagacggagtttcgctcttgttgcccaggctggagtgcaatagtgcgactgtggctcactgcaacctctgcctcccagattcaagcgatttctct

SEQ ID NO: 78638 - DNA, 1024 bp, Homo sapiens
tgtgtggttagctgataaatacacatatttatttagtgcctctgaattgataattcacttacacccatgcaggaggaatgcatggagttctttcttattctgaagactgagtgttaatagatggatgattattacctgtttccatgtactatctcacatggatcttttaaaggcataaaaaaagatttatgatgcctgcactggataccactgttatctctttaacatttatttttatttatttatttatttatttatttatttatttattttgaacataaactcaagattttattgtcttcataataaaagatgacacttagaactgaatcacttggccctttctcttcttatctcctcccagttcaaaatgcttgcatcttttaatagccagcattctcttagatctgcagttgggctcaatgcactcaagccttagcacaatctttgtagttttagcctttttccagaaaattggcttagtttgcccaccatagccactctgcttcctgtcataacgccgctttccctgggcatacagagaatccttgcccttcttgtactgtgtcactttatggggttggtgcttgccacacttcttacagaaagtccggcgggttttagggacgttaaccatgcttgcgtgagcgttatcggcacagaaagcctctttaacatttattaaactaaacagaacaaatagaaatataaatagatgtgatttttttatcagaaactaaacagaaacaagattttattagtattagtaatttggtgatagttttagccaacttaccaaactagtttattattgaaatgctttatcttttaaaatatgcagtcagttcttatttgaggtagttatgttcattttataaagtagctatgaacattgaatgagctaatgctgaaccattactccttggggaaatacagggttaggttcctgcaagccttggtcatgacattttacaaactatcaatacatagccttattttatgtgtgtttctatttaaagacagc

SEQ ID NO: 78639 - DNA, 1137 bp, Homo sapiens
acaaaacatttgccaggtgtggtggcacgtgactgtaatcccagctactcaagagtctgaggcacaagaattgcttgagcctgggaggcggaggttgcagtgtaccgagatcgtgccactgcactctagtgtgggcgatggagcaagactctgtctcagtaaaaaagaaaaaaataaacaaaatgtttaaaagacattgtcaaagtaacactgagtcattactagaacactggtattctatcttatgagccaggattttctgtcttttatcatgaggtcctatttgtgactgaagaaatttaatgtagagttttgtgtatagtgggcagtgagtgaattctgttgtctaacatacagttaattcaagtgaaatgtctgcagttggagatttagagtgtgtcactcaagatggcctatccacttagcatcttggctgcctgtagaagccagtactttggcaatattctgtcttttgcatagtaaaaaccttcatttcattctcactaaagttttgtgacattgcatgctcagtgaaactatgtaagagatcagaaatcagtggaataggatttttgacaggatagtggtttcctggggcattataaattcataatacatgtatttttaattttcaaagctggaaacaattatctagtgacagtgttctgatctatttccaatattataaaacgataaagctaaattagtggccatttgtgtctgcttcgggacagcgtaagtatgtttgggacaaacatgactatatcattgtttattcatataaaacaaagtaattctatttaaaaaagacagtatattaaagacaaatatctgatatttcctccacaatattttagtattttaagctcactgtcaacactaagaagcaagtgaaacgtctgattttcacatttgcaatatagatatgtgtcctgcgtgcttttaggaaggcatgactctagcaaagtgtttccatttgagtattaaatgaaaacatgttggtcagtgcttaagaagttgaactgacattagaagttgtgatctgatattatgaattttgatagatgggttaatatggaaacaaaacatccctaaatgcatttgtgttaataactctgaaacgtttgtattctctat

SEQ ID NO: 78640 - DNA, 1056 bp, Homo sapiens
ccctagaagttgggattacaggtgcccgccaccacgcctagctaattttttgtatttttagtagagacggggtttcgccatgttggccaggctggtctctaactcctgacctcaggtaatctgtatgcctcggcctcccaaagtgctgggattacagacgtgagccactgtgcctggcgtagctggcttcttttgttcactgttattacttgttgttttaatcatctgcttaacagatctggaagtaggtagctcagaagttaataatgtcaaggcccttgtcaatcttgtcaaaaggttttattgattttttccgtatggttgtggtggggctgccacagctccagacctcgtatttcacatagtcgtctgaaaagaggaggttgttgggataggggggaatgtaatagaaaagaactctcatttgtgtggccccttctctttttcttatcatatttaatgatacagtaatagatccagtttatcatacataaattattcaactttggaaggatttaatgaaatgcacgttaagtccttggcacagtgtcaggcataatgcatgctctcagtaaatattggtaacttaaaaaaataaccatccaaatatccttcaaattatttatatttgtgattattgtttgtaacttttcatacttattatttatttatttattattttgagacggagactcactctgtcacctgggctggagtgcagtggcgcaatctcagcccactgcaacctccgcctcctgggttcaagcaattctcctgtctcagcctcctgagtacctggaactacaggcacacaccaccacacctggctaattttttgtattttagtagagacgggattccaccgtgttgtccatgctggtctcgaacccctgagctcaggcagtccaccctccttggcctcccaaagtttaggattacaggcgtgagccaccatgcccggccttccatacttatctttaaaattcttctgacatggtgtctagttcatagacctgttttttttaatcttacaagtacactttcagttaagctgtt

SEQ ID NO: 78641 - DNA, 1008 bp, Homo sapiens
aaattctgaagctctatcatattcatttggataaagagatgtaacaattagaatttgtgtctgttatgtcttcacacttttaaattattttctctctgggttttgcaggcacacagttatgactctcaaatggagtctcataacatttatacactttaagtttaaaaaaaatcctgatcttgtgaatttttattttccctaaaaatctttataagcacatcattttaatgaatctagggctctgttttattatttgttttttctactttgctttctgttaatttcatatttcgaggaatataatgggattattttaaatatctcattatttcaatagcagtaatatttgatggctttcctaaaccaacttattttatataatctcactcattaaaaactgtcaatttagggttgaaaaaagttgttgagatattaaacatttttatatttttataacaggttattgaagatatatatgaaaaagagattgtcaaatcaaggtaggaatgaatttaaattttatacaatgtgattggggtggaccaagttggatcttggctgaacttctaaatgtgatcataacttgaaccctttttctgtttcaaactggtcgtcagggcaatggtgactagaaaaactttaggtgctgaagagtcataaattattttttgccttctaacttttggctcagattagaggtatcaaatcccatagggtttatttggatttagatggaatttgagaaaaagtaaacatgaagattttattactagtattatttctgattcaccttttaaaaatattcttaaaaagttatgaaagtaagacattattaaatttacaataatatagtatacatatgtaatgtataaaatgtataataataaacacagaagtgataaaaattatttttgagcaatatgctgtaaggggtgagtttcaataaatcatcttttctgcccccaatccctggttcatgtatatggttcatatacatctgttctattc

SEQ ID NO: 78642 - DNA, 1852 bp, Homo sapiens
caagacacctccaaatagacctatctaaaaacagagtaattctgtagtttgagagcgttcatttagaatctgtttactatcttgcattgtgagccacagttggctttggatagggaaccacagtcctgtggttgtcagcatcattcctcattcttattatttatttgtgaattgcataagagtgtaagtagttcaatgtagaagttatcatgcccacctgcttctttattctttattccttgtctcaacagatttgccagggcagaagcctagggagtgattttgaatcctccctttcccttagtccctacatttctacattctaaatatcttttgaatctatctggtgttctacatctctgtcaccctaagcttggttgccattgttttctgcctggaccaaggtatcgtaatctgttatattgtccttcctcttgctctgctctagcccattcttcatgttgctttccgagtgatttcatacaagtgcaaatctcatcatatcacttgccttcttaaaatttctgccttccggccgggcgcaggggctcacgcctgtaatcccagcactttgggaggccgaggcgggcggatcacgaggtcaggagatcgagaccatcctggctaacacggtgaaaccccgtctctactaaaaataaaaagaaaaaaaattagccgggcatggtggcaggtgcctttggtcccagctactcgggaggctgaggcaggagaatggcgtgaacccgggaggcggagcttgcagtgagccgagatcgcgccactgcactccagcctgggcaacagtgcgagactccgtctcaaaaaaaaaaaaaaatctcttccttcctttccttccttttcttctttcaagatagggtctcactatgttggctgggctccagtgagccttccacctcagcctcccttgtagctaggactacagggactacactaaggctggctgtccttaaaatcttcagccgggcgcgatggctcatgcctgtaatcccagcactttgggaggccgtggcaggtcgatcacctgaggtcgggagttcgagaccagcctgaccaacatggagaaaccctgtctctactaaaaatacaaaagtaggcaggcttggtggtgcatgcctgtaatcccagctactcgggaggctgaggcaggagaattgcttgaacccgggaggcggaggttgcaatgagccaagatcgcaccattgcactccagcctgggcaacaagagcaaaactccgtctaaaaacgaagcaaaaaaaaagaaatctttaaagaattctaattacccttaggttaacggctgaaatccttcatagtgttgtgtgatttgacctgtgcttatatcttcagtttcctctttttcctcttcctttctaactctgtgccttagctgtacagaacttcgtttatttgaatgtgccatgctatctttcatctcctggcttttcaacattgttcctctgctaggaatcctcattttttttctccccaccttcctttattcattctcagccttctacactactttagagaggcttttcctgacaacttaaacgagattagaggtctctttccccatatacctgcatttttgcagtagaagtcatttattagtttacttctgtcatggaactcacattttagagggaagaaccagacagatgaacggtatagtttcatacactgataaatgctatgaggaaaatgaaacagggctgtgacagactggtttgaggtgtatgaaagacagtcaggaaagttctctccgaggtgacatttgagctaacacctgaatgcaaagaaggagccagttttgagaagagcaaggaaatag

SEQ ID NO: 78643 - DNA, 1423 bp, Homo sapiens
ctctctaaacttgtcttcactcaaaactttatcttttctctgtttctcttcatctgtctcagaataatgttccttcatgtttctgaagctagctttttttcttgcccacttctgggaacttaatagtccctttttctggtatctagtttttctctctccaattgttctttcccctccacctaaaaacaatttcatgtgttccctattcagtaatggtgcttttggctgcaagtgacagaatacctgactcaaactgctttagcaataaggatcttaatgggcttacgtgacttgaaagtctagtgaataaataagcttcagagttgttgaatcacattgttgaactgattgtgcgtgcttctgtctgctctacctttcacaatggcatggctattttcctgtggttttaggatgctttgtaatcaatacctcatgctcccttcacagggggtagggcatggcagatagtgagtgagagagctagaaactcacacaagaccaagggacaactttcccaaaagcctatagcaaaactctcttctcatctgccagaattgcttcacaaaacacatttttctttgtttgttgttttgtttttttgtttttatgatggagtctgtgtttcgcaggctggagtgcagtggtgcgatctcggctcactgcaacctctgcctcccgggttcaagctattctcctgcctcagcctccctgagtagctgggattacaggtgcgtgccagcacacccagctaattttagtatttttagtagagatggggtttcatcacattggccaggctggtcttgaactcctgacctcaagtgatccaccggcctcagccttctaaagtgctgggattacaggtgtgagccaccgtacaggtgtgagccaccatgcccggcccacatttctgaaccaatcactgacaaggataacctggaaccggggctggaattcaacttccttttaagcacatggtttccagggagtgatacgtattactggtcaaatttgaagttgtgtttagaaagagaaatgaatggataagcaatctatgttgttctctgtacctaacttaaaaaggtgtgtttgtggggacaaacaactttagttttgttattctggatactgtcacaattgactttttttcttttatggtaagaactattgcaaatttatcttccatctacttccttcatggccttttcactcactaacttcttagccctttattattgaatacatgttttcttcaccatcctttgggagttgctctctcagtggctattgtagtggtcattgttggttgtaaccacatctccttctcccttcactgtatatcagccaagtagtcagggttagactgacctagttgcagctcagccatgggtcgtgatcagtctaaggctgtcagaatactcac

SEQ ID NO: 78644 - DNA, 1056 bp, Homo sapiens
tgttttgtgaagcaattctggcagatgagaagagagttttgctataggcttttgggaaagttgtcccttggtcttgtgtgagtttctagctctctcactcactatctgccatgccctaccccctgtgaagggagcatgaggtattgattacaaagcatcctaaaaccacaggaaaatagccatgccattgtgaaaggtagagcagacagaagcacgcacaatcagttcaacaatgtgattcaacaactctgaagcttatttattcactagactttcaagtcacgtaagcccattaagatccttattgctaaagcagtttgagtcaggtattctgtcacttgcagccaaaagcaccattactgaatagggaacacatgaaattgtttttaggtggaggggaaagaacaattggagagagaaaaactagataccagaaaaagggactattaagttcccagaagtgggcaagaaaaaaagctagcttcagaaacatgaaggaacattattctgagacagatgaagagaaacagagaaaagataaagttttgagtgaagacaagtttagagagggcatgttggacaagctttgatcacaacacagtagaaggcaaattcatcctctgaaaggatctaagtgaaattgtggatttaaggaaaacataaaagattggtaataattgctccattcattaatttcttccttcatacattcaacatatatttgagaacctaatgtttgccacagtattaagccttccctataaatgatatagattcattctgttgctttccagaagcatgtagttcagtggatctcagagtgtagtctcacaacagctaaccttagtcactaaatgcaaattttggggtcctaagagacactgaatcacgaactctgaggacgcaggccagcaatccatgcttttaacaagcccaattcacactaaagtttgaaaaccactagtttctagtggaagatcaacagagttataaacaaaaattaaggggaatacaggggatggagaacttgggtaaatcagagaggctcccggaggt

SEQ ID NO: 78645 - DNA, 1371 bp, Homo sapiens
attgctaaagaattttattttgatgcttgttaaatttttattttaattaataaggtagtcattcctgtagagggataagatgcttgtagagttgtgggtatcattccaaatagaactgttatgatttgggaaatattctttactacaaaggacttatttcataattacaaattttccttcatatttgcctttgtttataaaatcttcaggaatgacattctctagcaataaaaggaatgaaccgttatgtttctaagctgaaaagaggaacaggtgggtaattatcctgccatacttaaatatagtggaaaatcctctattgagaatgtggataaatgaacaattgtaagttttgcatcataaactgagaactttcttttgacaggggggaggcgggagggatagtaggtgggggtgatctgcttgcttcttttaccacaggtgatttttaagtaacttgggtttaatttacagagatgaaacatgacagtctgagtaaaatacccagtgatgtagaagtgtgcctgtttattatgtagatacagacatccagcaaaaacaggagaatcacatgctttaaagaacactttctcttaggtttccttgagatatgttcctccagtgcaagcaagataatggtttacagaatttgctttacacaaaacttgtcaagaactcatctgttaaaagcaaggaataactagtttatattttccaataatgttcaaggttttctccttaatatgtttgaaattattgattttggcatttttctaagcaatttatgtaattttatttgaagaaaatgttttgtataatgtttttcccagcctaaacagggagagtcctaacagtgttgtgcttgtatgattctgagactttatttgcgtaagtgatactactatactttatttttgacccatgcctttttaagctgtttcatattgaaaggtggaatattgtaaaaattttgtcaaagatgtactgtagtgctatttgaagtacctgtaacaaaacagttggccctctgtatccatgtactctgcatctgtggattaaaccaattgcagatcaaaaatattagaaaaaataaaaataatacaaataaaaatacagtataacagttatttaaatagcatttacattgcattaggtattagtctagggataaagtatacaggcggatgtgcgttggttatatacaaatatgtcattttatgtaagggacttgagtatacttggatttttggtatctgtgggttggggggacggtccaggaaccaataccccatggataccaagggacaactgtacttatttacctttattgtcattgcaagcttcttatggaaactttataggaatgaaaat

SEQ ID NO: 78646 - DNA, 1119 bp, Homo sapiens
gacatgaacagactcataatgaaaagagtccttatgcatctctttgccaagtagaatttggaaacttcaacaatctttctaatcattcaggtaataatgttaactataatgcttcccaacaatgtcaggctcctggtgttcaaaaatacgaggtctcagagtcagatcaaatgtcaggagttaaggcagagtcacaggattttattcctggtagcaccgggcaaccctgtcttcctaatgtacttttggaatcagagcaaagcaatcctttttgcagttattcagagcatcaggagaaaaatgatgtcttcctgtaccgatgcagtgtttgtgctaaaagtttccgatctccatctaaactggaaagacactacctaattcatgcagggcagaaaccatttgaatgctcagtttgtggcaaaacattcagacaggctcctcactggaagagacatcagcttactcactttaaagaacgaccacaagggaaagtggttgccttagattcggttatgtaaattgtcgcaaccactaacaattgtggtctctggtgatcttatttttaaagcctgtattatttaaaatgcatttttattgaaaggcctgcattaaactgaatggtttcacaggcatttgcttgtcctgcatagtaaggaggtagaatacatagaaaattaatacaatgttttagaaacagccaagttaattttagaggcaagaacatgatttgatgctataaagtaggcattttaatattgtaaacatatactttggctgtattgaaaaatataaatccatgatggctgtacaaataatttagcctcattcattttttaaaggaattattccttaagacatgccatctctttttagatatactcaaaagactgagaggcaaaacttggcttttagctgcagcacatagccctgttatatttgatttattttacatttcatatgaaagcataattttgtccacatgtgactcaaattgcattggtaattttttttttttttttgtaagttaaaaaaactacagagacactaaaggtgaaaatggatgagacaattatagtattattttcattggtctttttttttgagatggagtctcactct

SEQ ID NO: 78647 - DNA, 1075 bp, Homo sapiens
attgagaataactcatgttaaatttgtggctaagaaatccacctatgataagtgaaatgttctattctaagagcatatttacaatgtgctataattgaatgcaagtatatcttatttttagtattatgttttgatttgttacctttctagcccattttttaaaatgatggcaactaaatactggcaaatctacctaataatgaaataggaaaattggaattaaaatatctatttcatgttaagaaattcagcctagtcctcatttaatgtagcatctcaattagaaaaatagcttaaaattgtattgatttttagatatttcttttaaagactcatatctctgtatgtataaaattagtattattattctaaagtattacttaaaatgattattaacttgtaaacactaagtccagattctcctttgcctttaatatcttcagccaaagaacaacttaagttacttttcatatgaataaataattttaaaattaatactttttttcctttaatttttagacatctgtggaatttaagaacagtatggagctcatcagagtatatcattgaagaatatgatggctgaaaacaatttaaaaatgctaaagattcaacagtgtgtggtagccaacaaactacctagaaacaggccatatgtttgcaatatttgttttaagcactttgaaacaccatcaaaattagctaggcactatctcattcatactggtcaaaagccatttgaatgtgatgtgtgtcataaaacctttagacaactagttcatctggagaggcatcaactaactcatagtctgccttttaaatgtagtatttgtcagcgtcactttaaaaatctgaagacatttgtgaagcaccaacaacttcacaatgaaacctatcagaataatgttaaacaggtcagaagattgctggaggccaagcaagaaaagtcaatgtatggagtgtataatacttttaccacagaggaaagatgggcattacacccgtgctctaagtctgatcccatgtatagcatgaaaagaagaaagaatattcatgcatgtacaatctgtggcaa

SEQ ID NO: 78648 - DNA, 1233 bp, Homo sapiens
actaaaatacctagtggtctgctgtattacattaaggccttccccagcagcttccaaggcagcctccaagtcactggcaggagaatttggctggaagtgcatgcaggactgcagagattcctctccacagttatagaagggactgttccaggcctgattgttccaggattgggtgcaccaggtctgagtgttccaggagtggttgctccaggactggatgttctgggtctggttgctccaggttgaattgttccaggtctggttgctccacattggaaggttcccagtcgggttcaccaggcatccctggtggtaggaagagtagaggctggggtaggtaggtgctgaggccttctgcgtcacaccattgctattcttcggccagttgtttttctgccacctcttagatttcattctctggttctggaaccaggtcttcacctgtttgtagctgaggttcaggatgttggagagttcttgcatctgctggaggctgaggtatttctgtctctgaaatctatcattgagtacacacagctgggtggaagagaacacagttctggtcttctgtttcttgaccgggaccttgtcttccttttttgcgacactattctctgcagaagtgggttgtttgcctttgggactggtggaagaatcagggctgtcctgaataagcagatccatggaggaaggaagaggagagacagtctctgtgtgaggcatctcagcagaagacatttgcaaggatggatagttttcttcaggcccacaaatcacaggcataggtgaagattctttacagtcggattcttcaaagcaaggcaagctttggggacaagctggatccacactcatgttagtatagaggaagaggaggaaaaaatttaagaggtggactggaaaaaaggttaaggcagctttaagacttttctggaagatgttagagaaataggacctccagaaggaaaagtatcaagaaattgggataaagtgagttgcctgcataataacatgaggcaaccagctcagtccagcagaacgttaaaatcctggcaagatgtgctttgttaaacagatgcttgaaggcagcatgctggttaagagtcatcaccactccctaatctcaagtacccagggacacaaacactgctgaaggccgcagggacctctgcctaggaaagccagagacctttgttcacgtgtttatctactgaccttctctccactattatt

SEQ ID NO: 78649 - DNA, 1072 bp, Homo sapiens
taaaccagtcagtaacagagacaagattagaattcccatgttcttgagtctcaatctatgaagcaccctgccgtttctcatctcagttttgagttgacacacatttatttaacttagttgcatgtctgtaaaaaaaaaaaaaatattctaatgaatctttcaaggtgttctgctagctgctctgttttgaagtatatctgatgcatgatttatgtattagattgattaaaaacacgtccattacttcggggcctttggtggatttttaaaggaagaatatgacatattcaatccagcagttaagattctccacaggtctcccgcgggcgtcagcaggggcggcggcgggtgggaaatggcggagtgtccagcctccatctttggcaccgagaaagtcaactgttcatttgatttcaaaattggagcatgtcttcatggagacaggtgctcttggttgcaccataaaccgacgtttagccagaccattgccctcttgaacatttactgtaaccctcaaaacgcttcccagtcggccgacggtttgcgctgtgccctgagcgatgttgaggtgcaggaacactctgatgaattttttgaggaggtttttatagaactgggggagaagtatggggaagttgaggagatgaatgtctgtgacaacctgggagaccacctggtggggaacgtgtacttcaagcttccccgtgaggaagatgcggaaaaggctgtgattgacttgaacaaccgttggtttaacggacagccgatccacgccgagctgtcacctgtgacggacttcaggggagcctgctgccgtcagtatgagatgggagaatgcacacgaggcggcttctgcaacttcatgcatttgaagcccatttccagagagctgcggcgggagctgtgtgggcagcgtcgcaagaagcatagatcaagatcccgatcccgggagcgtcattctcggtctggagaccgtggtcatggcgatggcggtggcggtggcggtggcggtggcccaggcggcggcggcggacgggagcgtgacaggaggcggttgagagatcgtgaaaga

SEQ ID NO: 78650 - DNA, 2061 bp, Homo sapiens
tataagactaccatttatttggtggccaaggcaaaaacctaggtttcatccttaatttctacccttccatcaccaatcatcagcaacctctgttaattctacctccagattatgtgccaaatccactgctctttatcttattattgcctcccatctctccaatcttatctctaacattttctttttgttttttttgtaaacggatttttatactatattaaaaagccacaaaataaaaaagggatcaaccaacatatatcttacaagtccctccaagagtctcagtatgcaacagtcatggaggctgtgacctttttccttcttttctcggcctgcagttcatttaaggatcaccggagatgacttgtgctctagttcttaaaatcaaacttgttctgccaaatccaagatactgaatttttccaaattgtagaaacatgcatttgccacctgtccaccaaaatacctcccattcgagtcaataaccgcttgaattgctgatttaactctctcaaattctaaaaatatccgtactgcttcatcatcaggggcaccagaatttcaaacaacacactttccccaactttgagatatttttcacgttcttccttggttttaacttccaagtcttcatccacctttcccgcaccaaccatgttccttagtaggaccactttattaagacacttaagtatttcagtcagtggatttgaatctgacttcttggatgcatctttctccgtggcgtcacccacgatgatcttgccaccaagcttgctggtcttctccaccgaaaaggcggtgctcagcccctgctcatgcttccccagaccctggccctcccggaagccgtacttctgtatgatcttgtgcgccaccgtgccccccaagttagcgaggaaggagttgcgctgggccgggttggagatctcggtctgtcttgttcctcgtacactgggggaggaatggcagttttggaagactgtgatcgaggtcttgagtcctcttcataaggaaaatctcggggtaactgtcttttactgccagagaagtgggtgaggcaatggcagctccgcccatacttgttttcctcttctctcgctcctaatcttcatcttcatcagaatccggatctgaactccttgaaaactcacgtgcatcatgtctgtatttatgcctttcttctctttcttctatttcttctgtctttccagctcccgctgtctttgtccttcctctctggcgtttcactactttcttacaatcgttaggaaacataggatcatattcgtcagctaagggaatcagaacttcccctgcagaaaacccactgggaacaggatccttcagcccagctggcacatgcggtggtgtgtccacaatttgcccggtcatctgaggagccacctcgttgtaggtcaatgactggggcaagaactgtaccttgtttcgtcctttggctctttgcctgagtgagagctgccttcttcacctgaagctgagactgtagaagtttgaagtttttggaccagccttctgtttttgagtcactggtttcctctgatcgtacagggacatcttttcttcggtttaatgccggcccgcccgccgactctgcccatgggccgcggtggcggcagcgcggagccggggaggcaggagccaacggcggcaccaccctccgctgagtccgcggggcgctgggcggcgcggggtcaggtagcgcgggctgctgggagagcgcgccccatctctaacatgttctttctcactcactatgtttccccattcctaactccttcctgcctctccccagctgttcacatagatacaccttagggaaagacttccctgactccctaatctaaaaatggatctcgcctcaattattctctatcactaagtctcgacttattttcttcatagtatttagcagaatctgaaagtattcttttttgtgcgtgcttggtatctgcttctccaataaaatataaactctatcaggccagggctgcatgttcagctcctagaatatagttctagggctcaacacaatcaaac

SEQ ID NO: 78651 - DNA, 1050 bp, Homo sapiens
gcataaatacagacatgatgcacgtgagttttcaaggagttcagatccggattctgatgaagatgaagattaggagcgagagaagaggaaaacaagtatgggcggagctgccattgcctcacccacttctctggcagtaaaagacagttaccccgagattttccttatgaagaggactcaagacctcgatcacagtcttccaaaactgccattcctcccccagtgtacgaggaacaagacagaccgagatctccaacccggcccagcgcaactccttcctcgctaacttggggggcacggtggcgcacaagatcatacagaagtacggcttccgggagggccagggtctggggaagcatgagcaggggctgagcaccgccttttcggtggagaagaccagcaagcttggtggcaagatcatcgtgggtgacgccacggagaaagatgcatccaagaagtcagattcaaatccactgactgaaatacttaagtgtcttaataaagtggtcctactaaggaacatggttggtgcgggaaaggtggatgaagacttggaagttaaaaccaaggaagaacgtgaaaaatatctcaaagttggggaaagtgtgttgtttgaaattctggtgcccctgatgatgaagcagtacggatatttttagaatttgagagagttaaatcagcaattcaagcggttattgactcgaatgggaggtattttggtggacaggtggcaaatgcatgtttctacaatttggaaaaattcagtatcttggatttggcagaacaagtttgattttaagaactagagcacaagtcatctccggtgatccttaaatgaactgcaggccgagaaaagaaggaaaaaggtcacagcctccatgactgttgcatactgagactcttggagggacttgtaagatatatgttggttgatcccttttttattttgtggctttttaatatagtataaaaatccgtttacaaaaaaaacaaaaagaaaatgttagagataagattggagagatgggaggcaataataagataaagagc

SEQ ID NO: 78652 - DNA, 1038 bp, Homo sapiens
cctctcaaaaaaaaaaaaaaaaaaaaggaaccttttctagaaattttagtcagtacttttggagcagaaaaattatatttgatttcagaaagtcgattttaggaagcatttacaaactagactacaactgctaagcaagaactaaaatgtttaatatgctgcaaaagcttgcaacattacacataatgtaaccagtgtagattgcagaatacaagatttgaatgattaaggcagcttccttatatggaaatttggacattttatagggcctttgcacttgtagttcttctcccaaatgctagcatggctcacttcttcatgcctcttacatgtcaccttctcagcaaggtctttcctggctactctatgaatgccacactcccactctaatatttcctctgctggttccttgccttaaatgtctgtttaacactcatccctgtctaacatgggatatattttacttctttagtttttcttactgtctgtgatcctcagctagaatgcaggttcttagtgaggtagggatggggaggtaaaaattctgacatcctgaaggaacttagtaagtatttattgaatactacataaaacacaagtactttgtcacttataagactacttacatgccaggcatggtggctcatgcctgtaatcacagaactttgggcagctgaggtgggagggttgcttgaacccaggagtttgagaccagcctgggcaatatagcaagaccctatctctacaaaaaatttttttaaaaattagctgggcacggtggtgcatgtctgtagtccctactactcaggatgctgaggtaggaggatcgcttgaacctaggaggttgaggctgcagtaaatcacatttgcaccactgcacccagcccaggcaacagaaagaccctgtctcttaaaaaaaaaattctttttaaattttaaaagattatttggctaattttaaaagaaactaaaagtaaaaactgatttattaattatgtatgtaacttagtatttccatatacaaaatttgcaaagaca

SEQ ID NO: 78653 - DNA, 1134 bp, Homo sapiens
aacttttacaaaaaatagactttatgttttagaacagttttaggttcacagcaaaaatggagcagaaaatgcagagatttcccatataccctctacctccacacattcacagcctcccctaccgtcaatgtcttataatagagtggtacatttgttacaactgatgaacctacattgacacattattatcacccaaagtccatagtttacgtgagggttcactcttggtgttgtacataatatgggttttgacaaatgtgtaatgacatttgtcaaccgttatagtattatacagaataatttcactgccttaaaaaatcctctgtgttttacttattcatccctccctctcctttaacccttagcaactgatcttttcactgtgtacatagttttgcttttaccagaatgtaatgtagttgaaatcatacagtatatagcttttcatgcagtatatagcttttcagattggcttctttcatgtattaatatgcatttaggtttctctgtatcttgtcatgtatatgtagctcattttttttttagtgtagaataaaattttattgtctggttctaccacatttcatttgtccatgcacctattgaagaacatctcagttgcttccatgttttggcgattatgaataaagcgactataaacatccatgaacaggtttttgtgtgaagataagtttttttcaggtgtataaataccaaggagcacaattactggatcatatggtaagattatgtttagctttgtaaaaaaaactgccacactgttttccaaagtagttgtactattttgtattcccaccaacaatgaatgagagtttctgttgttccacctcctgaccagcattgagcattgtaggaattttggacttttgccattctggtaggtctgaagtgttctctcattgttgttttagtttgcaactacctaaagatatgtgatgttgaacatcttttcatgtttgtttgccatctgtgtatctcctttggtgagatgtctcttcagatcttttgactatttttaattggggtttttgtcttattattgagttttaagagttctttgcatattttggataacagttctttatcaaatatgtatttgcaaatatgttctac

SEQ ID NO: 78654 - DNA, 1009 bp, Homo sapiens
ttaccaacttgttaacccagatatgacacagttatacctaagaagaaattagtctgtcagaaagtctatttttattaaaatgagcaccgtattctatataaaatgtgctatactattaaagtatctgatagtttctgtgatcacatgctttttcatcagaaacaggagtagaaactttctttagagattaatgtaaccccttctcttttaccaattaggaaattaacttgcagcatagtaaaaaaagttatcccaagatttcaaattactctacttaacttctcattgtgaaaccctaaacatgttctaaacattaaatattcagttgttttcatttactctttctattaaatgtactatattttattagagttttagaacaaatgttatgtttagtctggcaatgcatcattaactagaatgtttaattattacactatgtggagtatttatattctaccatgatgatggaaaaaagaaaatctcctatgaaagaacctatctcttttaacaagtcatcattttcttgtcccatgctcttaattcatcagtattgtctctaggctttgttaataccactgctgtgatatgaactcttagcagttacacttttcaataacttcatgggttttaccttttttggggagttatttgtaattgattattttatggtttatgaatcaatatgtaccaaatgcctagaaatctccgaaatgttatttttttcatagtgttaattccttaataattattattaagcatctagtatattccaggcagatagtaaagattaaaagaaaaatgaaatgattatgtaattgtgataaattatatttggtttctagataatttgatgtcatttatttaagtcaatttatggaacatggttgctttctatgcttatgtgataggacttttctcacagtgatttgttctgtagctccattatatcatgtttacatctgttcactgccatcagactaaatttagcttctaccaaaatgttgta

SEQ ID NO: 78655 - DNA, 1048 bp, Homo sapiens
gtaagctcatttttttagagattatatgaccagtcttcttatctgttcttttaaataaaaattctgtcattttatttctaaaaataattatagaataatggtgtgttcagtgggagtctgggaacaaataaaaatcatatttacccacaaaacaattcgagttttaaaaatggtatctacttgttctgttagccagtaagcctggtagagataggaagagatttcaagagtgtgtgtgtgtgtgtgtgtgtgtgtgtatgtgtgtgtgttttagtttgaaaggtacatgaggtattcagttcttgtatccagtggatttatcaagaattatagacagactagaaattgcttctcagagtgattataccttttctaatatcacctactgattttacagtaaaactctaggctacaaaggttgagatgagaacacaattcactttacttgactcttaaaaatagcattgttaaccattttgtgatgtctctctcttcatgtattgggctgtactgaagagataaacctccacttgctttcatgacatagataataaattgatataattcagctgagaagttgaaaaatgcattgaaaataatggagcataacattgtagggttaacatttattcatagatgatgcaattaaataaaacaggcattaacttcaaggtcagtaagtaaagtaataaaattgaatattttaattgaattgtaattgcttcccattgatacatgcaagtaaagtaaaatagatgtcagctctgcaaattatggttcttcctcctaattaatttcttaattctgcatggagttatcagtgcctaggtcttgtgagtttattcatccacccagcttccatcaaggaatgtctgtatgacatgatgaaatggctaggtgtcagagtttacagtaaattttttctgcactttggcaaaaatattgttagtaactcaaagtaatatattcatgtattagagttaaaatgtactttaacatcatcatggatcctatggattataatcttcattaatattgatatttcttg

SEQ ID NO: 78656 - DNA, 1004 bp, Homo sapiens
tgacattgatgatgacttacactaatttttctggaaagaaatgtttgtattaagcagttgaaaacataattataatggttattgcacaaagcccagctttatagggtcttaaagaacaaataccacaaatagttttagatcatgattagattaaaaatcactggttttatttcattttttttttttggctacaggataaagaaaagatcttatcagaataaatttctcacctgccttgggcaggagtcattagatgtaagcaaatttaatggagcctgtgtgctctggggccattcagctgtgcttcaataattgcattttttttttttttcagtatgaaggttgtttaacatatcaagtggcaaaaaaaaagttaaagtacaagttgcctatttatctttcaggtaaataaccataggtactttataaactgagtagcaatgaatgcattaacaaataataaactccagtcaggaaaagaaaatgctgctgatagtgtgcaattattatttctgtgtccctccttcattagcattcacatgacttcaaactgcttctgtcctttttccccttcattcaatttactttcactggaaaactttaaggttcacttaacatatatttgaacaggtcaatatcatttttgatgatttctttttaaattcagcctttacaaacaaattagcaaggttaacttactgcaagatccagatccacattaacaaatgaatttttttcttgttcttttcccccacagactggatttcggtcttctatccacaatcttctaggatccagcttctgttcaatcagtgttttgattttgcaactctaactcgtaaatattacacaccaaagtaacagctaagataaaacagcgttaacaaaatattattcatattaggaacagattttttcattacagatatcctttcaatattgaattctgtttgatatttaaaatgtaatttaattcccttatatagtttttcagagacacatct

SEQ ID NO: 78657 - DNA, 1050 bp, Homo sapiens
tctaccatctctgctttctggatactcctatttcaatcattttttttctaagatttacagaaaaattattgtgctcccttatctatttatgccattgcttaatttttaaaagaagttactcaatctgggaaaatactgtccttaaatagaaatttctcaaaagtttccatcgaacatcagtgagtctttaaaaatacgttaagtgtgaaacattttggaagtgctgcctaagtctttgctttctccatggaaagggatctcagttatttaaattttaagtaaaaccataattatttttctcacagctgagagaatgatttaaatatatgcaaattttttctgaatgtcgattatattttcagtaaattactctggtttgaggtagttttctagatgagacacagttcatttataattttcagagcatgatgtggagccatttgttactttatttttaaagttatggtttttttctttattttcaggaaaaagaagaagtagaggggatatcagtaggtgctatactttctgactatcagcgtattcgagtggaaaatgtgtaagaaaacattaatttgttagttttaaaagtgtatgtgttttaagaatgtgaataagtgaaaaataataatcatattcaaattataaataggtatggtagtctacgtgctccatggaactaaatgtgtgtatttacctaagtaacaaaagtcatgcttttccttttttctatccttatatctcacatgaggaaacttaacttatttagtgtaaggaaaaataatctataatagaattgagacagattttttagtgagaagtattctcttcacttttttcttatttgatttagtatatcctgttaatctcttttaactcatcatttgtaataaaaatcaagagataataaaaggaatacagtaatattttaaagaaaaaatgtttactaaggagtcctctcctctttggttcatataattcagttcttgtctaaaaatatttatatgattgaaatgcttacatataaagccattcaactttcagggaatt

SEQ ID NO: 78658 - DNA, 1072 bp, Homo sapiens
ttcctaatgttatcctataggtgagaattgtctcccttgtggtctgttataatgtatatagacttatgtcacatatttgccttatttttttttttttttgagacaaagtcttgccctattgccaggctggagtactgtagcacgatctcggctcactgcaacctctgactccctggttcaagtgattctcctgcctcagcctcccaagtagctgggattacaggcgcgtgccaccacgcccagataatttttgtatttttagtagagacagggttttactatgttggccaggatggtctcgaactcctgaccttgtgatccgcctgccttggcctcccaaagtgctgagattacatgtgtgagccaccacgcccagccatttgacttatttctttatgtgtccattcctctgcatttcttatcactagattttaattttttaagaacatcgactgtgctgttttctaatgtgttttaactttcctagtataggacctgtcacaaagtgggacttttaaaattactgtttgataaatatatgaatgattgtgtctgacagcttaccagcacatgggataagagatgaatgtgtatatatatatatccataggtatatttttaatatcatttccctctaattaagaaagtaatacatgggttgtaaaaatacttaaaatataaagttggaaataaaatagcaaaaatgaaatactactcaaaaataagaattattacactttggtctatttctggtcctctttctacacttagggctatttcaaaaaatacatattttagtatgtactttatgaacatttgcttcgcttagccttatatcattagtagttccttgtatttcatgtcctttgaaaatatgtcttttaatgactgctttgttttccctcttccaaatgtaccacagttcattgaatcatccttttgtttaggattttagggttttctaatttgtatttcacttacatgtagaatataaatatgataaatatttatataacttgtgcacatttacaattatttttatagactgcatttctggatataaatttgaaat

SEQ ID NO: 78659 - DNA, 1014 bp, Homo sapiens
tgtaatcccagctactcaggagggagaacctgggaggcagaggttgcagtgagccaagattatgccactgcgacagagtgagactctatctcaaaaacaacaacaacaacaacaaaacagaataattatcacaaaaagggaacacatactaaaatctgctgacttgtagtgtgtttctaatagaaacaaaattatggaagatatcacgtgagtggccatgttgtcttgcccatatttgggtagccctgttatttgtcaaatgaataaataaatgccagtgaacaaaaaagtagtttagctttcatgtcaacaagtatatggtaaaataacccatactgcttgtagaaaaataggttgtgttattattcaaatcacaaaaaggattcttgagtcaatgtatacttgtttttaaaaatagccctagtgctctcattctccttgatcaccaggcagatgcagttctgagaaaaggtagtgaatgtcaaattaaattgacttggatcatattgagctccttgttagtctgctgaaaacatttgcaaggcgagagtatagtcatcaacaacccattcattgactgtatcagcgtgattccgcttgtgaaaagtataaggttcaagacttagaacaggaagcttctgatcaaaggagagcccatcactatttccctgaagtgagatcctatcaatattatatagagtgattatgatactgattatattgtagcatggactgatatatttattatcttggataaatggagggcttacttaaaggtttggaccaaaatattcctcattcatgataggagtaaacttagaaaaatatgacacctcctttaagatcataagctgcacctcttacctcatcaacttcttgacctctttgcactgtggaaaaccacatcaacacagtctgtgtcgacacctggaagactggatgatttctttagcaaactggttgttacgggaatggtactgccaggaacctcattcttgcttctactggcctggc

SEQ ID NO: 78660 - DNA, 1405 bp, Homo sapiens
aacacagatataggtatagacattcatagatgttattttttaaacagttacagatgtaatgctaattttaactttttttttctactaggttctgttttccaactagccacactcttctgctcctggctattaactgacttattttctattggcatcattaagtttggcaacatttaaaaatgatttctgattttctgtgagtaaatcaatggtggtagaatattggcttagtaaaagtagtttaatcattttgggcatattttttatatgaaacgtaagattttaggtatatttcactttatgaaaattattactgcaggtttaaaccactactttatcccattaatatcccatagaaaatactttatgttcactaaatatcccatagaaaatactttatgcttccccttttttatgaacttttattattaatgttgacagtttctattatggcattaaaaacaaaacaaaactatagtgctactattttaaacctagttactggattaaatattataatagctcatttgtaagaataaaataatgtttattttgtggtaattattactaaatcattatttagactttgcaaaataatatatcaccatcttggaattatgatacctttctcttttggtcattttagtttcttagacctaattctctctatttttgtttgtacttttgatgcagttagggaatatttccttctgtgacacttttttttttaaatgataatctcttggtagtttcttgtcagtgatatgaaaacgctgctattacaccgacttgagcatggggataagtaggagtgtgtgcaagtgttgttgagaggagtatcgctgctcttttccaagctgctgggttactttgtttcttctacttttcagctataaacacatgtacatattcacactatgtacagtttcatggttccattctccccctattctttttcctctcattcgcattctacttttttcctctcctttttctctttcatctcacatgtgtgtatgtatgcacatacacatgtaaatgaattttcaggtgttaaaaacaaagattgcagacagagatctagatccaatttaaacgcttaagttaaattttctctttttttccctccttcattagattatggtcatctgtaatatttatgtctttttatgagcactggttgttctgtcccttcactgttttatgtctcttggtgaagaataagctgtgaaaccagataaactcttagattagaaagtcttaaacttgaatatgcaaacagatcatttggggatcttattaaaaattcaggttctgatatagttggtctggatggagcctgagatttttctaacaagtacacaggtgatgctgaggccgctggtctgaggttgcattttgagta

SEQ ID NO: 78661 - DNA, 1142 bp, Homo sapiens
gaaaatctgttacactgtatgtttttatcctttaatgatgatcaatgatatgttcataattaaatagagtttagaaaaccaatattgtgtttaccaagaaatgttggtgggttttttgcctttgagggataagtggggactctagggtttgactccgctttgttctaggttccactgcatggtatgatcttagtttagttaacttctctataccttggctttcatatttgtaaagtaagactagtagtagtacgtacaacatagggtcattatgagcatttaatgggataatccatgtagaatagatcatataggaagcatcaataaatattaactattacatacttacttgtcactagaaaaacactttctctttcattggggccatagagcattgctcatatttaactaacttcataagataattgttatctgtcatggtttctctgttgatctggttcttagagaatttagctgtgctcttctgtctctttaggggtattgtgtggtggaaattctactactccttgttttgtctttaattgtgtttctttttagtacttaatgtatcagctgctttggcagtgatgaatatgatctcaaagtttgtgcatttcagtatgtctgctttgggctttgctttcgcttgatacgaggtaagaattaattaaatattttccagggcttaatttttctaaagggtcttttgagtgaccacctattaaaaacttcttaactaggaaagttttgtgggcacaaaacggacgtatcaccaagaatttaaaaagtttgtatgagaaaacaaggtctcactttgttgtccaggctggagtgcagtgctacaagcataattcactgcagcctcaaaattctgagctcaaacaatcttccgccttcagcttcttgagtagctggaactacaggtgagtgccaccacaacctggctaatttttttttttttttttttttttttctgagacggagtctcgctctgacgcccaggccagagtgtagtggcacgatcttggctcactgcaagctctgccttctgggttcacgccattctcccgcctcagcctcctgagtagctgggactacaggcgcccgccaccgtgcccggctaattttttatatttttagta

SEQ ID NO: 78662 - DNA, 1059 bp, Homo sapiens
tggttgaaatggagatggggacctagagtccctctctttcaaagcaacagagtttaaaagccacttggtccttacagtttatgtacgtgtgtgtacatacactccttttgtgtaagggctttgtcttactttggtttgaattcatagtgcctaattctgtacctggcacataaaagatgttcagttaatgtgtgctgaatacagaattctttgaacaccaggccttcccttactgatttcaaacacctcatgcataaaagtgcaactttatgaagccatctaatagtaaagtaattgtttctctgtgaaccaattaaaacaaacatacttctggcataattcatcaatttaatttttttaaagtaaaacattgttttaattacaaataattataggaaatgaataagaagtattcggaatgtgtcttcagtataattaaaagctgttatataccacaatgattggtttagattcagacacttcaaatgacctgatgataaaaaataatcttacacaatgaactttggaattgaatgttctcaatattcagtaaattgttgtttttcttgtaaagttcttatttatgttttgtattgcttttgagtaatcttgaatgtaatattataataaaccacctattgttttttgtatatcacttgggttaaaactgagaactgtgaaagtatctttttatcactataaagaaggaaccaatgttttaagctgataaaatgaaaaggtacaaattctcaataaccaaatatggtagttcctcttaaaataatgaccagttacagtaagaaatatgtttaaaattacattctggcttacaagactgacaagatgctgtctaccaaagaaaaaaattgaataaggtattttttctttgcaatgagagtaccaaactaagaatccacttaattaaaatagtgataaatgtagattacattaccgaagacagtgaaatacagctgctctatctactgagagcctgcataatttaccaagactgtacaaagaagcaagggagcagccactgcagactgttcaggaagcatc

SEQ ID NO: 78663 - DNA, 1086 bp, Homo sapiens
aggatatattgcttttgaagcttccttgttgaagatttggcatctacttaaaaatgcactgaatggtattgggggaaaggaaatctttcctattgattatcaaatcaacaggatgtcagccattccccaggtcctttttgaaggttcatgaggagcctgtttttctttcagggttggttcttgaaagcttgtatgtgagagattttattattttattttattttacttaatttttttgctgtgacaaatgtctgttgttttctaaacaagaaagccagtgtcccagttaggtgcattgagttattttcattcacttgcagtcctgttgtattaatactgaataagcagagacagcctgactggtggtgaaagatggtaatccagcctcagggctttttctggtcaatcctaaacctctgattgccacgttttcctaatttcccatttccagggcatcactagaatgaccttgcttgctgaatatgatgctctgaatctccaagattttcacatgcatttgaaagtgggcagccaggcgattgtttacaggactccaaatgaactgtgcactcacagcaagtttgataaacacacatttcctccttttatcagtgagattgcaaaatgtgaagtatgagtttccagttttactgattcccctcaacccttttcctgtttaaaaacttagacatactaattggatgctgatctgtccctgtttttcattctgcttgctggtagttgacggcttagtttagtacttacctaggcaagatttggcaaaccttcaaaaatgaactttccatgtattcaacttaaaggagattcatcccaaggaatgtaatgtgaacactaattaacattaatgactgctaatcactttgctttttatactcctttaggagcactgctattatccaatgtagttaagtaaaatgcttgtatatgaatcaacaatgttgcatccttttagcagctattgctcacaatcaagctttgcataaattaaagttgactaaaattgattttaatatgctgctcttcttcaatagtaaactaaaatatctagttaaatatcctgcatat

SEQ ID NO: 78664 - DNA, 1047 bp, Homo sapiens
atctagtaaagtcattttttttcattgcatacagcattccattagtatattaatattaagtggtagttacaagtgggcattgagatgagtgtaattttcttgactttattagtaagttaatgcagagaagaaaacgaatgataaacgttcagttgtgaaagaggttttagtgggggtaaatttatattatagattggattgaattgatccttctacatttggtgcctataattttgggccatccttagcctgttttagacttcttcagtcagataattcagccttccaagagacatgtagaattaatgctttctagtttcctatgtgagttaactgaggcatgggccatttcaaaaggagataaagagggttaacctaaagatatcagtggttctaataggtgatttttttccattaaaatttattttggcatgttcttttagaatttaactccatgcttgtctttaaaatctaagcagtatattttgtatgaactcatttgtagaaagcctcaagcaaggacttaagtgtgaaagttaggtgaaccaagtttagaaaattcagactttttggagtatatgaattaaaagatttaaaaaacagttctttcttcagaggcagtagaatggggccatcatttgtgctcctgtatgtaaaagcaattaactctcaacaccagcagaattatgccatacttatttgtatacagtgctgagccacgtggtcactttgtgtactcgtacacagtgggtgctcgatgagcaattgttaaacttaccaaaattaagcctatctaactttgacaaaattatgctaatattgatccccatagatatctttcaaaagacattgacaatcagaaaaggcagaaactatcagacatttatttgtctttcttgtgcagaatttgctgattcttctgtactccctactataagattggttttggagccattgaaatgccccatggtctattttaagaccagttctcttacggattctttcctaggtagtaattttgcagggaggtgggaagggagggagaac

SEQ ID NO: 78665 - DNA, 2901 bp, Homo sapiens
aatcacacctggctaattttttttgtctttttagtagagacggggttttgccatgttgaccaggctgttctcaaactcctgacttcaggtgatctgcctgcctcagcctcccaaagtgctgagactacaagtgtgagccaccgtgcccagccaattcttcttttttaatctcttctctcttccctccctcccttcttcccttttttccttcctcctcctctttaaaaaacagttggacattggggctaaagcagtgagcttatagttaaggacctgtatattcagttgctcatgatatttccaccttaatattccactggcatggtaaactaaacaaattcaaaacttgtttgttatcttcctacacaaacttgttccatattctgtatttccttaattaaaagcatcatcatttacctcatcatctaagtcaaaacctaggccctactgtgagacttccattttttctcagtccctttctccactccatccccctcaaccatcaccattatagctccagcacctattgataatgctggtatgacttctaaaatctgaccccttgacttcattctcaccactactggtttttcatctgtactatgcgagagcctcctaatcaacttgccttcagtattgccctatgctccatccacctcgtctaccaagttgttggcagctgatctgtataaatgcttaaatgacccatgattaagatatagtccaaacacattaggctaacacagaaggctctttaagaagagggcctggcagtcctactagtctgatcctgctattctcacacaagcacctctgggatcaagttataatgaactaattagtttctaggagattgcttttcatgtctgagtcttcggctgtgcttttctttatgcttatctctttgtcctcctgaagaaccccttctcacctcatattcttttgtgaaacctgccctaatttaccttcctcctttctgttccatggcagcttgtctataactctactgtgggtctcattgcatcattaggcttgtttttgtggctgtcgcttttgctagattgtgagacctcaaaaacatgatagtgctgttcatttttgtatctgtcctagcagagttcctgacatatggaggctcttaaaagaatattgaatattaaaagaataagtttagtaaaaaaatgtatcaaattattccaacttaggctgggcacagtggctcctgccttgtaatatcagcactttaggaggccgaggcgggcagaccactttcaggagttcaagaccagcctggccaacatattgaaacctcgtctgtactaaaatacaaaaattagctgggcgtggtggtgcgtgcctgtaatcccagctattcaggaggctgaggcgagagaattgtttgaacttgggaggcagaggttgcagtgagctgagatcacaccactgtactccacagcctgggcgacagagtgagactctgcctcaaaaaaaatttttttaatgtaattatcggatacaggggagccatgttactatgatatgtgatataaaaccattggcaaattcattttgtcttttgttttcctatttagaagcttaaatggaatgggcatcatagtggaagttttcaaaataaggcatcctatcagtgtaaccactaactgtaccaagaatagtttccttctgcacactactttatgaaaatgctgagcagaaactctttctaattagttttagtatatgcatcttagaaaacctgattatggtggaaaattactttgtgaatctcttttcacttcacttcatgagggaaaaacctgagattgttgggtggctctgaggcaaatctgaaggatttggaatgggagaaacatataagatggacttaagattttcagggaggacgcagacatagcattagttaaacaggcacacagccctgtacaaattgctcctggctcctcagaactgcacagcttgcctcaagccctttcagttcccaggattttggatattaaacctggtcccttggcataagaaatgcttttctagtattgactctggactctaaacaggaagaattggcattggaacagaccagtgtcattttcactcccaggtgcagctttattgaggctgtgccacatctggtcctttcagatgataaagtcaagcgtgcatgaggaagtacatgaaggaagatctgtctggaaataaaatgttgtaccatatttgtcaattactatagttcctaaacttatcacaggttcaaagccttcatctataaattccccctaaagcctagaaaatgtgactccctcattttggcaaaatcatcattctgtctcttcaaccttgaacttttctccacttggtatcagtgattgtgtgtatatattgcacatgcacatgtataccctttgtatttatcttttcccagagtcagtgcctctctataaatttatcaactgacttatttttatatcctatattcctttcttctacaaactatggatttcttcctatcttatcatctactctatatatcttacattgtgttgagtatttttgacttttctttcaaatatctttctttatattttcaatctctagtgtctgtatcctgttgactggttgggtttttttgtttgtttgtttttgttttgtttttcctatgctaccatttatttttaaagaaaccttttgtagatgtctccttctggagttgtgttgtctgggatgctaggtgtaagtctctgtcctatagtcttctacttcatttctaggcctgtagtttatcttgtctttgccatattcttattaaatgactgagaatacattatccagattgataagcataaattgctttatttctttgttgttgtatatttttgaagcaca

SEQ ID NO: 78666 - DNA, 1082 bp, Homo sapiens
ttcaagccagtatttcttgatgtcttgccatttttcacaaggggaaggaaagaagattcctgtcccttcctctacaaaggtacattgcatttcactttctcactcttcagagaagttcagttttttcagaagttacctcatgaacttctgtcatgaaaattttctagtttcaagtagctacttaaatgacatactttgagtttcatacaaatcaaaagttaattaaggattttgatttgaaaaatatatgaagcactgaaattcttttaaaatttgtttgactaaaatagttcttattttgtatgtcagaacattttattttattctaaaaagaaactgataagaaaaacccttagagtagttccaaaattttctgcttagttatagatagcataagaagtagacacttttgaaaggaaatcacaaggacctgctttcttccctctgggaagatacatgctaataaacattttgattatcaaacaaggtagaaggcttaaaagaatcctacttttagtggtcatatctccaaaagggtgcaattatgatcttgacagttttcactttgaagtgtgaactactgagtgtaaatcctgcattttcaaaatttctttctcatggtacaaagaatttgggcattaagtttttatataaaccaatattataaaatgatgagactcacactaaagtaattgggttgcttaaaaatcacaaacttgatcactttggaagaactccatgataataacagccctccaagaaagagagataataaattacaattaataataaatttaattaaaaatgggcagattagcaataattaagaagaaattttcttttccatccatgctgtctttggagaaatggatgctttgccattattatctttatgctaaccatcagttatgacataaattaatgctaatgttaaattcttgacaacttatgctttggaagtttgtacatgataattatagttgaaagatatgttatcaagttgtctgggactaaatagttccttcttttcctgtgtagaaatattaattttactataggatattttaaggacataaatatca

SEQ ID NO: 78667 - DNA, 1101 bp, Homo sapiens
ctttaattaagaaaggtttttttttctacaagtctagatgacttcatgaataaccttgaatgatttgtaaaaacatttatgtaataaaaatatttaactgaataaactaatcaaaatttattggatacattactcttctctttaaatgtttaccatatatggtacaacaaatttatgtattaatacatttgtatttgtaattagtagtagagattattaggggtgatatgaactagatgcaactacagacaaatgtgcaattcttatgtttttattttactacataaatgcagagaaacatagtatagcaagctttcaagttctgtgtcgactattcaagcagtaaaacctggatgggctttcaaatccgctttctttttcactctcttttgctaattatttccattttaattgttgcagtggggtctgatgaactggatagctacatgtatcagacagtggggcaccatgccattgacttgtatgcagaagcaatggctcttcccctctatcgccgaaccataagaggaaggagcttggatacaagacaagtgtacaccaaatgtgaaggtgatgaggttgaagatctctatgagcttttgaaacttgttaaggtatgcagagtaaccaattaagtatattggatttagtgtgtaatttaacaaattacatttgccgaattatttagtaatccgtaatttgcaattgttagtagcccaactattctttaaaaggattttgtctttttttggttagaaaaaaactgcaaatgattagtatgcctttatattaaatgatatttaaaaataagacgttttgtatagtttggcatccaggattatcaaatgatattaaaataagttttctgttcctaaggaaaagaaagattagagctgatggccatttaatctctttattaacaaatattttttgaatgcctactatatgcctggcatatagtgctagacactggggatagaatggtggacgcatacgttaaaggcttattctaatggagctcactttctagtggaagaggacagacaataaacaataaataacatgcttgatagtgaagagtaatatgaggaaaaatgaagc

SEQ ID NO: 78668 - DNA, 1743 bp, Homo sapiens
gatgttttttgaaagagttccaactttaagaaagagaaaattctttgaggatgaataggaactgcactctaacttctgtattataaaagaagaagcagaatctcctgttaggtttaccaaaagagagaaactcccttatcccttgtggccagggggaggcaactgggactttcaagctatcttgtgaagttaaaaagcagatgtttatatagtatataatacatacatggtatattataatttcatcactggagtttctatcttgttttcagctttcacatgaattattttacttacctagtacagaaccattaatatataatcttccttgtgttcatggttcaccagcagggtggtaaaatgacaagcaaagtatatttttaaattatacctctcagtagaatagagacacttatttagaatattgttagtgagaaaaaatttgatagtaaatagaattagaatattctgaagtaaaaagcctggaaaaggcagtcgaaacaatagtaattgttgtagaagaaaacagatggctgtgggttggtagatggagatggtttagctcatcttgatgaaaatcagcaggacattgggaattattgaacaattcactgaatgacttattttcctatgagtgttatgaaagaaaccttagtgaggaatgactggtagagatgactccaatgtccagcaaagttacgggttttcaatgggtggtgtgaaaaggaatttattcccatcaatgaggataatgcgaacttgtcataaaattcacaaaaccatctctttagatttgtagtaggaacttttgtggcatgttaattgagttgcttcaggcaacaggggagcctttggttttatttgatctcacactattgttgctctgtagcttccattaatcaaagttacaatgtggttaggactaaatagagccttaaagaaaattatcttctaggtttttgaagccagtgagatgttttacttattatgctaacatcagaatgtttcttgccaagaagcccaaatttctttgagtaaattggtttgattgtatcaatatcctttaaaatgaatgtatttaaagatccagtctaattttgagacgagagaaggccgaaaggtttttaggtaactttggctatgttctctacttcctactgggaccaggagtggaaacatttatagtaacaatgtgagtaatattctgaaggaagccaatctaacaatgtgtgagttcagaaacctgtcagccaaaatggggtagcagattttgatgattttgattgttgaaggggcccttgcactatcacttttcattccttttgataggaagttttcacatttaatggaaagcctggacctgtttggcttatattcatacatacacacataggtatatgtcaaaataactactttgtaatttttttaatagcattttgtgaacattttccatgtcattaaatattattctacgatagcatttcccatatgtctttagaacacaaatacccccattaaatttacgtgttctgtgggtagataaatttgagagatagttcatattctctgctcttattggagtacctgaaagcatattagcttaggaagatttacaccacagacatccatttaacactttttatccccatcttttatagacttctttaaccttaaatctttttatcatccgatacctattaatgtcttatgggatttgtattccgcagaacatactttagaaaa

SEQ ID NO: 78669 - DNA, 1042 bp, Homo sapiens
gtgtcttaaaggttgagtggcagttcatccaacaaacccgaaaggaaatcccaggcttgggagacagcatgtacaaagacatagatgtaagaaggtataaagctttcaggagggttagtatagggtgtgaagagagagagaaggtgagattgaaaaggaaggagaggccaaactctgaaggtccttctatgctgataagaagtttagatttatcttatttataattttttcctataagccagaggttgtaagcctggatgcacatgtgacttacttgtctttgttcagtaaatgattacacacagatctttttctagacccagagagtttattttcatatgactcatctgcctaacatcctaatttctttaaagaagaacttgttagaataatgatgataaatgtcatttccatttgcatagtacttcatacctttcagaacaaatagttttcaaggaaaacataagtaatttattaagtaatgtattttgatcctcacaacaactttgtgaacttgatagggaaggtgttatactcacaaaggaaaaatacagagaagttatcatcttctgattctatatagcaatgaagagtactaaaaagtgaccatctcctgcctcattgcttactcgtattacctacttaacatggaattataatgcaaacaacataaataatatttgatcatcttagcagtaggcctaacaattccttgaagtgggaagcccacatttgttggaacatttccatgaggagctccttgaaatgagcatgagacccttaaagagcatgctaaagacacaataagtagcttctaaatggttttgaagagtaatagtagggtccgactttgttatagctttgatttgaatgaataaaaggtatgcagtttggggacagaattttgaccttaatgagtttctttactagaggagagaggcatttgaggttggaaatcatgatgtccaggaagagaagaaaaagagccaacagaactagaacacatgggaagaagagactgttccacctcaggccaaaaaga

SEQ ID NO: 78670 - DNA, 1018 bp, Homo sapiens
aacttagtggttcttggtggtgaacttaggagtccaatctggtaaggagtggagtagctaaaaaacttgcttgggacaagcacagcagttttacttggctcttatgcttatttgaggtggcttggtttacttggtgctgccattggttatggttgtcttttttgaacaatccctcccacccccaataaatgatgcatttaagatgcctgctctttccagagggagtctcgtattccattcttcttgcctcctatcacagtttcttcctgagaaatgatagaaataaaaagctctatctctttttatctgagtcacagttgtctcatctgtaaaaggagaggtgaagtccgacggctaggaagtagaggaagcaggatatcaaacccaagtaaagtcaggctccagaatctctttctcgctctgttgtctcttcttgatcagttccttaaggctgtggtgacggtgaagtgagataaggcatgtaaaacagcgcagtgtagagctctccgtaagtttttaatgaaaagtaaatatgatttttgttagaaggtagtagctgatctacagtagaagaaatgtctgagcagtaaccttttgaaacataaaacacaattttgctttgaaacaaagtgcagtagatttacagaaaatgaaaatgtttatatggaacagttggttgtatggctgaacatgtaagatttgattatcagttgaatattgtatcgttaacagaaacttctttaagtatttcacagtgatatataatggcatttaaaaaaaccttttaaacctaaattcactgatttttaagaattgagggagcattgcaatgcataattaataccgtagggcttggtatacttaattgaaatactattcctattggccttgtttttctcaattgaaatgaaagttgattctcagtttgtggtcaattttctacacttctgataattttgtggtggacctgagttccagaataataagtgagaatagcttagaaagagagagaaaggct

SEQ ID NO: 78671 - DNA, 1739 bp, Homo sapiens
ttagttgccaacttgatataaagtgctcttatgtatttcttatgctgtaatgtttctttaaaaattataatttttaaatgttctattttcaaattcaggcaaagtgtgtagattcattcttttaaatgagtttcaatgctgacattatttactacaaaacagcaagacaaccaattagatgtagttgcaaacatgcactataaacccctctttaaaaaaaacaaaaaacaaaaaacaacaacaacaaaaaaaacccagaatatgctctcatgttcacagaagaagaagctacagaatgggacctataaatctgattcctgcatgtgtcaaaacagtaatgtattaaatgcatattattataaaaatttaagacatgtcttaaacacacttacatttttataacacgtggcaatattaaataatacctttccttgttagcatctgtttgccgtcattgttggcaagacctatgatttattgcttaaattaatgaccaagaccattttggacctgatatatgcccctaagcttattacatcactaaataaaataaaatgtatgtgcctatgacagagttatttttataattgtttatccctttaagtgccctattcggtgattcactgaaaggttcataatggttggcttgtaaccagaaaataatctcagaaaggtaaaatacattgcttgtttggaaataaaatgccagagtgatggtgatgataggggtcccagcaagaatttgcaatgctcaaactctttcttttctcaatgctctcagtgacctcttactgaattttttgatacacaacctctctaccaccatcccaactcttaaagctatctgttaatgctggcactcactttcatataaaccctgcattatggctaaagtggttttttgctcagacataaagctgtaagggttaaattattctgtacttaggattttccaggtaccattatcaccatgcattaaactgagcaagattattttcctatttttcgttcttttcttttgggagattggaactttactattttttatattgaactgtatttgacttcatcgtctttatctttcctttctgacggtgcagtatgatagaaccttcagtatttttacaataacctgttattcatctaaagtcactctgctgcctgacttgcaatacaatattatatggctttgtggtttctttgctccacatgaagtatctcattgactgtcagttctcctgtcatctgatggtaaggtcaagtttttgagaagctgatgccttgcttctggattgtagtatctacaccttgaaacatatggagcttctttgggaacctgagagtgttttttgtgagaagattattattttgtagatatttgggaacaattctcatttattttatcactcataaatggacgtaaaacttattatgattattcttttgagaccgggtctcactctgttgcccaggctggaatgcagtggtgcaatgtcagctcactgcagcctcgacctcctgggctcaggtgatccttacacctcacgctcccaagtagttgggactacaggcgtgtgccaccacaactggctaattttttgtatttttagtagagacggggttttgctatgttgcccagtctgctcttgaactcctgtactcaaaccatccacccacctccgcctcccaaagtgcctggattacaggtgtgagccaccacacctgacctgacttagtta

SEQ ID NO: 78672 - DNA, 1051 bp, Homo sapiens
ggaatatgaatgttgattaagcatactcccaggctttgaaattctgaaagcagtgtcagaataatggatgttgagcaaatgtcaagcatttgttaatttctctgttatttggagtttatctaccatgatcaatcaaataaactagtgcttctctcttgtggcatgtgtcattgatatggtgattaggtggctagagagaccttctgctttttttccaggtaacagattataaacgagtagacagagcttttcagttaaagatttgtttatggcttggtttagtagaaatttgtatattaactgaatactttggtggcagtgtgaaaatccgtggccacatgtcaaagacataaattctgggaccatttataccaggagaactagtattggaggcatgttttccatcaaagtatagttttcagtagtttatgaaactttgatgtaaaactggacaaaagaaatggatcctagatgaatgctaaccttaacatttgtagatagacttttcaatccatttttatgtcatttttcctatttcaatggttaattctaagttagtgattgacttttattcgtgagtgagagtaaatttgtttcatgtgattcaacataatttctattatttttaggaagtaatgctacagtgttttgatgtcccaagtaggggtatcaaaaaaaaaaaagtaaaaggttcctttcagagtttacttaactgtggattattgtgcagtgctaacattctgcagtgtgaggagttggttcccttttagaatgtgaatgactttaccaactgggatttcattaggggttgagactaggtacgatgtgtaactgtcctacccttcagcacggggtaacttggactgaaaagggacctttatgtgaaattttagtggctggaatcaaggtagatttgtgattggagatttgtcctttttctataccccattttcttttcgtagtcttaggcttgtagcttacatgattcagatggagactagtgtaatacttaccacccttgaccatgtccaacaggtacctctgtggtctt

SEQ ID NO: 78673 - DNA, 1080 bp, Homo sapiens
ctacttgggaggcttaggcaggagaacggcgtgaatgcgggaggcagagcttgcagtgagccgagatcatgcctctgcactccagcctgggtgacagagactccgtctcaaaaaaaaaaaaaggtaagttgtgtttttgagccatggcagcatcattggtgctaaatatacaaatcacactcctctgggattattactttggccaaagataatgtgagtaaattagctccttcttttagctgaaaaagtttattttgttactttatccttgtacttagtaagtgcagactctccttccttaactattagcccttattttatgcccaccttttctctgtgctccccaaatgtagactgactactcagaagctaaagacacattccctttaactaacctgtttccgttacccgtctctctggtggttgtttataaggcaggcttcttagaggaagaagaaaagtaaagggttagataatctaactaggcagttaatccttgaaaaccagagtggtagctcaatttaggattttcagttacattttaaagcatttcttatttgcttagaaagggagactatagtaatttttgaattttatcctatagcttacaaagcattttcataaaactttctcctttttctggtggtagtgatggagggggttggagatacttctttaggcctctatttgggatagggtttgaaataggatgaaacttatttgctatttatttttattttcttcctgtgtttctttctgtatcatataagctcctactctcctattatatcattgaaactcatgctttttatcagaataaagaggtaaaattcttccttgtctttggaagggacttatacttactgtagagttggaggaatcactacaaaaggctgagtaaaacagagaaccctgaaaaaagagttattgtccatttatttagcacagtttctgtggtagggaggcaacattaaacattattttaaaaactgcatttgtgagatattaatagatgccttggtttgctgcaaattggttaaactttttttttggtaatatttaaatcatagagataggact

SEQ ID NO: 78674 - DNA, 1006 bp, Homo sapiens
aacatcagatgaaaatacttttggggagcaataagaatgtaatcaactcctgttggttttattcaagttggaatgctaattttgaaatagtctcattaagttttatattattatgtcagctgaccttttaaaagtatttacacatatagttagtacactcagaagaaagtatacctacttaacagtaatatagtaaaactcctttaaaaaaagctttttccctattttgtaaaattccaattatgttttcaaaagaatttatatatgaagaaaaagcacctaagcatatatgatgatatttaacatattgtggtgataataagaggctctttgcctaatagatttaccaagcacaatatcttagtttaaaatggctttacggtagttctttttgtttatgtggtcacatatatcagctgccaaagaattgtgttttctgacatagaaaatatctaagattcacatggtttaaagagaaagggggatttagacccttgtcctctgtgcttctctttcattaaaaaagaaaggaaagacggaagtaaggaaggacataatttatggctttatgtttaagatttaactactgtttaatgatgattatatcagactttctcaaactttgaatctgatttcttaaattcatacctctttcctagatgcatttcttttaaatatctatattattattttgtactatagccgtgaaatcactatcattgtcagtgtgtataatacttttgtaaaggattaacagattaaaggagaatttgagtagctttgacctacaaatttataaactgcaaagacttttctccatatgtgactagcagcatttttacttcaccatgatttaataaagtttatataaatcaataatgctgtttttgtaacttgtattttttttttaatctggaattctctctgttctttgtagaaactcaactagattatgaaaaagttagttctgttaaatagcaaaattgcatgttgactccttgcaaga

SEQ ID NO: 78675 - DNA, 1041 bp, Homo sapiens
tggcttctgtgtgtagtcagagtgtgaccaccatccatcacctcaatagcagacatcagatttgttcatcacttggtttccaaggtctaataatccctcaagaatttagagtgttgttgactgtccccatttacatcagtgaaggctttgcaacaggtgcagctgtgtatactaattgcagggtgtgcctaatctgtccagaagggagagtacctccaaatttggtatcttaaagagtggagtgaccttttaaagtcccagaatgagaattgccaacaattccaacaggctaattatacccacaaggagttgtgaagtgcttttaagttttcctgtacacctaaaagttcagtgaacggcttgaagtcattaacatatgacagatgcactcccttttcaagagcttgtatgataagttttgattgtagaagtgggaatttgacctctagcttatcacttgcttcattagcgtgcttgaggacaaggagttttttttttgttttttgttttgacgtgagtgttatcttactcatgttccagaattctatctgcctccttctctctgctgatctgaagtcacagtagataaccttgatgctggttttttaaaagcatcacgcattgtgtagtgttacatatattttatatataaatatatacactatgaatatgtttctgagcatgggtctttcaaagttttgattcattattttagatatactacctcccatgtgatttctgttctttttcatggaaaaggaagaaatacactttttggctcataaagatgactgaaagtccgacttctacatttccacaaactgaccacttcttgaagtgaatgagaataagggaatgaagtttgggactctgcacacacatggaggaaagtatgctacccaaagaatgaacgaatgctagaggtgtacccataaagagatgcggaaatgaagcttagaaggatttcatgtggtaaactctgtgactgcagcacttaaatgaaattgctttttattatctggttgaaaaatcatccaaaat

SEQ ID NO: 78676 - DNA, 2939 bp, Homo sapiens
atatcagccttgtgcaaattccagtattgttccaagaatataatgcaaggctgggtgcagtggctcacacctataatcctaacactttgggaggctgaggtgggcggatcacaaggtcaggagttcgagaccagcctgaccaatatggtgaccaatatggtgaaaccctgtttctactaaaaatacaaaaattagccaggcatggtggcgcatgcctgtaatcccagctactcaggaggctgaggcaggagacttgcttggacctgggaggcagaggttgcagtgagccgagatcgtgctactgcactccagcttgggtgacacagcaagacttagtgtcaaaaaaatatatatatatataatgcaaataaaattgtaaaagtattataccttttaatatttcagaacaaaaacttatttaaaaaatttattctgttggggcacgggcctgtgagccagttagagttgcagctgtgggaacgattgggccgagcagaggacgacatgttgtttttcgtggagcaggtaacatctaaaggaactggtttaaatcctaatgccaaagtatggcaagaaattgctcctgggaatactgatgccaccccagtaactcatagaactgaaagctcttggcatgaaacagcagccacatcgggtgctcatcctgaggttaatgcagagctctcagaagatatatgtaaagaatatgaagtaatgtgttctttgtcttgtgaaaccacaagaaatactacaggcattgaagaatcaactgatgggatgattttaggaccagaagatctgagttaccaaatatatgatgtttctggagaaagcaattcagcaatttctacagaagacctaaaagaatgtctaaagaaacaattagaattctggttttcacgagaaaatttgtcaaagaatctttacttgatctctcaaatggatagtgatcagttcatcccaatttggacagttgttaacatggaagaaataaaaaagttgaccacagaccctgatgtaattcttgaagtgttaagttcttctcccatggtacaaattgatgagaagggtaaaaaagtgagccaagtcataagcgttgtattgtgattcttagagagattcctgaaacaacaccaatagaggaagtgaaagctttgttcaaattgaaaactgccccaaagtgataagttgtgagtttgcacacagtagcagctggtatatcactttccagtcagacacagatacacaaaaggcttttaaatccttaagagaagaagttaaaacatttcagggcaagccaattatggcaaggataaaagccatcaatacattttttgctaagaattgttactaattaatggattctagtatctatagtcagcccattcagactcaagcacagtatgcctccccagtctttatgcagcctgtatataatcttcaccagcagttctcggtctatagtattattcctcagtcttggtctccaaatcctacaccttactttgaaacaccactggcccgctttcccaatggtagttttgtgaatggcattaattcaccaggatcttataaaagacatgctactgctatgaatatgggtcgaccattccaaaaaaaaacctgaagcctcattttaggtcatccagtggttcagaacactcaacagaggactctgtatcattgggggatggacaattgaacagatctagttcaaaaaatttttcaactgaaagcataatcctacagtaactggggattaggagcaaacttaacttcaaaaggagacttccactttgcagatggaacaaaatggggactatggtaggggcaggagaactcttttcagaggtcgaagatgacgacaagatgtcaatctcaagacctcatccttcaacagctgaatcaaagcctccaacaccaaagtttgacttactagcctcaaattttccacctttacctggaagttcatcaagaatcccagataaactcattttggagaataggatgtctgatgttgttaaaggtgtctacaaagaaaaggataatgaagtgttgagagttagttgcccagtgcctgcagatgagcagacagaatgcacttctgcccagcaactcagtatgagtaccagttctccatgtgcagctgagcctactgcattaagcacaactcagccaaaaaaaaaaaaaaaaaaaggatctaatagaggattcctctgttcagaaggatggtctcaaccagacaactataccagtttctcctccaagtactacaaagccatggagggcaagtactgcctcaccatgtaatcgtaacataaatgtagctacaccgtgactctacaggaaccctgaaagttaagttatgctgaagtgtgccagaagccccctaaagagccatcttcagttcttgtgtagccactatgggaacttcgctccaatgtagtgtctcccacgacaaacaaagacaatgaagctccttagaagtcccttgagaaaccaaatgagaagccagaagcaagggctagtaaggattattctggcttctgaggccataccattcccaggggagcagctggaaaaatcagggaacagagatgccagtttagtcgtagggctatacctcagggagtgacatgacgtaatggcaaagagcaatatgtgccacccagatcaccaaagtaaaaaacaacaaaactattcaaaaacttctctctcttcccgttaaacttgagctgtagctatattgaactgttttggaggggagagggtaaccaggaaggaaacaggagaaagtacatccttaaatcattatggattttggagttgtgagtgataggatcccaaaattcatctctgatgtgatttataaatgctggaggatttctatctatctatctatctatctatctatctatctatctatctatctatccatc

SEQ ID NO: 78677 - DNA, 1028 bp, Homo sapiens
tctcgctcatggtaataatatcataatttagtgcctactaaattatgctgaacattgcttgttagagaagtgattttgtcacttgagtaagaattgataccattactctctaacgtctcatgttatattctaaacccttttgacaaatgccctttgaaagctacatttatttctagaatccagtcacttctgttttcctctgcatcaggctaccatgattaaaatcttgaaagccaaacaaattattgaatttgaagttactgcaaattggtgaggagaggcgggtgcttctaggtcttcataaccttcttgtctattttcttgtgataaccaagtttaagccagggacctcctaaagaaaatatgtgaagaattgaaattgtgaggttaaatattttgtatatgtgcatacatatatatgtatattattttttaggtaacttttcaggtaaagatctgacggctcttttagtaaatatctggattaagtcttatatcagaaaatatggtaatttaggagaggctggaatttcagcagtgaaataattgtgttagaccacgagatggttatttaacctctgttggaggaagtggtaccttacaatcagtggtgaataaaagaagttaattattttccttgatcttctcactctgtggtttgattactttaaaggcctagaggtcttcagagacaatttaatcactgtagctattgacctagaatagaactgctacagtaggcccacataaaaatgtccagtgtcaatatgattatgggttattattattaggaccaaggcgcagttttttgataaaactctacttaaacatcttagggctgtaagtagagagaaatttaacaaatttaactcttagatttgcagaactgataaaatcatagaacttttaagatgaaccggattctaaagaagttaccaatcagtttacagacggtggaattgagacctacaaatattaagtgatttttccaattagattttaagcacttcaagaataaagacaatatt

SEQ ID NO: 78678 - DNA, 1119 bp, Homo sapiens
aattactatgaccctgttggcttttacatatataccgtaccttgtggtacagtctgaagacatcccagccaagcaatagagattaaaatgcataggatcatagagtagaaggaaaagaagtcctgccatcaccacaattcccaagctgttattcagtgttccctatgtgctagtcactgggctcaagaaataatgtcattcttgttttgaacctcatctgtgacatatcaaagatttttttgtgttgttgttttttttctttcagaaacacattaaaagaacacatgccaaacatcatacttcggaagcaattgaaagttattaccagaggtatgaccttcctgccccactagagggtatcatagtacctattaattgtaataataattatgaataagttaggttattaattttctatgtcatatcccaagacattgtgttttaagtattttattcaaaacttttagtatgtttttgaatgagttttcaaatgctttgttttgtagatctaaagagtatggtaaggctgtcttgacttgtgtgtgtgtgtgtgtgtgtgtgtgtgtgtgtgtgtgcccatactatgtgagatgtagttataatattatgaaatctcagttggctacttgaaacttattataagtgcatatcctgtctaaatgcatatgctcatatatacatatatctacatatatttgaaagttctcaaactaattttcatttcttagattagcaagttgaaaaaagaagattgaatttggatgtcattttattttgcatcataggtattaggatatccattttagaaatgaaaaaagatgtatcaagtaaaggcatttggagatatattgtagtgtataacggtcacattttaaaggggattttgtatttttaaaagacaaccttgggtattaaatcaacagcatagtatccaggagatattttaatttcagcctaatttattataaataaatttcaacttcttgttctgaaacaatatttaaaatagctctgtttttttattttaaaatttgtattgtcattgtaatatgactgaataatttataacactaaatggtaatggtttgcattagaaattgttagttggtttcttaaatc

SEQ ID NO: 78679 - DNA, 1105 bp, Homo sapiens
cccagtgctcctggacctggccaatgaggtaatgttattgttatgattttatttaaacctgcgtgtaacctaaggggcctatctagagtaactttgcttacaattataactacctttggaaaaaaaaaggatttgaggtgcattagacatttaaattgctccctgatctctttgtacttttagtaattggacaaagaacttcacatattaataaatcagttgacataattagtctacttcttttaaggcaaatgtataaacagcctcttggtttcttattttgtggaaaatttcaaccaaacagctcaggacatgcttttcttaggataggttgtcttaatttagtgtgagaaatacctgtgtcaagtaaagagatggatgccaaaaaaaaaaaaaaaaaaactgctgttataaaaatgaagagagaaattgtatacttaaagatgtacttgattcatttttttgttagcaaacttttattataataaaggatacatgccttgtagaaaagtctccttctttatatgaagaagcatagtgttcttaataacaccaagtaagaagtgatttattgaacttattcgttaactctgatctgcttctgtttggggaaacaaataacagccttacatttaaaaagggaaaccctacagatttcccatgaatgaagaagctgtgaaaagttcataatagttgcagagagcataccaaaaaaataaaatatttaattcctaaactttaaaatatttatccactgtaataagagcaatacaatatttagtctgacttggaactgcttatgcaaacctcgtagggatggaatgaaatgtacactgtttttgcgttgcattataatggaaaacatagaagcaaggcagaaaatgtgtgtttgcattaaagatgactcggtactgtgagcattaagtgttgcagtagcagcaagttctacatgttatattagcaaggaaggatggcttccctcacagcttctgtctgctgctatacactgctgcagtcaacaaatgagcaattacctatcagttactagatggttttaatagtctaagcaatgtctacacaatcagataggatagttaacatatag

SEQ ID NO: 78680 - DNA, 1059 bp, Homo sapiens
atccttatttggatttgtcatataaggacatttgactctgtttttgaaaactgtcactaaataacaaaaagggcttattatttgaaattgcattcagaacagtataaatatagacagttgcatagaaagaagcatggcttgaataaaaaattatattggcctaccaacagaaaaaattgaggagagatgaaaaaagcctatttcactgttttagacgaatgctttttctaagttgttccatcctttttgctccaatgttatattcaataaatttgacccatttattcttttcaacagcccaaaccatacttgttataattttattataatggaagccaccaagggtgggaaagattttaatgaatgatgcttgctatggttgattaaaattgacttattcttcagtgttgacaaaatactggagtatccactgctcgcacaacttgatagttttaattttctacttctgttttataaaggtggactatgcgccctcattaatggctcggcttatactggagaggtttctacaggaacacgaggaaactccacgtgagttacccttttttcctaatggtactcttttactcccttccccaatttaaaaataatttacacagcatttcaagtcacttaatgagagccagattccaaaacagctatcatgaacagttaatgacaattaaatgcaatataaaagaccacccacaacttaaatactcttcagaataatgctctcttctttgtctaaattccacactcaacctctccattgagctaaatagacaatgtgtatcaaactaaaaaattgattcatcttcgtatatagaataagatacatcatttgaaaaaccattgtcaggaactggctctaaaagaaacattcatcctttttattttaattcagcaagaccggagaaatactacttccaaatgcaaaggtgaattccactggtcttcctacaagaaaataaaaaagaaaaaaagaaaagaatagagctacagaaggaggttcaagcctaaattaatttgccactgaaaaaatacattttgttattt

SEQ ID NO: 78681 - DNA, 1050 bp, Homo sapiens
tgccagtcaaaaatgctgtattaaaatatttctctggacagaaaatggtttcaaaaatcttttatgattatatgacaaaccataattgagggtttatcatttcaaaaagtgacagaaaatgttaaaattaatgccaggttatagaagtcaattaatttgctgatggtgctaggttatcttcctttcttttcttcgtctttttcattctctctttttccttccttttcttttttttttttttttttcttaaagaactttaagttactgtggcttatattctgacactttcttccccttcagagcatgggcctggctggcctttggcaatgaaattcaatgcacatggctccgcagtcaaatcatcaaatttccctgtgtgtatattagagttttgtaatgtgtttccattatgaaacaatgcggggataattgtctttggtagcaattagctaacaggtttgttcagtgctattggcagaggcatccatcacccccttccctgaccacactttttgtctagtgtggactatggagatcaatagaattctatataggggaaatcacctcagctttaatgagctgcaagtctcagtcttggcttgtatttttaattttttcctcttaaaactagaaatcaggcaaaaaaatcctattcttttgggggtggattgtactgtgtatttactattactttcattagatcaatgctcagttttaaattgtttttacttctgtaaaaaggtatagctaatagcatgggacatataagccatgtaattttgataacatatactttaggaatatccactttaaggagtactgttgggtttctcacgcgataatttttagggtatgatatatacattctgtctagtgtctcagtagttaaaaagaaacctgagtggctcttgtgatgacaaacaattttgttgtacacattttgttattgcccctgattaaataatgttctatagccttttagactacttttgtgttgtactgttgcttagcctcacaacaaaactagtgtactgataggatacgtatttt

SEQ ID NO: 78682 - DNA, 1021 bp, Homo sapiens
gagtaagtttcacactaataatggtgactttctactaggagcattatagaaaatctctgttaatgaaaactctaagtatagaaaactgttaatgaaaattttatgagtagacatgataatggaaatatccttaaacaggataaaattgtctaaatgttcagtccttttatgaaaatcaatcctctataacttataaggtgaacactattattaatagggaggttgacattataataaaattgtaaatcgaccatgtttactgctactgagtctgaatataaggcagattaaaatttctgaagaaccattgagaaaatacctcaatcctcattataaactgatgtttttgcttatgtcctggagattttatacagcttacctttgctttctttcatgttgctgtttaatctttctggctttgggatagaccgaggttaatagtcacatcatttgaaactgagccatacagttgaatgtaatttgccgtaaagatgaatgttttgtagagttcctctttattttcttaagggaatgtgcttttcaacataatgtgtataatccctgcctccacacacacaccagaatgggattatgatttccctgatgggattactaaattttgttcttactttttgaatgagcttaattttagttttcaaacaaactggtttataccttttgccagtatgctaggccatcaaaagatggtacaatcatcttcaaaacctgagtttcagtatgctaggccatcaaaagatggtacaatcatcttcaaaacctgagtttaatagaagaaagtatgagaaggcatccagtaggtgtttagatctgattagactttgagtggtccctttctaacaataagaggatattaattcctttggaattcatgttcttcattcctctgcagattgtcaagagctatttgaatcctaactatattccaggcactatgttaggtgctacagtggatggaagaaaggataaaactcatcaaagaactcatagtttagtggaatgt

SEQ ID NO: 78683 - DNA, 1038 bp, Homo sapiens
aaaccgaaggagagtactattacagaaatagctaaatcaactctcatttatttaaaagtacttttaaatagatttggtattagttataaataacttgcagctcactttgtaatagatcatgacacagaactatgtgttgttgaccgcagttaagaaccaaggttgaagatgatccagcaacactgtaaaatgtgttgaagtaaggtaattctgagtgtagtgagaaagaccaactaataagctattgcattatctttagcaaacttcaggtctgaactacggtttacaatgaaagtaataaaggaaataaagtctgtagacatggcaatttactggatactggtagtgaggaagtaaaaggaacccaggatgcatctgagatttaaaagttgggtatctcatgctaagaggaataagagttgctttgaatgagagaagggaaaaaatggaattcacttcaggctatgaaattcaggttccagaccacagtttatagaagagttttataaatgtggaagtgtgggcttctttctcagagccccatatttagatttgtgaatcatgtataaacggaatggtttttccaagcaatttcaaataggaggaagcactccgcattctacatgtgaaccctcatttgattcttaattattcaagtgtttatttaatccacaaaattattaatgattaaattttcatttgtatacctacatatttcaagaatgaataccttattgagaagtgaatacattgagcttctctagctcattctagagggtaatgcttccaactgttcgcaagcctcctgtttattgatcacactttttttttttgagacggagtctcgctctgtcgccaggctggagtgcagtggcacattctcagctcactgcaagctctgcctcccgggttcacgccattctcctgcctcagcctcccaagtagctgggattacaggcgcccaccaccacgcttggctaattttttgtgtttttaatagagacggggtttcaccatgttagccaggatggtctcgat

SEQ ID NO: 78684 - DNA, 1066 bp, Homo sapiens
tgatatacggattttaattatatagtacactgttaattgtacaactatttttagatcaggctactaacttgttcatttaaatgaatagctcatttgcttgagggaccaaaatgtaagctttcttgaaaactcaagagaatcttgaaaccgctgcaaaaatatgttaacctggtaggatatttttatggtatttgtctctccttaaaatgaagctgacctgtacctcgccttcgttgcataggttgtttgacacatagaattttgactttttttttggtacctaataaagtgcaagaaagatagatctctgtgttggataatgggcagaaattgaatagcggtgttttccttgaaagttgttgagatttttctcaggagaattagacgaaagttatttctgaatagaagcactgtccctggctgtaattagtcacatgggtttagttcccaggaaatgtttctttcagcatactaaaagtgtttgaattttcatatcgtttaacatgccttgaaatttcgcctctgctcacctacctatccctctcctacaatttaagatataaagtttaggttgttctttcccgttagattcgggagcctgccgaaaaagaacacacttttgtgccccctttccttgaatacttccaatcctgggcaacatttttaatgacttagaattaactgctttctaattatgcactgaggcagacaccatgatgttgtatgggcctttgccagcaattggaaacacaagagacataaatgagcaggctaccagagggaattattagagaggcttcttgaagtcatcaacttgcaaagcagagacttgcccttgtctcattgaataatacagacttggtcataccagtagccactgtggtatcacctttagaagcatccagttttctttcttttcatagactataagacatttgatctcatcaggctttctggataccccagtaaatttcggtaggtctttgctgccatgaactttctcctctgatcttgaatgggagttttcgctttacctgtatctcacctctcatgttgggccccagtg

SEQ ID NO: 78685 - DNA, 1660 bp, Homo sapiens
ttaaaacaactgacttcctctggcaagtttcctttcatttgaatagtgtttattcaacatattcagacttttaaaaaaaagtttattgcctatgattcttaatcctgataagcataccactgttctaaaatttatattgtgaggaaaattatgtcatcagtttattttttcttttgatatttcccttttttggctgaaaataaatgactacttttcttatgtcacggagtattgtcccttttctttttttaaaaaacagcctttgttttattattttagccaggagtttgcatatagtttgatatgagatctgtaatttttataggatagcgttcttagtcatggccacttacatattagtgatctcttcctcacatgggttcatgagagttggaatgtaccatgactggggtccatacagagaaggtgctcctattttcttaggcctctgctggcattatgggcaacataaaagaatgtgtctgccattaccatgtggtgactcgagtggcaggccagagagagttccctctagaaggtaatgaaaggtatggacaactgctttggtcccctctgactggccaggccttagaattaggttgggaatactgagtttcccaggcacattatttttttaatactattgctgctgtaatcttttcttttataagaagatgattcattgtttcctattcccgatatttttaccacttatcagtggtaattgctttcagaaataattgagtccaaccctatggtttgtatgaagtaaatacctaagtttgatttgattcttactattacttgaacttagcaaaatagtgctttagctgtcttctctagagaccacacaagaacactttatttcggtagtcagcttaaataatattttcactttctacagatagcaatgggcattaaacttgggaagctatgtaacttgccaaggttgcagagccagttgtagagatagggctggataggatagctgggtgatgctcttttggagattccatatgaccttttcacttgcagtgcaaacacgtgttcacaaatggctaagtacataagtgttgctataagcatgtagttatatgactaacagtgggcagtaattaaaataatcatgcttcattttttctttgcagacccaatactatttttaagtgaataagatgtaatttccttatttatttccacagtatttactaacatttttttctttttttttttgagacagagtctcgctccgttgcccaggctggagtgcagtggctcgatcactgctcactgcaacctccgcctcccgggttcatgccattctcctgcctcagcctcccgagtagctgggactacaggcgcccaccaccacaccctgctaattttttgcatttttagtagagacggggtttcaccttgttagccaggatggtcttgatctcctgacctcaagatccacccgcctcggcctcccaaagtgctgggattacagacgtgagccaccgcgcctggccactaacatttatcttatgtatcagtgttcttatagtatagagcttgataaagaacataatcttaaaagaaaacaagttagacccgaaattatctcagaacttgaatgatgataattagataattattcagtatgcattttaatttg

SEQ ID NO: 78686 - DNA, 1029 bp, Homo sapiens
aattagatttaaagtgttgtgacaggtaaatttagatagatcattttaaagccaactatggaaaaaatattggtaaataaacagaccactaatcttagtctttcttgtttacatgtgtacaccttgaattttgttgcagagatgttgcaaacatgtttaatttattttgatcctttgctaagctgaagtaaaatctctctctctctctgttggcttctaatttggactgcattcaaaagacaaatattctcatcttttaatatattaacccttcttaatttaagaattatgactttccctaaaatattttaccccattctaaatttgccacacattgtgctctatatttgttttataaaatgcatattttatctttactcttaacaattgaagggaaaaataaattactaattctttcttaaatgtccttggttcataactacatcctgagcagttgttatggcacaagatctagccaggaactataggaaagaaaaacagaagtgttcttatcattgaagatttgaatgtactgataggagttcatcctatcttttaaacttatccaatttgtacttccacacataagtatattgtattaagacaggtcaaagttgaataaatgactttagtttctccaactagaaaatatttttcatgtgcatatttattcatttattccacaaataagttactaagttggatactgttttagacactagataagtcagatgaagtgtctgctttcatggggttatggtccagtagggagacaagctaccaatgaacacagataatttctaacagtttctgagagtccatgtaattcttcccttcattatttattcattcttttcaattaacttttgttgtgttctctgcatgccaggaactacactagttagtacaaagtgattgattataagcactctgtgctcccagtgctcatagtcaagcaccgtattgcatgtgtgatccaatgagaatgcagttttctctctgatccagtgagaatccagtgagaatgca

SEQ ID NO: 78687 - DNA, 1054 bp, Homo sapiens
ctgccacagccactgtctggtgcaaattcttgttaagtctggcctaataagaatggttctggagatattttattctttccagtgaatgtttccctgttagtagatgctaacaattattttgagtgacacctgggaggcatttgctgtgcccctgcctcaccctcgcccccatgtttggacaaaccagcaaattttacaggggtgcttgtgtagcatttgtgtattactctgtgggactctgagagagtataatctgtaaagccaaataggcttagtgaaggatgtcccttgtcgtaagaaattaggatctttgtttctaagagttcatctgcccctgctgctttattcctcacctgaagcaataatactctgctggggaggtgattatgatgtgacaaacaggggattatgacttcaggtgaaggacaggcagcaggagcagatgagatttagaataccaagactgtgtgtacacgcagatgtcagtggcagagagtaagagaccagaaatggaacatacgattatgtaggctgaagggaatggagatggctgggtatttcataaggaatccaccatttaaattcttgtctatccgaaggttaaaaatatgatgctgtttttagagtaacaggaacatgaaattgagggtgggaggtgggggatttgggctctgttctcccctttctgaagagattgtcatggtgagagactttcttacttactccccttattgaatgtgcttgtgcatgcttctccctggcactgagaaaaggaccataaatgcatatgctgctggaagatgaaatgctttctggatgtttgttttcttatcggctgaatttgagattcagctccctggaactttgaagaaaggttgttgtgaccacttacgatggtgtgctccctgctcctggccctccctcaccactgctcttggtagttagctcatgtccacgggtcatctgcttttgggtcactaatgatttattggaactattttggttgtaagtggcagaaatccaatcaaactagattatatacacaaaaaaggag

SEQ ID NO: 78688 - DNA, 1077 bp, Homo sapiens
tttctcctcaataaaatggactgagtaaaaccttttttgccctattactctgaagatcagttatttaatatatgcaaagcactttcacagtgcctggcagtcaaaaaaatattagttcccctctgcctgtttttctgtataccactgatgaagtttagaagtcttccgactagacatttttaattgccttctttgccacataaactactcagctaatttcagcactcagcttggctgacatctctttgagaaaccttcctgccttctaggattgggtttgatgcgcctcctgcgttttgctaataatttcgtaacatctatcaaacatgtcatcgcttgtttacttgtcaacctcctccaattaatgttgagttccatcttatctactggttttatccatctttggttgtccagaatctggcatatagtaggtgatagtagatatttattgattgtatttactgatgtctgacagacaataatgttttgaatcggccattgaggaatttgtcaggcattgtgacattaagccttagtacaatcaaatttttttctttgagaattcaactcgaagtatagtgaggaaaatgcctgatttttctgaaaaacttttacgcacttttcaaatgtgtagacttttgcagtcctatttcatgaaatagagcataaatgtatttaacataaagatttttaaaaacagaaaataactgagaactaaatgacaaatgcactttataaaggtttttagataaatatgtataatcttatgttggtcggttgctttcccaaaacttcagacagttctctcatttgaaatttgacatagaataccgtgaaaattctaagcagaggataaactctagtttctttaagggttgcatgaaactgggcctggagcaagagtacaaatggagccttatatactatgtgtctaaatatgtaaagttacatattaagttaacagaccttaaataaaatatattctattctacatgaagagctgaaagtttagaattgcataagaattcctagattccttggatttccaggctccgtgtgtcagtgcagggagaggtg

SEQ ID NO: 78689 - DNA, 1024 bp, Homo sapiens
atagagtactttgagaaaaatgacttctcataatggttataatggataagtatcattttttcagcatgttgaatgtgaataacaagacttttctaagtgaggaattcatattttctgccatcattcattggttttaacaaaactgagcaaagtatagaaatgttatcttaggcctttagagtgatattcgtaataaggagacaattgttgagaaactagaatgacttaaatcaaagaaaacagatctataagggaatgtcaatgaattatagtttctctggctagaaagacatctaaatgattactcttttcaagcatatgtaagatttttacaagaggggtatattgaccagtttcacaaatccaggggaccagacaattgttgagagaatgacttcgtgttgacacccactatgacaaagttaatctgagtcatgtatagctcagaaatcttacaccaaaccaaaccaacaagcaaaggattgagtggccgttctaggaatggaaacacaccattatgatcatccagagagggtaagggaaaaataaatgagagtttaccaatatcgggagtatagttattgtcaagaacccaagaatacagagtctatttctgaggctaattctagaataatggagatcaggtcaaaattgatactaaaaaggcttggagtctagcttaatggttctcaaagtttactgtgtgttaaaatcacatgcgggttgtttttaaaatattgatgttggctttaccctattttaattggtgtgcagtgcagcctggactctgggatttttgttgttgttgttctgtttgaaaactatgatgaggttagtctgtatctaacattgaagtcagactcttctttaccgagcctcaacttgctagctagccgtagcattcttagcttatctgcttccaaacagagtcttcatgaaatagttgctttatgaagaaatacaagtccaggtcagcaaacatttacaggcactgtgttaggcagtagggactcagcccctgcct

SEQ ID NO: 78690 - DNA, 1193 bp, Homo sapiens
attcaagtatttcagtggttttgtttccaaatgtgataactgtctactaaatgaaattaagatacttttgtccaaggtaaatattttaatggcatacccaaaattaggactgaaattttgaagtatttgttttagctcttcacctgttttactcatatcactgcacttttcagtaacccctagacatcatacatctttgtttgaatcatttctcttcctattttctccaccatttcaaatggtgtcatgtcactgggagctaatgcccactatcagctgagcacattcagcttctgtctacattaccactcggcttcagttccaatttcctggtattcctcattcagatcagacctcttagatggtgtgctatgagaactgacagccccccatcctgctctgcttgcccagggcctagtcacacacactccactgtgccaagcgtggccacccccacacacctttctgttcaggattttgtataacttttaattgacatttatgtctgacattgtagatgtacttctcattgtagaacatttatctacataggaatagttgaaaactgcttttcacttaactattacatggattaatgttacttaacaatgacaggtttccctgctgaaactcaagtgggcagatagtttcttgtttctaaccattctccatctaacattgcaacccaccactcagcactattctcactaattgcttgagtatacagcaaatccatttgaaatgatagagagagggttaagtcctgagtacagtataaactgtagtagagcccagtataaggcatttttttttctatatatgaaacaatcttttaacagggtttatcagcgacttaatttctatacatatctttcctctaaattcaccccagctacacaagtataaatttacccaattgtttctaatataatggcattctatatatatctttccctctgaaagcacagaacaaagttctgttgttttgccaggttcctggccttcttttataaattcttagtaaaatttctttcattgtggtgagaaaaaaatatattctatcaattattttaaaaagcaataattcattatagttgatcataaatgtcaggaagcaaagacccagctgaagcatttttgtcactaatcatgctgtttttcttctaattagttaatttacattttgcaaatta

SEQ ID NO: 78691 - DNA, 1248 bp, Homo sapiens
aagacaacatcatagctttaactgacccatatttgtatctgccaaatttaagttaattagaaatgtagacgctgtttatctgtcagaaaagctcatcttttttcttaaaaaaaaaaaaaaaagaaaaaagtagacacactttttccccctcagcatttatcatctaaataatagtcttgccaagatggcagcctcataataaactcttttcagtggagtgatgggtaatgaagcttgcttgtgaaggcagcgaaaaatgttgtctggccaaatgcatgaatatgatggctagagaatcagtggactttctcagtcatcaatctttttagtagcctcttatacatctgaatattttgatagatgatctaataattgagttatctatctttctaaatatcagagttgcataaaaattattctcacatgctactgaatattaaatatattaggcatccagtaaatttttcataaaagggccaaaaggtgaaacattgttgttattctataaatatcttttaatatattgagtgttgagccctctgacatatccagctcttaactctctctgtgagaagtaggtatatattttaaaaagagaacatacctattataagtaggacacgtaatactttggccggtaaaaagtagaccctggtacatgtgtagatacaactcagtattgtaaaatggaatacacttgttggtctaacaccagccacacatttaatatgacacaaattttccatacaagaagcacagattatatgcatgctaagaattactgtatggctttggtgtctccatgattttgagaggaagatgatcctaccaaaaggaaaaacaaagctcccaagtattcttatgatacacaggtagttctttcccctcatatggctttgtatgtggagggaggaattgtttttgtttttttgttttttgtcatgcatcactctattaaaagcttatcaacaagtatgcttcactggaattgaaaaagtgacaaggaaaattggcaggaaacagatgacttagaagtgggcttctcccacccccctaccattcacagttcttcaaggtgaccttacagtgatgacttcccagtaaccaacattaaaatagttctgccctggaagagcagacatttgtttgtgggtctgacgggttaccaatcctctgcatcttgaaaggcactcaaatgagcagggccttgtaaattggatttctattagccagccctgatgatagctc

SEQ ID NO: 78692 - DNA, 1531 bp, Homo sapiens
tttttcttcttacgacgaagtgttgctctgtcaccagactggagtgcagtggcacaatctcggctcactgcaacctgcacctcccaggtacaagcaattcccctgcctcagcctcccgagtagctgggactatagacgcgtgccaccacgttcagctaattttttctattttagtagagacggggtttcaccatgttagccaggatgatctcagtctcctgacctcaggtgatcctcctgcctcagcctcccaaagtgctcagataacaggcgtgagccaccacgcctagccaaacaattattttttaatggttttcaactggaaaagcatttggaatgaaaatcagcaacacaatggccagaaacaaaaatggcaaaaatgtcttaaaccttgttttctatttaattcctaacaatgatttcatcttacggttgtgctatttataaaatttgagatgatagacttttttctctttatttttctggattgaaaataataattcaggacagtaccaattgtggaaatatctctgtgggttacactgaggaactagtactttctagtaggtggatcttttcttggtttcgagactctccataatttggttggaaaaaaatgatattttattgtaagagctatcactgagaattttaaattcttagatatctatttaaaattatacatttaaaaccatttgaaatgtccatattggggaggttttaggggagggaatagtcttttcttaatcaaagtagcaaacatctgtgttctttctagcctgtcttttgattagcatggcctcatccatcactggtctttgatatgaacaccaagaagtcgtgtccttttgttttaaatgataaatatgcctttgtcatgaatactcataggcaacccaggatttacatctgaattgtcaaagtgtaactgcccagctcctgtgatgagtgacattattagtgaaataaagaagtttttaatttgtcatggataggccttaatgagactatgtgggttgtggtgctagaaaaagttgtccttcccccactatttttctaagatttgtcatttatcaacaagaggcaatctgccgcaggaggttctctgtgaacatttttactttagtgccattagtctgtctctaggtttcattatttaggctagatgactggtagtacttatcaaaactaatgctatctgaagtacccaggctcctgttggtcaaacaaccagcatcatgatttgttctgtcaagttattattatcaaagacagtgtttttttaaactttagctttatttcaaggtctatgtcaattatattttctaaatacatttctttgacatctttgttcccactaacccacatctactcacatgtatttatgtatgtgctatttatataaatacattgacctattcatatctacctatacaatttcatgttaatcatcaaaaccctcagggtgtccaatttaactgttgtatttgactcttcaactaagaaattaggaccattaaaattaaaaata

SEQ ID NO: 78693 - DNA, 1035 bp, Homo sapiens
cctttaatttagcatgttgggaatttacatgaaagttaagctatatattttagtttgatttagcatctctccataaaaatcattaaaatggttcaatcagtataaaagcctcacttaaattatattgtatttcaggtcatatccctcaccccacaaatgtattaatctttgattttcagttttgattgtttcaaaactaaactttagcactcattttttgaacaatatttcttgagtgccaaaaatatatattttaaggcaaaaaaatacatgattaacccttattatcaggcttgctcatcgaattcttttttctaatttttagtatttcctaaatcacctgtttcatagaaaatgaagtcttgttcatatttgtttcccaaaagaaaacaaacgcctggcaactctaaagcccaaccccttacattaatggagatttttgtactgtaatgtaagtgtctgagtttttgagaccctaaggctttcacccaacttaaagacaatgatgccagtgagcttctgtccagagttaatcagctgcagaatttgtaaactgcacatgtgtcaaagttgaaaatgttagcactctaatagaagcttgaaaaggttagatctgataaaagccatcagcagttaaagaaagtgatttatgggaatgtaatgacacaaaatgcctcatttatcactcatatatagataggttaagcttcctgtgtcatacttttaaaaacttgaccacttcgaattgtcaaaataggtacttaattgcccttcatccttttcattttgaatttatttcatttgaaattggtaatttcatctacgattactttactgtcattcacttcatatggttccatttaaagtcattcatatttaagattttcaaaaactgcatcaccgatctttttgaagttttattagctaaagctgttgcaaagaaagattaagccagtcttatatatgctaatttacacttttatgtaacacaaataccatggagatatgttcaagtttcattttctctttcctaac

SEQ ID NO: 78694 - DNA, 1069 bp, Homo sapiens
tgatccctaaaaatgggggcaaaagccaaagttaagagacatgccaaattgtatttctttcccaggattattaaaaaacaattctcaattatttcttatacattctaaggaagatatttataaacttgggatttctaaacatttattggcttatttgatgtcatttagtttatgcataaatatcttaatgctattaaataaaaactattttacaaacttcgttacgtcacagtagtattgtaaaacacaaaattttatgaatgattatcacagttttagactccttaatgtgacaggtagacttgctgaagggcttcatggagatctttcagaacatgaagtaggcagaaatgtcccaggacttcctttgcccctctatagccaaaaaataaatttgagaagtttggcaggtttcactttgtcagcccaatgctgcactttcttcaacagtgacgttccaaattcaattgaaaaagaagtcagaacagtttcttcaacaagacaaaggcacaaaaaaaatttacagggaaagggaggaactgtactaggaaaaaaacttaagagacatcctaaccaaatgcagttgatcctgtttgttgcaccttgattccatcagactacaaaaaaaaaatcacattttttagatagtcattgaaagttgaatatgaattattgtgaattcttaacacctagaaattattaattttcttaggcatgacaatgccattgtggcattatgtatgaaattgtgtcaaaaaatgtcctttctttgaaaaagagatacatacaaaaatatgtaagggtagattgagttggtgtctgagatttcctctaaatatttcaataaaataaatatataagttcatagggaaagaaagatttaaagagggatatagaatctggaagatggatatctgaggtgagggatctctctgctttgtatacattgaaattgtttgcaaaaaataaaaaaagtcaggggaattatctaaaagtaccattttaaatataaaattataacatcctatattttctagtattttcttatcaccagtataagtttttaagt

SEQ ID NO: 78695 - DNA, 1048 bp, Homo sapiens
tttaattcctaaatagtagcacaaatcatttttttgtttaaaatgattgttgatgtataacttcagccttatgtttctggcaaatgaattagagagtttataaatcttatattttaagctttgttttttatcactgtttacaaaagcattttcttgagttacagatataatttcccaacttaaggactattaaactaaatgtatttctagatgcatctttgttcagacattttatatacatatatacatttaaattaaaatcttgatttttttgtatgatttttaaaacctgcatttacttggcactttaagcacatatgcagtattttcatctttaagcaacaacaagaaaacctgaaaatctgagactctcagaatatacattgatttggagaaaatgtgttcttaatatgaatttatcatttactcaacttatattaaaggttagttagccaaatgtattgtatttttttttcctttttgtgaatcgtgtacatacattaagacaatacaagaagaaccatttcagcttaaccttccagagattaatcatttagtttgaaggagttctgttgttattttttaaatctgtgattagaaaaaatcatgtgtttatataatcatgggcatcaaaattgtctcaatctatgaatcttagcagtttgctcttgtaacaactatgaggaaatgtattagaatgccttaattacagagcaagaaaaagagaaggcacagtcttttcgcatatgatctttcaattgttcagcaaaggataaagaaggcattcaagcgtggtttcaagaactgtcagcaataagaaaatgcaaggtactttgtagggccttcaagacctttctggaaaatagatttaattaaaaagtaaaatagacttttcaaagaaatcttaaaaatgttataaaacttcatgttaatatattaataggggtattgtcttcttatcctagatgagaaaaagtcatccatgaagctattatatttgattcatacaacagtggagcttataaatatttttctttaggtttgattt

SEQ ID NO: 78696 - DNA, 1020 bp, Homo sapiens
gccacttcttgcagtggttccctatgacccagagtaagagccaaaatcagccttcatggccctagatcgttctgccccagttattgttctgacctcatctcctaccacacactccccgcttacccactctgcaacagccattctggcctctttgctcttcctcaaacttgtcaagtacgttgctgccccaggccttttgtgctgactccctgttacatgaagcactgtcctgaggtacatacgtagctcactgtccaaagtcagacacatcaccaccttctcagacctaatctgacccccccaacagcctacagctttcttttttgttccatgtttctccataatccttacctcctaaaatgatctataatatccctctgttttgtttgccccactaggataaaagtttcacaaggacagggatttttgtctgttttgtttacccctgtatcactaggattaaagtaataagagcctattatgtgccaggcactgaatggtttattttgaataggcataatgtatttttaaaatgtaaatatcatgtaccaatgttaatagcacaaactgctaatgttacaacatttgatgttcccaaagtttctgagacttggaaggaatgttacaaatctaatatatatgccatggaaaataaacaatcatcagtctttgagttttgcggtttgaagaaaacaaggctgggtgcagtggctcatgcctataatcccaacactttgggaggccaaggtgggaagctgaattgcagccagggatttgagactagctgggcaacatagcaagaccctgtttcaacaacaacaaaaaacaaaaacaaatttaaaaagccagacatagtggcatgtgcctgtagttccagctagttgggagactgaggtggaaagatcccttaagcccaggagtttgagcatacagtgaacagtgatggtaaccctgtactgaagcctaggcaatagagtgaaagcctgtctctaaatgcaaaacaaaacaaaacaaaacaaa

SEQ ID NO: 78697 - DNA, 1049 bp, Homo sapiens
ataccaacttaaagaaaaattattggtattgttttatatgttatcagtatgtttggagatcgtgttacaatatacttataaagccatttataggaaatgcacactgtgacacgtattttaaccattactggcaagtatcaaacttcaaaattaattatgcaaatattccaaatgttagcaagtttaaagtaaagcatgagatgatgtcttggatccaactgaaaataagtatgtattctcctattaccattttgattactgaaaattatacaaaaaccatgttattgaatttaaaagatccacagtgttggccatctctgcacatatcacatccaaaaaatttgaaaaattagtattctgaatgaaatatacaaagttttattctttttttaaactctgattgaatatgtatctaaaatgtcatatttactacaggaatccacattgcttagcaaaaacaacaaatttattttgtactggaaaagggcttgcccgaaagtttcactgaatatggtttgttgaaaatgctctccaaacaaaagttggggggttgaataattttggaaaatgttgcctactacattagaatattaacggctctgagaaattctgtgtcaaggaaacatgttttcattgtttaagcctacatttcttaaacttatttgatgaaggacctcttttttgcatctaatacctgtgtcccctttggaatgccctcttggactctcttgtgtggacgataatcacatcagtggtgggatatgagtgaggtagatgtggggggtggggagtaccacttttaagctacgtaagaggagatagtaaatatacttaggcatcctaactaaccatacctgtcataactgaaaagcccaaatgacatcaccttagatccgagattatgcagggaccagacagataacagaaaggagtggaaactgtggtgataccgagagatggtagcacttctacgtgaaacagccctgctcagctcatctcatgtggctatggagatataatgggcccactatggtcaaatctcgtaattc

SEQ ID NO: 78698 - DNA, 1126 bp, Homo sapiens
ccatctccaaaaaaaaagaatactacttatgaaaaattgttcaaatcataggacacagaaatatatacaaaaaacagtttttagtacaattagagcgaaaggaacaggatccaggtaaagaaaagcttcctgtgacaccacagacttcagtgtctctggggcagcgctgatagttttgttgagcaaattgctaacataattcatttgatatgtggcagtattattaagctaccatgtagaagaccaattagaggtgtttggtttgtggggctctttgcttttggaagtttgttttgtttgtctgtattggggagtggaaatagtagagagaaagaggaaggaggccaagtgggaagttattgctgaaatacaagtgcaaaatagaaaaggaacaaaaacagatacatggaagtggagaaaatatatatgggatattaaggacatgtattgtcctcttctgttaaatttaggttggaaagaaaggtatttatgataggagtagttacattccttatattcagtaccatttaaatcatttgcattgtttagtgtccaacttatttgcaccaggaattgaactgagtgcttctgagttctggtgtgctatgttctctgttttaatgcttcatctatttcaaaaacaaaaacaaaacaaaactgttacctgcatatcatacacgtatatgcatatcatatataaatatatggttccacacacacacacacacacacacacacactgctactttgtgagtaaaagaaaacaaggtatcattaaaagttggaaacgtgtctttttttttttttttttttttttttgagacagggtctcactctgttgcccaggactatggctcactgcagcattcgcgtccccctcttccaggctcaagtgaccctcccacctcagtctcccaagtagctgggactgcaggtgcatgccaccatgcccagctaatttttctatgttttgtagagatgggatctcacaatgttcctcaggctggtgtggaactcctgggctcagcgattcttctgcctcagccacccaaagtgctggaattacaggagcgaggaaacattttctaccaggaatctttatgaaatgtgtttgtaaataacaaaa

SEQ ID NO: 78699 - DNA, 1049 bp, Homo sapiens
agtggctgctgaacaatgaaaacacatagacacatgggtgggggaacaacacacactggagcctgttgggggtgcaggggagggagagcatcaggaagaatagctaatggatgctgggcttaatacttaggtgattggtcgataggtgcagcaaaccaccatggcacacgtttacctatgtaacaaacctgcacatcctgtacatgtaccccagaactcgaaataaaagttgatgaataaaaatgatttaccttcatttaaatagcttagattctgttgcctataaatatagggcactaaatttttatttatgcaggataactgtcctggttatgccaaagatatattaaatacaatgtttaattgatgactcaaaacataccttaagtttatctttctagaactttgtatttcagaagataaagtagatgaggctgcatctgtctgcactgactttctcctcccaatgacaaagaacgctatctgttttgaagtgacttttaatttgttgaatattggtggtgagtggaaaatgaatgtaaatgaaatatcatattgctggagcaggtacaagggatgtgaatgaaagcttcctgttttatgggctgctgagaggtgatagctcttaaaaagcagtctgctaagtgatcccaagttaatgcaaattaacagttgttttctttcagaactgtgtgactgaataaacatttaccatttgtttcatttctactcatctcttgaaacagttgctacaggtcttaatagtaagactcgaaacatataatgtattagccttggcacatcaaaatattgttcatcttccaaacttgagatattccagtttggcttctcactgagtttataatgttctgagggtatgtatctaaaaacgcatcttactaatctcctggaattgatttttttaaaaaagtccctgtaacttgtcactattcccagcttaaacatggtctgtcaattgtgagattgatgggcattgtggtacatttcaatcttaggaggggcctgaataagaaatttaaactattaaa

SEQ ID NO: 78700 - DNA, 1721 bp, Homo sapiens
cttccattgaaatttttatcaatggtatttgcatagacaaaatggaatcaaactattgacatgtacttttttattaaaaaaaaaaaaaagcaaatttatgtgaatggtttgtcagtggagataatttagccaaaggcacctgtgttctctaaggactctgcctgaaaagacttttagggggagcttggtgaattttttgtctttaaaataaagctgtttttgaggtataagagaagcttggtttttgaaatggcacaatgaataacaaaagccccttttcaccccccagaaaaggactaaaaagaacatttgttagactcttggggaagaattgtgctgttaacatgaaagtctagatacaagaaaagggaaaattggaagaagaggaggagcaggtaatactggagaaatgctggaccctgaaagcaacttgttttgcaaagatgattacactcaagtttgggttcaaaacgtaagaaagcatgcttatagtgaataaaacagctagaagataaaacttggcagaatatcctgccgttttgtacagacttatgcgtgggtatgcatgtgtttctctctccattccttcctcttctcccacagtggccctctaagtatattctggcagacaagtggccaataaccagtcttcataatggaggtcaggtgatttgtatttctggatttttagaatagacagggcttatcattgatttgaagatggaaagtacactatttcactaccccctgtcatttagtggatgtggttcttgagtatgtccagaattataaggctgttaatgtgtcttgagccctgacctaaactgtagatgagaaggctctttaaatattaaaatggagaacaaacaggattgcttatgcagtaggaaagtgcacagtattcagaagtcaggcctaatctttttatggggcagctattgggcatgctacatttctgtccaaaatataactcttttgaaaactccctctttaacaaaaatactaagttgatggtctctcttaaaaaaaaaaaaaaaaaaaaggccaagtaagggaatatataacttcagagttatcaaatatatttatcccccttacatgtcaaagtttaagtgctgtgttttgtatatacagtcatcatgatatttgaaaaggccataaagaaaaacaattatataattgtttttaaagaacgcagaagcaaggataaaaaggcctttagaaactagagaacagtattaacaattatagtacctgaagtcaagctgcaaaattctgtcctaattattggggatgattaattaagcgtaaagttacacgccttgaaagaatttcagaattatttttctttgatttttctaccaaaaaaaaggcccaccccatcattttctattttagcagtttccacaacttaaacattaaattcttattgtttgatttctgttatattagtagtgtgtgttttgcaattctaatcttcacgtttttctttctttatcactgaagtaggccttttgaagctgggaaatttttcatagcaatattgacagtgttcacatttgcatgatgacagccaaggaatggagcagtaatttttgaaattgcagaagtatttagaacactgataaaagctgaaatatatttttgatggattgaagttaagcatacatgatttttcctgctgtcaaaaggctctgaatttagtgaatatttgcctgctg

SEQ ID NO: 78701 - DNA, 1033 bp, Homo sapiens
ttaccagcccacaatcttgttttaaaatatatggttgctgactggcacatttggcagtaggtttttgtttttgtttttgttttcaaatcatatatctaatttcagtgtggagattatttttcaactccctgtttctctcatatttcatatgttggtgttttaacacaaaatagtgaactttaaagcccatagttgcttagaactgacaaaaagaaaacctttgttatatccttgcctaaagcaggtgttataacaatctgctctttccctctctctctaaatgaattttgtcacagcctttcaagtttccttgtggtgatgagctaatgaaagtagatagtacaatttgtgctgaccaggtagcaagtgccagctcacagctgaggatagtttaaaaaaataaataaaatatagcatcatatcactgatttacccaatacacagcattaatagtgagagaccttggtgtgtttatctgtttgtattggtgtgcatttatcgaattgtttatgacaagactaattggggtaattgtagacactgaaattacctgtcagctatatgtaaccacactccctttctttctgacaaatgatgacaactgagggaccccgtagcattactcatgatggcttttcgagtggtaataaggacaataggggccctggctaatttgacatggacagccttcacaacaagaagccagctaaatgacttgtcaggaggggagagaagtcagaaaagtaatggagtcccccatggcgctctgacagggagatgaggcaatttcaacggaaagtgaaaaggcttcagtttgtcaagtacttagaacaatcagagaacagctagaggctggaacctgacaataaatttgtgaaccatggtagcagtttcatataggtcagttacttcataatggctgtgcagtactcagagggtcctgttctcatcacatacttcacgtctaccaaccagagctttgtcaccttaaatttgtgctctgttttacgtcgtgggaataacagttagggtt

SEQ ID NO: 78702 - DNA, 1017 bp, Homo sapiens
agaataaacattttctcctgtgaaggacataaggagcatctaagaaatggtggtggtggtgctggtggtggtggtggttgaacacttcattaaatcacttttcatatccatacatatttctttaggataatatccagataatagactttccaagtcaaagggatcacagagttttaaggccatggttacatatttgtaaactgcctgtcacagaatgattgtagcaatttcttcttctgcaagtagtgtgtaagtatgcccatttctcagcaccctggcccaagtcagatgccatcacttcatggatagtttttacactctcattgttactttccttccccttgttttcattcagaatgcttgcattttactttgagattttttgccatcggtcattttataagatacgccttcaccggcacatctaaaagctaaggcacttaacaattagaaagttgtatgatagagaccttcagtctccagttataattccagctctttctgaccctcaagctctggaacaggtcacacttttctctgctcaggacactagatatttcagattatttcaagcagtctcctgcccactttcctgtgcctttgttatagctgtcactgtagattgtttccgttgtgcatataattgcttcattgctagtaactggcttaatgttgtcacagaccttattggctcttcttacctcagatttacatatagcatcccaaggctttctttagggcatttatcatttttcctccaaatgatctggtgacagtatacagctattcaagttttcatcagccagcagatgatacggtctttcttctttgctgccacaagccagaaaagagaggaaatcaggggaaatgctttcattactgcacttcaaggaggcgctgtcatggagtcagggagggaagtttcccaaagttcactgaactgacactggaagaagctcttgtgggcagccccatccctttgtgacaccgcaacgaaagcacttcatcatctcttgc

SEQ ID NO: 78703 - DNA, 1073 bp, Homo sapiens
ctgaggaatcaccacgctgacttccacaatggttgaaccagtttacagtcccatcaacagtgtaaaagtattcctatttctccacatcctctccagcacctgttgtttcctgactttttaatgatcgccattctaactggtgtgagatggtatctcgttgtggtttttatttgcatttctctgatggccagggatgatgagcattttttcatgtgtcttttggctgcataaatgtcttcttttgagaagtgtctgttcatatccttcacccactttttgatggggttgtttttttcttgtaaatttgtttgagttgccccgtactttgctggccacactcagtaagagtcaagattacatccagttggcttcataaaacaggactttctaggacagctgtgctttgcttgcacctcatgggagttcaggggctccccagactggaaagcatagaatccagtttctctaggaacccaaggtgtcaaaacaataaatccccacttctctgccatcagcttgcactaccacaagccagaagagagaggactgtaccccgccatgttgtggtgagaaaccacacccataacgtctctttgggttagggagccttccttgctttccacgtggggttcagggagcttgagagttggcatcaaggctcactggagtccccttctacattgtatgtctgtgttctctgtgtagagttcaactcaacctcaggccaagaatcagctgctggctccacctaaaacctgtttattccttaactagatactcctttcagcagctgtggcttctaggaggcaaacactaactagagggaggtggcagcaaaggctatatatacatagtgaatgtccacattcagtgacagcctgtataagtctggtgactgtcagtatccattctctatgcgtaccaaaacaaaccacaagttcaaaaaatcattccagtaaatcaccccttctattcagacttcaaacaaaagaagattgggggtggaggagggaatcagtttgacctcacactcagagtgaagtatctatgctgtgagttgttttacctgttgt

SEQ ID NO: 78704 - DNA, 1809 bp, Homo sapiens
cctagagtctacatcttggttagatcttacccgtgtggaaaccagaagcctgggtcaggcagcagtgcctatgacaggccctgattagattaggactacatttatcaactacacagagagcacacttaacctttcaactcaagagtcttgatgtacctttattttaaaacaaaaaggtgaatgttactctgccaaagtcttgatccaatagcaatgaagtataacatgcagctttttctaatttcatctattaccagatttacacagggacaatatgcaagatgtataccctgacaagcgttttatctgttttctaaatgtataaatatgatatttcgatatttatagaaacctacttcgtaattttacattatgttcatttttttccttaagagcttagaatttttctttggtttctacctggatttacttactgtatatatgtatgtacgtatgtatgtattcattcatttagatttagtagattagaactattctagtaatcgattaatatatcatgaaaatccatctgtggaaggagtaacaagctgcttttagaaacttgatttctttttattctcccaagtatttggcttaaatatttctttgaaacatcacttaattttttcaaatatgtggtttaattttctaggaagtaacgactaaacttttaacaagacaaattgaataatacagttttacagtaggtttttcaagtacgacccattcacattcttctgatgagcctttgatcaagtctttcactgctgggcagtcttacctcacagatttaggatatgtcagggacatctgtgtcctcctaaatctgtattggagagaatattcagggaacatacatggtggtgatagaatcatggtatggggaatggtctgaattcaccaccaatgaacacctgaactctcttcattcatttatcttctagttcctcactgagcacctaccgtgttgatcaggtggagagaacactccctggcctcttgaaactaactttctactttcccagttctgcatcagaatccttgttctatgccagtgccaagtcacatagagctaaaaaatattcttcttggtaatcatgcacaggctgtagccttcaaaataaaattattcttcgtgctaaaaggatggtgttttctgtcattatattgtttctgcagtatgcttgttcagttatgtaaactcattttctgtgacatttataggatcctggcctagaatgcaggtttaaaggaggaaaaggcagcaaagagctttggtagaaataattatttccctgagtaaaagaaagataaaatgagttcatttaaattatagtaaaagtggttgccagtcgcccaacatagtgatctcttttttttccttacctaaatgaaatctaaatcttagagccattttgaacgttttctaaaacatgaggttgttttgccaattcgctttcatttggaaataatttttaaatttcctattatatcataaactttgaatttcaaaaactgctgcatgaagcgctgttttcatctttttgtcccaatatttttgatgccacacttctgatcttaaggttatataattttaaaggttagtctgaatttgatatttactggggaaaaaaatacttatcagtagggattaccattatcttggttgttgatgggcacattttttaatagtgcttactttactggatgtgtatttaataggtccatcagcaatatttactgagcccagagtgtgaatagaatgaaaatgttttcaacgttgtggctaattagtgacgggagaaaaaa

SEQ ID NO: 78705 - DNA, 2871 bp, Homo sapiens
tctcactgcaacctccgcctcccaggctcaagcaatcctcccacctcagcctcccaattagctgagactacaggtgagcaacaccatgcctggctaatttgtgtattgtttgtagagatggggttctgccatgttgcacaggctggtctcgaactcctgggctcaaaccatctgcccgcctcggcctcccaaagtgctgggattataggcatgatcctgtgtacccagcatctcaagtcttcaaaggcaattggaagatatatctgatgacctagttaattctgctggaattggtagcctctgaaatgcttgggtgatcccttctgggtcttcacttgcttgattttaggatgtttctcccccttgtgaagagaatgcaatgttcagcgtgctcaggaatgtaatcctgaatatcagataccaagttaccacgggcctggcttagactgagtataagacctctgtttttagggttgttggctttgtcaccgtcaggtcttttctgcctctcacgcactgctgttaggaagtcctgaagctactgacccccacagatgcctcagattgggaggacacacgtcaggaaaggatgagagtgacatgggatcagcctggaaggcagcccgagaaagtggaggaaagtagagggtctgtgttcctagtgctatttaattaaatctgaaactcctttttatgggtacttatcattttaccctctgctacctacaaactttttcttctgttttgcctttaatctaaagtattttaataaggctcccttccacattcctatcctctgcaattgttttacatctctccttgcaattatcccagaaaatagtctctatatgacttgattttgaaatgtttcttagaattaatcaataacaccttgaggttttccagtttaatttgtatgtatttatcttggcatatagtgcacatctctctagcatgcaattttgtagttgtttggatgttggcaggttttaggggtgggaggggagaaagttgtatttttagctatagtgattcactttgtaaatggtgtacactgtcgtctgtcctccagttgatttactgcatatggaatcaactcactctaagcacaccctacaatttcagtggtttacaaaaccaataaaaatataaaatgctgaaataaatatttaagattccttttctgcattgcactaaagatatgatggaaataaattgtaaaagaaagtatttgcacttgaggaattcaggtaaaagtcatgaagctataattgaaaacaggattgtaggagccgagtaagactggggggagataattaaattttactatttgtcttatttttaatcatatattcatttacacaaagccagtcttgatggactacaaaatacaccatatgttgtcattttaaaataaagttttgtatttaaattaggcatgtgtgctatgtggctgtatgccaccactccctgcattaaaatccttctcaacacggggcttcaaggaaaccactaccaaacaattagagttccctaaacaatgaatctattcgctatataatttttagatgcacctccagccttactcctccttcacagaccctctgctctagctcgcacagttttcttattctcttacaaacatggcagcttccttcagtaaagatcaactcacaacccagcctccacctaagttcatttttttcctttggtgttcaaatctcgctccctacagaaaacttttcctggagactatagcccaaagacagatttcagtggttcccaagtcagactgcatatcagatttaatggagacagctgttcaaaatgtagattcctgagcctgccccagaccaccttactcagattgtgtctaaatctaggaatatgtgttctatcttgctcctcagccaattcctatgcaactgcttggcattctccattcgtgttttgggaaccacatgggtgacggaaagaatcagtaattctggagtctgttggacctgagttcagatcttagcacctgcacttattagctgaccaggttaccagacttctctgggcctcagagactacaaaattgcagtttcttttccaaagattttttgttttgttttttagaggaaggatgctctgaaagttgaagataccacccaactaagttggtacatcaagtagtgtgaatatagtcttctgaagatggtcctatgaaacagactgcttttctgagtggggtgtggtagccagtctcgtttatgatgtggtcatactgagtagcagtggcatttccctccctcccttcttctaaagttcaaatgagttttctctcttcaatctagaactcccatagtcatttacgtttagaatgattccaaatggagagtgagtctcaatttcctgtgcactgaagcacccgttgtatggtgtataaagatattgggaacactagtgcctttttgggacctgagactatttagatattaaagtagatttcagagccatttaaagcagatttttcagttcctcattcaggaaaagagaatggcagtctcagaactggaagggacctcagcccttttactgagtcttcatgcctttatgccaataaatgcttggatcagaaaatctcattggctcaccaagctgagtcaggaaacctacctgtaataagacatgtgtaaaccaaaactatcaaacattttaaattgttttaaattgatgttttaaccaatggctgccatccattgtactataattgaattaactcgtatagatagaatcctattaggcaggtggattcctttatagactaccatatttagacacacacctccaccccaccttctcttgaaagcttttgaaaaggaatct

SEQ ID NO: 78706 - DNA, 4755 bp, Homo sapiens
gtatacacagtttttccttcaacagggactccactcccagaagtagccatggattgtaaacagactaattaagaaataggatcctcgtattttttccatgaagctgataattagcagccttgacttttcaagagtgtctctagttatcttaatgaatattgaaaaattcccccaataaaagtaattctcatttctcataatttataaactaaattattgttaaatggtaaacacaactataacaaagttatgtggcaaaaacaaacgacaaggaggagatgtggctgctcccaaaaggtgggggtttattccattagatgatcaaaaatgtgatgatgccacagccattcacattttacaagaaaatgaggcaaaaccgcattttaatactgccagtttactcctagtaaatcatcactctctaaattaactaataatttagcatttttgttcctgctttaaaatgattctatactaagctgcaaaatggtgatggcattttcagattttgaatttttatgacaagttcaagttgcaagcaactcttttaaaccacaagagaaagagaaagagcttacgagcaagcgcacttgtgtgtgtgtagatatgaactaatgcatacagaaggtgttttcatgagggatttctgaatgtattataatgcaaattacatttttaagctgaccaaactattgatggctttattgaatgaaataatttattatagaaatattttagtcagatgacgtttcatcatcagataacactaaacacaatagccatttcctataagactgttgtcttgagccaagggcttaaaaaagaagataaaacttgctttgttccaaacgtagcattgtactaacaattgtttattacactacagaagaaaagagttctgccagccagacatggtggactggaaaaacatgccattgtgtcagatcatcccaagaaatcttcatttttccctcctctcctaataatgtttgacaagtggagatgaatttttaaaatccaagtctcttttatgccattcattgggataatactataaaatctctcctcgggtactcagagtattacaacatcaatgacctgtcagcagctgcatacagtttttatttttaagactctgtaaagctatggttaaattctaattttctaaaataggtttaagtgtggggagagccaaaattaagtgcacttttcttgctagaaatcagaccacaaattgtacattgtgcttacaaagatgattaaggcggtcccagccgcacaccagcagttcggcagattaattggagcatgcagatttgtgtaaaaacatatgttgggattggagtagcttttttttttttaatgctgtttaaaagttttttgcaagttcctgtgtataattttcacattatctaatcctctcttaaaagcctgagtttaaattcatatatgcccaatatttaagcattttgtcaaaatgggagcatcttattgatacctttcgcccagttagttggtggcaagctttttcatttaggaaatcccagtgttcattattttttaaattgtttcatgatgaaaccagagccacttgtttaaacaaggcataactttaggacccaaaaagagctagagcctcagagctgtgatacacatgaacatacagtaaacacgggaaacgtaagttggaatttgctgaaaatatgattaaaactgcttgcggaagtttaatttacccctctatttgttaggacttgttggcttgacaaacactgtaccacaaagccagctaaacccacactgctcataatggtggcacagacacctgtaagagacatttcagaatattggccagtattttaataatctgcctaaaacctcattaaattaagatcagcaagtaactctaaatgaagagacatataacccattttgatgtaatataaagctcatttatcctgactttccacaggtttccagagttcaatactgacagggttcatacactaagagaaaatgaacgtaaagcaaataaggaatatttagaataagtaagcatgcacatccttaatacaaagttgacttcactttaattagagttcaaagctgtaaggctgaaaatatgcatttttaaggtaaatttttattcctttaaattgtctcaatcctatgattttataacactgttattaaaaataacacttaccggcttacaggagagatttgagataaaaacacaaagtgcctgtcagagtacctggcactttagcaggggctcagtaaagagtagggaggaagtggaggaggatcactggtagccgtgtaagtggtgctaagtttggacaactaggcagttaagccagttattcctagggagaaaaaggaaattagagtctaacaagcaataattgctcaaagcaattgtaaaggactacacatgtaactcccttgccatccacagataatgcaatttagacaatataaaagtttaaaaggtgtaataatcactggtcttttgcccttgtttacttaagaatctgtctgctgaaaattttcctgttgcccttattatatttgctttgcagcagtgacgaataatctatcttattctgtggataaaatctccacacttcacggagatttttttattgttggaatttagttggatctcatattaaataatgcataaacattgcgttatccaatcttatctctttttctttggtcctgcttgctaactaaattctccccctttaaaaaacattctttatatgcttgatatctctcctcctctttgctactttttccttcagtaccataaacataattgttgcaccatggtgctcttgctagaaataggctggaattcctgtaagctccacttgatcaagacagctcccctgttgattttgtggtatggcaggtgtgatttttccctgcccaagtgacaccaccaaatactgttaacttaagtggacctgttttggccatgaggagatgggttatctttctgaattagctaagaggttgatttcagatgtcagggtgctgcccttgtaaaggtttagtgtacacgtacagagtcaccaaaaagggcctctgtggttcttacttttgcacatttctgagaatggggtgaatgattcacatttacatggaggatattcccagctattaagccagccaggggaaatatctataagtcaatcacaaaatagctaaggtgttctcatagactttggttcccatcataataaaattacaaatttagtaaattgcaaaaagaggcactaaagtgatgataccatatttcaatagtctgtctgatgctcttctaggctctgtgttaaccaaagagtccggtaggcctcacactttggcccagtgagccctggttgttcagttgaaaagcggttggataatcactaacattctgggatcatgacttactaacccgggagtcgagtagtcatgaattgaagcataggacatctgtgaggcagaagcaagggcctctacaaagacaagttacactgatacacacattcacatacacaccttagatcaaagaagagccactgatcagtgcctgagcggctgattggacttgggacttttctacacattgcaacttgaaaacttgctctccagtgacccagggaaaaactattctcgttaccttgtgcagataactaattggaagttgagcacctctcaggagttccaatactttttacagaaagaattggtgttaagctataattcttgaactgaagatttattgtaactgagaaactgcttgccgaagtttaatttacccctctatttgctaggacttgttggcttgacacacactgtaccataaaggcaactaaacacacactgctcttaatggtggcacagacccctgtaagagacatttcagaatattggccactattttgataattctgcctaaaacctcattaaattgagatcagcaagtaactctaaatgaagagacatataacccattttgttgtaatataaagctcatttatcctgactttccagtggtttccagagttcaatactgacagtgttcatacactaagagaaaatgaaagtaaagcaaataaggaatatttagaataagtaagcatgcatgtccttaatacaaagttgacttcactttaattagagttcaaagctgtaaggctgaaaatatgtatttttaaggtaactttttattcctttagataaaattgtctcaatcctatgattttataacattgttgacacagtgaatggtacagattgggttatgttccttatcaccttctaactctattaagaatgctacttgcccttttacctaaaaaattataatatttctgaaactgtgctaaatgtatagattttttaatcgtagttgtttgttcactgtgtgtatcgtgtacttcccctgagtggacacatctcattgtgacaatctctcatttttattctctcagtattgtggtctttttaatcctgtgtccttctgattgagtctgtggacacaaatttcataaggtcaactgttttatgacacacaagatcatattagaccccagtatactggccaccaatatactgaaggctgcccatcccacatctaacctgctttcattctctttctgctgtgtctgcttttatctctgttcttttcttcatgatcaatcttgaaagagtcatctgcattcagggtccctacttcctcatgtctctgagtct

SEQ ID NO: 78707 - DNA, 1413 bp, Homo sapiens
acaaatgctattctattcactttatagatagagaaatcttggggctatgccaggaaaataaatctggagtagtcagtcatggattagctgcaggggcattacatttactagaatgccttactctcgttgtgcttaggagggaaccaaatagaaaaaaattacaaagcccagaactgcagaatgattcacaaaacctcaagaatgacaggtaagatattttccaccacacagaccctcagcacaaccagaatcgagtgcaggatggcctcccagacctgtctagcactggcatccagtcccctaccaggcatctgtctgctcatgcagtcaagcctcttctgttcacctcagatgttcatacatcggggcttgaaatccccatgagatgttgccctgtcgggaaccatcctctggagctggaccagtgtgcctttttaactccctaaacagagcatccctcttcgtttggaaatgtctgtggctcagaacttcatcttgcagatccagcattaattaagctatgcctttaaaatataatcaggtaccatctttacagacttaaaatttctaactataaagttgacctttgaagttcacatatttgcatttcccttttgctgagcttaattttctattttgctatcatgactctttgaagaaaaggcagagtataaatacattaaaagccgcacaaccgacatacagaaactgtaagattctcattttcttaaaggagcactattgaaaatggtgcaaagatcattttgtagagtttgtatgttatggaaaagtagagctgtgaagaacacagatgcctgctgaacctaggaatgacataggcattgtagagatggcagttgtggttcaatgagtgcaaatccatgtgtcatatacaaatacagttcactttaatagtttgctatctcttcactcatcttaaacaccttaaggtatttggaaagggaggaagaaataaaacagatgaacctgctgagatatggccaggaacagtagtacttcattttgattgatgtttttacaaccttatcttctagataaaagcgactgtaaacaaaagcctacctaaactgattgtatttaaaggaagcaagagccacctgtgtgcagcaattggctcccaagtgcagtctttcctcctagcagccaattcttgctgctcacagccttgcagccaccactttaaccatcagtagtgttacttacagggactagtactcttggtttctaccactctttaaaccacagcatcatctcccccttaatatcctagacagaatagattcctaccagcaatcccagcaatcttgcaattcgctcttcagaagtgtacaacttggacatatttttaaggctcattttcttacctttaaaaatgactttccgtggccaggc

SEQ ID NO: 78708 - DNA, 1101 bp, Homo sapiens
actgaaatacaagctgccctcatgaagcttacattttaaaagaagtgtttgtttgataactgcaaggccaggttatccataatttttgaagacccatttttaaaatcatttttccttatctgatcattttttctaatgatctagacatttctaacttctaatttatttttttcccctttctggcatttgccttcatgaatctgcaaaattgggatgttttgcttttggggactaggttggctagccaaagagattttccttatcattaaatatttcttgtgactaagagaaaaatttaactgcccatttagagtgagttgggatctgacataccaaagcattgtgtcacatttggttaatgatagatttatagggcaaacatgtatcagccctaatccttcagttatttgactttgccgaggatgaaattccaataattttttattttaagcagacttttatatatccaaaacccataaatctctttgttccttgagataaacatctgaccgaactctgggttaccctgtgatcctttgagaactatgccaaggaaaaagaaactccattccctccattagcgaataattaagggctacttgaaaaagacatattttgggtacgcaagatttatgtagtcttttccattttataatgtggttctaatttctaatattcagaaagttagttagaaatggaaagttcagaaatcacctcaaaattcatcagagcaagtctgatggttgattaactggcaaacaccaaaatggactgcaccactgtcagccaggccttgccaactccatgatcactatccattatggttgtcatatcaattataaattctctggcatcaaacactaaatcagctgaaatgatgggtttgcctttggcgtgtttccctggggaaataactgagaaaacatgtaataattcacacgaccaattttgttaaaacaaacacccccaacttttggaagaaggctggggtataaattccagatcgatggacatgatttgcacccagtgtccacatgaagtgttctctcgttttagtacttaagtaagtaagtgttttcaaagtaaacataacttcgggta

SEQ ID NO: 78709 - DNA, 1046 bp, Homo sapiens
gtaattcagctcattgggaagaaaagtattaggtcaatttcagcagtttccgtgattacaggtagagagacaaattatgtaatagtacataaatcccacacctttcaccgtcttattaccaaaagagatgtaaaagcatactagtttaaaaaatatatgtagtggttttctcatagagctgaaaacatgggtaagccaagttaatggcacaaacataagatgcatctgtatactagaggtattttaggagcaaaactggggcctttggggcatactgtatcaccctgtttaacaagttctgaaccttcttttctgggaaaacaaatctctacctcatacgttcacttagacccgttgcttccctcagttttcctcataacttattccagctgtttatttccatttatatgaacaagctgtggcagtgttctggatttactcctcttccctcatgtttagattctgccccataacttctgaaccccttcacagcgtgagacatttctcttctctgaactttatgtagtgattctgtaattctcattccctagcttacttccacctgtttgtcaaaggtttaaaatatgctccctcaaaagtaattattttcatttcttttgccagaattatgggttgcttttccatctacttcctaaatgtggtgatacttaaattgaaataagtagccagataaactttttagcgtgaaactattgacatcaaacttagagttattccctgtgtagataggtggatcccaactcatatactggggttttgatcagttgccttgcttctggacccctgcttgcctatcacctatccaggtgtagtaaatatttttcagagtcaaatgactgttatagaatgctatataaacacaaggtataatgagacagtaaagcatagtagttacaagggtaagccatagagccaggcggcttgggttcgaaacctggccctttttgggccccagtttcttcatctgtaaaatgaggatagtcatagtgccctcctcatagggtggcagtgagtaccaaattagt

SEQ ID NO: 78710 - DNA, 1728 bp, Homo sapiens
cctggggacccacacacctgtgcacaggtagcctaattctactgaccccaaaggaatctcttctttggggatgctgaggaagaagagaacatctgcagctgataaatctcagtgggcctggtgctccaaggcttctaattatacccagttcctacatcttctagaacaagatcaagtgatgagctgccatctcatggttctgtacctgcacagaggggaatcccaaagttttaaataatcttgaatacaacttggctaccccactaatgtggatccccaaataaaccaggccgtgacatccaattgaacttgtccctgtgcatacagtatctcgcagcccatcctgtattgttagttttggcaagtacactacagcatataataaatcatggaaggcaaaagctttttggcctagcatggttcagcctgctgtaatgttagaatacagaaagcagttctgtttttagacatgcttttactaacccaacattcataatttattatttcactgtaaaattcctgcaacactacaccaaaagtagtgctgccctttaattaagtgccctcggtaggaaaaacgtgaaactgatgtgcaaaacatctctctgtgtgcagtgattgatagtgattacatctttatgaacccagcctaaaggtctcaacttcctgatgggtgaagtagtccatagggccacttcctgagtctgcctggcggggatcagtcactgctaacaaaattgcagataattcagagggcacaacttagaaatgctgaggttttattaagcccgtagcgatctatactttgtcacaagcctatatgaccttattcctcatttccgtaagcaccaatgaccaaactttatgctgtgtccacacttaaagaagttgtaatgcagagagtaaagggacccagtgtgtcatatggatgacaggaggtacttccagcccaatgggtgcataagtagaacagtatagccagaagaggaccataagttgttgcatttttttaaattctgttttcaaacattcttttatttttcttagttgctattaggcaagtttaattttttaaatagtaccattaaatgttagacttaaatcccaaggctggcattccccagctcattcctgtttgcactgtgaatctgtcctccatcagctaggtagtcacatcagcccaagctcataacaccttactgaaaggtaagattcagagtttccatatctgaaatacttcaggtttctggaaagaaagggaacacatccatccgagaaggtagtatgtgtgttatgtgaactctttggtataagtttggctattttcagtcacaatggtagcaaccaaaacaaaaattttgtgcagtcctgtcatttaatcatcttatcagtgccccaaggtgacttttttcaagagctctgttgataccatgtgtgtgtgttattttctggtgtttttacagatttgggccaggcttagtcatctattggtatggatttatccaggagctggactgcaaccgggaaaggggcatcctgctcaaagcctgtttccccacgaacattgtcaccttatgccacagcatagcttgaccctgaagatcctggaagagaagctgggaggaaaaggtgaatccggaagcaattttactttcctgcactgtaagatcctggcaacatctgccctgaacttcagctgaactcttgctgcccgtagtcacaccacta

SEQ ID NO: 78711 - DNA, 1053 bp, Homo sapiens
gctagtatttttatgagtcgagttttttaaaggcacattctgtatactgcttagtatatgcattttataccatgtaattataaaacactcgagtaagttcagcattagaaatgtttagctttgtatgaactgagtgtgccagaaataaacctggagcaatttttaaataagcaaaataaaggagatttttctatttgttcactttaatttattcacttttgtgtacttttatgtactgcaaatcagatttcagtctaaagcgaaacatcagtaagttaataataaacctatcttttgggaagttgaatattaatctgtacccaaaacgtatttagtaaaatatttgcccccgccaccctgccatgctgacataacaacttttataatgttgaatagatgatatgggaaatactaataacaacaatgtaatttttgcagacagctttaacttatatacattgcttgatttttttcaaaagactaaatatgtcatttatactttgtttattttctaccaaagaaggtttgtaaaaatatgcctgctgcttttccttttgaaggacacaaacctggtcccaacatgtgtggattttaactctgagtggggtgcattaaatcaaaagagagaggcagaagatgaaatgctaaagaagggtcaggcaaacttctgtttcagtataaaattcatcatgcaggcttctgagtgaaatagaatgatttgaaaccactactgtattgcctggatacacacacacacacacacacacactttatacaaaaatgttaaaagcaggtttcctggcatgttctaaactgttttttctttaggaataaattacatttatctgcacagatgttgaaaatcctgttaaacccttgtcaaggatttgtttattttacattaaacaaatttattatgatgaacgtgaacaaataaattaaaaaataaaaaaggtacttgcgttttgtatttattcttttacctgctgccctgacataatgtgttgtgagaaggtattggtgttcctagcaaaggcactacctcctctttat

SEQ ID NO: 78712 - DNA, 1055 bp, Homo sapiens
ctcaggggtctaaagtagaacgctggacctccaggggaaataattttcttgtaactgtaggtgtgtgtacctgttcattatctgcaaggcttgattccccctggaaaagatgataaattgttggtcttgagggggtgcattaactcactcaggccgccaggggactgcttagagccctgatgaggtaatctacctaaatggtccctggtgggccacactaattaatgctgaagtgaacagttaattcacttgcttctcactggggagctacacccattgctttcttttctctttggaaccaagatgccttagatgtctcctctttttaactgttcccatctagagacctggtatctcaattgcaataaatccttactgcttccatatgctttctcacttcacttttcactttttccatgtcatcttcccctgcgttggcctttgccagtttccctccacatggacatgtaccctgcattttctcattactcttgggctctttttctctctaaaagatcaggatcccaggaccaaaatatgtcctgatgcatacacctggttggggagtggggagcaattggcctaacctctttggggagaaacacaacttaagcaccctccacatgcccaaatactcaagtgcatatgtggcaccagaaggatcgtaaaacttttaactaagataataagattttacagggttaaatatggcttgaagttcatgccttcagtaaatgatttggcaaaaggagcaaaaagagaaaaaaaaagtaaggttatatagctactttcagcctgagtggtggtgttcagctgattaaaatagcaaaatgtctgtatgatttagcgaatcactcctagctcattcatcttgggggtagcttgccattttcatgtgatctgatgggagcaagttgtctcaaagtataactattttgtgacaagatgagaggagaaaatctcaataggcacattcttgattagggttaaggaacaaagcaagcttaacttgagaggaaactaaaaggcaaacaatagaagtttgcctgcaatgt

SEQ ID NO: 78713 - DNA, 1031 bp, Homo sapiens
gttggtcaggctggtgatccgcccgcctcggtctcccaaagtgctgggattacaggtgtgagcctccgtgcccagccaagttattttttgatagtgttgctactttatctgcattgtgaaagtggaaatagaaaatagaaatgccatcatttctatttctaaaaattaagttaaaccaccttaggaaattctgataggagatgtgaaatctgaatatgctgtaaaaattctttcaaattgccgtacagtgtgtttgcttttttgtctgttgtagatgacggctttgtgggtaatgtcagaatcaaaggttgatgtctctatttctcacaaatcggggggaaaatccactaactaaccctctaaagctaaaatatttaaggactaaagcagatgtggcataactgctggtttgctaggtctcttgtggtttataaagatatattttatgtcttttatgattacgggatgatgccgaaaattttgggggtaataataccgtcacattggaaagactgcgtataacatctctggagaagatacagaatgccacccggctgtcaaatcaaagtaaaagatgtttaatttgtcattaagaaaaggcagtcaggaaattttatttggaatttggtctttgatatgtgaacatcataaatgtgaggatattaagtcatgtattcatgaatagattttttttttgctttctgacataatataatatgttttcataataatttttaaagctattgttagatgcgtagctgttagaactataatttatttaaagtgagttttaaaattgtttagatctttgatttttttttccccattggcacctttactagatgccagtataaactggttaaatagcatttggtttaaacagaaagaatatacgtatgcatatttatgatattttgtttgttggatctttttcttaatattacttgactttctgtgttttaatctcattttttcatattttgggttgaagccactctaaagtttaacacctaggagatttctcacttatg

SEQ ID NO: 78714 - DNA, 1088 bp, Homo sapiens
aataaaggtatttaaattaaatattttaatcatgtatatgattcagtcagtaacacatgagtagccaagatacctttaaacagtacttcaggctacagtcggacctttatgtctgcgggttccacatctggggactcaaccaattgcatattgaaaatactcatgaaaaaaaagacaacaaaaataacactgcgacagtaaaaaaaaaatgcaaataaaaagtgtagtataactatttacatagcatttacattctattaggaattataagtaatctagagatcatttaaagtatacaggaggatgtgcataggttatatgcaaatactacaccattttatattagggacttgaacatcctcagattttggtgtctgagggagtcctggaagcaatcccccacagataccttgtttcagatgaaaaagcatcatactctatgggtaactggttaactcaccttattctgatatatgaatgccattcacattatgctggatatgggtcaaacttaagttcttctgcgaaagccacaacataccaggcatcagaaatgctagagagttttgaccatcattcagaaaaacaattgtttaacagcaaccaacaattcaaactatttaacaggcaccagctgtcagaatgaatgctcaactaatcaaagcagttgctggccatagtggttcataccagttgaatttagctgcattaaaaatttgtccttttaaggttctgtttttgtggagacagccattttcagggcttcctaaatccttgtaagaaatatttttttgcaaatacagaattatttatttctaagaatataaagatatactactaatttctaatatacaaatcaggaggaataagaaatagctattgctttctatcaaatcttactgcttaaatggattaaaaaaatatggctggtgtataccttcacatgtttatattttaaatatgtccaccattatttctctttcttttgtccagttgatgaatagaagcaaatatagtagagagatgattagactattttctgctgaggtcaacttgtttacccaagctaagaaaagccttttctgaat

SEQ ID NO: 78715 - DNA, 1021 bp, Homo sapiens
acctccctgcccagggcggcacccagcatgcaccatggccaccgattagagttgtgggtggctggtgatttctgggcacttgttgtacctctgctgtgctacgaactaacagtaagagcttgtagtcacctcaagaatgctttcatctagttgaatgtatgcaaggctttgtgcagaattctctgtccgactcaaatttttaatgactgcctgtcctccaggttgggagagaggactcaaatagcctaagctgggggagttgggaagtctgcattcatgctctgtgatcctctgtactggctgaacctcagttaagtccattaagttccctggactttctgtttccccatttttcaaatgagagggacacgttgcaggatggataagctcctttcccatgctcctaggttttggttctgctcaaggacatttagtcagagcaatgcccggtcccagcctcatgggtcattctttcctctctttccccctttctctttgcttttgcttttcactaactgctttatttctctcctgaccttcttcacaacatgcccctttcattactttctcccactagctttgtctcccatctttctctctgtgccgctcctctgccttttctgcacctcccttgtagctttaggaaattctcctctgcttgctctttgaaaatgttttccttcttcatccacacttcaccccactgcagagaagaggttcagtaactttgatgaggatggtcctgtaaaacttttactttccaatctttaatgagctgaaagatttactcagctgtaattctgagctcagaaaccaagaatagagacccctaactagcgacatgttaatttagatttcttttcttacatgcactaacaggcatgaggaagtccttggaactagagatgccccactatatttttctgtcatttaattaatttcgactttcaaagtgaaatgttggctctagctcactgaaagtagatgcagtctaaattattatttcatgtaaatttcttta

SEQ ID NO: 78716 - DNA, 1018 bp, Homo sapiens
tgaggaggcaggtggaattgtaggaagttttcattgactctcccgagcaactaaggacgccacgagagattcttctcagtttgaactttatcagggtctacgcttaatcaatagagtattggaaaaagaattaattactaaagcagaataaaacagctgcattttaaactaaggatccatcaattcggtaatcttccagttacaggctaggtgccgtgaggatttgactccatgtaatgaggaacccggggagtttcctcatgaacaggctgggaattcacattagcctgtttcagctatttgtcattagtacaactcatttctcctcttctgcattacaatttgtattttatgtactgtggaacccacgaaattcccacattcatgggagggagggcgttaaggcggaaatcattgtcaccctgagaaagagtcttaacctagctcggcctctttattctggaagctgccgcgggagcggttcggagctggaccctgctccattgtgcccagggtgggggtcagggcccccgcctgttgaagacacactggtttgaacccagcctggaaatgtttcatctataatttccataatggtggatttcaaggagggctgaggagggttatgggagatgaattaggtttttagtgagctcattaggaagccaaacagagttgagacacaaggcagtgagcggggctgtaatcagttctgctcgctttgttccctgcctccgggacatgtttcgaaaactttctggcgggggctgccgagccggtgctcaggcgaagctgccgtcctggtggctgacttgttgatttgtaaacctcttaattcattttttttgttcaatttaatcttttctttctgaaggaaaattagttgaatgttagccctctttgcactattcacctcttaaattatgctcattttgaagagcttgttatgcctgaataaacatgaaatgacttggcattttcccatcagaggcacacccattttaacaccatgtattta

SEQ ID NO: 78717 - DNA, 1078 bp, Homo sapiens
cgccgctggggccgcgctgccgcagccgctgcgccgccgcctagactactagcctgggctgcttgttttgtctctgaaattgacaaggacgcagggaatccgctgctaaataatgtttctggtaactttcacgttattcgcccccccaccctccgctccctgcccccggggaggcactggccctagtctttcctagtcctcggcgttctcgtgctgattattagcgtttttcttctctttattttgtttcatttcgccttttgatttattggatcctcagaggaggcgaaggggggttaggggtgggatccggggcttcctcctcacactaactccacttctccctccgttggctcgctacggttctgttgcctccggcgggagcggggcctcccggcgccccctcaaatccccggcctcgccgcctcctcttccttctctaaacgttgctcttggttcatgctttttcatttttaaatttaataacattttttcctcacaacttttaactccgttgttttggctggtttggtttctgtgtgctcaacttgtgctcggtacttttctcctttctgactttgtttttatttttattttctctctctctctctctctctctctctctctctctctctctctctccccctctcctccttttcctcctcctcctctcttctctcttacctccctccctctctctcatctttatcccttcctctcttttctgttcgccctcttctccctgctctttttccctttccacccccctcctctgttctccctcacctcctgcgccccctcccccttcccgggttctgacagtacgatgagctgccccattacggcgggatggacggagtaggggttcccgcttccatgtacggagaccctcacgcgccgcggccgatccccccggttcaccacctgaaccacgggccgccgctccacgccacacagcactacggcgcgcacgccccgcaccccaatgtcatgccggccagtatgggatccgctgtcaacgacgccttgaagcgggacaaggacgcgatctatgggtaaactgaccccccggacccag

SEQ ID NO: 78718 - DNA, 2956 bp, Homo sapiens
cggctctcccccagacccatccgaaacttgggtgccggaaagcttgcgaccctggagagttcggtgcatcttctggagatagctgatttctttagccatttttagtggcagcacccctccccatcctcccacatttagctgctttcttttggggtaggggattaagtgttgggagaggatggcaattgtacgtctatgagagggaataatgtggatggatggaagtggagtagaaactacccctttgcctgtgagacccctgtcccgtcctttttcactcacataccagtcaccataccttcagtatccatcctacttcctttatagctgtttcacttggaaactaatgtgtgggagcacctcctgcagcaaactgctcttgaatcttaattcgatgagtcagtgactcttaaataccgattaagccttcaccctctcccccctcccccttttaaacttatgacctgtaagattcttgtaaaaaatagggttagggaaacatttttagaatttaataggattaaggacacctggagtgtgggcgatgttgagctagagtttacctttgtgaatattggacgtgtcttcaggaacggagaagaattttgaatgctaatttttacctttcagctatgtgaaaacacatgatttacgttgatgtaaccgaatttacattgctgaatatgttggtgatttcattaacttttagagcattccggtttaagttttagcttatttgggctttctccttgctttccaaacgaaatacttcgtcttttaaatgttttgctttaacgtgacagctgcgtggagaaataatggttggcaacacttttctattgagaagggatttaattccaagcagaatattagcatccgttttcttgtaattaagttcaacttttgtttatcttcggagggttggaaagagttaagtgagttaggacttagtcatttggatgcattcctttaaatacagtgcattactaaagtcagacctttttgaaataactttttaaagtctgtaccgagtcctgtttaacgtaaaatagctagagaaaggccaaacaacatttcctcctcccttactccctccccaccccaaaacacacgcttctgctgagcgggtgtagaaggaggtacattgctgcagtgtcagtgcagtgtagaagcagaagtggcagccatgttctgtctctttttgtgaatcgccctcatttgcatagcacactcttcattcataaaaaaaataattaaacatccatcaccttggacatcttgaaaggatttcccaagaaaaaaaattcgcggcttatttgtctgtgtgtagatttttgagttcagaaggtaagaagaatgtgaaattttaggttaaatttaaaaacatacgcacacacaaacaactacccctgttctgagaatgttgacacagttatgtgggaaatatcagttcggggaggtgctgggatcacgtgatcgcctccattcataaaatacctggctgtccattcagagtgcagtacagtctctccctgccttctgcagattagacctactttgagggagatcaagaagtctatctcagataatggttatttaggagaagaactgctaaaaatgctgaaccgaatgacggtaacttttattggtatctttcaaaaagtttggattaaaaatgttaagttttcttttagagatgggaaaagacttcttaccagtttaatttttttcttaaagcagtgaatatctccttgtttccttctggttgcagctaataaaaaaagcagatgatggaatgtgaattaacacaagtaaaatatattttttctaaatggccatttttttaaatacttgccataaataaattgagacaacaggtttttttgtatagtgatagtgcgttccactgctattacagtaaattgagaaaatactcccagtgatttaatccccaagatgttgatatttgaaacaccgatggcaatcttcagtgagaggattgctttaaatatttttttttcatctaaatgtacttagtatgggacaacttggaaattatctcactcacccagacttttaaaatcgttttttcacaaatttatcctgctttattaataaattattccctaggagctttgtaatactttttaagtttgggcagggcgataataatatttagcataatattttggtaaactcttcatgggaacaaaatcttgggggttttactttaaaaaactctattatattagaaaataatgtgttcatctgataatcagttttactagagccagcattgtttgcttgtgcattagataaaccacagagtgaacttatttggaatgtagcttttaatatagtaatttatgtctcatctttaataggtgaaccgttttgaaatggaaatttattatttatagtcattatgaagaaagatacgtatcatggcagaagccattaaggccttagcacagtttaaaactgccctgtaacatggattttatttgggccttacatttttttcccttttctcttttttaaagccattgctcatagggatttaattacagtagggactatttttaacattctttagtttctttttcacctgatttcaaccttcaagaaaagtgaaaatcaccagtttcctgggaaaccattaaccctttctagatagccattgtggtaaaatccagtagggcctcattctgaaatcctcgagtacatgcttattatttgaaattaaagttttatgtagagaaatggataactcctaggctgactgtgagaatatatttaatcaagaattagtgggggatctgttatgtgtagggctttgctttaatgccaaaccaagtaaggaagaaataaattagaataaagcatttcttagattgtttcacatttatgtttaaaaatcttacttttcaaaaatagtaaacatactctagagcaa

SEQ ID NO: 78719 - DNA, 1049 bp, Homo sapiens
tagggccaggcacggtggctcatgcctgtaatcctagcactttaggaggccgaggtgggcaggttgcctgtgctcaggagttggagaccagcctgggcaacatggcaaaaccctttctctactaaaaatacaaaaaaattatccaggcatggtggtgcatgcctgtagtcccagctactcgggagtctgaggcatgagaaatgcctgaacccgggaagctgaggttgcagtaagccaagatcgtgcactgtgctccagcctgggcaacagagtgagactctgtctcaaaaaacaaacaaacaaacaaacaaacaaacaaacaggatattcttcaactttgtattatcatttttaaagagaaggagagtggcgagagatggatgagacagactggcttctagccaccttagttttccttagcaatgtttcctagtcttgatacttgaagagcaagcaaactgagcttctaagtgagccaaaaagaaaaaaaaaaaattattggatgttgtatatagactctactgcttttgagtccgaactgtgttttgtgtactaggccctagcatataacacataagaagcataatttgacttacaattactggctaatagcagatcatccaatttttgcatttaccctatctcagatttagtcaggtggtataaggaaaaaaatgaaagtaagctaaaatcctttaggaaaacaatgagcaataattacatcaaaagaaatcaactaaaaacccagcacagctttcaactgcatctagttccatacacatttttgcttgtgtacatacacatattatttacctgattaagtatatcacctgatatacttaatataaagacttaggcgtatatctagtttttaaataatcattttagtactgtaatatttcacattgttttaccaaaagtttacctacttgttatctctttaaagaacactttaggtttccagctctttgctattacaaataacatttttaaggagcatctttttgcatataaatattttcttctctttagtaaaatttcttaagata

SEQ ID NO: 78720 - DNA, 1012 bp, Homo sapiens
caaacagacttaaattgactcacccaaggcgtaataaatattataaggtggatttaaatctaatttttatgctacctacaatgtgaaatactcttcctattgtggatgtattttgttcaggctttcaagtatcattttaattctcatgttcaggatttggtgagtaagtctattctgtttaaacattttttgacttacacattttgagcctgtccttttaaagtttttgcctgatttatgaaacactgtagtttatcctaaagaagtcttatggcagtatcattttactaacttatggaacattcttctggtctataaagttgtgttaggttagtgatcagtatccacaagtaaaaagaggtggatatatttttgtgctagtttataatagcaggctaatgcttggtgtgcatttcttttctgggtcatcatgatagtttggggtctatctttataaaaaatgatagtaatattcataaagcttatctttgcttctacattaagagaagtaaatttattaaaatttcttgtgtcagtataaggactttttaaaacttttaggttcaaggttacacgtgcaggtttgttatataggtaaattttatgacacggggtttgatgtacagattatttcgtcactgaggtaataagcataatactcaataggtggtttttttgatctgttccctcctcccaccctcaagtaggccctggtgtctgttcccttctttgtgtccatgtgtactcaatgtttagctcccacttataagtgagaacatgagatatttggttttctattcattcattagttaacttaggatacccatggcttccaggtccatccatgttgctgcagaggacatgatctcattcctttttatggctgtgtagtattccatggtgtacatgtaccatgttttctttatccagtctgccattgatgggcatttaggctgattccatgtcttttctattgtgaataatgctgtgatgaacatacatgtgcatgtgt

SEQ ID NO: 78721 - DNA, 1126 bp, Homo sapiens
aattcattgcaaggagacattaaaagttcctaatgtagaataagaactaggtaatacatgacaaacacttatgggggactatctaggataattttaggagtcttcagtgtttcatggaatcaaagaagtttggattaggagagggctttgattagcatcttttcttccttaattttatagatgagggtgctacatcttggaatgataaaataacttgctggaactattacagttgcatgtgtcagtctcagtggaaacttggtcttcatgactgtaagttcagtgttgtttccactgaatgttgccttggtcaattttttcctataattttgcccctggtaaccccagtgtctttaaagggaaatgatttgtttgggaagtcatctttttctttatttttagggatcattgatatcagtaatcaacactgattcttaaagtgtaggtaatataagttggaagagaaatacctcatttgcctccttaaaggaacacaatagtataataatgttttttgtcagaatctcttcatgaatccctccagcaagttaatgaaaatctccaaaaacactattcagattctcatgatagccagaagggtattggcagtagattgattatttagcttatagatgagttgcttgtttactcttacacatttgaaaaatacagaaaggtacagaaaagataaccttatctatatccttatccagaattgacatggatatcatctttgcgttagatttttaaaaatccattgttttttgtggagataattataattgagttagaccattaaatctatcttatctaaagataagagattttaaaaatgtgatttttagcttggggctacttaggacatttggttaggcagtgtactaatagagatagtaagcgtatatgtggatcagcaaactgttttctttgataatcaaaagcccttgtttgccaaaccacaatttagaatgaatgagtagaaatttaacatctcttataacttaaaaataactacttgtgaactctatagatcttcattcagaatatgtaattgtaaagtagataataccttaaaagagaaaacagtgaatcactttgctagtgggtgagcctagctcatcaccta

SEQ ID NO: 78722 - DNA, 1257 bp, Homo sapiens
ttaatgtgctgaaatacagcagtttgtcctggttataatattgtagcaaatggacatatatagacaagttttatggtaccctgtgtagtttgacagtatttgcctctgggatccttcacaacttgttccgtggcaatcagatgtgctggaactactgaaatgatgaattgaggtagtagttttgtagtcttttattacaagagtagtctttaaaataaaggacaaccttaaagtctgtttttggtttttgacctctttcaagtaggctactttctgtagattttcatggaagtagtaaacaccttagtcaccacatgttaactaatgtgttctttggtttctcaaacaagactgatggcttggctgttttttgtttatggaaaagctaattcctgatctttgcatctattttagtaatagttatgcacgagtgcgagctgtggtgatgacccgagatgactcaagtggtggatggttaccacttggagggagtggactaagcagcgtcactgtcttcaaagtccctcatcaggaagagaatggctgtgctgacttttttatccgtggagagcgactcagggacaaaatggtaatgaataatgtatctaatactataattttagataatgaattatctgtttaaagttatgattagtatactgttgtgagtttttttcacctgtgaatcagtaattatgtttctggagctgtttctgtgttaaaggcagtgaaatacaacatttttttttcaaactgagactgacattgatacacatttgttgggggatggggttgctgcttttccatttacgcttaatgcaggagttaataaatagtccccctagttattcaaccggtaacatcctgccttcccttctctcagctattccctagaccagagattggcaaactaatccacaggccaaatgcaagcccaccaattgtttttatattgtctgtgagctaataatggtttttatagttttacatggttggaaaaaattaaaaataataattttgtgtaacataagaattatatgaaattcccatttcagtatccacaaattaagttttattcgaacatagccaaggtgattcccttattaattcccttattttctagtctcataagactatctggtggccagcctaatttttaacactattgtcttccatgcagatgtgtggtttcttacctgtatacattttaaaatttcagtttaacctttgataatgttatttgctcttttttaatta

SEQ ID NO: 78723 - DNA, 1252 bp, Homo sapiens
atgataataataaccagtccagaatcccattcttttcattattaacccattgaaaaggtaataaattatgctattaattactttctgtacaaccatgaattttgtagtttttccccagcagttgttttgcaacagttaattatttaatattgctagcataccttgaagagggggaagaagtctgcctattagcatttctgttctctttccccggagccttgtgggaactggttcctgaaaattaagatttagaaaatgtcccaaattattataccttcctggttgcctttattttctcatttagcttaacactttcacctttcttcagcaaactctttattattacatttcctctttcttctttcaaaccctgcatttggcatctgacatatttcctctttacaatttattttaaactaacatcattcctttctgtagttactgcttttcactggttgatttggtctgtcagcctcatcaatattgtcttggcttcattgttctcttttatacctgattgtggtatatttcgtaatttatttcacatcctttccattatcttccaattgccattaaactgtaatagcctctatcatagctaaattaaagcccaaactctgacctcaaattatcgaccatacttattagctttccaaatgtttctgcactacttttgttttattacattctaaattataatttgaatgtgtcatgcttttaattgagtggttgactgtagtattcctttggttaatcaaccactgagtgccttctatgtgcttgacttcctgtattagtttccttgggctgccgtaacaaaataacgtagactgaatggtttaaacaacagaatttattttctcacagttatggaaggtgggaagtccaaggtattggccaattttctgtttctggtgtgggctgtcttcctggctttcagactgtcactttctcaagatgtcctcacatggtctagagaaagagctctggtgtttcttcctcttataaaagcactagccctatcagattagggccccacctttatgacctcatttaacctttatcatttcctccctggctctatttccaaatgtagtcaccatggatattagggctttaacatatgaatttgaggggagcacaatcccttcagtccatagtacttcctattccattgtactgtttgtctgttgattgttagttgagtagtattctatgatatgcatgtacactctctaaattatggtaactt

SEQ ID NO: 78724 - DNA, 1053 bp, Homo sapiens
aaggaatttctaatgttgcacagataagtatgatgtcagctgttgtcttgagatgtcctttaccatgataaggaagtgttcttatgttctccacctccccagactagaatttgatactaatttttatgaaatctgattttgcaaatgtctcacagactttttaaattgaaatttttgttgagataattgtagattattaattgctattgtaagaaataataaatgctgtgtacactctaacctgttttcccagtggcaacattttgcaaaactatattgtcatatcacagcgaggatatttctgttgatacaatctatcatattcagatttcctcagttacttgtattcatttttgtgtgtattttatttaagtctgtacagttttatcacgttttcactaccacagacaagatgcaaaacagtttaacaaccacaagaatctcttctttctgttgattttatcaccacatctatttccgtttttgccaggcaaccactattttgttctctcaattatttccgtaattttgtctttcaaaaaatgttataaaagtgtaataataagtatgtaacctttcaggattgaccttttttctttcatgatcattctccgagggttgatccaggttattgagtatctccagagtttgttccttttattgttgagtagtagtctgtgatatgtatttatatgacttactgaaggacatcttggctgtttccagtttgggactaaatataacgttgctgtgaacattcacatacatgttttttctgtgaatgtaagttttatttctctggggtaaatgaccaggtatgcagtggctgggttgtatggtagttgcatatttagttttgttaagaaactgcaaaacttttttctagagtgggtttatcatgccacattgccaccagcggtttatgagcaatccattttctaagcatcctcaccagcatttcaagtagccactattttttgttttactcattctgagagatgtgtagtgataataacttattgtggttttaatttgcatttttctgatgactaa

SEQ ID NO: 78725 - DNA, 1053 bp, Homo sapiens
caccctggaacttttttcagatgaaggaaaagggttggagattgaagcatttttacagcctttagaatccattaacaaactcttcagaatttactcacataagttctttgaagtgcttaatagttgtatctgtcactcaaacacctctgtctccatactcaaaaatcctcttcataaataatgatctcccatcctcgcatagcaagtaacctattgtggggtagtggcatcacctagtcaccaacatcaccatcactactaagatttattgaagatttactatgtgtcgggcagtattttgaatactttattagttcatctaattctcaaaagtcagctggatggtgagtggtagagactggatgggacccagcaggtcttggctacaaagcctacaagcttaactaattactctactgaattcttacacagtagtaactgttttcttcttccttgggaagtgaatgtgtcatgttcctggcctgttctatttttcatagcttaatcattttattttgaacacttttcactcatataaaaatcaatttttgttaaacaccttcttccgctgtctcttaacctggtgtagtataaggaaaccgtttgttttccctctcccttcatctgtatcagattttaataaatttatgtcaacagtattttcagttttcttgaagtccagagttcacctgtttatctgtttatctgtattttcgtaaataacatctgtttaatgttaacagacaaaaacataaaaaataaaaatagattttaaaagttatttttgttaccactggattgaaagactttaagatcttcttaaaatatctgtggttccaaaaatatttaccttgctagtaaagaatttagacttgtatgtcttaagcaacttagatttgttaagatctgtgttggaatgcaaagttgtgctaccaaatacaccacataactgtattttcctcctttattattatagtcactttcctaaagccggctccagccagtctatttgcagcaattatattgtactccaacctggccagatctgtttgt

SEQ ID NO: 78726 - DNA, 1005 bp, Homo sapiens
cagcagagttctttgaacatttttttaacttgcaaaataaaacatagatttgtgttttcttcctaataatttctgcatttcctatgtacatttatcactttttattatagttaaaagcattattataattagctcttctacatgacatggttagccttttagttcttcatgttatttttaataagcccatttttctcgtgaagttgaatttttctaaaagttcatattattgtattttgacatagctttataatcatgtacatttgagttttgggaattgctattcatagcgatggtagcgatatatacttattgacttgctaaatactttttagagtgaaagtatcttattttgtggtggtggtggtttttattctggcaactaatgcattgagggttgttcccaataggcaaatgaagaggattcttccagttctctagtgaaggatcacctttttcagcaagagacagttgttaccagtgagccttatagaagctcaaatataagaccttctccctttgaagatctgaatgccagaagagtctacatgcaaagccaagccaatcaggtaagaagataaaatattttttcggcgcgttgtttatatgtgtagaaattgaatgatgtcatagataaggacgttaaaaccatctgccctttaccagacacagtaaacaaacaaacaaaaaccccacaaacaaaaccaggagaatttgatttataatgagccaaatccagagtgaaacaataaacatatacaccataaagtcctatatgggtgtagcgattgagcaaggggacatcacaagcattcttattttaccccttatctcacaggaaagctttcaatatttatcattaattatgatgtgtttactatatgtttttatagatctctttattagattaagaataaccttgtgttcctacagaactaaatttttattacatgctttttctgcagtaattgaagtgattctattttttcttcccttattctgttt

SEQ ID NO: 78727 - DNA, 1132 bp, Homo sapiens
aatattcatagaccctgttgactcaggtagttttcaaagtgtgtatgtgtttaagtggtgtgtgtgacttttttctgagacagtggtgagaaaattgacatttttactctttagaatagttcttagaaatgtatatttaatatactagttgaggtcattgtgttctatcaggaaaaaaaattgttctctctgcttccttttgtgtaatgttcttctgtttttctttttttcacttgaccaaatatctagcttattctgtgtttacttcaagtcgcatttcctttcatgccttcccagaccatttaatccatagttatttcctcttgttaatttctaaattcttacagattctacttataaacatagaatggcctccatattgtatcattaaatgcagagaccaagggcacagtacaaagggtcctattttaaagatctgtgtgtgtgtgtgtgtgtgtgtctgtgtgtgtaaaaatttttggaggaatgcactaaaaaattttttttatgatagttaacttttaaaactgggtctgaaaggtctaagatggaaggaagagttttacttcatgtgcttttatactatttgaaaattttgctatctgcatgtattactatttattttcagggttatagtgtttattaagtatgtaacagtaggagttggctcaaaattatctggaaaaataagaagtaaacaagattgccaaaatgttgatgataagtgaagctagataatagacccatggtgattcataacattattctctccttttatgtatattagaatttttcaccataaaattttaaaaattaaacattgatatattctagctataatttaggtctgaaatgggctttgcaattcgaaacacttgtaaatgtatcaggacactaaagattcctatttttttattgctatataattcacctaccacaaaatcatcctttaaaaaagtatgtaatttggtggtttttattatattcacaagattgtgcagccatcagcagtatcaaattccatatcacttcccaaaaaacccacactgattatcagtcattgcccctccttccctattcccagcccctggcaaccattattgtgacatgtgtaactactttatttctcttt

SEQ ID NO: 78728 - DNA, 1201 bp, Homo sapiens
gaggttagggcttcagcatatgaatttgaagaggacataagtcagaccataacattttgtcctttgttcccaaaatcatgcccttctcacttgcaaaatacattcatccttatcctaacagccccaaagacataacccattccagcatcaactcttaagtcccaaatctcatctaaataacgtctttcaatcaagtgtgggtaagtggctcatgcaatagtagaggtacagatccaaaacagggtaggctgtctggagacccaagaaatagttgtagtctgagtccaaaggcaccctgctggcagaatttcttcttgctcagggggagctcagtcttagttctagtaaagccttcaactgattttatgaggtccgcctataccacagaaggtactgtgctttcctcatagtccaccaactgaaatgttgatctcatcccaaaaacatatcatagaaatgtccagaataatatttcaacaaatatctggacactggccccaccaaggtgacacgtaaaattaaccatcatagccctcattgcagtttttatctgtttcttttttaggtccctttgaaatcaatcagacatgtcagctttcaagatgaggatgagattgtcagaataaaccctcgagatatcttaatacgtcgctatgcagactacagacatcctgacatgtggaaaaatgacttggaaagagatgatgctgattccagtattcagttttctaaaccagacagtaaaaaatcagactatctgtactcttgtggggatgagactaagttaagttcacccaaagactctgtggtatttaagacgcagccttcctcattaaaaattaagaagtcaaaacgaagaaaagaggatggtgaacgttctcgctgcgtatactgccaggaaaggtttaatcatgaagaaaatgttaggggaaaatgtcaggatgctccagaccctattaaaagatgcatatatcaagttagttgcatgctctgtgcagagagcatgttgtatcattgtatgtcagactcagagggagatttttctgatccctgttcgtgtgacactagcgacgacaagttctgcttgcgatggttagccctggtagctttgtctttcattgtaccatgtatgtgctgctacgtccctttgagaatgtgccatcgctgtggtgaggcatgtggttgctgtggtgggaaacat

SEQ ID NO: 78729 - DNA, 1165 bp, Homo sapiens
cagaaggaaaccatttctggttatttggctataaaaagtcagcataaaatatgatccaactaaaagggattaatttttggcatttttgtatatttatgcattaggtgatgggacttttaaaggtttgaatttattaggacacgaactaaaaataaaagtgcactaggggacagttgatttcaatctaagaaaagttaacacttgggaattacaagaagtaaaacaagtgcaactaaatcatttattagttgttttttgaaagcagttttatgtataaataacaaatgtttatatttaactaaatgtaaggtacgaattattacatattaaacttttcttccccttcctagttctgaagtagatatatatatatatatatctactgtcacattccatatattttgaatatttaactcatctagttaataatgtttttattccatgcgaatgatttgatattttcatccttatttctctttggctacaatttatattgagttatatctgtacattctggtaatctaaaatccttaaaaatactctaatagccttgagtgaccaactttttttttaaagcacagatgtaattgtctaatgttctgatgggaacgtaacacttatttttatataaaaagagactgagtaaacaaacattatagaaaaaaagtgaagttttttagttgttttttgtggtattcaaccagcaagttgttttctttcagagtttcctccttcaaaaagttatattgcatttacaaatgttttacaaggcagaaagtttgactggatagttagtgtaaaagcttcatgttgagatcttcacgtatcattctgctaaaccagaatatgttcagctgtgttactaatttttcagcttaatcctcagtgcttattatttacataacaataactttttatcagttacattttatttttatttaaactggccaaaagcaaaattattttatgttaaaatgtgtgctaaactatcccaggaaagtatttaatccaacattgtaaatgaagtatcttgtacatataaatttatttcttttgcagagcattatattactggatgtttaatttacaaaatagttgggtaaatgttccaacaaactttaaagtaccttgaagtcaaattgtctgtttttgttttgttgttgtt

SEQ ID NO: 78730 - DNA, 1017 bp, Homo sapiens
gaattctcatttactcaaaagaaaatttccatatagggattcagagaacattatatcatcagttagtcttgtagactgattaagaaactgggtatgttaactataaagatccaaggtaaaataaaaaccatttcatcaccatagtttttaatgaagaaacttgtttaaaattgtaaaggaaaaaatgggaatgggacggcaaaatcttagcagcaaagtggttaaacaaattgaaaatattaatgcacaaacattaaaatattaaagcatatatgttgcatataaaatacagtacagaaccaggagttgcactatactgattagtgcttaacagaagaaatgattaaatttgttcctcccagaagtatatacacagttcatttccacagcattttcctatatagccagcaagttattttcttcagttattcacaccttgatcaaacctgaattataaacttagcacttacaaatatgaaaattcattcacaaggaaaaacagtatttccatttcaccaataaaaattttgaaagttaacagtctattctaggaaaccaagtttagctgaaaacttcagggatgaagatcatctgttgtagcagcattcaaatatataaacagtaaaaataagacttaaaactgctgcctacagtgtcatgttttggatttagttcatccaattgatttttagtacaaaactagaaataccctcttcttcataacatctatagttatcaatatattttcttcttttcaatgtgaaataatacttcaagatgatctatatacacaatgttgtcagttcaagctgtcatataaatataaatgctttcttaaaaaaagtattttacagacagatagtgttatatacattgttcagtttgatctggggcaaaagaaaaaagctaacacaagcttaagtgtgatatataaaaagaatgatacataaatgacgtttaaaaacctgcatagaaaatgagcttcaaatagtagtgtgattttaatttttatcacct

SEQ ID NO: 78731 - DNA, 1033 bp, Homo sapiens
atcaaggtgtgaataactgaagaaaataacttgctggctatataggaaaatgctgtggaaatgaactgtgtatatacttctgggaggaacaaatttaatcatttcttctgttaagcactaatcagtatagtgcaactcctggttctgtactgtattttatatgcaacatatatgctttaatattttaatgtttgtgcattaatattttcaatttgtttaaccactttgctgctaagattttgccgtcccattcccattttttcctttacaattttaaacaagtttcttcattaaaaactatggtgatgaaatggtttttattttaccttggatctttatagttaacatacccagtttcttaatcagtctacaagactaactgatgatataatgttctctgaatccctatatggaaattttcttttgagtaaatgagaattcctttgtgaaagcaaatgggtagtttaaatcactgattcttaaacatgtgtataggcaccttcaggaacattttctcattctctgtacagattcggcactgccaattggcttttcctctaaaacttttctttgtttttatctgatataagcagatggctcaagacaactgcttgagtaatagtattgaaaatggaatcatctagacggcatgacaagcaagactggtctgatgaacttgttcagaattgataattcttaaatatttctcttggcttcaaaagggacatcatttgatttctgaagaagtatgtcgtgtggagcttcagcaccacctactggatgatttccaggccagagacatgagatggcaatagggatctgacagggttcatcactactaccattaaagggctatttatgtggtgaccacctctaccagggaaaccaggaataagaactgtctcaaaggaattgtaaaatggttatttacctaatgtgtcttgttggcttgctgaaagattttaagcacttttttcttacatatcctgttttaaaatatttgttgatatttgggactggcaatcaaacttaa

SEQ ID NO: 78732 - DNA, 2055 bp, Homo sapiens
cttccgccagtcagggagaatttttaaaaataataatcaaaacatgaaaaaacataatcacacctgtattttatcatgacagcttcagagagtgtgtgtgtacgtttttctctcttttatttgagacggagtttcactcttgttgcccaggctggagtgcaatggtgcgatctcagctcactgcaacctccgcctcctgggttcaagcgattctcctgcctcagcctcccaagtagctgggattacaggcacccaccaccatgcccagctaagttttggtattttagtagagatggggtttcaccatgttggccaggctggtcttgaactcctgaccttaggtgatccacccacctcggcctcccaaagtgctgggattacaggcatgagctactgcgcccagccgtgtgtatgtttctgaaatgatgatggggtggggttaaaatctaaagggaaaaacttgaaactacctattttcattggttattcagcagtgcctaaaatgagcttttgaagtaatgtaaatgcactttcaattcatgtgtatagtgccatctgatatcttgggtaagtcttgctttttcttttctttttcctctcccctgcccccttaattaaatggcacggaaatgtttcttaatatgcacgtgagtctccagagtacaggaaatgtgctttcctctaaatggtcaatgtaaagaatcttaaggatatttcttgtgttgaaatttacattcgattttgtgattacacttggaagtatgtgttaaattgggtttttaattgtagcccaaaggtgcattaagcaagtgtaacattttttccacataaaacttagaaaactttagttacctgaaaagcaaggattctttactaattattatgctcattcttgatttgacttccatgttcacacttcaaagtgtaagaggaagcactagaaactggcattattgttgcactaaaaaagtctataaatcataatagcaccatgaggtgttttgcaatgagacaaacatgaagaatgaatttctttaagagagaaacacaaccggaggtgatttatataaaccaaaagaaaaaaaaaggctttaaggtattaggtactgtttgcctagcagccaggtggttataaaagattcatatgctttggtacactgataaatgttagccattattcctgaaagcttcttaaattgcatcagttgttttgaaattttttcaagaataaactagttgaaaagtctttgtattaaaaatacacatagatttttgtgaacatttccagtgtgtagtgtcgtttgctttctatttctgacctcaaaagtgcctcacttgtatattatttccattaaaagcttgactgcattctttctaatgaacaatgaaaaactgtttaactcatgtcataatgtgtctcctcagatatagttaactagcttgatagttttgagtatataatgtaaataatacattataagtttgtaaccatttctgttacttcatacccgtgtaattggacatagcagatgattatcataagaatttgttttaatggtttttttccctcctggaattacctgattaaacctgtcatgaattataaaaggactttttcttattctcctagagcttatcaaattatcacataagagataattactggaggagaaagtaaaaatggaagcttttgataattagctctgttctttaaaagtatacttttaaactgaaagttcacatatagttcatcttaataacatatttattcatccttaattgtattcagatttttttttaagtctctaagctaataatgttatatttattggtttggtaacatgttgcagctaagctaatgaccttaagtggcaattgtttaacccaggactactgatttttttatattcaagtcagtttcatcgttttacttaactcgccatataaccaaaaataacgaataatctaaaggaaaggttattaggacagtaataaaaaattatagtgtatctcaacactagaataagttggattactatattatagtttatttga

SEQ ID NO: 78733 - DNA, 1068 bp, Homo sapiens
cactttatgcaaagttctgctcattattgaagagtaaaacaccacattcggtaacttcctatcatcttaacaaaattgatgattattttgtacccatcgtagccaaagggagaaatagctaaaaacaggttctattgagagatactacaaaaatgtaatgttcctcacattattcatagtctcccactccttcattgctccataaatcagtgattaacctcaccctctgaccagtctacaagctgcaaacccagagtcctcccggacacaccctctcctgcactcccattcctggaccactgctcagcacctcccccttagtccaagctgctgtcagctcttgcctggacttctgcttaatgccccagcccacttccctcagtcctttctccatacttcaaatctattttgatctctttcgaggctctacattggccttagggcaaaagcacaaccacttagcactactgggtggactccacagtctcatcggccttcagagctctggccacactggccttctttcagtctttccgttcatgctttctcctgctgcagggccttccttcatgcaatttccaagcctgacagctcccttagcatctcccctcctaactaaatcctactcatctttcaagcagtcccagcatcatttcctcaggaaagctttttcctggacttcctgtcaggttatgacctctcacaactctatgtatgtacctaacatttatttgtgtgataaataaattaaaaactataattttcatgagaccaggcaccatgtttatttttctttatcatttcaatctctgacacctaacagagtaggatatatatatatatacacacaaacacacacgtatatatacacatatattttttaaaagaatgaataccgttaagcattgttcttttctctagtcctcccttgattcacaagtgccttaggaccagaataccccaagttctcagatctattttcctcagtggaaataacctacagagacagtgaaatcatttgatagctagaattataggaaagtcagagtgcagagtgaatactgagag

SEQ ID NO: 78734 - DNA, 1051 bp, Homo sapiens
tatacctattttaatatatattaggaatttgtaaatgttattaaaacaagaattgtcattgtaagagaagataaataaaaatgtaaaacaaaataagtaaaacccctacaattctaaattccagttggaaatagcaatatgaaactgatatagtttctctgaaaaaggcatagaaacagtgaccaacctttggtagcagattatgtactctaaataccattaaaagaatcggggctccttggagaaatgcctgattccaagtctaaggcaggaagatgttgttgtagaaagcaaggaaagtattcagagagtacggaggacaagacaaagggctcgactggcctacctgaatgggctactataaaccagagacagaagaatttgagtatcaaaagaataactgtgatggattaaaacacatcaagtatattatctgtgactttataatgttaacaaaagttcagttgcaaaaagaaccataaaagtagaaaactgatcatctaattcagttaagatagtatataaagtgttttgaaaatttaagattcttgtgaaatacaatttgcagaaatgtttagaagtgtaaaattataaataaatgaggccaggcacggtggctcacacctgtaatcccagtactttgggaggccgaggtgggtggattgcttgagctcaggagaccagcctggccaacatggctaaaccccctttctactaaaaatacaaacattagctgggtgtggtggcaggcacctgtaatcctagctactctggtggctgaggcatgagaatcccttgaacccaggaggtggaggttgcagtgagccaagattgtgtcactatactcctgccagggtgacagagtgagaccctgcctcaaaaataaaataaaataaaataaaataaaataaaataaaataaaatagtaaagtaaaataaataaaataggtttagattaaaatgatctaatagattcttttcaactttagcttttttaaatttgtaatttgtgtctgtgcttttttcaccatatttttattgtaattaatat

SEQ ID NO: 78735 - DNA, 1656 bp, Homo sapiens
attatgttgtatttacttttctgtttaatagtaaactgataacttacggtttatagttttatcaataatgtgcccactgtacaaagaaaaatcacatattccaaagaatttcagtatgtggtagtaaacatttttggattaaattttatattaatccagaattgatatttaaatttgctataaaactataagcaattactatttatctgctatttttttctcttcctgacggctctgatatctgctgtctaaaccttagtattgttttttagaaaaagtagggtctgaatttgattatttaaaagtttaatttttgaatggtgctcatgttgaattaaggcttaaaatattatatatatataattcctaatttgtgttctgaagcttgtagctcaggatatggattcacataggaatacttctattaaaaacttctgtactagctcataaagcttctttagttcattaccatcttagtaactggagtcctgtgggtctttggtagaatttcggatattaatagtataataaaaagaaaaattaaaaattgtgcattcacaaaagtagctttttctttgaaaagtatcctttttttcttaagagatggggtcttgttatgttgcacagactggacttgaactcctgggctcaagcaaccctctcaccccaccctcccaagtagttgaaactgcaggtgtgggctaccgcacccagccagatctaacagttcacttgacgcaaagtaaactaatttgaattctaaacatataacacgactgcctacataattacattatgaaataaagataagcagtgagggttaattagatggttgcatttattttctgaatatatagaaatatagtagaaatggatcatttgctctgaagtgaattaataattatagccataataatgcttttactatttcagttgttaacgtaagcttcgtgatcacacatttaaggatttaatgtgaaaatttagaattgaatgtaaaatggaaataaacgagtagattttatagtattggattatatggtaaatgctcagtaaatgttttatgatttttcttttttaaaggaagagatgatctagagagcttccagcttgagataagtggctttttaaaagaaatggcatgtccatattctgtactcatatcaggagatattaaagatcgtttaaaaaagaaggaggactgtttgaaacttctatgtaagttatcttgaacatttaaatgcatgtgtttgacatggtttttattattttcaagtcaagatttattaatgaagcattagacattttgtatattaaaagggttttaatattttacttaaaatacaaagctatctcagaaatgtttatataatatagtataaattttaccagtatgccttctaacacttgtgatttatttggccaatatagaatgtcctgtgtttgtgatttatatagtactttagtaatttttcctttatctcattctatctgttattgttcgtgactatatggctaacattgatgatctccaaagtcctatttaatctaaaaactctctgaaactaggcactggatgataatttgttgatcacttactctaacaccaagaactgctctggatactagggatatatgagggttgcttgttttgtt

SEQ ID NO: 78736 - DNA, 1694 bp, Homo sapiens
cttactctataacaagtgattttcagatttattaaaactattacgtaatgttggaatcctaggaatggagctgaatgtgattacacgtaacaaactacaagtatacattgagaattcctctggagtgaggagttacaactcatactttttataatgtatgaaaaaacctaaaattggatatatttacaacagttggagaatctacagaaatggtccattttaagaaaataaattaataatttctttaaaatatgtacaaattgtatcagtagagaaattgtatcattgtagatgtagatttgctgtgaagctactaaagctgaagttttggggtctcttatttgcacaggttctttctaagctaatttttttaaaacaccatttatgaaatgtaatcatgccataaagtttgcccattttaagtatatatatatagttcagtgaattttagtatatttacagagttaaacaaccatcaccaaactcttgaatttagagcttttccatcaccctcagaagaaacctcaactgtgcccatttacagttactccacattacaaccccagcttccaagctaattttgaattctttccttaaagagtgcccccaacattaaataagcttcatgctccttaaaatctgaactgcccttggttgtttcctttggttaccttgtaaaaaaaactgtatttcatttggttttgtaaatattttatttagctaatgatggattctccagtcaggaaggtaaattaatcctttagttaggaggataaattattgaatgaccctgatattgctaaaggaaaagtaaatgcctaatatcttgtttatcaaaataaaaatgtttcaagtaatttaaattaggggctttgcaaaagtaatgaaaatatgtatgtgatgactgtaattgagagagatggcttgctcccttatgttgtcttgctgaacaatgaaacaagagtacttacaactggaatgtgtacatagcatttatttgagaaaaatcaatgtgctggttaaaggttttagtatcccttttgaaaatttactagaaagtaagaaagtgctatcttaagtaggaactccaaagttatttcactaagacacagattctcatagtagaacctaggtacttctttagctgtctgtgtatgttcgttcttacgctgggaaagaatgtgctctatagcttgaatgaatataatgtgcttttttgaaaaagatactctgtattgtagtggtattctggtatatgatggtatattttaattatgtcactttaatattttattctgtagtgttcagagcgatactttaaacaagcataagattgttttaaattaggaatatacatttttcacaatcttttatatttacttttaggtgaaagatattctctcaaaggtccagaaaaatcatgtgggaaaaccactgctgaaaatggatttaaattcagaacaggcggtaaatccccctttttgttattagttttatgtaattacattagtgaatatgacttaattttataaatgaacatctattttgcaatatgtagcatgcatatattattttgtagaattaaaattgattgatattctggagtaatatgtcctaacatttctttagttaaattattaatttttaaaaatacctggctgaggatattgatagtgctcaatgtgctagcacag

SEQ ID NO: 78737 - DNA, 1050 bp, Homo sapiens
tctggatttaactttagatttttttttcattctctcaaaaactatttatataggattataagttaatttgggggaaaactgacaataatacttaatgttcccatacagaaacttggtatttcttaccatttatacaagttttccttttgtttttgcaagatttactgatgtttcccttttaaatgtcctgtatgtggttttggtaaaactattttttaggtattttttgttaatatgtatagaaatttttttgttattattttttagcgagttgttgctggtagttacatatttttaacacctgttggtctattttatttgttctaaattattcataaattctcagatatttgggtgtttttgctcttttctaactccttgcttatgcattatctccttttctttatttctaaagattatgattgtttttgctctttcattaaaatgtacttttgttccttttttccttaactcttgtcatttaggtaaaaacagatgatatagcaagaatttatcagcctaagcgttatgctttgtcacccaagacaacgattacaatggcacatctacttgctgctcgtgaagatctatccaagatcattaggacaagtagtggcaccagccgggagaagaccgcatgtgccattaataaggttggtgtttctttcagtacagtggaaaatgaattgatgatatcttacttaatgtttttacagattttagtctatttttctttcatgtcctggtaaatgtttagaaaaaagagtggcaggggggttcagtctaggcttagttatgttatttttgtgtatgtgtgtatgttcacttgaatttgtgtattcataaatcaaagtattttctgaattagaggaattatgaattgtttttgtcaaagctttagcaagaattatgttccatctttctaaaaagtaatcattttttgtcagtaagaatctttcggaattgtttcaagtactgacagattcgttatatccttggtgtaaagggaagaagagtttgtgctttagagtcagaccaatctgggttccc

SEQ ID NO: 78738 - DNA, 1445 bp, Homo sapiens
atattggcttctgtttattagaaacaacatcacttgaaacttttatgtaaacttttttgaaatattaggaactaaaagaaaatgtttcttcacacaggtgctgatgggaagggtgcctgacaggggaggccggccgaatgaaattgaaccaccacctccagaaatgcccccttggcaaaagagacaagaaggcggcggtggaaggggtggttggggtggtggtggtggaggtggtggtagaggaggtggtgggggtgggggtgggagaggtggctgggggggtggaggaggaggttggggaggtggtgggggagggggaggagggtgggggggaggaggaggaggtggtagaggaggtttccaaggcaggggagattatggtggaagagggggttatggtggaagagggggctatggtggaagaggctatggagatccatatggaggaggtggtggtggtggtggtggtggtggtggaggaggtggatatagaagatactaaaaactataaaaattagatagcagtgcttgcttctttatagatacattagaaatagtgttccaaataacatacttgaatatcatctttgaagtaaacaccatgttagactccctggtgataccactcttgaattggttaatatgtaagaacattgttttttattaccagttgatctctcaaatgaagtgatgactttttccatattctgtgtacccttgagcatgttgtgtctttttaaaaaacaaaaaaaagaacaaaaattattttttaaaatgtaaatatttattaccatcagacttggaaaatggaaagtattttattgtcatgattgaatttagattgttacctgtattttgttcaggtttgagacatataaaagaccccacctgtaatagaaaggaatatagacccttgcctcacctgtattgctgtggatgtgttttgtgggtttttcattcgattttacaaaatagggaaaggcacttccagttgtatttagtaggcagttgttgtgaatcatttttttctcttataggaggagattcctctctagccatgtttctgttaaagtttcattaattgaagcccaagtttactttttactgtacatacttattttctaattggatttgaaatcagcatgattttgtttgacaaagcaaagtttaagattgaggtcagaaatactttaatggagcaaagacacataccaactttacatgacggtgtgagaaatagtcctataaactggtctcttcatcatttatgctctcactttagatatccaaatattaaaaggcaggctgacctgtatcacacagaattaaggcagtaattttctgcttcagtagatcaagggtagggctaaggcatcctgtggtaattctgattcacagctagatttgggaaacacaaagttagggaatggctatatgtgatttgc

SEQ ID NO: 78739 - DNA, 1028 bp, Homo sapiens
taggccaagtaatgtatttttctcttagtgtagaaagttaagagaaaaagagctggtaccataaattttttcaatcttagtgtaaaatctgtatctcattgtaggcttctggtcaatacctatacataacaacttaatgtgatctaaccaactcaactgatagaaagctgaattgttcccagtggacaagtggtatttgatgtttagcaggtttttttgttgttatttttttggtaaactctgtggtaaaatctaaaataatgttaaaaccctaaaagtaactattgaatattctgtaatcttagacatgtatttttcaagctaaccctttgaagaaatgtgttcaaggtaggaaaatataaaattttttggttatttgtaaatttattttttgtgtgtttatatttaatgaaaagatgtaatttcatttgtgatagctgaaaaaaaggctttccataattaagaaaatacctttatcagtagctatgaactctgaaaaataatttttaaaaacttttaagaaaaaaactacttgagtaaaatatttcaagagttgtttaaaaatcttctttaaaacctttacatttctgcctcacttcttttttggtagcattagttgctgatgaaggagatttacaactactttcaacttttttaccactaaaggtttatggtaaatatggcagaaacaatagtttatcagtttcattagattttccataagatttctttgtacctttataggagtgctgcttgggttattcactacaatcacttatttcctatcaaagtttagcacttgctcctggaatcgtgttggagctgaaaccactcctatgtacacattcctataaaccttaattgaatgaaaagctgaatcaggtagactcttaatattttactctttcctgtaaggtgggattttcctgataatctttgttcagtaaaaatttcttttgtagaacagtttgctgagcagtatctggaatagcaggaaggaaatttggggccttaatgggaaaggccat

SEQ ID NO: 78740 - DNA, 1034 bp, Homo sapiens
accttgcattacagaattctcagtcatgctttcatggctcagacctgaccagagactgtttctgccaagttgagatctcccgcgagaaaacatccaaaagttttgtcattatctacctattgctcggaaatggtttattctgcctgctaaccactcacaaactttgatatgataacaaagactaactgctgcttacaaatgctcgtttgatatttaacttgctattttctattcagggcaaaataactatcttgaaaatggttgttaattctcagccacagtgaataggaaatgccaatcaaaagtagctctcaatttgtaattcatttgctattcattgctgctttattaacatacctcattctcctttccctttaggaaataaatactctgaaagcagataatgatgccctaaagatccaactgaaatatgcacagaagaaaatagaatccctccagcttgaaaaaagcaatcatgtcttagctcaaatggagcagggtgactgttcttagcccagaaactaagtagcacaatctgtagatgagtatagtgatctcatttcctaaactgtaatgcacagacctgaggaactttacactgaccagctttaaaacagtactttaaaaggaaaagcctgttactgtttatttacctaaaagattcctaatgtgcagcactgttttctctttcagttagttgactcaaagggggaaaactaaagaatgcaaaacttttgctattcataccactgatgttcatcaaaagtatgcgatctaaaacatgactatcatttcctgacaatggggcatctcggtggcctgcctggctgattcttccttaaaactaaaatctctggaaaatggatttgcttcttaccctgtgttttctgcaaactgacttactttgttccagccaaagcttgctaataatagaaaactacccatattccaaaagtagatttcctctgtatcccagcatactttgtgaacctggctccttcttcactacctcagatctaatcaattagtccatg

SEQ ID NO: 78741 - DNA, 1040 bp, Homo sapiens
agttaggtactgtctaaagtcagaaactgtagcataagacatttccctccctatacacatgtacatgttacattgtttctttttcaagtcttatagatagtggtcaagttagttagggaaacctagtttggccaaagaacacctctgtggaaatgagtaatgctgccttacctacttaccacatgtcatcttgtatccttgttaagagtagggcccatggaagtaatcatgaggtagcacataccatattaccactgaggataaaaagaaaggtgagtttctaaggctagaagcccccccttgctacctgcctccatgccccttatactcacatccttgccttggtcatctgccggcagggaaggcctcatcagcagggatgagatcacagcctacttcatgagagccagctcaatctattccaagctgggcctgggctttcctcacaacttccaagagaccacctacctgaagcccactttttgtgacaactgtgctggatttgtaagttgttcttagggtgctccagggctgaatttggggaagagtgtgggatactttaagacaggcacagacctcacaatccttatgaacccatcccagcttggagcccagacagacacctagaataacctagagctcaagcgtgtggtttttacctgcactcatcatctctcgcttcttcctgttttttcttttctattgcaatgaggccttagataaatggtaccagaaatgctgaattaggatatacttttaaagtataatattcatgtgctgtttcaagtgttataacaaagacatatgagataccttctgtctttaggagataaccttggctatgcccctcttccgttccactcctgaccaatcgtttccccctaaactcgggtcctgatgcaaggctctatatccttctcagtttggagtcctgaggaacctgtttgcccgatgattcatccatttctcgagaatgtctgggtcataaggctgctagtgagagccaggtgtggtggctcatgcctgtaatcccagcactt

SEQ ID NO: 78742 - DNA, 1018 bp, Homo sapiens
atcttggctcactgcagtctctgccttcccagctcaagtgatcctttcacctcagccttctgagtagctgggactataagcatgtgccaccatgtctggctaatttgtgtgtgtatgcgtatttttttgtagagacagggtctcactgtgttgctcaggctggccccaaactcctgggctcaagtgatctgctcacctcagccttccaaagtattgggattacaggcatgagccactgcacccgacctctaacaatatattaaaattaaaagtgtcctcaaacctaggacaaatagatgatttaggattacaaaaattcaaacggattttaggaaatttctctaaattttcttaggtggcaaaatagagtggctgtgtctgttttaaagaagggagaggaaaataaagaatgaaaatggttactttggttacacatcatgaaaataattcacccgtgtcatgtacttgacatctcgtgtcacagcgcattccccaatcagcactgagatgctcaattcctgggtatccaaaaagaccaaaaaaaaaaaaaaaacctggaaacttgtaatctttaatgctactgtcagaggcgggagttggagttgagtaagtaagagaatgtaatactctcctccacaccccatctcacacacacacacacgcgcgcgcgcacacacacacagttttgagcagggaaatgtcatgactgtgccacagctgatttcagcaagcggtgaaaagattatggaggccacgtcacatggcagtctttggaatctgaagctgagtcactgagtctgccatttaccacatgtggggcttgtttgcccgtttttaaaatggagaataatggtaaaaaattttaaaggtggttttactttgggtggaaatttaacaagattgtcttagtttgagttttcccaggagcagatcctgagacaaggatttttaagtacaaatagtttactttggaaggtggtcctaggaaaaactggtaggggagtagggaaggcagctc

SEQ ID NO: 78743 - DNA, 1045 bp, Homo sapiens
ttttgagcatttactatgaataacacagtgtttatgttaatattttacatatgtagtctcatttagttcccactattttataagttcttgtatttgcaaagatctaactgtccctcagcatttatacttactttataaatgttaataacttttaaaattattcatgttcaccatagagaacgtagaaaatacagactggcaaaaagaaaaaaattaccgtcactcattttaccatcaagagcaagataagcactatcaactttcatgggtgtgcctttcttgattctcttctatggatatttacatgtattataatcacagtaactttttggtgataaactcactataactttttgcttcccataatttatatcttaaacaattttgatcttgaaatcaatattattatttataaagaggtatgctagcacacaaggttgctcttctattttaaaattgattttttaaaaataattctgcttagtcccttcaaatataggacataaaagtgaaggttgcttggcaactgaaatgatggtaatgaggaattaaagacattacaagaaaagaagagtactcagttcttttcaatgctacatgctaattgcagtaactatggctgattacagttgtaataaatgaaggaaacacaaaacttccattaaaaattcttgatgtgaacttttttttattttgtattacagtgaaagtgagatggggtttgctgaagagaaactttactttcagaaacaagaaaagatcttttgtctgtattaacttttttttcttttcttttctttttttttttttttttggcgacagagtctcacccaggctggagtatggtggcatgatctgggctcactgcaacctccacctcctgggttcaagtgattctcgtgcctcagccacccgagtagctgggtgtgcaccaccagagccagctaatttttctatttttagtagagatggggtttcaccatgttgcccaggctggccttgaactcctgagctcaagagatccacctgcctcgtcctctcaaag

SEQ ID NO: 78744 - DNA, 1231 bp, Homo sapiens
attccaggtgagtttgtgtggcacctttaggggaaggagggacaaggaagaggtgctggctatcccaggtgtgccccctcacgtgctgtcctctccctcttgagcctgactggacatcaggacgcagcttcactctgatcctggtatttattcacctctttcagtggttgccaggagttttcaccccaaccctttgtctccacccctaaggactcagccccctactgctggtcccagcctagaaagctcactttgtgttctctcctgtctaacagagtctggcggagacaacagcgtgtttgacatctttgaactcaccggggccgcccgcaaggggtctgggcgccgactggtgaagggccccgacccttccagcccagctttccgcatcgaggatgccaacctgatcccccctgtgcctgatgacaagttccaagacctggtggatgctgtgcgggcagaaaagggtttcctccttctggcatccctgaggcagatgaagaagacccggggcacgctgctggccctggagcggaaagaccactctggccaggtcttcagcgtggtgtccaatggcaaggcgggcaccctggacctcagcctgaccgtccaaggaaagcagcacgtggtgtctgtggaagaagctctcctggcaaccggccagtggaagagcatcaccctgtttgtgcaggaagacagggcccagctgtacatcgactgtgaaaagatggagaatgctgagttggacgtccccatccaaagcgtcttcaccagagacctggccagcatcgccagactccgcatcgcaaaggggggcgtcaatgacaatttccaggtgaggcttcttctctgagccctgctccgtgggatcatctgctagacaggtgacctgccaggagggctacaggaaatcctgtctgtaaactaacgcagcagttctcagattttaggcagcatgagcatcacctggagggcttgtgaaagctcaccctgctgcaccccagccccagagtctgggattctgtaaaactgcaactctaacaagtaccaggtgatgctgatgccggtggtctgggaagcacactttgaaaactactcaaggaaacaagaaatggttttcctttagcagtcagcctgttcaagccttagatactccttaggctcttaagaaaagagcttatttcaaatgcattcccccaattttaatcttgtttgaaatggatactttcta

SEQ ID NO: 78745 - DNA, 1356 bp, Homo sapiens
tccccaccccgctctgcattctacaagtaatgtgtgtcctctgcccacagggggtgctgcagaatgtgaggtttgtctttggaaccacaccagaagacatcctcaggaacaaaggctgctccagctgtgagtacccctctatttttagggcacatagggaatcagggggaattccaccaaaaacaaactgaggaatttagcaatagtggttatacataaattacccccagtgagatcatcaagaggcatacagaagtgactccaaggggtattatacacacacacgtatacacacgtgcgcatacacgcaacccctctacctgcatccttcacaccaaatgaaacgtcttctaccactaagaactcaagaggctggttggtaagagtatctatttgaagttttcattttgtttcttgccagctaccagtgtcctcctcacccttgacaacaacgtggtgaatggttccagccctgccatccgcactaactacattggccacaagacaaaggacttgcaagccatctgcggcatctcctgtgatgagctgtccagcatggtcctggaactcaggggcctgcgcaccattgtgaccacgctgcaggacagcatccgcaaagtggtcagtggcctctgcacccagcccgttagcatgaaccctggaaggtttatcgcagatggtcccaaatgactgaaaatgcggggggacactaatgatattctctcccatttagactgaagagaacaaagagttggccaatgagctgaggcggcctcccctatgctatcacaacggagttcagtacagaaataacgaggaatggactgttgatagctgcactgagtgtcactgtcaggtaagggaccttcaccagccagaataagaatcgacggcttttgtttgaacctacatctttggggaaataccctaatcgccacagagattctttttatgttccatggcctgataacaaagtgttttttttttctttaagatgcaattatggcatctataagttcttctttaaactctcagatggtttatcaaagtattaattataccccaggctaagtatctaagagaatgaatctactaagacatctgaataatttacctaccttagttcaaagactaagtgttgaatgtcaggtaaataaaacctggttggaacattcatttttttttcccaaccctgatttatattcagctttggcataggttcttttagtacagtagcaattgtttttcaaatcacttagtctgacactgttaggatgttactgtctgctttgctcagatggcactgccaggtgtgtgattcactctagcatccccgcatgccagtggccagtgagt

SEQ ID NO: 78746 - DNA, 1057 bp, Homo sapiens
gcttaaatacaaatcacagatgactggctgtgggaaccaacttcattaaattccctttcttttccaatataaagacagatcacagatctatagatgaggaaaaagtgcttatagatcttccttcctccccccaaacacataatataaaaatgtaaaagtcctggctgaattttctgagtttgatttcagacatagatttgacccatgatgtttgttggttcctctgctataaattctttgtactgtaacttccacccttgactaagtagcaattaaaaagaactttccaaggaatggagtgacacgtaaactagcactagaactgtctctacgatagtggtggctgcaaatatgacagagacagatctatgaaaatcattccactagagcattgacagccctgaccatgttttggcttgtaaaggaaatgttacaggatgtagacttctgtatgcaacatgctcagcagcctgttcccctctcactctcttgccctgcagaactcagttaccatctgcaaaaaggtgtcctgccccatcatgccctgctccaatgccacagttcctgatggagaatgctgtcctcgctgttggcgtaagtttctcaaatggcatagctattcttcagtgactaggtcagttctacatacatcctagacagccgagcacaacactggaaccccacccccatctccatcatgcttccattcagtttcttgctgcagcagctggttaactgacagcttatctgctgtacagagccaaaactccattatgagtacatcgtaattacccatctggattgcagtaatggcagtgaagatcttggtatagctcattaattctgattttttgctttgaggaaaagagatgaagacgtggcagcaacagctctaagttgactgcttttagaatttgaccttagtggcacagagttaagaaaaatctgctcaccagagatattgacaggcttactgtgtaagcattggcctgatcgggcctggaagttttgcccctttcatctgtagggataagagggcctaagagaatagcagcaa

SEQ ID NO: 78747 - DNA, 1735 bp, Homo sapiens
gacctgggataaacccctgggccgttggcctaagaaatatgttgcttttcatcctgtataactgcaactttgtgccggctcatattatgttctagagagctcatgtacaccatggtgaccatagttaataatactggattgtatgcttaaaatttgctaagagagtagatcttaagtcatcaccaaaaaaagtaactgtaagatgatggagatgtgttaattagcttgacggtggtaatcacaatatatgtgtatatcaaaacatcacattatacaccttaaatgtatataatatttgtcaattatacctcagtaaagccaaaaagaaataaatatattgcttttcaccctctggcaagtggagggccctgaacagagccctctaaagaacagcttgtcctaatcatcacgtacctgatgaacctctgtttcccctgcagccagcgactctgcggacgatggctggtctccatggtccgagtggacctcctgttctacgagctgtggcaatggaattcagcagcgcggccgctcctgcgatagcctcaacaaccgatgtgagggctcctcggtccagacacggacctgccacattcaggagtgtgacaagagatgtaagcatcttagcctctcagggacgtggagaactgacctgtccttgttgtcgtcaccaagggcagctccacagcatgtatattaagaacacgggttctaggatctctggatcccaatcccactgcttagctgtgcacccttgaacacaacttaccctctctgaggctctttcctcatttgcaacttggagataataatagttcttgataagtttatcttgagcattttatttagatactgcatgtaaagcagttagcactgagttttggtttatggtaagcaccctgtaaatgttaggatattaacagcaacccataaaaacagcgaacttatccgttctctggtagaaaacattccatgttgacatttgggcatgtggccaggagccaatttctaccgtacactgggtttagttgccattgaccatttcctggaaatacttctgcgtgctcctgatgggagcctctatttggctgtctctaagccaaaaccatttgtgaccatcaactctgtactttagttaaacaggatggtggctggagccactggtccccgtggtcatcttgttctgtgacatgtggtgatggtgtgatcacaaggatccggctctgcaactctcccagcccccagatgaacgggaaaccctgtgaaggcgaagcgcgggagaccaaagcctgcaagaaagacgcctgccccagtaagtgtgaggtccgctgcaagggtgagcatgggcagcagctctgcccagctggttgcctggcatctgcagcctgcagttcagtgggtcatagagcaggaaggttacctactagagaaacaaacagaagcaaagtcctgcaggctcagcaacttcttttaatgaaaaacaaactcaccctcttccccagcattctttccatgtgtcagagaagcagaggtttcttgaacgggcttaggagagtctatgacaagggagggatttgaaagttgatcttaattgttgcctgtggttcatcttcttacagtcaatggaggctggggtccttggtcaccatgggacatctgttctgtcacctgtggaggaggggtacagaaacgtagtcgtctctgcaacaaccccacaccccagtttggaggcaag

SEQ ID NO: 78748 - DNA, 6172 bp, Homo sapiens
caggagctttgctcttttactgaatgctgcagtcagcattcgaggagattccagcttggttagtcctgagcgatttgattgctctaagatgcaggtggacaacataatcccaacaagttatcggttccctataccctataatatcttacactgtgttaagtgcccagcatggcagtatggcagcttagaccaaccatttactgtgactgtctctctctccttgtctcagatggatgcctgtccaatccctgctttgccggcgtgaagtgtactagctaccctgatggcagctggaaatgtggtgcttgtccccctggttacagtggaaatggcatccagtgcacagatgttgatgaggtgaggaactgatggggctccgagtttctggatctaggaaagcagctaacctgtgcagtcgcttccttatggcagtgacttctaaacatgatgcacgctcttatttcctccatagtgcaaagaagtgcctgatgcctgcttcaaccacaatggagagcaccggtgtgagaacacggaccccggctacaactgcctgccctgccccccacgcttcaccggctcacagcccttcggccagggtgtcgaacatgccacggccaacaaacaggtacagtcaactagacgagtaaaccagaggacaggagagctgtccttgaccaaaataactgggagcgggaggaatgtaatttcatacccttcaccaaaaaaaaaagggcgaggagatgaatgtacggtctagttttagaaacgtgattagaaaatccatggtaaatcctgcaggggaaaaacagtcttccatatttaaaaatgctgctctggaataagttgtgagcagatggacttgtaaacgcctaggtgctgagcaaattcaagaaaaataaacataaagcaaagtttgcttatagcctcagggagaatggggagggacagaggtaacccacactcttccaaatggagcctctgtctactcagagatgacagggatctggattcttgtttccatgatatctgaggattctcaaaagctctgtgtaacagcagcatggtgtaccctcaggtgtgcaagccccgtaacccctgcacggatgggacccacgactgcaacaagaacgccaagtgcaactacctgggccactatagcgaccccatgtaccgctgcgagtgcaagcctggctacgctggcaatggcatcatctgcggggaggacacagacctggatggctggcccaatgagaacctggtgtgcgtggccaatgcgacttaccactgcaaaaaggtagagccaggtcctttgtgtgcctccagaaagagggcccatcaccttatcaaaacacaggctaaggaattttaaatacttaaagtttggacatgaaactgaaagattaaatctcccaaagggagaggggcactaattcctattaaaattaaatcacttggtgccaaaaacatgaacagggctagctctttttgggcaactgtgttccatagtcaactcttctgtccaaaaaaaagttcagtactctatccaaataccagcaaagcatgacttgtgttcacaacatctataaagcctagagcatttacacaaattctgtatgtatatcccccaagaaaagttttattttcttgtcttcccataaaaaaaatatgctgttactgagccaaattctgttctttttctatttggaattccaggtacactccctcgtgcatgagctcagcatgaggaaggcaactgaagcagtgatatatatcttctctttcctaggataattgccccaaccttcccaactcagggcaggaagactatgacaaggatggaattggtgatgcctgtgatgatgacgatgacaatgataaaattccagatgacagggtaaaaacagttttctatccctttttcatcttttcagttcagcaacagcctgaaacactttgggattcaaggaaattacatggctatagcaaaaaatataccaaatcaatacacaggataattagaaattattcattgtgttccagtagtttaaggatgtagatgttgccaagagaatttttaaatgagggttttgtttttcatcagaactgtttttctctgtacttgagaaattataatgcataaacaaatgccactttgttccctagattcatttcaaatgtcacatcgaaattacagtaaaattgactttgggcacactatgaactgagatgatgggattatattctacatctcactaacttctaacccacagggatccatttttttaactatgtccttttaacttttgtagtgatcgttttacactgagtgatcaattagcctatccactaggtagaaagtattgctgattttcacagttttagacatattatgcacatggtttgaggcttgagctgttttcaaggacaacattgttaagtgctccatttcttctctttgcaggacaactgtccattccattacaacccagctcagtatgactatgacagagatgatgtgggagaccgctgtgacaactgtccctacaaccacaacccagatcaggcagacacagacaacaatggggaaggagacgcctgtgctgcagacattgatggagacggtaaggtgctgcctgatcagagggcccgcgggagacagggacatgcacagctttccaaacgtacttctgtctagtcctggctattagtatgcactttggtggaaacatccaaggctggagagcccagctcttatttgtcccttgttctcttcaggtatcctcaatgaacgggacaactgccagtacgtctacaatgtggaccagagagacactgatatggatggggttggagatcagtgtgacaattgccccttggaacacaatccggatcaggtaggtggatggactcctttcagagtctttcagtaaactgttggaatatccctttcatggcctttgaaaaatgagcttaacaaagttcaaacactttcattactgtggctccctggcttctcatagccaactggaatacgttcatgtaaataatttgcctgatgtgagctccttgcacagagtctcacagatctttagcatgaagatctggtaacttcagtcttaccttctgtaagaagggctactggacttgctcagcatcgtctaccattgttaagacaaattatacaaagcagacatctgtgactgacaactgtacaataatattaatcatatgtaatactaagagatggaaaaataaatgtgcataagcaaaataaccattttcatggctaatgatgtaatctagctataagaaaatcatcaaactaaggatacatccaaaaccaaagtaatttatccctgtcataaacattacccagacagtatacaacacagggaccagtggtctgtttccatcttttcaggacttttcagagaagtcgacgtgtcaacagttttacaactgaaaccttctaaggaaattctctgttataaagtatccagaaaatttcatttaacattaagatgtaaacagttaacatttcatttcatctttagtaattaaatatcactctatttgaccttatttagaaagttttatatgtaaaacatttttaaattatcccttctcagatttttatacgaaaacaaagataaaggaaaaaaacttttaaaatgtaattgctactattgctatctttctgcaggagtgtgtaaatagacatgacaccccactggctgtatcaaacaatggagaattttccctgtggtgggggcataagttatctttaacatgaatggtttatactgcaatttaccctccatttacatctctctttcagctggactctgactcagaccgcattggagatacctgtgacaacaatcaggatattgatgaagatggccaccagaacaatctggacaactgtccctatgtgcccaatgccaaccaggctgaccatgacaaagatggcaagggagatgcctgtgaccacgatgatgacaacgatggcattcctgatgacaaggacaactgcagactcgtgcccaatcccgaccagaaggactctgacggtgagtcatgggagccactttctaagacagggactgctggcacagctgtgtagattgaagaaatgaaaccaaggctcaaagcatttgacaggatgaagggaccaaatgccaacttagacaagatagtgacatttctgacaccagtaataataatagcactttagaattttgctgaactcttgcttttttgacctcaggcgatggtcgaggtgatgcctgcaaagatgattttgaccatgacagtgtgccagacatcgatgacatctgtcctgagaatgttgacatcagtgagaccgatttccgccgattccagatgattcctctggaccccaaagggacatcccaaaatgaccctaactgggttgtacgccatcagggtaaagaactcgtccagactgtcaactgtgatcctggactcgctgtaggtgagtagcgagttcttagatcctaagagactgatgcatacatggggaaaaacaaatataaaacctggcagttgtacctatccctgtgggtgctgaggatgtctaggaacatgatggagaaccttctgaaggctgcaggttttaacctggctctgggctcttcttccaggttatgatgagtttaatgctgtggacttcagtggcaccttcttcatcaacaccgaaagggacgatgactatgctggatttgtctttggctaccagtccagcagccgcttttatgttgtgatgtggaagcaagtcacccagtcctactgggacaccaaccccacgagggctcagggatactcgggcctttctgtgaaagttgtaaactccaccacagggcctggcgagcacctgcggaacgccctgtggcacacaggaaacacccctggccaggtaagaagcaaagccctggaacagagagagagcttatgggtgcctgactagcactggggatgctgtgctttgaccaagactctgaccagggagtcttagaaagttcccagcatcaccagctgcagcattgaactctgctttgtaaaaacataatagtgttgaaaagggagcttgaccaagaattgccctgcaaatcctaaggtgccttcagccttttcaaacaaaaaaacctccttccctcctctctgtctgctttatatgtgtgctcagtggcacacaacaaatatgagaggacttggaaaaattccccattgcagccctctaacttagatcagctcagtacctttcaagcattgtttctgatggaatgaaatagaaatctttacctgaaggagctgtgtttcaacctttccttttccttttccttcaggtgcgcaccctgtggcatgaccctcgtcacataggctggaaagatttcaccgcctacagatggcgtctcagccacaggccaaagacgggtttcattaggtacgatcatactgattcactttcacttacagtcacactgagggacaaaaagacaaaaagtattaaatagcattgtcactaaacaagattttttttccctgcagagtggtgatgtatgaagggaagaaaatcatggctgactcaggacccatctatgataaaacctatgctggtggtagactagggttgtttgtcttctctcaagaaatggtgttcttctctgacctgaaatacgaatgtagaggtaagagcaacatcaccatgaatgtacactggacatctctatttcagactaatatcaaggatgacggttatgggggagtccagtgtaaagactgttttggagacagggttatttctattttgcttttgaggacacaaggacaaaaatggaataatgcctaggcactgtggcttatgagttcctgagtccttagctataatattagtttgcttagcaatctctgtgctcctcatacacagtgcaaaggtaagctgcagaaaagctcctatataatttggacttcattaataatactgttctttacaattatatatttatatatcttactgcttattgttttatgcatgccatcacagcacgagttagcattcccaacttttccctgtatacaaagaagggagaggaatgttgctttcatattggcatgttaaattaatgttcactattaaacttagcatttt

SEQ ID NO: 78749 - DNA, 2768 bp, Homo sapiens
taaattattaatgtaatttttgagtccaaatttttaaaataagactccctaaactgttaacattgaaagcctttggaaagcataatatatgttctggaaggttcacgctgtgtcggtctcctagcatcaatgtcagctaataaaattaaatgctaatgtgcttgaacaaccttaaaattaggcttttgtcattagaaaagtagagctattcctatgtggttaacttattaactaagatgtctatgcttttatgaattagttttcatttgtatatttatttatatttgtttatttaacagatccctaatcatcaaattgttgattgaaagactgatcataaaccaatgctggtattgcaccttctggaactatgggcttgagaaaacccccaggatcacttctccttggcttccttcttttctgtgcttgcatcagtgtggactcctagaacgtgcgacctgcctcaagaaaatgcagttttcaaaaacagactcagcattcagcctccaatgaataagacatcttccaagcatataaacaattgctttggtttccttttgaaaaagcatctacttgcttcagttgggaaggtgcccattccactctgcctttgtcacagagcagggtgctattgtgaggccatctctgagcagtggactcaaaagcattttcaggcatgtcagagaagggaggactcactagaattagcaaacaaaaccaccctgacatcctccttcaggaacacggggagcagaggccaaagcactaaggggagggcgcatacccgagacgattgtatgaagaaaatatggaggaactgttacatgttcggtactaagtcattttcaggggattgaaagactattgctggatttcatgatgctgactggcgttagctgattaacccatgtaaataggcacttaaatagaagcaggaaagggagacaaagactggcttctggacttcctccctgatccccacccttactcatcacctgcagtggccagaattagggaatcagaatcaaaccagtgtaaggcagtgctggctgccattgcctggtcacattgaaattggtggcttcattctagatgtagcttgtgcagatgtagcaggaaaataggaaaacctaccatctcagtgagcaccagctgcctcccaaaggaggggcagccgtgcttatatttttatggttacaatggcacaaaattattatcaacctaactaaaacattccttttctcttttttcctgaattatcatggagttttctaattctctcttttggaatgtagattttttttaaatgctttacgatgtaaaatatttattttttacttattctggaagatctggctgaaggattattcatggaacaggaagaagcgtaaagactatccatgtcatctttgttgagagtcttcgtgactgtaagattgtaaatacagattatttattaactctgttctgcctggaaatttaggcttcatacggaaagtgtttgagagcaagtagttgacatttatcagcaaatctcttgcaagaacagcacaaggaaaatcagtctaataagctgctctgccccttgtgctcagagtggatgttatgggattctttttttctctgttttatcttttcaagtggaattagttggttatccatttgcaaatgttttaaattgcaaagaaagccatgaggtcttcaatactgttttaccccatcccttgtgcatatttccagggagaaggaaagcatatacacttttttctttcatttttccaaaagagaaaaaaatgacaaaaggtgaaacttacatacaaatattacctcatttgttgtgtgactgagtaaagaatttttggatcaagcggaaagagtttaagtgtctaacaaacttaaagctactgtagtacctaaaaagtcagtgttgtacatagcataaaaactctgcagagaagtattcccaataaggaaatagcattgaaatgttaaatacaatttctgaaagttatgttttttttctatcatctggtataccattgctttatttttataaattattttctcattgccattggaatagatatctcagattgtgtagatatgctatttaaataatttatcaggaaatactgcctgtagagttagtatttctatttttatataatgtttgcacactgaattgaagaattgttggttttttcttttttttgttttgtttttttttttttttttttttgcttttgacctcccatttttactatttgccaatacctttttctaggaatgtgcttttttttgtacacatttttatccattttacattctaaagcagtgtaagttgtatattactgtttcttatgtacaaggaacaacaataaatcatatggaaatttatatttatacttactgtatccatgcttatttgttctctactggctttatgtcatgaagtatatgcgtaaataccattcataaatcaatatagcatatacaaaaataaattacagtaagtcatagcaacattcacagtttgtatgtgattgagaaagactgagttgctcaggcctaggcttagaatttgctgcgtttgtggaataaaagaacaaaatgatacattagcctgccatatcaaaaacatataaaagagaaattatccctaagtcaagggcccccataagaataaaatttcttattaaggtcattagatgtcattgaatccttttcaaagtgcagtatgaaaacaaagggaaaaacactgaagcaca

SEQ ID NO: 78750 - DNA, 1046 bp, Homo sapiens
ttgctatgacttactgtaatttatttttgtatatgctatattgatttatgaatggtatttacgcatatacttcatgacataaagccagtagagaacaaataagcatggatacagtaagtataaatataaatttccatatgatttattgttgttccttgtacataagaaacagtaatatacaacttacactgctttagaatgtaaaatggataaaaatgtgtacaaaaaaaagcacattcctagaaaaaggtattggcaaatagtaaaaatgggaggtcaaaagcaaaaaaaaaaaaaaaaaaaaacaaaacaaaaaaaagaaaaaaccaacaattcttcaattcagtgtgcaaacattatataaaaatagaaatactaactctacaggcagtatttcctgataaattatttaaatagcatatctacacaatctgagatatctattccaatggcaatgagaaaataatttataaaaataaagcaatggtataccagatgatagaaaaaaaacataactttcagaaattgtatttaacatttcaatgctatttccttattgggaatacttctctgcagagtttttatgctatgtacaacactgactttttaggtactacagtagctttaagtttgttagacacttaaactctttccgcttgatccaaaaattctttactcagtcacacaacaaatgaggtaatatttgtatgtaagtttcaccttttgtcatttttttctcttttggaaaaatgaaagaaaaaagtgtatatgctttccttctccctggaaatatgcacaagggatggggtaaaacagtattgaagacctcatggctttctttgcaatttaaaacatttgcaaatggataaccaactaattccacttgaaaagataaaacagagaaaaaaagaatcccataacatccactctgagcacaaggggcagagcagcttattagactgattttccttgtgctgttcttgcaagagatttgctgataaatgtcaactacttgctctcaaacactttccgtatgaagcctaaat

SEQ ID NO: 78751 - DNA, 1044 bp, Homo sapiens
acaacaaatacatttcagtctagtttttaatgtgttacacaaagctggttctataagtgcttggcatcaataaattaacaaccagcatttttgccagcaaagccagcagcatgcatataaaaccaacaagggatattaggcccactgccaaagctttatacaactagtgtcacttaatttagttctcatatcagagtggaatcatgctcgttctggaaaagtatttcttccaaccctcccggaaactggaaattaatatatttctctgcttgcttatagccaacactacaattttacttttatctaaatctggaggtaatgtttaaagactgtaattttaagctatccaagtgaggataagttttaaaacattacatggatagtggtgataacaagtgaaatggtcattctaaacccctaaataatatgaccactgaatcagatatgcatagagcccaaaaggtcctttcattcaacgtccagaatgtattcattcaaatattatttagtgagcaccaactatgtgccagtcaatgtctgggtaggcagagctattccgatagtggttatcttgcttggtgaacagaaacaggaatgcaggaaacaaattctgccaaaagatccctacacttaagaaatggcaaaaaatatactcctacatattaaaaataaatgaaaagaaccatatattagatgcaaacaaaagattcatgattattttctctcttttgtctttttctttttctttttttagagacagagtctcgctctgtagcccaggctggagtgcagtggtgcgatcatagctcactgcagcctcaatattattttcttaatggtgtccaaaagaatactgaagaaaggtcagcctggaatgttgaaccctacttatttcataggcagaaacagctgccaggttttggtcaactgctgtcttactaagactgccaaatggaaagcccaatagggctgccatgttatactgcatgtcattcaaatgttaccaatcacttaacattcattgtaaatactgagtgtttagga

SEQ ID NO: 78752 - DNA, 1020 bp, Homo sapiens
tgaacccaggaggcagaggttgcactgagccaagatcacgctattgcactcccactccagcctgggcaacaagagcaaaactctgtctcaaaaaaaaaaaaaaaaaaaaaaaaaaaaggaaaagaaaagaaagaaagaaaggtgaaagggcattgggtgtcaaaagcaggagtgttattgagtaagaggctgcaaagcagggaaggacacagattggagagaaaaggagagattgagattgccaaggagaaacctcacatttaaaaggtttacttgggacccagccatttgtagctacctgaaactgggatgatattttgcaaatagatacagacaagtaggcagaactgtctgccccattctcctgccaacaacaaacaaaacataaaacataattccaaataagggaaatgcccattactcagactttccctttgaatctaataatgtcacccaagtcttgaggaatttgctaattgtttgtagatcctacaaggtcataatctagacctgttttaaaaaatcttttaaaacttcaatatatttatttgaaagggatgaagaaatgatatacattctacccagtctgcaggattacttgacacttgccgtcataggctgggactcaagaagtattagaggccaccatttgttttttcagttagtcacagcctttgctcacagggcttttgaaattattttaattcagttacacatatagttgaagctacaaatttatctcagttctacattgtaatactggaacaatgcattgccaaggggcgataaagtcagaataccaatttatattgacagtttggtgagatattcttctgtgattatacaccaaagccttagatgtagaaattaatgggaaaagtttttaattgaaaatgtattttctcattttttaaatttattttttgttaaagtgaggcacctgggtttgaattttatactgctaatactttgggaaggccatagtggaggtggaaatatggttttgagatgaagcagtgt

SEQ ID NO: 78753 - DNA, 1065 bp, Homo sapiens
attcctaaaagtccaataaaaaaacccacagcaagtgttttggcaaagtagttctaaaaatgactgtatgcataaagcattggtttgtctttgagtgacctctttgactgacctagataccatgattagccatgtgccagttccagggaagatgtgcccaagttgctaattcctacttcgtatctcatttgtatgtcttactaaaatcagaagatcccccttctgccctgctttcatttagaagctgcctgatactcacagtcagcatggggaccctgcttgtttttaggctggtttatggactgcctttgttgagaaaaaccactctgctgcctgtattctgatcacatcaccaatcacattgctcctgaccatcagtcacatttgtcaaaaaagtgacaaggactccaagagcctggagaaacccatttgtgggtggctgttcgtgatcccagacttttgttctgctgctagcttcctgctcctgctttctccttgcaccagtgtaaaactcagttcattcattcctggtgccctttgcacttagctatctcttaatgatggtagaaggtccttccagccccccatcccacttatctagtaagatgtcatttattatcttaacaggtggcatcatggcttaggctttggttggatcagcctgagaaaatagctggaatccaggtaataatataaacattgaaagagacttcaaacctcatgtaaaatcttgccctccagccactcaaactgtctcctattccaaaatacttgagcagagttgctgtagttcacatccctcatcatagatggtcctgagcagtctagatggtggtcgggatactctgggccccactctgccttagccttgtgtccactcctcacttcactcttttcctcttttctctcctgtcagtttgacctcataaatatgcctccaggatctgctctttctccgctgtttactcacgtcttggggagaggtgctaactagatttctgtccctcctgtctcttgctcctccagttctaaaatcctccccaccccgcatctgctgatttcact

SEQ ID NO: 78754 - DNA, 1085 bp, Homo sapiens
gtgttgaatacctcatgtagtttattaaatactgtactgaaaatatattgcttttgcaccatggtaaagttgaaaaattgaaagtggaactctcataggttgggaccatctctaattgagagagtgccttgtattaggagtgactttgtattttctgagcaagaatttttgaggacatctctgccttgtatagaatatgtgatatttactccctggttccctgggcatcccttgtgtgctcatttgcacctttaattacaactactttttgttggggcttcctgtgtagtttcttagggcaagaaacactttcagaggctgctaaatgggaaggaaagaataactctctgaagtcaacctgagtgttaattcaatttccaggaacacagagttcaagcgagactccagcagagacaaaataatcaaatctcagttttcagaccctttcattgattgatgagaatagcaccttttgtatttgacctgttgtttctgtggcctgctcccaaggttgcaagtctttagtagcaatgaatctacaaatgaccagaagccttaagatgaagctttctgcgtctgccaggtgaaaggcaggattagggactagagggctaactgcctgtttctctgcaggatgctattattcttaagattggatggaacttttccctgaagagtgtcaaatcatttttcttgttaataacaaatcaatgggctctagcaggtaaggatcacaccaggtgcttgggaagggtaaattctagcctggccttgctgctgaatggtgggttgagtgctggtaaatcaccctgcctcttttgtgattgtacttgcaaggcagagattcttaaacctagtatgcataaaaatcacttgtcaaaatgcaaattattgagtttcaccaacagaaattctgttttagtgggtttgacatggggtcttggagtctattttttcgttttctttgagacagagtctcactttgttgcccaggctggagtgcagtggcacaatctcggctcactgcaacctctgcctcctgggttcaagcgatccctccacctcagcttcccaagtagctggga

SEQ ID NO: 78755 - DNA, 1050 bp, Homo sapiens
agtttcccgcactagccatgccagggtggagaagttccagcaagcacttctgttaaagatacttgtttcgtgaaaactatacaatgtggcgttttcattcctatctgtgattcatttcttaagttcgtggagttcctttgctccccttcccccagcaggatgtgggcaaagctgtccccctgccttcttccttcgcctgggcttctggagcctccggagctagctcccggcgcggagctccgcctacggcccgtccccggcgcggaaccccgcccacgagcccgtttccagcgtggaacaccgcccatagcccgtccccagcgcggagccccgccccgcaggctgccgggggcccaccgccgcccaggcaaggccgccctgccttgggcgcagcgctgccatggctgggggccgtggggcccccgggcgcggccgggacgagcctccggagagctacccgcaacgacaggaccacgagctacaggccctggaggccatttacggcgcggacttccaagacctgcggccggacgcttgcggaccggtaggaacgtggcttgtcaggcccgggctggcgtgccctggcctccccgggccctgggccaaagcccggacacttccagattgggccgccgctttaggatcctgcagtcttttcatcccttaggttccacccatgctcactttagtccttgcacctgcagctggtctgcagaatcccacctaggccgaattcttctacagtcctttccccatgatttccccagaggaatccccctggattcctccctcttacctggcactgcttcttattcctgcctacatcccataacataactgcctccttccaaccttgtcctttttcccctctgaaagcccttgcggatgataccacagcaattcatacgcgccccttgctactttgttctgagaacgctttttgggctctcgcacaggccttacgtcctcaatcagaattctcaagtctcatccatgcattcaaatctgcacgccacataattccctctgtactccccaggcatcctcact

SEQ ID NO: 78756 - DNA, 1099 bp, Homo sapiens
attcctgacctcaagtcctcccgcctcgcctcccaaagtcctgggattacaggtgtgagccaccgtgcccagccttttatccaaaactcttgagacttgatgggtttcagaattcagaagtgcttctgttcacgtttatgtgtgcacattccacacattacctaataccttcctcagtgtctggggcagcatcgaaaatcaaacacaatgaaacatagaaatactcaaatttcacactgaacaaataaacactataactaacctcatgtcagttcaggctaaatttgctgccaataaattcaggttagatttttttttcaacttcttttagtggggatgtgttgtaatataaatttcagtttagtagcatatgtatatcatttataaataacattttgaggtgcatgctaaaaacttttgcatttgtaaaaagtttagacactgctagtttaaagtatctataatttatagatagttacaaattactaacttattttggctagctttccacagcagcaaaaggtctgctcatttataatttgatagcttttggaaacatccctccaaaaaacttgcttcaatccctggatcccccagtagtgtatggtggtgtttgttttcctttatcttcaacaatactatatatgttagactttttcatctttgccacataaatgaaacatatctcattttaatttttatttatttataaattatctagaacacctttgtttacaaaccattgatttttctttttctgtgaactgctcatactctggtttatttttctactctgtggtccattttcttgtttatttgtaagagctaaatatcttaagaaaactagcattttgggtcatataatgcatatatttttctcctaattatatgcatttatttacgtaatttatgtgatttaaaaaatgttgatagagtcaaaatgaccttttttttcttttatggtccctgtgggttttttttccccctctgttccaatgttactaaaaaccaaattcgtcaaagtttacttttaacttgttcatgacttcgtttttaaattttcatcaaataaagatataagtaggtttttttttttaag

SEQ ID NO: 78757 - DNA, 1033 bp, Homo sapiens
tttcagttttctgttttgacaacatagaaacagattgaaattcgtagtattttctccttcctgctcccattccacataaaatttcatttcctctatttcaacaaaactacatcagcaatagatgttttcatgaaacctgtctcattttaagcctgttcatagttatagaattgtcactacagatacttatatttgcctagtgactattttgcttcctctgatgtgttaacttttgtttatttatttcttcataagttaggaagaggaaaatttggaagaaaacaataaaggcatggtgactgttgaaagcccttgcatagttagagtgtggctggtattagaaattcagcaagtctgtgcctcagatgacctttcactgcctagagtgagggagagtatttggatctgtcctgcctctcaatggggcactctggcgagtgtccattgtgcagggctgtgctgtgcactgcagtacgtttagcatccctggcccccacctaccaatgccacgagtgtcctccaggcattgaaacaaccaaataacctacatatttccagactccctctgaaggtgatgtcacctctggttgagaaaaactagttagagccaaagtgttagccatcagcacttaagcatgtctatttggtgtaatctttccccacccatcccacatggaaaggcaggttggcctggatggcgttaagtagtttgaaattattgtatggggaaccagtgaaggtttttgagatggaaagggacaagtaaaaggaaactctgctttacacagtgggtggtaaatttatggaatttattatcctaagaagtgatagggaggatatgaaaagacagataagtcaaaattgagctccttgaagtcagtaaccattcttggcccccaaaactgtcctgagagtattatagtaggtatactatacatactataaaaatattaattaacgaaacgttaattataaaacattaatgaaaaagataattaaaaatttatgaaaggaaattaaaagagtgcctctc

SEQ ID NO: 78758 - DNA, 1130 bp, Homo sapiens
aaggaagagtcaatcgatgcagcaacttcattgttgtcttcttttaagaaattgccgcaaccaccccagccttcaccagccaccaccttgatcagtcagcagccatcatcaagacaaaaccctctgtctgcaaaaagattatgacgtcctgaaggttcagatgatcattagcattttttagcaataaagtattttaaaattaaggtatatacattgatttctacagacataatgctatttcacacttaatagactaccatatagtgtaaacataacttttatatgcactgggaaaccaaaaactttgtgtgactcgctttattgtgacatttgctttactgaagtggtctggaactgaacctgccatgtctcagagggccgcctgtgctagcattcatctgagtcatcgtcatataatgagatttgaatgggtgttaaacatgggaaggcactgtgcaaatcactcttcttgtttatctaaaattcatttccattaagtctggagtactggaaagtctaaaatagacataattctaaagaaatttttttattttcaagtaaaatagagtataattaggtactaaagcatggcatagggattcatcttggtatggcattcactgatacttgccttttaaaactaggagtcatttaattatttgaatggaaataagtactcaaaaacagcttgttcttaagcacttccaattgcttatgaatgatttttaatctatacacagctctttgtcatgtaaaaataaacttaagtatactctattttttcaaatttgtaaagccaaagtttatttttttattaatttactcaacagatatttattgtctgtgtaccatgtgtcaagtgctattccagcactgggaaaaccacagtgagcaaaccacaccatgggctacactgggaagggaacagacagaaagcaatcaaataactgcacaaccaatcaggcagttataagtgccatgaagaaaatcagggtgagcggtctagagagtgtgacagtggagtggctgttctttacaaggcattcaggagaggcctccaagacttaagcagaggtctgagggaggccagtgagccctgtagcaccaggggagtaggaggcaagagtcag

SEQ ID NO: 78759 - DNA, 1091 bp, Homo sapiens
ttctaagtgggcctctgaccgccagtttgctttcctgttctgtagcctctcctgtttgggccttcccattatttgatcatttgtggttgatttttgtttacatgtttaggtgatgatctttgaactggcttaccacgtgcagtcatttctcagcgagcataacaagccccctcccaagtcttttcatgaagaaatgctggaaaggcgggctcaggaggagcagcagaggctgttggaggccaagcggaaagaagagcaggaggtgagatgcccttgtcgatgtctgtgtgcatggccagcctggaggattgcaaactactgtaggttttatctgtctctgcctacaaacttatctttaagttttgctcagcctttgattcaagaaaggtagacacatgtgagagtatgaaaaatatgagtgattccctcctgacacatatcagtactgtcccttagagccctcagtccaggtcttaaagaaatagaagagaaaagaagctgtttaaccaaaccacctgtggtcttttggagcttgttagggtgtacaggagttcactgcattttagaagctattttcttcttccctgtgcaagactagtatctcatgcccaaatgagtagcaaaagccagagaataatttttttattcaaacatttagatgtatatattatctttgatttaaaggattttaaaaataagacagttaatatctacgcaaacagattaaagaaaaaatacaaagattaaataccatttgtatttaaatcaaagataatatatgcatctaaatggttaccatttgtattttataaactcctgtttatatcctatgctgagattctaaagatttgtttaaattcaagtttgtttaaatacaaatagttaccatttgtatttttctttaatctgtttgcataaagatataaactcttgtcttatttttaaaatcttttaaatcaaagataatatatgcaactaaattcccttttttattttaatttatttttctaaagttttaaattttttatttgttttttctatttagcactttaatcaacttatctagaacttactttgattcaggttataaa

SEQ ID NO: 78760 - DNA, 1058 bp, Homo sapiens
ggctggtcctcaacttctggcctcaagtgatccacccaccttggcctcccaaagtgttgggattacaggcgtgagccactgcacctggcctagaattcttaatacttggaaaataaaatgatttgttgatactgaagagggaatagaaaccatatggatctgcctgaaatttcatccagtgatgaaaaagagtaattcaacagagcagatttaaaaggcagtggtgaaaaaggatagagtgctttttcctttatttttcctgagtctagctcaagcaaaaaaccagtcagacgtgtttggagaaattcagagaaaattttactcattctcttttacataaattagagcattaaacttaagggacatgatgtggtagcaggaagaggcactgaagcacaagcaagcttctcctggtttaaagcttcagctttcctgctgcctcactttgtgaccttggcaaggtgacattctctgtgactctctttacttgtcccttaaaatgggactgataatgcctttctttctgtcttgtataattacctccacagataagtgtactgccctatgtgaaactaaacctgcgtaaaaatgtaagatgagatccctgtttccaccagtgctcctgtcttgctcctgacctgccttcctgtcagccactctctgccctctctttgattctcccttcttctgttcatctcctgttactcttctccctaactttttacactattgcaagattctaagcattttcatttataaaatttacattttcttgaaaccataacctggacttcagttcttgagccagtacatatttaggcattaacatttttttaattttattttttaattgaccaataatagttgtatatattcatggagtatatagtgaagttttgatacatataatgtatagtgatcggatcagggtaattagcacatccgtcactgcaaatatttagcatttctttgtgttggaaacattcaatatcctccttctagctattttaaacgattaaaagttaagttcaattttatttcacttgtaaacattcagc

SEQ ID NO: 78761 - DNA, 1033 bp, Homo sapiens
gcgggggcctatagtcccagctactcaggaggctgaggcaggagaatggtgtgaacccgggaggcggagcttgcagtgagccaagatcgcgccactgcactccagcctgggcgacagagcgagactccatctcaaaaaaaaaaaaaaaaaaaagaatatgtggacatatgtgtggtgtaagatatgagtatcataatacataatcttgtcaccagtgtaggaggggtttgaggaaagagaggatgtgtaggattggaagcagaaagaccagataataacagagtattgcatatgtccaggagaaagttggagatgaactaaacagggcaggggagatagagaggagaaggtggtacttgaagaccaattagatgcagatgtaggagcccaaggagactcacaggtttctcacctgtgagacagaatggatgactatgcccctaaccaaaattaaagagtcaaggggaaaaatcaggtttagagcgagtggagggagtggcagttttattgacgttgcaatggtgtgagggataaatagtgcagaagtggagacaggaagtgcagtaatgtgactatgaggaacaggatggggcgggtggtgcagggttgagggaggggaatgtatggatcagagagatttataggctggtgggagggaacccagagagaggggctgactgaacatctgggagaaagggactaactaatagactaagatcccagaggagacctttgtaggggatgggactgaggacaggggtagccatccttcctcaaagtcacccacaaagaaagaatagtgccaatgccaagtaactttataggaggaacaatagaaattgtggactgtattcctcttgcctcgtgttctcagtgaaagtaaaagtcaaaatcatgctgagaatgagagggtgatctctctagagatctgtccatgcacgtcatcgaagtgtttctgataagtgttcaatcctgaccatcaagagctctctcccttgcctcttccctgcaaccctctcccctaatttattgt

SEQ ID NO: 78762 - DNA, 1051 bp, Homo sapiens
actaacagatcattttaattaaaatctctaaattatcagcattcccatgaaataaaaactgcttgtcagataaaaagtcaaagtgagctagttcagccatatttttccaaagtatttttgctgagacatctttatcatgtatatgcaggttacttcacctttgattattcaaatagaaaagataattagcaatgtctctttaaaaatttgttttcattatgaagatagtatagcatcatggaaaactattatttatataagagaaaaaggcagattactatatatcggggttatcagctgggggccattttgtagcctgcaggacatttgatgatgtctgcacacatttttgatggctaacattggggtcggggtgctattggcatctagtgggtagataccaggattgctgctaaaatcctacagtgcacaaaacagctgcctacaacaaagattacctggtccaaaatgtcatagtgtcaaggtgttatatatatgctatgatatggtaaattatggggtaaaggagaatagagggaactaaaagaaaaataaaacaagtggtgatttttttctccttttccaattttttagaattttctattatggttttaatgaaaatagagatttttataagaaaatttttggtgttacagaaatttagctctccctgtgtaagtgagaaccatatgactatcactaaataaatgtgtctcattttctagcttcaaatctaaactgtcatctcttgttctttccttccaaagcattgaccagtttgtatttactgagcatattcaaattttgcacttagaaagtcattgatgtattcagattttcaaattactgttttactgtgcacactaatctataatgatctcgatggcttgttctctattttcatattctttctgtcattttagttggtatttagctgtatgagtgtacaccagtagacacagtcagcaaaggtagactcgttatgaaaataacattgtgcataatggctagtagcataaaacactggcctcttttgttttttgagacagag

SEQ ID NO: 78763 - DNA, 1111 bp, Homo sapiens
caatgatctttattaaatcagaaaagattttttttttctgtcttcaaccttaactcctctttgccatgtgaggttctgaggattaggatgtggccattattctgctgctcaaatcatatactatatttttaaaaacccaaatacaaagctaatcagaaaaggttatttttaaattaaagtttgttttttctagtggctatacctcaaaagaattttattttaaaaactgttcactaattttgtagtatatgcatagtaggttttgagattagagaagttgagaattagctaaattttttccatctttatgaactattagattgaccatatggtttggggaggattcagtttagggcatatttgttctcctctcatttgaaagtatattttctatcaaatacttcacttttggttttggttttgtttttttatgcccccatcttgtatgatcaaatacttcacttttgaaatgaaacccaagttaatgttgactggcccaatattctttttttttttttttaacttatcagattcaaggaacagaaacagaattcaactcactggtaaaattgagccatccaaatgtagtacgctaccttgcaatgaatctcaaagagcaagacgactccatcgtggtggacattttagtggagcacattagtggggtctctcttgctgcacacctgagccactcaggccccatccctgtgcatcagcttcgcaggtacacagctcagctcctgtcaggccttgattatctgcacagcaattctgtggtgcataaggtcctgagtgcatctaatgtcttggtggatgcagaaggcaccgtcaagattacggactatagcatttctaagcgcctcgcagacatttgcaaggaggatgtgtttgagcaaacccgagttcgttttagtgacaatgctctgccttataaaacggggaagaaaggagatgtttggcgtcttggccttctgctgctgtccctcagccaaggacaggaatgtggagagtaccctgtgaccatccctagtgacttaccagctgactttcaagattttctaaagaagtgagtatcactgagattctctctaatagcactttactcctgtac

SEQ ID NO: 78764 - DNA, 1036 bp, Homo sapiens
tccatttgtagttatatttttacatattagtgaacaccctttggagcaagattttgtttcaaatcagcctctgtgatgggtaagactctggagtcaaaacatctgggttcaggtctcacctctatgtcctactggctgagtgaattaaccccctgccctgcgtttcctcctctgtgaaactgggataatagcactgcctacctcatgaggtggttgtgaggattaaattagttaacagccataaagtgcctggcacttggcccagactgagtcagtgctggttttcatcaccatcctcagtagtgagaactatgaagaaatgtgggtgttgccaggcattttatccctttttgttcaaagctgaaccttttctatatacggctaccctgttgccaaaattattgattcagagaagttcatttttaaagtgagatcttggtggctataaatctcttaaaaatactgtgcattctaggtaggctgtaacatttttctgatccagatttactttcaagtcaataacatttatgtcacagttgagttacagttgataacgcaattcagaaacccaacagggcatatatagggatgctcattgcagcattttgtgaaaatgtgaaaaattggaaataatctcaacagtaggagaatgtgtaaataaattctggtaggtccacgcctatacagaagtttaaaaaaaatctttaagtactggcttagaaagagctccaagacacatggtggaatgaaaaaagcaagctgaagaataatgtatataagatgatattgcttaaaaaaatcaaaaaacaatactattttgtttggatggttgtatgtttatgtgtataaatgcatagaaaaatctctacaatgagacaccctaagtggaagaaagaattggaaggggaggttggtcaaaggctttatcattatcagtaatgttttaatatttgcaaggagaaggtatatatgttttaatgatataattaaaaagtaattttaaatttaaaggaaaatacggtatcttatacaaatg

SEQ ID NO: 78765 - DNA, 1038 bp, Homo sapiens
tttactgtgagtacagtgtggacagctgtgttcgtaaagtataggactaagtgaagtgatttctattgcctcgccttgactgcaatgctcttagatgattatgtccttaatgaagtgcctttctttagtctaaaattcatgtttatttaccagaaaggtgagaacttttggggaagtagagattttttttctcttactctatctgtgttggtatatgggtgtggttttttttttttgttttgtttttttttgccttttttcatctgcatgtttaattaaactactttgttgttctctgaagccattaggtttttactttgtacccagatgtgctttctgccccttgaaatttttttctcagtgaaatttccatttatgtttttggggttagtccttgcctctgttactgcctgagctaaaagggaccaatgttatagtatgtgaggtcaaaggtgcagacagcattaggacgaaagtgaagagtgaggtttgggtgaggctgtcatttgggtaaagtttatattaaaataatatgtatgtaattggaagaataagcgtcaggtttcaagaaggtatcacctatcttttcttgctagcaaatttttatttctgtatttgattttcttacttatggtgaataaatgctttcactgtggcagtctgccaaaaccttgctgatttgaatatatttttttagcccacttcgcctaagtttccagaagactttgacgatggagagcatgcaaagcaggtaattttctgatgcgtcaattactatgtcttcagtcttgcattttaattattatttttcttctttttcaattagtaatcttctgccactcattctcttgtgtcctgggaacaacgtggggaaaaaatatgaaaagatgaagcacttaaaatgtcattagacttgaactacaccataaaaatgccaagggctggcacagaaaattaacaaactgcagggttcttttgtgcaattcgttgtgcttttgaagtgctatttggacccttggcttagctgttgaaaaaaaa

SEQ ID NO: 78766 - DNA, 1069 bp, Homo sapiens
gctcactagcccctaccttccaggctcaagcagtcctcctgccttgctgcttgaatagctgggtctacaagcatgtgccactgaccccagctaattttttatttttttgtagagatggggtttccctatgttccccaggctggtcttgaactcttgagctcaagggatcctccaaccttggcctcccaaaatgcttgaattacacaggcatgagccaccaccccagccagtctgagtactttggatatatataatatagtattaaattagagtatactctgactataacagtgcaaaaagaatgtatgaaaaaaaaataaactaggaagccatatgctaaattcaatccttccattgtgttaggatgacaaattggtggtaagtttccagatttggtcatgtaccagtaattgcttttataatgaaaatagtaatttttctccatatcccaggaaagaaattacagtatttatttgaaccataccatgttattgaaagcaatactcttacactgtgggatcccagaagataaactcagtcaagtctacattattctgtatgatgctgtggtaagcatttaattacttatgatgttgaaagataataccttgatgttgaaagataataataatagttcctgatgattttcttacccatgcagccatgaaactgaattgggagccttatctccttccttcattgctctaaattgaaagaaccaattgattttaattatatcaacagttaacaagtattggttgagcttttgttccatcctcagccctgtactactaataacctccggggtgttttttaaaaggctaacttctaattttaaaagatcaaattatttaatttgtcagatagtaaagttattcaccaacctacttattaaggcaaatcactaagtaattggtcctgatacttgccaataataatttcaaagatagttaacattgactgagccccgctctgtgagctaggcattgttctgagctcctctgatggatgaactcacttcattctcacaccagtgctgctattacctttcctttagagaccgagagca

SEQ ID NO: 78767 - DNA, 1915 bp, Homo sapiens
ccctaaagctctgctgctgtttgtcagtgacagatacaatatgatgtcaatcggacactggcagaaaccccagggattgtgcaaggggcttcagctcttactgattcatgtcctgcggctacggcacatctgccagcgtgggatgaaatgcccagagcctggcctttgttaggggagcccagagcaaaatgactccctccctgcccaaacaaatgccctcattaagcctgtccagatttgggtcacctcaccattcagcaagtacaactttccccttttaattcttttgtcagggtttttcagattttaaaataagttaattacggttttgtgtgaattgggagaaaaaattttttaatcacagaattcaatctatcctgtaccattaggagcagtttgttcaaaatgaaggctatacttgttagaattcgcctggaaattgtgtcttgttcagtgccagatttcgcgactctcattgttacctttttcttccacgttagacagagaagctgacgaggagagaagtggaagctaaattttgtaatctgtctttgtcttctaatagtgtaagtaccttctaatggtattattacagctttctctgtaattttgtgataccagaaaatgtcatcaaattctcgttgcagtagggtagcagccagcgcttcctaccacctcgcagatgcagtttttcccttgagtgttaggtaccatggcaacctctgggattaggagaagggagaaactaatgctgtgatcaaagaatgtctctccatgcttcttcttgatacgctgtaatcatcctgctctttcttgatcagcagatacttttctttgtcaccccttatagagctgtgcctggtagagcctcctgctgaacatacctaataccagttgtcctcttttgaattagattatacaggactagaaggaggcacagaattctgcaaattcatctggggagctacccttcccctacctccatgtcttctaactcctcagagttgaattaaagctctagcttttctggtatatctcttaatcttaaaatcttacatttgatcccatcatcaataagggaaatcttatggaataaacagtttggtcatattctctctgtaggcatcagattgatcccagatctttggtacagtaacccacacttaattgagtagctgaacaacagaatacaacagggattttgtacattttcctgaatatttaaataaggaaagtttttttttaatttcccggaacctgtctaggcccttgtctgacactcaattatatgatcttgcattgatcagcaaaattcacatatgggatagattaaaatatgattgtacacagggcaggaagagtcactcaatctttcggacacctacagtgtggcaggcacaatggcagggatataaagaagagtccatagactgcattcagcttcttggttcatattggcctttaaaaagccataaggggatatgcacagcatgtatctgccctcaactctgtaaaacagctttcagagggcacacggaaaccagagttcaaagaaatcacccctttgcgggtagggaaagtaaaccagatgcatagcactaggagttctgaaaattgagccaggttaaatcttaaatatttaatattgggggagatagtaatgatatgcaaagtaacacaacagctaaatatccaaatatgaaggacaatatacagtatttacatataatctaaacatgtacacagcacacacctatgtgcagaaatagtcccatgtgtaaatagcacagagaatctgcacaagactgctcagttcaatgattctatacccaagtttccaacccaaaaggttatttggactaaagtcacatttcagaacatctttttttttttttaagaaagtcttataaatata

SEQ ID NO: 78768 - DNA, 1009 bp, Homo sapiens
ttatttgcacctagccttaataaattcaccattaggtgtttctgagggaacataatgttctggaaatcaccagtattggaattatagatctaaatcaaagacagaggtttagaagagaaaccaagaaatagccaagtagtgagtatgggggaacattaccaagacacttaaaaggctacatgggatttagttttagcagggaaaggttcaaagtttttcctccagcaaatgattatttccctgttttcccaagatagagtgctgttgtctctctcaaaggctataaattaattcacagcatttgaaagaacatccattcacggctttttaaagaatatctttatttaccaaatgttctcctgtgggtggttgccaaggctactgccataatgaaggtggggctgctgttattcatgtttccttgtattatgaggggggcggaaagaacacccattatatttcattgaaatcagcttattgtgtggatccaggatttcacgcccagctgaataaatcagaatgttttccttaggcatttgttaacttaaaaagacatcctttataatttttacttgctcttgaccaaagcataactaaatgcaaattttttgtttttgtttttccaccaataaccaagaagatgtttttatatttaatggaaaagtggctcactatacatgtagttcactgtaagttatgtgttgcttgtgccttattgactgttctttaattgtttttgtttgcttgtttttagagaagcttccgataatcttgcagtgcaaaatctgaaggggtcattttctaatgcttcaggtataattactaattataatctgaacataatgatgcttatatgtttgctctaagcacttattactgtagctaactgcttgtgacactggaaatctatttttaaaataacatatacgcaataaattgtaccacatgggatgcatccctatgctttgaaatccacatcctagaaaaggataaaacaactggaatttag

SEQ ID NO: 78769 - DNA, 1047 bp, Homo sapiens
cctcctgaggctcagatgatccatctcagcctctggagtagctgggactacaggcatgtgccaccatgcccaactaatttttttagtttttatagagatggggtcttgctttgttgctcaggctggtctcaaactcctggtttcaagcagtcttcctgccttggcttcccaaagtgctgggattaaaggtgtgagccactgcacccagcctcttcttagaatttaattttaaattatgatgaatgtacaacattccattattccagtataagcctctgtctgtttgaatgaggttaacgacagttctttagggttaaaataagattctgtagtagtcatctctatagctgtacagaaatagcacagacaccctgcaaaagaaaagaaaagatataaggacagactcagtttaatgagtgaagaacagagctaataaatttttataacacctgtaggagctttatttaagcaaaaacaagatggaaggctagtcattaaaaaattatataggttttatacaaggtgtgactgacaggggtctgcagtataaggtcctagtaaggagataaccattcacctcataggcttccttgttgccttttaagtgtatgataacatgaatgattgattgattgattggcattatgacataaggacatacagcaaagtagtcatggttattttctttgatttaaacatacttagaaagtgaattacctgggtgaacaaaattgtaattgggacagctactcctaggacccctgtgttttgttattgatgagatcatgactgtgattcacagtccaagcaagatttattggttgtcagctgcaattctaagaacagcttaccaggcgtcaaacctcaacaagacaacaaaataatgtcactctgaaaccccccgccctgaattttaaccatgtgaaccctgctatgcccaagtgataacttactttttttctactttgatgttataaatttcatcacagactaatttgaggtatctttgctttggcaggcgtgacagcagctgcttcacagttgtgt

SEQ ID NO: 78770 - DNA, 1338 bp, Homo sapiens
aagtttcagatggtgagttttgggtgttccttatgtttcccttctcagggcaagagtcagtatgatagtgaacactgggtaagattgatacttgggttcactgctctccggagataagttttaccagtatgtttcaagtaaaagctgccagggtgtgaatttcaatgctaataccgtcttcctttctagtttttttaagttagattttgtcttaggctgtagatatatgctacctatactatagttgaacaagaagttgcctgcaattttcccttggaaaaaaacgtaaaaaatgtgtgcaactgtctgtgggtgttgcagaagctgctataatgtgaaagagtgttttatgcttataccattttccggtacaagtgtccaatggtgctatattctttcctgatttttggctaccctaaatccattatgcagatagggctggtgttctgccagtttgcacatcttcccactaaggtatgctctgttgtatctttcaggcttattcaaacctccttagagctaacatggatgggctgaagaagagagacaaaaagaacaaaactaagaagaccaaagcagcagcagcagcagcagcagcagcacctgccgcagcagcaacagcaccaacaacagcagcaacaacagcagcaacagcagcacagtaaagggcatacatttcctgctttcaccaattaaccactgaattgctattttttccttttggccagatagctaggtttctggttcccccacagtaggtgttttcacataagattagggtccttttggaaagaatagttgcagtgtttataggatagttgtggtaagaatctagtttattttgcatttggctaattggtctgtgctgcatggttatatactcctggattatagattaaaagtctctgtagacatctctgtgaagagcaagctatcattaaacatgtctgtttatcagcactgtctctttattcctttcccaacccattttaatagttctggcaataactactaaatctagaatgatgtgattaatgaataggctttagctctataatatcttctaggttattagaattgaaacctgacagttttataaaaagtcatgttatctcatgagctgcttcccacctggctgtataattttatcatcatggttccccagtttcgatgagttctcacagtcaaatgagagtttgtttaaccaccttaggagaaacatactacaaagtcatcaagaataaaggttccaaagtaattatgatttttggtttctttatgccctttggtttggatattttcatgtgcttagtcattacagccaagggaagaaaaggc

SEQ ID NO: 78771 - DNA, 1012 bp, Homo sapiens
caagaagaaggggtgcctttcctaatttgcaaaggtgccatatgggctcacagcaccctggaggagaagggcctcaaactgtgcatgtaagcctttgttttgttctgctcagatattctggatattacctcttcttggtcagaattctattctcagggtgtgtaccatgatttgtctgctaagaagacgggttcctgctttgcagagaaggagccggggaccagcttgaagactggctctgggacacactgaccattgtgaaattcagccttccctgtgggtctccataccattttatgatgtgtatgggacatacgttgttctcccctctctggatcaaggtggtgacaggcagcctgctgccgtatgcttcagtggcacacaccaaaaaaccgggattatttacagcagccactattcaccccttttggcagactctccacctgagttcagtgagagagaaaatgatttagatcttggtgctggggcaaggccatcagcttcagagaccttgccaggcccaggctgggtgccctgtggcctgagaactgagcccagactttgacaaacccacctcaacatcaagcctggggcaggtggaaggtggtctgactgcactgtctccatcttatgcaaagccaggaactcactcactgtcttaagtgagccagggcaaaatttacacccctcacgtttccctctcccttcttccccaccaacaaaacccaggaggtagctggcagagtagctgtcaggaaggagaaaggttctttctggctggttgtttttaattggcttagtgatctaaactggccccttcctcctctgcctggtgagttggcctaaacattcctcaagtctagcctcaggagacctgcccctcccccccgacctccaccccctcagactccatcccccacccccaggagcctggctgtctctagcgaggggtggagaatcagatttagagggagggagagtctgacctggatcctgacctgtaaccagctga

SEQ ID NO: 78772 - DNA, 1030 bp, Homo sapiens
agtacctgccccatgggctcaaggattcctggccagctcctgccacctccagcagacctcagggagggttgagtttctctaaggacccctcaaacatgtcgcaaaatgaaccaaacttctggctaggcctcaaaactgacttggtcccacttggaggccccaggattggtcctgaggtacagagccactgccaccactggcggcctgggaccagctgggtgtcagccacggatgagccgaatagccagtcagcatgttgctgctggcagcctgtgcctttgtcagctcttctttcaaaagaccccaccgacagaccgcattccacccccaacatcggcactgagggacatcgggggcaagtttgcagtggggccggaaaatatggtggccaccctaccatgagagtcagccgtaggggaccccagaccccttggtttccttggaaacaacatacctcttcccccttatccccagtcctttttcatacctagtgggatacagaagaagccaggacagtggctttgccagctaagtgacttttagagtaacagataacgattagagtggggaaccgtcaaagctgggtacacatttcctatcttcctccagcttccagctaggccagaagggcatgctctggaacccagcaggatcacagctgcctgtgcacgtcttcccttctctccctgctgcggcacttatggagaggatctaaagcagccggtgtggcagctccgatagcaggcacagggaatctgttaaccagacgctagaaactaaattataacttttgcatatgtgagaaaagacaacattggtgctaacagtgaagtaaggcccaaaggaaagacggcttccctggacaaagaagacctcagggctacccaaggaaataggaggagtctagagtagactcacaaatctgaacaagcccaagtcttccagttctgaggagaggaggtcttcagtactattgaaggagacattgatcttctggatgtacagttgtgcaggttgttcactgcacaag

SEQ ID NO: 78773 - DNA, 1642 bp, Homo sapiens
gggccactgaagtaatccaagtccagcccgtgctggctcctttctgcacactaggtttttattcccctgtccagtgagaaccctgtggagaggcccccgcccagtcctcctgccctggcagacaaagagagaacaaagaccgcctcttccagcaccccccagtttccacccccccaggcctctcctgggaaatggtacctgtgtgggcagggcaccagccccaatctggtgagccactgacccctgaactttgcccctagcttcccagcctgacagtaggacctgggataacctccagagcatagtatatattctttgtttttgttttgttttcaagtatgttcttgcttaatgtttaattggctccagtcagtaggagagcgctccaagagggattatttatggcttactgtcaagagcatctataaaaagggcagcaccgagctggagatgctggggagggagagcgggcgggcgcacaagggtgtgtgtgtgtgtgtgtgtgtgagtctgtgtgtgtgcgtgtttgcactggatgaaatcagatttttgctgcctcagcagtgtggtttaaattgaagattaaccctttgaccttcacagtgtcaaatcacttgcagatggaggccccccctttccccttgttctctgtgttactttggagtcgggggagagaggggggcacttcttctctttctgaagccagtttgttgttcatgcagctgaggtttgaggggctcgggagccaatctgattaaaagcagcacttggctaaactctggaaaatcctgcaagcaggggaaaaagcttaatcctcttgtgcatagtgcatatagagcctagtcttttctttttaatgttaaaactgcaattgtttttggagaactcaactctctcctccacatggcagtgtctctttcacctccccctcctccccgctgtgagctgtactgataggattaaagtgccagccgtgagacttggagatctgaacttttactggaaatgagagggagtcgtctaagattgcgtttgggagttatgttggtcttttttttttttctcccttcagcaccagcagaaccaaaatcgtgtgtggtggcagatcctcctcttcctgcacaaccttgctttgaatggagaagagaacaggaacggggcaggccctaggtgagggtgggctgccctcttcacatggggcaccaggaacaccgtctggaacaggaaggacatcgggcaggactgacactgtgtcttgtgaaattgtttttttgttgttattttgtgttttaattttttttaatttctctctgagtgtacatacaacatactcaagcgggaccttctttctctgtcaggcccttgacctggaatgggggcctttgtcaaacactgttgaaggagaggctgatgtgtctgtgatggtgagaattcccaagggctctgacaagtagattcttcgactgaggaatctaccagttgtcgaagatgatccgttagtgatgttctctgggaagtggactgtggtttttccagaggaactcagttaagaaatcgagagtggattagactcccagttccaccaaacctatgagccttccactgtggatgggggccgtgatcctgatggtcacattgcttt

SEQ ID NO: 78774 - DNA, 1034 bp, Homo sapiens
ttcctgtctgaaagcactctctggcccacagctgcttctgagtcccccaacgctcccagatgatgggagtctgtgcctcatcttcagagatctcaagttgcccagggagtaggtggcctccattagtggaatttgggagaaaactgaggcatacagagatgagaattgcctcagccccaaatcatagaattctcatctgctttccttggccattgagctgttttgagatgatttagtaaaggggaggctagagggtctgctttggtataaagaaaggtagtggcactctgagcacagagataatgggaagggacatagctctagggccagatggtctaggttcagtccagtccctgccacttaaactagctatgtggtcgctaagtaatgggcatgataatgtgcctcaaaatcacctggggaatcttctgatgctgggtctgcatttccaggcagctctctgatgatgctgaggctgctagtccatggaccaccctttgagaagcaaggatgcagaacacacagaacagagcctggcacctccccacccccgactgccaccctaaccccacgttactattatgaggtgatgattgttcttgccaccggtcttctcagacaagcacctcaggagaactggaattccagcagactggcctctccagggatgagtctgctcctggattctcctcttgttcggccacatgacctctgcacctgtctcggtcagcagctggggaggggaggagagggggtctttggcccagctgctgcaggccggaggcttcgggtttgcagctgagtccattttcacgctgttttactctaaccagattttgttaagccgggtgtgtttcctctttttactcatctttgtttacaaaacacgaggaagccatccatctccccaccctctgtctgccaggcctcttctgtggcacgcccgatttcccttcccctccgggcaggagctgcgcctccagcttgccgggttgttttccaggctcttccacgggggaaggaggaatgctgtt

SEQ ID NO: 78775 - DNA, 1048 bp, Homo sapiens
atctttgtatccacataactcttagctcagttgggtgcttagtagctcagttgggtgcttggtagctcagttaggtgcttggtagctcagttgggtgcttggtagctcaggtgtttggtagctcagttaggtgcttggtagctcagttgggtgcttggtagctcagttgggtgcttggtagctcagttgggtgcttgatagctcagttgggtgcttcattaaaatgtccttatttcaacagaaaacatcttcctagcttccttcaagcaggaattttcctgctctcaatgttcctgttcttaattgcaaggctctttctttcagccttggcctgagtaggtttagagaatgacagggaaaagggaagagggaggaaaacttcacatcgtggactgtgcaccttcccctagagtatagacaattctgcattttgaagagattgagtgtggtttcagatcacagtctgaagttataatttcagaccagttttagctttatttctgtttgatcttcagttagctctgcctctgaaagggttatttttttctggtccacagcgtccttactaaatagttaatgatctggaaacaatgtctttaagcatactaggggagcagatcagtggtgatttgctttgaaaaaggtaatgctattttcataatgtcaataaacacactgtaaaattttagtgaaggaacatagctttggagtcagaagtcagggcctcaaattacacccctcccaactaacttgggatgacttttctgagccattgtttccgtcgctctaaaatgggttgattaatacctgctcttcctatcgtgaggatcacatgagaagaaaggaaagtgctctgttctgtatctgagatattataagttgctctctgtttggtaaatttgcattttgtgagttaggttcttttagagctgcacacggcttcgctttgcttcttcctctgatactttggggtgaattagctctagctggagcatctggaacactggtgacacacagagcccccagagggtatgaattggatctgaaa

SEQ ID NO: 78776 - DNA, 1214 bp, Homo sapiens
ccctttgttgtcaatgaggaagatgtggcatttgagaggctgactactgccagctgtgggatgtgtgcctggaacagactcccaacaatgaatatgagttacctatggcagctgacatgaggaagaccccactacacagacgagcatgagagaggcccatccgtctacccacaggctgcgccttcctcctcagtggtaaacaaagatattggaccagttgacctctttctagcagtcaaaggctccagttagccttgttttcttcactggtgtagaaaagctatgagaatatgggttctaactcttcatccctaggacctggcccgaggcaggtactcaatcaatactggttaactgactgattgacagtaatgaacaaaagagaatagctagcacatgaccttgttggaccaagcactctaggatgtccaccattcatttgacaaacatttcttgaatattttgtgtcgggtgctgtgccaggcaccagagatataaatatgaaaaaagcaccagtcttatgctcaagaaaaacaaaacaatctatgatataacagcttatgagctatagccccagcaggagcctggagttaggggaacttgaaagaggatgggggccctcccacacccaagcatgggggctgagagaacaagagaaagggaggttgggattgctgccaagaggggtctttaaaaatgagtaggagttactaaaaagagagaaggggctttccaggtggagagaatagcacaggaaggactaggaggcaggagagtgagagtgcattcggcatctggggaagtgcaggtggttgcaatggcaggagcctaggagagttgtgaggacctgaaatgagaccctgactcactgtgcctgacaagcagcaggtggggagcaaacccagccccttcagttttgagcccagggcgggcatccagctgcattgtcaaagcaggggcttatcccactgagctctcaagtttcccagctgtggaaccacctattcctcccacttctgggaagggcctgcaggtgagaagggggtggggcacagaatgggcacctcacccacctgtatgcatttccttcctctccccagacaggctctgggatgccaaactgttttcaatcattggctttattctaatgagcccgttaaggctgccaggactcagggggaaccggcccagctggtctgactggttgggcagca

SEQ ID NO: 78777 - DNA, 1020 bp, Homo sapiens
catttggtatgattttacagaactagaatccagctttttgaattcaagggtggggcaggaaacagctaggtcagtggcctaagaactccggacgggtgagatttggggcagacagcaggggtagtcaccctacaagagtcacgccaagtgcaagcactcagagacatctcccaacactcaaaacagcaaagaagttctggtgctttaagtgttcctcgctcggctcagagactcggcttcgagccgcgactcaagacagcacctgggggtatttgttttgcctaagcctgctgcacttccacggccattgaatcccaaaaactacaattcccattatgcaccgcgagttcgcggactaaacaggcataaactacaagccccagaatgccttgggcgagacgcgagagcacggaggagcggaggggcgtggccacgtcgaccgcgcgggaccgttaaatttgaaacttggcggctaggggtgtgggcttgaggtggccggtttgttagggagtcgtgtacgtgccttggtcgcttctgtagctccgagggcaggttgcggaagaaagcccaggcggtctgtggcccagaggaaaggcctgcagcaggacgaggacctgagccaggaatgcaggatggcggcggtgaagaaggaagggggtgctctgaggtaggtacgggagaaagctgctgggggctgggcctgagaggacacggcctggtaggtaatagaaggctccgctcggagcagtcgagggggagatcggcaccgtcagaacagaccccaccggagcctccttccttttggagtagaatgccggaggtggaggtgaaaacgcagtggactgagggcacgtgcgaatcctgccgcatccagcttcaaagcgaagaaggctgcgggaccccagcggaacaaagagtttggaagttgcaatgttgtctgtttgtaactcagctcagccacctgctagttgtttgaccttgggcaaatcgtttgtatggaaaatgctgatgttaatgctg

SEQ ID NO: 78778 - DNA, 1574 bp, Homo sapiens
tctcttcttatgttaagtagaatcttaattatttctattcttttttttttttttttttttttgagacagagtcttgctttgttgcccaggctggagtgcagtgctgcaatctctgctcactgcagcctctacttccaggttcaagtgctcttcccacctcagcctcccgagtagctgggattacaggtgcttggcaccacacccagctaatttttgtgtttttagtagagatgaggtttcaccatgttgcccaggctggtctcaaacttctaacctcaagtgatccaccccacttggcctcccaaagtgtcgggattacaggcatcagccaccatgcctggcctttttctattctataacaaacccataaactctagtgcaataatttagatcaatattacctacttattacatgaataaaaatggaagtgatacttgttcattggctgttgtcactattgcatatgctaactttttctgtttacatttcagggcatttgaatatgaaattcgattttacactggaaatgaccctctggatgtttgggataggtgggtctttttatttcacaaggacaatagaaacattaacagataagtccttatggccatgtttctcaaattggggtatatggagtgtgtgtcagagtagacagtggtgtcctgggggcacagagatccagaataatcataatatatcttcctgaggtgtttaagattcaagaaatttcaagtttatgatgtacaactttgaactacacccttctatccctatcctcagttttccccagaagcatgtactagagatactttggagaagtttgagggatacaggcttagggtatgtcattgaggacctcaaaagaaacatactttacttctgctaaaatccagaatgggtcttggagcaagaacaaaagtacatgttcaatttaaaatgtgttcttatctttttcctcccatttaggtatatcagctggacagagcagaactatcctcaaggtgggaaggagagtaatatgtcaacgttattagaaagagctgtagaagcactacaaggagaaaaacgatattatagtgatcctcgatttctcaatctctggcttaaattagtaagtctttctcaagtgccatctgagttttaaatattaaactaagagattttctctagaggtatctggtataccaaaaaaaaagtaaaacagccattttgaaccatttagtagattggaaacatttaataaatatgcaatacttcttaaattggttctacttaaaggtggacttaaatatagtataataaggtattttcgcccttttaagattgatcgcaaagtctgtagatctctcagtgagtatggattaataatttattttatattttgaaacaaggtctcactctgtcacccaggctggagtgcagtggctccatcatggctcactgcagtctaaacctcctgggctcaagcaatcctctcgcctcagcctcgtgagtagctgggactacaggtgctgtgccattacgtccagctaattttttaatttttaatagagatgacttctctctctgttac

SEQ ID NO: 78779 - DNA, 1765 bp, Homo sapiens
gagcaagaccttgtctgtagaaataaaaaaaaattaaaaataatggttaagtgtaagcagcagcgtggaaaagtgaatgatgcagtattatagtggaataaaagcaaattttattatgatcaaaactttataagataatacatatcctttcatccttaagggaaaaaagactgaaaaaatttatcaaaatgtttgtgatgtgaggtttttagtgatattttcctccctcttgctaatagaattatctacattgtatatggtctcataatgtcccttctaaaacacagatttgactatgtcattcctttgcttatcgctcacccaccctaacacatacaacaattactattaggcagattcaaaattgattagcttgatattcaagacctatcacagcctttttctccagacaactatctagcctggacccctacataacttttaattttctgtatctttgcttatgctattttctctggctgaaatacccttcccttcccattttccacctgataaaagtccatttctccttcagggctaagctcaaatgttaaccccttcctcccccctttttttaattttctttagagacagggtctcactctgtcacccaggctagaatgcagtggcaccatcatagttcactgcagcctcaaactcttgggctcaagtgattctcctgccccagcctcctgggtagctaggactacaggcgccttccaccatgcccagctaaagttttaaattttgttgtagagacagggtcttgttatgttgcccaggcttgtctcaaactcctaacctcaagcgatcctcctactcctacctcggcctcacaaagtgctgtaattacaggcagaagcgactgcacctggcttattactccttcttgaagcctttactctccaactcttcttacaaatcgctcagttttgcctcttttttaggtcctcccagtatggtccttatcacattgtaataatagatttttttttcaatacaggaattgcatgtagtatctccagtgattgtttggcaactaataggcattcaatacgtgagtagaaattggttaactgttaacacttctgttacaggggcgtttatgcaatgagcctttggatatgtacagttacttgcacaaccaagggattggtgtttcacttgctcagttctatatctcatgggcagaagaatatgaagctagagaaaactttaggaaagcagatgcgatatttcaggaagggattcaacagaaggctgaaccactagaaagactacagtcccagcaccggtaaactttctttggagcttgtcttaactctaaaaataatagaaataaattatctcttttttgcatctgaataaagtgctttctggtggattggcatgttaagtttacttagttactattcaatttttttaaagatatattttaaaaattttatttatcatagagtaaaatccactctttggtatatggtactaggagtaaaaagacttgtgatcatcatcattaacaagatacagaataatttcacaccccccaaaagaattccctttgtaattagtacctatgctgaacccaaacccctggcaaacactgatttattctccagcctgtggttttgccttttccagactgccatataaatggaatcgtataatatatagccttttgagtttggcctgtttgatttagcataatgcatttgagttgtaaaagttctttatagattgtaagtataagcctttgtcagatatg

SEQ ID NO: 78780 - DNA, 1020 bp, Homo sapiens
ttatattaggtactttaaaatctccaggctgggcacagtggctcacgcctgtaatcccaacacgctgggaggccaaggcgggggaatcacttgaggtcagcagtttgagaccagcctggccaatatggtgaaactctgtctctactaaaaatgcaaaaattagctgtgcatggttgtgggtgcctgcaatctcagctactcgggaggctgaagcaggagaatcgcttgaacccaggaggcagaggttgtagtgagccgagattgtgccactgtactccagcttgggtgacagaatgagactccatctcaaaaaacaaaataaaatctccatctgaaaactataccatctgggtcattttatgtttgcatttgcttattgttttttcctttgaaagttggtcacatttttctagttctttgtgtgtcaagtaattcttgtaccctggacatttatcctgaccatatgttataagactctgatcctgttggccaatattccctggagaatatctatgtttttgtcttagtagacaaccacacttcagatattacaagttctttgtcatcttgtgtggctgttggttccactgtcagttcagttttcaagacctttgctgtgttgctttgggtctgtcccatgcatgtcctgcttaagggttaatctggggcttgggcagtggtttatatcattgttcagttctcaaagccttttctgtgctgctttgaatctaccctgtgcatgcatagctcaagagggaacctaagatgtatgccaattcacatacagaattaggagatcctcttgttcagctcattcctttgcagttctcctcccatattctttggccttcagagtcctcttttcccagtcctcaggccagaaagatggggtttctctgagttttacattcacataccaccactgcaacagttcaaaaccacaagagaaaatagaagaataaaaaaacaggaaacaatcctgcgtgggttgtttcttcaagttttgacccctctccacag

SEQ ID NO: 78781 - DNA, 1037 bp, Homo sapiens
agaaaccgtatatgtgtgtgcgtgcacgtgcgcgcatgcatgtgtatagaaaaagagacacagtgataaaatagatgtggcacagtgttaacaattggtgggtcaagttttctaataaaaagttagtgggaaaactctaatcttaataaactctgtgatcttagtcttaataaccctaacctgatcctcagatcaacttaatggtgattttcagaataatttaaattggtcaaacttgggcatttaaagggagagttaaataattctagccaaaacttttcatgatcttaaggtgactctctttacttctgagagaataaacatgttctttgggatatttctgcattcttcccccagcctgctcttctaatttgtttactttaacaaattggaaattttgagtctggtaaaatagtggtcacctcactaaaagttgtgcattctgctactttagacaattccaagctcgagtgtctcggcaaactctgttggcacttgagaaagaagaagaggaggaagtttttgagtcttctgtaccacaacgaagcacactagctgaactaaagagcaaagggaaaaagacagcaagagctccaatcatccgtgtaggaggtgctctcaagggtaagtttgttaaacgttatttcggaaaactgttagtttctagtggtaaaatcatgtaagaagataatacataaatatacctgtggacacttctagtttgctgaatactgagtagcaaaaagaaggaagtcaaaggagagctaatattacagtgtgcagtaaaatcaaaatgcatcagtaattttgtgtcttaattaagaaagacctaacatttaggaagcatcaagattttctgagtttgaattgttagttgaaagaagatatgtagtaacatagcaggtgttgttaaagtgaagcttacatataccaaagcctcagagaatgatactaatatggttaagaaccctgccttcagagccctttgggaccagaaattagactctctatatacccaaagatcagcaataattttt

SEQ ID NO: 78782 - DNA, 1021 bp, Homo sapiens
taattttgtattctctagttccagtatatctctgctgatttccattgagagaaaatttaaaactgaagaataaaacttaggttagtttctgataaaactagataatgttataatgatgactgaaggaagatgcagaatgtcttttttggaaatttgtgaataaaagatgtggggtgactggaggagggaaaagaaggcagaatataagtaacaaagaatggataaaacgattctatttttgatttattaatttttttaaagattatttttaaaatttctttttttttttctgttgtagtggaaatactgtccttgagttgaggaagaataggtatactttatctggcatctaagttaataatgaaacattttacatgaggttttaatatttttgctcctagctccaagccagaacagaggactccaaaatccatttcctcaacagatgcaaaataatagtagaattactgtttttgatgaaaatgctgatgaggcttctacagcagagttgtctaagcctacagtccagccatggatagcaccccccatgcccagggccaaagagaatgagctgcaagcaggcccttggaacacaggcaggtccttggaacacagggtaaggactcttagatccagtgctttgctgacacaacaaagacttcacatttagggtagagaagtatttttaccatctcttttaattcctcttgaatatttagccatggtctatatatgctgtctgagaacataaaactatggtaattttagttttcttcttcatctccagcctcgtggcaatacagcttcactgatagctgtacccgctgtgcttcccagtttcactccatatgtggaagagactgcacgacagccagttatgtgagtgtggtttttggatattttgaagtgggaattattaagggtgggcagaggcacctattctacttcccaaaggcagtttcttctttatgaagatgaaagtaaccaggccaggcgcagtagctcacacctgtaatcccag

SEQ ID NO: 78783 - DNA, 1046 bp, Homo sapiens
gagttgattttttgtataaggtgagagaggaggatctagtttcattctcctacttgtgacttgccaattatcccagcaccatttgttgaatagagtatctttccccactttacgcttttgtttgctttgtcaaagatcagttgactgtgagtatttggctttatttctgggctctctattctgttccattgatctatatgcctgtttttataccagtattatgctgttttggtgactatggccttacagcatagtttgaagtcaggtaatgtaaggcctccagatttgcagaacataattattgatggcccttgtaaattatttttagcttcttttatcaatcttattgattttttttattttgacccatatgaataatagtaattttgcttctttaggacaccatgtaaaattgaacctagtataaaccacatcctaagcaccagaaagcctggaaaggaagaaggagatcctctacaaagggttcagagccatcagcaagcgtctgaggagaagaaagagaagatgatgtattgtaaggagaagatttatgcaggagtaggggaattctcctttgaagaaattcgggctgaagttttccggaagaaattaaaagagcaaagggaaggtgtgtgtaattcaagtttgtgaagaggacttaacttagttgtgtgaaggttgagctgacctattaagtctgaagaaaactaaccttatagtttgtacctttgtatgatgtttctatggtagtactgtttctttctgtgtatcagccaaaatcccactgctgccttctatggttgtactgtttctgtgtatcagccaaactcccattgctgccttccatgaaaactccttggggtgtgggggcactgagtatgtttagaagtaaaggaagaagttctgaactgtatgaacaatttatattccccaatacaataagcaagcagctatgatccctgacatgcatatatgtacattccatgcatccctattaagtacttttcctaatgttattgcttgaaatatttcactttacctttgat

SEQ ID NO: 78784 - DNA, 2683 bp, Homo sapiens
cagaatgatcttccctgatcactggtcttaagtagccctcccttggcctccatctccctacccagtcaaacattctcacgtcacctattttattctttttcctaaactgattttcttgtgtgtgtgttgcccccaaatttgaatgttagtatcacataaccaaggactttgtattatgtaccactgaaacctaagtactcagagctgtgcttggcacatagtaggtattcaatgtttttttccttttagtagaaacctgtgttgttcaaaggtattctatttttttattgaatggataaagaatagaggcctagaccacaagttgaggaccttattccacttaaatcattttcatctgtattagtaacatatatgttgaggagatgagctccaaaggcagtttttgacagaatgagttactatgaggaataatacctcaagcaactttactgtttctagccgagctattgaccagtgcagagaagagagcagaaatgcagaaacagattgaagagatggagaagaagctaaaagaaatccaaactactcagcaagaaagaacaggtgatcaggtaatttttcttttttcatacacaaaactagaatttattgaaacaaatttaaacattataaaaatatagaaggttaaagtcctcccaacccccatttagagtttctggtagtttcttagctgttagtagccggaaagttgagcgggaaagtaatttaacaggtgacttcaaatggaatttgtggcatgtgaaataagtggtgcagtttattgacttcttagttatactccaaatcattatgttattaattctggcttaagctttttattctagctatgttccattaaaatgggattgcctaaagaaatttagtatatgcctggcactgctcagttgagtacaacagtactggtttagagtaggaataaaaattattggaaatgacttttgtggtacactcattttgtactgttagtggatgtctagggaaagagtacagtaaagctaatgttagaactagaaaatagcattttctggatgggagggacattgattttgtttatttaatgcaaacagcaagaagagacgatgcctacaaaggagacaactaaactgcaaattgcttccgagtctcagaaaataccaggaatgactctatccagttctgtttgtcaagtaaactgttgtgccaggtaagactacataggtggaagggacaatgcatataggagggcatttagaaccaacctttgactctctagtgccttgaagtctccttgacgtttacagtatcgagacatggtttttgtaagtctctgtcacaacataagctttgatgctgatgagggaggacagagcattgactattttccactgaagaaacatgtttcttatagaaacaaatacatatactgtttttaaaaaacaaaatcacccatttctaccactaagagatgattaccattaacactgttctgtctcttcttttgtgttgtatttttgttttgttttataaaaatggcagcttaccattttgtaatctgcttatactattaatgcaacttgacatctattatcaaatatatttctgcaacatttttgataaccaaagcttccatcttctttaagagaatttgaattgacagtaataatttatcttagagtaaatattatatttaatggaaaagcctcttggacttttaaaaattaaacagttctttctgtgggtattgagcacatgatttaaaacaagtttctttacagagaaacttcacttgcggagaacatttggcaggaacaacctcattctaaaggtgagttgtatttgacagccttgagaagaacttgctgataacaaatgtattatgtaataaatggtaaatatttttaattatgataaagggattgaaagacagggggactaggatactaggaatttagtataagcatatgctttatgataggaaagacatttgaaagagtatttttttaaagattcctcagtgcttcaaaatatttggtttaattgtaattttaaatttacactaaccaccaaatcttatactttagttactgtacactaaacagcaaagacactaagggaagtgtttcttttcagggaaaaaaaaatttaaagctattttatactcaaattggttttcttttcttcaaaatgtgttaaaagtggtgaaacatgaatatctacttgtaaatggtttggcaaaaataaaaataaaaaacattaaaatctaattaaacctctgtttctaaccgtcaatttattggaaatataaagcatggaggaacgttgttaaacaacacagcgggatggaattggcaaaatccagcattatggggctagcaacccagtttgttcaacaaaaattccccccaaaactctatagaataaaagagatttaagaggcatttgaacagtcacagtatacggatcttaactctgcattcccaattcaaacaaactttaaaaaaatttttttttatttattaatatttttttgagactgagtctcgctctgtcgcccaggctggagtgcggtggcgcgatctcagctcactacaagctctgcctcctgggttcatgccattctcttgcctcagcctcccgactagctgggactacaggcgcccaccaccacgcccggctaattttt

SEQ ID NO: 78785 - DNA, 1100 bp, Homo sapiens
tttgtacttttaattttttaaccaacatagcaaaagacatttgttcttttttatataaaataccttttttggcaatgcaaaagttatgtgggccaatcatttttcttcagtaatgttctatattaaccgctatagactaatgacataatacttaaggtaaaaagaccctgtgtagacatttaagtcaaaataaataacctgtatcattggcattttattaaagttttaaggaggaaaaatcattctcttcaaaccagcctctggaagcttgtcatgagactgaaaagaattgagtatgtttaatctgaagacttttaaggggtgatgtgagcagtagctttagtaacttaaagcagtgttttccacatcctagggaatcatttggaggaagttttttaaaagcactttttcattttagtttcttctctgttgatgtatattttatatccagtaaactgcacaaatattgtacagctagatgaatttttccatgcaattttttcccatatcaagatacagaatatttccatcaactcagaagagactagcgagtcttttgtgactaacagtgcttaagccccattccatctaggtgccattggaatttccagggaagaagtccaagcatgtatttttgtctttttaaaaatactttctcagataattctgctacagttagtctactgactgctatgaaaagacagtgatgtaagagtaattaattacatattgtgttctggagtaaaccaccagagaacatgatgaacaggctagatttggatacagtggttctagattcagctgttcaaggatatgcttaattgttaaaggagtccaacttcatttacctttttttttttttaaccagtcttttacttgaattttgttaataagtacctaccagaattttcatcccctaaaaaaatcatatttaaaatgtctaagctaatatggccataagtagtatttgcataaaatgtatagattataaacatctattttactttaatcacatatataaatacatatatatgtatatatatatttttttctttttcttttttagacagggcctcgctctgtcacccaggctggagtac

SEQ ID NO: 78786 - DNA, 1092 bp, Homo sapiens
aatagcataggaaggaagaaatacaaaaagtatgagaaagagcaatacagagtatcatgaatgctacagtttcactggttgtaaaactgcttttcaaatgcatagaatatgctatgcatatatcctaccagacatacatgaattgtctttaagaaataaataaaaattaggtatgtagcatagaggaagaagacctaaaaactaggaggatagcaaatcattagaatatttactaagtgaaagcagaagaaaaatagtatttgtgctttagttcataggtgaaatttgttgaggaacaaaaccattgcccaatatttttctttgtatggagaatcttcctggtacattttttggatgaagtatagtttactgtgttcatgatataaaaacctttttatatttgcctagatattctgatatgctatttctgtaccctgtgtcactgagctaatatgtctctctcagtaaaaaagttcttcatgtattgaaatattttagctaaactttatatggtctttatttcaggatgaatttacaggaattgaacccttgagcgaggatgccattatcacaggcttcagaaatgtaacaatttgtcctaacccagaagacacttgtgactttgccagagcagctcgttttgtatccactccttttcatgagataatgtccttgaaggatctcccttctgatcctgagagactgttaccggaagaagatctagatgtaaagacctctgaggaccagcagacagcttgtggcactatctacagtcagactctcagcatcaagaagctgaggtgattggggatttacaggttttacaaaccagattgtttactctcttattctgcatgtgcttgtcagttacagtaatcagttatcaagttcttactaactgccaggtactgtgctaagtgctttacatgagagtagggctgccccagatgaagtgtcaatgggatttagtgattgatttggatgtgagggttaaaagtaaattttgatggtagagaaactaagtggtccgagaggagtatagtaccattgaggaaactttgcaaagtgtacatgactgacgaaaaggaggca

SEQ ID NO: 78787 - DNA, 1050 bp, Homo sapiens
cgagggtcaggagatcgagaccatcctggctaacatggggaaaccccaactctactaaaaatacaaaaaaattagccgggcatggtggcgggtgtctgtagtcccagctactctggaggctgaggcaggagaatggcgtgaacccgggaggcggagcttgcagcagtgagccgagatggcgccactgcactccagcctgggcaacagagcgagactccgtctcaaagaagttgccataaattgtgaaatttctagagtagattagtacgaagtgaacacagtttcataaacacctgagacaggtgagtgtagttaaattaacagtgctgactgtgtaatcttgattttttttttcttctactctgttataatatccattttaagcattagggtttttttggtgatatattttcacctttccctcccactggcagaaaaccctactcagtcaccatggtgttcacagtatcgcagacagctactgaagtccctaccagagttaagtgcctctgcagagttgtgtatagaagacagaccaatgcctaagttggaaattgagaaggaaattgaattaggtaagtaccattgaactcatgtcctctggttcatgacagtatacaaataagtgattatttgtacttaagcttgatgcttgagcactgtaaatattcctagattgtattttttaaaaaagcaatatagaggatgacacatcagtaacttcatgtcctaataataggaattatgtcttctcctcttgcaatctttaacaaattatttttaaaagtattctagatactactaactggcaaatacaccagtgcctctatcccttaaaccaggaggtaaaagctacagggctgtatatgttcacagtgatttttaaatggaatcaaactttctcaacaggtaatgaggattactgcattaaacgagaatacctaatatgtgaagattacaagttattctgggtggcgccaagaaactctgcagaattaacagtaataaaggtgggactgattctttataatttcagttactttgtaaata

SEQ ID NO: 78788 - DNA, 1050 bp, Homo sapiens
tcataatcattggtcaggctggtcttgaacccctgatgtcaggtaatccacacgcctcagcctcccagagtgctgggattacaggcatgagccactgcactaggcctaccttcctcttaaatgggattcaatcactcctgtcttagctccaccctcagcctcacttccatgggtaattggtgctgccagttatatagtataggaaaatagccttgtagtgtaaatgtagctcagctttctcctctgccaaaatcagtttttattctaattggattgttacctcctgttctctttccagcttatcctctttccagaatttgttgttattgtgtcttttatagtagatttatgcctttaaaaatatctctttattatttctctatcagaagggctggaaggaatgtgtttcaacctgccagccataaccatagacttaactgaacttatttttaaaatacaatgtcttacaggtatcttctcaacctgtcccatgggacttttatatcaacctcaagttaaaggaacgtttaaatgaagattttgatcatttttgcagctgttatcaatatcaagatggctgtattgtttggcaccaatatataaactgcttcacccttcaggtctgtaatactaaaaacataatttaaagtcctgaagtagagagatttgtgctccatttagcaaaggaatttagtacaaaattcctgtcaatcttctagaaatagaccaattcaagtataagttagaagcattgataattttctcgttattttgaccaaagatctctttggtatttttttaactttttttggtccgttgtcaagcataaataaaagtagaattgtacaatgaactcccatgaactagtcatctatgataatcttagctcatggtcactcttgttttagctatactacccccactggatagtttttaaaacccagacacaatatgtcattttactcttcggtttgttcttaagaaggtttgctatggattttgatgataatatgaattctcaaaaatggttggaatgagggtattttaaat

SEQ ID NO: 78789 - DNA, 1118 bp, Homo sapiens
cattgttttccattaaactctggaaggaagaatctaaacaatacttggaaagcctatctggaatagtaaacaagaaaggctatgacacctataaaattttaatttcctccatcataattcctgtcagtgtataaatcattgcaattgtatgtgttaatgtgtacagtacagggaagaagcctgtgctctgcttccatacttactttatataatatggaagcttgataaatgtttaatggtggccatgcaccgtgattgaaatatactttgtgtcaccaaagtggtgacattccttccgcattgggtggacactgccactgctctgtcttacaggtgcattttcaaaattaaccactggagggagttgttggcatagctaagatgtacccaaggtaccttttttttttaaagaccagctatgcagcttctttcatggcctatttttattatctccttctcttaaatctgggctcagaatccacgatccctatgattgtaacaagaacaatcaagctttgaagatagtggacttttcctacagtgttgaccttagggtgcagctggatgtttttaccctcagcggctttcggactgtacagatcctggaaggacaaaagatcctggctaactgttcttctccctaccaggtaagtgtaaaacaagcctgagcaaatatggagagggtttcttaatctctttattatctagataagctataaaagctactgtttactgataccgactcctagaatagatgacctagttttcaaatatcaccaagtcaagtaaaatgtaacatttttgtgttacagcattgaagaatatacacatacatgtgcaaacacatgactaactctgtaaccgagtgccagggccactcctactgcctaccacccatgtaatcttttataagtcattttctgtgatcttctctgtaaaatagggataacagtctctgctatgtgtttatcagaattgttatgaggagtaaatgaagtaatgtatataaaaagaacattagcacaaatgtaaagtcttttgtatggtggcattatatgcagaaattccttctaactcagctttagacataagacatttgctgattgaatatgtagcac

SEQ ID NO: 78790 - DNA, 1234 bp, Homo sapiens
ttaattcagaacttggccagtgttgtctcttacatgaacttttaaaaataggcttgaaatacaatgtaagacatataggatggatataggcatgtccacttggctatggtccaggcaggtctggctaacacaagcagaaacaagtggggtcagttggggtttcctaacagccctgccttatctaataagggaagtttctctgatcaaaagaaaataataagaagcaaaggtacaaacatattaagcagtagttagtttagtcaagcttacgattatcagagaattgtaaagaagatccactactggggtaggagaaaggagctgtagcctttttaatgacctagactctaggaaagttagaggaaataaaattcctttttcttctatttgtagaagaaaagtgctatgtcttagtacacagaggaaatttatagatttagatgagagatcttctttccctttatgtgcattgtatcttggcttttcccactatggtagcccttttttgtagttcttccctgggctttcaaaggactatttgaatgatctctaaccctagagttctaggtattaccttacaccattttggtgcataaatgtaccactgagttaaactaaaaggaattataattttcatatgcctaatcttgatggaaatggttttatatatttttaggctaaaagatggtgaattgtggaataaattctttgtgcggattctgaatgccaatgatgaggccacagtgtctgttcttggggagcttgcagcagaaatgaatggggtttttgacactacattccaaagtcacctgaacaaagccttatggaaggtagggaagttaactagtcctggggctttgctctttcagtgagctaggcaatcaagtctcacagattgctgcctcagagcaatggttgtattgtggaacactgaaactgtatgtgctgtaatttaatttaggacacatttagatgcactaccattgctgttctactttttggtacaggtatattttgacgtcactgatattttttatacagtgatatacttactcatggccttgtctaacttttgtgaagaactattttattctaaacagactcattacaaatggttaccttgttatttaacccatttgtctctacttttccctgtacttttcccatttgtaatttgtaaaatgttctcttatgatcaccatgtattttgtaaataataaaatagtatctgtta

SEQ ID NO: 78791 - DNA, 1044 bp, Homo sapiens
tcaatgtggttatccttggaaataggagtggtggtgagaggggtctttcactttggactttttacactcttgcattgtttcagtgaacatgtactgttgtatttaaacaatacaaaagtaaaaataaaggaatgtatgtttttaaaactaataataggccagacgcagtggcacacgcctgtaatcccagcactttgggaggccgaggtgggtggatcacctgacgtcaggagttcgagaccagcctggccaacatggcgaaaccccgtctctactaagaatacaaaaattagctgggtgtggtggtgggcacctgtaatctcagctactcaggaggctgaggcggagaattgctcgaacccgggaggtggagattgcagtgagcagactgtgccattgcattccagcctgggcaacagagcgagactcagtctcaaaacaaacaaacaaacaaacaaacaaaccctaataatagaaaaccaagagctatgaagagtacctaaaacttgtatatttgaacattttcctctgcaaagtccactttaaggcaatgtggggatatggaaaacactttttcttccttcatgtctttcaaattttcagaaatgttgttagagggaggggcaacatgaagatgtgaaggcactaaggcaggagatagagtttattacgttaaattcaaaacactatcatcttattcagataataattacaatgactctctttaagaaatgtaacatttctaagtttctgccagtttatgagaagcaggcggaaattcctgaagaaacatcaacaatttcataaatcaagaaaaatcatgttttccagatttctgctatagtagctagcagagataatagccatttcatgaaaggaactgagaactaaacaaaccagctctcctgaatctgcatcagtcaggttctctgttagcctggagaatcaagtccaggacagaagctatggcagtcctggggtctctaagcaacaggactgactgcagtcccacagatcacccctgcctggatgagagatgctccc

SEQ ID NO: 78792 - DNA, 1053 bp, Homo sapiens
cagcccttcccagggtagcccaggatgcacctgggacgggcgccgcagcctgcaatggtccctgcatctgaggagctcctcccaggtcaccaggctccttgggactgtcaggcaggtttagcccccagtgtcagcttgtgtttggggaggatggttttatatattctcgttggcacaggaagcctagtacagatgcagaacctgagggaaaggcaggcagagagagagaggctcgaggttctgctgaggcccagggtatcagcagggcacatctgtacagcagccgggcggggacccatggacttttccaaaacacctaaccaggccctagacagtgctaccccctggcgctgggctctctttccggaacccggggtgaacagacctgttgggttgatttagtagcaagtggtagccttgttttctggacgaatcctgggattctactccatggcacatcaaaccaagctccagtgtgcatgcccagggtcggggaggggagctttctccttggtcccttctgcagctgtgagggctgagggttaagaacctttcaccccgtttgggggtgctgctcctccatagccctgtaccccaatgctctagacttcattattccaccaccttccccagggcgggaggtactctttccattacatgcatcaggaaactgaggccagagacatgctgtaagtcttgcgaggcaagagggctcccgtccgcaggactccatggctctgcagctagactccgtcaacttccctcctgcctggggaccccaagggcctggcagtgtcagctccctcggctcacacttccagatgctcggaggttcagaggtttgcacctccctcttggtcccatcagcagagagagatgggtggtcccatcagggtgaggagcaggaagaagcaggtgctggacagcctggaggagagggggaggaagggattttctcccaagagtgcctctctcccaggcttcgggctccagggtgagtgggcagcgacccctctaggagccccagctccacagggctcctcctgccaagca

SEQ ID NO: 78793 - DNA, 1036 bp, Homo sapiens
attgaaatgtgaagccccagccccaccctctgcccttcagcctactgggccaggccggacctgccccctcagtgtctctccctcccgagtccccagatggagacccctttctacaggatgaccccttgatatttgcacagggatatttctaagaaacgcagaggccagcgttcctggcctctgcagccaacacagtagaaaaggctgctgtggttttttaaaggcagttgtccactagtgtcctaggccactgcagagggcagactgctggtctccacagatacctgctgttctcagctccagcttcaaacctcgagtctcgagagggccacggggtggtttttatgaccggaatcccgcttcctccctcacgtctgatgtcctgaaggtgcagtcccacctgtacagcccctccccgcccagaactgtgaatggcctgctccaggccatggctgggggcagggagtgaggggacaatttctgagtgaaagagaaagaatggggtcggtggtgaaggtgctctcactttacagaatggagagaacatcgtgtgtgtgtgtgtgtgtgtgtgtgtgtgtgtgtgtgtgtaaggggaggaaagccaccttgacagcccaggtccctccaggtcacccacagccagtttcaggaaggctgcccctctctcccactaagttctggcctgaagggacctgctttcttggcctggcttccacctctccactcctgtgtctacctggccagtggagtggtccatgctaagtctaacactcctgggagctcaggaggcttctgagcttctcctgtactgtgcatcgtgagggccagagacaggaatgtaaggattggcaactgtgttacctttcaagtttatctcaataaccaggtcatcagggacccattgttctcttcagaaccctatctgggagagaaggcgaaccacctccgggtttccatcatgtcaaggtcacaggcatccatgtgtgcaaaccatctgccccagctgcctccacagactgctgtctccttgtcctcc

SEQ ID NO: 78794 - DNA, 1026 bp, Homo sapiens
ttattctcagggccagcagcatgtgggcaacccctgtggaggatgcagggaacccctgtgaaagcagaggttggcaccaatgttatcagggcccacctgtcaggtaggtgttgtgggacgagttgatgaagtaatgattgagtggctgcgtcatgtcgtggtggagcagcagcttgtcctgggccagcacgctgttctctggcccacagagaaaccagaccatgccttcaggtgacagctggcctgggggacaggagatagctgtcaggctacaaccccgctgccaaggcaggacaggaccacaggggacaaggggttcccttagtcctcacccctctgtgcattgatgccactgggctcatacttgtcgatgaggccctgcacctggtcaggccgtgctggcgggaacagcagggagttaagccgggagtcccgctgtttctggttgatgaatttggtcaggtgctccttcgtcatgtagggtttggccttagcatggcttcaagccagagagaagagcacaggtccatatcccttgggcctggaggcttagacaacccccttgtccagtgaagcctcctgactcccggcatggcaggtgggaggaggggattgttagccaccacccttttcccatgaccagcacaacccaagaaactcactaagaagtgaagatctcatctatttctggccgaggacagaggctcatgaggaaactcttgtagacaggttctgggaagtcctcaggattgatggcgtcattctaggggcatagtaaccttattgcccctgccctcaccttctcagagctaagaaccacaaactcggcccagccctggtcaaggggacctggtcagaaggcgggctcaaggcagacagaagaacttcaaggacacccaagcatccacttctcaaggccctggttgctgagcagagagcatgcttagctggtttgctctgaccctgattttgtacagtggctattccattggctggggcaggatcggaactaagaataaccagaat

SEQ ID NO: 78795 - DNA, 1034 bp, Homo sapiens
ccccctgctactctcttgcccccaccttgtctgggaatgggggagggggtacacagccttgccttatccctgtagcttccttaccccatctacacatctcctccccagacctggtccgggcctgagttctgaagaggctggagagcattaggtctccctccccagcaagtgctctgcgggcctcccagctccaacacagtgcggggcaggcgaagggaagtttgaggcttctggaggcttctgaagcctcctgaggctggcgtggaactcagtccactgtatggggcaggatgcagagcgtctgggagaaggagagagagtgtgtgcgtgtatgtgtgtgagagaggcccagggcacaaagcctgggtgcgtcatggttgctgggagagtttgacgagtctgactcagtggggacatccggcaggaaaggaagggagagcgcagtggcatttgcaagcaagatgggaactctggggtggtggagatggggtgtggggccaggggtgctgtgcaaaggcctggacaggaagagggctaagcctggcggagctgggggagggagtggggaggaaagggcagttctggaggggtggaggttggacctctggctgcctgggtgggtctgggaggagaaagaaggcagcgggggtttctgctctggagacagaggggacgagttgtggcatttgggaaactggcctggtcaatcagggatgtggggaatgcaggggcttctgattctcacctgagggcctggagctcagggccttgtagctgaggaaacagactccacgaattcctagtccagaaagaccaccctcctctcagcacccccaagccttgagtcccagaggctctaggagcctgggcagggagaccagtctcagctgtatgaggaagatatgggggaggagctttcctgagaagggctgattcctttgccaggttcagagaggctgaaaaagccagtcttggagagcaaggccaggaagggcccaaacttagggcccgagggaggaaggctgttgaccagc

SEQ ID NO: 78796 - DNA, 1711 bp, Homo sapiens
tgtgggtattgtcctgatttcaaaaatgaggaaacaaggcctcagggaggttatgcaactcactgaaggtcatataccactgtgtaatagccaggatagaatgggacgtgtttgtgtaactctgtaggccgtatttttctttcttttttttttagacggagttttgctcttgttgccacccaggctggagtgcaatggcgcaatctcagctcaccacaacctccgcctcctgggttcaagcgattatcctgcctcagcctcccaaatacctgggattacaggcatgcgccaccacgcctgactaatcttttgtaattttagtagagacagggtttctcttatcttggtcaggctggtcttgatttcccgacctcaggtgatctgcctgcctcagcctcccaaagtgctgggattacaggcatgagctaccgcacctggtgtgggccatactgttaacccttttatcttttcatgtaagtacaactattattacagctacaaaccactgagtaagcaaaaatcagaggaagagctcaaggacaagaaccagctgttagaagccgtcaacaagcagttgcaccagaagttgactgaaactcaggtaagagacccaccagagctctgttaccagctgccactgggcgatccacatggaatcctgatgggtggccccttggatgagcaagcttgttaatgcacagatgcccaagggcagaaaaaaaaagccaggcttttgctatggctgtccaagagcaagggcaagaaagggcaaccacccctagggagttggacaattcctgatctgtctgtgctgtgctccaatagggagagctgaaggacctgacccagaaggtagagctgctggagaagtttcgggacaactgtttggcaattttggagagcaagggccttgatccaggtaagagacagcacacagctagcctcctttgaaggaattggtgcatgtgccccttccggggttgatcttggcagcatggcatcagctggcccagtatgtgcaggggttactttcataaagccctaaagattttggaaagcttctgtttgttttcatgtgatgttgatttttgcctggccaataggatttcagatgattatagagagagggttatctctttcttacctgaacactttatgccattcatttagtgccaacaggtatgaccttgcaaatagatgagaaacactttgttcctttcaagggagaacattttctgtctcttcctatttgggaaagttactagtgtgcttgaaaggaacattttgtttgaacatgctcttcctttcaagcatactagtaatcccaaatgggaagagaaagaaaatactatttcaagcattcttaaacctggttaatcatcagaattacagtgactaaaatatgactactattctgaccctgtcccccagaaagcagtatctgtagcaaagagagcagaagaaggaattgcccaaagactgtaagagggcctcagactgagtcaaagagccagagaatgcccaggaaaggggcccaggcctttttgtattaaggaatactgactttgaatgttactggttaatctttaggttacagttgaggatattctttttttttttttgagatgaagtctcattccattgcccaagctgaagtgcagaggtgtgatttcggctcactgaaacctcctcctcctgggttcaagtgatt

SEQ ID NO: 78797 - DNA, 1050 bp, Homo sapiens
ctaagtgagattgactttgttgtatccatcagctttaggcagtgagaccctggcatcacgacaagaatccactactgatcacatggactctatggtgagggcatgggtgtgaaagggcgcaagggctgagtgactgtggggctctgtaaatctaagaaggtctctgctatatattccataaactccaagaaacagcctttgattatctgtgatgctagaaaagagaaatgggatgtgtactcaaaatagcatattttacttgaaaggtagctttgtgcttacaaatataagtgagtctgaattgaaaatttaaaacacataataggtaaacctgtagagagagctttctcgttcttctgttctatactttatcaaatttctctcctgactcctttgttgagaactgtgtggaaaggatgttagccatcatctaatgcaagtctggttttatatgaagatttgtttactacattgtgctttcctcttagttgctgttagaaactttgcaagaggagctgaagctttttaacgaaacagccaaaaagcagatggaggagttacaggtgagaggcagacatcaccctgaccatttcctaccatgataggtagatttatagtggggtcttttctgtttttctatttatttttaataaactttctaaataattttagatttataggaaagttacaaagataatacagaaaatttaccctgatagtaacgtgtttttttttttccaacttttaagttcaggggtacacgtacagggtgtgtaggcttgttacacaggtaaacgtgtgccatggtggttagctgcacagatcatcccatcacctaggtattgagcccagcatccattagctattcttcttgatgcacttcctcctccacccccaatagtaacatcttacattatcctggtacatttgtcaaaactaagaaatcagccaggcatggtggctcacgcctataatcccagcactttgggaggctgaggtggaaggattacttgaagccaggagtttgagaccagcctgggaaacataaca

SEQ ID NO: 78798 - DNA, 2106 bp, Homo sapiens
gcctcccgggttcaagcgattttcttgcctcagtctcccaagtagctgggattacaggcatttgcgaccatgaccggctaatttttatatttttagtagagacagggtttcactgtgttggccaggctggtttcgaactcctgacctcaggtgatctgcccgcctaggcttcccaaagtgctgagattgcaggtgtgagccactgcacccggcaggaaaaaaattttttaaaaaacagaccaacatcagtacattactattaactatattccaagtcttcatttggattttagcagttttttccactaatttttttttttctgttaccgaggcttcttgcaaatgttcacatcaccaaggcatgaggcaatgtgtaacacagtaggttgctcagagttgggaattgagaactatatgtaatccattctatggaaacttgataactcaaggagaagacctgtagtaagcacagattctttggtctggactgtttcagattgcttggatgaatcatgggatattgcaccaaatgtagaggatttcatcgttccagtttagatacaggagtctagtccctctctactactagagggacaattcctaaaaccagtgcatagaaataaaatctaaaatagaagatacagtctgttgatactccagtggtcttccttagtggaataggagcataatgttctgatgtgggaattgtgtttcctgttagtcaagagttttgtgtatgtgttgttttcttttggaatgtctttccatgcaggccttaaaggtaaagctggagatgaaagaggaaagagtccgattcctagaacagcaaaccttatgtaacaatcaagtaaatgatttaacaacagcccttaaggaaatggagcagctattagaaatgtaagaagaagcaagtggccagatggctccctcttgggcataaaatctcagaggaagctacttaggacatcatcttggccatgatcttctgggactcaccatctccagaatgaaaacaatttctacagtagacttaaggacagtttatgctgaaatggcaattcctcatttaagcaagttttcccaaccttcaggttggtcagccctcctgagcctcacaggtggataattgaggcctacaagagaggggagcctaggagcttggattgaccttctagtcaaccacctgacttcagcacaccattacaatcgggagactaaaccaacaaccagaggatctaaaatgtcacattcagattttcaggaagaaaatcttcattacagtggagcacaaatgttccatacaagacatcattgaggagccatgctgtccccttctaacctgaaacacattctttcccatcctggttgggcttctgtacctccttattaatttatgaacctgaagttgcttgaagtgttttgggcttaataaatggggtgaaagtataggtagcagtaacacctacatgaaacaatacaccttggatcttttaatctaaattacttttcttttttaagtctacttttaaaataaatacttctgtaaatattctgactgtaacattgaggaatgaaaatagccttttaacctagatatgtcagttgatcattattgaactaatttagttaacaagtccaagatattctgacttaatctagaatatttttctgctactctttaagagtcctgtggctagtccctctgtctcccaagagcattggctagtctcctgagggtgttgcccatttgtagcagtggtttcaccaggtctgtggccacttgctgcccatgttttccctgcactctttttttttttttttttctgagacacagtctcactctgttgcctaggctggagtgcagtggcgtgatctcggctcactgcaacctccacctcccaggtttaagcagttctcctgcctcagcctcccaagtagctgggactacaggggcatgtcaccacgccttgctaatttttagtatttttagtagagacagggtttcaccatgttagccaggatggtctcgatctactgacctcatgatccgcccgcctcgacctcccaaagtgctggggttacaggtgtgagccactgcacccggcc

SEQ ID NO: 78799 - DNA, 1046 bp, Homo sapiens
ggaagcagagcaggagttccaatgaaaagttaggagtttgggtttgtttttagaaatgagagaactgagcagattttttggtcagaaggaaaaaaaagggaagaaaaaagaaaatagagggagaaattgaaaagtgtgggaatgagtgggcagaacacaatggtgagctggggcagaagagagaaggatgggttacaggtgatggtgcaggaaccacttgcctaacgatcatgaggaggaagccaggggccctgtgaaggctggggccacgagtgggggagttggcaagagtttcatgagcgagtattgtaaaggtttgcggtaccctccatagagagggggaaagtagctgtctagggttggagcagtagggacctggctgagattggaaatctcaaggttgcgtgatgccaccctcattacaggctgaaggcagcatgtgccagcactttgctggtcacttgccaaaacatgctgcaacccagtagtccaggtcaaagtacagagggctcagttcagccctagtgggatccctttgggtacagacaggagaacaacagaggataagggaattgaccgggctggtgacagtgtcttggaagtaatgtcccctgggggagggaaataaggccaggggggtcgggagggctcagggaactgagcatatcattgagaaagaagtgtccccatgagaactggggagaacacaagctagtggcagaggaggctgggatcaatctggggcgttagcaccggaaggtcccggggggagcatgggactaggatgctgccatgctgtgcaggtacagggactcaataggaaggtgagtgccttcttcccagaggcctttcctttaccaggcccccttggggctaatctgtaaccaggaccaccttttgtttcctgtaaagggtatgcctggctttagcacctctaagaagctggacaagctggggatgaggggctctaacacctgtgagctaatctttgaagactgcaagattcctggtaagtagcaccgggaatcggggagcccctctcctga

SEQ ID NO: 78800 - DNA, 1026 bp, Homo sapiens
gggccatgagaataagggtgtctacgtgctgatgagtgggctggacctggagcggctggtgctggccggggggcctcttgggtaagtgtgagaggcttgagggaagctgggctctgtcggcctcctcggcaggtgacccaccatgagcagcagcagccttccccttgcggggccaaagggagctgcctcttggccctgctctctcctgggagatgaaaggaacctcctcttcccatgttgaatttcttcccacagtggggaaatatcattaagtaacagacaaaaggcctgaggagcagggtggcttactcggctgtgaaacgacacctgggctgtcacgcccctgcacctctggccagtcagtgccgtaactgtggcaagactttctgaagttgcttttctcctccctgggattctggccttcccacgctagcattttgccaccacacccggtggtgggatgaggaggtgcccacggggcctttctcctttctgacaggctcatgcaagcggtcctggaccacaccattccctacctgcacgtgagggaagcctttggccagaagatcggccacttccaggtgagccgagtgcttttgctgacatgtactcttcaactgggctaaagttttctttgaaaagagaggaagtgaggtgggcaccgtggatggttactgtctcctctagcaaattgagcttgactgcttggaatgcagtcttcctcagcatgcagcctgactctggaagtcatcaggaagttcaccacattgccacctcgattcctgtgtgaggtggatgaactagacattgtaaggttggagagcaaagcgtgcaagttgtgggggcagaagggaaagaggttgctatttgtagttagaccttctggtccgaagaagctgctggaaggtaataagcattggagtaaatggtgccttgggagccatgcctttcggaggcagtgatggccacttcggggtgtcatgcgggctgtggaacagccactctgtggccctaactcccacacct

SEQ ID NO: 78801 - DNA, 1050 bp, Homo sapiens
tccaatcagctgtcctgatatcagagtgcctgtgttcaagtaactcttattttgctcagtggccccagattgcaagagtagtgatgctggcatgtcataatagttctattttagtatttgttattattgttgatctgttactatgcctagctcataaattaaactttctcataagtatgtatgtatagggaaaaaaacaacatatatatggggttcggtactatctacggtttcaggcatccactggggtcttggaatgtatcctccaaggataaggaaggactagtgtattccccacacccctccctcttgctaccttttgctgcttttctttaatcaccctctcctcctgtggcctgtttctatatacttggcattctgtttgctttctttgttttgtcaatcacttcctttcttctctgcccaaaccctggttgcaggtggcaatggctacatcaatgactttcccatgggccgctttcttcgagatgccaagctgtatgagataggggctgggaccagcgaggtgaggcggctggtcatcggcagagccttcaatgcagactttcactagtcctgagacccttcgcccccttttcctgcacctagtggcctttcttgggaagtagagatgtggcggctttcccaccctgcccacagcaggccctcctgcccagctgctcttgtcagccctctggcctctggatgaggttgagttctccacaacagctcccaagcatcatgggcctcgcagccgggcctgtgccacggctagtgttgtgtgatttaaaatggactcagcaggaagcatattgtctggggattgttgggacaggttttggtgactctgtgcccttgctctctaacttctgagcccacctcccagggtaggcacctgggggcatgcaggtgcccacctcccagggtaggcacctgggggcatgcaggtacccacctctttctcttgggtgaggctctggcaaggagatctctctgctcaagcacagcagaatcatggcccctctccatgaattggaacttggtacaggt

SEQ ID NO: 78802 - DNA, 1211 bp, Homo sapiens
gttgcccaaatagcatttccctctttggtagggctcttacctggcaggagactcatgccagtcggatctggtgttaaggagggtttgctccggagagtttagccagtgattaggttctttttgatatctccctctctttcttcctttctgttgtcctgctgtccccgtgtcaggcctgtgttgttgttatagcctccctttccctcctgcttcctttggcccttctgatccagtctgtatgcagctaccaggtcattcttcctaaaacaccccttcccggtgtcactccctttctcacagacttgcaatggctccccgttccctgcagtctgaccctagacagtgtcccctccagctcttccctagccataccatgcacattttttcttcctgcatcttcactgctgccgctccccttcctttactcccacttgaatcccacttgtccttagtctggttgttgctcagaccactccaggccaacatagtcatccccgcctgagctcatgactctggattttctaacgtggtatcctcttgagtggttttgtaggttggaaatttcttaaggacaggaacaatatgagtgttaaacctctgtgtgtgtgtgtgtgtgtgtgaatattctggtatttcttgtacagtgctgtgcacatcatttttgttgagtgaataaatgtggttggttgctgagttaggcaggaacaagggggagaccttcctttcagcttctccagaaatgctcatattggagtccttggagatttccagccctttctgtcaaaggcatatggatagggcatgtttggggtgctgtaaatgggaaatttaactgctgtttctaatatttctgctggtgaagagtcctatggattgcttatgtgataccatatagacattggaaaagggctgtaatcctgttttcctcctacctcaccggaccaccattctttctacccagctttgctgctcttatgcagttttccttgttgttcatgctaaatgaatccatgttttatctcttctcaaaccgggtgcaaatgagggagaaaacacaattctgagcacagaaaagaaaaatactcctgggtctggcccatagatgggacttttggggctggtttggaagaggtgtttatgggggcatcaccaacataagaggcacaatcagccccacattggacccctcataaaggaaagctacaatccct

SEQ ID NO: 78803 - DNA, 1052 bp, Homo sapiens
cgagcttcttgtttcttcatctgacttcaaagcatgactcacacatgctctccccagaatggagtgcagcgagaggcaggcagcagagaccccagcctctccttaagatgccgagtggctggactttgcaccacaggaaagctaggagctattttgcgacgtgcttttgatggccttgggtgtttttagcgagtgacaggggatttggcagattttagggagtctagcaggaggctgttctgctggatttggaaatgtgactcgcaccctgtgattcagacgcttcctgggatcgtcagcaccctaccccccaggggagtagtgggtgtccctgagggactggaaagctgaatgagaggttaaagagcaagattagtccacagggaacagattctcaaaggttctgggctcagactcctgaaagtggaagctgtgtagtcaaggcactgactcccttcccacctctctctgcttgggacttctgtgtgttgagaggggaagactgagtggggacaactatccaaagatctgaggaccatctgcccatgcagccagtctcccagccagctggaggtcaggggtggccaatcatccccctgctaagaacgcttccagtagccaggcctgacagcacctccctgtgctgtctttcccagccgccttctccttactctgtactgtgtccttatcctcaaagacgacaagcccaggtgatctccaccttggctcccagccgttcccaggcctagcccctctggtaacttggggcctgttgaggggctttggcccgtgctcaaatgcatggtctgttcacttatccatcatctccaggccatttgggagttggggagggctggacctgggctccctaggagatactgatgtgcttctgctgcttctcgttgcatgctcctccacctccagcacaggggtgcctggatatgagagaagggcctgtgggttataagaaatgggatgatgttgttgttgttgttgttgttttgagatggagtctcactctgttgcccaggctggagtgcagtggcacgatc

SEQ ID NO: 78804 - DNA, 1046 bp, Homo sapiens
gctgcaggcccacctggctggcaaggctgccctgatgaaccatggccatctgcaactccttgtgggccatccgtccagccatctcatcagcccctgagcaaggctctggagagccctttggggctgcgccctcacctgcccctgctgatgggtggacaggcggctctgaagccggagcctgggcgcccaggcgaggagtcacctgcccctaagcaggaactgcatcagccctctttccccacacctcagctgtcgccgctgccgatgcctggcaaccccgccgactacaatggcctgtgtgttgggcctgagctcactgcactaggcagcttctacctgtactgtggccaagaggggctgcagtgtgggggctactcgccctgccccatgcttcctgagggcaagctgtccccagtggctgcacctcacgaggaggggctcctcttagctccgagctcagtgccctcaggcacccctttccagcaccctccctggggctcctctcgctactgctctagcgaggacactggagtgaatggctacagcatctgcggagtgttgcccctgtctgttacccacgctggcactacctgtggcggctgcccatacaaaatgccttttgcagcaggtgaggcttcctgggcccaagatgtactggggagtctcggagacatggcatcccaggaggttgggctgttgatctgagcaggggtctcccttggggtctggctgctaactggaaggtagggggctttcagaagtgagaactcccgtagtctgtgccccaagccgaggagcattcccaagaacagggcccgtatagctctggacagccttgctctgcccaggctacctttggagattcttggcctggcagttaggtagcattgcagtggtacaggccacaggaaggcctctcttctctcctcattgggatacccgttcttagactctgaagagcaggttagatattggaattaggacttttaccaaattgttctcacggcccttctaccctccttgaggaaagctagaattccctagtt

SEQ ID NO: 78805 - DNA, 1030 bp, Homo sapiens
tgaggcttagcaatactttaaataatttgtcaaaggctgtgccccttataacagtggtttaagggttcagaccgagacttgttccattaggaagcatgagcacttacccagcactgggggtcttggagtgagagtcagctgtcgggtatggtggtcagagctcagccccagaagcttcaggccacttttccacccctattcccttttctcatcctttctccaaccatgagaattccccagccccatccaaaaaaggatagtggtttgacaaaaccaaggtagtggtttgactatcttgaggaaatcgtggaaaggatgtcattccctctctctgtccttactctgagtgtggctctgcaagcctatttgtgtcattggtttgttgcctaggatgagccggagccagccatccgaaagagctaccaggcggtagagcggcatggggagacaatccgagtccgggacaccgtccttctcaaatcaggcccacgaaagacctccacaccttatgtggccaagatctctgccctctgggagaaccccgagtcaggtacctctccctctggctggggacccaaggggcagctgccttcagcagaactgtagtccccagattggcccctgcctggagtttgacctggcgtgagtctccccgtgttcctggcacagagtctgccttccactcggctggggtctctctgctgccgagggctgtgggtgaccttgtggcttgggttggatcagctcattaacctttccagccagcagagcctgggcacctgtccccccacctcacctgtcagtgccttctcccccttctccctccatgcctaacagcattccaggcctctgaatgcttggcctggggcaggggacatgggttgccggagcctgcaggattgaggttggatgaacctccagggcagccagccagcctctctgcctgtctaagtaactcaggttgccagttcaagccataaccactgtgttgtccttccaggagagctgatgatgagcctcctgtggtatt

SEQ ID NO: 78806 - DNA, 1043 bp, Homo sapiens
atgtttgcggtgatcgtggcctccagcgggctgctgctcatgatcgagcggggcatcctggccgagatgaagcccctgcccctgcacccgcccggccgcgagggcacagcctggcgcgggaaagcccccaagcctgggggcctgtccctcagggctggggacgcggacttgcaagtgcggcaggacgtccggaacaggaccctgcgggcggtgtgcggacagccaggcatgccccgggacccctgggacttgccggtggggcagcggcgcaccctgctgcgccacatcctcgtaagtgaccgttaccgcttcctctactgctacgtccccaaggtggcctgctctaactggaagcgggtgatgaaggtgctggcaggcgtcctggacagcgtggacgtccgcctcaagatggaccaccgcagtgacctggtgttcctggccgacctgcggcctgaggagattcgctaccgcctgcagcactactttaagttcctgtttgtgcgggagcccttggaacgcctcctctctgcctaccgcaacaagtttggcgagatccgagagtaccagcaacgctatggggctgagatagtgaggcggtacagggctggagcggggcccagccctgcaggcgacgatgtcacattccccgagttcctgagatacctggtggatgaggaccctgagcgcatgaatgagcattggatgcccgtgtaccacctgtgccagccttgtgccgtgcactatgactttgtgggctcctatgagaggctggaggctgatgcaaatcaggtgctggagtgggtacgggcaccacctcacgtccgatttccagctcgccaggcctggtaccggccagccagccccgaaagcctgcattaccacttgtgcagtgccccccgggccctgctgcaggatgtgctgcctaagtatatcctggacttctccctctttgcctacccactgcctaatgtcaccaaggaggcgtgtcagcagtgaccatgggtgtggggccagcagctggtggggactggtttcaacgccag

SEQ ID NO: 78807 - DNA, 1329 bp, Homo sapiens
taacaaaaagaattacaaaaaccagaggagcatttttaggtaaattaatcttcattcccacaagactagcgcaagattgggtttaaattttgcatagattttgatttttgttgttgttgttgtttgagacagggtcttgctctgtcaccaaggctggaatgcagaggcatgatcaccactctctgcagcctcaacctcctgagctcaagcaatcctcctacctcagccttccaagtagctggcaccacagacacacatcaccacacttggctaattttttttagagatggggtctatgttgctcaggctgctctcaaactcctgactcaagcgatccacccacctcggcttcctaaagattttgtgttttttttttaaatatgaaaagacatgttattattattattagtgcatacaccagattgcactgtctccaatggcaaatgaggcagagggtaatatttctctttaattccccaagaacctcaatatcatctgtcttctggaggttccggtttcttctgacatctgtgctaatgtccacgaagatgccaaccgtacttagcataaagaacattttgctaagttgttctattatgggttctcgctcaaggtgttcacttttttcttctctagttttcagcacttgaccatgtgtttcttcattattatacacaggatctggtcaagggataggttttgtgcgttcatatggaatgtctatagaaggatggtaacatactattgtcctggcatcaggtgtcaaagcaaattctactttgcaattgtagtcacctggaaaagaagagtacgtagatttatgacaaacataaggctccattttggattgaagataaatgtttccagatagttctctttgatatcacccgtcttactgctgctactgccatgtagcaagacacttatcaggtagtatgaaaaaagatgcttcaaagagaatctgcttctgggcacattaattttcatccctgcttcacagctgttcaccatgagcccatcatcttgtctccttatttttgcatagatcttaaattatttttacccagttgtaatcatggacaaatttgtagtctgctttttttcacttaacattagttataaactgttccatactgctgcatattctttgtaattataattttaatgatttataatttaattgttttacttgaatttgttttctttctttttttttttttttttttttttttgagagagaatctcactctgtcacccaggctggaatgcagtggcatgatcacagatcactgcagcctcgacttcccgggttcagttgatcctcccact

SEQ ID NO: 78808 - DNA, 1009 bp, Homo sapiens
cccgggaagtcgaggctgcagtgatctgtgatcatgccactgcattccagcctgggtgacagagtgagattctctctcaaaaaaaaaaaaaaaaaaaaaaaaagaaagaaaacaaattcaagtaaaacaattaaattataaatcattaaaattataattacaaagaatatgcagcagtatggaacagtttataactaatgttaagtgaaaaaaagcagactacaaatttgtccatgattacaactgggtaaaaataatttaagatctatgcaaaaataaggagacaagatgatgggctcatggtgaacagctgtgaagcagggatgaaaattaatgtgcccagaagcagattctctttgaagcatcttttttcatactacctgataagtgtcttgctacatggcagtagcagcagtaagacgggtgatatcaaagagaactatctggaaacatttatcttcaatccaaaatggagccttatgtttgtcataaatctacgtactcttcttttccaggtgactacaattgcaaagtagaatttgctttgacacctgatgccaggacaatagtatgttaccatccttctatagacattccatatgaacgcacaaaacctatcccttgaccagatcctgtgtataataatgaagaaacacatggtcaagtgctgaaaactagagaagaaaaaagtgaacaccttgagcgagaacccataatagaacaacttagcaaaatgttctttatgctaagtacggttggcatcttcgtggacattagcacagatgtcagaagaaaccggaacctccagaagacagatgatattgaggttcttggggaattaaagagaaatattaccctctgcctcatttgccattggagacagtgcaatctggtgtatgcactaataataataataacatgtcttttcatatttaaaaaaaaaacacaaaatctttaggaagccgaggtgggtggatcgcttgagtcaggagtttgagagcagcctgag

SEQ ID NO: 78809 - DNA, 1452 bp, Homo sapiens
ttgtatttttagtagagatgggattttgccatgtttcccaggctggtctcgaactgctggcctcaaatgatctgactgcctcggcttcccaaagtgttgggattacagtcgtgagccactgtgctcaaccttatgctgtattcttaaagccagttcttactcacttgagcttctgttttatagctcagattccaaatgaaaatgtttgagagcgctgactctacagccacaagatctggccaggatctctgggctgaaatttgttcctgtctgccaaatcctgaacaagaagatggtgccaacaatgcattctcagactcctttgtggattcttgccctgaaggtgaaggccagagggaggtggctgactttgctgtccagccagctgtaaagccttgggctcccttgcaggattcagaagtgtatttagcatctctaggtaagtttgacggctctagggaagcatattgaagttctgttacatcaaacttggtttcctattcttttgtgttgttgttattcctgtcacacgtatctgtcagatataattccaagggatgtttcaagccggctgttgggaagcagcccccttttccttgaacagatctttttttatttttatttttaattttttgagactttcactcttgttgcccaggctggagtgcagtggcgtgatcttagctcatggcaacctccacctcccgggttcaagcgattttcctgcctcagcctaccgagtagctgggattacaggcgcctggcacaatgcccggctaattttttgtatttttagtagagatggggtttcatttcaccatgttggctaggctggtctcgaatgcctgacctcaggtgatccacctgcctcggcatcccaaagtgctgggattacaggcatgagccgccgtgactacccgaacagctcttaaaacagtttttgtcacttcctgcctctgcccagttcatctaaattctgtgtttgatttcttggcattctgtagaaccctcttgcctactgttggttgcccgtatattcaaataactcaaaagtgttaaaccttatgccatcctgcaagaaaatgtgatggccccagggctacatgtggatttctgatgctggagtttgaaaaacttacataaatagattgattgttgagaatgggagcatattgacataagattcattctgcctcttgttagccattttattttaaaaatatttcctgaacacattttcagtaccctgtcctgcggccatagtataagtatctagagagattccaaacacaggaaagagattcaaattgtcccatgctaggggaaaaagaaatatcagtctagggcggtgaggggcagtctttagaattgtaatatccttttattgtggaacaaccatgagattcatccatgtttcacaaagccaaacctgggaataaggcttaccttggc

SEQ ID NO: 78810 - DNA, 1050 bp, Homo sapiens
acagtgggttttagtatattcgcagagtttagcaatctttattctggttgttagtttttgttttgtcttaaataaagctcctttcaagcgtttcttcagacccaagggactactcggaatttacacgacctactcctgtcatggcctttacacggagcaattccaagggtttcctttataaataacgtcgtatctccctaataggaagacgtctgagtaaggtcacttttggtgagacatttacagtctctcatctctaagctcactcaattcacctaatttaattcgagcagctcactcattcgctcacttatcgcagaccccgcctcgggactgggcctccctgattcgctggggccgagtgacgtcctcagatcgcgaccctgggagtggagtgggggcagcgtggttatgtggctggaccgccgcggatggctcagggttcttggacattggcgctacgaccttaggcgccctagctttaccaggacttggagtggcgataagggcccaatggcagaaacagtgtctacccaggttgggacagagggcgggctgagggcttcgcatcagcaaaacggtgacgctggtggcgacgcgaaggttgagctgtcccccgggcccccgaagccggctggccgggaagtggagccggccccagtaggcggggagcatccctcggctgcagccccaggcccgggcaagcataagaagcggcggggcgcaaccagggagcgtgtcgtgccgcccccgaagaagcggcggaccggggtgagcttcggagatgagcactttgcagaaaccagttattacttcgagggcggcctgcgtaaggtgcggccctattactttgacttccggacctactgcaaaggtcgctgggtgggccacagcttgctgcacgtcttcagtaccgagttccgagctcagcccctggcctactatgaggccgcggtccgggcgggccgcctgcaactcaacgagaagccggtgcaggacctcaacatcgtgctcaaggtggagtcctgatggggctggccagaagcgggc

SEQ ID NO: 78811 - DNA, 1029 bp, Homo sapiens
ggcatgtgccaccacgcctgctaatttttgtatttttagtagagacagagtttgaccatgttagccaggatggtcttgatctcgtgatccacccacctcagcctcccaaagtgctgggattagaggcgtgagccactgcgcccggctaaaaaattttaccttttaaatacctttattgtagagaaaatacaattagcaaagccaaaaaacattcataatctaaccacccagagataacacagttaacatttttgcatatgtccttccagtactttttcagtgccagctatctgcctgtgtctgtctgtatttttacaaaatgagatcacactctgcacactgctttttcagcccaagatgtgctttcaccatttttccatgtcagtgaggaacaggggaagctggatatgaagttgactgattacaggctgcggtccctaggctgacttattacctatgtctttgacaggacaatgatttcttgcggaacacagtgcacaggcatgagccaccagtcacagcagagcccattcgcctgctagctgagaacgaagatgtggtggttgtagacaagccttcctccattcccgttcacccctgtggccgcttccgacacaacacagttatcttcatcctaggcaaggagcaccaactcaaggagctacaccccttgcatcggcttgaccgccttacctcaggggtgcttatgtttgccaagacagctgcagtctctgagagaattcacgagcaggttcgggaccggcaggtgagtcaggcttttgtctcctacaggccacttcttgggctcacgaatgctctgtgtcaaaagggcatcatggagttccgaagtggtccttcatatttatctggccatccttcctaccttcctaccttaaggcaggtcaacacctaaagtgccaaatgcaggatatctcatatgtttccaaaaaaatctttagagatggcatacactgcctctcttagtagtttgctattttgaagctttaaaatgctgacaaggccaggctc

SEQ ID NO: 78812 - DNA, 1041 bp, Homo sapiens
aaatgttatttagttttcagttcactagacattcctagaagttgttgtagtattttcacacgatagagtacatctcagggaatgattttagaaaagaaaaacgttttgggtcggtgttgtagactcagagcagaatgcatggattcactatggaacctctccagaccctgtcatcactgtgttcccagagatggttctccagtgggagaacctaatggtaaggaacaaattgacttcacttctgtcattgcctgcctctcaaaaccagtctttgcaagtcttggagcctgaggtctgggtttttcttgcaagagttaagaaataaactttagatgtgtcaaaaaaaaaaaaaaaagccaaaccgaacaaacaaaaacaaagcattgatttcaattcttccttcagagctatgtcatataagggctgctgctgacacacacagcctgtctgggctgtggaccagtttattatttcataataaacattggccattgattcccagagaacctcattttcaaaagagggaattggtcctcttaaagctggccccagataatgaagacgcattgcctaacactccaatagtaaaagagctggaatatcttggtaagatatttatgcaacagtcctttgctgtggtcttccagaggttgaggtgtcctgcaatagttgaggatagtacttgcaaggaagaacgttggtgttggtagagaacggtttctttgagctgtggtttgttgaagaatttggggagttaatggagatctctgtagacgagagcatccatctcggtagacgagagcatccatccctgtagataagagcatcttgtccgagtcttgcagttgcagctgctccagtagatggcgcctctaactcttttcctgtcagcttcttacaagcttctctttccgtttctaattgaagtatttctttttctttcccttgacttttttttttttttttttttttttgagacggagtctcgctgtgtcgcccaggctggagtgcagtggaccgatcacgcctcaccgcagcctc

SEQ ID NO: 78813 - DNA, 1078 bp, Homo sapiens
tttgcgcgtgcgcatcacctaggcggttagatttgaatacttcactgaggcgagccgggcgttgtgagcggactgctagaggcggctgtctgtttccgctctaaggaaactcagagcgtgtggaccccaaacaagtctgcgcaaaatttgtcgaggaggtttgccgcggcaggtaaagagaatgactctttcgttctgggcttcagggaaggcttcgggttttgtctgggcgccctgaagttcctgcggtgggaggtagggtacgctccctcagcctggcggcctccgttagcgccgggccgagtagacgcccctgccccgggccgggcacactgtgccctttttcccctcctcggcctgtacgttgtgccgcctcccgcttccctaacacttctccgcctgcacctcggcccctccggccacccggctcgggttgcttgtccgtcgctctcttggcgtcctcttccgccccgccctgccgtcctctgtcagggctcgcggactcttcttgcacccctgccgctcttccctagggacctctcggctgtttgtatttctcacttaagctttttttggctctaaatgaagtgacagcaatgagtgattttaaaattctcagctcttcgtggtttaaggtgtctgctcggagtgctggccgcacgtaacagatttttcgttttctgcaagtataataaccttaacaaatgaagtcaatattagtactgcgcaaattagtttttaaaaatcctcttctgttcattattcctcaggatttaagcccttattcttcacgtttatttaaatactcaagtttgagggaggaaaaagtattgccgattggaattttacagataggtttaataggcattaacagataaaggatgtggatgaagaccaaagcagaagcttattccagtctagatattaaaattgatgttttcacttccgtcgaatcctgtagatatttattgggttccttatcctgtgatagggccggggacagatgattcccaaacctagaggggtttacaaagggaaataactaatatacacaaataactagaatacaagacagaat

SEQ ID NO: 78814 - DNA, 1037 bp, Homo sapiens
tttttattttttagaagagatgaggttttgccatgttgcccaggctggtctcaaactcctggcctcaagtgatcctcctgcctcagcctcccaaagcgctgagattacaggcgtgagccactgtgcccagcccaaactgctttaagcacaaaatgtgttgggttatgatactaaaaaatccaacgaagggatggctttaggcacacttactgaccagagattctaaccatgacaccagtactaggatttccttttgctttttctactcttagtgcttcctctgggtaatctccagcagatagattctttccctataattactgtgatacatctagctcttttacttccaggcccaagtcctacgtgaagaatagtgtctttttcctgaaaacagaaaagactcagaattgaatcatgttagcttgattatcctgatatgggtcaagtcctcattcctgaacaaatcatcattgacaagagaatatcagattgttctagacagagctatgtgttttaccctagagttggtgtggcattcactcagaccatgtgggatgagagcgggtagaataattggagaggatgggcaggtagaagggaatagatgtcagatatttaaatctgccacacggtatagcattgagcagaatgaatttgaggagtttcagagtttttaatgaaaattttagctttctacctatgatataacttgaaataaactgattcttaatagatatgccagattttttttgaataattctaattgttaccctagatattgaaacccccaaggagtcctcttcaggacctcagaggtgggaatgaaagagttcaggtaagtcttttgtgcaaatactttatagatgactattttcagttatatttttaagtcaagaagtttattagctatttgaagaggaaatgtgtaagcatcccatgagtttccaaacacttgaatatactggcattcttgatttttcatttttcttcttttttctaggaatggcatctccctctcttacccaggttggagtgta

SEQ ID NO: 78815 - DNA, 1540 bp, Homo sapiens
tccccctgcctcagccttccaaagtgcttggattacaggcgtgagccactgtgcctagcctagaataatttttttttttttttgagacagagtcttgctctgttgcccaggcagtggtgcaatctcagctcgctgcaagctccgcctcccaggttcacaccattctcctgcctcagcctcccgagtagctgggactacaggtgcccgccaccatgcctggcttattttcttttttgtattttttagtagagacggggtttcaccatgttagccaggatggtctcgatctcctgccctcgtgatccacccacctcggcttcccaagaataatttttaatgacaaattatatgcaacatgctacaccattgattcaagcaaaccaacgtgttatgaaaccatcactgaggattttttatataatacatgttgtaaaatgcctttttaaaagtttgcttttgttctgatctcttatattttgctttcattatagttttcaattatagaacatacccgtgaaaggaaacatgcaaatgaccagacagtcattttttcagatgaaaaccagatggacctgacatcaagtcacactgtaatgattaccaaaggccttttagataatcccataagtgaaaagtccaccaagatagataccacatcatttctagctaatttaaagcttcacaccgaggactcaagaatgaaaaaagaagtaaatttttccgtggatcaaaacacttcttcagaaaataaaatagatttcaatgacttcataaaaagattgaaaacaggaaaatgtagtgcttttcctgatgtgcctgataaagaaaattttgagatacctatttattccaaggaaccgaacagtgcctcttctacacatcaaatgcatgtatctcttaaggaagatgaaaataacagtaatattactaggctctttagagaaaaagatgatgggatgaatttcacccagtgtcatacagccaatattcagacattgattcccacatccagtgagaccaactcacgggaatctaaaggtaatgatattacaatttatggcaatgactttatggacttgacatttaaccacactttgcagatcttacctgcaacaggtaatttttctgaaatagaaaatcaaactcagaatgccatggatgtaacaacaggttatggaactaaagcttcaggaaataaaacagtttttaagagtaaacaaaatactgcttttcaagacctttccataaactctgcagacaaaatacatattaccagaagtcatattatgggggcagaaactcacatagtctcacagacttgtaatcaggatgccagaatattagccatgaccccagaatctatatattctaatccatctattcaaggttgtaagactgttttctattctagttgtaatgatgccatggaaatgaccaaatgtctctcaaatatgagagaggagaaaaatttgctaaagcatgacagtaattatgctaaaatgtattgcaatccagatgctatgtcttctctcacagagaa

SEQ ID NO: 78816 - DNA, 4184 bp, Homo sapiens
tgaactcttatcaggtgaaaatatggatttgactgaaagtcacacaagtaacttaggaagtcaggttcctcttgcagcttataatctagcaccggagagtaccagtgaatctcactctcagagcaaaagctcttcagatgaatgtgaagaaattaccaaaagtcgtaatgaaccatttcagcgatcagacataatagccaaaaacagcttaaccgacacctggaacaaagacaaagattgggttttgaagattttgccctaccttgataaagattctcctcagtcagctgattgtaatcaggagatagcaacaagccataatatagtctactgtggtggagttcttgataaacaaataactaatagaaatacagtatcatgggaacaatctttgttttctaccacaaagccattattttcatcaggacagttctctatgaaaaatcatgatactgctataagtagtcatacagtgaaatctgtactaggccagaattctaaactggctgagccactgaggaaaagtttaagcaatcccacacctgactattgccatgacaagatgattatatgttcagaggaagagcaaaatatggatctaacaaagagccacactgtcgtcattggatttggtccttctgaactacaagaacttggtaaaactaatttagaacacactactggccagctaacaacaatgaacagacagatagctgtaaaagttgaaaaatgtggtaaaagtcccatagaaaaaagtggagtgcttaaatctaactgtattatggatgtgttagaggacgaaagtgtacagaaacctaaatttccaaaggaaaagcaaaatgtcaaaatttggggaaggaaaagtgttggtggaccaaaaattgataagactattgtattttcagaagacgataagaatgatatggatatcactaagagttatacaatagaaataaaccatagacctttattagagaaacgtgattgtcatttggtgccattggcaggaacttctgaaactattttatatacatgtaggcaggatgacatggagatcactagaagtcacacaactgccttagaatgtaaaactgtctcaccagatgaaataactactaggcctatggacaaaactgtagtgtttgtagataatcatgttgaactagaaatgacagagtcccatactgttttcattgactaccaagaaaaggaaagaacagacagacctaactttgaactatcccaaaggaaaagcctaggaacaccaacagtgatatgtactcctactgaggagagtgttttctttccaggaaatggtgaaagtgaccgtctagtagcaaatgacagccagctaacccctctggaggaatggtctaataataggggccctgtagaggtagctgataacatggaattgtctaaatcagccacttgcaaaaacatcaaagatgtacaaagtcctggatttctgaatgaacctctatcaagcaaaagtcagagaagaaaaagccttaagctaaaaaatgacaagaccattgtattttcagagaatcataaaaatgatatggatattacccagagttgtatggtggaaatagataacgaaagtgccctggaggataaagaggacttccatttggcaggggcttctaaaactattttgtattcatgtgggcaggatgacatggagatcactaggagtcacacaactgccttagaatgtaaaactctcctgccaaatgaaatagctattaggcccatggacaaaaccgtattgttcacagataattacagtgatctggaagtcaccgattcccatactgttttcattgactgtcaagccacagagaaaatacttgaagaaaaccctaaatttggaataggaaaaggaaaaaacttgggtgtttcctttcctaaggataatagctgtgttcaagaaatcgctgaaaaacaagcactggctgtaggaaacaaaatagttcttcacaccgagcaaaagcaacaactctttgctgctactaatagaactactaatgaaatcatcaaatttcatagtgctgctatggatgaaaaggtcatagggaaagttgtagaccaggcctgtacattggaaaaagcgcaagttgaaagctgtcagttaaataatagagatagaagaaatgtggactttacaagtagtcatgcaactgctgtttgtggatccagtgataattattcctgtttaccaaatgttatttcctgtactgataatttggagggtagtgccatgctcttatgtgataaagatgaggaaaaagccaattattgcccagtgcaaaatgatcttgcttatgcaaatgattttgccagtgaatattacttggaatctgagggacagcctctctctgctccttgtcctttgttagagaaggaagaagttattcaaaccagtaccaaaggacagttagactgtgttataacactgcacaaagatcaagatctgattaaggatccacgaaatctattggctaatcaaactttagtatatagtcaagatctgggggagatgactaaacttaattcaaagcgagtatcttttaagcttccaaaggatcaaatgaaagtctatgttgatgacatttatgttattcctcagcctcatttctcaaccgaccaacctccattacctaaaaaaggacagagtagtatcaataaagaagaagtaatactgtctaaagctggaaataagagtttaaatattatagaaaattcctctgcacccatatgtgaaaacaagcccaaaatactcaatagtgaggaatggtttgctgcagcctgtaaaaaagaactgaaggaaaatattcaaacaactaactataatacagctctagatttccacagtaactcagacgtaactaagcaagtcattcaaactcatgtcaatgctggagaagcaccagatcctgtaattacatctaatgttccatgttttcatagtatcaaaccaaatctgaataatttgaatggaaaaactggagagtttttagcctttcaaactgttcatctaccaccccttccagagcaattacttgaattaggaaataaggcacacaatgatatgcatatagtgcaagctacagaaatacataatattaacataatctccagcaatgctaaagatagtagagatgaggaaaataaaaagtctcataatggagctgaaaccacctctctaccgccaaagacagtttttaaagataaagtaaggagatgttctttgggaatctttttgcctagattgcccaacaagagaaattgtagtgtcactggtattgatgacctggaacagattccagcagacacaactgatataaatcacttagaaactcagccggtctctagcaaagattcaggcattggatctgttgcaggtaaactgaacctaagtccttctcaatatataaatgaggaaaatcttcctgtatatcctgatgagatcaattcttcagactctattaacatagaaactgaggaaaaggccttgattgagacataccaaaaagagatttcaccatatgaaaataaaatgggaaaaacttgcaatagccaaaaaagaacgtgggtacaagaagaagaagatattcataaggagaaaaaaatcagaaaaaatgagattaagtttagtgatacgacacaagatcgggaggtgagctctgtcttgaaccaaagaatgttcttgaattttgggttttgttttgttttcttaaattgtgggtattctcaaattttaatcttagtctcgggtaggcagaaaataattatttccacttagagggctggagaaatattcttatgtagaaccttcagaaattaattgactaacagctagacttcaaagcaatttaaagtgacaaatagtcacaaaaaaattaaatggaaaattgtacaaaaagtagccaaagttaaaattgtataatttcaaaaatttcaaaaggtatgtatactgtcacctctagtgatttgtcaatttggctttatataagaatctctagggaggttatatatagcttgaaaagtcatcttcagtgttgttatatttggggagtaaaaagctttttattttgccaactgcatgaagtaaagcttgactgaatttccttggctgacaaggatatgtagaagttgagagtccattttctttatta

SEQ ID NO: 78817 - DNA, 1050 bp, Homo sapiens
tattcagctaaagaagtcttggtcagctggggaggaaagtagtaaagcctggaaataagtttattgtctggactctagccagggccaccacatacagccaatattctagtctggttttctgcagtgtggttgccctgctgttggtggctagtagttgaataattggataggtgaacatttgatagcttacaggatctgattataacttagatatataatgagaaataatttgcatacacagtataatccatagagtaattttcaataaaattacttttaactctaattaaaggcttaagatgtttgttacttattctaattcttcactaagatatttcatatgaattatagattaattgtatgttagaagtagtatttctgttagtgtttgtcgtaagtatacagtgtatattttattctgatgatattccttaattgacaatttcagatttttgatcaccatactgaagaggatatagataaaagtgctaacagtgtattgataaaaaacctgagcaggaccccatctagttgcagcagctctctggattcaatcaaggctgatgggacctctctggacttcagcagtaagagcttcatgaaggctaaataatagcagccatctgcttacttaactaataataagtagttttcagttcaggaaatatttgaatgttgtatatgcctttttggggttataaaaagttgatcagtaaaataatatttagtttatttttaattcttagtttgtaatgcactgagaagtgacatactacagagaaatagagtgatttccttcatgggcttataattagtggagaaacactggagccttaaaactataatatactttgccctgctacatgactgtcttcccagaaagatcccaatgggtagcttcaggatcagaaacaatctgaatgataaccacaattaagttcacagtttagttttgacttgttcgtcaccagaatttgctttacttctagcttaccgcagtagtcaaatggaatcacagtttctcagagatactatttgtgaagagagctt

SEQ ID NO: 78818 - DNA, 1623 bp, Homo sapiens
gatagaaattgggaagatgggcacacaactcttttgggcctcagcctcattaccatgatagctgccagtagaatcctcttgcctcagctatagatagggaggagaaaggagcttaggtgtgcatccaggggctgatactctttctacttttcttataaagggaaagtagaaagagtattaggagaccaagaccaaacagaggagagcagaggggaaggataggaacagggaggatattggcagggtgaaggagggagaggatgctttaggaattgatccttgacaaattgatgttatgaatcttcccctttcctcccaggtcttgctgaagtcaggaggggtagtgataggaaaatatatctgggaacaaacctatcaaaatggaaagagttcagggtacttcgggaaagaagttgaaaatcccaaaataggaaaaggccaaagagatggattatatgtggaccatggaaaatgaggttcgtggctgtgggcatctgtttcaggattttttttttttttttgagatggagtttcgctttgtcatccaggctggagtgcagtggcacgatctcggctcactgcaacctccacctcctgggttcatgccattctcctgcctcagcctcccgagtagctgggactacaggcacctgccaccatgcccgactaattttttgtatttttttttagtagagacagggtttcactgtgttagccaggatggtctcgatctcctgacctcgtgatctgcccacctcagcctcccaaagtgctgggattacaggcttgagccaccatgcccggcctgtttcaggatttgttttttgagatggaatttcactcttcttgcccaggctggagtgcggtggcatgatctcagcttaccgcaacctccgcctcccaggttcaagcgattctcctgcctcagcctcccaagtagctaggattacaggcatacaccaccacgcctggctaattttgtatttttagtagaggcagggtttccccgtgttggtcaggctggtctcaaactcctgacctcagatgatccgcccgcctcagcttcccaaagtgctgggattataggtgtaagccaccacacccacctggggaatgtattcttgaggcagggggagagatgtgtgccagccctcatagacatgtacacacctcccatatatacgtacagttgcaggaactcagttggcggcactagcagaaggtgctattgtagaggcccatgaccccctgcatgctcatgtagtgactcaggccaaagcactagaactcacatctcctagtaagggtgaggatctgtttttgttttttgtatttttttgagacggagtctcgctctgtcacccaggctggagtgcacttcccgggttcaagtgattctccctgcttcagcctccccagtagctggggattgcaggcacctaccaccatgcctggctaatttttgtatttttagtagacatgggatttcgccatgttgaccaggctggtctcgaactcctgacctctggtgatctgcctgcctcggcctcccaaagtgctgggattacaggcgtgagccaccgcacccagctggttgagaaattattgcaagtgctcctgcta

SEQ ID NO: 78819 - DNA, 1130 bp, Homo sapiens
tttttaaataaccaaattttcactgccttattttataattggaggatgtgccagaaaagtttgagttcagcctgggatagagtaaggattatggctagaaaatgggaatagttactaggaaactggcttaaaaaaaaaaattaaaaaggggttcctggtaagttgaatttttaggtaatatttattttcttaacgcatagccattttcaaactactgtcattcccatgtgagtaagaacaaccacagttccagtaaaatctatggggaaagggacttagaagtcagagacttgaattcagattccaattttttgtttactggcattatgaacttgagtattcaaatttttctttgtagaacattttaaaataggcactctgaaatttgagttaattcttatatatggttttgtctgcaagataccagttctcagggactgaatttttttttccagtttactgtaaacacaccacctactccagaagacctgatgttaagtcaatatgtttaccgacccaagatacagatttatagagaagattgtgaggctcgtcgccaaaagattgaagagtatgaaagctttaatttttatgtgtgtttttttgaggggagggatcagttaatagtttgtgtggtaaggttttgattagaataatgctggcatggggtaaaattgatggcattaattggcagtgtgatgtgggagaaagagctttggcctcgtagtcagattgaagctcagtcttggcttcaacactagctgtgtaaccttgggtaagtcatttaaccttcatttccaaatccttaaagtgaggataataaaacctactcagccaatagatatgaacaatagaaatggcgtatataaattgttttcataccattcttaggaaaaggtaggtccttaataagaataaacagtaatttttagattatgatatcataagttgattgctagagaacaccttcaaaagaaaatatcctttagagatttacgcaagttgagtaaccttaatctggaaatcggaaatctgaaatgctccaaaatccaaaatgttttagccaccaacatgatgcaagtggaaaattccacacataaatacgtaagtactttacacaaactttgttt

SEQ ID NO: 78820 - DNA, 1762 bp, Homo sapiens
aatccacctcagcacagaccatttacgggtgtcgggctgggggacagtcaggtctttctcatcccacgaggccatatttcagactatcacatggggagaaaccttggacaataccccgctttcaagggcagaggtccctgcggctttccgcagtgcattgtgcccctggtttattgagactagagaatagcgatgacttttaccaagtatactgcttgtaaacattttgtcaacaaggcacgtcctgcacagccctagatcccttaaactttgatttcatacaacacatgtttttgtgagcttcaggttgggtcaaagtggctggggcaaagtggttggggcaaagctacaaattaacaacatctcagcaaaacagttgttcaaagtacaggtctttttccaaatggagtctcttacgtctttcctttctacatagacacagtaacagtctgatctctttcttttccctacagtgctaattaacttttccgtattttagattaaagctttctgcatcgaaccaagataagctgttggttgatataaataagaacctgtgggaaaaaatgagacactgctctgacaaagaggtacttttgtctcattttctgaatgagaatcagtgaagacattctgaacgatgtttattgtgaaatgagtaactgttacttggtcatagtgatgagttatttaacttattttttaagtgtaatgtggtaccaaggtcttatttaattacacacaattgttaatatataatcttttcaaacctgagatgatcaatttaatatatgaaatatagttgaagtttatttagagttccctccttgctatttgcctttcacttagatttagacgaagaaaagatttactttaattgattaaatagcaagcaacccattttatatgtgccctaatatattaaaaagtttcattaactaagagcctgtcattttctaatttataatatgaataagtgaattaaaggcaggaatcaaaactgaaatcttttttctggtcttagacaattacatggaattaaatttgcaaatgacaaatatcctgccttaggataggcaaagcctagccttcctagaccatttacctcttctgactcgtttgttttagtacagtgttctctataactttcccttccagctgaaggcctttggaatttatcttaacaaaataaagtcatgttttaccaagatgactaaagtcttcactcaccaaggaaaagtggctctgtatggcaagctggtgcagtcagctcaggtaatttgagacagttaatatcatagaaagagagagatattaaaattactttctaatggttatagaatatgaagaatcttccttagaagacatgtgaataagacttgggcaaaaacttaacaattaagaggtaaggttcaatttgtcaaaagtggcaaatcctgacatcttgagtaatactggaatataattactaatgtgggcctatgtctcatctcaaatactattatccatcatacatactgaaataaaatacataggattctggtctcccattgctaaggactataccatagtattatcttcttcatagtccatactaagctgtatatgtatgcacatgtgtttaaagtagcatttcccaaaatgattagcttttttaaaaggctctgcataaaaaaactttccattggcaagtaagtatgggaaatgttgcaagcaatatgccctttcagagaaacataattttttaaagtctaagcataaa

SEQ ID NO: 78821 - DNA, 2786 bp, Homo sapiens
ccaaagaaagtagtctcttttccttgagctctcatggctcttttgttagtacttcttatattacccatcacatctacttgtattatagttattttgtatagtttatcttcctgattaaattataagctctgtggaggcaggaatcagctcttctttttctccatctccttcagagtccctaggactatatttcatacagagtaagtgcctagtacatgttttttgcactgaattgaccatgagtacatgaattccatagtctaaagttcacccctttgttgactaccttactttctctttcacagaaaaaaaaaaaaaaatagaaaccatcagactagaacttctgaacttcctactaccaaagaaacaatctgtcgtttaataaattgtttttgattgaattattctttttttccttactttgttttctttttttactatttttcactgaattattctaacaaatactgtctactttagaaactaagaatttggaggatgaagagaaaaacaatcctgtggaagaatgggattctgaaatgagagctgcagaaaaaggtaattgaattagttaaggagataaatgggtgtgggggaagcccttctgttctgagtttgtttatatactttggtgagattaagtcagaattttcaataaaacagatttttgtggcaacattctaatatgtttgttctgttttttttttttttctgtttccaaagaattggaacagctgaaaactgaagaagaggagcttcaaaggtcagccttcaatccaagtgttagaaaatataatgctaaatcacagaaggctagatgacttcctgcctccagagactgacaggatttggggacatgagtcttgattgaggctgactcagggcttctccactttgaatggaaacctagagtccatcttagtcaacagtagttttgaagcacttattgtttacagggcatttatccacaacagtgtttctcaagcttgaatactaccagtatcctttttgtttaataaatgtaaatataaacaagtataaaatgaagtatatatttcttaggcctatgaatcttattcaactgtaagtgtaaaagaaagtaaatagaaataatgacaaagccactaaaattctagttgacaacattaatttgacaggtgatagtgtttggctgaaattaaattgatgctagcaaaatgattaacaaagatatgttctgtttagctctaacaactaaacgaaaccaaatacaggcaaaaaaaaaaaaactgtgacatgtctcagttttaaagtatatcttatgatctacattatgcttatatttttatatttttgctttttatcaaaaataaaaatgtagtatttaaaagttatcttaacatgtgaatcccaaggatatcttcatggatcctaatttgaaaaacaatgatttatgcctttcccaggtagacccacttctagattaatgcttatataaaaaaaaaaaaaaaaactaaactaagaatgcagaaatggatgccatacacctaacattattacctcaatggggagtcatgtagcatgtgacttcttatcataaaccttttatattgatagagtgaattctctaacaaaaaccttatctctctgaatacctgcttttatttgcagaaatctcttagaactggaggtacaaaaagagcagacccttgctcaaatagactttatgcaaaaacaaagaaatagaactgaagagctactggatcagttgaggtaaggaaatgcaggcatcatttgtttgtgttttattctgtaccttgtggttgtttaaaccgattggagcaattgatgtatttttaatgtgttgctgtttttaacctatacagtgctgtttcaaaaagagtcagtgtactcaacagtaagctggaaatagagtagaagaactatggaattataatttttccatattttatacttttcattgcgtagacttggtgtttctctgatatacaactcaagattgggttcttagttatttcaaaagcttaagtttgtacatccacaatatatgaattgaaatattttctcccagtccagtggaaaaacattagcagctgctgttggtactgtttgggtggtatcagaagttctcttttatgttaattttaaaaacgctttttaaaaatcttgtttatctctctacagcttgtctgagtgggatgtcgttgagtggagtgatgatcaagctgtattcacctttgtttatgacacgatacaactcaccatcacctttgaagagtcagttggtaaggagccaaagtgagataattcttttacagaaaaatgaatggctacactcactaaagattcaaatctttattttactatactgataactattggcatgatgagagcactgctgaaagtcttagaacagtcactttattgatagcagaattttattttattttgtaaagaataaaataaaaatggaattagtgaacgttgccctttgttgaattacattaaataaaaattttgctctgcaaataatggataaacatgctactcatgtctatttactatgagtttctttcttttcatctccatctttcgtgatagagaatagagaatttaccctaatggctggagattctttttttttttttttttctttttttacttaagagtgaggccctgcagctcacgcctgtactcccaacactttgggaggctgaggtgggcggatcatctgaggtcaggagttcgaaaccggcctggcccacatggtgagaccccatctctac

SEQ ID NO: 78822 - DNA, 1049 bp, Homo sapiens
tagatacagagaataatgattcaaggataacccttcaacttcctgtggaaaaaactctgctacacagaaggagtaggattctaaagtactgagttttatgtgacttcaaatcaggtagtttaaaaaaaaaaaaaaggccaggcacggtggctcatgcctgtaatcccagcactttgggaagctgaggtaggcggatcacgaggtcaggagatcgagaccatcctggctaacatggtgaaaccccgtgtctactaaaagtacaaaaaattagccaggtgtggtggcgggcgcctgtagtcccagctactcaggaggctgaggcaggagaatcgcttgaacctgggaggctgagcttgcagtgggccaagactgcgccattgcactccagcctgggagacaaagtgagactctctgtctaaaaaaatttttaaaaatcattattctggttctttctagttggtttccctttcctggacaagcgttataggaagattgttgatgtcaattttcaatctctgttagatggtaagtagaaaacatttaagcctctaaaaatttgttggggctgggcactatggctcatgcctttaatcccagcactttgggaggctgaggcgggtggatcaccaggggtcaggagtttgagaccagcctgactaacatggtgaaaccccgtctctgctaaaaatacaaaaactagccgggtgtgatggtgccctcctgtagccctagctactcaggaggctgagacaggagaatcacttgaacctgggaggtggaggttgtggtgagccaagattatgccactgcagtccagcctggcaacagagtgagaccttgtctcaaaaataaaaaataaggctgggcacggtggctcatgcttgtaatcccagcactttgggaggccgaggaaggcagatcacaaggtcagaggctcgagaccagcctggccaacatgatgaaacccatctctactaaaaatacagaaattagttgggcgcggtgatgggtgcctgtaatcccagctactcaggagtctgaggcaggag

SEQ ID NO: 78823 - DNA, 1002 bp, Homo sapiens
gcctgtaatcccagcactttgggaggccaaggcgggtggattacctgacatcaggagttcaagagcagtctgtccaaaatggtgaagccccctctctactaaaaatacaaaaagtagccgggtatggtggcagacgcctgtaatcccagctactcaggaggctgaggcaggagaattgcttgaactgggaaggcagaggttgcagtgagccaagatcacgccatggtactccagcctgggtgacagagggagacaggagactccagaaaaaaaaagaaaaagaaaaaatggagagaatacttatgtacctggtagtttgagaatatttctagcttatataatatagtatttttcacttatataaaatatatgaatcataagtaataacctgcttttgcttttttttttccttccccagaggatcaagctcctccttcctcccttttagttcataagcttattttccagtacgttgaagaaaaggaatcctggaagaagacatgtacaacccagcatcagttacccaaggtaaagcccgattgaagtatttaaaggaaaatttgtgatatctttccaaaaaaagcagaactgaaactttacataaataatagtggatcctgaaatgataaatgtattcaattgtttaacttttttgagttctttgtaagtgagccactaagcattgaaatgttttcataatttcactggattttttttcccactttttctagatgcttgaagaattctcactggtagtgcaccattgcagactccttggagaggagattgagtatttaaagagatggggaccaaattataacctaatgaacatagatattaataataatgagtaagtgtattagttcccaaggactgccatgacagagtactacaaattgggtaccttaacaggttctggaggctggaggtctgagattaaggtgtaagcgggtgttattctttctgagggctgttagaatctgtccatgccttctcccagtg

SEQ ID NO: 78824 - DNA, 1043 bp, Homo sapiens
aaagaaaagaaataatgtatgcctaacttggacatgccagcgtaaaaataaaatgaaattgtgctgggacagtggctcactcctgtaatcccaacactttgggtggtgaggcaggcggatcacctgaggtcaggagtttgaggccacattggcgaaaccctgtctctactaaaaatacaaaatttagctggatgtggtggcaggcacctgtaatcccagctacttgggagaatcgatagaacttgggaggtggaggttgcagtgagccgaaattgtgcactgcactccagcctgggcgatagagcaagactccgtctcaaaaaaaaaaaaaaagaaattgtgtttcatgctattatttgttgcatttttaattgtggatcttgtcttttacagattgagacttttattctctagctccgcagcatttgcaaagtttgaaataactttgtttctctcagcctattatccatctgtaccattaccttccaccattcagaatcacgttgggaacactaggtgagtaaagggccaacagggtaagactctgggctacttctttttttttgagatggagtctggctctgttgcccaggctggagtgtagtggcgcaatctcggctcactgcaacctctgcctcccgggttcacgccattctcctgcctcagcctcctgagtagctgggactacaggcgcctgccaccgcacccggctaattttttgtatttttagtagagacggggtttcaccatggtctcgatctcctgacctcgtggtccgcccacctcggcctcccaaagtgctggaattacaggcttgagccaccgcgcccagcaaggactactttttaatgttcattttatttgaaagattcctcaaagtggtcagcaaattagtggaccatagtgagagctaaacttcagttctcttgagttcattttgaagaatttatgtgtgtgtgtgtgtgtgtgtgtgtgtgtgtgtttgagatggagtctcactctgtcaccaggctggagtgcagtggcacgatctcggctcactg

SEQ ID NO: 78825 - DNA, 1049 bp, Homo sapiens
agaattggttcttaggccctgttttggaatcccatttcaaactggatatctggttatttccagaaatgctcatttgtgcttcctaggaaactgagagaccaagaacataaattccactgaattagagacaagtgtaagattttttaaaaaattgattaacctggctgggcgcggtggctcacgcctgtaatcccagcactttgggaggccgaggtgggtggatcacaaggccaggagatcgagaccatcctgagtaacacagtgaaaccccatctctactaaaaatacaaaaattagccgggcgtggtggcaggcgcctgtagtcccagctactcgggaggctgaggcaggagaatggcatgaacccgggaggtggagcttgcagtgagcggattgcgccactgcactccagcctgggcgacagagcgagactccgtcgcaaaaaagaaaattgattaacctttgttctttccagccaagatgatattgctaccattctatctaaagtgccactggagaacaactacctgaagaatgtagtcaagcaaatttaccaagatctgtttcaggactgccatttctaccactagacccttggaccaccattggaacaaccaagcagaatgtacttgatattatttcagggtcccattgctgttcagcctttgtttttacgtcattacaagctgagtaaaattccttctgatgatgttatagttaatctgtatgttttttatatctctgcagaatgatggtgatgaagtctggatggtaggcctcatagcctactatcaacttactcatctttgtaccaaaggtttaagtaataggacacttaggaaaaatgtctcctaactaaactagtgctttctgctttagtacaagccctaaggattaacttaagtataagaagtgttatcactgacaagaacattagccattttcccataactagatagagctatgattttttaggttgcctggcttctgcctagcagatatttctggagtagaaatgtatctgtctacaaactattatcctttttctc

SEQ ID NO: 78826 - DNA, 2126 bp, Homo sapiens
agccaccgcacctggccctcaaagaataggtttgatttaggtcaggcgtggtggctcacgcctgtagtcccagtattttgggaggccaaggtgggcggattatgagatcaggaggtcaagaccagcctgatcaatatggtgaaaccctgtctctactaaaaataaaaatattagctatgcatggtgctgcatagctccatgctactttggaggctgaggcaggagaatcgcgtgaacccaggaggtggaggttgcaatgagatcacgccgctgcactccagcctgggtgacagagcaagactccgtctcaaagaaaaaaaaaaaagaatggatttgatttatcccaaagacttgccaggtagagctccagagtagttgggtgctatcatctctctgcttatagtttgcctgaacttcttaatagaaagggaaatacattctttggtcctgaaactactgtcagtaccacttcttccctacctattcaggtaatttaagtgtcagaaacaaattgctcatctgcctgagttctgtgtgcagcctaaaaatgttctctcctctctcataggtatggtctctctggcagtgatgtcctggataatgtagcatatgctcgagcgttcaacacagaccaccagacccagctcctttatcaagcatcagccatgatggtagaatctaggtatgtgttcagtataagacaccaaatatgttcttaagagtccttccctgaatcttgtaatggctatttggccagattgatagtagtttgaattagaaatgaggaggtttaagtataattcctgtgttgacactcttgctttgtagtttaggtcaagtcactattaaaaatgaaaccataatctacttgaacttgctggaaatcttgttaaacggtgcctcagatgttagtactgtgcaaatattttaataaaacatctatatacaggccgggcgcggtggctcaagcctgtaatcccagcactttgggaggccaaggcgggtggatcacaaggtcaggagatcgagaacatcctggctaacacggtgaatccgtctctactaaaaaaatacaaaaaaattagctgggtgtggtggcgggcgcctgtagtcccagctactccggaggctgaagcaggagaatggagtgaacccgggaggcagagcttgcagtgagccaagaatgccccactgcactccagcctgggcgacagagctagactccatctcaaaaaaaaaaaaaaaaaaaaaaaaatctgtatacaggaaaaactatgaatatgagattttagggtggtaaggaagggaccagaatctgacacaggctagaaataggcttcagagaatccttgtttcctgtaggtatgcactgcttattgtagacagtgccaccgccctttacagaacagactactcgggtcgaggtgagctttcagccaggcagatgcacttggccaggtttctgcggatgcttctgcgactcgctgatgaggtaagttgtgggatagggacagagaatgcctactttcagtggctgtgaattccaggagccttgctaggaggctaagacatcagtgcctgagatcatcaagctcttaggaagaagagagacattagttattcgttattttgtgggggaaagtggtggcagcattaaggcttttggagtgtctatggccacaaaattgacatttatcctttccccatcagtttggtgtagcagtggtaatcactaatcaggtggtagctcaagtggatggagcagcgatgtttgctgctgatcccaaaaaacctattggaggaaatatcatcgcccatgcatcaacaaccaggtaaggtgttgatgggatcagttcttcttttcggaatgtcatattaactgtgaagacatgaagatataacattttcatttaagccctgttaaagctactgttgtatagacacttaggaactcttgctaatctaattaacatgctctcgttggtatagatgttttagttcataaaagaattaaaaacccacaagtgtggaagaatgaatatgagtaattgatatgcctctcccctgttatttaaaaaatgtttgggctgggcacagtggctcacactggtaatcccaacactttg

SEQ ID NO: 78827 - DNA, 1650 bp, Homo sapiens
gagttcgagacagcctgaccaacatggagaaaccccatctctactaaaattacaaaattagttgggcctagtggcgcacgcctataattccagctactcgggaagctgaggctggagaatcgcttgaatccgggaggtggaggttgcagtgagctcagatcgtgccattgcactccagcctcggcaacaagagcaaaactccatctcaaaaaaaaaccaaacaaaactgcctgtcatcactgaatcatcatgtgacatttttagaaaataatctttcctagaggtcttatttccctagtaaaaaagagtctacctctaggggaagagacagatttaataggctccaggctatcctggggaagtaggaaaaagactgtagcagagctcaggaaggaagcaaagggcccctcttcttaggttccactggtttgggaaaatgctggtttaaattttgagccctagatttgttctttgtctccctaggatttggctatccagaaggacctggaagaactggaagtcattttacgagactaaccacgtttcactggccttcatgacttgatgccactatttaaggtgggggggcggggaggcttttttccttagaccttgctgagatcaggaaaccacacaaatctgtctcctgggtctgactgctacccactaccactccccattagttaatttattctaacctctaacctaatctagaattggggcagtactcatggcttccgtttctgttgttctctcccttgagtaatctcttaaaaaaatcaagattcacacctgccccaggattacacatgggtagagcctgcaagacctgagaccttccaattgctggtgaggtggatgaacttcaaagctataggaacaaagcacataacttgtcactttaatctttttcactgactaataggactcagtacatatagtcttaagatcataccttacctaccaaggtaaaaagagggatcagagtggcccacagacattgctttcttatcacctatcatgtgaattctacctgtattcctgggctggaccacttgataacttccagtgtcctggcagcttttggaatgacagcagtggtatggggtttatgatgctataaaacaatgtctgaaaagttgcctagaatatattttgttacaaacttgaaataaaccaaatttgatgttatcagctctttattcttacttgacacctccataattgtttctacctacagaggctgttgcaggcaggttatggttaatgctctttacagtatataaaatacaggtatcgagcttatttttagcctaaacaaggcctattgcaactaagcaggtactccctgcctttctcatgttcatttttagggccacgagcacaaacccctaaatccacctagaagaaaatttaagactgagatgcataggccgagcgtggtagctcatgcttgttgcttgtaatcctagcactctgggaggccaaggcgggtggatcacttgaggccaagggtttgagaccagcctggccaacatggtgaaacccccatctctactaaaaatacagacagaaaaaattagctcggtatggtggcgcacgcctgtaatctcagctactagagaggctacagcaagagaatcacttgag

SEQ ID NO: 78828 - DNA, 1393 bp, Homo sapiens
ttgcctgccacctgcccctctcatacctttaggaagctctggagggcatcttccacagtggcactgagagggctttcaagcaaggctgtagcagtttttttttctagccagctcaggtgagagacctgccacaaaaagatcaaggtgtgtataagaggttttaaaaggttttttttctttaaatctttggggatatattgaaaatagggtcaaacggggctgggtcgaaccaccaataatacgagcattcagaagaaagggcacctgagccagagaaggctgaggatcttgttcttcctggcaaggaaatcggtgtcagaaggcatttaggaccattatgtcaagcactgaaacgcagcttacctgatagcaccacctgccaagaagaaagtgagccatggggttttctggctggagagcaatggctttgtccacatgctcctaaggggaaaatgtaaatataaactaacatcagacaccagagttgctaaaagagaggcaagggccggatgcagtggctcatgcctgtaatccctgcactttgggaagctgaggcaggtggatcacctgaggtcaggagttcgaaaccagtcctggccaacatggtgaaaccccatctgtgctaaagatacaaaaattagccgggcatggtggtacatgcctgtaatcccagctacttgggaggctgaggcaggagaatcgcttgaacccaggaggttgcagtgagccaagatcacaccactgcactccagcttgggcgatagagtgagactctgtctcaaaaaaaaagaagaaaggcaagtcactgaggctgtagaaaagtttttggcagggagctggaaaggagtggggaatctgggataggccagcacaaggaaggaggaaaagcctgtcctcaccttgaagctaaagccactctggatgcgcctctggatgctctcatgctcagccagctgaccacaaagcaccgcatacctaggggggaagcagcaagctcagggacaagggctgagtaccatcactgcaaggaatggatgccccaaccacagcctagttgcattgtcccctatccctgtaccctcaactagagctgaaaatacctaattttcatctgtacgtaatccccattctttacggacctctggccccaattagtattctttagtagataatggtaggcttacaagtctccaaagtattctaggtataaaaaaagctgggttcaccacagtaaatctctcttacacagtaaatctctcctacactcataaggagtacagccacaggcattaataaaaacttgaaaagcatgaaaacaatcagcataaaagtatgagacctgactatactacttatcttctgggcagacaaaaaagtgggtctcattagcctt

SEQ ID NO: 78829 - DNA, 1052 bp, Homo sapiens
tgtgtgtggctgcccatggcctgaggctgcacccacccatgttggttgtggcaagtgtctctgactgataaggcaaaaacgagcagggacttctcacatttgccttaactgtcacagggcctcagctggttgtctgctctttccttcctggatcattttcccagcccttagttcccataggaaactttctctcaaataatgatttctgctgggcatggtggctcatgcctgtaatcccagcactttgggaggccgaggtgggcggatcacttgaggccaggggtttgagaccagtctgggcaacatggcaaaaccccgtctctactaaaaatacaaaaaaattaggtgggagaattgcttgaccccaggaggtggaggtttgagtgagccaagatcgaaccactgcactccagtctgggtgacagagcgggaccctgtctcaaaaaaaaaaaaaaaaaagaaaaaaagtctgcccttaagaggtatgaatgattgtgatttggtgctttggacaatgccatgtagagtgcttctttgggggtgagggatagacagaccctaggggctctgagctgaataatcctcttgttgtcccttacatttctctgccagttacacaacagccaatgcggagtctgacaatgagcgggactctgacaaagaaagtgaggacggggaagatgaagtgagctgtgagactgtgaagatggggagaaaggattctcttgacttggaggaagaggcagcttcaggtgcctccagtgccctggaggctggaggttcctcaggcttggaggatgtgctgcccctcctgcagcaggccgacgagctgcacaggggtgatgagcaaggcaagcgggagggcttccagctgctgctcaacaacaagctggtggtgaggctccagctgcctgtctccttctccttccctccctccctccatctctctgttcctgacccctggggaatgaaggcccgtgtggttactgcccctacaaggtgacatgggacgagaaatggtgagacagctggttttgcatctgtcccccagg

SEQ ID NO: 78830 - DNA, 1194 bp, Homo sapiens
gagaaactccaagttttccctactattatttgtgaagtgagagatcagaatttgagggagctcagttttagttttagttttgctatgtggttggtattgactccttggtattgggcactatatggtgaggtgaaggtttttgtttttttttaactctagcaggacagctgtcctccttcaggttccacacttgggcaagcatgttacattatctatcgtggtgtgcagcattcctgaagggccctggtatggaaggttcttggagcagagggctctcgtttagagatccctgggtagtttcttgagacttgttaccatgacctggctgtgaacgtgtgctatctgagcgtcactgggccttctcttccaatggaaagcaggtattcttgaattctgggtgtgagatctcttccccaccatattcctgtgtgtcactggctcccattcgtttcccccttcagtgatgctcctgcgggctgtcccaggtggggctggagatgcctcagtgctgcccagccttccacgggaaggacaggagaaggtgctggaccgcctggactttgtgctgaccagccttgtggcgctgcggcgggaggtggaggagctgagaagcagcctgcgagggcttgcgggggagattgttggggaggtccggtgagtaatgcggcttcttctcctgctttatccctcccctgcagcttttcagctggggtgtgttctggccttcgctgtctgtctctaaagaataaaccagttctatagcttctagcctaatctgggttgaagctgtacatttggtacctcgccttgcacatgctccttgctgcttctggactctcatggttgatctgttgtagcagctgaagcgctctgtttgcctaacctagtctgtctgtgcgggctgggcccaggaagctgccctgcttgccctcctgagggttagagacttaggattttctctgcttttagccctttaatgaggagcagtagtaagaggcaccccatggtgagcagaaagacaagctggatgggacctaatggtacccttcgggatggggcctgctttccagatgccacatggaagagaaccagagagtggctcggcggcgaaggtttccgtttgtccgggagaggagtgactccactggctccagctctgtctacttcacggcctcctcgggagccacgttcaca

SEQ ID NO: 78831 - DNA, 1006 bp, Homo sapiens
ggctgctgccatggtggctggcggccgggtaagggtctgagtggatctcctgccaggccagagcgccttcgggggccgcggcggaaggccaggagtttgcagccagggcgccgggtttgtggtctgcagtgtcgtgaggctgaggtgggggttgaaggcccagaagccggactctgtgacccgggtcggggggtgtactggaggggcggctacgtccaggctgggtgagaagagaggcagtggggcccaggaggctggaggaagccttagggttcagactggggtgcacgtagtcgagagctcagggtttgggcaaggggatacctgccggggttcagccttgagggtgggtttaccgggttcacgaatctctctctctccttacccccgcccgcccgcccgcctgcctgctcccggtgacttctgctggccgcaggtgcagcatgtctagactgggagccctgggtggtgcccgtgccgggctgggactgttgctgggtaccgccgccggccttggattcctgtgcctcctttacagccagcgatggaaacggacccagcgtcatggccgcagccagagcctgcccaactccctggactatacgcagacttcagatcccggacgccacggtaggagcccgtctcctgagaccgcggtcactgcagactaatgggcctgaggtctgggctgctttcggtggagactgtgggacagggtaacggagagaagtgctttagggtttcacttttttggaagcttgttgaaaaagcagtcgtcgggctgggcgcggtggctcacgcctgtaatcccagcactttgggaggccgaggcgggcggatcacctgaggtcaggagttcaagaccagcctggccaacgttcaaccagatgtcaacatggtgaaaccccatctctactaaaaatacaaaaattagccgggcgtggtggcgcggcctgtagtcccagctactggggaggctgaggcacgagaatcgcttgaacctggt

SEQ ID NO: 78832 - DNA, 1459 bp, Homo sapiens
cctcatgtgtaaaatgaaggtatgtatggaaaaacctacctcacagggaaatcaggaggagtaaacgagataatccaataagtgcttgggaacatacctgactcatagtgagtactcagtgaatattctctgcaatcatgatgttgataaggaggaagaagctatttagtaaaaccagccacatctcaatgctcagtagccatatgggcttcatggctaccatcttggacagcacagatatagaacatgatatggaatgtttccatcatcatagaacattctgttggacagtgctgtttgaaggcttcagagcagtggttttcaacaaaggatgattttgcccccaggctacttgtggcaacatttagagactttttggttgtcacaacccagaggatattactggcacctacaggatagaagccagggatgctactaaatctactatgtcacaggacagcacatcatgatgaagaattacccggtccaaagtgtcaagagaactaagattgagaagtcctgctttagaggcacaatctcattgaatatcctcaataatcttatgaggccaggtgtggctcacgcctgtaatcctaagcacttaaggaggcagaggcaggagggaggatagcttgagctggggaatttaagacctgcctgggcaacatagcaagactctgtttaaaaaaaaaatcttataaggtacatactattcttttttataaatgaggaaacaggcctggtgagcttgaggaacttgaccaaggtcacacagctattaagctgcagagatgagacttaaacctaaagctgtgattttaaacctcttgctctgaaacactaaactgaaggtgactgtgtcagagccacacctaatctggtaaaattcttcctgcccagtgatatacaagctcttagcttccttcattgccctctctgtgctaatcccaggagatgctaattcctgccctgaaaggcaaagagatcggctgaacctgggccttatcatgtcttgatcctttagggcagtgattctcaaaccataggacgcccacccttagggcagaatgttaaaatatcaggtagatggggatggatgtggttggaaaagacatgggtaaaattattagttttttacatttggaaaaatggaggaatactaattttatttgtgatagaaaccataggcgctagtgctgagcaaaaagctgatgatctgtgattagaaagggttgagaaaagctgggcatgatggctcacgcctgtaatcccagcactttgggaggctgaggcgggtggatcacgaggtcaggagttggagaccagcctgaccaacatgttgaaaccccgtctctactaaaaatacaaaaattagccgggcatggtgtcacgtgcctgtaatcccagttactcaggaggctgaggcaggagaatcgcttgaatccaggaggcagaggtt

SEQ ID NO: 78833 - DNA, 1002 bp, Homo sapiens
actccgcctcctgagttcaagcaattctcctgcctcagcctcccgagcagctgggattacaggcatgtgccaccacacccggctaattttgtatttttagtagagatggagtttctccatgttggtcagggtggtcttgaactcccaacctcaggtgatccacccgccccgcttcccaaagtgctgggattacaggcgtgagccaccgcacccggctgttgttttttcatccattccaaaatataagatatggtgggctggatttggcctgcaggcttagctgatgctaagctatagctgatgcaggtagagtacctagcatgctgcccagcatacactcagccagtgcctctatttccaacccttgcctgtctgtcattgtctgctggttcgggtggcctgccttctcccaaatttaacttctcttatgacttaacctatatgttccctctaaatccggtttcccttctgcctgtaccctggcttttccttcccagttcccagagactggcaggggagaagccagaagcatcagcccagcgttgtttctcacatctttatctccattcccttggctgctctggcatttgggccactcctgttgcatctgccctggaccgctgcactggtatacttgccagcctcctcgctccacagaatgcttccaaacagatgggaaaatagctgctgctcagagctcaggagtgctcctgctgcccaagccctgggcccctccctttgaactcctggacctctgtcatgtatctaggaggtcaatgtctggtgcagctggcctccaggactctacgccactgctcacggccagtgtctgtcccctttctgtactaccagttgtttaatatttgaatgttactcctgctgtgtccaaacaccctggcctggcctccaggacgctttaagatcaactcaagcccagcgaactggccttgcaaattcctaactccttgctttggtttctcatgtgttctgccattttctttt

SEQ ID NO: 78834 - DNA, 1760 bp, Homo sapiens
gaggtatttctattgtagaaaatagaaataagcctatcccctcaagtaagtgtctgtgtgtgtgtgtgtgtgtgtgtgtgtgtgtgtgtttactcaataagatcagatggcagtttgttcagtaatttgcttcagaaagagggttttacagctgggtgtggtaattgtacctttagtcccagctactcacgaggccgaggcaggaggattgcttgagtttgaggctgtactggccatgatagagtctgtgaatagtcactgtgctccagcctaggaaacatagcaagaccccatctctaataaaaaaaaaaaaaaggaaagaaagtgggttacaacataaaaatatcttcagtataccaaaaacatgctctctctgaatagagatcaagaagctggttctgttgggggctcccacccgcaccccatgcaggctgtggagtcccagtttggtctaggtggggcccatactttcaccaccccactttgctcctgagagaagcctggtccatctagtgagaattgaccttatctcactttctctccccgccagggtctgggatccccaaggcctgggcaggcatagacttgaaggtacaaccccaggaacccctggtgctgaaggatgtggaaaacacagattggcgcctactgcggggtgacacggatgtcagggtagaggtgagacactgggctgactctgaccccgccctctgcctgccagccttcttggagcccctttctggggccctaggccaaccaatggccccggatgggatggggtggagagaggctgaagatgcatttaatccaactccccctggcctccccaggggtgtgggtgtgtgtctggccaggcctggggcagcccaagggcatcagggggtgcccaagcctgatagccactcctgtgtgcagaggaaagacccaaaccaggtggaactgtggggactcaaggaaggcacctacctgttccagctgacagtgactagctcagaccacccagaggacacggccaacgtcacagtcactgtgctgtccaccaagcagacagaaggtgagggaggggtgaggagcagcacctggagcccccgctgtgcggattggccgcacggtcccctcataagctctcccccctagactactgcctcgcatccaacaaggtgggtcgctgccggggctctttcccacgctggtactatgaccccacggagcagatctgcaagagtttcgtttatggaggctgcttgggcaacaagaacaactaccttcgggaagaagagtgcattctagcctgtcggggtgtgcaaggtgggcctttgagaggcagctctggggctcaggcgactttcccccagggtgagtggtctctctcttctgtggccagggaggtgggtggtgggagctctcccttgcccacccaccccaattatctcatccccactggagcctggtcatgcctcctctcattctctgttctctctcccaggcccctccatggaaaggcgccatccaggtgggctttactcccctccccatcccccatccccaccacatctctagcccatatcatccctatgcccctaagcagcctgcctttgaccaagccattcctcccctcagagtttgtggaaggaccacaaacatcccaccccttccagcccagcatcgtcctatgaggatctgcccagtttgcgtggggcaggagtggggttggtggaaagggaatgggggatgtgctgtgtctgggcagagagggccaa

SEQ ID NO: 78835 - DNA, 1358 bp, Homo sapiens
ctgcaaggagagcgacttgagctgagacctgaggcccaccagagttcctctgagctcctggacagagctgttcagctgttcatatgtgggaggtctgagtcgggtgcccatgtccttccatacctggcatccatttgacttggtctcttccatagattgggggtgggtgtcagaaccaggcaggccctgggagccccttattctaccccttcttcccccaggctctgtggagatggctgtcgcagtgttcctggtcatctgcattgtggtggtggtagccatcttgggttactgcttcttcaagaaccagagaaaggacttccacggacaccaccaccacccaccacccacccctgccagctccactgtctccactaccgaggacacggagcacctggtctataaccacaccacgcggcccctctgagcctgggtctcaccggctctcacctggccctgcttcctgcttgccaaggcagaggcctgggctgggaaaaactttggaaccagactcttgcctgtttcccaggcccactgtgcctcagagaccagggctccagcccctcttggagaagtctcagctaagctcacgtcctgagaaagctcaaaggtttggaaggagcagaaaacccttgggccagaagtaccagactagatggacctgcctgcataggagtttggaggaagttggagttttgtttcctctgttcaaagctgcctgtccctaccccatggtgctaggaagaggagtggggtggtgtcagaccctggaggccccaaccctgtcctcccgagctcctcttccatgctgtgcgcccagggctgggaggaaggacttccctgtgtagtttgtgctgtaaagagttgctttttgtttatttaatgctgtggcatgggtgaagaggaggggaagaggcctgtttggcctctctatcctctcttcctcttcccccaagattgagctctctgcccttgatcagccccaccctggcctagaccagcagacagagccaggagaagctcagctgcattccgcagcccccacccccaaggttctccaacatcacagcccagcccgcccactgggtaataaaagtggtttgtggagtttctggctctgttctgtgggccaggagagggactaggttgctggggggtgatgggaccgtcctgttcagctggttcaggcttcagccaccctgttgagcaggttttcccatcgtctctctcgaaactggcctggcccctgactttggagagcagtgccatgtttgaccaccagaggggaggagtgagcgggccacgggagccacgagtgtggggaggctgcagtgctgctgtgtagcatttcttcctgg

SEQ ID NO: 78836 - DNA, 1108 bp, Homo sapiens
gtgggggtaggtgtggagctccccgcttggggctcagctggttcccaggagagctagcgtgggaagcggcctggaaacgggtttccccaggtgtcagcgccagagctggtttcccatgacctcacctggtgggtggagcccctcccctccacccctcctttctagagcaccatgctcagcactggagctcaaggtcagtccccagccttctaacttttctgctctgttccttctggcagttcacagggccctggggctcaggttaggggaccatccccccctccgacctctattcacagcctgaacataaagggaacccatacagcctaaacctcaatcactggccaaagttcttagacttgggttggacccagtcttcagccttggcacctaaggagctagtgaaggtcagggtgctgcttgtgaacaatttaaatagaggtttatccccaagtatcctgtgcaagagcgagttcattgggagaggacttggagaggagcagggatctggagaacattccctcatgttggagcttgaagggactttgaaggacacccagggagaaaatgaaacaaaacaaaacttactttaccataaggagactgaggaccagacagaaaaggtaatagcttaaatgatatgtatcacccagtgactgtaagagcactttgcaaactctagagttggatacaggggtatgtgttactctgggagaggaatttctttctttctttttcttttgaggtagagtctcgctctttcacccaggctggagtgcagtggcgtgatcttggctcagtgcaacctctgcctcttgggttcaagcgagtctcctccttcagcctcctgagtagctgggattacaggtgtgcgccaccatgcctggctcatttttgtatttttagtagagatggggtttcaccatgttggtcaggctggtctcgaactcctgaccttgtgatctgcctgcctcagcctcccaaagttctgggattacaggtgtgagccactgggctcagctgggagaggaatttctgaggcacacctggcacacctgctaggcagctgctgggtcagatgagcactcatgccctggcccagcccacc

SEQ ID NO: 78837 - DNA, 1009 bp, Homo sapiens
gtgggctctgagggtggtgtgggggccaggaggaggctgaggatgggaacggcagcatccactggggcgccatgctctccccactccaggctctcacctgctgattgccctgagcagcacggaggtcctctacgtgaaccgaaatggacagaaggtacggccactagcacgctggaaggggcagctggtggagagtgtgggttggaacaaggcactgggcacggagagcagcacaggccccatcctggtcgggactgcccaaggccacatctttgaagcagagctctcagccagcgaaggtgggcttttcggccctgctccggatctctacttccgcccattgtacgtgctaaatgaagaagggggtccagcacctgtgtgctcccttgaggccgagcggggccctgatgggcgtagctttgttattgccaccactcggcagcgcctcttccagttcataggccgagcagcagagggggctgaggcccagggtttctcagggctctttgcagcttacacggaccacccacccccattccgtgagtttcccagcaacctgggctacagtgagttggccttctacacccccaagctgcgctccgcaccccgggccttcgcctggatgatgggggatggtgtgttgtatggggcattggactgtgggcgccctgactctctgctgagcgaggagcgagtctgggagtacccagagggggtagggcctggggccagcccacccctagccatcgtcttgacccagttccacttcctgctgctactggcagaccgggtggaggcagtgtgcacactgaccgggcaggtggtgctgcgggatcacttcctggagaaatttgggccgctgaagcacatggtgaaggactcctccacaggccagctgtgggcctacactgagcgggctgtcttccgctaccacgtgcaacgggaggcccgagatgtctggcgcacctatctggacatgaaccgcttcgatctggccaaagagtattgt

SEQ ID NO: 78838 - DNA, 1845 bp, Homo sapiens
cacgtggtgcaggaagaggaagatgtacagacagccatggcttgcctggctagctgccccttgctcaagattgaggatgtgctgcccttctttcctgatttcgtcaccatcgaccacttcaaggaggcgatctgcagctcacttaaggcctacaaccaccacatccaggagctgcagcgggagatggaagaggctacagccagtgcccagcgcatccggcgagacctgcaggagctgcggggccgctacggcactgtggagccccaggacaaatgtgccacctgcgacttccccctgctcaaccgccctttttacctcttcctctgtggccatatgttccatgctgactgcctgctgcaggctgtgcgacctggcctgccagcctacaagcaggcccggctggaggagctgcagaggaagctgggggctgctccacccccagccaagggctctgcccgggccaaggaggccgagggtggggctgccacggcagggcccagccgggaacagctcaaggctgacctggatgagttggtggccgctgagtgtgtgtactgtggggagctgatgatccgctctatcgaccggccgttcatcgacccccagcgctacgaggaggagcagctcagttggctgtaggagggtgtcacctttgatggggggtgggcaatggggagcagtggcttgaacccacttgagaaggctgcctcctaggctctgctcagtcatcttgcaattgccacactgtgaccacgttgacgggagtagagtagcgctgttggccaggaggtgtcaggtgtgagtgtattctgccagcttttcatgctgttcttcagagctgcagttatgccagaccatcagcctgcctcccagtagaggcccttcacctggagaagtcagaaatctgacccaattccaccccctgcctctagcacctcttctgtccctgtcattccccacacacgtcctgttcacctcgagagagagagagagagagcacctttcttccgtctgttcactctgcggcctctggaatcccagctcttctctctcagaagaagccttctcttcctcctgcctgtaggtgtcccagaagtgagaaggcagccttcgaagtcctgggcattgggtgagaaagtgatgctagttggggcatgcttttgtgcacactctctggggctccagtgtgaagggtgccctggggctgagggccttgtggaggatggtcggtggtggtgatggaggtggagagcattaaactgtctgcactgcactggtggctttgtgtcgatgctgggccgagcggtgtgtgagtgatctccaggcggggctggagtgtcacagggaggctgccaggccctacatgcccccacaccttggcacgcagtccttcaccttgtccgccaactctgcctctccagggctcattggggattgcagccaaccaacctgaattgtgaagcaggggctgttcttccctttggccagcagatggtgctgctccccacagaatccttggctttccggcagctgggagcagtgatttctgtcactctattagtgcttgcttcctccctacttgtcgcaagaattttcttggagtcgcccgggcatggtagctcacgcctataatcccagcactttgggaggctgaggtgggcagatcacaaggtcaggagatcgagacaatcctggctaacacgatgaaaccccgtctctcctaaaaatacaaaaaattagccgggcgtggtggcaggtgcctgtagtcccagctactcgggaggctgaggcaggagaatggcgtgaacccgggaggcagagtttgtggtgagctgagattgcgcc

SEQ ID NO: 78839 - DNA, 1080 bp, Homo sapiens
cctggattcccaaaaggaaaactgaggcagaggggcaaactttggtccaggatggccaataaaagggtcacaaaatagggttgtcatttcaaggggattggccccactctctgaatgcccagtaattgggtgctttcctctccctgagcagctttaccgtggctcagctttcaccttgaaccagcccttactgagcagtcagaaaccataccgtgaggtcaggagaggctgcgcggccttagtttggtggccagcaacccatgtccactgagaataagcttgggcagagaaaagggaaaggggcactggtctggccccccggaaggtggctgctgcttctggttcccaggctgctgtggccaaaggtctgtttgtgtttgccaggtgcagaggcaggtggctgcagctcaccttccctccatggcatgatctcccagctctgacccttgacctgttccctcgcggcatctccacagggctagaaggtgaaccctacttcctttaccaggtcctctggtttctcttcccaggccaggacctaaaccgttcacaactcccagcaggccagagctgcagagacctcagatagagactataaagtgctgtggaagccttgttcaaataaaaacattcatgaatgtccagtacttgaaattggtatgctgagattctccgatggaaactgggctggagggacccacactcctgttcactcagcctgttctccactcctatctcaatgtctctctctctgttttttttttttttttttaatagaaacaacaccttgttctattgcctaggctggagtgcagtggcgccatcatagctcactgcagcctttaattcctgatctcaagtgatcctcccaccccaggctcctgagtagcaaggactacagacaccacacctggctaatttttatttctattttttgtagtgacgggggtcttgctaggttgccaaggctggtcttgaactcctgacttcaagcagtcctcccacctcagcctcctagggtgtccggattacaggcatgagccactgtgcccggccccctatcacgatatccataagatg

SEQ ID NO: 78840 - DNA, 1038 bp, Homo sapiens
aataataatagggatggccggtgtggtggctcatgcctataagcccagcattttgggaggctgaggagggcagatcacttgaggtcaggagttcgagaccagcctggccaacatggtgaaaccctgtctctaccaaaaaaaaatacaaaaagtagccaggcatggtggtgtttgcctgtaatcccagctactcaagaggctgagggaggagaattgcttgaagctgggaggcggagtttgcagtgggcagagatcatgccactgcactccagcctgggcgactgaatgagactctgtctctaataataataataataataataataataataataataataataaccttggagccttggagagtggctgagggactgtatcagattatgcattcatgggacccaataaacagtcatttcctttcccccaggtgacatccagacagtcaggggcagacttagagtggaggggagctccctgactgcaaatgagttccagaaggaaatgaaggaaaaaggagaaccgcagacaaatgctcataagggatgaggcatgaggagcagagggtggggaaaaaagagaggaaagctaggtggggctcggaagggatccggaccctgtggaaaaagccaactgttggaggtcctgtttgtggcaagagggtgtgacaaagttcttgactggagggagaagactggagctttgagaatgggtttggggaagatatgaaggtttggaggaactaactgctcacagtcttggccttcggaaaccaagacggcactcctgccagggccaagtgtaggtttcaaattgtaacccctcctccttcatggtggcagttcagagctgagacctgtggcaggaaagaggggcatcttctgccctggtccttgaagctcctggcagatcagccctctctgtgtcaccaagacagcacactgaccgggctggaccatccactggctgatggctcatgactgatgacccaaatgtgccaaggaagggatgtccaagtggttgggacccttggcagga

SEQ ID NO: 78841 - DNA, 1060 bp, Homo sapiens
acaggggggcgacacggcgcagcgccgaaagagttaatctgttctaggcgggggaagtgcgggcttgggggtgggaggcaggacgcttagcttggcctggagctgcgccccgcgctggacgctcggattccgctcgctgcctggactcagagcacaattgcgtttcctgcgggttatttttggcgtgggaacgcggggagtacggcggtgagaaaggctgaagctgccagcgccgctgacgggccccttcctgtattttacacctttcgcgaattccgctcctttggaaagggaataatggctttgggatgttgttctgacacagaggaaaaggatatttcagcagcacaacaattctcactttgaaaaggaaaaaagaaaaccattacccacctctggaggcagaacccctgaatgggcaccaaaggaccccctgctcccagggtcctctctagcctggggagcttttctttctttttctcttttttccattttgacctcttttcctctttcccctccctatctgcctccaagaccctgggatatcttaacatccttctattgtcccctttttgaatactatcaggccccctgcacatgcacacacgtagggcagctacgtagcggggctttgggtccctctggcctgttcttgctggcaggcgggggtcatctggataactgggctgattggttggctgatcaccatcatcacagccaagaaggacattggccagccgtcactggcacccttggggactggcgacccttccctgacccgaccctctgccccctcagaggccttgccaccagatgcactcatcagcaagatcgccatccagggctccctagctgtgggtcagaactggttattggatgagcaaaccagcaccctcacaaggctgcgctactcttaccgggtcatctgcagtgacaactactatggagacaactgctcccgcctgtgcaagaagcgcaatgaccacttcggccactatgtgtgccagccagatggcaacttgtcctgcctgcccggttggactggggaatattgccaaca

SEQ ID NO: 78842 - DNA, 1020 bp, Homo sapiens
ccacctttaatttgcatgggtatttcaccagggaattcggagtttagtagttccttaacagcctggagccagtgccctgcctggagaatcaatttgaccccacggtgacctgaggacagctgcttttccagggcccctcggctggtagagtcagggaggggttgtgcagaaggagaaatgactttatcctgcttgctcagccagggttcctctcctgcctcagggccagggtcagcctggtcagggggtagggaaaaaaggacagtggctcccacctcccccatcccaggctagaaaaggccaccagactaaaccacggtggtgtggatgctccatctcttgactgggacccacagagctctccgtagcttccctcgccgcagctctcccagcctctccctctggatccacaggatcagcggccccagccctccgccccacgtggcttgctgcattccgggaagggggtggaaatgattcactgggggaactgtgactgtcccttcctcgggcggggatgcgcctgcgaggtcccagcggccttccctgggcggctgcgccctccctcgcgcccagggcgccccgaggcctgcgcggcggcggaaggggcaggtgcgcctgcccgcccgggtcagccctccacctgccgccgccgtgccccgcagctcccgcggctccccgccccccgcgctctttgttacagcccgacttcctgtttgcggcagccgacccggctcacttcccgggccgggaagccgccgaaggccgcgagcttctcggaggctcccccgcccgctcggctccgcctcctgcctccccaatctcgctccggccgcggccgcgggaagcggagccgcgggcgggcaggcgggctggaccgcgcgggccccgctgcccggcactagagggcgctgcgcggccgtcggggctgcgcgcgggaggggccgccgaccccgggaggctctctggggccgccctttctccgttcggggccgatgggacgaaggcggcagggggcgg

SEQ ID NO: 78843 - DNA, 1344 bp, Homo sapiens
ggtgggcgtggtctcccggcaagaaggtttaaagggcgcctccatggggggcgctcagctggagctaccgagcggtgccaggccaggtgtgtgcgtccgtcggtctttccgtgcccacgccggagaccagccccggaggccgcctgggcctatccctgtgccaggcaccatgaagcaggagtctgcagccccgaacaccccgcccacctcgcagtcccctacgccgtccgctcagttcccccgaaacgacggcgaccctcaagcgctgtggattttcgggtacggctccctggtgtggaggcccgacttcgcctacagcgacagccgtgtgggcttcgtgcgcggctacagccgccgtttctggcagggagacaccttccatcggggcagcgacaagatggtgagcatccaaccgtgcccaggggagtgagggggttgggggcgggatactgggcgccagtgccctggaatgtccggggctctctgggccaatagaaagaaatgtgtaaacctgtgtctggggtttgtggctcatttaaatgtatgtgcccagtgcatcactgtgatggctggagtctgtgaacctgtggatccctgtgttgatcaccaactgggaccactgacatgtcagtgtttctggacgtttctcctacatccgtgcatcgctcccccaccttcccctgcatgaatgggactcagcatgcagagtggggcacttggaggcccgggtcagcgggattgataaaggtttccttgctgatggcagagctgatttctaacttgtctatttcaaaatatttcttccctccctagcctggccgtgtggtgacgctccttgaagatcatgaggtaagtgcccgaatcatgaaggggaaccctggcccagtgtgaagggggaccagcagagagagctcataggctcttggctgcaggctagctctgtctgatgcttctctggcagagtagaaacgtgttctagctcagtgcttctcaccaaatcacatgaggatcttgttagaatgcagattttagttcagtagcatgagaatgggtcctgagacacagcattcctaactagcttacaggtgatgccaccacatcctggaccacactttgaggaggaatcctgtcttccctggtactagaccactttgtcaactgttttttttttttgttgttgttgttgttgttttgtttgtttgtttttgagacagagtcttgctctgttgcccaggctggagtgcagtgatgcaatcttggctcactgcaacatctgccttccagattcaagcgattctcccacctcagcctcccgagtagctgggattacaggcatgcgctacc

SEQ ID NO: 78844 - DNA, 1030 bp, Homo sapiens
aatgacaggctctagcagcagaagagcttgaggccaagggctgggtgtggtggctcatgcctgtaatcccagtactttgggaggccaaggtgggagaatcacttgagcccaggaattcgagaccagcctggacaacacagtgagaccccatctctataaaaaatacaaaggaaattaaaaaaaaaaaaagtgccttgagagtccaacccagcctcctcctcattgcccagtcacctcggaaaaagccttcagccccctgggtacaagttcactgtgaggggacgatgccgtgggatgatgtatggggcaggctgggtggtatgtgttgctgctgttcttgcggctggtgtcctggattggtctgggtgtctccagcagggtcaactccgatcaggttgtgcagccgttgtggctggggagggtgccatgcctgggccgtgtgctcatgtcttggcggccttgtgtcttggccattgatgggaagagtgtggagtccagccagcttcttctgggtgcctggtgagggcaacacaaaaggaggaggcagcaggtggcagggagccctgggcagctgcctcctgtgtttcctgggcctcttgccagacagccagagcacagccctgctccatcctgggagctgatggtggggagggctgcttgccagctgcacgtagggggctttcacccatcaagccattcgatcagcaagtatttccttaagctcccactgtgtgccatgcaccattccaggcacggggatacagcggtaaagaactcctcctcctcaaggaacttggagtctagaaactgatggtgaccattcagcgtggaatgggagaagagggccttgagcacccagaaagggcttctgacttgagcagggcagtcagggaaggccttcttggctttcttggagagggaacctgagaaggggcctctgaggaacagagagtaagggaacaacacgtgcctgaggggaggcaagctcagaccagctggaacagagtggcccggacaggagacacgagcc

SEQ ID NO: 78845 - DNA, 1423 bp, Homo sapiens
agcatgaaattgaaaaggaaacatcttatcaaacttgatgttccaagaaagaagaaaggaaaaacctgtttgtgcctagtaagttacagctctcatcctgtaactttggtgtctcagattgtaaaatgtgtgctctatctagagtgtcaagatgaacattttaccatctgtggatgaagtagtatagagagggttgggtaggtatcattttctcttaaaaatctattcctcttactgaaaagacagttgacaggaagagcaagcaaacatgccaagaagttgttagcaaggagtggcagggaggaattgcccaccacttctcctccagctcagactctggtaaccaaggccacaggctccaaggaagcttacgcgggactggtgcttacgttcttgtctctctccgtccccacaggaatctccgccagcagtcctctgcagacatcccttgttcggcctgctggccttgctgactttggaccttcaagcgcctcttctcctttgagttcccctttgagcaagggaaataatgttcctgggaatcccaagaacctccacatgaccagcagcctagccccagactctctggtccggaaacagggcaaaggcaccaacccctctggaggacggtaaccatctgggccctccgacttccttcaaccaaaccagggctagagtcctgacctgccagtggtctttggatggcttgccccgtgcagcatcttgcatcctgagtcagaagtggaaatgtccagcaggggaaggacaggcaggtggatggtgtgagcacttttatcatctgtgtctcatcaggagcatctggggtgcctgtaggaggaaggccacagggcatggatcagccccactgcatctcaagtgaactgtatagccaagtcttaaacctctcacggggcaagcctgacacagaccccctttagatgctcaggcatactgtttccatcccgattccactcttcggctctgacacgtcccttgcaaagtctccgcaggtgctgtgaagagccttccatggtagagatttctcttaagagtgtgatttctcatagggctagtaagggagattgtatacctgttgtccacagtcttcaggcagctccccaggtctctgaaccccagagtgtcatcattggagagagcagtgactgcgagagatggtggaggccgctaagcatggtagaggctagaggaagtctatccacaggcagttgtgttcccagcaattcctcccatcctgcatggttcacaccaagagaaccttcagatcctaccagcaaccgtagcaccttccacccaggggactcccagaagccagtagagagaccaggagccacctcaatcagcaggacagcctcactgcccctcttgcagagtcccctttgcccatcctgaatgcacagtctcc

SEQ ID NO: 78846 - DNA, 3049 bp, Homo sapiens
ggagaaaagagggtgtgaacctggtgatcccatttgttccctcggctgataactccaacctctctgctgacggagatgactccttcattagcgtggactcagccatgccaagccctttcagtgaggtgaggctccttttagatgcctgcatcacagccgtaaggagtgtcctgaccgtgtagcagggacacactgctgggcagtctttgcttctcctggagttctccagccttgttgaagtaggttgcacatgaggtctgtaaggagaaaaacaaatgaggacaggttggtttctcagaagccaaagcagcctcaactgtgaagcatgttcctagctgggtgcaaggccatgggcggtgagcacagggggtcgtaatgatcttaacccttcctcttctagatctccatcagcagtgagctgcacactggctccattcccctggacgagagcagcagtgacatgctggtcattgtggatgacccagcctcctcagcccctcagtctcgagctaccaactctcccgcatccataacaggctccgtctcagataccgtgaatggtaattgctgctgtcttgtacagcttgggcctggtccactgcccagcactggtttggttgtgggtaaggtcctgattccttctaggataatggtatttttattctttcaatagctttgtcaagtgaaatgagaaaacgaggtttagggaaagcaaaataagtaactttataaagatttaaaacttttctagtcatccccgactttcagattcaccattatttttgctgatttttaattaatgttagcttttctgggcctttcctcactttgctgtgtggggtctagtgttgctgccatttcttggggagctctgggttcaaaactcgagggtaaaatttgactctccaaggcaagagcacattagagtgtgcagatgagtcccaggtagcaagtcgcttccctttgtaatggacaaatttaaagaggaaactcaggagtaatgtaactgctcttcagaatgaaaagcagcttgaggagttaggatgttttcattgtttagaattcttagtattctgtgtgactcagtggtctagccatcattaagtggagacatagacctcctcatgggtcctaaaacaaatgccctaagagctcgctttccctgtcaggagaaggtgatgttaacatcttggagattgactttttttttttttctttcccttttggcccatttgttcccacaggaatttccattcaggaaatgccagctgcaggacgtggtcactcagcccgaagccgaggccgccccaaaggttcaggaagcacagccaaaggagcagggaagggccggagccgaaagtccacggcaggcagtgctgctgcaatggcaggagccaaagccggggctgcagcggcctctgcagctgcctatgccgcatacgggtacaacgtgtctaaaggtacagaagcccagggtggctgcagactttgttctggtcagagacagtctagaaattctgtcagtcaggtagaacatgtaggaaaccctgaagccgggagctttcttcctagagccccaattggggttcttcttctttgtaataagcactgttgactcaccccttgccctcctgacggtacagggctgtctgtggattggaagtagttgtaaaaagggagagctgaattgtgaactgtactactttaaacattctgaatttttcttgctttggggatttgttttcttcctaggctttcatttctgagatccacattttagtaatccaaattagcatagttaacgttcattcagctgtgtgatttatcacctagatatgaggcacctgctgcatgcataggcgtataccacatgggccaggcacagtggctcacacctgtaatcccaacactttgggagactgaggcaggcagatcacttgaggccaggagttcgagaccagcctggccaacatgaggaaaccctgtctctaccaaaaaacacaaaaaattagatgggcgtggtggctcacgcctgtagtcccagctacttgggaggctgaggcacgagaattgactgaaccctggaggtggaggtttcagtgcactgagatcaggtcactgcactccagcatgggtgacagagcaagactctctcaaaaactaaaaaacgtaaaaaggagtattccacatggaccttgctcctgagtgtataatagcaatgagaaggggaagccatgcatgcagtactcttaacagcaatccacggcaaaatacaggggaatgaaaagaaggcagccacagcagttgtaggtcaggaggagagggaaccatggtcctgctgataagttgcctgtctgtattcaaaagggaggagaagaatgaggaaggatttggactggtgacagagagctggcagtggccaaggcatactgggggtcactgagcagcttaggttccatggaagaggagcagtaggagtcaaggttgtaaacacatggcgaggcctgctgggcaggagcttagcagatgtgtgacaaggggctgcagacagtttgaggaaaaaagtggctgttgtgaccgtgatatgtgaaggatgattgtagctataaagtacaggacatttgagtgtggtgagaaagagagagccacttacagacctttcttcccattcaatacgtgggcttagtatgagctcatagttgtagcaagtaaaggcatactagtatagaaagtgcttggagtgtagtaattgctcagtaattgttagtttacttgccttttctcttactgcagaaatctcagctttcatttattggttcttccaggaaatatgaagtatgatagaggaaatatgaagtataatagcctcgcccagtgtttcttagccctttgccaacttaccacatccttggaaaacaacagtcatgccagtagtccaggctgccgtggcagggtctcacccatggctggggcattgcatatactcatcagggtttctcctcagaacctgcactgtgtagagggcagaaagggtgagggagatagaggg

SEQ ID NO: 78847 - DNA, 1042 bp, Homo sapiens
aagcaatgtgatcttggataaattgtctagctcatttgtgcctcattctcctaaactacaaaatatgtgagtcttaacagcatttaaataatgacgattatgggattttttttctcagcacaaataacagtgataattctgggatttaaatgagttaatgcacttagaacaatgcactgtaagtgttaaccgttaatgttattaatgtactaaacactacgttttaactattaatattattgccactctttttaagtgaaaactgaaaaaaataaaacaggagcatgtatcttttgctcagggcatgtgaaggaacggctttgtatcttctaagatgtatcttacttagctcaatatcatagaaacgaatcagaccctactgacgccaaactcgcaaacagacaattggctgggttgctctcagaatttctggtccttccctaagagtgcttcagtttttgctatattctatgcaggtgattttctatgatagcgactggaaccccactgtggaccagcaggccatggacagggcccaccgcttagggcagacaaagcaggttactgtgtaccggctcatctgtaaaggcaccattgaagaacgcattctgcaaagagccaaggagaagagtgaggtaagcacaagagaaagaaattcctacactggtggagcaaacagaaagtccaaccacattgactgcattgagactattttaaaactctcttgcctttcattggtcctgacgaaactacaatttcttctgaatagaaaataaaatcaggtcccatgcaatagcaattttgacttccctggccatgcctcattccctttcccctagaatggtttccatagcctggatccagctgttgttcatgtggagactgacaccggtaatggcctctcgcattcagtggaagaaggatggacattttttagttcctatcctagtactctcagcttatctgcctctgaattgtatgccaaatttgttattttttgtttttttcatcctgattcagtagccttagattttctagttag

SEQ ID NO: 78848 - DNA, 1030 bp, Homo sapiens
tataaattacatttccagtggcaggagaggagacaaagcataaagaaatggaaaaaatactgataatatggggccaggtgcagtggctcacacctgtaatcctaacactttgggaggcagaggcaggcggatcacaaggtcaggagttcgacaccagcctggccaatatggtgaaaccctgtctctaataaaaatacaaaaaaatttagctgagcttggtggtgggcgcctgtagtcccagctactcgggaggctgaggcaggagaattgcttgaacccgggaggcagaggttgcagtgcgccaagatcgtgccactgtactccagcctgggtgacacagtgagactccatctcaaaaacaaacaaaaaactgataatatgaatgctatgaagaaaaattcatcaggtaaggagtggtagcatgagaatgatcaggggttgctgttttatatggattggtaaggcatctctgataaggtgacatttgagccaagatctgaagaaagtaaggcggcaacctaagcatatacctggcagaaagaagagcattccaggcagaggagataagtgcaaagccctaaggtgagaacatgcttggcataatcaagcaaaaggaagcagcccagagcaggtagaacagaatcaactatggggagagtagtatgagatggctattgcagaagcagatcatataggggttagtagccatggtaaggactttgagatggggagcgattgcaagaatttgaacagaggagtaacatgatctggtttgagttttaaatgcatccttctagcttctgtttagagtgggagaaaaaaatgaaatgctacaaggagacataaacaggaagatcagttaggagtatcagaggttaagtggcaatatcacccaggcagcagagtctgaagttcaggagaaagattggggttaaagctgtattttctttttctttttatttatttatttattttttgagacagagtcttgctctgtcattcaggctggagtgcagtggcttgatctcgg

SEQ ID NO: 78849 - DNA, 1049 bp, Homo sapiens
ctcatgagggtagtggagaaatgaggtgcaagagtgtagaggcttgaatagattcacagcagcagggggaatctctctctctctctctctcactaatctgatactacacattctgtaatagcaactataggatgcaccttccttggcatctaaactttcagttaaccaggtacggcaagacgtcagcgcctgagggccactggaggcattgctgggtagctgtacatcatcagcatctgtcatactatgggagggctgtcagtgtggcatgtgttgttcctgtgggttctctgatgtggtggctcacttgagccatatcacatagtttctaccatatcagatagtagaaacttgcctttttccttgttatctcttggttccctgctctctgtatcttttaagaatttcagcatagtcatactctcaatgtgagtacaagattcatcactttgtcccagctgctcttttggactccactctcagttcccggcttcatacctgttgatccaaatccattctttgctatgctggtactctgttagtttctctctgccctttattaatcatgccactcctttgattaaaactcttcaggaattcttcatcaattataaaataaagtataaggctcttcatttgtgtcctttatctacctttatagcttaattatcagaccactttcccttccaaattttatattccagaaataatgattgacttctagttccctgaacacaccatgccatatcacactgttggataaactgttccctcagcctaagtcatcctcccatgagtctcctcttccacctggtgaacttctgtttgttctttaaaaccccattcaggtgtcaatattcctttcccagcccctccctttattcaagttaatcaaaatacattgtaagtaattattttacatactagactttggcctcaacaatggaaggaagtcaaaagtctgcatttctaggctgaacgcggtggctcacgcttgtaatcccagcactttgggaggctgaggtgggcagatggcttgaggtcaggag

SEQ ID NO: 78850 - DNA, 1030 bp, Homo sapiens
ggcctcactctgttgcccaggctggagtgcagtggcatgatcatgggtcactgtagcttcaacctccccagcctcaggtgatcctcccacctcaccctcccaagtagctgggactataggcatgcgccaccatgcccagctaatttttgtattttttgtagagatggggttttgccatgttgcccaggctggtcttgaactctgaggcccaagtgatccacctgcctcagcctcccaaagtactgggattacaggtgtgagccactgcacctcgcctgaataagtgtcttacacattcattcgacaaatatttcactaatgcctactatgtgtctgatactgtttgagacatttagggtacatcagggaaaacagactggaaaaacaatcagtccatccagatttgttttaggagctataattgaacacatcagaaaggattgttttgttactcttatgcattattccattaatggaaaaacccattttttgtatcctgaacttcaaaaggtggttggagagcaatgaaaagggtaatttcaaaaataaagtagaaaagatattccaacaaattatccactctttcctacccagtcttcttgcaggaatgcttcagtgtttgaaagggtgaagaaaagaggattcctggctgggcgtggtggctcatgcctgtaatcccagcactttgggaggccaaggcgggtggatcaccaggtcagaagatcaagatcatcctggccaacatggtgaaaccacgtctctaccaaaaaaaaacaaaaaaaatagccgggcgtggtgacacatgcctgtagtcccagctactcgggaggtgaggcaggagagtcgcttgaacccgggaggcagaggctgcagtgagccaagatcatgccactgcactccactctgggcgacagagtgagactgtctcaaaaagaaaagaggattctttttgaatctcaaaattattgctaagattcaaatatatttaataagaattttagtaactttgagatttaaaaatacgtaaatg

SEQ ID NO: 78851 - DNA, 1043 bp, Homo sapiens
tacatccttttactagggaagacatttcttaattttaaagtaggtcacagcctaggaatctaaaattatgtatggaaaacaagatttaggattagttctctgcgtaaaaaagcagagaacagctattcaacctgagttaatatagtgattctcaacttgactacatatcgcaatcacctgagaagctttaaaaaaatatggatttctagtcctatttccagagattcttatttattacatttgaaatgaggcctgggcatcaggatatttaaaaggtcctggggtgattctaatatgcaaccaggcttgacagctactaagttagtggaaaagatatgactgtgcaaggcagcttttgtttctttaattgcttctttgttgaagtttttctttttcttgtctgagtggtgacttattttttaagggacaggaggtcacagacctagaaacaggagagtgaaaatgagaacagataatcacaaactagtacaataagtctttatataaataaagtttgagaggcagaagtacctggttgtcagaagtacataaatgttctcatgtttttacatgtgtaaggcttcataccctcgccctgctacaccagggaatcgtaataagtaagtggaaattgtactgttattttccttatctaggaataaagcaatagggaccatatcagtacagaaggaatgaaggctagcattaaggagggttttcaggctttttggaagccaagattggcttgttgaattttgcaatgaatttatctgaaatcagtgggaggtttcttttaataatccggcaacttcttttagcaagagacataaatgatttttggggtcagtttcagcactaagtcttaggtttcatagccccttgaatgctgttgacagactaaactctctggtttgtattatgagtaggccacttattcctaaatgatggaagtgcttatgagtgaatgtaagtcaccataagagaggtgattaagctgttgtgtttgatgtatatattaactatgttaaatatcctaacagtag

SEQ ID NO: 78852 - DNA, 1368 bp, Homo sapiens
ctatcaaaattgagagaccttagggaattcaattactggagaagggtaattgtggtaagaataaaaccttaaaagttgttatgaaagctttgctgcctgctcagacttggaatttatacagtactccttgtctggtgccagggagagggcttagcagtcaattctgtcccagctgcagtcatttgattgtgttggtaaggagaccaacaaaaagaagagcatttcaataatctaaacaggaccaaacaaagagactgaacaaaggtgtgtgccacagcttcagggagcgggtggtggaaggagacatggcctggcagcattctgaaggtgggaaatggcaggctgcagtgcagagggagtaaacagccaggacctgtggctttgtagcaaaaacagagtggctgatgatttgttatggtgctgtcagcacatccgttcttgttccttgtatacaataattgtgcatttggcaaattgtggcaagaacagagaatgactgttgagaacttttggattgctgtcaacggtcagactgtggttctgaagaaaagccataggttcaaacccagaaactgaggaggaacattgtgtttttcttttagttgttagttgtctatataatatctccattctttctctctccctttttgtgtcctatggccacttccacatatactcttacccaaccccttaaacctaaactcttcccctcttaatgacagcaattgttcagggcatgtttatggaccagtctgcaaacaggaaactctacttcctgaatatgataggagttaaatgatactaactggataagatgaaaatttgtgagttaagtgttctttaaagatctgttgctgaaatgcttttcttgtgagaagaggaaagagaaagcacaagttagtgagtgagaggagcttcactgcagagaaactcaaagtcagtctttctgaaaagccctgctttctttattgaattaacatacaactagggttaacgacatttaccagtcaacctatttgcagtcctccaagagagctagttttgggtttaaaaaaaaaaaagggtaggggggctgggtaccatggctcagcactttaggaggctgagctgggaggatcccttgagcccaggagttcaagaccagcctaggcaatatggcaataccctgtttctacaaaaaaagagaaacaaaattaactgggtgtgatagctcacttgtagtccaagctactcaggaggctgagatgggaggatcacttgagcccaggaggtcgaggctgccatgagctgtcattgcgctgctgcattccagcctgggtgacagagtggaaccctgtcttgaaaaagggaaaaaaaagagagaggtta

SEQ ID NO: 78853 - DNA, 1321 bp, Homo sapiens
ctacagaatcccaggcaagagatgagcaccgttattgaaagaagcaagatagcaccttacttcttttttctcccttcttggttctggctcctaagttcccattacaggagtagatggcttattgctggcgttgtgggaatctcttgtggcttttcctgttctttgaaagaaaaatggaccttgtttaaatagcaggaagcgtctgagttctttttgcatcgataaaaagcaccagcctcactggctgtttactgtgagaaccaaccagctcctcaccccattgtgctctgtagactagctgggacagggcgggggttgggggtgtctcactggaaccctttatcatctctctttcctttatacttttacgttttctctttccctgagaagggttgcttccatattccttgagagactgaccaaaatcttctgggtttcacaccttttcttctccatgtttcaccagaaagatgtacaatcccttcaaaagtcccctttccttggaaaaatgagatattatttaatcttttgccctaattttactgccataggctacattctttttatctctgaacaggatcttacaccgtggatggtaaaaacctgtgtctaatgaaagtactataggattgtaggaaagtttgtaagagagtaggataggtttgttcatttaaacattttttaagctcctgttttattttatttatttttaacacccaatgatccagaaagctcctgttttaaagaagggtctgggcacaggtttgacttagcagaatcagctggatttccagagaagtgtgttccttgtgtctctgtatcctgcttagcgacaggtggagctcttgtccagtgcaacttaagtgactgctaaaaacttggctaacaaataccagccccagaagtcactctagtgtgttcagagaaagaaacctgtttttcctgcatatcttactaaggacaaatactagagactgattttctccatgctcaccagcaaatcagagatagtgttcattttgctgaagtgttttaaggctgttgctgaagtgtttcttcttagtcattttccttcagggcagtacaaagaagtccagtccatccacttctcccttccccacctacacaataacaagataacaagctgacagcaggtaccacttcttgcctcctttagtcatgttagagttctgtctttataagtatatgcacatctttatttctgagcttttctaatcctaggaacagttcattctgattagcaaagtaaagtagatgtgggaggcaggactgtttgaaaaccattgaatcatgattttga

SEQ ID NO: 78854 - DNA, 1793 bp, Homo sapiens
taggttcaagccattcttgtgcctcagcctcccaactatctgggattagaggtgaacgccaccatgccaggctaatttttgtattttttgtagagatggggttttgccatcttggccaggctagtcttgaactcctgaccttaggcgatctgccacctcagccttccaaagtgctgggattacaggtgtgagccaccatgctcagccgaaaacaagttccttttggagaggataaaggtgatatgagattctagtattgtttggataaactatttttgttgtgaactggttttggaactccaggcccagtttgctgtgaccctctgtagttttgcatctggaccatagatggcactgctccctagcaaactcagttcagcttcatctgcaagccagagtactctctggttattggtaaatgatgctctttctgtcacgttggtaccctccagaggcacctacagcccatggtcagctgttcatatgtctcaaggcagtatttctcaaggttcaacttgggacgctggggtgcttgtcaaaaacataggtctattggcccctccctcagttcttctggttcaaaatctacacttttggtccgcttcaaaggaggtccttatgtgtaccaaaacctgacagccatttccctaaagcttgatcaacacaaaaggagaaaagttaatagcaagatcaagttcccttggtgcctaacttccacgaaatgatagaactacctaactagatacagccggtgttttatgttctgatctctcctgtgctgtggcctttgcttctcatacgctgtttctccccatgtcttagtctagctttagggttcttctgagcaattctgcgtatgcagattgagtatctcttatccaaaaatcccaaacccaaaatgctccaatgagcatttccttagtgcatcatgtaggcactcaaagttttagattttcagattagggatattcaacctgaaatgggctttcagcatatttgtcagcgtgggcttgacagataatcacagcctccacattttaacaaaagctagccttgtcatcttcaagttccttaccagttgacttcacaggtatctgaatactgcctattagagtaggaataaacccagatagccaaagaaggataaaatctgtgtttctgaattggcaggagccctctactccatcgagtgagcagcagctgagtgttgtttggttataccttgtattgagataagaatttgtgtatagcctttggccaagccaggaaacaaatctgctactctctggcaattgcttccctaccctcccctgcctccgcactcccccttccccagtttatggcctgaaagaaagtttctcttccattaggtttgtcagtcagcaacctggtcagggaagaggagaaagctgttgataaatttgggagctttgccacaaaagcattaaagatgacttcaaatatgccaggccaatattctttagtttttaaatgaagtctgactagctgcagctccctttctggcatcaccatcatgcatatggttaagagaactttgccaagaacaatatctagcagtgaaggggaggtggcaaaatgatcagatatatatgcatataatagagttattgctgacctggtattctcatttatctgcaaactccagctctctttggatctttagtttgtttgcaggtttcattttataagaggttggctttttatctggaaaagctcactaagtcattcattagggacagcttagtgtgccagaacagatatttaaaaccact

SEQ ID NO: 78855 - DNA, 1519 bp, Homo sapiens
gttgtttattagaattaatagtatttacagggaagaaagctcttaaagttagatgtttaatatgtggctttttttttcattttgcttacattaaacataattatagttggcattcatttgcatttttattttgcagtctcttgttttcagcagccactgtaaagcagtgagtggctactcagaccaggttgtccatcagcggagatcagctacctcctcgctgcgtcgctgcctgctcactgagctgccatcttttttgtgtgtggccagtccacgagtaagtgctccaggagggaagagatgaaatagatggcaataggagaaataaaccaatttttaagggatttatttcttaaacagaattgttttaaactatttggactttaagaaacatataaattctagtattttaaaatgtgggcatttgtgattctggcctgccccagacaacacttatattcaccttcatttgttgatttaagaatagttgtatggtcgatagcttctttttatttagtcaggggctctaaactatagtgggaataaaccatctgtcaggtagaatatatatcacccaatagcagggtcggggcgagggaaccatttgtcacctgtgttgaggttttgagggttttcatgagagggcgtcagattggtaaggattgggggagatttgatccggtcatatcacctcagtacagtctccagataacaaaaggaaacataacactccagcatcaagaaccttctcagtgttgtgttttcttgctttccaaagcagcctcacttggactgtcattcacatgtctgttccatctgaaaagtgactgttgtatcttctttgctattcaccatttgtccactgttgtttgcagattgggcttagtttctattgtggtttcaactttagcagttgtctgcatccttcctaataccctgtttatcaaaatagagccctcttgccattgctgacaagcattgctggaaaggctttaattggcacactggggttatttactttgcctacatcttccatcctcttttttatccatgttgatcagagccagagaaaagatctaccaagaagggaaataatcgaactgtggccaggttctgtggttagagccaagaatgaatttctgtcttcccagttcatttctttttgctccaagaggcaactttccgttagccaggaagctctaagaggttgacatttcttacccttttatgtttttctcttgtttctccactcatcttagcaagtgtactgtttttacaggtttgttggttttttttgtttttgttttttttaatgcttttgagacagggtttcactctgttacccagcctggagtgcagtggcattatttcagctcactgcaacctcaacctcctgggctcaagtgatcctcccacctcagcctcccaagtagctgggactacaggtgcgcaccaccgctcctggctactttttaaattttttgtaaagacgaggttttgtcatgtcgcccaggctatt

SEQ ID NO: 78856 - DNA, 1078 bp, Homo sapiens
ggtgcgcacctgtaggcccacctactcaggaggctgaggtgggagaatcgcttgaacctgggaaggcagaggttacagtgagccgagatcgcaccactgcactccagcctgggtgacagagaaagactctgtcccaaaaataaaaataaatgaatgtgttctaatttgggaatgaccacccctgggaatagaattattgctagtcagactttttccagaaaggtaataacaaataatgtgctttgttaaaagaactccctatggtgagttgtattcttttcttagtaataactacagtgctgaagagaagataattggaggaaatgttcattcttttattttctacctttatattattggaacaaagtaagaaacaggtttctgttgaattttgaattttagaatactcaaaatgaagatgaattaatgcgatacctgatagagacattatttagtgactggtctgtagaagttagtaagaattcagaagtcttcaggtcagctactgctgctgcctcagccatctgcccaggaatggtctgattgacagtggatgtcccagctggcagccctgaactactacttagctggcggtgatgagcagaagttgctagacttgtcatctctcctccccagtgagggagcaagatgggctactgctgatgtcagaaatgcactttcaggaaacaaacaaaaaacgtggctacatctttttacctttttcctcctaattattcagtattggaagaacagtctgacacctagcctgctaatctttgtaacgatactcatgttagacattcaagtgataatgggcataaacatgtagagagataatgaacttcaacggagatgctacccaaaatcaagatgggaacacagatgttattgaaaagctgtcagaatgttaaaattcttctttgggtaatgacagggacctcaacatttagagaaaaggccaaacatatcatagctacatgggcctagcagtatatcaaatgttgtaaacacttctgtagtctgtagtcagaaaccacctaaagacagcccagctatcctggaaaatagctatagtctt

SEQ ID NO: 78857 - DNA, 1051 bp, Homo sapiens
gtgaggtttcaccattttggccaggctgttcccgaactcctggcctcaattgatctgcctgtctcattctcccaaagtgctgggattaaaggtgtgagccactgtgcccggccaaggtgaatttttttttttttttttttttgagacagagtctcgctctgtcgcccaggctggagtacaatggggcaatctcggctcactgcaatctccatctcccaggttcaagcgattctcatgcgtcagcctcccaagtagctggtattacaggtgcctgacaccacgcccttttgtagttttagtagagactgtattttgccatctaggtcagcctggtctcaaactcctgacctcagatgttccacctgcctcggcctcccaaagtgttgaaattacaggcgtgagccactgcgcctggcaaatttttttaaatactgataggagctttgcggaggattttagttttcatagtagcaaaccatgtaatgcgaaataatgtatctgaaagtaggaaagtaggaaagaactgtttctaaaatgataaagatttacaaaagagttatgttaatgagagacaatccttgctgctatgaacgaccctcaaacctccatggagcactgaataagcgtgtctgctgtggtttgtttcagatggttagctcttttcctgtctctgaaagcctcctacaggctccatcagctacgctcctggggagcgccagaaggggagagccaccagagatacctgaggaacaaggatttccttcttggggttaattttccactctcctttccaaacctttgcagctgccctttgttaaaggtaagcaattatttgagcataaattacctacttagtatcttctttccttttccttgaataagtaaaaataatagtaaagtaaatgaaggcctgagagaaccaaaaagttcccagaggagtgggcggtgcagcatattgagttctaacttaatttacactttgtatatatatttttgagtgtatttatattttcaaaatgttttttttacaatactgtgaagtacacagatc

SEQ ID NO: 78858 - DNA, 1763 bp, Homo sapiens
ggatttaggaaatactagaacatgaggtgtgagagagcattcagaggtgagttaagtttgtctttcccaactgaaggaatggtaatgctgttaaccaatttagtaaattgtggaaaagagaactgtttttctgacacatcacatatgccattgctgcagactgagtggtactcttagagttagtagttgcaggtactggcctgggttatgtttgggaatgtacttttgtatgttactgtgatgggtgttagttggcacagttagaaatggaagaaattgcccagggaaagcaaatggaatgagtgatgaagagaagagggccaaggaatatacatttttttctgaatgattgtccacattcacaggtttatagagatactgagttcacatatgtttattctcaatcataatatggtttgtgtgtgttttcaactttaagctgatgctgaattttcttaaaaactacttttccaaatataaatgttcttattgatttttagattgagattctaatgtattgccaactgaccagccgacagaagctgctatatcaggcactaaagaacaaaatttccattgaggatttattgcagtcttctatgggctctacccaacaagcacagaacaccaccagcagcctcatgaatctggtcatgcagtttaggaaggtaagagcttacgtcagttcccttgaagttttgttttttgttttttgagatagaattgtcttgctctgttgcccaggctggagtgcaatggcgtgatttcggctcactgcaacctctggctcccaggttcaggcaattctcctgcctcagcctcccaaggagctgagactacaggagcctgccaccacgcctggctaatttttgtatttttagtagagatgaggcttccccatgttggtcaggctgctctcaaactcttggcctcaagggatccacccgcctcggcctcccaaagtgctgggtgagccactgcgcctggccttgaagttgtctttattaacctttttcaagaaaaacagtctatccttgatgccagataagcaaaggctattaatgagatgaaaatgggaaagtatccattcccaaaggtaaacatttgggatttgggatcccctgtcattacgtatgatgtctgcatgtggtaatattgtcttaccatttcccttccttttaggtgtgtaatcacccggagttatttgaacggcaagaaacttggtctccatttcatatttccctaaagccataccacatttcaaagtttatctaccgtcatggacagatcagggtcttcaatcattcacgagacaggtagggaagtattactatctgttcactattagtgttttataatttacagttttatggcttagtagataaatttagtggagagaatatgagttcccagcaatgagacatttaagcaaagggtggacaactatttgttgagggatcttatggaaggaatttgagcactgttaaaacttcagctaggtggccttaaaggccctagtcacttctggttcttctttgaatcaggaatgtgcaccaatttgtaaatatgtacttgcagcaagtatgcatatctatgccccattgctgaaattggtttgtggtggcttactttacatttggaattgcacttgtgggtgaactgattgtattgtaagttaatcaaatttacctttttctcagagtcagcaacgataaatttagtaaagtttgaagtggttgttaaggtaatgcactagagacgac

SEQ ID NO: 78859 - DNA, 1002 bp, Homo sapiens
gtgtttattacacagacatgagcttgctcactattagaaaaatccttatgtgattttacactatgagttgttaatttgctgacatcctttggaaggtaatttttggggaacactgagagtctcagataatttttcttatacttacaaccctattagtgataaaatgtccctaaaacctaaaaatgaattctaatgaaaatagagcctagtatatttatcctgttgactatagcaagatggtataaaaaattaaaattccttgctttcctacttgggaaaaagtttcagtctgcttttagagaatcattgagccaaaggagttttgaagagtttggtgagaggtgaatgtggtatttgtttctgttgtttttgtgaaatcactataatgtattatttgggggcctcccggcatttcagatcaactttctcgcttacacatgattttgaagccatttatgctgaggagaatcaagaaagatgtggaaaatgaattatctgacaaggtaagtaaagaagacctcatgtgtttaagcctcaataggcaccaacttaagattccagggggagaaatttattgatatatgtttagttgaagtttgcttgaaggaagacgtttaaacttgcatggatcaaagaggacttaaaatgaggcaaataattgaggaaaataacatctttttttctttttttgaaatgctttttactggagaatttgaaacattacaaaaatagaaagatagtataatgaatccccttgacccattgttccgtgacaataatcattaactctacctctctcttattcaaaagcaaatcccagatgttttataaatgaatatttgtttatgaagtattttcatgtatatttctaaaagatttggtttttttaaacactgcctaaccacatgccattatcacacctatttaaaaagaccagttccatgatagcatcacgtatctagtcagtgttcagatatctccagttgtctttgtgtgtctgtc

SEQ ID NO: 78860 - DNA, 1003 bp, Homo sapiens
tggttattaccagctatcagctggtggtgcaggatgtaaagtatttccagcgggtcaagtggcaatacatggtactggatgaggctcaggcgctcaagagtagttccaggtaacatgagtagtagaaaccaaactcaatgcattgggttaagtacacacacacacacacacacacacgcacacacacacacacacagacttgtatatatgaataaaatcaagatatgagaagttttatttaatttttttaatagagacaaggtctcgctttgctgcccaggctagtcttgaactcctggcttcaagcgatcctctcgcatcggcctccccaggtgttgggattagagggatgagccacccgtccaatatatgagaggttttaaatatgacgtgacatgatctctgcatcagtcgtgtacctgatcagaaggcaaaaattccctttttttattttttcatggaacacaaatgttaatgccaagaataccaagacttttctcaacttttatctccctgttcaagaaggtgacatttttacaggtcatctcttcagggaaaatttctatagaggaaggagtctctgcccttgctttaaggtattattttagataggagttctaagtaggaggtagaatgttaggttatgtggattggatgctctgtttgttttatgttgattatctgagaccctggatggttttcagatctccaagaatccttttattctaagttatgtgtttaaaatattccaatacctttgaggtcccaaagtaaataaaaagtgttatttggtgatattaaacctcaggcttgatattttttttattaactcatggtgagtcgttagaaatttattagaggtccatgttaactggctagatgatattttctgtagaactttgttttttctattcttttctttctttctttttttttttttttttttttttgagatgtagtttcactcttgttgcccaggctggtgtgcagtggcgcagtctcg

SEQ ID NO: 78861 - DNA, 1375 bp, Homo sapiens
aaaaaaaaaaaagtacaatgtagtagcattaggtgcattcacaatcttgtgtaaccatcactgctgtctagtttcataactttttcatcagcccaaacagaaggcctttacccactaagcaatcacgttctattcaccttgtgctgtagcctctggcaaccacaaatttgactgctgtggctggatttgcttattctgaacactttgtgaatgctgtttctgtctggcttcttttactgagtataaagttttcaagcttcatccatattatagcatgtgtcagtgctttattcctttatatggctgagtaatattccattgtgtatatatatatcacattttgttcatccattcatctgttgatgaatatttgggttgtttccaccttttggctgttgtgagtagtactgctatgaacattcctgtgcaagtttttgtttgaacacttttactgttttcacttcttttgggtatgtacctatgagtagaattgctaggtcatatggtaattctacttattaaggaatcttccacctgttttttttgttttttgttttttgttttatgacacagagtcttgctctgtcgcccaggctggagtgcagtggcgtgatcttggctcgctgcaacctccgcctcccaggttcaagcaattttgcctcagcctcccgagtagctgggactacaggggtgtaccaccacacccagctaatttttgtatttttggtagagacggagtttcaccatgttagccaggctggtcttgaactcctgacctcaggtgatctgccctcctctgcctcccaaggtgctaggattacaggcgtgaatcaccgagcctggcctgctacctgtttttgaatggctgtaaactaagaatagtttttactttttaaaattattgataaaaaaataaactttcatagaatgtgacatacaaagttgaaagtcatacgtattggaacacagccccacactgcactctttttctaccttttttttgagacagtgtctcgctctgtttcccaggctggagtgcagtgacatgatcttggctcactgcaacctctgcctcctccgggttcaagcagttcttctgcctcaagctcccgtgtaactgggactacaggagcctgccaccatgcccagtgaatttctttattcttagtagaggctgagtttccccacgttggccaggctggtctcaaattcctgagctcaagcgatccttctaccttggcttctcaaactgcttggattacagacgttagccaccatgcccagccagcttttttctttatctgatgtcttgagatggagcttagagtattgattttcagcttctaatagatgtacatttaaggatactcattgc

SEQ ID NO: 78862 - DNA, 1173 bp, Homo sapiens
gcccccagaatagctgggactgcagacacatgccaccacgcctgactaatttttgtattttttgtagaaacgggctgtctccatgttgcccagactggtctcaaactcctgggctcatgcgatatgcctgcctcggcctcccaaagtgccgggacgggcatgagccactgcacccagctgatgtctttttgtttttttgtaacctggagatcctactggagaatatttgtgtatttcttatggtttgtcttatatggacttggtaaatctaattgcttttgtgtctgggttgtattagctaacagattggccttgccctgtctcatgtatcatggttcatagttgtagctgtagcattggcaaaagcaattactatagcagtgggtaaaagtgctgaggctgagtatctctggtcacttctctttaaacaagcctgttatcttggtcgttctttttggtaacaggttgaactttatttgatgaaatgcatgaggtgttgaccatgtattttttttccccagggtattaatggcattcttgctgatgaaatgggccttggtaaaacagtacagagcattgcccttctggcccatctggctgaggtgggtagatgcaatctttctatcttcatttctctagaatttagggtaatttctgttgaaaatcagccacttaaaagcactatgttaagctgtgtagcattccaagatagtgggactgggttcttgcctcagagctttataaggggacagtgttttataactttttggtttttaagagggctaggacaatttttgagcatgtgattttgagacactcctttccgctctgcattaattaccaccagtgtagtggcaagggccatatagttagatcagaacaccttgcctaacatttcagctctactcttattaccagtgtaaacttgggcaatttagcctctttttcaacttaactctctgaggcttagtttcctcttcctcttcctcttctatggagacgttatctactttataggaattttataagaattaaattttaaaaatgcgtaaaactgaaaaaaaagcaaaagctctatacctattaaataactacaagattgtcggataactagtatagtagaaaacaatacatacaagtcagtgtgtcatgaatgctttgtggataagacct

SEQ ID NO: 78863 - DNA, 2223 bp, Homo sapiens
tttctcctaatgattcctgtatctggatgccctgctctctcagccttgcagattggccctggtaagcaacatgtttttaatcaggatagtgctaaggtttaggtattgtaacatttttctagtccacttcaagccttacatgtaacttaacatcttcccaaaagtatacagaagactatttaaggcatccacaatgctgacttattcttcttgaatgcttctttaatcgttttatgtatggcgttgagacaatacatctggatgacttatagaagtaatatatcttgcttggcttgacattttctaaccctctaggaattgagtaaaagactgttcattctacatagtcttagttcaaaaatgaatcctaaatgaaatattgttttttaaatattttaggcaaataagcagaaagcttcagctcgtaacctgtttctcaccaatagccgaaaggtaaaattgtagttttgtattttccatttcatgttttgctggaatatattcttcttctttggggtccatcttgctgctcttgtccgtcgtaacctgttgatcatgaatctaatagttcgtaagagagtttctgaatgttctcaagctgtttattttttatttttattttttgagacagagtctcagccacccaggctggagtgcagtggcagtgatcttggctcactgcaaccaccgtctcccaggttcaagcgattctcccatctcagcctcccgagtagctgggattataggcacctgccatcatgccctataatttttgtattttagtagagacagtttcaccatgttggccaggctggtcttgaactcctgacctcaggtgatctgcctgcctcagcctcccaaagtgctaggattacaggcatgagccaccgcgcccggcctcaatctgtttattaaataaaattgttcttcctcacatttctggtatttgaacctttttggataagaccatagcccaccctgatttcttgagcagatcatggaatcttcctgtcttcagtctcgtctaagaaataatgatgtgaataccttcccttagaggagactaaaacaacttcctttaagaattgtgaggatcagattaggccatgttattagttgtgtttctctggggtagtcattcaactgtgtttcctcatttataaatgagggtgatggtaatgccaatttcatagggtttttgtgaagagtaaattggtttaatatatttttcagtggtgctaaagatgtaataagcagtgatagctgttattaatgtgtgcaataacattttgtaacttccaagcacatcccaggtccttcttcatcattataatttttcatcttctaaggtgatagaaattggatagatttcttatccctgataataccacagggtctgggcctatgtcacagtactgtacaaggacattaatcaagttgcaggagaaagatgtggtcaaggatgacagtttggctgaacagattgaggaatgatgtggtttagagtccaggaagaaccagcttctggtatggggtcctttccgctgtaatgctgttgttgttttcagcttgctcaccagtgcatgaaggaggtgcgtcgagctgccttgcaggcccagaagaactgtaaggaaaccttgcctcgtgcccgccgcctcaccaaggagatgcttctgtactggaagaaatatgagaaagtagagaaggagcaccgcaagagagcagagaaggaagctttggagcagcggaagttggatgaggaaatgcgggaggtagggcaaaagcataacattttgaaaaccctaattactacagccatttgaagagattcgtttgcattttgaaaattgtacatctaaccaatgacactgtcaattttttgttttttttttttttttggtagagatgcggtttctccacattgcccaggctggtctcaaactcctgagcttcgagtgatccgcctgccttgatctcctaccgtcagaaatttttttaaagacttaattttgaggatggtgattttagactagtaaaccaattctgcttttagtcttttggtaaggccctcctcaggcctttttctcttttcttctaagctgtcttcctctattctgggctcttattcctcaagaaaaaggaatgagcaaaagagaaagaaagtagcttttaattcatcttggtttgtttgtaggtgctgactgcagttttgctttttttgga

SEQ ID NO: 78864 - DNA, 1022 bp, Homo sapiens
ctactaaaaatacaaaaatcagctgggtgtggtggcgtgtgcttgtaatcccagctacttgggaggctgagacacgagaatcgcttgaaccaaggggcggaggttgcagtgagcccagatcatgccgctgcactccagcctggcgacagagcaagactctgtctcaaaaaaaaaaaaaaaaaaaaaagaaaagcaagcatgaggaaccttagtaaatctgaggaactgttggtaatagaagtatggcttatttcttggtggtgaatttccaaggggagacatttctgcaaggaattaatttcatgtcttagtatatgtcaggtttaagtaagtatgtagaaattcagaagcatgaagagttttgctttcttaaattattttcagtgacttgttacgtgtataggagttgaactcattttgtttgaagttaagtaagtgattcccttagatatactagatgttactgatctctttgtgggaagaatactgtatttaggagctatgatttcctctggcttagttttctgtagtaaaggtaatttgaaagctgtactatagaaaacaggcccatcatggtctttgcctgcttcagttgcagcaatatcagtactacagtgcaggcctgctctccacatatgaccctttctatgagcaacaacggcacctacttggacccaagaaaaagaaatttaaggaggaaaagaaacttaaaggtgagcatgttgaactgccttccacgtatattcattcttagtttcagaattgcatgtggcctactggtgcatttggactttatatataagtccatatggtagaaatttgctttatctgaaaaactctcctttctaattagtagcaagtacagttttccctttggtatccatgggtgattggattctggacccctggcaggtaccaaaatccagagatgctcaaattcattatgtaaaatggtatagtatttgcatatgagctgtgcacatcctctcgtatactttaagtcatctctggattacttataa

SEQ ID NO: 78865 - DNA, 1092 bp, Homo sapiens
tactaaaaatacaaaaagttggctgggcgcagtgactcacgcctgtaatcccagcactttgggaggcccaggcgggtgaatcacctgaggtcaggagttcgagaccagcctgaccaacataaggaaactgtgtctctactaaaaatacaaaattagctgggcgtggtggtgcatgcctgtaatcccaggtactcaggaggctgaggcaggagaatcgcttgaacccgggaggtggaggttgcagtgagccgagattgagccactgcactcttgcctgggtgacagagcaagacttcatctcaaaaaaaaaaaaaaaaagaatttctaaaattctctggaatcaatgaaattaaactactaatacttcggatgtactagactaaaagatatgttcttaaaaaaaaaaagatacatcattttaactttaggtagcagtggagcagctttattgagatgtaattcacataacaaaacttcagccttatatagtgtgcaattcagtgtttttttaatatattcatagttgtgttactatcattactgcctaattccagaacatttgcatcacctcataaagaaaccgcatgcctcttagctgttgcccctcattctttctgtccctcagtccagacaaccaccaatccactctgttccttttttcttttttttggacagagtctcgctctgttgcccaggctggagtgcagtggcgcgatcttggctcactgcagcctctgcttcccagggtcaagcgattctcctgctcagcctgctgagtagctgagattacaggcgtgtgccaccacgcccggctttttttttgcgtttttagtaaagacgggttttcaccatgttggccaggttggtctcgaactcctgacctcaggtgatcctcccgccttagcctaccaaagtgctgggattacaggcgtgagccaccatccccagcccaatctgctctgtttctataaatgtgcccattctagacatttcatacaaatgcaatcatgcaacatgtgcctgtgtccagcttctctcacttaatgtcatattttcaagattgattaatgttgtagcatgtatcagcatttc

SEQ ID NO: 78866 - DNA, 1034 bp, Homo sapiens
tgaatcctatcataatgtgaccttttatgattgacttctttaattgagcataatattttcaagattcttcatattgtagcccctactcatgtgttattccttttcatggctgaattacatctcattatctggatattccacattttatttatccatttatcaataaatggatatttgggatatttctccttttgggccattacagcttgctttctatatttttttataccctataggtagttgttttttttgccttcctgtttggcatgtatgtatagtttgtatgtatatgatatttatgtattatttatacttttgtaagtattcagaggaatttttagccttgttgctgataacatgtcccatgttttattgcattttagtttgtattccctaagtttaattagtattcttaatgtttttcagttgaatttataaagcatgtcataaggggaactggagtgactatctttctgctgtttttgtcattgttttggatctaggaaaaaatgcttggattataaatgggattgcttcacagcaaaagatacatttctattttcacccttttcagagcattctgctaagtgatgaatccagcgaggctgattctcagagtgaagacgatgatgaagaagaactcaatctcagcagagaagaacttcacaacatgcttcgactacacaaatataagaaacttcaccaaaataagtatagtaaagacaaggaggtaagagtttcaggagaaacacttcaaactgaatattcaccctctgctttatagtcattaaagatacatcattttggctgggcgtggtggctcacacctataatcccagcactttgggaggacgaggcgggcggatcatgaggtcaagaaattgaaaccatcccggccaacatggtgaaaccccctgtctactaaaaatacaaaatttagctgggtgtggtggcgtgcgcctgtagtcccagctactcaggaggctgaggcaggagaattgctcgaacccagaggcggaggttgcagtgagccg

SEQ ID NO: 78867 - DNA, 1971 bp, Homo sapiens
gagatatcttggagatgggacccaagttaataaacaccaaattcatttatcttttatatacaccttatacacatagtctgaaggtaattatatttttcccttggggatgttgaataaactctgttttgtatacctgtgttttgactgtgacctgtcgcgtgaggtcaggtgtggaattttccacttgtggcatcttattggtgctcaaaacctttgagattttggagtattttgggtttttagaatagggatgctcaacctgttataacgtactgaggggaaacaggaagtacaaaaatttatcagatgaagtccttgcactcattgggtcacataatcaggaatattaattccataagttccataatttatattaattccataacttccataagttcctgagtagtttattcatttaacagatgttgatttagtgcatccatgtgcatgtgccaggtacgattatggttgggcaagtttcctgcccagtggtgcttacattctaaaggaggcaggcagttagtaagcctgtaaacaagtaaataaacatggcttctttaaagacgtaacatttcaactgattctgaatgatcacagagaaccatcttatatccagggtaacggcatttcggtcagaaggaacaactgcaaaagtcctgagaaaagaaacaacttagtatgtttggtggaaaaagaagtctaatatggctagagcacagtgaatgaggaggatggtggaagatgaagttacaagactgtgatcacacaggctttgtctatgttaaggagttcgtgttttactgtcgtaggcataagccgttggagtgtttacaagcagagaggttgttaatctcatttacactcttacaagattactgtcagtggccaaactgaattaaggatagtatttcttttattgaaactaattatttctcttttatacttttgctatgaagtactcaaaagcaattaaaacccttcattattatcactaggtccttcaaaaggctcatgtgtaaaaggtccgatttggttaatatcagttgcactttaggctgttggaaatgcagaaattgttatgcttagccgtcatattttgaaaaattgagttataattcattgtcataaaattcaccttttcattttattttatttttatttatttatttttgagacagggtctcactttttcaccctggctggagtgcggtggcacaatctcagcttagtgcagcttcgacctcctgggttctagtgatcctccagcctcacccctgtgaagtaggactacaggcccgcaccaccacgttcaactaatttttgggggtttcaccatgttgcccaggctggtgtcgaactcctgagctcaagcaatctgcctgcctcagcctctcaaagtgctgggattacaggtgtgagccaccgtgcctggccaaattcacccttttacaggttaaaatttagtagtttttcgtgtatttacaaagttgtatacccatgattacaatgtaatctcagaaaatttttaacattctgaaatgaaccccgtacccgttagcagtcactctccattttcttttttcttttttttgagacggagtcttgctctgtcgcccaggctgtagtgcagtggcgtgatctcagctcactgcaacctctccctcctgggttcaagcgattctcctgtctcagcctcctgagtagctgaaactacaggcgcttgccaccacgcctggctaatttttgtatttttagtagagacagggtttcaccatgttagccaggctgttctcaaactcctgaccttgtgatccccccgcctcagcctcccgaagtgctgggattacagacatgagccactgagcccggccggtagtcactctccattttctatttcctctgtcctttggcagcgactaatctgctttttgtctgtattgatgtgcctcttctggaatttttgtttttgtt

SEQ ID NO: 78868 - DNA, 1755 bp, Homo sapiens
ccctaatgttgtctttaacaatgtaaggtagcaaagagaatgcttaggctatacctgtgtttctcaccctcacttttactcttttagctccaattttctaaatttaaattttactcattatggcatttttacaaaggatagtaaaatactctgccaatacatctattcccttgtaaataagataccttacatatatgtatgaatatgaattcaaaatgaagagggcagcacctattttgaaggtgatgctgagaacgagtgctcctctagtactttcctttctgaggtgcacaacagtgagcttggggtgtagatttggatagttgtttattcatagttttgggtaattttttattgaaagggataaaggaagtgggtatacattttaagatactgttttgaaaaagtatagtatgaattttcattgtgaaatgtaactgtgttgctgtatttttatattctttatatccttttaacttctgcctttgctttaggaggcagtgtctaacaagagctttatcatgatctttctgcagactcctgtcttttcagtgtcttgtgttctagaaggtctgatttctcttcacattgggaacaagcaggcaagagaaagggagaatggatagtaatttcatctttcacttcttatctctgttctgcagccgtgcagtcggaggtccttgtgcatgaagacagatttgttctatggcctcggagttgggtgccagggatgatggaggctgcactgagctggcaaagcccctctatcttcagtacttggagagggccctccggttggaccattttctgcgacaaacgtcagctatcttcaataggaatatttctaggtatgttattgtatctttgcaatatgttttaccaaattcctgatttccatcatccttacagattttacaggattaaagtatcttatgatttttatgtttgatattttcttttgcctctttcaaataaaaaagtcaatttatttcagaggaacagtttcttctgtaaagtgtccagttctaactttaaattatattttattgggtcagctgtaattgtggactcattcttcaatttatagtgatgacagtgaagatggactggatgacagtaatccattattgccccagtctggggatcccttaatacaagttaaggaagaacctccaaattcattgcttggtgaaacttctggagcaggcagttctggaatgttaaacacatattctctgaatggagttctacagtcaggtcagtgtggtgtgacatccccctttggactatcgttatcttggggcagtcatcctttaatttttttattctttgtgtttctttatacagaatcaaaatgtgataaggggaatttatataatttctctaagctgaagaaaagcagaaagtggctaaaggtaagagataaagcagggtgtttacagtgcagatagtctactaaagttactaatagatgggaaagttatcaactcattttggcagattgacagagtttttcaaatatgattctcttatactggatgtggtttttttgaagagattattgagaaaatctggaggattcaatgaagtcatttagcaaacatgaattgagtacaggttgagtattgctaatctgaaatgcttgagaccagacgtgtttcagattttgtttttgagacaacattttgctcttgttgcccaagctggagtgcaatggcatgatctcagctcactgcaacctccgcctcctaggtt

SEQ ID NO: 78869 - DNA, 1034 bp, Homo sapiens
gagtgctgggattataggcatgagccaccgcacatggcctcatttgcttttaatgccaaataatattctgttctagttgcattttatgtttgaaatttccaagctcctcctcctataaaacaatttgagatcattatgtgtggtaaaagttgcataccttctagactttaaaatgaatgtttttttttttttgttttttgagacggagtctggctctgtcgcccaggctggagtatagtggcgtgatctcggctcactgcagcttccgcctcccgggttcaagcaattctcctgcctcagcctcctgagtagctggtattacaggcgcccgccaccacacccagctaatttttgtatttttagtagagacggggtttcaccatgttggtcaggctggtctcgagcccctgacctcgtgatccacctaccttggcctcccaaagtgctgagattacaggcgtgagccaccgtgcccggctgaattttgtttttaagggattgaattccatcattttagcttactgtgttcttttcctctacgttttatttcagtagaaaccaaatcaatttttgaaagtctgtaaattgtgataggaaataattgtagtgagcacaaatgtgattagaaaagtttatgactaataaaaacattttgagtacatcaaggtggaaatgtgattaagccaaagcaacaaatcgagagctattctgctgggcatggtgtctcaagcctgtagtcccagttactcaggaggcaagaggatcacttgagtccctagtgagctatgattgtgccagcgcactcaagcctgggtggagagcgagaccctgtctctaaaaacaaaacaaaactaattataagctgtggtgttagaggttcacttaatgaaagtttgttggccgggtgcggtggctcacgcctgtaatccctgcactttgggagactgaggcaggtggatcacctgaggtcaggagttcgaaaccagcctggccaacatggttaaactctgactctaccaaaaatacaaaaaatt

SEQ ID NO: 78870 - DNA, 1223 bp, Homo sapiens
cctctcctcccccccgccatggctccccgtgtccctgctccgctcctctcagtgagtgaaagtggccgccgccgccgccggcccagcgcccgcagccgcctcagcgccgccgccatcttggggtcccaggagccgcggagggagcgagctaggagcgtccacgcccaacgcagtcaccgtcccacggcctcagagagcgaaccgcggctccaccgtcggcggggcgacccccccctccggaccccgcccgcaccccgccccccctccgccgccgtcgcggcggcggggccaggcggcccgaggtgaggcaactagacgtgggcgggcgaacggagtgggggttgtgtaggtcttgttgcgcccctctctgcgggcgacaactgggccgcgtcttaaaggggccgtcgcccccggcccttggatttgttggggttagtatggaggatgggtgtggacactccccgcagggttgggacctcagggactagggccttgtccttcccgtttcatatctctggagacccggggtcatgcggtgacctcagccacctgaggaagcccgtggggcgcccacacgtggggagtgtgttagaccaggtgcacgtgggacccggtggggcggtgtcgggctaacacgtgtgtaggtttgggggtgggcaggggcagggcggaggctggaaggccttgagtgggaaccccgtgaaggttgtgtatctgtcattttaaacaaatgagatctaagggcttgttagtgtgtcattttgtaaggggcaagttgagatacggttgaatggtgcacgctgctggctggtgttgggtgggggcaggctgacacctgcatagacttgggagtgtctagatgacacctcttctggttttttaggtttttacatagcgactaggaaagtgtcatcctattttgacattccttcttgagctcgctaatggaaagtactacttccgtaatctccgaggctagaagccccctacagtttaggaatgacagaacctaggcagccacttactattctagttaacagccaactgtgcctggaattctttgattcacacactgtctctagtttgatgtacttgttagaaatgggggaaggaatttggaggttgacctggctaacgtcacaggttacttttccagtcagtgactttcattatttcctccacaacaaaattattgtggcttttcagtggcaacttaaattaaa

SEQ ID NO: 78871 - DNA, 1027 bp, Homo sapiens
acggcggctcacacctgtaatcccagcactttgggcggcagaggcgggcggatcacgaggtcaggagatcgagaccacggtgaaaccccgtctctactaaaaatacaaaaaattagctgggcacagtggcgggcgcctgtagtcccagctactcgggaggctgaggcaggagaatgacgtgaacccggaaggcggagcttgcagtgagccaagatcccgccactgcactccagcctgggcgacagagcgagactccgtcaaaaaaaaaaaaatacttcatggaatagaattacatgtaatcagaatgactacataagacccttttctggtaatgaaagcatggagtcttaaccaaaaagctaagcagaattgttagatcttttggtttctgtcataatgcactattggaacttcaagtagatatagtacattaatatgaaatactttgaaatacaccatcttctaaaaaaaggcacttacacaaaaatcatgtaacactaggtaggatgttgaaatgactggtatgcaatatttttttaaagacttcatttttggtcagcataagttttctttaaatatttttctgtttccagttggacttcactttgaggcttaacatatcaaagtgagtataaagttctacaatttagtcattgtggattttatgtcatttatgatgaaaatggaaatgtgtagttaagaaaattttcttcttctgtaacatctaactcttcatcctcatcatcttctgcttgttgatcctttcttagtcgacaagtggatacctgtcttgttccagatacacacttagctgacagtgatctctgaagaggtgactttgaattcgctcttacagtatctaaacaagatgaataatctggtgcatacagagaatttcggaaaacctctaaatcttcatcttcatcaatgttttgtatattccggtaggcagcagtgtagacctctaaagctttgccgtgaaataacatttcgattgtgataaattcagaaaatatagtctttatat

SEQ ID NO: 78872 - DNA, 1024 bp, Homo sapiens
ggcccaaggattggttaagtttaagacagatttggtgaaacagtgttaaattctcttactcaattctcgcagccttttaattgtgcttgttatttttctcagaaggggatttagcatttaactcttcaaggatttttatgttttcttgggccatactttaggaatagttggcttaatgcagcacttcgaagaggacgacattttgggtgggatttcagaaagccccaccaaactgatttaaatcaataaggaactagttaggctcacgcaacaagaatgtttggcatagattgtccaggctggtacagtacctaactgatgtccaggaaccaggcttattctgtgttcctgccctggcatccatagctcatattactcacctcatggctccagggtggctgcagtgccaccagacagaatgaggtaagaagaatgaggaagggcaaaatgcaaaggactctcccttagtctttgtcttcttatccagtcacctagataagttctgcttacatcattgcctagatgagaagataaaggtttcagccttttagctgttacttagtcacatgatggtaaagatggggatacattctgagatatgcaatgttaggcaattttgtagttgtaggaacatcatagaatgtacctacatgaacctagatggtatagcctactacacacctaggctatgtggtgtggcctattgttcctagactacaaacccgtgcagcaagttactgttctgactactatatgcagttgtaacataatggtaagtatttgtgtatctaaacatatctgtggctgggcatggtggctcacgcctataatctcggcactttgggaggtggcagagggagaattgcttgagcccaggagttgaaggcctgcctgggcaacacagtgagacctcattcctacaaaaaaattttgaaaaattagccaagtggctgggcgcagtggctcacacttgtaatctcagcactttgggaggcggaggcgggcagatcatgaggtcaggagt

SEQ ID NO: 78873 - DNA, 1648 bp, Homo sapiens
gcggtggcttacgcctgtaatcccagcactttaggaggccaaggtgggcggatcacgaggtcaggagttcaagaccagcctggctaacatggtgaaacctcatctgtactaaaaatacaaaaattagccaggcgtggtggcgcgtgcctgtaatcccagctacttgggaggctgaggcaggagaatcgcttgaacccaggaggccaaggttgcagtgagccgagaccacaccactgcactccagcctggcaacagagtgagactctgcctccaaaaaaaaaaaaaaaagttacgttttactgcacaggaggaaggggggaaaacattactcagataagagcttgggagtgttgtaatcttcataacctttgtaactgttactggttttctcccccaggttttggagaaggtggatgtagaacagaaaatgagcatccgatttcttcactaaaggagaccaaactgttccttgcggtctagtatttaagaactggaacttgaaagtcctccttctaccaactccacctccaccccctcattccccttctcccaaagtactactgctgttgcatgacaaccccaaatatgttctgtcaacacaaacctgcctttggtgtataaacagggcattacagaatggtacaccctatatatttctgttcagtatccattcactagttcttcatttataaatatcatcttccccattctgctgctgaatgccacacatccatccagtctgagaaagtgagagaggcaatcatgccaagaacaagccagcaaagctctttcaccagatgtagactgtagccctgctgccttccctccagcgagtctgccagcatgcttcttcatcctttttatatgttctttgcttcctacttccctgtcttccaacatactgttcacttactctggcagtctttctgcttttcattaagcctcaaaatctcctctgttctacttggcaccacaagctatgtcctatatatgtatttctgacttggcaggatagttcaggggtctggcagtttttatttaccttcattattaaatgggcctctgggatgttgcctcttcaggagctttttggtaatcaatacttctctcagaagtatgagaccatcctctgcactctgctctgtcatcaaaggctgctgggtggagataccctttttgaaaggtggccttggtgagaggtatggagccaagtcttctaggttgcttgcccacatcactctatctctggcctctgattctcaactttgtacctgtgtggctcctcttgttagtgcaatgttgactgttgaaaaagcagcagtatgcttacaggtttgcttagtttggggacaccgttaccaccagaatggctgctctgacaatatgcctagggactttctcatggcttttatttaataaggaggctgggcaccctataaagcctcatgcattcacacctttgcagcatggtttatgcctcagtgttatgtgcactggaatgttttccacttcacatttccaagtagaaatattagtgttacggaagtgcctaatatcccagtccaaatttttttttttttttttttttttttttgagacagagtcttgctctgtcacccaggctggagtgcagtggtgcgatcgctca

SEQ ID NO: 78874 - DNA, 1108 bp, Homo sapiens
ccgtgctcagccgcaaaattctttatgaattttacacttggcaaatgttaatgacggaagccatagtctgctcctaatacatgtccaaagcattgactgttgtgtcattagctgcctggttacattagctccctggcttcttgtttagaccactgctaatcccttaaaaacaagaggtctggcactagtagcacaacctaaggtggcattacagatctttgagcgagccacagcaacttttctgccaagtcagcttagtttagacttcagtgaatcaggctattgctatcctaatgtatgtctctatgagtgtatttagccacacatctgcccttggttgactttctgactcattgcttgcttgcttgtttccttgctttggaaaactattgaagattgctaaaaaataccactgcaaagtgatggaaaagggtggagaacaggggagtagccaggctggatggctcaaatataaatgaatgaggaattctttatgaagtatcagtcagattttatgattaagtgatgtaatataggaattatgtaaaagggaagaatgtctgatactgatctattagagaggtactttagaggcttcttgattggcataaagttcctaaggttatagattttccccccttttggctgtatagcaaagtgttttaatccacggttgtgccttattgttccattaaaattgtatcttcgatccatcaataaatacttgtggttgaaacaaaataacttttgtccattttacaagaattttatgtaacttagtcccttcaagtttgaaatcacagtgtctcccttactcaagtttatgtctgtacggtcagctgcagtctactctgctgctgcctggatatatgaagtggaaacattcatcgaggggccagcacttttggcttcgacatggttttgtcagccgtggccacttcccattcattccagctaagacgcaatttctattcttgactccctgactccttaaatgtagaaaaagcctaaaaatccagtatatgtccattccttaaattgcccacctcctcattcatgtgcagcctcagcggtgacatactctggttttacatggctttttctttgc

SEQ ID NO: 78875 - DNA, 1020 bp, Homo sapiens
agtcaagatcgcgccactgcactccagcttgggcgacagtgagagactctgtctcaaaaaacaaaacaaaacaaaaaccctcgggcctgagaatgaaattattagtactacagtttaacctaacagtggcttaaaatagtcacgcggcctagccacactatcttaccacgtggtacagcttctacggcggaaattttacattcttaataattgaattacaaaagcatttctccctgttacctcaattctgggacccaatccggatcgaaagagtggggcgagtgctattgattgacgtgcattccaaccaacctacgacgcaaggagagcgcgcgcgagcaagacgatgcccaataaacactcagccccagcggcgggggcggggcttgtgggaacggcccaccgcagggttggccaccttgagaagctgcgaagatggcggagtaaggcgtgccgctgcaaactggcctctgggccgggggcgagcagcccccgggaggccgagtgcatctgttggaccgtgcgaggtgagccgagaaggccagtgacggtgggacgagcaggcgccgaggaggtggcgtggcccagacgggccgggtacggaagcgcgcaggaacctgcgagttgcgggcagccggcctcggcctcggctgggcgggggttccaacctcggcggctccagggcagccgtcacccgccttctgggtgtgttgcacggcccacccctcagcccgtctcggtccttcccagtgccgtgcctttagccacctttgtgctttctgcttgcacccacacggggctgtatctggcagccgctgcttctgccatcgatttatttttcgaagaatatctttgttttattgatttacttatacccctcgccttaggacttcgttccccctctttgcccgtcagcggtatcagttgaggcctgttgtggctctgagtattttgtgtccccagcccgttgaccttgagacttgtaacaggtttcccttgggaattgcattcgggtgtgtt

SEQ ID NO: 78876 - DNA, 1120 bp, Homo sapiens
aggagatggaatttcacaaggtaatgtcatcagtcaaggcaggaactggccattttcacttcttttgtgattcttctgttgcttcagaccatctggatatatacgtgcaggcttgggctcagaggcctgacacaaaggtcttaagtaggggtccataaactactggaaattttatgcacaattatacatttttgtgggaagaagaaggtccatagtatcagattctcaaagaggacactgtttcataaaagcttgagaaccactgctccaagacttgacatctttttaaaattaatgccagtgcaggtagagagtaactgctttcttactgttccttttgaatagtttatgatattgatttttttttaacaatagcttgtctgtttgagtaatattgtatactaaaattactagcaccagtgagggccatatccttaatgttctttttctttttaggttccttatcacaggaagaaaattttccttgacctttaggtgcttttatattcatctcaaaaacaaaattctgaactcaggacttggcaagtaagtaattgtgggctaatcgttccaaatactgtttaagtagcttgaaaacaggtacatagaagtggaacaataagccgttagcttcagcagaagacgaacatgaaaaatgactgtaagctattgaaatttaagttaaatcttttatttttcaacaaaagaaatgtattaaataaaaaggagtaatcttgatcatttgctcaaactaccaataattttcactgtctaaagaaaacagacacatatttaattagattgaaggaaatcaaatgattaaaaaataggcctggcccggtggctcacgcctgtaatcccagcagtttgggaggccgaggtgggcagatacttgaggtcaggagtttgagaccagcctgggcaacatgggggaaccctatctctacaaaaaatacaaaaattaagcaggtgtggtggcacgcgcctgtaatcccagctacttgggagactgaggcaggagaattgcttgaacttgggaggcggaggctgcagcgagccgagattgcgccactgcgctccatcctgggccacagagacagactccatctcacccaaaaat

SEQ ID NO: 78877 - DNA, 1052 bp, Homo sapiens
gagtagctgggactacaggcacccgttaccacgcccagctaatttttgtatctttagtagagacggggtttcaccatgttggccaggctggtcttgaactccggacctggtgatccacccacttcggcttcccgaagtgctgggtttacagatgtaagccactgcacccggcctattcttttctttacattttagatattgttttgagtcagcttatgcaaaagtacctgtcctaatctttctgtttttattttgtatttctaggtgtctctatgttgtctcctagagtgggtagtcctgcttcttttacccagttactttcccgtttttgaaatgtggctatcacttctctacacattacctccatgatttggaatggaaaaggccacttttctttttgttctgcctctcaaattcaacacagaggagctcctaggattccagttatcctgctaacatctccaggaagaaagaagcaactcacatgggtcttttgctgtttgcttaattataaagacatcattttgcaagcagaaggctgagtttcatttgaaacaggtgcttaggtggtggtatttgtgaatacttttcattccaagcaagaagactaaagaagtagcaagtatgaatgacttcagggtttaaaaaaaatgtcttccagtttcagccactaccatgataagcacagttgagactgcagcagtaaattccaaatatgtgtttctaatttgacgtgaaagatactaaaaatttatatttgtatatttaaatcctggctcatcctgtgacatagatttactgaataggaacaaaggcccaattttaaacaaaaacctaggccgggtgtggtggctcacacctgtaatcccaacactttgggaggccaaggcaggcaaatcacctgaggttgggagtttgagaccagcctgaccaacatggagaaaccccatctctactaaaaatagaaaattagccaggtgtggtggtagatacgtgtaatcccagctactcgtgaggctgaggcaggagaattgcttgaatccgggaggcgg

SEQ ID NO: 78878 - DNA, 4534 bp, Homo sapiens
tgaaattgtatcttccatgcttcagaccagatgcatttaacaaaatggatatattccagctgtagttgcccagtgtttacttaacacatctacatttttttcttgtctattttggtccccttgataggaaaagctataattttaggcaggactatacgtcgatttgtagccatgcttccttcctttcccttgctcatccatgttagctggcagtttttcttttgaaaagttaaaaccgggatatgtgcaatagaaatatatatatatatatgtatattttaatacttgtggacaaatgttacaagttgtttaagaacaacaaaatcaccaatgtcttccattttgagatgtgtatagttttgtaagcattagtgcttggtagcatattgtagtgccatgttaggggttagtgcatgagtctagtgattttaaacttcaggatgaattattgataataacaaatagtgtaaaaagagtggaaaatctaaaccttttctttttccataatgtctaaatctgttatattcttcctggggaaaagagattaaggcccaaaagactcatttatgaatagaaatgtggggtcaaaatctgagatactatatttgaggacatttcagctttccataaggtatctggaaaccagctgtctttgtgtcttatgaaacctcaagtcaaaatgagaccgcatttaattattctgctttgctctttttttggggtgggggggagatagagtttcactctgtcacccaggctggagtgcagtggcacaatctttgctcactgtaacctctgcctcttgggttcaagtgattctcgtgccccagcctcccgagtagctgggactacaggcacgtgccaccacgcccagctaatttttatatttttagtagagacggggttttgctgtgttggccaggctggtctcaaactcctgacctcaagtaatccacctggcctgctcttttcatgtcttaacatggcatgtcttttagtttcattattttcctactccttgtatgtcaagaaattacattttgcatgtcttatggagatgctgttaattgcttcagtgagtgcttttctaatctgcagaccatttacatttcctgtttgcagcatgctgtgtgcaaacactcagtaatttggagtattcaattatttgttagggctcttcctatttccaaatgtgctgaattgtctattgatgggattttcagatcttttcatgagaactggaaatgtagctgggtggcacctacctaggttgctacgtagtgagtagactttctcttgggtatagtaagcctcagacagctttcacttttatctactttacttgtggaaataaaacagtcattttgttctgaaagaataagatagctttctgtagagaaggaattcctacctctaaaagctgccttgagaactcagaactggcagttttctgaggtgatttttaaatttcagtattagggagagtccagcatttgctgacacagattctacataactaatgtatgatagcaaatgcaaaactattataatgtggtgtatcttgcgcatacacaggttagaacaagtagactctggcagcagatctccagagacccaagtttaggttctcatagtgtatttgaagtagttatactcctggcttaagtagtttagtgcctgggagaatccattactgaaaagcatttaacttaaaaaaaaaaaaaaaaaaaaaaaaaaaaactgaaaaggtagtgaatacagaatagcacaatatataggaaaggatatttcctgttgaaaaaaaaagccataaaattaatagtaattttcaagaggtagaattttagtagcaataagtttgtgcatgtatagtaatttgcattagcaaggttgtacaatagaataagtgatactactggagtttgtggggctctgcaaccaagagttgcacaagggccaggtgcggtggcttacacctataatcccagcactttgggaggccaaggtgggcggatcacaaggtcaagagatcaggaccatcctggccaacatggtgaaatgccatctctactaaaaatacaaaacttagctgggcatggtggcacatgcctgtaatcccagctactcaggaggctgaggcagtagaatcacttaaacctgagaggcggaggttgcagtgagctgagatcacaccactgtactccagcctggtgacagtaagactccacctcaaacaaacaaaaaatgcacaaaaggaaaaaatgttctggataaagagcatatgaaaggtactttcttttagaacagtatgaatgtatatgaatttatctttatgtgagaaataatcttttttgtaagttaaaggttaaagaccctgcttgtttcctaaatcagagggttagagctgttgaaattaaacctttatagtgcttaacctggaaacaaatgtactacagccccactgaagccgctctatgggttttttgcttacgatgttttagcaacaggcatttattttgtagaatggtatactttctgctttgtctcctcatctttctccactggtttcctgggtacattttttttaaagggagagaagtttgtgagtttaatgttttaaaaaaactcccaagaacatggataagccggatttctctcatgcttatgattagggagttaggatttaaagatgcaaagcagaaggactgaaaggaatagccagtgaatatgtttcagtgggtgaggtgtgaaaccttgtctaatatagatgtgtcctatggcctgtgactgcttattctttatcaatgagaactcagcaaactagtttctttcttgatctgaggaaccacacagctcacatcagaatataatagtggaactagggtgacttcactccctttcacctgatgtctatcttggccttttagcaccttgactatccctgaaaagactgggtctttgttttcccagggaaaaaacgaagtgatgtagatctaagaaatagtgcctctttaatatttaattcttacatgacaactaacacacagggaaaaggctatgttaagttgattatagctcctcttaaaatgtcctatgctgtcagttggtcttagagacatgggaataaccaagcaatattcagacatctgcactatctggggacagcgctacatagtacaatgatgtcagcagttcagttacttggaacaattaaagattacccttaacagccatgttaatacatctaaatgctaaaatatactacgagtttttcatagtcttgaaagtatacagttaattacttttcaaagttactgtggtctcatgtttactcttcttgtatctgtgatatgcaaaaagatgaagactcttggcctccaggagtttacattctcatggtgctgttggttcaagcagattgctttagtttattaatgaacattgcttggctattaattatatcctatttggaaggatcccttggtgaacagttttaaaaagcagagggctgtgctaaatttcagggtattgatagcttgagtttacattgtattagccctgctcgttatcatttttttccccagggagctatgcaggtaatgctcattagcatgaatcagaaaagaaaccattctgcctaagagcatcttaaccatccccctaaaccacctatgctctcctgttatagttgtcagtaaatcacgaagaaaattaacagctccttaagactctacatccctcaattctctttcttttcccagagtttgtacatcattctctactcagatggaccaggatttgcatataagccttttaaaactgactagtggtcctaattttaacatttttgtgtatgactcctatcccttttctgaagcagcattgtgatagatgtggagcttctacctgcatttctaagcaattattaacccaacttttgagttgaaacttgcatggatccttgttatgtcccgtaattcctctgaatcaaggaatttattttgcatgcttattaaactcaaactgggtctgattgaaagtgcaagcaatagtgacaggaccttaactctggttttagagtacgaacattctaatgcatgactcaaaatgtccagtgttgtggttactagttattttatatatgcatttgttaataatgaagcaatagagactaagaccaatagcttgaatatattcagattattttcatgttttaataaaggatttttcttacttccattgaaaatgggaagtagaagataaacaggggcaaccacaagacattcaaactgtcaggactagggcgtagcagtgcccaccctctaaccacttgcctggttccattagtccccaagcatgtttgaaaacaaaagacacaaactaagcatgctgaataaaactagctgctatggctgtaataatcagaaaggtgcagagtttcagaaagagtaggaaagtagggaatgccagtatggagtatgtaaaataactagatatggatatggggtttgtttatgatatgctttatgtagac

SEQ ID NO: 78879 - DNA, 1115 bp, Homo sapiens
cttccccaattacttgatagcatgtctgtcagccagtaaagattaagaacagagtttctctaaattcctccgattattccactaaggcacattaaaatacttaattttgggaaaccagacatcacagatttctccatgaagtcctaaatcttctttaaagtcagaataggtatcttagttactgacagtattcaggtttttttctcccttggtgatatgtcattccatcagtgaaaaaatattttctcccagggataagaaaggtattctggtaatacattatcatcaatccttaaacagtaacagtcttggcacttatcacaaaaccgacccatttcttataaccagaaagattatcttagactgtccttcacattatactttacctactgccttgtaagaataagagttgctcactgtgtttacttgctgtcctccatattctccattgcaccattggtgtataacgttaagagtttcattgaatattattttaagtattacaaaaggcagcttgcttcttaatctatgcatctttggggtttttgaagaaatttaattctttgatgtaaaaaggaactgttaaaaaagttggaagctctgcacctgtgtatatatatattttagcaataaagcagcatgggctgagaatgcactgaaatctcattgtgtgtcgttacttgaaatgggtaattttaaataatgcagtacatactgatgatgggagaaggagcctttccaaagacctgtgccaaagtactcttcagatgttaaagaacaaaggaccaggttacttgagacctagctgtagcagtttccagtgtgttgtacaatggaacaggcagccattcaaacctcaatatgtaatgctgcttttacagccataaggagttttggaatactttttctaacatatttgtaattgcctttattttgtgtctctgtgtatccacatacatggagtttaataatagtattcattgagcaccaactatgtgataagcactgctctaattacattagatgcattaattaactcatttaatgctcactacagctctaattactatagtttttatccctattttacatagaaggaaattaaaacagataaa

SEQ ID NO: 78880 - DNA, 1041 bp, Homo sapiens
gcgcatttttttcattaactttcttttttaatataagcaaaagacaaaccttgattttagttctatgaacaatttgtttagtaaggccccagtcaacttgattatttttcaacaactgtgaatttatataatgatagccattttacatgatttgtagttttaaatgtttaaatgttaatcagattagttagctctttttgtgtttattaggggtaaattacctttctcttctgaagcgacaattatacatccatgattgctttgaccagaatatacgagggtatccgcaatccagcatgtaattaaattacaatctgagttaccctttcttgaatgtgacattctttccgtctcattcctattacaatgtaattttcaccctgacttaggtgttaggaatgcttcagagactagttattttttatttcttatatgattttttattcttacccatattgtgtttttccccacccctagtacttacaaccttttattctgtggttcttgtgggattcccgttggtttccatctgtattctacccatgctgccctggctgccttgagaggtcacttctgcctttccagtgacaaaatggtgtggtgagtagacttagatattgatcatcaaatacattttattttatttattttgagacaaagtccatcaaataaattttaaaaggtttttcaggaaagacaaagtaggctgagcacagtggcttatgcctgtaatcccagcactttaggaggctgaggcggtggatcactcgaggtcaggagtttgagaccagcctggctaacatggtgaaacccatctctacgaaaaatacaaaaattagccaggtgtagtggtagacgcctgtaatcccagctactcaggaggctgaggcacgagaattgttggaacctgggaggcagaggctgcagtgagctgagatcacgccactgtgagatcacgccactgcactccagcctgggagacatagtgagattctgtccaaaggaaaaaaaaaaaaaagtagctgggcatgctagtgcaca

SEQ ID NO: 78881 - DNA, 1147 bp, Homo sapiens
cccagccctgcggggccgagcggcgaggaccccttcaccacctgcgtatcccactccatggaggtcgtaaaagaagcttggtcaatcgccctctcagtgccaccacaaaagtccccccggggcggcgttgcacaacgtgagcgatgccgcagcggctgagccgccatcttcccgcagccggcgccttcctttcgaatacacgccaggccccgccccaagcacagctcctgcgtcctcattggacatcatgggcaatccaagcactggagtccgagtccgcgcactcgttacctgaacaggcgttacaggccctttggcgcctgcgtattcgtgaagtgtgaaaaaagcgcgcctctgttgggacgggaaatcagcctttctattggtcagggttagaaaccccgcctttgaggcattttcaaccaatggaagcgcggcattcttcatttaaactgtctataaatttctgcctagtcaaagttaagagtggcgccagggatttgaaccgcgctgacgaagtttggtgatccatcttccgagtatcgccgggatttcgaatcgcgatgatcatcccctctctagaggagctggactccctcaagtacagtgacctgcagaacttagccaagagtctgggtctccgggccaacctgagggtacggcgctggcggtgcgggtccctgggcgggcgcggcgggaatagcggcctcggggagatgcggtgcgaagggaccgagagggaagcccgggactgaggcagctctccctgcccctcgggcagtagatgtggttcacggtagtcccagttagaactctgataaacggaagaggaactgtagttttcacctcattttgaagctggcttgtctgggtgctcacatgataagctctattccgagggatggtttattgttttttgttttgttttgttttgaaattactgtatacctctcagggcgtcgattacgaaactcaggcccagaaagcacaaggggtgtcgttaatcgttagacaattaagtaaataattggctcagcttctggaaaaccccaaacagactccagtgatttgtaatattgccgataatctcttgatactttattgatggacctgtcagaaaaaaaaaatcgacttttaggggagcacc

SEQ ID NO: 78882 - DNA, 1043 bp, Homo sapiens
tttgaataaaaggataagataaaagaataaaaccagagtctacggaaagcaagcgagggaagccccttgctaatcatgtgatcacactgctgaaagactaagtacagggtgatcaccaggccagggacaaggtaggaaggagaatttaaacaaacgaaaaaacaacaaaaaacacatttaatgcttgtttctctttccttcctacctactacacctcacttaagtgaacactcaatgaatgttcatatttatacaacaaatatttaatgtgagcttaatacttaaaaagtgcttcctgaggcccaagccctgggatgcagtgatgagcagctggacttgggtctgggctttcatggagcttacagcacacagtaaccttacaaacacatgacatcacatgggaatttaaaaagaaatctccataaaagtatgccaattttggcataggtggtttattttcagtttgtatatttccattcacctgtgagtcagggtccacacggacagtcttgcaccttctccttgttttggtgacatggccaagtggctgtctctcagcttcttcctggttgctgatctgtatctcagtctcatcacaagaggatgcagaagtttgactttcatcctgaaaagagaggtattaatctgctatgtgctatgtctacagttataatgctcaggaagaatcagaattgagacagaataaaaaacatattacatatgcaaaagaaaaaatttaaaactctctagcggtaaattgtaggcaaagacaagaattatagagtatttaggccaggcacagtggctcacgcctgtaatcccagcactttgggagaccgaggcgagtggatcacctgaggttagcgagaccagcctggttgacatagtgaaactccatctctactaaaaatagaaaattacccgggcatggtggtgcatgcctgtaatcccagctacttggaaggctgaggcaggataatcacttgacccggcaaggggaggttgcagtgagccaagatggcgccattgcactccagcctggg

SEQ ID NO: 78883 - DNA, 1038 bp, Homo sapiens
aggggtcggggggagggtggtgtctggagcttattcctttggccttggctatttggacagcgttatcttctaactgtcttcaaagtgagctactaggcagaggaaaacttgttcttttctttttaactcttgccttgccacattctgggccttagtttttacttttcttggagtgaataaatgcagtacttattattatttaaatttctgcctcaatgtagtcacttgctcagtagactgtctaggtttcttcatttgtccttgctaacagagctaatcttgccatttctattttcctcttaatgtgccctagtatctcctgttctcaaatttacattctcgtgacagttgataaggcagagaaccaaatctgccaccaaaaatctcattctcctacttttcttcctttaaccccttttccccctcactttggtacttatctttggaaggcagcaattcttatttatcatcgaaatcttttatttcctttttaaatttgtagcagaatcattcagagataaaaataagtaatcccactgaattccagaatcatgaaaagcaggaaagccaggatctcagagctactgcaaaagttccttctccaccagacgagcaccaagaagctgagaatgctgtttcctcaggtaaacgtggaataaatggtatgtcaagtaactttaaaaaccaaaattgctagaagtagccaggtacattaatttcctaggactgttgtgacaaagcaccacaactgggcagcttagaacaacagaaatttactctttcatagttctagaggctggaagtccaaaatcaatgtgtcagcaggaccatgcttctctgagactctgggtggactccttccttgcctctgactactttgcgatggctgtcgacgcttggtgttccttggcttgcagctgcatcattaccagtctctggctctgacagcgcatgacattctctctctatgtcttcttaataggacagcagtcatattggattaggatccacccaaataggccaagcatagtggctggt

SEQ ID NO: 78884 - DNA, 1025 bp, Homo sapiens
gacagagcctaccatgtgaaaatactctgttaacttacacacgtttttttttttgtttttgtttttgtttttgtttttttagaggtggagtctcactctgttgcccaggctggagtgcagttgcgcgatctcggctcactgcaagttccgcctcccgggttcacaccattctcctgcctcaacctcccgagtagctgggactacaggcgcccaccaccacgcccggctgactttttgtatttttagtagagatggggtttgatagtttataagccaggatggtcttgatcttctgacctcgtgatccacccgcctcggcctcccaaagtgctgggattacaggcgtgagctaccgtgcccggccacatatttcttaatgagaacttttttgaaatccttcattatttctgtgtctttggatttaggtaacagagattcaaaggtaccttcagaaggaaagaaatctctctacacagatgagtcatccaaacctggaaaaaataaaagaactgcaatcactactccaagtaagttttgtagacaaagccataataagtaatggttgccccacttcggaatgatgttggactgtaacagctgaaagcatagaggctggaaccagtttacattctagttctctcgtcttttaggtttgatatcttggggaacttactcatcctcaataaactcacttcctcagtgcaaagtggaaatagttatactatagtgcctatttctttcttttttttttttttttttgagacagagtcttgctctgtcacccaggctagagtgcagtagcgtgagcttggctcactgctacctccacttcccaggttcaagtgattctcctgactcagcctccctagtagctgggactacaggtgtgctccaccacgcccagctgatttttgtattttcagaacagatggggtttcaccatgttggccagcatggtctcaacttcttgacctcatgatccgcctgcctcggcctcccaaagtgctgggattccaggcgtcagc

SEQ ID NO: 78885 - DNA, 1114 bp, Homo sapiens
caatttgccatatgtaaagaatggtaaagaatgggcttatttctctaccacacaaatgaatgacattcttttaggaacatacaagacctgttctcaccactcacctagcatagcagtcttctgctacctgtgacttcccctaacctggaggaggaggaggaggaggaggaaggggagcttttggcttgcctcttggactataatgaggcctccacacctattcctccatcaccatcattgtccaaggcagggagagcagaaaagacaagaacatattttacaaataatgttagttgatatgtgatttaatttagcattagccttttaggaatatgtctcttctgcaaaagaggttcgttcctatgacaattattaattgaggcccttttcactgcttgctaatagtcaagtggttttatttataagctagacacaagttactcttgccacagtactcatgtcttgtactctgctgtcctatttaggttttcagctgctactaaagataatgagcataagcgttcactgaccaagactccagccagaaagtctgcacatgtgaccgtgtctgggggcaccccaaaaggcgaggctgtgcttgggacacacaaattaaagaccatcacggggaattctgctgctggtaaaaaaaaaaaaaaacaaaagaaatctgtttcatttttaagccatgtaacttcccaaaatgattaggtatatctgttttttttgtttgtttgtttttttctgagatggagtttcgcttttgtcacccaggctagagtgtaatggcgggatctcggctcactgcaacctctgcctcccaggttcaagcaattctcctgcctcagcctcctgagtagctgggactacagacacatgccaccatgcccggctaattttgtatttttaatagagacagtttcaccatgttggtcaggctggtctcaaactcctgacctcaggtgatccgcccgcctcggcctaccaaagtgctgggattacaagcgtgagccactgcgcccggcctgtatctgtttccttaaaccctttccatttctataatcaaaagcaaaaattttaccatagtgtatttttaattgtgtactagtggggg

SEQ ID NO: 78886 - DNA, 1011 bp, Homo sapiens
aaaaaagcaacacataaacttcaagaaatttggtcccagttctttttgtaaaattgcaaattggttggacacagtggctcatgcctgtaatcccagcactttgggaggccaaggcaggcagattgcttgagaacaggagctcaagaccagcatgggcaacatgatgaaaccccgtctctactaaaaaatacaaaaattacccgggcatggtggcatgtgcatgtagtcccagctactcatgagtctaaattgggaggatcacttgagcccaggaggcggaggttgctgtgagctgagatcagatcacaccactgcactccaaactgagcgacagagtgagattctgtctcaaagaaaaaaaaagtataaatgttgatagcaggtaaccccacagatgaagagaatgaagttgggaatataaatcaaacaatctttttaaaattctttgtctctgtcctaaactaggaaagctaaaaccatgggggcaatctaaagaaaataattatctaaatcaacatgtcaacagaattaacttctacaagaaaacttacaaacaaccccatctccagacaaagtaagtacataattatccagctttataattattttaatttcaaaagcagcacctctgagggataggggctcagtaatagtggtgttttaagaggaggttagaagtggtattatggccgtgtgcggtggctcacgcctgtaatcccagcactttgggaggccgaggtgggcggaacacgaggtcaggagatcgaaaccatcctggctaacacggtgaaaccccgtctctactaaaaatacaaaaaattagctgggcatggtggcgggcgcctgtagttccagctactcgggaggctgaggcaggagaatggcgtgaacccaggaggcagagcttgcagtgagccgagatcgcgccactgcactctagcctgcgtgacagagccaggcgccgtctcaaaaaaaaaaaaagtggtatcatgggccaggcacggtggctca

SEQ ID NO: 78887 - DNA, 1042 bp, Homo sapiens
ttcagtggcacaatctcaactcactgcaacctccgcccactgggttcaagcgattctcctgcttcagcctcccgtgtagctgggactacaggtgcctgtcaccacacctggctaattttttgtatttttagtggagacagggtttctccatgttggccaggctggtttcgaactcctgacctcaagtgatatgcccacctcggcctcccaaagtgctgggattacaggcatgagccaccgtgcttggccggaattgcaattttaaatccaattctaaatatctatttgtaaaaggaaattaacataaaatgtgtaatacctaatacattttaacaacaaatttaacttcctccccttcagcttcttatttgcattcttgttatcagatgggaactagatcaaaattccctttccctgcacatcctaacaggggtattgatgccttcagtttgtctgttcagcactatgccagactctcagaataatcaaagaggaagatctctgccctctagacattttcacgaaagacctttagcacaagttcactgtcagtgctgcttgggggtctttaggaatcctaatgcattctggatctttcctgccccaaataccttgtgctgctccatctggttctgagtcttcactgggggtataacattagacttgctgtctagcgtatggtacttgtggaaggaacaaaccatgacagatcactgagtatctagtgtggattggaatgcagttcgtaaggaggccttttgtccctgggtttttcagatgggaatctgagccattatgtcaaaaattttacctccaatttattccttactgaaggtgagatatatgggccttctaggctggtttttcctggtggtaggggcagacctctgtgtcagaagccacctgggttgcttatttaaaatgtaggttgggacttagagggtgcagcagttcccatcctagacctactgaatcagactctcaggggatagaggtctggactctgcatttgtaacaggtatagctcaagtaattatgattt

SEQ ID NO: 78888 - DNA, 1054 bp, Homo sapiens
accatgttggccaggctggtcttgaactcctgacctcaagtgatccacctgcctcagtctcacagaatgttgggattacaggcatgagccaccacgcccagccccagctgttattcttgaaccttacttactgaaaggtattttatttcacttgtaaattcagttcagagtcactgggttggaatggtttctatgctgggtcctgagacctaggaatatgggtattccttgctcattagagataatttgctctctgaaatcttgaagtttctttactttcctgccttcatcatgctcaaaatactcagcatctcaatgccaccctattccagagcaaccagtccccgccttgtgtttcttcccatctttcagttgcgtgcccagaaggatagctgcttcacagaatggggacctgcttataacattctatacacactcagcgtgacatgggggaatatagtactcaccttccttgtttcactaggtaattgttgcccattaaaatacctgttacatcagtgagagtcaaactgctgatctctgttattaggaagaaaacatattccatccagtctctttttaagttttcttcattgcatatttacaaaatacttttctggtgttctgtggggttgcatacatgtacacctaggaaagcaggatgtcagtgtgtacaagagtcctgacaatggatcctttcctttacccagatggtttttgagcagtggtcattgggagatcctctggcctctgtacttggttcagatgcacaccggtgggtgctcattttctcattcttggcttatgtttggtgcatttgagggcagtttgaaggttataacagagcttacctttcagtagaaccatacttctcaaaacagattaagaagtgcaaggtcattttctctacttccttctggatggggaaagtataagagcatccctttaattctttcctttattctttagatcccatttactactacatcctggtgaaatcattcattttccctctgtctcagaatcaggtgaataagatttttgcagggatggg

SEQ ID NO: 78889 - DNA, 1019 bp, Homo sapiens
agtgcagtggcgcgatcttggctcattgcaacctccctcccggattaaagcgattctcctgcctcagcctcccaagtagctgggactacaagtgtgcgccaccatgcccagctaatttttgtatttttagtagagacggggtttcaccatgttggccaggatggtctcgatctcttgatccccccgcctcggcctcccaaaatgctgggattacaggtgtgagcccctgtgcctggcccgtagtctctcattttaaacatattccaacttaatgctatcaaatattttatattttgttgtaattaacatattaaatatttttaatgtacttaaaaggtacaccagagtttcttgcaggaaagccaaaatatctattagctcctttcccttagttcctttctcctatctaatagaaatcagtttttatatacatttcattgctacttaaaaaccaaatatcttttaaccagatttgaaatcaagaaaaaactaaaaacagccaaaaagaaagaaaagaaagaaaagaagaaaaagcaagaagaggagcaagaaaagaaaaaactgacacagattcaagaatctcaggtaggagattcagtgttcctcattgtccaaagaataaacctgttttgagtgtgtgtgtgtgtgtgtgtgtgtgtgtgtgtgtaaaaggtggatttatattaatcagcctaagtttataagacttgtgacatggtttcattaatctctggacatatcaccattagctgtgctgttaaatccttagcactttttcctttgctttcctttttccttttcttttttctttcttctttctttttcccttttcttcccctcccttcctccttcccccttcccttcctccttcccttcctcttccctttccctggtctcattatgttgcccgggctagaatacagtggctattcactggcacagtcataacacactgaagcctcaaactcctagtctcaagcagtcctcctgagttgctgagactacaggcatatgctacc

SEQ ID NO: 78890 - DNA, 1049 bp, Homo sapiens
gttgactgtaatggattttattgtaaattgacttttgaagcactgaccaagcccatttggtttccagtgctagctttgggatctcaatcttggcagctcattaaaacagcctgggatgattttatagggtagctaggattgagaaccactgcaataggtatatataggtggtacatagtctggtaaggttgctttgcttgtactacagtcaacatgcacatttcttggagatgctgtctctcttttatgtaggcatggcaatgaccaacgcgtgttccgtttagagtttgtctcaaaccaagaattcaccgaaagtgagtttatgaagtggaaagaagcggtacgtggctagagattacctagcagttgttcgtgcacgttgagaaaatatctttccaaaatcccttactaataatctcgtatcgtgtttttgatccagatgttctctgctggcatgcagttgcccactctagatgaaatcaataaaaaggaattatctattaaagaagctcttaattataaattcaatgatcaggacattgaagaggtaagaaaactggtgccccagaacccggaggttcatcaagaaccagtgttgagagaacatgattctcttttatttccctatatcttgacatttttagctatgcatgaaaatgagggaatactaatattactacctgattatttatagttcatcaagcttttttctatacattctcatgtccggatgaggctaacatagactgaagtgtattcagagttcagatgagacaacaaatgaggctacatacactaaagtgtatttagggttcaggggtctgtattctgctaggcttgatccttcaagagttttccttttctaaaacatcttggtaaaattatttgatctctgttctcttggacagtggctagccttacactaccaggcccttgggctgctgtttcttggtgcatgttccttcagcctgtcccagaagaatctccgtgacccaggaagcagcatagtatcccttggaatgaacccgctctctctctctctggggcat

SEQ ID NO: 78891 - DNA, 1045 bp, Homo sapiens
ggcaacgttccttggccattttccattccctaaattcaaactcatcttctgcgtgtgtgccagtcttcttactttctagtcacttcagtttcctttgtaataaaatagaccctggggtggtatttaacactgagtctgaacagacagatgacactgtcaaggccacctgtggctggtgattttccattcttcacactgggttggggtgggccttgttatggtggtttagccaccctgtgaggcctggggttctactgccaccagggacccacagccaggtagctgtatgggaaggtgttccccactgtactgtgcactactataatataaattatatcttgtatttgtaaagtacttctacagtattcttccacatctcctgtcctttgctcaccacatgagatatctttgcctgtgctggaagtaaggggatacttgatatggagtcagttgtatgtagccaagaacgaactcacacatctctctatgtgtaggccatggctgaggacctgggggatcaggacaaggccaaacaaatccaagatcaactgaatgagctggaggaacgggcagaggccctggaccgccagcggaccaagaacatatccgctatcaggtgtgttatggagcctatttttggcccgcagaccttggccaaaattatcaggcaagcctgtggcctgtacactctgtgctgcactgaccccatagatatctgagttcagggctcagtggttccctccctcccttgtttcacagccactgactcatccctcttaccccacagttacatcaaccagcggaaccgggagtggaacattgtagagtctgagaaggcccttgtggtaagaaaactttatctgaatcactaaaacaaagttaattaataaaccatgacatcttttctacatcttgcctaagtttattttttaattattgaaataacgtaggcacttaacgtatacacactctctctgtatgtccacgtacatcgatataatttattcataatgaaaagcagcagtcttctgccctgtcctacctc

SEQ ID NO: 78892 - DNA, 2121 bp, Homo sapiens
cacaccatctcccaccagcctcccctcccccagggccccacccagtgtgggcctgggctctcttgggctttatccatgtctttagatttgtgtttgccttttgtttttttaaccgcgcagttcattggccactctgcacgcattcagtattaccatggagctgggaatcttgctggagcccctggggcaatagcagcagcaccaggcggtctcctctacagactgccttggcccacccattgaacattcggcacgtgaccttgtggggggagcggggattgggcacctgcgatcctctttcctctcttcatctttctcttctgcccttctttttggaagaaggggtttcaaaaccagtttagtttccaaaaagtgtacatttgtggggggggggggtctaatttgagagcgagagtgtgtatgtgtgtgtgtgtaagtgtgtggatttttttatcatttttttaaaatgcagtactctttgtatcagtctgtcatgggtctatagctgtttcagatttttttcagctgtacttgagcatctgaaactgcaagaaagaaactcattaaatgtgattcttcttactaaacaggcctgactgctgtagctgtgtaacttccccattcccacctactcttcccatcctttcccaactttggagaaaactccccagtttagccccctgacctgcaggctgtgtcctggcaggtgtgggagggaagcccatggccaggtaccagggagggcagtgaatgtcttgctcttcccatgggtacagcccacagcttcttggctgaacgtagaacttctttttctcacccagtataccagcctcttcctggtgattctgttttgctgctttggcaagaactacattttgtttttaagagaaatttctgaatatgaatgtggagagcaaacacaaaaagatttaggttacgccgggtgcagtagctcacgcctgtaatcccagcactttgggaggcctaggcgggtggatcacctgaggtcaggagttcaagaccaatctgactaacacggtgaaaccccatctctactaaaactacaaaacttagccgggcatggtggtgcgtgcctgtaatcccagctactcggggggctgagacaggagaatcccttgaacctgggaggcggaggttgtggtgagccaagatcgtgccactgcactccagtctgggtgacagagtgagactccgcctcaaaaagatttaggttgcaaatgtttcaagcatgtgcagttttgtgtgtgtgtatacatatatatggtcagcatatatattgtgcagctagggcgaagccagcagaggtgtgtgtatgtctttatgaaatgtttgaaaagagataaactgactgcttgataatcactctcaggtgtaaagctccaagtgtaaataaaagtggcatttaacaaatctttcagaacaaagtacagctgactatatataccaagagctaagctaaaggaacagctgagagctccgatctccacgagagactaatctaaaagctctgctttgtacttcctcaccctgctttcgtacaaggaagggggacgatgggaaatcatggacttgtaagttgtatttaaacataaaaatgaacttggtaacttctgggtttagtagagcctcagtgtcgctttaacttagtttactttttttttatttttaaagcagcaatggatggttttaaaggagtattatgattgtaaaattgctaaatatgactgtaacacagctttgtggtagctgtgacacagttcacttgggcaaaggagtggtgatggactcgttaaaatcatatatacttgaatagtccattgaccgaaactctttatagactattgtgtaaatgtggaatcacagactgttaacattgcctggacttcagcagagtcctggagctgctgggacctctcctatcatgatgaacttggacttttttttttgatttctggttttaaaaaacataaaattatagaatccagataattcgctggagtcattctgatccaccatgtagatctgtatttagtatcatttggatttggagaagtgttgattacattatggctgtgtaataaaatttttattaaaactgca

SEQ ID NO: 78893 - DNA, 1036 bp, Homo sapiens
aatgactagagctagggttaaccccctctcctgaagcgtgcagggcagctcagaaactgtgcccttttcctccccagaccctgccagaactctgctcgcctcaggatgagctggatttcctcatggaggccctcatcatcaggtgcacctgggaccaggggcagggctggaaggcgggaggggaatgcccgggaacagtttctcttcaccctgaggctgaggtagcaagtcaggggacacagagggcctctccagctttgtggagcctaaaacatggtttccgtctccctcctggtaacgggatatgtcccccaccccactcagcaagtttcgccatcagaacattgtgcggtgtgtggggctcagcctcagggccacccctcgcctcattctgctggaactgatgtctggaggggacatgaagagtttcctgaggcacagtcggccacacctggtgagacccttgtcttagcccccccaggcccctctaaagaccctgtccatgtgtctgagacctacatggactgatgccccctctgcctgacccagggccagccatcacctctggtcatgcgggacctgctgcaactggcccaggacatagcccagggctgccactacctggaggaaaatcacttcatccacaggttaggagcagtcctggctcaggggacccccatcccaactccctccccaaggaacagcccttccacacagcttttaaggaaatagatcaggaagagcaagaacttctagattctggcagtgattttttttgcctactctgtagggatattgccgcccggaactgcctgctgagctgcgctggacccagccgagtggccaagattggggactttgggatggcacgagatatctaccggtgcgggacttgggaggtgggaaggctcttgctccaagggggttttccccgcaccttggtggtgaacaactcatcattcacctcctccctcctgtagggccagttattaccgcaggggggaccgggccttgctcccagtcaagtggatgcccc

SEQ ID NO: 78894 - DNA, 1299 bp, Homo sapiens
agcccttttggacgctgctgcagttgttaacagagcagccctgaatttggagccaggagacctaaattctctttcttccaccgacgacacttaactcttccgagcttccattacctcattagtgaagtgaggatcaggctaaccacacccaagaatgattgtgagacttcagtgtgactgcatggctaaaaaaatggtatctaaatcagttacacacatgtaatagccatccgctactgagtgtttactctgtgtttgatactcccttatgtatttatctacattttaagtattttacttggaccatgagatagatactattattatccttattttactctgaggaaactgaggcccagagaagttatgtaaactcatgcctaggcagctggctgtagtgtgcatcctcttaactgctacacagcactgcgcgggaagtagttaagggagcagagaggcacaggtctggacctaggagcctccaggaagttccaaagagctggcacagcctccaagtgctgtggttccagccctcatttttggcttttgggtcccattacagggaaagaacatcagggggtccagaggcagccgacttctctgaccagctgtcgttaggaagcagcagggtccctcggtgtgggcaagggactctgctggctcaggcctgccaggacctccccagcatccgcaactgctacctgactcattgctcgccagcccgagccagtctgctggcctcccaggctctgcaccgaggggagctacagcgagtcccaaccctgctactgcccatgcctacggagccgctgctgcccaccgactggcccttcctgccactgattcgcctctaccaccgggcttcagacaccccctcgggactctctcccacagacaccatgggcacagccatgcgggtcctgcagtgggtgctagttttggagagctggcgcccccaggctctctgggctgtgccccctgctgcccgcctggcacggctcatgtgtgtgttcctggtggacagtgagctgttccgggagtccccagtacagcatctggtggcagccctcctcgcccagctctgtcagcctcaagtcttgccaaacctcaacctggactgccgactccctggcctgacgtctttccctgacctctatgccaacttcctggatcattttgaggctgtctcttttggggaccacctctttggggccctggtcctcctgcccctgcagcgtcggttcagtgtcaccttgcgccttgccctctttggggaacacgtgggagccttgcgagctc

SEQ ID NO: 78895 - DNA, 4672 bp, Homo sapiens
atatatatgtgtgtgtgcataaataaattagctaagagaaggaaattctttctgtaaatgccttctttttggccctagtcaacattaacttattcattctacagccacttacattggaactgtgacctgaaaccaaagggataggcataggaacctgggccagtggactgtgagggatagagggaaaggtgggcaggtgggcaggtgggcctagtgaccccacaggtgtgagaaggctgggtcattgatgggccacaggagcacccagaaggctcaggcccaggctcggaagcagcttgtcctgtccttggcacccacagacaggcgatattcagcgggttccaggtctgtaggaggccagggaggatctaccctcactcactctcccctctaccttcgcctctagaccccagcttggttgctttcttgagatctcacagccacacgcaagagcaaacaggagagacagcctctgaggagcagaggccaggaggaccctctgctaatgtcaccaaggaggaacccctcatgtcagcttttgccagtgagcccaggaagagagacaagctggagccagaagccccaggtttgcaggaggcgggggtcatattttggtggataaaagtaggggaaattgtcccttttcctaggcctggcaaatgagagaagagagaagcttctgtgcttttggacatctaacattaatcctcattattggcttcaagtcagtcttcattgctgatgcatgtcttcttcctgcacatgcttcctgttttcttgtcctgttactgccccttctccgccttcccttttaagaggcagcaatgcgtgatggctgaatcccactccacccgctcccggcagactatcttcctgtccttgctgtagctgccccagctctggctctgtccatcccactgttctttctctctctgctcacagtgctgggggaaagatggcagggccagagtaataagagaggcagaatctgacaaagatcttatgaacatgccagaccagaagcagagaggccagtggaagcactcatttcccagaaactagattatttcattagtgattaacaaaataagaaattgaattatgagagccaggaacctcatgcccccggaggagctccaggccagctgagcaggttgggtgggggtaggcgtgaaggaggaaaatgctgtgggatttgtttctgtatcctgccccccaggagcagtatagttgcctcctcctcattgtccccactctcctactcctttaagggctggtactggaaagtggagatggtgccttcctgacatatgtggtcctccttcttcatctttttctcctttctttctctttcttccttctccttctcctcctctctcccctcccaacaaatccttggggtcagcaaggggctggagcccaggatggagtgtgtctgtcatatttgagactttcaccccagccccaggagttccagtccctgggccatgccatttagccataaccgagggtagaagctggcagatcctggaacagaagtggatgtggcagctgctgggtgatggtggggacccctgtggatagtgagctgagccgtttgggtaatactatcatgctttgtctccccagctctggcattgcccgtgacccctcagaaagaatggctgcacatggacactgtcgagctggagaagctccactggacccaggacttgccccctgtccggcggcagcagacacaggaggtgaggagggccacctggcctacaaggggtgggtgagatagggcaggagaggagctgctgctcttgccctcagaactcaggcctttctattgcccagagcctgagaagcatctctcctttgctctcacccacctttaccatcactctgcctggcccccaaggccagataagccccatttctggtagaagtagagtcagtacctaagtcctgaaaggcctgggattaaaggtggggagtgggtgtgggaaggttgctggagcccccagaccacagtcctctttctcttcccattagaggatgcaggctcgattcagtcttcagggagaactactggcccctgacgtggacctgcccacccacctgggtctgcaccaccatggagaggaggcagaggtgaggcatgggactggagaggatggggcagctcttttaacaaccccatggaaaaggatctctggtcaactgcctttgaccttctgtgtgccctgttctagttcatgcctttgctgtgcattcagtttctttttttggagacagaatctcgctctggcccaggctggagtgcagtggtatgatcttggctcactgcagcctccacctcctgggttcaagccattctcctgcctcagcctcctgactagctgggattacaggcgcatgccaccacgtccagctaatttttgtatttttagtagagacggggtttcaccatgttagccaggatggtcttgatctcctgagcttgtgatccgcctgcctcggcctcccaaagtgctgggattacaggcgtggcattcagtttcttaggctcaaaatcttgatcctctctccgtattctggtcagttgctagaatttgccgatcttctgtcacctcctcatgatgcctcctgcactgtggccttgcttccttggtctgctcactctccatgccctccattctccgcccccctgccattccatgtctctcggggctgctgtgctgatttcttctggcccagctcaggccatgccttgcctccagaagtttcccagcttccctctgctcacaaaataaggttctggtctcagctgggcaagatattccttctaccttttgtccctgctgaccctgctgctctgcctccttcacttcctgctacaccactctgctggcttctccccacatacctcctgtgctcagggccctccaggactccactcgctccaggaaatgcctttgccttttgctccatgtcaggccatcaaagctctacccatccactgagaccaatttaattttccaggttcccttctctctctctcctgtccgccggtcgcaaattaaacatcagttatcacgttcctctgcatctgcctcatggcatggttacttgtatgcaagtcttatctttaccggcttgaggctccatggaaagcagggcagatttcacttatttatctttgtctttcctgtgataccttgcttggtgttttgggggcactgtgctgtatcctggctgcttctgacttcttgtccctgccccagagagcggggtattccctacaggagctgttccacctgacccgcagccaggtttcccagcagagagcactggcactgcatgtgttagcccaggtcatcagcagggtgagtggattgccagcctggtcctgcccacccttcccttcaccccacagcctcagacttccccatctcctgcccttttcactctggctcactagccagctatgtgcttttaacaacctaggatcataggggggcaaacgaaggattagggcaaagcctctagataacttcagcatcttcagcaaggttttaccctcctgccctcaggcccaggctggtgagtttggggaccggctagcaggcagtgtcttaagcctccttttggatgctggtttcctcttcctactgcgcttctccttggatgacagagtggatggggtcattgcaaccgccatccgtgctcttcgggctctgctggtggctcctggagatgaggtaccacagggataggaatggggcttgggctgggaggtgccagggtccatattcctgttcctgggcatggccccattgctaaggctttgcgggcaagatgtagaatgggatggcaggcgtctccctcatctcctaaagtccctaaagcccaggaggcttgcctttatggtttttattggggagcatcctctctactcctggatccatttcctggccccttcagcattgccccccaactcccgttcctctggcaggagctcctcgacagcaccttctcttggtaccatggagctttgacgttccctctgatgcccagccaggaggacaaggaggatgaggacgaggatgaagaatgcccagcaggaaaagcaaaaaggaaaagccctgaagaagaaagccggcctccacctgacctggcccgacatgatgtcatcaaggtaaagggacagcttctttcccatcccatggcccaggggacaagcacatgctggaaagaggggccatcaatgcccagggtccagctgcatttgtcagtgggtttctctctccaactcccaggggctcctggctaccagcctgctgcctcggctgcgctacgtgctggaggtgacatacccaggacctgcggtggtccttgacatcctggctgtgctcatccgcctggcccggcattccctggaatcagccacaagggtgagaaaaaagggagcagggaatgggcaaaaagcctagctgggccttgtcttgacccacagcctcccttcctcccttttacctcctgtctcccataggtcctggagtgccctcggctgatagagactatagttcgagagttcttgcccaccagttggtctcctgtgggggcagggcctacccctagtctatacaaagtaccctgtgctactgccatgaaactacttcgt

SEQ ID NO: 78896 - DNA, 1082 bp, Homo sapiens
acttggccccagcagtgcttgtttattaattaccctaatgataacaacagcagtgctggcagcagcctgagacccagctgggggcgcccccaggcggcagcaggaggagagactcatgaggcactgtcaagacatggatggcaggggccagatatctctgtctctgtttctttctttttttttttttaattggcatatttgtttatttctcagtttgtgaaaatgttcttaatttgttgatgtagcaaacaaatttcaactttgattgctatgaaaaaaacaagataatctgctttgcaatgaactttatatagttaaactgcatacaggcaacatgctatatatgaaaaagttactaactgatctacaggtattacatactgaaaagagttaacagtttattataatttattttatttaacaatctaggaagttcgcagccatcagcagttctagtacaatttcaggtgcaattgggaattcaggaatctcgatggagctgttagtgtagcgaaccttgtaggtaaaatacatgcatactttcgatagcacatgtgaaggtatctctctaaaattgacctcattggtttcgttctcagcaaactgacctcacagcataaacaaaaattaacttaagaccaaagacctaaatttaaaagccaaacccataaaacgcctgggccactcaacatggcttttatcgtgcctgatgttaatgcatgttctctttttacaataaattcatggccatcagatgatatcaatttgacatacgtggcatcagggccttcacagccaccataggttttctcctctccatccattttgttcttatgaaattctactttgcttccccaggaactttagtagtttcctggtgaggcgaggacacagagtgtgtggctcacttccgtctcctctgtctctgtttcactgagctctctggcaattatgttcttcttccttcttccttcttcttccttctttcttcttcttcttcctctccctctcttccccttccccttccacttccccttcccctcctcctcctcctattcttctctgcttcttcctcttcctct

SEQ ID NO: 78897 - DNA, 1008 bp, Homo sapiens
ttccaggccagcctgggcaacatagagagacctccccgcgaccaatctcaaaaaaaaaaaaaaaaaaaaaaaattcctaaggagcctgaaaaagagaagcaccgcctacctctcaagctagatgcctgttctgctgttgacctaatcataaggggcctgtgggaaccttctgcgtggaggacttcagatgtaaacagacttgtgatttgtacagtaggaagccaagaggtggcagggctcactcctcactccccttctctcctaggtgtgccatttttcacagtggagccaaaagatctggcagtgccacccaatgcccctttccaactgtcttgtgaggctgtgggtccccctgaacctgttaccattgtctggtggagaggaactacgaagatcgggggacccgctccctctccatctgttttaaatgtaacaggtgagcagcctcagaagggggctgggagtggagaaggagctgggtcctggagggcactgaagctggcagtttcagccactgagcttgcggttgtgagcgtccagagcaagccccagtgtctggggacgtgagctgcaccattactaagctcattagtcaggtgtgctaggctggctgggtgggctgattagtggtgatcctgctgtgtgtgcttaaggagggtgtggggccacctttggttcacagcagtccaggccatgcacagctggccctcagagatgaattgtatgagaccaggggcacccatcccccacccctcccaaggaaaggagccagaaaccagcccacgcagaactagggaggagtatctggcagacactgagaagacaagactctcaggctgcagagaggggagaggagggagagagaaggggtagggggaggttagcacaaagatacagggcctcctcccctaatggcgctttccgggaaacctccacacgttttctcaaacaactgtgtctgtccatacctctgcacagtcacacctgcacacccacctgggccccaag

SEQ ID NO: 78898 - DNA, 1974 bp, Homo sapiens
ctgcctcagcctcccaagtagctgggattacaggaatgtgccaccatgctgggctaatttttttttgtatttttagtagagatggggtttctccatgttggtcaggctggtctcgaactcctgacctcaggtgatctgcctgccttggcctcccaaggtgatcccacctcagccttccgagtagctgggactacaggcgtgtctaccaagcctggctaatttttgtattattatagagacagggttttgccatattgcccaggctggtctcgaactcctgggctcaaataataccccccttcggcctcccaaagtgttgagattacagatgcgagccgctgtgccccaccagggaataaaattttttaaaaccctagtgccatatgatgaaggggcccctgcttttgagggaagggctcctgccttttctcacgcttctctccaccccaggtatgatctcatgtaccagtgctggagtgctgaccccaagcagcgcccgagctttacttgtctgcgaatggaactggagaacatcttgggccagctgtctgtgctatctgccagccaggaccccttatacatcaacatcgagagagctgaggagcccactgcgggaggcagcctggagctacctggcagggatcagccctacagtggggctggggatggcagtggcatgggggcagtgggtggcactcccagtgactgtcggtacatactcacccccggagggctggctgagcagccagggcaggcagagcaccagccagagagtcccctcaatgagacacagaggcttttgctgctgcagcaagggctactgccacacagtagctgttagcccacaggcagagggcatcggggccatttggccggctctggtggccactgagctggctgactaagccccgtctgaccccagcccagacagcaaggtgtggaggctcctgtggtagtcctcccaagctgtgctgggaagcccggactgaccaaatcacccaatcccagttcttcctgcaaccactctgtggccagcctggcatcagtttaggccttggcttgatggaagtgggccagtcctggttgtctgaacccaggcagctggcaggagtggggtggttatgtttccatggttaccatgggtgtggatggcagtgtggggagggcaggtccagctctgtgggccctaccctcctgctgagctgcccctgctgcttaagtgcatgcattgagctgcctccagcctggtggcccagctattaccacacttggggtttaaatatccaggtgtgcccctccaagtcacaaagagatgtccttgtaatattcccttttaggtgagggttggtaaggggttggtatctcaggtctgaatcttcaccatctttctgattccgcaccctgcctacgccaggagaagttgaggggagcatgcttccctgcagctgaccgggtcacacaaaggcatgctggagtacccagcctatcaggtgcccctcttccaaaggcagcgtgccgagccagcaagaggaaggggtgctgtgaggcttgcccaggagcaagtgaggccggagaggagttcaggaacccttctccatacccacaatctgagcacgctaccaaatctcaaaatatcctaagactaacaaaggcagctgtgtctgagcccaacccttctaaacggtgacctttagtgccaacttcccctctaactggacagcctcttctgtcccaagtctccagagagaaatcaggcctgatgagggggaattcctggaacctggaccccagccttggtgggggagcctctggaatgcatggggcgggtcctagctgttagggacatttccaagctgttagttgctgtttaaaatagaaataaaattgaagactaaagacctaaggttttgtctctttttttttttctttttttttgagacagtctcactgtgttgcccaggctggagtgcatgg

SEQ ID NO: 78899 - DNA, 1028 bp, Homo sapiens
gtgcatgtaaatgagatagtgcctatgtgtttatagaacaatctaggatcaaaactgtgtacattctaggccagactgtttaattgcatgcattctctctagttttttgtttgtttccccttaatattcagaaaaatctacttgaacgtgcagtctaggaaaatcaaggcaaagacttttgtgttaggctggaccaataagttgagctatgataactgaaaaaggtggaacttaggagcatcactttagcagttagcttggcattcttaaaccttcggttatatatggatgccttttaaaggaggaaatttcttacattatccaaagtatacaaccaagaactttagtatgagaatgctgcattaaaagttgaatgtaaccatttaagtggttactcaaagcaaacaaaaaataaaaaagaaaaacaagcggttacttggtacctgcatgatggtaaatccaaactggatccctgaaatgtgtgtggtggtatgattatttttagaatatcatctaaaaacacttaaaagttctcataggaccctcagattcttgacatctcccgacctctctaggttaggcggactccactttgaaaaactatggatagttttcctctcccaccgagatctgtagtactgaatcttcaaagttcagcgttttttttttgttttgtttttttaaagtatctagtatttagttatatgtttgcctggtgtagggaaggagtaccaaaagagaatctccattccccttcttcccaagttgtcctcacagatcccccagttagagagatcatttgggttaacttgtctctttggggatgcatggttgttaaccagtcattcacaccttatgatcatatattttaatgctaaatcaacataaatttacttcttccccagaaaatggaaaatttttatgaggaaacctcagatccttgagaggaaggcattcttggtaaggtgggagattctgacagggcagcttgtaggaaagaagttcttgggttcagggaagaggaggaa

SEQ ID NO: 78900 - DNA, 1023 bp, Homo sapiens
ttgggggtctgcggagccccgtgtgggtggggctgggcgcggccggggcggagccggcgaggagccctagggaaagggtgaaaggcacagttgagaaaggcccgccgggcattggtttcacagtttccacgaaggcttcgtgtgcaagcctgaggagtttaggtgcctccctcctgcctcgcctttcttggttctagaaccttcagtaggcttttctgggttgcagggacccggaaaagcagcggcttccactcggggggcgggtcccaagggtcttgctgctgctctggggccgtttggactcctggtgttgggggaggggtcagggaggtgctgctcgcgtctccttttgcgcctgcgcggcgggctccgagcgggtaggagcgcgtgcgcggtgacgtggacgtccggtgcgcgcgcgcaggctcttcagctggagcggacacacggtgtgcgaaccgaacagaataacccgcccccagcgggatgtgaaggactccgggtgaggccggccacgccccgcacggtaactctcgggcctgggtggagggcatcgcttagtactggcccgattggagtttttcgagagtttgaagctcttgtgtatttgaacggcgtgagaaacgttccgctgagagagcttcgcacgccctcgccaggccgggccttgcgcagggccgcctttggcgcgcccctgtggtccctgagcgaggctgcgcatgtcacctcgcgcgcgtccccggcctcacttccgcgtcgctcagctacctaactgggaacatcgacgccagagagagcggccacgaggcgggaggggtgagaagcgcccatggctcggccctgccctcgcgtgtgtggggtgccgctccgcgtggtacggtccgcgtgacgacttctcgcccggcgccgggctctaggtcgagagccacgcttacgcgcttttcagtttagagcctaggtctcgtggttctagaactccaagggaaacggtgtcggcgtcgcttttctgagaacttggcgcag

SEQ ID NO: 78901 - DNA, 2185 bp, Homo sapiens
ttaaaaatgcataaccttcaaatttaactttttaattttgtatacttttttaataatgaatatactcttttgtttctttgtgtgagattatagtatttatagtgaattgttagaggattaggatataagcaccttaactaattagattaaaatgaactttaaaaaatgattagatattccagagtaaatattcttactgtgattgaaagaaaagcttagaagcaaagtcttagaagaatttaggaatattttggggataacataatcgttcttgtatttttgttcaagaaataaatactcacttgattaaagggtgttttttgtttttggtttttttttgcttgtttcttaggatgggaaggccattgtgactatgtggtgattacagttgtcttactactgagtttcctactgaaatcatggaggagaaacagcagattatattggctaatcaagatggtggaacagtggcaggagcagcacctaccttctttgtcatcttaaagcagccaggaaatggcaaaactgatcaaggaattttggttactaatcaggatgcctgtgctttggctagtagtgtgtcatcaccagtaaaatctaaagggaagatttgccttccagctgattgtactgtgggtggaatcactgttaccctcgataacaatagtatgtggaatgagttctatcatcgaagcacagagatgattctgaccaagcaaggaagacgcatgtttccttactgtcgttattggataacaggtttagattcaaatttgaagtatattcttgtcatggatatatctcctgtggataaccatcgttataagtggaatggtcgttggtgggaacctagtgggaaggctgaacctcatgttttggggagggttttcattcatccagaatctccttccacaggtcattattggatgcatcaaccagtatctttctataaactcaaacttaccaacaatacactggaccaagaagggcatatcatcttgcactctatgcatcgttacctgccgaggcttcatttggtgcctgcagaaaaggctgtggaggtgatacaattaaatggccctggtgtccacacttttaccttcccacagactgaattctttgcagtaacagcttatcagaacattcagattactcagctgaaaatagattacaatccatttgccaaaggctttcgggatgatgggctgaataataagccccagagagatggaaaacaaaagaacagctctgaccaagaagggaataatatttccagttcttctggtcatcgggtccgtcttacagaaggtcaggggtcagagatacaaccaggtgatttggatcctttgtcaaggggtcatgaaacatcaggcaagggtttggagaagacttcccttaatataaaacgagactttcttggtttcatggatactgattcagcacttagtgaagttcctcaattgaagcaagagatttctgaatggtaagtagtagtttttctgttcttagaaataaaaggaagattgagatgggccaggtgttggatttaacatcttggttctgtggaatgctacagatgttgataaatgtaagccactataaaatatactacaactgcttttacattctgtgaagtgacatcatttttctgtaatgagaatcagttgggttcaggatctagaattgtaggcaaattggataacttatcagaattattcatatgtatttagaatgttccttgatatccttgggggattggttccaggaccacccaagaataccaacacctgactacatttgagactccatctcaataaaaaaaagaaaatcataccaattatgacaacatagatgagcctagagaatactatgctaagtgaaataggcaaaacaaaaaaagacaaatactgcaaaatattcataaaagtagaaagtagaatggtggatgccagggggtagagagagactgaaagatgttggtcaaagggtacaaagcttcagttatgccaggtaaattttaaagaaagagtaagcatactattttttttgagatggagtctcgctctgtcgcccaggctggagtgcagtggcatgatctccgctcactgcaagctccgcctcctgggttcacgccattctcctgcctcagcctcccaagtagctgggactacaggcgcccgtcacc

SEQ ID NO: 78902 - DNA, 1869 bp, Homo sapiens
cgctcctgcccaattttttatttctaccatattctcaagatacattggtacagttcttaggctttcaatggatgattgggaggagggggaaactagatgtttatgttgtttttggatgaattatacacaatatatctgggtcatacgtatttgcctttaactccctatcttttattttggaagaattagtggtgaattctttatattgaaagtgagtttttcaattttaaagttggaaaatcatctggcaacatcatgactatactaaaaaccaatgaattgtatactctaaaattgctgcaatattatgttttatgttatgtgaatttaatctcaaaacatacaggaaaatatcagctggcagtttaatggccctttccggtttgtgttgcaattcttagttgtgatggatgtgtgttcgctttacagggttgttaatcaccgtgtggatttttagagtttttgagtgtttttgaggaatggctcaggaaatctgatgtgttacttggattcctaacatctttttttttttttctcttcaagtcttgttaatggatcattttgtacttttaaaatccctttctcctctctctctccagtcttattgccagcagttttgaagatgactcccgtgtagcctcaccgttagaccagaacggaagcttcaatgttgttattaaagaggaacctctagatgattatgactacgaacttggtgagtgcccagaaggggtcactgtgaaacaggaagagacagatgaagagacggatgtatactcaaacagtgatgatgatcctatactagagaaacagctaaagaggcacaataaagttgacaacccagaagctgaccatctatcttctaaatggcttccaagcagcccatcaggtgttgctaaagctaaaatgttcaaattagacactggaaagatgccagtagtctatctggagccctgtgctgtcaccagaagcacagttaagatttctgaactccccgataacatgctttccacatctcgaaaggataaatcttctatgttggcagaattggaatatttgcctacatacattgaaaattccaatgagactgccttctgcttaggcaaggaatcagaaaatggtcttagaaaacattcaccagatctcagagtggtacaaaaatatcccttactgaaagagcctcagtggaaatatcctgatatatctgacagcattagcacagaaagaatactcgacgattcaaaggattcagttggagactcactttcaggaaaagaggacttgggcagaaagagaacaactatgcttaagattgcaacagccgcaaaggtagtgaatgctaatcagaatgcctctccaaatgtccctggaaaaagaggaaggccacgaaaattgaaactctgtaaggcaggacgaccacctaagaacacaggaaagtctttaatttctacaaagaatacacctgtaagccctgggagtacctttccagatgtgaagcctgatctggaagatgtggatggtgttctctttgtttcctttgaatcaaaggtaagattgtaattttcaggattctttaaggctaattagtcatacttgaattgtatactggcttgtaagtaactcgatttacaatctagttttgtgatatctatttgtgagggtgtatggggggtggagttgggagggaagtgtctccaaaatgtttggtttagttaataggaataacttaagatacttcatttgaatagacttaaaaaagtatgtcttgcttagatttcagtttacgatttttgcatagctgtgtttaaaaaaagtcttcgggtcttactggaattttcatcattatggattttggaaaggactaaaaat

SEQ ID NO: 78903 - DNA, 1219 bp, Homo sapiens
ctcctgaccttgtgatccacctgcctcggcctcccaaagtgctgggattataggcgtgagccactgtgccaggctgtctttcttaattgactacacagatgttggatatttaatcccttctacctgttcttttcctcccttcttgttagctgagtaagctatctgaatataggctctgagaagtgaacatgcaaattggcgtatactttgaggtcagttagctcagtatgacatcgtattcacatttttttacttcccccttttccccttctgattattaaagtaatattaatgtagaacacttagaaaatatcaaaaagtatgaaaaaattgctcctgttctgccaatgttagcgtaactgtaggcatggagatattttccttctggtctttaagttttttttaatcctgttttacatttaagttttcagaagcaatatgaactactatttttttttttttttgatgtataggaagctctagacattcatgcagttgatgggacaacagaagaatcttctagtctccaggcatcaaccacaaatgactcaggtattataaaatagtataaaaagagttgtatttgtggtttgggctccagcaatgaaacatgcaacattcatttgtctgtagtgtacagtagcttattttattactatttattttgggtgtaggttacagagcaagaatttcccagttggaaaaggaattgatagaagatttgaagactttgcggcacaagcaggtgatacatcctggtcttcaagaaggtaatagactagcgacttctttttttttgttttctttttttctttcttccctactgtttctcctctttttcctctctctttctcatctctttttttctgttttttcctctttctttctagccttgatttcatttctttcagcacgtctttcagtttgcatatttttctcttctctgtctccataattcttccctttagtttaaaaaccatgtctaatatcttatgtaagaaaaaaatgtatcatggtaaagcaagtgatattttctttgttcattcttataacctggtattctccccttcccgtttctcatcttaatttggttgcttttgtttatgtgtgtgtgtgtgtgtttgtttgagacggagtttcgctctgtcgcccaggcggctggagtgcagtggtgcaatctctgctcactgcaagctccgcctcctgggttcatgccatt

SEQ ID NO: 78904 - DNA, 1691 bp, Homo sapiens
cattctcttcacttggttttatttattttttctttctgaggagggatagtttgtttattaagtatttattttaaaaaatttatttatgtttttagggacagggtccttgttacgttacttaggctggtcttgaactcctagcctgtagcgatcgttttgcttcttcctgtcaaagtactgggattacaggtgggagtcactgtgcccagctaagggatagtttagaagattcactatcttgtagctcaatattcttggccatttttagtgtttttatggagattcataaatctgtcctagatttctttaagcattttatgttttcttatttctaggtggaaattcagaaagttcactgaaaaatcgttctgctttctgtagtgataagctagatgaatacttggaaaatgaaggcaagctgatggaaacaagcatgggtttttcttctaatgctcccacatctcctgtggtgtaccagcttcccactaagagtaccagttatgtacgaacacttgatagtgtactaaagaagcaatctactatttccccttctacctcttattctttgaaacctcattctgtaccccctgtctctcgaaaggcaaagtctcaaaacagacaggcaactttcagtggccgaactaaatcatcttataaatccattttaccataccctgtttcaccaaagcagaaatactctcatgtgattctaggagataaggttaccaagaattcttcaggcatcatctcagaaaatcaggcgaataactttgttgtgccaactttggatgaaaatatatttccaaagcagattagtttgcggcaggcacagcagcagcagcaacagcaacagggaagtcgccctccaggcttgtctaaatctcaggtgaagctaatggacctggaagactgtgcactttgggaaggaaaaccaaggacatacatcacagaagagcgagcagatgtatccttaacaactctacttacagctcaagtaagtagctgctgttttctggaggtatattagtgcttggctagaaagagcgaggttagtgaggggaaatgggaatggtactttttggcagggtgatcagctagtttttagcatttagaaccttcatgggaactaaggctatgtcttccccatttgttctttaccaactagatactcaggtgtagatttctcctgccatcagagagagagagtacaattgcacttttgaataacctctctctcctgtataaaggcaactgaccattctgaaaatctctgatttcattttccaacatatgggcaagtacattggctgatcttgttaaaacaactttgaaaattgtgcttttattttttattttttgagatggagtctcgctctgttgcccaggctggagtgcagtggcaggatctcagctcactgcaacctccgcctcctgggttcaagctattctcctgcctcagcctttcgagtagctgggactataggcacataccactgcacctggctaatttttgtatttttagtagagacacgttttcgccatgttagttagactggtctcgagctcctgaccttaggtgatccacctgtctcacctcacaaaatgctgggattacaggcatgagtcaccacgcccggcctgaaaattatgcttttaaaagatactaaatcccaggaaattgaaaattaaaa

SEQ ID NO: 78905 - DNA, 1665 bp, Homo sapiens
gcctcctgagtagctggggcctgtaggtgtgcactaccacgcctggctaattttttgtattatattaaaaatacaaatggggttttgccatgttatccaggctggtctcaaactcctgggctcaagctatctgcctgcctcggcctcccaaagtgctaggattacaagcatgagccactgcgcctggccttcatcattactttttttactttccattttgtaattctatgactgaattctggaactgaagatcatcagatgttggaactaaatgcagattattttattcgttattaatccttcataaagacttttatttatgtattgtcctattctttttttattaattaccctacaatagggaccagcaaactttttctgtaaagggccaaatagtaaatatttaaggctttgcagaccatacactctctataggagttactgaactctgctgttgtagttcttcagacggtatgtgtatgaattagcctggttgcgttccagtgaaactttatgacacaggctggatttggcccatgggtctcaacctttgttaatctttgcgttagaacattatgtataatttatattgaaaataaatccatccttgatagttttgcccataattgtctgtactaagcattagaatggcagattgtttagagccctggttagattcatgttctgtcctttgaatctgcattagtcctgtgctgttagtacttaaaatcagagagtaatgcagtccagtatatgaccataagttggtggtggtgtagggggatggtttagtggaattacaattttctcctttgactttaggcatccctcaaaactaaacctatccacacaatcataaggaaacgagcccctccctgcaacaatgacttctgtcgactgggttgtgtatgttccagtctagctttggagaagcgccaacctgctcactgccgccgaccagactgcatgtttggttgtacttgtttgaaaagaaaagttgtacttgttaaaggaggatccaaaactaagcattttcagaggaaggctgctcatcgagatccagtattttatgatactctgggagaggaggcaagggaggaggaagaaggaatcagggaggaggaggaacaattgaaagagaaaaagaagagaaagaagctagaatacagtgagtattaattgagagttaaaactgtgccatatcagtttttggaaaagtatggttattttagaataatacaacctaccttaatcccgatcaattatccaataagagctttgagacttcttattatccttacatgctctttctgactggctatctgagatgcacacaaacacacaccttttttaagttgaattgttctctgagaattgcttttttgtgctaaatttaaatcatactgttacttggttttctagaatgcccttgatctttgagtttcttccattttctggattgtgcgcatgtgcacacacacacaggtagacacacgtacgttccttggaaagactatagatgatccatataatgcatcatgttttctaaaaggagaagtttgcaaaaagaccctctgctcatggttggagatttggggacaaagtaggattgtggtaaagctgaacatcatgtactgtgttgaaaattgggtttttttttggtgg

SEQ ID NO: 78906 - DNA, 1040 bp, Homo sapiens
aagatgggtaacattattggacactgttatgcatagctctctatgaaggttctatcatttaaaccttcaaccttatatgataaggaggcttcattctccattttagaaatgagctaattgagtgcttagtgacttgttctccaaggtcataaagatactaagtgagttgtaggggactgccaagtcctcatgctttttctgccttgtacaatttctgaaattttaattctgcctccttgttgtagaccccagtggcctttacttttatcacctgcttatcctttggtttgtcaaaaaatactgctggctgtgcagaggtactgtgcctagctgttgtgggtagtaccaagggaaagaataaaacttgtcatttctgttttcttagcccacttaatatacctataaattaacaatataaagaaaaaaaatcaataaaattgatacttgtagccagactgaggaataaagagaacatactaattaccattattaggaatgaaaggtgacttcagtacagacattgaaaggatgatatggcaatattatgaacaactttatgtcagtaaatggagaactcagatgaaatggaaaaactctttaaaagacacaagctacaaaactcactcaagaagaaataggtgactgcttgccttatacttattagagaattgaacttgtagtggaaaaccctgcaataataattctggtctgagttgcttcactgttgaattctataaaacattaaagactaaatcccatttgatacagtcttccataaaatggtgtcatcttatgaaaccagcattaccctgatattcaatccataagaagactttacaagaaaactgtagactgataacccttatgaacatagatgtaaaatttctaaataaaagtttagcaactcaaatccaacagtatatttaaagaatactgcatcatgactaagtggggtgtatcctagaagtgtgggatttgtttaacatttgaaaaatcaatcagtatactttgccattacagtggacttaaaaaaagaccag

SEQ ID NO: 78907 - DNA, 1417 bp, Homo sapiens
cgccattgcactccaccctaggtgacagaacaagactctgtctcaaaaaaaaaaaaaaaaattttttttcagtaaggtcttctctgaccctaaatataatggcaactcttgttttaattcttcattccttaattaccttgctgtgtttttctacatggcttaccattacttgatattatatatttatgggtttgtcttcccctactggattttaaactctgagggcaagaactttgttttattcatagctgtgttcattctaatgcctaaaacagtatctggttgatagctggtgttcaataaatatttaaagatgaataaatgaaagtatataaataccactaaatgccctttgtttggggagggggtcgtctatttgattattttaacgagttactgccttttgtgagggagcgtattttgttttggcagtgcctcagtattgatcttttgttgccaaaagtacctaaaaccttacccttcttttttgttaagctatatgtgagacagagcctgaacagcctgttcgacattacccattatgggtaaaagtagaaggtgaagtagatccagaaccagtttatatccccacgccttctgtcattgagcctatgaaaccattgttattgcctcagccagaagttttatctcctactgtgaagggcaaactgctcactggaattaaatctccacggtcatatactcccaaacccaatcctgtggtaagtctggaatttaatcttttattacaagttaccaaagtcatgtgtaaagatggtgtgtttcaagcagatttttggttgatattttgtgaatcattttgctttcagtaatatgtttataagatatcttcctttctggtttaatcagtttagtgctggcactttaaaaatgtcttaaaagtagaaatgagtagtagtaattttaaaaaataaccatcttcaagaagatcatagaaacataggcttttttacatggcttggaaaaagttttttaaagatactactcctgtattgtagaatattagtaatcaatataagcagtatatattattagtagaaaaacattaggaaaaagcttttaaaagcttttaaaagcaaatttaaaaatgcataataatatcagtaaagtttaagatttaaagtaacagttgatataatatgactgaagactggtaggtaaaagtaggaagttattcattgtgttaatggcttaagcaagtcttattatcaaatccatgtgtcctcctagtccattagattgaagaaaaatcctatactacgatgctactgaatatgttctttgtagcagagctattatagtataaaactgtttctggtctgtgatgaaataagcaagggtgggccgggcgcggtggctcacgcttgtaatcccagcactttgggaggctgaggcg

SEQ ID NO: 78908 - DNA, 1115 bp, Homo sapiens
tgttattcaggggtcagctggatagaaaataagagtaaatatttagaaatttctacagcaagttgattagctgaatctaatatttaaaaaccttgcattttatatgtttttagtttttctagtaatttattgtatttactaaagtatcagtctatgatggactggtaattaacaatgtatccttcaccatagataatttgaaatgcactgctctggtatgatctgaaatttcctgatagagaactggatcctttctgactgccctaaggttcggcacatatgaactgtacttgtgctgtttgatttgaaagtttgcattaaaaaatttcgactgttgtaatacaaaaaaagattaaacattcgttttgttttggagtctagcggagtttttcccactgtatggaatattttgttgtatgaaatttacagattcgggaagaggacaaagatccagtctacttgtactttgaaagtatgatgacttgtgctcgagttcgagtatatgagcgaaaaaaagaggaccagagacaaccatcttcctcctcctccccatctccatcatttcagcagcaaacttcatgtcattctagccctgagaaccataataatgcaaaggtgagtttcttgttgcataagttctttttaacttctgattacctgtttttggtattaagatttgtattactatcagaataataattatcctacagggcagagaagtcatacatgacatgtataacagtttatttctctgtgtacctattgtatgatacgtcccttatggttattacaagtattctttcttggttgggtgctgtggctcatgtctctaatcccagcactttgggacgctgaggcaggcggatcagttgagcccaggagtttgaggctagcctggccaacatggtgaaaccctatctttactaaaaatacaaaaaaaaaaattagctgggcctggtgccgcatgcctgtaatcccaactacctggggtgctgaggaacgagaattacttgaacttgggaggtggaggttggaggttgcagtgagctgctatcatgccactttactccagcctgggtgacagagtgagactctgtttcaaaaaaatatgtata

SEQ ID NO: 78909 - DNA, 1060 bp, Homo sapiens
tcactgcaaccttcagctcaagcgatccttctgtctcagcctcccaaccaactgggactataggtgtgtgccaccatttgtggctaagcttttgtatttttggtatagatggggttttgccttgttggccaggctggtttgaactcctgggctcaagtgatcttcccacctcggcctctcggaatgctgggattgcaggcatgagccaccgagactggcctcaactggtgaattttctgaataactgtagtttgtttcatttaacagtaaatatgtttccctctttaaagtacaatgtgaatttttttcttgatgactcagtcactatcaaggacattaggtagcaaaactatgtgtttttacccagggttttatatgatagtaacgtagatgtgcatgtggattgaagctgttgacatttcagtcattctaatgatttaaacttctgtgagagatttaatgcttgtgtccaagtttctgtgggtattgaatatatgttaagttaaagtatttctgtgttactgtctccttcaggaacctgattctgaacagcagcccttaaaacaactcacctgtgacttggaggatgattctgataaattacaaggtcagaatgaaaactagatcttaacatttgataaaaattatttaggtctagattatagtaataatgggagaaaacccaaaccatcaattcagaatatgtctgcctaccctgtttcaaacttatgccaaaaacagggacaataagtaaaagttttttttccccattatttggtctgttaacactcctgctctcaaaaataaaagaaaattcattcatgttgataaagcatgttgttgcaagagacatttaggttgaggtcagtgagtttttttttttttaacctctttccaaaccccagtaatattggcatcattagcctttggtcctccatcactgccacctctggggaaatctagaaggagaaaggaaggaatattactgtgatttagctggcagaggctactgtcagaattactttgatgacaggtagtggtcaggtggttaccaatttgt

SEQ ID NO: 78910 - DNA, 2299 bp, Homo sapiens
tgactctaatctgtacatgtttcaaagcatctagcaagtagtttcactttgcctgtatgtatagcaaaatagtaacctataccagtgaagcttaaccttggttgtaggtcatggtttgtttgcaagctaactctaatgtaataattgtggcatttagagtagtgttaagggaactacctgttagagcccagtcagcaggataatgaggactattgtagtcttattctctggaactttttcttcctggaaaactcccaaattgtgaaagttgatacattttaagttactactgtgaaagaacgtgagaatgtgacagttttttttcagagtttcatacaaaatgctgtgatgcagaaataatctttcaactttttcttttttattattattttacatcagaaaagagctggaagtcttcctgcaatgaaggagaatcctcttctacttcttatatgcatcagaggtcacctggtggtcccaccaaactgattgagatcatctcagactgcaactgggaggaagatcggaacaagattttgagcatcttatcccagcacatcaatagcaacatgccacaatcacttaaggtgggcagcttcatcattgagttggcttctcagcgaaagagccggggtgagaagaaccctcctgtttattcttctcgtgtgaaaatctctatgccatcatgtcaagaccaagatgatatggctgagaaatctggatcagagactcctgatggtccattgtcccctgggaaaatggaggatatctctcctgtgcagacagatgccctggattcagtgagggagagattacatggaggcaaaggtctgcctttttatgcagggctttctcctgcagggaagcttgtggcctataaacgtaaacccagttcaagtacatctgggcttatccaggtgagaattatctttaatctgggtatagcacctttgtatacacctaggtagtatcatgatttttcagagccctttatggtcctgatatcctttatcttgacatttcctgggaactgggtgacaaaattattatctctttttgtaataggcctagtttagatgcatacctagagtgaatttttgtcacatttatgaacagaaacgtagagccttgtattagttttaattttctttctaatcttcccagaaagttgctcttcataaactttattgcctgcaggctctagtgatactttgacaataaagcaagggtaatcagggattcagtctagctcttggaatttattattagcagataggtttcaaaacaaaaccatggttagaacggtaggtgtaaggggaagatgaaattgacttaaagataggcaatatatgtttagaaacttggggaaaattttaaaaatttttatttattatttatttattgcaatcttggctcacagcaacctctgcctcctgggttcaagcaattctttgtgcctcagcctcccaagtagctgggattacaggcatgtgacaccacacctggctaattttgtgtttgtgtgtgtttttttttgtttttgttttttttttagtagagacggggtttcgccatgttgtccaggctggtctcgaacttctgagctcaggtgatccacccaccttggcctcccaaagtgctaggattacaggggtgagccaccatgcatggctgaaaattttaatttagtaaggtgttatttaaatacaagagtaaaaattcagccatatttacttaattatattttttctttatttgattcgtaggggttttgttagtgtaactgttgtaggacaaatacctttatccttgatacttagtaattcacgcaggttgtattagtaaaattatactggcatatagaaaatttgaaaagagacgttctgaattaatgtcatagtcagaaaaggtttttctagctgagcgcagtggcttacgcctgtaatcccagcactttgggaggccgaggtggtggatcacctaaggcaaggagtttgagactagcctggccgacatggcaaaaccccatttctactaaaaataaaaaagttagcccggcgtggtggcgcgcgcctgtaatcccagcttcttgagaggctgaggcaggagaatcatttgaacctgggaggtggaggttgcagtgagctgagattgtgccactgtattccagcttgggcaacagagggagattgtctcaaaaaaaaaaaagtgcacttttatattagagtagcaaatgtgtggaagtgtctgatattattgcaaagttagcttgactttcattagattggctgcttctaag

SEQ ID NO: 78911 - DNA, 1903 bp, Homo sapiens
gacagagtgagactccatctcaaaagagaaaataatattaatatgattgatctacttaattaaaaaacttattattgcagtttactgttgtgcatgctatgtaaatgcttctgttgatatttcttatactcttgatgaggagaacagtattttctctaccttatatattgattgacactttgaaaacagaggtttgcctgatacaatttctagtgagactagactccctaaaatacaagcatggaaattttttgttgtcttctgcccaggactcacaaagccaccatagaatgtgtctgcataagcagtcaggcaactgtaaactttgtaaactttggggaagctgcagagtaggcttcagcgcagtcccaagggatccgggagggggtatctgacctatttctgtatagcctgaaaagttacagtaaagtctactttcagggggaatgatcacattctttgtaccaaactcaaggcagagatattcttgatctctgtgggaataatcacaatttaaccaaagtagcaaagagtaattttgttttgtgtctctgaagatggagttgcttgctgtagctggtctcctcaccagttccctgttagagagtagattctacctcactccatctcccccaacccccgattttgaaatggtgaaaaggaaatatagaaaaggttatcttctctagagttgcctggcaatatgacctagagaacatgggtagagacttgggaagtttttgttttctttctttaaaaaaaaaagaaaagaaatcaacccccacaaaaaacaactgtgctggtacccatgatgggcagtctgataaactcaggcagcagaggggatctttacttcatttgttggttcactttcttctgactatttagttaattatgtctagaataagaatgagttcgtaccaacattcagtttgaacccatgttttatccaagagatgaaaatagtattttcaaagctaagctttttgaaaatgaaaaactgtgaggtaattgtggcttaggttattgcaacaatgattgtcttataacttaaagtagatttcacttatatttttcaaatatgaaggatgcttgaaaggacccttgtgtgagagcttcattatgtctctctggtcttatcagagagattctgtgggacactcatttttgctgatgaggttaatagcttaaccagaatgccttatttacaaggaaaacaattggataattctagttgtttagatttgatgataactttcacataactaggatgcagaaatgatgagtttccgattctctattttcaaactacaatatgaaggagatgagattagttcagaatatcagttgacagcatttttctaccttctgattactcagattattctaaatggaaaaagtctacttctttttcccttttaaatctgaaaaatagacttatgaaaacttgtaaaaatgaagcccctgtcaagggagaggagttagcaagagaattttatctttacagaatttctctttgccacttgtttcaggttaatggtaagagttacccgcaggctaagttgctattgggacagatgggggcattgcatccagccaataggctagctgcttatatcacaggcaggttgcgaccctcagtcctggacctctcaaccctcagtactgtcatctccaaggtagcatccaatgccaaggtggctgcatccaggaaaccacgtaccctgttgccttcaacatccaattccaaaatggcatcctcctctggcactgcaacaaatcgccctgggaagaatctgaaggcgtttgtcccagcaaaacggccaattggtaagttggggtgtatgtatggtttggaaaggcctatgacttggtggtgggacagtgggtacaggtatggagg

SEQ ID NO: 78912 - DNA, 1375 bp, Homo sapiens
aaaaagggaagacatttaaaaatagtttactattatactaaattatttactaaaatattttactaaattaaaaatagtttactattttcctgtgaggactggtgtttctggcctcttgttgaactcttgctggtgctatgtaaatgcttctgttgatacttcttaaacttatgaaaccaaggagctagcaaaagctagtggtgtaagtagtataggcttaaagtggaaagctcctataaatacaattttgaaagtgttgatttattccattcatctctgttctatgaatgaaaatctctcttttccttaacatttaaatgctgaagtctgtaataaattaccttcttgaaacatttgtgttttagcattgagagtatctatagttggtttattgaattcctctttttgttgtttcaaatctgttaggaatgttaggtaagagtgtcagttgaaatctctggctgaatggttagagttgtgtgaagatagaagatatttattgtttgccttaaaacctattttggccgggcgcggtggctcactcctgtaattccagcactttgggaggccgaggcgggtggatcacgaggtcaagagatagagaccatcctggccaacatggtgaaaccccatctctactaaaaatacaaaaattagccgggagtggtggcatgcgcctgtagtcccagctactggggaggctgaggcaggagaatcacttgaacccgggaggcagaggttgcagtaatccgaaatcgtgccactgcactccagcctggtgacagagtgagactccatctccaaaaaaaaaaaaaaaaaaaaaagaatctattttaccttttattaaggcagcttcagttgtgattaaggggagtaaaaaaagcaatcctatcctgatctgtttggagaaatgtctttatatattttaggaatatgtaatacgtaagcatctcataatagcacagctgtaaagaggtgagagtgctcagacaggaggaaatggtagaaacaagtttttacattagaaattgggggaaacaaaccctctcattttcttttatctgtattaggtgatgaagtttttgctactgtattgtctttttagtatcctgacagtttgaatatattgcacagtcaaaagaattttagtaggaacactctatttaattttttaatttttctttcaagacagagtcttgctctgtctcccaggctggagtgcagtggcactatctcatttcactgcagcatccacctcctgggttcaaaccattctcctgcctcagcctcctgagtagctgggattacaggcacgtgccaccatgccctggtaatttttgtatttttagtagagacggggtttcaccgtgttggc

SEQ ID NO: 78913 - DNA, 2115 bp, Homo sapiens
tgatctgcccacctcggcctcccaaagtgctgggattacaggtgtgagtcactgtgtctggcctggaacactcaattttaatccctttcttgttagaactgaggtttgtttttggtcaaggcaagcgtttgatttctgagagtagaaataagctcagatgctgggtgtggtggctcacacctgtaatcctagcactttgggaggcccgaggcaggcagatcacctgatgtcgggagttcaagaccagcctgaccaacatggagaaaccttgtctctactaaaaatacaaaaattagctgggtttggtggtatgtgcctgtaatcccagctactcgggaaggctgaggcaggagaattgcttgaacctgggagacagaggttgcagtgagccgagatcgcgccattgcactctagcctgggcaacaagaaagaaactccatcttaaaaaagaaaaaaaagaaattggcacaaataatacaggtaggtagtacctgtaagaaattgacccagtagtgcacagtaaatgtcggtaagcacagtcactaagaggataaaatatgagaactgaagatttttgacctgcaaatttctgtttgcagcggctcgaccctctcctggtggtgtgttcacacagtttgtgatgagtaaagttggagccttgcagcagaagatacctggagttagcacaccccaaaccctggcagggacacagaagttcagtatcagaccttctccagtaatggtcgtcacacctgtggtttcttctgagccagttcaggtgtgcagccctgtgactgctgctgtcactactaccacccctcaagtgtttttagaaaatactactgctgtgacacctatgactgctatttctgacgtggaaactaaagaaactacttattcttctggtgccaccactacaggggttgttgaggtctctgaaactaataccagcacctctgtaacatctacccagtctacagccactgtgaaccttaccaaaaccactgggataactacccctgtggcttcagttgcttttcctaagtctttggtagcatctccttcaaccataactcttcctgttgcttccactgcttccacctccttagtcgtggtgactgcagctgcatcttcctccatggtgaccacaccaacttcatctctgggctctgttcctattatactctcaggaattaatgggagtccaccagtgagccagagaccaggtaaggcctagatgttactagctgctttattttactgtacacctatttatataactttgtggttgtgttaggattatagatatatcaggataacagtataggtatttctgttgtaacatgatacatgtattcctgaaaacctctgcatgctgcaaaactgaacactaaaattaatagagctcatggttaatacgggattgcgataaatcactgaaaatatatgcagttttataagcagaacattaataacaataactgataaccttgagagataacttgaacaatcttgactgatagtttagtggagctggagattgcgactcaaaatactaaaaaacattacaatggaagtggtggctgaaggatactgaagtaatgcaggtaagactggagctctgagccactaacatgggcatgggaggaaacatgacctgtgtgctgagagctaggggtgcacatctttgaggagggagcctcaaatgcagatgttccttttgtggggtgtggggggtgctgctttttaattagagacagatgagcagacttcatctccttttgtgtagtaaaaaccactaatgaatcagcacctatttaattgctggacatgaactgattgaaatagaaacaaggaggcatatttgtttagggctctaatatttttataaactttttagttaaaatatttcttttattggcttaggttgagtgaatttgaaataggaatatcctacactttgtgtagtttttatatccagatgcaactagctaaagtaagtggttcttttaatctactcatagaggaactaatatggaaaagagcaagagactttgcaggatttgaggggaaataattaactaatagcaattctgtcttggttattgatgtttt

SEQ ID NO: 78914 - DNA, 1063 bp, Homo sapiens
cagtgagccgagatcttgccattgcactccagcctgggcaacagagcgagacttcgtctcaaaaaaaaaaaaaaaaaaaaaaaggtagatgaatattttttgtttaaattgcacatgattattttcatgaacagtttggttttgtgttttatttaatttttaagagtagtcttggattttctatataatttttcatctaaatgttatgaccatgactttctttttgaaatttgatatttttttgtgtgggcagagtgcctgtttgatagagaatcacgttaagctaaagtctttgttttgtttcatttgtttgatttttttttctcttcagtagcagactttttaagttttatttattaatgttaaataagcctaccaatttttatttattaatgttaaataagctcaccaatttgaatagtaatgttagaccagtttcatttatgcttactattaccatgattcctacctctttatctctttgatctaaaaaaaaaaatctagattactcatactgttttttcctatgtctttagtatttcgaaatatgtcttccaatcaggaaagggcatctttaaagtactattaatggtttgaaatctctattaattcacatcttctgcattaaatttctgctttttctttttgttttaaaaacatcttttgcctcttctaagccaggtttatttccctgcttctttgatgtctcttaatttcattccattttggggggcttaagtaattttttccttctgaaaaataattcccacaaacctttaagctttgcatatttgttagtgaattttaaaaaccaaaagccctttataaaccaaggatttttagttctttatcttcctcaggtggtataagcttagaaattgacccataactctagtaagtgttatgagctttaattttaaagttaaattgtgcagaatctggattttatttaaaaacataagaggccaggcacattggctcatacctataatcccaacattttaggaggccaaggcaggaggattgcttgagccccaggggttccagaccagcctgggcaaca

SEQ ID NO: 78915 - DNA, 2946 bp, Homo sapiens
ggctgaggcaggaggatctcttgaaccaaggagtttgagactgcagtgagctatgattgagctactgcactgaaggtgacaagtgcaaccctgcctctttaaaaaaaaaaaaatatagactgggcgcggtggctcacgcctgtaatctcagcactttgggaggccgagaacggcagatcacttgaggtcaggggtttgagaccagcctcaccaacatggtgaaaccctgtctctacccaaaaatacagaaataagccaggtgtgctggtgcacacctgtagtcgcagctactcggtatgctgaagtggaagaatcacttgaactagggaggtgcggaggttgtagtcagtcgaggttgtgtcattgcactccagcctgagcaacaaagcaagactgtgtcttaaaaaatattatgaatacttttttttcctacgtgtgttaaaggggaatttgggtaccatgtttccatttcctgtttttcagaaaatgctgctcaaattccagtggctactccacaggtctctcctaacacagtgaaacgtgctggacctcgattgttgttgattccagtgcagcagggttctcctactcttagacctgtctcaaacacacaacttcagggacatcggatggtcttgcagcctgttaggagtccaagtggaatgaacttattcaggcaccctaatgggcagattgtccagcttctacctttgcatcagcttcgaggctctaatacccagcccaacttacagcctgtcatgtttcggaacccaggtataaagttcttttttatgaacttttcttttgttgaatcacttggccatatggtatgttaatacaccaagattgtttttcttcatctcttaagagttacttttccaaaaagaaaagcaaacattggaagtcttgatatgggcagtcatgatttaaaaatttctctcttattttttaaaccagggtctgtgatgggaatccggttacctgctccttccaaaccctctgagactccgccatcttccacttcgtcctctgctttctctgtcatgaatcctgtaattcaagctgttgggtcttcttcagcagtgaatgttatcactcaggcaccatcattgctttcctctggagctagttttgtgtctcaggctggtacattgaccctgaggatttctcctcctgaaccacaaagctttgcaagtaaaacaggctctgaaaccaaaataacttatagctcaggaggacagcctgttggtacagccagtcttattcctctccagtctggtagttttgccttgttacagctcccaggacaaaagcctgttcctagctccattcttcagcatgttgcttcccttcagatgaagagagaatctcagaatccagaccagaaagatgaaacaaactcaataaaaagagagcaagaaacgaagaaggttctacagtcagaaggagaggctgtagaccctgaggctaatgtaataaaacaaaactcaggagctgctacctcagaagaaactctgaatgattccttggaagataggggtgatcatttggatgaagaatgccttccagaagaaggttgtgcaactgtcaaaccatctgagcattcctgtatcactgggtcacatacagatcaagattataaagatgttaatgaagaatatggggctaggaatcgtaagagttccaaagaaaaagtggctgttctggaagttaggaccatttctgaaaaagccagtaataagacagtccaaaatttaagtaaagtacagcatcaaaaacttggtgatgtgaaggtggaacagcagaaaggatttgacaatccagaagaaaactcaagtgaatttccagtcacctttaaggaagaaagtaaatttgaattgtcaggaagcaaagttatggagcagcaatctaatctacagccagaggccaaagagaaggaatgtggagactctctggagaaagacagggaaagatggagaaaacatctgaagggccccttaaccaggaaatgtgttggagcttcacaggaatgtaagaaagaggcagacgagcagttaattaaagaaacaaagacatgtcaggaaaattcagatgtgtttcagcaagaacaaggcatctctgacttacttggaaaaagtggaattactgaagatgccagagttttgaaaactgaatgtgattcttggagtaggatttctaatccttcagccttctccattgttcctaggagagctgcaaaaagcagcagagggaatggacattttcagggtcacttactgctacctggagaacagatacaaccaaagcaagagaagaagggtgggagaagcagtgctgacttcactgttttggatttggaagaagatgatgaagatgataatgagaaaactgatgattctattgatgaaattgtggatgttgtttctgactaccagagtgaggaggttgatgatgtagaaaaggtggtgagcccatttttgttgtgactgaaacctaaaggatttaaatgatttattaaagacagaagctttttcagaagagcactaaggcataatacatttaattggatgcctaggtttaagattatgacttaaatggcttagtagttctttaggctgtgtcaatcaagcatcatttattgagcttttattctttgagacttgtctggttttatgggaaggctggcttaaatatttgggggataggtgcttgagagtccctaccgagttagatttttaaaatcccgaaaccactactcccatttgacctcagtcaatttctatgacgttttctatgtgaggtggttgtagcttctctggtagatgttaatcagaaactgggaatgggtgaccttagaactagaggagaacttattcacttgcatatagagagatgtttttgtttttggagaaaaactggaaaataccatcatattctagtaccatt

SEQ ID NO: 78916 - DNA, 1183 bp, Homo sapiens
agtgcagtcctttgaggatgctgttaagtttaattatgtctgtttatttattttttatttaatttgttttgagacagtcttactcttgtctcccaggctggtgtgcagtggtgcagtcttgggtcactgcagcctcgaactcctggcctcaagcaatcctcccacctcaggtttccgagtagctgtaattataggcgagcaccaccatgtctggctaatttttgtattttttgtagagacagggttttgccatgttgcccaggctggttttgcactcctgagctcaaaacgatccacctgcctgggcctcccaaagtgctggattataggtgtgagccaccacggctcacatatatatatgacttatagttcttgattgttaattctaatgatatgttatctttctgtcttaattccttattatgactaacaatcttaggattatcagtactcatgatataacatgaatgtctggcattagttggttttataaggggaacaaacatttgaaaagtttaggtgtgcttgccactcaatacattatttacttttataatgatgtatttcagaataactgtgtagaatacattgaggatgatgaggagcacgtggacattgagactgtagaagagctctcagaggaaattaatgttgctcacctgaagaccacagcggcccacacacagtcattcaaacagccgtaagtcttatttctctttggattgttgtttttgtagttttgtaaccagaaacaaaatgagatgttctgttcaggagctctgggtaactcatctggttccttcttcctctagctttttttctgattagtatagatgaggagaggaactagaatttgggtaattaattttctttggtcgttggtaggaggcagtgtgtaaatgtgaataacatgcttttggagcccgatagactggtattataaaatattagttttgctagtttgtaggtatttaaccttgggcaaatctttaatctctctgaacctcagattctttacctatgaaatgaggaaaatgcccccatttgaagtgttaaatgaggtagtatgtgcaactagcataataactgatataagtggactactcaacaaaggttagtttcttttatcatttaagaataggcattacattctaaatttggttactttactagttgaacaggt

SEQ ID NO: 78917 - DNA, 1230 bp, Homo sapiens
tttttgagatgtattatttctcaagctagatggttcatatgtgggtgttcattatacgcttggtcctccttcacggatgggaagaccaagtttataatggaaaagcatgtatccacaaatatagaaagcatgtatttgtggattcacccaactgtggattggaaatacttggaagaagaaaaattgcatctgtattgaacatgtatagactttattttcatgtcattattccctaaacaatacagtataacaactgtttacttagtttttacattgtactaggtgttataagtaatgtagggatgatttatagtatacaggaggaggtgcctatgttatatgcaaatactatgccattttatatcagggacttgagtattcaaagatactgctggaagttttggaacgagtcttccctggatactgaaggacaactttaaatttgtttatatggttttgtatattaaatatttcatgattgtacaaagtaatttgaagttttagtgactatttgtacacttttagagaaaatatataatgtcaagtaaataatgtggccatatatcacaccttgggaaaaagaaactggttgtaatttggaatggtttggttgtagctgtgaaataggtcttagattattaaatttcagtaagacactgaaaaatcctgtctttatccaggtcctgtactcacatctctgcagatgaaaaagcagctgaaaggagtcgaaaggtatttaggatatatttagtgataattactcattgaataaaattgttaacatttatcttagggttgaaacaacattagctatattagccacgattttttctcagggctatttttgccagtgagttaatataatcagttttttctccttaatcaaattatactgctaatgtcctttttttcccttttaattcttctcctcagaggatagactaatgtagaggagttaaaaatggatatgaaatttatgagaatatatgtggttatttgaaaactgttcttgtaatggtctgatgtaaaacaaggtgccattctttcttgcttgggctcatgattttaagtgatttaaaaaactatgctctgcaaaatggctagcagttagggatccatgaaaaaataaacctttaattttcttaatctttttggtttatatcatagtaacataattaagcagggttttttgtttatcctaaccaacagtaggcatggaggagagtttgg

SEQ ID NO: 78918 - DNA, 3158 bp, Homo sapiens
aaaggaggctttaagcctttctggggatcaagaaggactttcctgaaaaagtgcagagtttgagttttaagtgttaagttttaaatgttaagttttaaatgttatgggggtttaggtaagaggtgggataagtaatctaggtacaggtaaaaagcctgtgtaatgtcagggaggtgtgggattgtgtagtatattttgggaatttctagcagataggaatggttggagagaaaggtgatttagaagagtggcagttgattttttaccagattgaggaggatcttacagtattttttgaaaaacatttaatgtaatttgtatcatgaaaacaagttttagtaatacaataaattacttaagctctttcagatctcgtacgcctgtaacatatacaatttcttcctcatttgaaaatcactgaaatttgaactgagagctggtaagatcactttagcatgtattagaaattacactgttggcattgtaagagttagatttgaaggaaggatagactggtagtaagatgaccaattgagaggctgttacaacagtccagacaaaaggtaatgagtgcctgaaatagggcagtgtcatttgaaacagagtaagagggccaactacatgttcaagatgtttaggaggcaatcttgtttggacaggctccaccaattcctctaaaactgaagcctgattactggagtgacaaactacagaaagaagcagaagcgtttgcttattatcgccggacacacactgccaatgagcggcggcggcgtggtgaaatgagggatctctttgagaaattaaagatcacattgggattacttcattcttccaaggtttccaaaagtctcattcttactcgagtaagtgttctgtgtaaatgacagtaagagcttgactaagagattcttaccgatgatatgagaaagataatccactgacatataagggagattgaaatagagctgcttaaatgtaacagatgaatatggactagtgaatgcccagtaaatcccttagggggaaaatcattatgctaagtcacagtaggttttcattgaaagtcagatttttttttttttcttttgagacggagttttgctcttgttgcccaggctggagtacaatggcacgatcttggctcaccgcaacctttgcctcatgggttcaagcgattctcttgcctcagcctcctgagtagttgggatttcaggcttgcgccaccacacctggctaattttgtatttttagtagattagtagtaattttgtattttgtatttttagtagagacggggtttctctatgttggtcaggctagtcttgaactcccgacctccagtgatccgcccacctcagcctcccaaagtgctgggattactggcatgagccactgcacccgggcaaaagtcaggttctttattggcacagctatcctttcttcagatagagtcagaaactctggttagccatgttgaccacattctcgttacattggtgttcttgatagcacttagtacaggttatcacagcataaagcacagcataagtgatattttaatatgcttaacagttgacagtcattttaaaagaaaacctgaaatattcaagggagcagaagttttaattttgcatgtagaatatctaaagtaatttcgtttaaacagtttttaagtagaaggtggaggagtacaggataagcattcatatccctctagagcagttatttcaaccagattttggttagactaggagttgatcttaaagttgattattaaaatctaagcagagcacaggtgttttgtatctcctcgcagtggtggaatacctactaccattcagtgatgctctttggaaataatcatggtcacattccttaaaagtgtaagccagaaatcctcttacagtttaacaaaaaataatttctgaaacatcaacaattgttaatggaatttaaaaattctcttaagatgtcagattaagttttttttcattagagaaattgtataggccttagctgtgtttaaagaaagagtggatcaattttcaataataccactatttgtattctaggccttcagtgaaattcagggactaacagatcaggcagacaaattgataggacagaaaaatctcctgactcgaaaacggaatattctgatacggaaagtatcgtctctttcaggtgagataagtaaataatctctggtaaagagcataattatagctttatcaagaagaaatcctcagtagatctttcagatacttaattgaaagcttggctcccacagtttacagcacagttatcctttgactgggtggtgggttgtttcttgtgaattgtaatcaccttactttccatagtttttgggaatatagttaaagcaactagatttctgttgactctgtttctcattatgtggcgtaatgctgaaagtgctaatgtattctgttaacttacaggtaagacagaagaagtggtcctgaagaagctagagtatatttatgcaaaacagcaagcactagaggcacaaaaaagaaaaaagaagatgggatcagatgagtttgacatatctcccagaattagcaaacagcaggaaggatcttctgcatcatctgtagatcttggacagatgtttataaataacaggagggggaaacctttgattctttccagaaaaaaagaccaggccacaggtaggagggacattcttcgctttccttaatgtagatatacatcagttgactttagtggactgaccaccttctcttgtccacatttttagttttgtgtggttttttttttttttttttttttttttttttggagacagctctgtcgcccaggctgcagttgcagtgatgtgatctcagctcattgcaacctccacctcccaggttcaagcgattatctgcttcagcctcctgagtagctgggactacagcgagcaccaccatgcccaatttgtttttttaattttttagtagagatgggattttgccctgttggccaggctagtctcaaactcttgacctcaagtgatccacccgccttggcctcccaaagtgctgggattacaggtgtgagcaaccacacccagcccacagttttagttttaattaaatgaattaaagatgggttgtataaaaagtaga

SEQ ID NO: 78919 - DNA, 5577 bp, Homo sapiens
ccttttatctataactaatttctgatctttcttacagaaaatacctcacccttgaacactccacacacctctgccaaccttgtgatgactccgcaagggcaattgctcaccctaaaaggtcccctattctcaggaccagtggtagctgtttctcctgatctcttagaatctgatcttaagcctcaagttgccggtagtgctgtggctctaccaggtatgttgtaagtgttgtcctctatgggaagtgataaagttatccctaacatctcacggtgaccaaggaaggctttggatgtgttctgtaatgataaagagctattctgttggcatttgccttggtaagaggtggccctatttttagaacacatttggcttgagctgtggtactgtttggtgtgttttacacctggtattgggaaccattttgtgaacactagtaatttctaagaggaagaataaaaaagatatcagagggaaaggaagatgttaaatgatcatggtcttaggtcttggtgttgataaatatttgtcactttttgtggtactcagagatgataacagtcctgcattattagccccattcactttgagcactactctgttttggggcaaagggtaaagttgaaagagaagcctcacttgggtgattaggttccaggcaactaaatttctattaagatgaaagggtctctttagtaatattaggatcctggttactttattgccattgccagccaaaattccttgtctctacctgttgccaaactcactctggaggactcatctttcctggttcccatgctgcctttagggcttcattttctgcgctaagtagcagttaattaggtgaacagaatcaagatgcatttctgccttaggagaagaattaacttggggagcatttctataaaataattaaatggaactttaaaaaatggtggaaagagccttttggttggattttagttgagatttttcttgttgggttaggtcaataatttgaagaactgatatttctttcatctttttgataaaagtagagtgctgaatttagactacaaatccctaagatggttatatgatatgacagagagaaagagaggtgttaacactagatctaaatgaatttttctttttttaatttttgtttttcagaaaatgacgacttatttatgatgccacgaattgttaatgtgacatcattggccacagagggaggtttggtagatatgggtggcagcaaatatcctcatgaagttcctgatagcaagccatctgaccatctgaaagacaccgtcaggaatgaagataattccttagaggataagggtagaatctcttccagaggaaacagagatggcagagtgacgttgggtccaacgcaggtttttctggcaaacaaagattctggttatccacaaatagttgacgtttccaatatgcagaaagcacaagagttcttacctaaaaagatttctggtgatatgagagggattcagtataaatggaaagagagtgaatcaagaggggagagagtgaagtcaaaggattcttcatttcataaattaaagatgaaagatctcaaggactcaagcatagagatggaactgaggaaagtaacatcagctatagaggaagcagctcttgattccagtgaactgctgactaacatggaagatgaggatgatactgatgagacactgacttcactgctcaatgaaattgcctttcttaatcaacaactaaatgatgactctgttggcctggctgaactacccagctctatggatacagagttcccaggggatgctcggcgggcttttattagtaaggttcctcctggaagcagagcaactttccaggttgagcacttgggaactggtttgaaagagttgcctgatgttcaaggggagagtgactctatcagtcccctcctcttgcacttggaagacgatgacttttctgagaatgaaaaacaacttgcagaaccagcctctgagccagatgtccttaagattgttattgactctgaaataaaggattccctcctttccaacaagaaagctattgatggagggaagaatacttctggcctccctgcagagcccgaaagtgtgtcctcaccccccaccctacacatgaagactggcttggagaacagcaacagcacagacactttgtggaggcctatgccaaagttggcccctctaggtttaaaagtagctaatccttccagtgatgcagatggtcagagtctcaaggtgatgccttgtttggcacctatagctgccaaagttgggtcagttggacacaaaatgaacttaacagggaatgaccaggaaggccgggaaagcaaggtgatgcctacattggcacctgttgtggctaaattgggcaactcgggggcctcaccaagttctgcagggaaatgaacttacttgtccttaagcagaagccaggctgtgaggggaaatagatctcacctcctttctctgcaggcatctgtttgtttgtgtcttagaacttggatccttgacttcaatgatgcagtggataatgatgggagaaagggggtagggtgctgaccctggtataagaagtactctgaaattctgatcatgttaaaatgtgttacctcacttgtggtgctgggtcccctcatcctctctaagaagatgtgatccattactgaacatgaggtgcccctcttacccaaggaatttataacatgactctggctccacagtggtttctagttcttcccccacaagcgaaagagctgtttgcaactttggagttgctgtagactgaactgtagcttgtagctgttgaattaagtccaaaatctaaggaatgcgatggacttgtgcaaagggatccagaagagacactttttagttgatgtttcaagaatagggagagagaggatgggtaccatggaataccaaagtgaaggactttgtgtcattcagtaaaattttcttttttcatatcctaagtagctcccattccctcaccttttcaatcagaattaacaaattcaagccttcagtaaagtagggatgcttttaacttttattattaattattttgagatcttaaaaaaatagtagttctcccttattatttttgtgggcattgaaaagctcatttcacagtaccagagatttttactgggagtatatattttggaggtaggcatagagggagccctaccccttccacaaattacgttactcaagagacagctaaaataaaatgcattatctccccagaccagagacagtggccaaaataaaaaatcatggggctggaaatttcccaaatcaaaccagcctcctggtgcttgaaggtttcattcactattacctgcacaggatgtaaagaaaagtcacagtaggcactctttaccagggaaataaggcagtatttgaatcacaagatatattttttatctgcaaccatggatccaatgatctgtagagctttttcactcattaactgtcaggatatgaaggactgacagtctgtaaagatatttatatttttgtatagttgttttcatagatttctcaaaggctgaagttttcaacctagaagatgagatttgtattgagtatagaaatgatgtttcctatctagtttgtaaataatcatggtgcacttgaggggtctcttggaaactcctagggggtcaagaatcactattctgaaactgtatagactgggatttagctgctgcattttgcctttcttaaataattatattttggaatgtaacccctgttctgtcttcattgacaggatttgcttgtgttgttaaaacactaacacaagagcttccagtgcctgggccgtgcctaggtgatgctatttcttctatatctcctgtcttctttatcccaaatcccactcagcatatcttcagacctaggttgtaagaccaactttggattggatctagccagtgaattattatttccatggttggttccctttctgttaactctggtaatcaacagattgaaaacggtggaagaacttctgaaaattgcagtgggagcaaattcttgttggttttgtgctgcttgcctttctagatctgctcatcagcacttaaccttccctcctctaaaggttactaaagaagcctgaagtaggtaaagagtgctcctcagcttcttatccttccactctttacccagcagatttcattcaatgccttagccaaggagtccagcacctgtctcccctgctaataattgtccttagagatgctagtactttaatccaggtatagcagtttcccgttattttcttgcttgtcgttcccctacatttcctcctgatttcccaagactctctttgtggcttttgagggtcagccaaggagcaggcaagtgagtgaacaatcctcaggaaaagaaggaccattttagcttaacacttccttttttttttttttttttttaagaagaatataggtaaacaggtaatgattcttgattggagataccatttgactcttgatgagagttgtacgaagatggaaatgagggatgattccaggcgttttagggggaaggctgcagataccattctaacccccaagatactgtgttctcaagacctcttagaactaggtgttgtcagggataatttgaggagggcttagtcttcagaacaatcctgcagtcttgacagaaatctaaaatctccaaaaactcctaccctttaaccttaccctagggggaactgatctatgaatattacatgtgtgattatgaaaggtgaagttgagtgagaggagttgaggaacgtggaagacagtgagctctcaccctaacactataagaagcatgatctcaatagaccaataattcacctttttatacatctgtaaataaatggaatgtttttaagaatataattatgtcagatttagcattttcttttatatattaaatatatatatctttccttttctgctttcgaaaagtgactatttttttagaaatctaagaacagaagtttggtgattgaaaggtagaatatataaacctgaaataaagcagttaaaacaattaaagcagaacttggtgttgggaggtttgtgccaacttggagtggagaattctaattccctaagacatatttgagagaggtgccactgaagtggttttatcataggaatcctttccttttctctaagtttctgatatgccatttgggggaggttttcgatgttctaatccttgtagcatgttttacatggaggcttcaaaattgtgtgcaacctgatggcaagtatttgttttagaagtcattctaaaatcattctggtgtcagtatgagcaaggcagttcacctgttaaccttggggagtaaaggtacacaaacacagtcttttagtggtaaaggacagtaggtgttcttaagggaagatatgttaaagagtttgacagttaacaaaaacgtttaaaggaatcctttagacatccaactactcctatctattaaggtcactaacagatcaagtccagttatataagcttcatacaaattgttcactttgtg

SEQ ID NO: 78920 - DNA, 1144 bp, Homo sapiens
cgtgccggactggctgcgagcagaaactacttcagtcgctttaaatctcaacacttgtggtcgctgggagcagagcttttaggctgtagctcagtcttgtaattctgagctaggagtttcagctacggtccctcgggcctatcagatgacaaccttaacaccctggaggcgtggttatcgtcttggggctctgggaagtgcagttccatgggggaccaggcctgataataccataaaaggcttggttctctcaattctgaagccatgttctgttgaccttcctctaaaagcggtacccgcaattgtgcggattccgtggttccctagtcccaagccgtctgcttcctgggccctttcattggctccgcccccgtaaaccttgctcgtccactctggaagcgctctcctgactacaggccgcgcccctcgcgtcggctccgcccacccagcccgcggcttggcccaggcggtagttcgcgttttgagccgatcgtgccaccatagctcctgctgctgcctctaccgctgcggctaccgcggcggagctgaaattgccgaacgcgatgcccgagggcgctgtgagcggggtggccttagctcgccgaggctggtgaggctgggcccgaacgggggcgctgacgagtagcaggggcctcagaggcgggtgaaagataaaggtccagagccgctgtggagggcggagagcgagctctggaggatagggagtgggggagggaggctcccgtggcagaacgagttgtgggctacggcgagccccgccgcgtccccgccggcgctagcgcaggtgtccaggcctgcggaaatccctggtggtctcggcggcctcctcccttggacactacagttgccatgggaacagttgggcattaacgggaaccagatcgtccacgagaccaactggggcccatcccatccatctcgccagttaaacgcctctggcgggcgtgggcctggcatttcttcgtggcttaggattttccccccctttttcgtgagcctttccttccgacgttgtaagaaactgtgcagggctagaaggtggggatgagggaaatggtgagagcaatacccagaggtaaaagctgcagacttcgctaggcagaaggtaagacactgtgatact

SEQ ID NO: 78921 - DNA, 1033 bp, Homo sapiens
gtggaggtggagatttaagttacatcaaagagtagatgagtgctgagatttttattaagctttttcagagggaggggagtctcttcagtggagtacattggaaaagactgatttaaagttttatgctaaatcagcttagtcttggtgaagtgtgacttgaagttatcagtaaatacccaagttcaaatcctgtagacttgtcatttcctgcctctcatctctaagttgggctgtgttttccttaagaagcaaatgtatgtgttcttgatagctaaccctcctcctctgaaagtttctgaaagatttttatgtggagggagctgggcttgttttcaaggacaaaggatagaaatggaccaaagcccagcaggcaagatttaagttagggttacaaaaggattgtctgtgctggagggttgctagatttttaaaaagtaactgaaggaggtattgagatcgtcctcctccttaagagccattaatctgatctaggttatattattccttctggaaacaatgggtaagatgactttcttctagttgtgtttttttaattgtaaatctaattcttctttctctatttgtttccccaagtttttttcctgtatagttgtgtggtggtacttcgagccttttgagaagtgactctaagaagagtttggttgggtgggtttcatgaaggagaaaaagtggcaatactctaatttcagcttttgctcagtgtttgaacgcatatatgatttggtattggggaaacatactcatttttttcgagacggagtcttgctctgttgcccaggctggagtacagtggcgtgatctcggctcactgcaaactctgcctcccgggttcaagcgattctcctgcctcagcctcctgagtagctgggattacaggcgcgtgccaccacgccgggctaatttttttatttttagtagaaacggtgtttcaccatgttggtcaggctggtctcaaactcctgacctcgtgatctgcctgcctcagcctcccaaagtgctgggattacaggta

SEQ ID NO: 78922 - DNA, 1036 bp, Homo sapiens
aaaaaaaaaaaaaaaaaaaaagaaaaggaaaaaaacagtggagcccttctgagctctttctacccagctccctctgccgggtgactggaagtcctgggtggcctggagggctcctgggggagctgtggtttgctgctgagcctgttgtctgctcatctcctcaggtgtgtggttgtgttgttcaatccccggaaacacaaacagcaccacatcctcaacagttccaggtaaatgggctggggtcctcaggatacctcttccttctgggagctatgagaagggcactgtctagagtctctatggctctgggggctgggacctggttgggtcctaaagccagatggggaagtgccacatgtgccattggtgtctgctggtctcaccttttgagaggctgggagggggctaggcttaggccaggctgccagtgcccctctgagcctgccccatctcttgcaggaaaaccatcactgcccttgccttctcccctgatggcaagtacttggtcactggagaggtgagtgaggaagagggctggcagtactgtaaagagggcaggtgtcctggcctccgcagagagctgcggtcctaggcctgctgtcactttggcttctgaaacagacaccaaatcctggttttcgctataccttaaaatagtggttctcaagctttagtgtacatcagaatcacttggagggcttgtgaaagcacacatcactagcctggtcctcagagtttctgattctgtaggtctgggatgggagtctgaaatgtgcatttgtaacaagttcccagagagtgctgatcctgctggtgaaggaagcgtgctttggaaaccactgccttaactattccttacccccgggggccccctgctgggctcaggaggaacgcttctgtcctggcggcgtagtcttactaggggcagaaatagacctgagtggtagtggctctcaatgccggctgcccatcagaaccattcagggagctttgaacaacctgaagtacagacggccacccagagatgctgactaaa

SEQ ID NO: 78923 - DNA, 1029 bp, Homo sapiens
ggcggcaagcagcaaggaccatcctctccccaaagggcttctggacccaaccggtgagaacagaatgtgggcaagtgatgggtgggtgtgcagatggcttgctgggacctcactgcacttcctccatgctttgggcctgccattcagcaactctgtctcccaagaccttacctctcacacaaggatccatgatgtcagcctcttccccctgttgagtctcctctccccctattgagtctcatcttcccctcattgagtctcctcttccttcttcccccactgagcctcctctccccctattgagtctcctctccccatgcccttccttgtctcggactcaggcaccaggccccatcaatgctgtctcctggaccggctctctcatcagacagtgacaaggagggagaagatgaggggactgaagaagaacttccagcactgcccgtccttgccaagagtaccaagaaggcactgggtctgtggcagttgggtgtgggggcagacaggccctagttggtataatggctagatatggtttttctgagactgtggggtgagagcagtgtgagctgaggaaactgaggcatcactgtggccacacagggtatgggctgatggggccagggctccagggttgggtggcggggggggggcaggagacacttcctctgactgcctgtttctgtctagcctcggtccccagcccagctttgccccgaagcctgtcccactgggagatgagtcgggtgagtcgccattgttaaaatgttcttccaaggttagaggaggcaaagggagctgtgagaacagggctctctgggcctggtagggtactggggcatggggtctgcccacatgctgcactcgtgtgtccaaggaaggccttgtcggggaagttgaagcagctgggctggtcctgggtgcgggggtgaagaaagcccaggtatttccttcctgtggaccagttggggtggatggagcacagggttagtcagcactggggaggtggggcacttgttcagctgcctg

SEQ ID NO: 78924 - DNA, 1054 bp, Homo sapiens
ccccagagtctgcctgcatcccatgttccctggccatacatgctgatcttggcgggtagagttcccagctagtcccttctgaggcaggctggacccaggtggggcccctcccttttatatgtctgttgacaggctcctccacctcacttctgggggtgctatttcaggtggctggctgcaagatgccctcagcagagcaaagtcggattgcccagctcctcagagacaccttctcttcagtgcgacaggagctggaagctgtggctggggcagtgctgtccagcccaggcagcagccctggggctgtgggagccgagcagacacaggccctgctggagcaatactcagaactgttgcttcgagccgtggaacggcgtatggaacgcaaactctgagttctggaagcctgtcccaagtgaatgaatgctccagcgattccaaactgcagcccctctgcccctcaccaaaacctgcggggctgcttggagtggaaagcagggagcagtgttcagaggcaaagcagccttcccagccgctcctcgtggggggcctgtatttattaatttatttccctgactgttgcctcacttccttggaactcctgcctccacagcccctccagtggcagggacaggtcttgggtctttgtcatcttggtgctgtgagaggtaggagggcagcctgccccatctaggaatctgggaagggctggccctctcttagaagccatttgaaattactgcagggattagctccctgtggtggagcatacacagggtactctggggtcgaggtgagaggtgatgtggtattcagtgcccgtcagccaactgtgggccttcacctctacctgcacttcccctctcacaccagctgcactcccgtggctgccagagcagggtggttttccccaatacctggagctcagaaaggcagagccatctggccctccagggtgtccccagccatcaggagacttgagttggtatttggacctgagcccgcacattccactcccattctccctccaagaggggcccagcattgtatttcc

SEQ ID NO: 78925 - DNA, 2782 bp, Homo sapiens
gccctgtggacggtcagggcccatgctggtgtgtgtgcgtgatgctttctgctttcatttttccgtcctcatctttctattactggttgtccagggtcctttggtcaccaacgagcatttcccagtgacacagcgcggcctttccagggagggcatctcttgggcagggactgggtgctgcagacatcagcccttccatcccctgtcttcttctttctctcagagctctgcgtgcctcttgctgtgccctacctggacaaacccccaactccgctccacttctaccgggactgggtctgccccaacaggccgtgcattatccgcaacgctctgcagcactggccggccctccagaagtggtccctcccctatttcaggtgggagctgccctggggtcaggtgtgagcagtgattactggcatctgggcatgggctgagtgtccattcctctagagccacagtgggctccacagaggtgagtgtggccgtgaccccagatggttacgcggatgccgtgagaggggatcgcttcatgatgccagctgagcgccgcctgcccctgagcttcgtgctggatgtgctggagggccgggcccagcaccctggagtcctctatgtgcagaagcagtgctccaacctgcccagcgagctgccccagctgctgcctgatctggaatcccatgtgccctgggcctccgaagccctgggtgagtggaggtggggtggtcgtggccctggacagggaagatatgggaaggaggggggtcagcctgtttgcccttaggtgatgacctggcctatgggcttggtcctgtcagcatctggtgcagctcactaaatacattcccaggccttgacttaatcatagatgaattgccaaagattgttgtccttccttctgccccagggagggaggaccccttccccaagatttcccaacctctgcctcttctccctgacccctttcttgggattcttctgtgctcacccaggttttggctctggcatcactggatggcagctttccccagcctggccttcctaacttgctctctgccttctgccctgcaggaaagatgcccgatgctgtgaacttctggctgggggaggcggctgcagtgacttcttgtaggtgtaaggggaatacaaaggtggggaaggagcaggttggggcagagggagggaagacgaggccaggagtggagggatggccctgggtggaggttgggctgttctctaagatttcttttggcttctaggactcgggcaccacagagggtttcccctgacagctgaggtcggggaatggacccatggcattgggggcgggtgcattgtttcttctagacccaaagaaacctccctgaaggcccgctgggccagggggtaagtgtaggagaacttcccctcttgttgaagaggagtccagggcctggtgagcatcaggtccctggtaggcagagttccagaatgcccatcagagcccctggcatctccagcccactggctctgtgcgtgcttctcttttgtcataggacgtcttggggtgcagggctctcagcatgatggtttgcctcctcccgtgcccctgccctccataccctgcccccgggccttctttctgttggcagtgcacaaggaccactatgagaacctctactgcgtggtctcaggagagaagcatttcctgttccatccgcccagcgaccggcccttcatcccctatggtaggggatgtggcctgcagggaggggctggggaacagctggcccaagggggagggaggcagcaagagcctgggaggccagttcccaggcctgaggtgtggctgtggcatccccagtgcaccagggcccctgatccccttgcccctgcccagggctggctggggtggaggagggtctggcaagttccaggctgtttgcaattcccccacacccttctcccttgggctccagagctgtacacgccggcaacctaccagctaactgaagagggcacctttaaggtggtggatgaagaggccatggagaaggtgtctgtcctgttcttgggctctagggagggagaagggcagaagcctggctctgaagaacaggcacaaaagatctggggaggtggcaccttgctctgaaaagtctctaagtctgaggcctttcactgctgagccaagcagggcctgtggtgttgacctttggaagggacagagcctgaagtcctggggggtctggggggctgctccctggcatctgatgtgttcccaggtgccctggatcccactggaccccttggcgccagacctagcacggtaccctagttacagtcaggcccaggcccttcgctgcacggtgcgggccggtgagatgctctatctgccggctctgtggttccaccacgtccagcagtcccagggctgcatcgcaggtgaagagttgcccaggccgcctggggagaggccctgtcaaggtccagcagggcctctggggggaggcttgggaggctctaggtcagaagagggatcttcatgctcagatccccgttcttcccacagtgaatttctggtatgacatggaatacgacctcaagtatagttacttccagctgctcgactccctcaccaaggcttcaggccttgactgatggagcactggtgaacaccaccaagcacgcctcgggggacggagccagcccctccctggccaggtcaattctcgagagagcctggagtgtgcatgctggctgctggccccgggtccagcatggcttgagatcagctttggag

SEQ ID NO: 78926 - DNA, 1367 bp, Homo sapiens
atgccctggaggcagaagaaccccctgcccctgagtgccaacccacaggcctcatccctggccactcagcacctagctttgaagggctgttttatgtgacagccactcccctgcctgtcgtgagggggcccgggtgttcatctcagattgatggatccctgccatcaagactgggcattcctgtccaacaggtgccagagttgcgaaaggcctgtgacagggaactccactcttcccttggctgctgttctgggactcacccctgctttccttctgctcagcccctggcagcaagctctccaggctgggattgcagggctgggtggggcaggcccagctggtaaaggctggcgagtgccacagaggtatcaggagctctagtataggcttagggtgcctcatttcctggacaggtggctggttcaggagtgggtgtggagcttaggtggagcagaggcggcgggtaggagggacttgggaccaattgggacatcacatccctggctctgggttagaaagctgacagtccttgatcctgtggccactgccccatcattcctgctcctgaggactcagtctcatggctgtggtaaggcctggcagggccctgggtccctactgggacccctggtctctacctggggcctagttaatatgtttcttatgggagctgtggtcttctccaggggtagggaggggagtttattgaccacaagaccagggtagcgggcagaagccaggggaggaggaggcttggggatgagggatccgtcctgagtgttttctgtcctgggaacgggctcctggcagagctccctggcaccacagatttgggccctggagactcagaggctcccagctgccgccctgaggccctggaagcaagtggctcctccatgctcctctgactcagttgcctggagtgtgagggccctgggctgaccctggtggatgaggccctccagcactgccctggacctggttgctccctggacttgacctgttagggtccttgtggaggcaggtggaaggccgaaaggaagcagttggcacaggcttccctggtcccggtgcgcctgccaggctgcattcccagaaccaggggcatgggtttggagggagctaccgggggaccatcttcagcctgacctggcaggacctggaggacatgacagcctgtgaggggtctgagctaggagccgcctcccctgcccaggagagagcccatttccaggatgctcttctgaccagggtggagggagggtacgagagcagctcagcctggggcccaaggccctgatgtgctacttcccctccctcgatagcttatgtcccctgccacccaagaccagccggaaagctgctta

SEQ ID NO: 78927 - DNA, 1216 bp, Homo sapiens
gaagcccaggccacaaggcctgggcctcctggtcctcagctgccctaaagcaaaaccctgggtcggggtgggggtgtgggtgcctaagggctctgcaccatgaggctgaggcgtggactcctcacagagtggtgcgagttctctccctacgaggtcggcttccccaagtacggggccttcatcccctctgagctctttggctccgagttctttatggggcagctgatgaagaggcttcctgagtcccgcatctgcttcttagaaggtgaggggcactggcaggctggggaagctgggccgagcagggaaaatgggtcctgggtgagagggcagcctcggtcagaagagtttcctgggccaggactggccatggggaagggtaggattgggacaagagtcgggggccctcttccctcacggccgctctttcaggtatctggagcaacctgtatgcagccaacctccaggacagcttatactgggcctcagagcccagccagttctgggaccgctgggtcaggaaccaggccaacctgggtaagtgctccgggcccttcataagggtgccaaggggcagccagctggggctgcaccagggggcggggggttcacacctcttccccctccagggtcaccaccaaggtggggataaaggtgcaggagtccccatttcccccaccttgcctgtgtagacaaggagcaggtcccccttctgaagatagaagaaccaccctcaacagccggcaggatagctgagtttttcaccgatcttctgacgtggcgtccactggcccaggccacacataatttcctgcgtggcctccatttccacaaagactactttcagcatcctcacttctccacatggaaaggtacctgcttctctccaaagtcctcctgtggccacctgagccttgagtccccagtccagatacccctcacagtccactcccattctcctgctttgagcttgattccctggactacttggaacaggggtctttttctccttgtcttggggacccagggcccacctgcagggctgtgggggtgttggttcagcaggagagcagggaccagaggccagagtctctccttccagcaggaatctggtacccttggtatctgtgacaattgctgctctccccaaccttccagctaccactctggatgggctccccaaccagctgacaccctcggagccccacctgtgcct

SEQ ID NO: 78928 - DNA, 1071 bp, Homo sapiens
ggtggtgacattcaaagttgtctgaggactagaaggttagagaagcacccagatcagacagaacagagcctggaaagcccttggaggaacacagtccatgaggattctggcaggaagggcttggggcagtctgagtggcagactccaaaaggggcagaacaggaccaggacacagctgggggttcaaaactggccccatctctgctaattagctgtgtgatcttgggcaagttgcgtaacctctccaggacctaaattctttgaggaaaaacagtaagtcccacttcttggaggttagagatgctaactgtgaaacctccctaggatgcataaaacactaggggcccaggagcttggggcccagggagtcggccgccctccccgcatccttcccctgaagcccacctgcagtgctgcccagggctcgccaccagctctcagcctgctcttcggacggtgctgcaaacaggatctctgccccactggtcagcctggcacccacagtcacaggtcaaactccactgtccctttggggacccccacgcctccagcccccgctgagccaggtggctgctgggggtgatgccggagtccatgtctctccgctcaccttaaggagaatgtgtgtttcctgccgtggcggccccgcagcctctcacaccgggctcccgtgaggtcaaggagggctatggaagctactttctgaggagagatgagaggcaggggtcactgcggccatctcagcttttccctgtggggtccctctgtcctggggcccctctgccttgcttcccagcaccctgatgtctgcatctcccctaccccgcctggtacctccgctgccatcctctcatccaggaacaggctcagagagctgccctgcaagttcccgcggcagctgtcccaggagctcgagctaggctgtggagaggaggcgggaaggtcgcatgagccacacgcaggaagccagagctagggcctgtccacgcctcaccatgtgtgtggagcttcccaggaaaagcggtggattggaccaaagtcccaatggggaaagggaagccacagaggggc

SEQ ID NO: 78929 - DNA, 1071 bp, Homo sapiens; identical to SEQ ID NO: 78928

SEQ ID NO: 78930 - DNA, 2929 bp, Homo sapiens
gtgcaatgccaagatgtttgaaaagaggaacagggcagggcgaggggtggggtcttcaggtcagaagttgctttctagccctttatgaccccagttgtcatcccgttggtttaacatttctctttagaaaactgtagcctgaagaaacattacctttgcccttctgaaccacagaatgacaagatgcattgtcacggtcaaagccttgcttataaatgtttgacctcatcacatttgggtggagtctgttggcattttgcctcaagaaaattcagtgcaagtaatgtttgccacgccaactccgtctgatttatagacatattgtatgagactttctagcctgacttatacacaaagcccacttgaaaaatgaggaatggacaatttccatgtgcgtgacacgggattcctggatctgttcatcctaatatataataatatcagaaggttagatggggtgacttcttaagcatccttggaagtcatacattccacaacccttcctcagatagtttctttcagtatagagttgtttggaattggatgacaataagttaaactttggggcaactaattacacctatagaaacattcaaggaccttcaaattggcccaaatgctatatagcacatgaatccagtagaagggatgtaataaaatgaaacttactgtttgataattgtgtcatttagagttgttcattcagtattcctgtagccatctgaagggtctactgtagccatctgaagggtcatcttaggctggcactgtaactagttcgtgtctgtactatacagacgctgagctaaatcgattttcctgggaatctggctttttatttcaaagaagcttactgtttggaaccaccctatatagctaaaatttaagatctagaaagaatcctttttgatcatctgactcacaggtatagaaactgaggcccagcagaatgaaattgttaagccaggctccaggacttacaggattttcttggtaggtttttttaccaacttccctctccagcaaagagcctaaaatgactgataataccatgttgctgtctttctccagggctcagccttctttaaatgggcctgcttcttcatctggtatttaatctgagatggaaagtgagatgcgaaacccaattttccctttcacttggtcacatgcccagaagcagcagcgttcagtgggccgagtactggcgtggaaccttcctctgttcccatgtctgtggcgtggcacgaacctgtgatgtggggctctcccgcccttgccctggaggggccttcagggacatgtggctcacccatctgttattgtcacatatcccccagaggaaggagggacaggctgtgaggttagcttgtttattttatgaggaaacaggcacagaaaaattaatttacagagtcttggacaaaatcccaaaggaaggaggagtgggaagagcagagagcggataaacagcacaacgccatccctggacacgcctagttcttgcttttatttaaattttggtaggttctgtggccacacccactttaggctaggtactgggagacaacctctggggttttctggtaaccagttacattctccaagaggtggccattaccagctgaaaggttcgaggtgaactcacatccagcctctccaaaaggagcttgggaacctgtgttccctccgggcagtctcccagaccgggtttggtatcagcccctccctgccactgccctgcatctggtcagctggggaaaagggggcagggaggagagaaggccagtggagcagagccattcattctgtggcttattttgtcatcagcaggtcccattgctcccgctgattggggactgcctcttcctcgggggtgtagttgctgagatactgcttccccctcagggtggtgctcggcacacccaccatagcctctggcagggaaatgctggaatccagaccttcaccagaagcaccattgtagaagaaaaagaacaacctcctcaataataatgcaagtgggccaataatttttacaatatgcatatttgttttcttgatataaaaataatatatattcattgtagaacacttaggaaaccacaaatcaaaaaggagaaaataaagtacactcacctctgattctaccatcctggtacacatatggtgcagcgcagcgggtgaaagcacaggctctaggatccgagtccctgggtttgaatccgggctcccctgagaaacagctgtgtgccttgggtcggatacttaacctctctgagtcttttttcctcccctgtaaaatgggggtaataaaagtacctacttcatgggattgttgcaaggattacaagattgtagtgatatggagctcacagggcagtgcaggaatgtagtaagagctaagtaaatatttgctgcagttgttgatttatagctatcattttgctctctgccacaatgacattttcagaagacattttcagaagcagacttttctagttgcgaagtaaactcagccaggaaacaatgcagagactccttgccctgaagtggctgttattattaactaaagggactcttttcgaagtgtatttataatacctgagcgatcccagatagttgatgtttactttgagatgatttacacttcccctagttagtaacaacccttttttagaaacgcataccactatttaagcaactaaacttgccagattgctaaaaatcagttacatttcttgttcaagtgaattcacttgattaaaccaattttactgtattttactgtgataagaacacttaacgaaatctaccctctttacgcatttttaagtatccattacaagcacaatgtggctataggcacagtgtggttccgcaaatctctagaacttattcatcttgcctaactgaaattttatgctgg

SEQ ID NO: 78931 - DNA, 1047 bp, Homo sapiens
caaaagaatcgacagagctaggaaatggggcctggacatccaagctgtgactaagaggggtgcagaaaaaaatgaaaaaggcaccagcagaccacaatcagggaagtacaaatgcatccacttttgaactttgaagacaaaagaccggattttgaagcttgctcgggaaaggagagagaacacttagagatgtccagataagaatgacttcccctctcaggctttggtaacaagaaggatttgagaggaaaacacacacatatgcaaaaaagaaatgagtcttttttcctaaaagaccaagaaccctcagttcccttccattgctctatgtgtctatccttctgaaaggctgttgatcagagcctggctggagagatgggtgagctctctagccagccaaggcagggcgctgtaggccagcgtgcagacaaactgagacgaagacatgacactcttaccacagcctctgcctagcaccgagtcgagggagagagaactgtggctgcccttcctgttgatatctcttctagacaacagaaagagtgtatgaaagaacagagagagatatgtgagctcagggcccttggaggaacggaagctgtgcatgtggctggaacatgggtccatggcaggtgggcgcatgtggcaggagactcgaatttgtcctgaaggccacatggaatactgaggggtaggaggtatgggaggacgtggtggagaattctgtagaatagaacatgcagccacaggcgtggatcatgaagccatttttttatttagagtttgcattcagtgacctgactctgagctttgtctggatttggcagtgacagaaaagtgtccatccctggaggctggggcccagccctgatgatttgttggcagatcctgttttccagccagggctaaggccagtctgaggttgggttgtgaggtcctggacatcactagccacttgggcctctagcaggaaatcctgatttctttttgtttcggggaagttttgacaaacgcatccagactccttttccgctggtgccacgggaa

SEQ ID NO: 78932 - DNA, 1017 bp, Homo sapiens
ttttttttttttttttttttgagacggagtcttgctgtgtcaccaaagctggagtgcaatggagtgctcactgcagcctctgcctcgcaggatcaagtgattctcctgcctcagcctcctgagtagctgggactacaggtgcctgccaccatgcctggctaatttttgtatttttagaagtgacggggtttcaccatattgattcttgagggctttccttaacatttccttaacattgtctaggaagacttaaagatgtttgtatataaatgttaaaatgataatcagtatggtaaccatattggccaaactggtctcaaactcctgacctcaggtgtgatccacccgcctcggcctcccaaagtgctgggattacaggtgtgagccaccatgcctggccattggcagaaaatctttagggacaacagactaggttagtttagttactaacctgtagctttcctggctgacgtgaagtgttgaattcccatcaagcaaggataaaagtgttctgatatatttataataataatattctgatcaagtaatagcttcctaaaagtcctacaaacttttcttgatttcttttcttgtattttagtagccaatgaaagaatgtttggattcctgcggttttctaaattgctttcttgaagtgtgtgggtaaatctgagttggttcactcttcagaacatcctttgtccttggtgatagcagccaggtgtttgactctgcgatgagaagaaagagcacctttatccacacgcatagcattttccttcccactcgacctcttatcatgctggccgctgaaatactgtttcctagaatactattgagtccatgctgaacctaaacataatctaggatatatttctagagttagcatgaacacaagtgtgttcccagctacttagtacaaacctccggattctgactccaatcataacatcctttgaaaaattataatgtagcaactggtattcttatcaatctatttagcatttggcattttca

SEQ ID NO: 78933 - DNA, 1037 bp, Homo sapiens
tggaaatagtcacagattgtgggcttacattagaatcagtcaaaactttttagaaacaaagaagtagtttaggaccaaatagattgttagttgcaggaatggggagctgcagaaggctgtgcaggttttttcccttgagccccttcaaggcttataagacgaagatcatcctcctggcatggttgggacatgagtctgccctcatcagctcagacaccttgcagggcccataaacaagtaattgtagtacacatgctgagcaccacgctggcagcaggcacagggtgcccagggaccacaaaagaggtgtccccacatgcaggtcagggaggctcccctaagggagctgagcctgagcagagcttccaggatgcccaggagccagcacggtacacttcccttggggtagcgtctgttgcatcaacagaaatgcagaggaggattgcgtgcttttcttgggggttatgtttctacgtttttaaatgattatgtaaaaaaattggtaatcccaggcagctttctggcctcttactttgtgataagatgctaagctttctcttcttcttccctctcccagatacctactggagcaggatttcccaggcatgaggattggtccggagcccaccacagactccttcatcgccgtgatgtatggagagactgagggcagcaccccagggaatgctttagtcgtggaccccaaaaagccgtttagaaagctcagtcgctttggaaacgctttcctgaatcggtaaggaccagcaagctgccatcttcggtcaggctgtttaaaccttttctttgaattactgccagttacatataaaggttcaaaaacagaagaacaaagaatctctgctctagaagtcatacaaaatatgtttatcatattaagatatttgaaagactatcataggaaataatcatttatgcctattctgggtaacttgagagggcagagctaaggcccagaactggacattataaggctgcacagggccaggtgtgtggctcgtgcttgtaatccagcactt

SEQ ID NO: 78934 - DNA, 1033 bp, Homo sapiens
aactttttaacccacctggaagtaaaatctgtctcaattatattgttgtgggtttttttttttttgtcttttgtcattttctaacactattattaaatctacctttttctgctgtcacatgaggcttcctcatacgctaagttattaaatactatattgagtctgttaggacctttgtctcgtgttattctgtttgtaaattcttatgccaacaccataccatcttaaatattgtcactttgaaatactttttaataattttagctcaagactcttctgcgtgcattactctttatttttcaaatgctatcaattctcattttctgtcattctttgagaagaactttcttagttaggttcttcaaaacaaacaaaaaaaaatcccactgggatccatttgtcctggaactgcattctgtctctaagttacatttttgtatttgctcttcccaagcagcagctcaccattgctttaacgcagaccttcttggaaaagtgattgatttactcatacaggtcctatggagctcttattaatgtattaggtattttatgccctgttgctcttatgaatgggctttttatttctcttattttttttggcagggtattgctgatatgtaaggaagctactgagttgtacatttttgttttatatctggtcatttgactcaagaagttattctgacagcttgtcagtagattctcttaggttttctagatagataactgtatcagttaccttcatgattactttgtctccccttctgttccatatttcataataccaggaagtaggcattcatatcaagcttctaatcttaatggtattgcctatgttatttcaccttaagagattatgtcagctggtggcttcttatctataaattaattgcattaagaaattatctattactagttttaaaaggatttcatttaaatgattctatttggagaaaaaaacaaaatggatatggagtttgttagatgccttttagccttttcctttaacctatgttctgtggaatgcagt

SEQ ID NO: 78935 - DNA, 1042 bp, Homo sapiens
ttcttcagatatatgatgactctaagttgagttcacatctcccatgggataattatcctttgagcatcctgagttgtgacagcctcagcagagatcccttacaacaaatttggcctcatcatagtggcatcagccccagtctggaggtgcttgaggcttgacagctccaccttactgcctccatgttttagggatacttatttatttttgttacgtgacgtatcttttcaagaagggctttatacttattatttttaaaataccttttctatcatacatgtgagtttggtaagggaggagaattttgatgtgggttcagtctgccatcttgaaatcagaatttgagcttcctttggattgtggagctgctgggttggttctgggacatacctgtgtttctagtaattacaaggtcaacaatcacatcccgttgggaacctccagaaccaccttatgtccactagatgtatttaagaggcagcctcaacccacatcccccaggatccttggaacaagaggcctcagagattagtccatgtcacctgagaacactgacctcagagttcagccagatgacaaggtagctgctttgggaccatccatgagaacttactaggggctgatgagtcaaaggatagagttcatataccccaccaattatcagaacccctacaagctttgccacatcactccctggagtgttagatgttcgattccctaatctggattttctagcaccaaaggggctgtcttcagtgcccaggggcccagtgctgaccacattctatatcctggcaggggtcttgcttgctctttcccatccatccttcccctcaggtgaaactaaatccttccatacttcacaggtctctaccaagcttgtaaaagaggcaaaattctctagcaggaaagtgagaacagaaggccaagaaggcttcagggagttggaaaggagggaatagacacttgccttccttaattcgtttccctacaaatgtctgtcacatctgagcagggacttctgggctgtctcccatccccc

SEQ ID NO: 78936 - DNA, 1077 bp, Homo sapiens
ttattttctttcttcaccctctagctttgggagcactgaccctggtctctttgggagttgtggccagggaccccatgaaggtccctggccacagctcctggggtaccaagccatgaaactgaagtggagttgggagcgacggtcgcatcctcctagaggggcatctatgagccatgacctctataagctgaagagatagagctttcccaaattatggcgggctagtcctacagtcatgtgggtccagtgtcctcttcttgccacccactgtgcccttgaaggcctggtcattctgagtggctgggggctacagactgctgaccccaaagaccagagccctgcgggtccctgtatttctatgacctgaagacctgtgatttctttgatatgaagagatctaggcccatgcaccctatctgtctacccactcaaaccactcccagagcaatcccagctactgccaagctgtggccaggaaggtggagctctgagtcagagtataagttcctgatcttgccacccagctggagagctgccgtgatgctcctgaggcagatgcacgccagggtctcccactccctgccagacccatgccaagcagaagacagcaggccctcggccacctgtgccttgaaggtgagggaggggtgctcagtggctggggccagaggctgagggccagggaggcatggccaggaagtgaggggcaggggcagggagctgagagcaggagacgggcctcagggagggctggtaggcattggacatcccaaggacctgggctcaggcagcctcatcttaaaacctgggggaggtggtttatcccagttggggccagggctcctgcttgggtggccctgctgagagtaccctcaagattttcaaggcatcatgaagtggcgtggggccatcctggggccaggctagcacccaagatagagagtatgccagggggatccacatttggcctgccctaatggcaagcaggatttaaccctgcaaacatcctaagcttctatgctgtgcaagagtatggtgtagtgtatggtgagaattggtggcattgtcaatctgttg

SEQ ID NO: 78937 - DNA, 1617 bp, Homo sapiens
tataaagtatggccttttagggtcatgattatttggaccctaatctagtatggaatgaagggtgacctctgaacacagggcagactgggtccaaatgcagggccagaaccaagttggtggtatctgtgggacctcttcatgtgcctggccctccagagagcagaggggccttacctgggtgttttccagatttgttctttcacaaagcctccttctttctgcccaatttctaccacccctgtgttccactctctacccccagtatctcttcccacacaactcactgcacagacaccagaccacctgcatacataagcgtgccctgctttctggcctccctgcctgtgttcatgctgtttcttcctcctaggatgcctctctcttcctcctagtggtgcctaggctcactagctgttgaaatcccattcctcgtctaaagcccaattcagatgccacctcctctgtaaggccttttcagatccattctttccctctccagctggaatccattttccatcttctgtgttccctagccagttcttagttgtgtggcagagctctgtaaaccaggggcccccaaccccctggccacagaccagtaccagtccgtggcctgtttggaaccaggccacacagcaggtggtgaacagtgggcgagtgagtgaagcttcatctgtatttagagccactccccatcacttgtattaccacctgaaacccacctcctgtcagatcagcagtggcattagattctcataggagcacaaaccctattgttaactgtatactcgagggatctaggttgcacattccttatgaaaatctaatgcctgatgatctgtcactctctcccataacccccagatggaaccatctagttgcaggaaaacaagctcagggttcccactgattctacattatggtgaattgtataattatttcattatatatgacaatatgataataatagaaataaagtgcacaataaatgtaaggcacttgtatcatcccaaaaccatctcccgcccacccgcggaaaaattaacctcggtgaaaccagtccctggcactaaaaaaggatggggactactgctgtaaaccatggatcttcacaaatgtgaaggaaggattgttatcgatccttctaagatgccccctctcaccacagggaaacttggatccctgagcctctgaggggttggatgcatctggctctccagccagactgtcagcaacttcaagcttaggatttcctctctcagtaggatgtatacagcagatgcttactaggtacatgaactaaattgaatttgtggagtttactgagggatgtggtgctgagtccccatccttggcagaggaggggagggcagggcaaggaaggaagccaggagagcagcaggctaaggcccctccactttctggaaggccaggcacgtgaagagttcccacaggtacctccaaccaggttccatccctgcattcaggcccagtctgtcccatgttcagatctcatcctcaatttcaaaaaagcacttctatctatggtccagaaaagccggttgtggggccccaggcaatagctcaggcaggaaactcccagtgtacagagtcagg

SEQ ID NO: 78938 - DNA, 1098 bp, Homo sapiens
ctcagaaagcacaagctctgcagctgcttgttcatgccttttcatcccccggcactgccgtggagtgccggtgctgcctgggtggctggctgctggcctgggaacctaacagctccctactatctcttgcatctcatgagaggcagaggcctccgcccactccaggggccccaccccaccccatcctcccggtttcacactcttggcccccagctcatgcccttccctctcagcagggcttgccctactctgtgccacccacgtggagtgaggcaagctcattcctacttctttccccagttctgctacctcccatcgtagagggtctcccttccccagctgccacctttccaaaccttgcccctaactcaaggctcagccccctgagactccccaccggcctccacgtgggatcttgacagcctccccttcaagaccagccctgtgtaccttcacctgctgggtcactggagcccactggatgccctcatatctaatctatcctgccgggtcactgaagcccactggatgccctcatatctaatctatcaccatgccgtgtaggttctgctcagaaatacctctcgagtccaccactgcttccatctctgccccctacccgggcccaagtgaccatttgcttcccatctgagccactacaacacatcttcctgtccctgtcctgcccaattctgtccccacccagcagccagatgatctcattcacatcacttcctttcttttttttttattatactttaagttttagggtacatgtgcacaacatgcaggtttgttacatatgtatacacgtgccacgttggtgtgctgcactcattaactcatcatttagcattaggtatatctcctaatgctatccctcccccctccccccatcccacaacaggccccagtgtgtgatgttccccaccctgtgtccaagtgttctcattgttcagttctcacctgtgagtgagaacatgcggtgtttggttttttgtccttgcttaatacccttcggtggcatccagtttcttaagataaaatcccaaatcttgaccatggcttccaaggcctctctgacctcatcactccttc

SEQ ID NO: 78939 - DNA, 1088 bp, Homo sapiens
aggctgctgccctcatggatgaattcatgtcgttttcatgggagtcactgagagtgggattgttataaaagtgagttctgcaccctgttgctctctcttgtgctctcttgcccttctgccctccaccatggaatgacacagcaagaaggcccttgccagatgtggaccccttgaccttagacttcccagcctctggagctataagaaataatctctgttcttggtcaggtgctgtgggtcacacccattatcccagcattttgagaggccaagacaggatcatcacttgaggtcaggagttcagcctggtcaacatagtgacaccccacctctacctgccaaaaacatattttaaagaaatagatttctgttctttataaattacccagtctcagatattctgttatagtagcataaaatggactgagacactcaccagtcttcaaatagctcctcatctgccctccattttggtccttgaaggattccctccaggaccacccctatggatcaggccttcctcttttctggggccagttggaggctcccattactgagtagcatattgtcatccagtaaccctaaagcaaatatcagcttatcagattacctttgaatcaccgcatctcctgccctgtggaggagttaccatctcctgccctgtgttcttagataacttctcatgtggcttgtcacactccctcaagaagacctgggaccacatccaaagcattttttcattcattgaacaaatatttactgagctcccactatgcacctagtattgttctaggagtgggagagagagcactgagcaggtcagacaagatccagctctcacgaaacttacatttcaatgtgggagacagtaaataaatatctgactatttctgatattggtgctattaggacaaaatgtgacagcgagtgacaggcagcagggaggggacatcagaagagggtgacatttgaactaagatccgaatgatgagaagattgatggcaagtattccagaaagagcacattctaagtgcaaaggccctgaggtggacacaaggttgaccttttgtagaaacagggagaaaac

SEQ ID NO: 78940 - DNA, 1036 bp, Homo sapiens
caaaggccccttccagtgctgacagcctgagcctgcaggatgagtcctgcccagggaaccctgagtgctcactctgaggcaggccctgggctaagcattttaatgtgccttataatcctcctaacaaccctgtaaagcaggcacaatcagtatcctctaattcatgagactgaggcccaaagaaaacacttgctcacgggcacacagccagtaagtagtagagccagggtcaaacccaggtcggtgacactccgcttctctcaaccacggattatatggtttcttcttatgaatagcacgtctccatctcagtccataggccttggcatgaataaaatatcactttccttattttcttgaattccctccccacacttggtcatgtcgagtctccgggcctcatctagtgcaaggaggggctgtagggcagggactcctctggacctctcatccctcagtgtctgctgtcctcgcatactttgggtctctgttgcttccatgttgtgttaggggctgggactcctgggaggctgtctgcggccccctctgcccggatgtcatgtgcagccatttctccctggggtctggcctcctccccagaaagctgctgggaagctgggcagggagctccggagcccacaagcccaccccctcactcctcccagcctgggcctcatcttccagtctgggctagccctccgccgcttctccaggacgtgcatctctctgtacccacgcatcccattcttcctcctcccgcctctacaaaccttcctctcccaacgttctacacttggaaacaaaggccagaacaacttgcagcctactggttttctcttgggccacaaacctccaacacaatgagtaaagaggctgaagtggggcaagcgggaaaccactgcctgaaaactgctcattcttatgataaacatagaatcatctcaaatcatcagccccacaggctctgggcagggcccctctccctccccgctccctgccttcccctccaggcatttgtgtgcttcccacccttccc

SEQ ID NO: 78941 - DNA, 1782 bp, Homo sapiens
gagctccttgagggctgtgtgttccctcagtcacagctgaattatcaatgtctagaacagcacctgacacatattttggaataaatgaggttctccatggagataccactgcccctcctatgtccatgacaagccacaatgccagtctccccttctagcccctggagccaagcagggctggcaggcaggaacagctctggaggcttttggagccttgaaaaaattggtgctccctccccctccatgtaggattcacaagagctgcaggtggaatttgttctggagaagaggtgagttctggtagagccaacgccctcagagactcagagatttgagtcagggcagctcctaggtgccagtcaccatgtcctgcactggccttggaggcctggcctggaggcaatggcctggtcttgacacccatctgcatgttgggcggcaggctcgccccactccaaaccctgctgtgttcctcatgctctgcccgctgcttcagtcacattatgattgtagaggccatcatgatggggccagatgtattctccatgtattcctcatcctttgcagccaggtgcctgcatctgaagtcatcaccaacggggttctggtggtgagtggggaaggcaagcttggcgctgttctgggctggggggcagtgaggaacccgtgacagggcccatcaggcccagttgcctctgaaggacacccaagccctcctcggaggggagatgtgctagggaggcacctccagagggaaaggacaagaagctgccaggcacttggtggacagcccaggacctcagcctcctactcccacacagcacgttactcacttgggcctctggctgctgagaccaccggagcagccactgtcatggcccctcaactcctccccctttcccaccagcacccacttcctctgagtctggggagaggggctaggtatgaccttgggctgctgtaaaagattcttacccgtgaggcccaggtcctgggagggctgtttcctagaccctgccccaggaactcctccctccctccatcctggatggggccatggctgtttcccagaccctgccctaggcactcctccctctctccatcctggctggggccgtgggctgtctggctcctacaggcctctgctttcctcaggctcacccctgtctgagaatccagggcacgctccggggagatgggacagccccacgggaagagtacggtgagtctgctcagcggccttgggtcttttgccttctctcccggggttggaactactgatgtcaaggaggtgggtctggggcaggaagttcttaaagttttcattgctcaaagccgactaacgatgggatggattgttcactggaggcagtgaacaacctgtccctggaagtgttcgagcaaagaggttgtatccgcccaactattgctctacaacaaacactcacatgatctcagtggcatacaagcagcatttatttggctcacacaactggcagtcagctgggctgggcttggcgggggtggcccagccctgtgccatgcgtctctcctctgcctcctgtgacaagcccattagcctgggcatgttctcaaggcatcagcagaggaacaagagagcaagcccaactgagtaagcgcttgttaagcctggtcacagcctggccactacctaacatgttattggccaaaacagggttgaactcaaagctggagggcagggtatatagttggcctctttagcgggaggagctgaagtcacatggcagaatgagaatacag

SEQ ID NO: 78942 - DNA, 1671 bp, Homo sapiens
tggccttaggaatcctggctgccaccaccacaaggctccccatttggacattactggctatcttgtgccctggaacaactctgaattaattagactcatggtctggcattgccagctttttaatgggaaaagagattagttataccttataccattatgttgtgggcaattccagagaattcagtacctgcttggtcaggaggatgtgcaccatcttgcctttgcacaccagtcacctgaacaaggaaacttgtcacaagtgtttgtaaccatggggttgttcatcaagggcttttctattaagtacatgacttcacaaggaccgctcagcatggctcactggagagttccatgagagaacagcactcaagcttctggccgcatggacccgatggctcgcattctgtgtagtgttttacgtctccatggtaactgtgccctgcacccctcggtagccgccctgttagttttcagtctccttttctttctcaccatttatcacttccctcactgccctacccaggctttctctcccacttccctgactctgggaataactaatatttaagcaaggtaagatgagaagcaaggggtctcagttctaggaatacagtgctagttgattgtcaggtatgttgtaaatagaccctctttggccatacactccatgcctagatgcctcggagagcatcattctctgcctaggcaaggccctgcatcccttgcctcaggccgggctgagtgtgactgcagctcctgaggatgggcctgccctgtctggggtatgcgtgatccctagatacatgttcccacagaggtgcctgctccgtcttcgctcaccagacactcaggcaggctggcttagtctttgtgcgtggcgattttgtgctctgggccctttctctttttccagccagtttccattcacttgccttacagcctgccctggccgtcactccccagctttgttcagcaatggtgtggttggagagttgtgctgggatagcgcaggaaggtgggtcccggcaacacgcaggggatgagtggacctggaactgacaatggcgtgctgccaagtgttcctgagaggtgtttaggcacagcagaggggacgcggggggcaagaacagcaggacgctggtttaaaaataactcaccgccaaacctgtggagcagtgtggggcatcctgccagaggtgcacaggctggagtttcaggcactgcaggctgatgacacacagggagagtggccctgcctcctgtcctccccggggtttttgcagactcgaagtctcactgcaccagtgtctttgatggtggtgagggtgggtgatggtgcccagcaccaacagttttagtggcctgtccttgacctgccgtggtcctttgtaaactatggctccatgctgtgtgacagatcaacgtgctgatggtaagtagactaggcttccccaggcatgccgtccgtgggggcctgaagagacagtgagtgccattggccccattcgcagatgtgggagactctgctcaggcctgtgaggctgggcagcccttcaccagagttcggaggagcagtgtgtggcgccacgtcccgactggccatacccacacagaagcagtgctgcccggggcctcatctgggccagcttggactctgcttcctccaggagc

SEQ ID NO: 78943 - DNA, 1028 bp, Homo sapiens
aaaatgaattctggggcaacctgcccacctgccttcccagtgccacaggcaagatgggcctcaactgctgacaagtcctgcttttccttctaggcacagaaaacctgcatttgattttctcctactcagtgtgggtgctgagagacttcccagaagatggcctgaaggtgagccacaggagtcccttggatttatctggtaaacacttggttctgattgcacttgagacagcagtggatggagaggagggtggattcatgcatctgtcttcattggtgcatgaagaaagggtggactgggaagcgcgagccagcactgtagttggtagagagagccttacacaggcatgaggaggcctgtgcctcgtctgacatgctgactgcctacagatgccttctcgtacccttgccctcctaaagtctgtttgatccctgcgctcacatgcgtgtgtgtttgctggaactgcagtcagatggttctgctgctggaactcgggttcattctaacagatatttactgaagatctcccggaagtggagtctctgccacgtgatcgagtcctcggcttcttaatagagaattttaagggtctggctattccttatctggtaaggtattttttggtctgcactaaaaagctttaaacccaggatccaggactgcgtggttctgttatcgggctgttcagatttgggatttatgtcacttggggattggaaggatgagggttatttcagcttcctctgaagaaaaagatcccagtagaccaagctggaaatgctacctaccaaatctaggtaaactacagagggataaaagaataatgttttagaaaaaaaaattccaaagccacatttggaaaaaaaattccaaagcgaaactcaaaagtgaccacaggacaatcaaataggcttaagtaccaggatgcagatatttaaccacaattacatgagtcgctatgagagtttggaggattatgggacaaaattagtaaaatggagtttagtaattgagaagatggctcctca

SEQ ID NO: 78944 - DNA, 1101 bp, Homo sapiens
gcagccctcctgcctcagcctcccaaagtgctgagattacagccaccatgcctggccccattgttatcttgttaatatatttgttccatctttgtgtcatttgaatatcctgattttatcagcatcagagttgcagactcctggaggagtcactgctgtgccactgactcaatagcaagtaggcctacagatggtgagagagcgcacaaggaataagggaactgagcaaaagctggacttaaggctctcagttctctgactgccttggatgctgacatcaccttcagggtgggaaaccttgctttaggaccaggctattcagaaattacttatttacatacagtaaaatttattctttttggtgtacagttctgtgttttgacaaatgcttagatttatgtgactaatgccacaatcgagattcacaacactaccatcaccccccaaaattccctcatattgaagtcagcctctccttctgttcctagacctctggtaaccactcatctgttcttcatctcctatagctttgccttttccagaatgtcatataaattgaatgacacaatatgtaggcttttgagtctggcttctttcacttagcagaatgcactggagatttatccatgttgttgtgtgtgttaatagtttattctttctcatggctgaatagtagtctatggcaaggtgtttgtttatccattcatcagttgatggacaaagttgattttggccaggcgcggtggctcacacctttaatcccagcactttgggaggccgtggcgggtggatcacgaggtcaggagattgagaccatcctggctaacacggtgaaaccccatctctactaaaaatacaaaaaaaaaaattagcctggcgtggtggcacacgcctgtagttccagctactcaggaggctgaggcaggaggattgtttgaacccaggaggcggaggttgcagtgagctgagattgtgccactgcactccagcctgggcgacagagcaagactgtctccaaaaaaaaaaaaaaaaaaagttgttttcaatttttagcaattttgaataagcatctaagacatttgcatacaagcgtttgtgtaa

SEQ ID NO: 78945 - DNA, 1782 bp, Homo sapiens
ctttgtcattagggacttttcattgttcagaaaagatatcgctctttatttttgccaatttatcattcttttattcttcagaatctgcctcacccctctctctactcaacttaccattttttagcatttatgttctacattgacactgcatcattttatgcttaggaatactcttttccttgctctttaaaggcttaaaagtgggcttgatgtcactggcacatggtcacccttaacccagcatgcattgacagccaggagcaagaaacatttaagagcaaaaaggagggaggagttatataggggaaggactgccccaggattttctcctctgaattgtgaatgtccatgtgatttgctggtgctgtggtctttggctggcaacccttcgggaggaagtgttcctcagtcacttgtttcttagcgcatcttagagaatggtgttctgctcagctttcctggcaggatgactgtgttacagggaattttcagagtagtagcaatttcaaggtagacaatctctaatttagttatcactcagttagagagagtcattgtattttcatttgctctgcatgtctcctcccagcacacagagaccggtgaggaggtgttacggatgtgtgtggcagtaaaaaagaagctgcagctctatttctggaaggacagggaatttcatgaattgcaggtaagtccactgttccttggtccatggttgggtgggagctgctgcagtggctcggttctagtgaagttcaggactccagtcttgtcattctacgcaaatgaatactctggtatgaagtgcatgagagcttgttgatgcctacttgtaatatgattctacagtgtttttatagattggtttatttcaaagtgggttttcaccttttccaaatgtactttgtccagttcatggacttgtatttttattaagggtagtttcctggccttgtgcctgtagaattgtgcccgatgagggtgagggttgttttgcagaatggaggttgcagaataacaggaaagtcatgattttttaaaaaaatatttatttcattcagatccttgctctcttttttcagggggactttagtgtgccagatgtgcccaagtccatggcgtggtgtgaaaattctatctgtgtgggtttcaagagagactactacctaataagggtaaaatcttattattttgcaaatatcattagtttatcttggggaagatgattatctgctccaaactccaggtcaagcgaccactttaagtagagcttttggcataacaggatttgttatttgtatgtgtagttatcattcatgctcagcatttttcacaaataggatatctttgtaacttaagtcagtccaagagtcaacgctcagttctttacgtaatgatgatccacagtgtgtattttactattgggacagataatgaaggctgtttgcctctgtccagtggatcatcatggactgctatcctaaggcttcagtgcttaggaattttaaactaattttagtataaacttaagtatttttaagactttgagtttcctctcctgccgtcaaatctttttgtatgtttgtactaaaagtgattctcactatttttttaaatttcaaaagccacgtgtttttacacgtgtttattacagaaaatatagataaggagataaaggaagtgcaaatcaaccatagtccccccactcagaaatagtcactgccaacttcttggtatatgaacttccatcctattggtaaaaatactatgctatacaattgt

SEQ ID NO: 78946 - DNA, 1773 bp, Homo sapiens
atttaattaacataaagtactcgtggaagatgtttgcttggatagtctgtatagaagatatttggaatatagatcattttaacctaatatacttcaacctttttttttttccctaggaacgaatgatcacacactttgaaaggtccaaaatggagtaaggaatgggaagatttgcagttaaagatggctaccatcagggaagagatcagcatctgtgtcagtcttctgtacggctccatgggattaaaggaagcaatgacatcctgatctgttccttgatctttgggcattggagttggcgagaggtgtcagaacaaagagaacatcttactgaaaacaagttcataagatgagaaaaatctacgagcttcttatttacaacactgctgccccctttcctcccagactctgacatggatgttcatgcaacttaagtgtgttgttcctgaactttctgtaatgtttcattttttaaatctgacaaactaaaaagtttaacgtcttctaaaagattgtcatcaacaccataatatgtaatctccaggagcaactgcctgtaatttttatttatttagggagttacataggtgatgggggaaattgttaactacctttcattttcctgggaagtcaaggttacatcttgcagaggttgttttgagaaaaaagggcccttctgagttaaggagccatagttctatcaatgatcaaaagaaaaaaaaaaaaagagaaactgttacagtatgattcagatcatttaaaaaagcaaaatcaagtgcaattttgtttacaaatggtgtatattaaagatttttctatttcagatgtactttaaagagaaatattagcttaactcttttgacatctgctattgtgacacatcccattgctggcaatgtggtgcacactccgaaacttttaactactgttttgtaagcctccaagggtggcattgcagggtccttaggcaatgttttgtttgcctttatgcagagaggtgctccaagtgctgtgattgagcaccgtgctagaggaactgtaatgcttcagaagttgtagcttatacaaaggaaacaggtcctgctggcttaatttaaacagttattgcatgaagtagcgtggaggccctggactgctgctcgttctttaggatggactgttctggtatctggtattggtttagagactgttaataagggacatcacaaggtgatgggattcatttgaagcactctatttctgttttaatggttttatccaattttgccttcccaagatttttgttctacataaaaagttcatgccactttttaatataaaaaaatttaacaaaattaatgtatttttctcatttttttcaaactttttctaaagactctttctgtcaaactcatgaaaaatttctttctatggcttttattctagattgtcttattttctgttaaaaccaatgaccacatgaccacaatcttcactaactcatactgcagtgaaagtgttaacccttaggtagtttctctacaactctttgctatggtgatttttaaaaaagtttcctaggaagtatctctgaggaacagcaatctgaagaactgactatattctcatgctaagtcattagccaaaagctggtggtattgttgcatgctgctattgcatattaaaacgtagcagatgaataatagttgtaatgcagcaggatagttggtcaaattatttttttaggctgctttgatgttgacttgagactaggaaaaaaaaaagcccattgtg

SEQ ID NO: 78947 - DNA, 1481 bp, Homo sapiens
agggaaatgcaaatgaaaaccacagtgagataacacctcacacctgtttgaatggcatttatcaaaatgaagaaataacaagtgttggcaaggacatggaaaaaagggaacccttgtactctgttgataggaatgtgagttagtatagccattatggaaaatagtatggagcttcctcaaaattaaaaatagaactaccttatgatccaggattcatgtcactgggtatatacctaaaggaaatgaaatcagtatgttaaagagatacttgcactgtcatgttcattgcagcattaatcacagtagccaagatacagaatcaacctgcatgtccatcagtagatgaatggataaggaaaatgtgtattttgatatacaatggaatactatttagattcagaagagaaggaaatcttgtcattcgcaacagcgtgaagaagcctggaagatactatgttaagcaaaataagccaggcacagaaagacaaataccacatgatctcacttacgtcgaatctaaaaaagttgaattcctagaagcagagggttgagtgctggttaccaggggctatgggagaactggggagatgttggtcaaagggatttttaaaaatgtttttaaaaattaaaatatttgacttttctgtcagcagtcccatttgtgaatgtatgactacagaattatgaaagacaagttttaagaccttcatgtccttacttgagatgtattatgtggtgcattttagtaatgagtggtatttgtatgttcccagcaggaagatgatttgaagtgggtagaagagaatgttccttcttctgtgacagatgtgtaagtttttgaatgattaccacaagaatcctatttcaaagttagtactactttgttattattttaaatgagcaagttatactcatgaaaatacaagatactgaaaaataattaaaagaataggaataatccgcaaacaaaattaattgggtttattcattcagatgacatttctgcttagaaagatttagctatgtagtatatcttaaaatgaatgggatactccttttgaaatttttagttcctttccagggctataattttaatgaaacattggtcctgttgcattgcaaaatacgttttttttctatacaatttctgtaactgttgcttattgtatttgctgtttatttttcctaaaagggccattaataaaatgcaaatcttagataattataaagcttttaattgcattattccattgtcttttatgaaccatttatggctttattttacattgttcaatttagtatttctctctctttgcagagcacttccagcccttctggattcagatgaggttggtactcaattcacgtgcataaattatgtatatggtgactaaatagaaagtcatgaatcgtctgttcatggagattctctttatttgactcagtagtggcctgaaaactatagtttatatagttgaaaa

SEQ ID NO: 78948 - DNA, 1174 bp, Homo sapiens
ggcagatcacatgaatccaggagtttgagccaacatggtttcggccaacatggcaaaaccccacctctactaaaaatacaaaaattaaccgagcatggcagtgcacacctctaatcccagctactcgggaggctgaggcacaagaatcgcttgaacccggagacagaggttgcagtgaggcgagatggcgccactgcactccatcctgggtgacagagtgagactgtctcaaagaaaacagaagatataattgtatcacttacactgagtctctcctgtctagtgtctagaaggaaagaaaatttctgtaaccagcagcccagctcactttgtaatgatagaaagggtaaaattaaaacttacataaccaactttgaaattaaaaatgtatgtgtaaatctgatttgtccaactataggcaaatttcagtcatttaggaactgcctagctttattttgtgattatgccttccccccccccccatttgcatttagacggttaagagcttatattaaacacccataccaccaaagaaggaaaagggtagcatgatataaatgactaattttataaccagacccaatgaaagattgaaatagaaaataggtgaaatccttttactccatgaaaatggccttgctgtcatttcaaactatgcactttatatgtgtttatcaaaaaaagtcagaatagagaaaagtaatgaaagaaaataaaggagatctgaaatcacactattgagaaagaacttttacattctggagacccttcttttatatccgtctgttgatctactggttactcactagctatatttgtatttaaatattttcccttcctcagtcattaaaaaatttttgcgttaccttccctcttctttttttcccccttttcttttaaaacattgccccctttctctgtgacttcagtgttaactgcatattataatgtgtcttttccctgttcatgtatggaatcttacattactcttgtgacagtacattgtggagattccttccagtgtaacaggtttaactgaactcattcattttcatggatagcataaatatgggacatgtgtagtacagttaaattaacatattctcttattaatgggcatttgggatatttccagtttgaggtgtgtcagggtcctcaagaccatcctgatgtt

SEQ ID NO: 78949 - DNA, 2053 bp, Homo sapiens
cagcactttgggaggccaaggcaggaggatcagttgaggtcaggagtttaagaccagcctgagcaacatagcgagaccttatctctacaaaaaaatttaaaaattagccaggcatggtggcacatgcctgtagtcccagctgcttgggaggctgaggtgggaggatcgcttgagcttcagtggtcaaggctgcagtgagccgtgattgtgccactgcactctagcctgggctagaccttgcctcacaaaaaaaaaaggaaaagaaaataaaatgatgactttcttattcatcttgaggtgtttgtgagattaagtgagaataagagagctataaggcctctgagagatctataagtttattggcatgaccccagatccttaaagaaacctgaaaactaattggctagcttactgttttttcctgaatgttgaattccttgacctgcaaacacatatttattagcctgactcaaacaatgaagctattaaaacttcggaggaacattgtaaaactctctttgtatcggcatttcaccaacacgcttattttggcagtggcaggtaagtctgggactttcttcttggagttcaaatgtgatctgtttagaatggacattcttaacctgaaaggccatgggtggacatagaaagttttgtatatttcacttggaaaagggttcttagctcttgtcaaattctcagaaggatctgtggtttttaaaaagttgagaaccatttattttatgtacagtagctggaaatcaacctcatatttcagctcttcatttatccctcttctatttgcattctttcttgaggcattctttttcttgaggttagttagcttaagtgccagagagtactccttttagaagacattaccacatgtttgtttagttttattaaatagttgtagaattttagggtgcattgctattatagtggttttacatatgtcagcaagcatatgtaaaaaattgacattaggtggactgtaaccaaactaggctaatttgcctacctcctgacccttgtaccaggaatagtgaggtctgatttatgattggaactagctcttctgtttgtgttacagtcgttttatcagccattttttttcatctgaccagccaaagaaaaattagcattactatactaaggataaaaggagaaaaaaattatattgataatgctggaaagagctatatttccaataccttattttccaaccacactggttactgatgtagccagatggcaaataacattattaccaaattattctttaaatagagaaaggattggccagagtatgtatcatgagccttgctgatagcaggtatacagtccttttgtattgaatacatttgttaaaataactgatagagttgtgatgtatttgggggttcggggtgtgtgggattccacttaaccggaaatgggggaatgtaattggggatgtaaaccagcattcatactctgacctggtttttcatttactgttagcatccattgtgtttatcatctggacaaccatgaagttcagaatagtgacatgtcagtcggtgagttataagcacatttatgaataatgtactgtcttataaacaactgatggtgttgatgacagtggtaaggttcttctaagttatataccttataaaaaattagagctaggtctctactctgagggttgtgatacttccctcctcctaagtattctgtactatcatggtgcttggtatagtagttttttgtttgttttttctgactgtattctcccagttttgggagagaattttgtaagttataactacagtgtgctataacccagtcttattttaactaaaaatcttaagaagtccagagtactaaatattaagtaccatatgtgtaaataatactaatctgaatagaagccacatccttaagatctgagctcaacgactgtgacagtaggatttcttcagaagcagctaaggctcttattttgttcaataaataatgaaaatgaaaattataaagtataccaacctaatgtaactttctcttacac

SEQ ID NO: 78950 - DNA, 1048 bp, Homo sapiens
gtcctggctacttgggaggctgaggtggaaggactgattgagttcaggctgcggtgagccatgatcatgccattacactccagcaacagagtgatacctcttccttaaaaaagaggagaaaagaaatttatgttaccactggattaatacgaagaagtataaggttctctaggccatttcaattaattttcttattttttaaaaaaagactccacagcaacctattagattcaatattgtaaaaactataaacttggctttgcccacaagaaaacggctcaatatgttttgcaataaattgcctcttaaatcaaacactttgtggatgcacatttgcttttcaaatcacactgtcctctgtatgtaattctcttagacttctagcaactttaaccctctgtcaatttcattttctttcttctgctgttgctatagtatttttcttatcccttgactctgatagtaaacctggccctctcagcaattgacgcctgtgttattttatggatatcctttcagtaatgcctgttgattgggtaattagggttatataaaaaacatactctatataaactcctggaaacatgcagcatagtttttcagacagataattgccttacattttattttggggtgagctcttatttgtaaaatattataattttagaaattaataattctttgtatatgatgcagtaattttttttaaatacgagaaaagtcttttcagacttgtagccaaaattgcaataataggaaatgatagattaaggatggggcttataaacattagaacttttttggaatatggtcacttgttaacatggatctttatatatgaaaaactcgtacttagcagtatgtttcgagattgtaaatgacaatttatgtgaaatgcttatagctgtatattctatgtgatggtttataagaagggaagaatgattaggtgtcaaatgttctttttattttctttcagttcaatgcaaaaactttccagtgattatgtaaatgcagaatcatgtggtggtttcttctctgtgcctct

SEQ ID NO: 78951 - DNA, 1011 bp, Homo sapiens
agaccctgtttctttaggggaaaaaaagaaaggcccttttgtagccattgaaataccaaagaaaaataaggtcctcatttattaaaaacacatactgaaatatatcaaagatatactgtctaggatttgcatcaagagaatatgaaagggtggaaaggggatggggtatgcatgggacaaaactgaccataggttagtggttgttgggccttggtgaagggtttataagggtgcattatactacttgtgaatatgtttcaaaactctctgaggaaacattttttaaaatgtggtaaccagacacaagatctcaagttgtagtgttccctatcttgttttaagaccataaggtcttagtttttttctcttaggtgaatcaagtgtatattatttattgctttaaattgttggcctatattaattaacacaagttcctgttacttagcttgtttcggcatttgtcccatatgtactcaaatatctccttgcttcctctttaggccacgccttggagtcactcttcataaggttgtagtagcaggagccctctatcttttgttctctggcatggaaggggtcctcagagttactggggttagtactgcttaatctcattttctgtggtcagttcaattatattgtttacatcttgacagtgtggattggaaatgtctgtgggcttctttctgtttgctttaagtcacttttgggctctgattttcaaaatatatgtatagttcatgttctcttttaaatctattagagctttgtaaatttagtgtgtgcccgaatgaatgcttttccacctgtctccaaattgctaattgttttagttcctcctcccaagcagtagacttgcatttttttttctttttctaatcaatggaatccagactgaaatccagactgaaattcttgtgtaaatggcagactttggagtcatacacttactagttaatctaatctaaagtaactgttgtttcttaacatttcagtttcaaaaacttcctt

SEQ ID NO: 78952 - DNA, 1062 bp, Homo sapiens
tgtgagataaactgataagattttccctggtctttgaaaggtcttgaaaatagtagatctgaaaaaagttaagctgtacatgccaacaagcgtgtacacgagtgtgttttgtgcttttctatgtgtagctgtatttcacagtttttaaaaatgggggaaattgtctcgatgctacaaactgtccatatagggtgaggtattctgttaaagttttagtgaatttggggccaggtcggggagggagctgagttgagcgcacccagattgccatacatagacatgagtaagattgtgagtggcatcagcttgtatcctgtaaaaactgtggaagaggtattctattttagcaggactaatatcaatgcttattctgaagagtgtagaaagcagcagtctagtattggcatctggcctgttgccaaacctagattatggtgccatttcttcccttctttttcatagtccagggtgctttgatccttgcagagctgctttcagcagtgaaacgctcactggctcgaaccctggtcatcatagtcagtctgggatatggcatcgtcaagtaagtattaacttcctgtatggaagagcaaattaaaatgctgattaaattaaaacagtattgcatgttcccaatgtagtagttctgaaatagttgataaaagaaataattctgaaacaagaaaggtatttgaaattttgtagcattgtaaatgttgggaaaatgtgtttcattttccatacttccaaatatattccatacttccaaatatattccatacttccaagtccaaatgtattccatacttccaaatccaaatgtattccatacttccgaatatatttccatacttccaaaatattttttgcaaattagattttttatgggaaacgcattcttgctgtaactgtctgaaaatatttttctatccaaaaaattttatttttattgaggagtgtcttctataggcattctttgaggcattgttctaggccctggggatatggcaagtaaacagaagattttgagcttacatttgtggagggaggggacaaagacaa

SEQ ID NO: 78953 - DNA, 1514 bp, Homo sapiens
actcaagtcagatttttatttattaattatgcctagaatttatccaaattattttatcaatacaataataaaatagtccatcttgaaatagtttttaaaattacagataatcttaaaattagtcaatgtttgctttactaaggcaaatatgtctttcagatatatgttattactgttactttatctgtctcattaaacactttgttattaacaaattctttgaaaaatgttaactagcaggttttggggaagttcaattctatgtttattggatggagctttgccttgaagcatctgaacttttgagttatttttattttggagtgagcatctagggtacctgattgtgaagctagatttcaatcttgtatgagggatggtatatttttttgtgtgagttaatttaaatttttaagtttttttccaatgccttcattccgaaaatgatacatgaatgtagcaataaaagaaaattggagtccatgaaaaaatagtaaagcaataggaaaatacaggtgaggaaagatagaaaacaaagaagatggcaatatgtaaaaaggaagtcctgtaaggcatattttactgatgtgttgtaaggaaaagtatatatgaagtatgtttagaatttagagtatgtgtagagttgttccagatgggcagccagagaaggctgtgtggaggaaatattcaatctagtcttttttaagatgtgagtatggaaacaaaagagccttcccacttcagactatggtggaggcatggaaacctgtgcaggacacagcatgaactatgaggacacttaatgactttccaagtgctgtacaaatataatgtaatattgaccaggattgaagtgcctaaaagtaaatgacccaatgaaattcttactaagttcattaaacaaatattaggcaatatttttgtttaatttctgcatcctgtaaattaattctgaggactctgttttggcagtgactgttgaagtgaagggtccctatgaatacctcacacttgaagactatcccttgatgattgtaagtgactttatattatttaacctcagtattggatggttttgggttcaaagattgtcccatgttttgtggcagtattctttttaatgaattgttcctgtgcaattcagaaaatgttgcttgtagtcctggatttatttcttattagactgggactttgagagagtcagtatacccttgtgtgcctcattttcttatccatataatgaaggggtcagtgacctgtggaaatacctcaaagatcatctcacattctctctaggatgcatagtggggcactttttactacaactctattgtttctgatcccacttacattaactaaatgaggctgggtgccctggctcatgcctgtaatcccaacattttgggaagctgaggcgggcagatcacttgaggtcaggagtttgagaccagcctggccaacatggtgaaaccccatctctactaaaaatacaaaaattagctgggcgtggtggt

SEQ ID NO: 78954 - DNA, 1881 bp, Homo sapiens
gaggcggacgtcacagtgagccaagattgcactgctgtactcctgcctgggcgatggagcgagactctgcctcaaaaaaaaaaaaaaaaaaaaaagtaataaatgtcatatgcttaacagagttatctggcatataaatgttatttttacagggtcagaatctctgcattccagagttaagtataaactttctcaaatcctggaatatgagaattgatcaatttattttagaatttgtaagaggtggttttaagacatatatgattaatagagcaggttattacaccagcattttataggttgatgagtaagtaagttcaggaaaggttctgtaattatggctaagcagacatgtattacccataactttgaagctgcaaagttttctcacaaattggttgtgagtctcgtcagagactattaggtggagataaatcaatgtatgattaggaagacatttatattcttaaattttactaagataacctagtaaatggatatctggagaattgtttagtctgctttgtttgacatggatttttatcatggaatataatttttgaactaagccttttcttggttgtaggatattttaaccatttgaggagaactatggctccacaggaaaatgcataaacataaaaaatcagctattcattttggggggttcacagaacctagaagcttacccagagatctctggataaacgtttctccttttaagaacagatggtagtaaattgcaattccaaggaagaagaaaccagttattttctgtgttcctctttatcattgtgtcttagtcttctgtttgtgaagactctagtctatgtgaaaagcaagagtcactacccctcaaagtcaaggacttggagactgttaatttgtcttccttgactttgaggggtagtgactcttgcttaccacatagactagctcaaggttaaatttttgatataaatgtgagaccatgtcagcagaaattctgatattcttgggaagcatgttgaacaaagggattagatttaggaattggtgattagaattcattttactgataccatcattaagttttgtttaaggtgatttaaataatcatttaaattcctttgtaatgtctgcataaaacacaaactagtatcctagtatggcttagttaaacagagattaaattagtgattttagttgggggtttcctcattaaaaaaatatgttaaatgtgatttttgtgtacaagacatggtatcttgcctttcagtaattcataatctagcctactttatgcactaggcttgtttggtttgttgtgcctaatgtttcaatgaatgaaagagaaggactttaccatatttctgggcacattctggagcaaaatttgcatattgtattattaatttgtgctcttaattcttaagatttatagatgtgatgcccttttccctttctaggcaatgcatgaaccattgcaaacttggcaagatgcaccatacatttttattgtacatattggcatttcatcctcaaaggaatcatcaaaagaaaattcactgagtaatctttttaccagtaagttcagttttttttttaatggttatgttattatctggttatgtcattcatgtactttacatatgcttttttattaggtattacaggtatcagatttctatttccttcatttgacactcctgctgttaaaatttttagttagtaacatgttttcagtattctgaactagaattgtcaaaacttggtcaccaagccagagataaggaaattttaaattaattaacattggccgggcgcggtggctcatgcctgtaatcctagcactttgggaggccgtggcaggcagatcacatgaggtcgggagttttaaga

SEQ ID NO: 78955 - DNA, 1059 bp, Homo sapiens
taccaagaattgtggagtagtgaggtccaggtctccatgcctccacaaaagcaactagtaagctgatgaaagctatcacattcagctttcacagaactttgaaatctaaccaaaacttaataaggaaaaagttcaacaaagaaagaagctgctacattacattaagaaagtgcagtgatattgtaatttgtttaccataccctccttcccagttcagaggcaggaagatggcaactcgcagtcgtggtgcaggttgctggtgccaggggaactaatacagacctttttcttaaagacttgccattgtgtgttttcacctgcctggaggctccctgaaggaaccttgccaggacttaactttgttttccccaacttagagtgttcccagggctggagtggcttcctgggttgtgtttgccaaaagcatttgaatgcagaagtattatgtgcatagggaaggggataacagtggggataagcaatagagagactgtcaagcatgagaaggaaagggtccagaaaggagatttgtgggagaacaaggctttttaaggcttctgtgtatattgagctatgaagaaagccatatatattctcaagactggacatacgatcagaaaagaccttagatgaccctaagctttcattctggctctgtacaagcaaaaagtgaagaataaggaatggctttaattggcccagctaagcattgaaggattgcgccagggtgcaaagactgggaggatattctgttcttttttgtctttggctcctggtgtttaagaaatctttgtcaaaacactagctgaccactaagctaaaggaatatagattccagtagccacacaggtctaagaatgcagactttacaaaaatggtttagaaaacttactaagcaaaagagacataacccatattattattaccagctaacaaaccccaaggagggggcagattgtggtttccagagttgccactttataacattcagttttcagtggaaaattatgaggcatgcacagaaacaacgtatggcatatttacaggattaaaaaaaat

SEQ ID NO: 78956 - DNA, 1050 bp, Homo sapiens
gttgaatttttcagaccttttccattctgtttctatctctcaatttgcatttttaagaagattatcctagttctgtgcttgcaacaattttctgctctatcttagcttatgagcatgaatatttttttgttgatgttgttaatttggtcaagtaaatcttttaagtatattttaatgtgacaaaaccctctacactctggcagtttcccagtctactcagaattgttagtagaactatgccttgtgagccaaagactagagtctaatagtccttgagtctgatagtgtttgattcttagatatttttatatagagcctttatctgatgctgttcatttttaaaatagcaaactcaaaattgtatctgtactgcaggtgaactgtttgttgtgctgtgctcttagtatcttattttttggaaggtgagttaactactctgtattatctctttttccaggcagaagaagtagagttgtatttggaaaaacttaaggaaaaaagaggcttgtctgggaaatatcaaacatcatcaaaattgttccagaactgcagtgaactctttaaaacacaggtaatctttgaaagtgattggagataaatagaataggcaaaaattggaatgtatatatttttggctgtatccacttccgacttctcaagtatttcttttggcagaagtaagtggaagcatgttctgataggtacatagtcagccacttatacatactcatcaaagagaggttgtactttgctttgtgtgtaaaaagcaaacccccatttttttattgtggtaaaatatacactacataaaatttaccattttaaccatttctaagtgtataatacagtggcattaaatatattcacattgctgtgcagccatcgacccatctccagtactttttttttccccaaggcagattcttgctctgtccgccaggctggagtgcagtggcacaatctcggctcactgcagtctccatcacccggatctaagcaattctttcacctcagcctcccaagtggctagggctacagattcacaccatt

SEQ ID NO: 78957 - DNA, 1510 bp, Homo sapiens
tatttttgtcatgtttattattacatttatataaagtagggagtctttagtatatttttcctttcatagctagaatcaaagataaaagcgaatactgacttcctccagctaatcagtcatatagtcagatttaccctcccaagtcttcagaataatgtcttgatccattagaatactgtgttccaaactgtgtttaatgagctttatgaagcttccatgataacatgagcttccttgaggcctcttttaaggtaggctttgaaaaaaaaaatctgatactcttatctttgcttttgctatttctaccttccacagccatgtttgcttttcgttcattgctctttctgttctatcttgatatctttcaaggtctgagatagcaattttgctctcagtggaactattatgtatatcatcatttaacaccatttaacagttgttaatattgccttgtgacatgcattcctaattttattattgcttgtctcttcaactagccttttgaagggtcttaataatttgtttccactcgtttccctctttagcctaacagtgtgccattatacctttgtaatacttgtgctatttatttatttatttatttatttatgttttttgagacagggtctcgctctgtcgcccaggctggagtgcagtggtaccatcatggctcactgcagacttgacctcctgggctcaagtgatcctcctgcctcccttgcctgagtagctgggactacaagcatgtaccaccacgcctagctttttaatcattttttgtagagatgagttctcactatgttgcctagggtggtcttgagctcctgggctcaagcgatccccctgccttggcctcccaaacttctggggttataggtgtgagctaccgcacctagcctgctcaataaatacttaaataatagaagactggcttgaatttagagtgctttatcactcccaggtttttctcaatagagatccagaagttaggactttatggcataaaaatagatccacagtttccagaggttaaaaactgcttacctgctatttttctatgaacaacaatacttttatcttaatatccagctctttttgcatgtattatttcaataccttatgtttggagaaaggatggtctttgagtatctcagtttagggtacgaaatgaataggatataggttaacagcttaggaaaaatgctttgttggggaattatcttttgttaacaaagatttcttcttttgtagttgatggagaaccttgtgacctgtctttgaatataacctggtatctgaaaagcgctgattgttacaatgaaatctataacttcaaggtaaggaacataaaattacagagtttttttggaccttagtgattatctggttccagtctcttaatttcatagaggaaagagtatcatgtagctatggaggaggagagctgaaactagaatgcatgcttcccaatttgcagaccaccaattctcaaactttttggtttcagaac

SEQ ID NO: 78958 - DNA, 1094 bp, Homo sapiens
aatatatatgctgtatatactacattgaatattcagtcacatctcagtcgaattacatttacagttgatactttctgagaaaagcatccttaggtgattttgtcattatgcaaacatcatagagtatacttaaaactggatggcactacacgcctagtttgtatggtacagcctattgctcctaggctataaacctgtataacatgttactgtactgaatgctataggtggttgtaacacaatggtaagtttttgtatatctaaacataggaaagtagagtacaaatacgatattacaattttatgggacccccgttgtatatgtagtctttcatttactgaaatgttatgtagtgaatgactgtgattatgttggggttgattccctgcatggtggttttaatctgttctgtgtagattaaagaggttttactcttgtgtgcttgttaaatgtttactgcaaacatgacctaggtttgtcaggccgttggctgtgaaggaatatatttagtagatcctttatttacaaaaggagtattttactgctttggaagaggaagctcagatattatcaagaaatagggattatgtagaacaaaactagtttgtctagtggaaaaatgactgtatctgaatctaaagtatcccattgtgtgttcagtaaaagcttccttttagttctgaaaccggctttaatttagagaacgattgatcgtgggcagctttatttctagatgagggataaaaatcctgatgatagatgtgtgattctatgcatactgtcttcacggaagtgcaaaattttaagtcatagttggataattttattcttttcaattgtttagtgagtaattattacttattgcatagactgtggggaagtaatagaaaaatgttcttccctcatcgagcttacattctagtgggagtgaaaacagcaggtagaatttctctgaagaatatatactgtatccatgaatatgtaatcagtctcctgaccagtgacttatatttgatttagatcaaatctactctgacactggccttgtgagattggtttactgggtaacctagtaacccttgtcttttggaat

SEQ ID NO: 78959 - DNA, 1048 bp, Homo sapiens
acccagtctaggaatcgcgtgtactccaccaccgccgaattccagcctttgcttaaataccacccaaaccggagaactcactactagacgccacttgggcagccaggcttagggcttttccagactttctggccccaaagtctgacattgacttagaagggatgaagggctggggcgagcggaagtagagagccaaatcctgcacggggtgcctgcctggtcctaaaacctttaacggctgggagacagaaaagactcaggccaggctggcatgtagcgatctctctaacccagctgaccaggttccaacaggatgacgcctgcgcagtaggtccaaagtctcacggcgcacagacgactgtctgagagaggggccgctacgccgcacagcaaacaagctccgcgacgtttccaggacccggataatcccgcccttagagcagagccggaagaaggcgggacgaaccggaagagggtgaaatgctttcggtaggcactccacggctgtgaagatggcggcggctgcgtggcttcaggtgttgcctgtcattcttctgcttctgggagctcacccgtcaccactgtcgtttttcagtgcgggaccggcaaccgtagctgctgccgaccggtccaaatggcacattccgataccgtcggtgagtattcacttcactaacgtctgaacctagaggagcaaggggtggggctacggcggcccaaggggtccatgaaggttccgcaaaagtctcttcaaaaggggtggggttgctgggatggtctgtgtggctagccaactgggacccacctccctggagtggaaagccgcgcacttctgtgattaggctagcgggaatgtaagggccacttcagcaacagaaaggagtggtggagcggcttctcatcagaaaaacagaactttcagtgcctgacttgagatgtaaacttgatgtacaaacggagagttgtttatctttcagatgtttcacagaatccagtgtccccgggttggataagaaagatatgtaaataggagtcttcatttctttct

SEQ ID NO: 78960 - DNA, 1040 bp, Homo sapiens
ttgttccctggaactctgtgaccccaaattggtcttcatcctctctctaaggctccatggttcctacgaagctctgaaaggtgggaacaccacagaggccatggaggacttcacaggaggggtggcagagttttttgagatcagggatgctcctagtgacatgtacaagatcatgaagaaagccatcgagagaggctccctcatgggctgctccattgatgtaagtctggggtgtggggcacagggtggggagctccaagtgtcaggaagccttttacccaatgaagggcagcatagagcttttgtgtgggacagagcgaatgttttgtttgaggaagcaggaactggctctcaactttgaggactgggaatttctcaagggagaacagttcttccggattttcaataaagacactggtcaaggacatttcaagccctggaatgtcagtggaaatcagtccagaggcctgtgtcagtggaggcctcccttgctggtgctcctcagtctcagcacgctcccattaagctggccacgtacttggctgtggacctgagcccaccatttccctaagaaagcctcccagtcactgggctttcaccacacctccccgcttgagacgtgggctttgtgttgttacctgggagaagctaagcctgcagcacctttcagtgcaaagaaatgctgtgaactgagacaggagccaagggtagggagatggccgcccatggccaggcctccttcagggggcatgccttccctgagggctgctcagtatattgatatgataatcttagtggtttccattggggaggatggggctgaagctgaattcctgccccttcttctcccaacacgcccaatggacagcttggaaggtcagttagcacacaacaccatggatgaactttttttctgtatcacttttctccgtctttcctccattcgtgctctgttgatctctcctctctccctttgtctgtcccatctctttctcctctctccttccctttccacccttctgtgtttgttctctccctcc

SEQ ID NO: 78961 - DNA, 6021 bp, Homo sapiens
agggggcagaggttgcagtgagccgagatcgtgccactgcactccagcctgggcaacaggagtgaaactccatctcaaaaaaaaaaaaaaaaaagccctttcgatattataggaaaggtatttgccttttgtattgaataaactaagatagaaactcaattttatgatggcaacatcaaaaaatacagtttaaacagaatttcatggtaatttacccataaacatttgctggccttttcctgatttaagaagttgtaattgctacgttagtgctgtgccctctcaaaatatcaaaagatttttccagtattttcaaggttcctcattatactgatattttggttgccttggctttgttgtcttttctagccaagaataaatttgaaataaggggctggctttttgcttccatagtgcttatgggatccagctgggggctgttctgattcacgttcactgcaccctttttcaccgagtctcctcattttctttctctccagtggcatggttgctctctgatatttggcgttgtagatcatttaaaacaacacttgctgaccgaccacactaatcccaacttccagactctgaaatgtcgctggaagaactgcgatgcttttttcactgctaggaaaggatccaaacaggtacattagtgggacttgaggtttgcctgggattcagtagactgctcagagcaggggctagcaaaccttttttattattgagaattgccatatatagggagggcctagggttttttatttttatgattcagagatttggggggtagcttaatgaagttgcaaatgaagaattaggtcatttttgagaaagggcctaaagagaatgttttcagatgtttcaaatccagtaactgaacctggagatttattacagtgctcttgtgctgagacaacagctcacctttaagtacatggtttcacgtaagttagcaaagtgctggctcctaactgcctttcctgtctggatcctaggtggaatggacccacatggctttccttggctttgactttctcctgtcttactatcgacttctctctcatgggcccttttcccttcattcctaggatgctgcaggacatattgaacgacatgctgaagatgacagcaaaattgattcatgaagttttttgcctcccacgttgggaagtcattagttgaactattttcacattggccccccacacaggccactctcttccctttcttggtgaagtaaggaaggagaaagtggttactagccaggcatacccctagcataagtctgggcagctctatgggatgataaattacacttttaagttcttgctggaggttttaaatagatttagacaaatgttaaggaaccatacttctctgggacagcatggcatatagtgatatatgctatttgcgttctccagatgtttattgaagatacagatcctaattggttacccagtttgaccctaatcatatgtatattttattgatttcagtttgcaatttttaatttatgttcttatgatggtttaaacctatagtcaggcttttaagtacaagtttgtttaagtgccagactttgaggatcagttttaatttctccatttgtaatagctgggtatttaaactggaagcaaatagttttctttcttaacaattatgtgcagtgtgtgtcactgttttcttgctttatagatagagctggctttaagtgctaaaggacacagtagatttttgacaaacagtggctgctctgctgactatcttttaggaattcaggaagcaaatcacatagtgacaagtccttacagacaccacttctagtaaatctctgtaaatgtggatagaaagctcagtgtgaggcagtgcgtagacctaacgtctacctttacatctgctgttgaacctgggcactacctgttacagatcctgtcaggctgttgaactggaggtgtacctttatcttcctttctagtgtctgaccctgcaagcctaatgttggtttgaacccttttggtttgttcagttgccagcctccatctctcccactgtatggccgtgcctagaccgatggcagccatcgaatattcctctgggctcacggggtgttttccacccccctgcagcaactaagatggtgggggagagggggttagaataaagcatctgaatacagttttcaggacctcaagcagacttcctagagacttgtttctgagacagttctttgccttcacttccctgctagctgggaaagaagagtggagcagagactctgcctggccactgagaacagccaaattcacaaaccctcagtggggctttgtttttggattttctccggactcatcagtaaacctgtagaagtgtcgctttccagccttttgtttctggatcctcaaaactcagaacgtggccgggcgtggtggctcacgcctgtaatcccagcactttgggaggctgaggcaggcagatcacctgaggctaggagttgcagaccagcctggccaacatggcaaaaccccgtctctactaaaaatacaaaaagccgggcgtggtgggcgcctgtaatcccagctgctcaggaggctgaggcaggagaatcgcttgaacccgggaggcagagattgcagtaagctgagatcgtgccactgcactccagcctggtgacagagtgagactccgtctcaaaaaaaaaaaaaaaaactcagcttcttcagagagataaaattgggggaggagcccagggccacataccaagctttgggacatggtgcctcatgctctctgggattgcagaccatccaggtctgtcttcgcccctgttagtgcacatatatccactcacatgtcttccctcaggctatcgggcagggggacttcaccagggggtttatggataggcttcaagagggtctgtgagcccccagaaattgtgtgtgagactgagtatgtgttcttttttccaggaaaggctccagtggttcttacttgatccaaaaaatgtcaagaattaatctaggaggccgggcctggtggctcacacctgtaatcccagctctttgggaggccgaggcgggtggatcactcaaggtcaggcatttgagaccagcctggccaacatagtgaaaccccgtctctattaaaaatacaaaaattagctgggtgtggtggtatgtgcctgtagtctcagctactcaggaggctgagacaggagaatcacttgaaccctggaggtagaagttgcagtgagccaagatcatactactgcactccagcctgggcgacaagagtgaaactccacctcaaaaaaaaaaaaaaaagagttaatctaggagataatgaatggcctagtactagataatatatggccccacaagctcttgacttctgtccttggggaaagccattttgttaaccacactagtgagatttacatgatgcttaatggagaacagagaagatcttgttgcaaaaggtgtattaaatatttgtgctgtttctgtatgagattgagaagcttttcccacctctcacccctatttcctataaggatatccagagaagccaaactgttctgtgggtttgggaatggtcatttcccgggaaaatgcatctggatcgatgactaaacctggcccttttctctgggctgtagtgaagccgcattttcacgctggctggcagtgtgctgagagcctcgaatgctctgcggcgtagtgcccttctgccctgcctgacgatgtatcgaaaagatgagagtgaaggagactttgtgcagcaggaaacgggtaggtgaggtgttgggcagttgtgggaacttctgagagtattacagagtggtagaatcggtaagaactctgatttggacttcgctttggtggaactgtgtgcctatacctgcctgtgtgtgtgcaagtgtgcaggttcctttgtatgtatgtgtacgtgtgggaacctgtgtttgtcatatttttcttcatttcacaaaggctttttttgaagcagtggcagtatgcctttgtttcaagaacacatgaaattcttttaacaccagattagtgtgttaccccaaatgaacggttctagccctctattaagaaataaagggaccataagcattttggctgcttatggctgtgtgttactacttacaagagtcttgaaaattatacagaactttgccttctttttttaatgtcttccacaatgttgtgactgattataaccctgtttcccctcagagaagagctatggctcagggatctgtgttgactctggcatttagtggctttgtgaaggaaagaaaccattaaatgacctgacaaaaactgactcatgtctttaaagtagttgaagccacttttagaatgttactctcggttgcttttgtctaattctaatggcttaaagccaagaaaaccatagtataaatctttttgtgtacctatgctagtgtttaaatggcagttcgttgtgataaagtatcagtcacttcaagttttctgtgaaagtttttaattaggttaaaaataattttggcatacgtctctactcagtttataaagcagttccacaccatgcaaacaaaactctaacagcaaaggttatcttgacctgatgttacttgaatctgagagaaagtcattacttactactgcactcctgcttttgtgggaaaaattttcttcttccccagaagagttaacagttgagtgttcagctcctgacttacctttaatttagaggcaatattattactgtttaagtgattatttgcttaacacaggttttattttgtctttttgctggtagattatacaagggacaactttagtgatgaggcatgtggatgatttggtgggagtaggtatatacttagtggaatggtttattttatggaagagaattcattggaggtgagattgaagtatattgtgaagtgggatttgaacagcacatatgctctggtttgctcaaataactgcagtttatgcttacatctaaattttgtttctgttacctaaacgggagcttctagaattacgaaggccatacctgccacatttataaaataatggttttatccctgcccccaaatcatcaggttcctcgggtttaagagaagtggtctaatagacaggaatagaagttgtggtggaggtgatttgggatagactaggtttccttatgcaagtggatatgagctcctcatagaaaccagacctactgtattagacagtaacctctaacctcacctccaagcccaagtatatggccctgctgggttacctggtgactacatttcccagattcactctaaattcaaggtagtgacccaaataaattgggaaaggagggggtcaaggaggaaaagctgttgaaaatctttctcctatttaagagaaatatatgccctagagctgctccagcacccttggtttctgatttttttaatattgaatatggattagaagaatgaaatcagatgacacctgactgcaaaaatgtttataagcaaatagccttcttacattttggtataaagctgtgaacttcgtaactttgtaaagcaagatataaagcaaatacaagaggaaaataaagtacttttactaattgacggtttactttcgttaccttgtctgcatattcacggccagccctttccacgttggcttagcgaggaagaaggaaactgggtggaaaacacaggatgcctatagatatgccgcaggccatggtccagagaagtttagcaaacaaacagctgcgttcagggttttgtccacggtcatgcgacaggtcagttagtgagcagaggagctaggatagctcaatctccactccattattcaggtaaccggcccctcccgttgtacatgacccatttattcttgatgtcttttacagcaacaactattcctctgccttccttttatgtcttggaaagtatctgagccattcttatgctcaagaaatagcaataggcatgattacaaaattcaagatttt

SEQ ID NO: 78962 - DNA, 2507 bp, Homo sapiens
taaaaaaatgaacaacagaaacagctgagagactgttctcaggtcatagaggcagctttttgaagctcagttcctggttcataacctcagaataattcccacctgatagacttgtggtctagatccagtgaaatgaaaaaagtgaaagtacttggaaagctataaatacagatagagttttggccgctttctttccatgactaatattagagtctttccatcaggatacaatccatatattttgtatatgtaataaatgattgtgggatacttctgctattaaagttaatacagttgtattaactgtatttgtacagttaatacaattaattgtattaattatatgtgtacagtatcctcagaattatgcctcttagaattatagaattataaccaggaaggagtctcgaaagtcagtctggtgactcttacttctcttctgacatagactggtgagctcgtgcggatctataaaggtcacaatcatgcagtgactgtggtgaatatcctaggaaaagtgatggtgactgcttgcctggataaatttgttcgtgtctatgaattacaggtagaatttagattcagtattttgcttgaatgatttggggagattgtctatttgggtttagtgttgatttttgatacagtaaggtgggatggaacccaggaatctgtattttcacaagcattctagataattatgaaacagctggcctgtggactgcagctttcagaaaccactctaagatacttgatctgggtcatgggtgtcaaaacttaatttctggagagcaactccagtctcttaaaacctgtctagttctccttgtgtgcagtttcaagtttgaaactctgattctaacaaaattgattttattacttctaattaccagctccctccttgagtagtagaatgtaaaagaaaaattgccattagattatatttctgttagaatgctactggtgcttccacttggcgcctcaggtgtggttttaaacctgccaaaggcctttagggactgtacttattaaacgcaaggtataaataacttcaattctctttttttttttctgcctaagtctcatgatcgattacaagtttatggaggacacaaagacatgattatgtgtatgaccatccataaaagcatggtgagtgttatttgtcatgtaagatatttgcttttgaatgtgtttgctaaaaaattcttgtcacttccaaaagtgacatctgcttctgatatgcctcattgttaagtaccttcccatctcttggcataatagggaagtaaccaggggacagtgttgaatattccattgtctattaatagccaaaattattacaataaaaatggtagtatcaactacagtttaatagaaggtaaatttaagatgcttcaaaaaattgagtggtgccttttccagagacatgatctgaatggaacactggaatggagtcaggagatttggccagtgtggcatggttacagcagacctaaaagtagaaaccaactcacgtaaccctgctaagccttgttttttttatttttaagttatggagttgaaccagaatggatgtttttcagactctgagtagtagaatcctttcttttccagggaaatacaggtgcctaacatagagcacccgatagaaaccagggctaccccagttaaagtataaaggacaagtgggtgcctctgagccctgccactcctctctgccctggtcccaagtggctttctaaggagcacagctgcaaaatacctagactagaagatctggaaaatactttcccattctcctgctctggagctggttttgatttaggtgtttgttttcttgtagctgctgcaaggagcttgtgactcttgttttgagggtgttttgtagtttgtatgtattttggtctgatattataaacctctctttctccagatttacactggctgttatgatggcagtattcaggccgtgaggcttaatctgatgcagaattaccgctgttgggtaaggagtgaaactcttcctgtcactggacttctataggttgcttcaccctaggctaattgatagatcttcattatcatcagtgtagcatttttatattttagcatctactttatgccttacactgtagatcacaggttgtctcctcggtggtggttttgttttattataaaatcaatacatgcttagaaaacaacagtacagaaatatatgaaataaaaagcggaagtgcttattttggtaatggcactgccccctctactcccgctcatcagagattactagtgttaatggtttggtttgtgtcctcattggtttttgaggaataggcaaataaaaaaaatttaaggtcttgtaagttctaaaccttagttcatcaggctgaattgtgtggtttttattttggggttaggactgatgattaacccttaaaattttcacactatttcttataagccttaatttttttttcgtcagttctaacaatggtagcttttcc

SEQ ID NO: 78963 - DNA, 2813 bp, Homo sapiens
ggcaaaatgatgagatgatgacaagaaattcaaatggaaaagttctttaaaggattgaaaagccctggagaagatggtcctagagacagacatttgagaatctctgcatagatgtgaattttgaagatgagggctgggctttttcctaggttgcccatactcttagaatgtagtgcttctggagtcacaacagagagccaggactgtttaccagggccggtccacctttgggtcctgacctcctttcagtctgtctccctagcacttcaacactgttgaaatcattgctcagcaatgtaggctcccagctgtcgctttctgcttagttttaggagccttactccaggcatgcacctaaaaaacttctgtggaagtgggaggcttaatgaacagggttggctgggggatgaaggaaagaagtctaaaatctgagataaaagaatgttttgggattcaggatgtgaccctaccactctgatataattaggcttctatagtctactaaatgatgttgtgagagatgacatggaaccaggtgccagaagaacatcataataaggtggagaatttaggccaggtgtggtggctcacgcctgtaatgggaggctgaggcaggcagatcacctgaggttaggagttcaagaccatcctggccaacatggtgaaaccctgtctttacaaaaatacaaaaattagccaggtgtgatggcgggcgcctgtaatcccagctactcaggaggctgcggcaggagactcacttgaacccaggaagcggaggttggagtgagctgagatggcgccattgcactccagcctgggcgacagagcgagactccgtctcaaaaaaaaaaagtggagaatttgagacttactgaaattacctaggaaggtaattctaaatagagatttttggaaacagcatgacacatagattgcctaaattttggatgacagaaatagttcctgggtcggtgtcagggaatatgcactagagtttgaaaaaaaaaggttcacccttcattattattaacttacaggtggtgaaagaaagcataaaaagagaaccagtttctaattaggatggagatggtgtgggttgaagttataaatgagtttataatgtaagcgtttgccctcctcagatcaggggatgggggaggttcagtaaaaagggttggagtgggaaatagcggagatggataagttaaggctgcagagtgggtatgaaaatttgagtacaggtgacagaaatgagtttgtaccaaggtaatgatgttggttagttgaattttccagctaagttggttttagctgtaatcttggcttattttccagaacaacaaacgacttgagatctttgaatgccatggccctcgggcagtcagctgtcttgctacagctcaggaaggtgcccgaaaactgctggtcgtggggtcttatgactgcacaattagtgtacgcgatgcccggaatggactgctcctcagaactctggagggccatagcaaaaccattctttgcatgaaggcaagtacagtgcaagagaatcggagttgtctggcacaaatagaagggttttgaggccaggcgaggtggctcacgtctgtagtcccagcactttgggagggtgaggcagggggatcgcttgagctcagaagttcgagaccagccagggcaacatggcaaaactcgatctctacaaaaaaatacaaaaattagcgggatgttgtggtgtgcacctgtactacttatgaggctgaggtgggagaatcacttgagcaccaaagatcgaggctgcagtgagccatgattgtgccactgtactctagcatgggcaacagagtgagaccttgactcaagcaaagcaaaacaaaacaaagaagggttttaaatggcatttcccgtgttgtctcatgcatcatttagaagcaccaccttggaaagagcaaggagattgcaaaccttttctttacaccaacatcaccaagtgatgcactttcatttgagaaacaatgagtgtattttgttatactgtgggtatactcgaatgcccttctaggctgcttcataatcattctggaaaggtaacaaacgtaataatacattgtcagttcattagcatgcttggtaggggggtgtaagtttcagctgagaaaattcatctgagaaacttttatacctagttcatcgtgctcatctcaaaataggatggaaattagaatttgccaatgtgtattacaagttatagagaaaattaagaaccgtatacagaatctgacttgtttaattttttctttaaggtggtgaatgatctcgtgttcagtggctccagtgatcagtcagtccatgctcacaacattcacgtaagctgtgttggtgttgtgtaaagaaactgtgaataaaataatggttaaagcttgatggttttcttaaacctcttgcaatttaaattaagccctttatccaccgaagggattcgtaatcatccctgtgcatatgctcttggataatattgtgtaatttagaaattctacctcatcaaagtttttaatggtggacagacaggctttatgtaaggtttagtttgaatgcctcatttaaacttgaaataaactgagcagctgaggcttccagaaagtggatatgatatgtagttaaaatagaactagtaaaaacagctgagagctgggcccaatggctgtcacctgtaatgccagctactcagaaggctgaggtgggaagatcacttgaggccaggagtttgagaccagcctaggcaaaatagtggccccatctcttaaaaaaaatttttt

SEQ ID NO: 78964 - DNA, 2812 bp, Homo sapiens
gtatttttagtagagatggggtttcaccatgttggctaggctggtctccaactcctgacctcaggtgatccgtccattttggcctcccaaagtgctgggattacaggtgtgagtcaccacgcctggcccaaaagctcattatataattatctatctttttcctaagtgaaaggccttctctgcctttgcttatcatgcagtcttcatagtgaagatgggtattgaaaattgtagtagtctgataggggaactaagatttaagggatctacttttggtttaatctagggactactgtattgtataatagttctgatttttgagtatcttttcagactctagcagacatgtctctgaaacctattcttgttttccagaaatatcttcagagccaggagatgatgatgaacccacagaaggaagctttgagggacaccaagctgccgtaaatgcaattcagatatttgggaacttgctatatacctgttcagcagataaaactgttcgggtttataatctggtggtaagttgatagaacatgtagaatgtttttggttgcaggttttggaaaatccagtttatacttttttaaacaataaagggaatttgttggctgtctgaaggaaggggtgggcctgagattgactttagatgcatttaatccagaagctcagcaaggtcactggggacttaatttctttttgtctccctactctgccttctctggtatcacctcttcctgaaagctagttcccctcctgcttacagggtaaatgtcaggagccactggagtctctttttccctcccaccagcacagaagggtcctgtgttttactccctgaacgatcacctttgcctgtggcaaagggggttgggattacaccagtggtcttggactgttcaggtcccaatgctggagttggtaatggggtcacttgcatagcagctacataatagaggagggatgaagtgaatatggggaagtactggaggaggtattttccctgacaagtgattgattacagagttcaagttattaaggagagcaacacttttccactgcctcacacttagtattatctgatgcttattactctcaaaagaatgaacttttgagttttgaatttgaatttgttaataaactaattatgtttatgaacaatgaaagcttaagaaatttgaagaacatgatgtctgaatgaataccatgaaaatatttaaaattgctagagtcagtgaaaattaaaaagttagatgatggaccaggaaaatgtgtttgctatataggcaacaggtgtgtagattcctttagcttaatgatatgaggattaacacgaatgactgaaaaaaggaagcagtgctaccaggatgtataagtgtaagatctaggggaacaggatatcaaaatatgtatgtgtatgtatatatgtacattctaaatagatctcagtatgtgcactgagataacatttggaatgtacccataagaaacaccaccagtggccgggcacagtggctcacacctataatcccagcagtttgggaggccaaggtgggtggatcatgaggtcaggagattgagaccatcctggctaacatggtgaaaccccatctctactaaaaatacaaaaaattagccgggggtggtggcgggcacctgtagtcccagctacttgggaggctgaggcaggagaatggtgtgaacccaggaggcagagcttgcagtgagctgagatcgcgccactgcactccagcctgggggacagagcgagactctgtcaaaaaaaaaaaaaaagaaacaacaccagaaccactagacctgtgatagcacctgacgtttttgaataccatggtgcattctcacaaactgcttatcaaatgctcatcttttgtgggaaattagctgcagtttggatttgctaggtccttggtccatatgtcagaaagctttgccctaaacgttaattaaaattctggctgtcttacagtgttgccataagtattttctggtatggctcaactaacatatactttcagatacctcattgcctgtgactgtttgctaggcacttggtgaacatacatttactgagcatcttttgtgtaccaggtgctgttttagacatgaggatacagcagtgaactgaatgttttagcatctttttgttgaggaaatatattatctaatcctcctatatctcataagtaataatctggtctgtgcttaaactttagagtcggaaatgtattggtgtctttgagggtcatacctccaaagttaactgcctcctggttactcagacctccgggaagaatgctgccctttacaccgggtccagtgaccataccatccgctgctataatgttaaggtaggtgggtccagagaaatccaaagtggttcatattgagtcgcctttgtatttactgtgtggagtggagacactgtggcagacgcttcattctacccaccatctcctttttgcttctaaacaatgtttagcacattgttgtagccctaggtagatatgagacttacacataaaccatattttctgtctctctccaccagtattttttcacttcctactattaataatataccttccttggtctttgccataaatgttatgcatatcatatgtcaaaactaatcctagatagaataaagagaaaaatgtaggccgggctcagtggctcacgcctctaatcccagcactttgggaggcagaggcgggtggattcacctgaggttgggagtttgagaccagcctgaccaacatggagaaaccctgtctctactaaaaatacaaaa

SEQ ID NO: 78965 - DNA, 1686 bp, Homo sapiens
agcaaatttttttaactactaagctgtagctaaattggatgggtgtggataatgaaaacttcaaagaaataaaagtaaaaggacttcagctaagtagacatttaagtgtctactaagaataaaccacaatgttaaatgtgtggacatttaaaacaagaaaaaagattgatagaaacaatccctccccacaaggagcttttgtagggaataagacacacagtgtttgtgagattcacgcaaggcagagggtagtaagtgttgtcataggagtgtatgtaggtgatgggaaactgaggggtgagataccagctgaaacagtcatggttttctgaacatatcattgaaatatttggtagagtttcagtcagtgataaattgcagcaaacacaaaaaaggatgcaataatttttttcctctcaattcaggagagatcagtgacagttgtccagtttatccagtcatcactgctagattgtccttaccagagtcaacagaaagtttccatgagcctagccaagaactgaagttttctgtggagcaaagaaataccagaaacagagaaaactctccctcttcccaatcagctggtctttctagcataaataaagaaggggaagagccaaccaaaggcaatagtgggtctgaagcctgtaccagttcttttctaagattgtcttttgcttcagaaacccctttggagaaggaaccccactctccagctgaccagcctgaacaacaggcagaatccactttgacatcagctgagactaggggaagcaagaaaaagaagaaactccggaagaagaaaagtctacgggctgcccatgttcctgagaatagtgacactgaacaggatgttttgactgttaaacctgtaaggaaagtaaaagctggaaagttaattaaaggggggaaagtaacaacctccacttgggaagacagcaggactggtcgggagcaggagagtgtcagagatgagccagatagtgactcgtctctggaagtcctagaaattcctaatcctcagttagaagtagtagccattgattcttcagaatcaggagaagagaaaccagacagcccatctaaaaaggatatttggaactctacagagcaaaacccactagaaacgtctcgttctgggtgtgatgaagttagctctaccagtgaaattggcactcgctataaagatggcatccctgtaaggtaagaatattgtattggtccagtcagaacaactttcaccaactttatttttttaaatagaatttgaaattatgaatcagaatttctttaaaaaccaaactttatgtgaatgcagtagagattgtggatatggaaaaattaaagctcagcagtagagattttctgctttctcttttgactgtgttataaatattcactctgcttttatttcccttcattaagaaatttcagatggaaaatctaatctcttatatcattgctactttgcccattgtttagaaaaatcctttgagtcagaaatttttacttttactacctgccctgttcacacagatgctgagaacacttttgctattattttgtagtgtggcagaaactcagactgtgatctcctccataaaaggatcaaagaattcttcaggtatttgctgttcagttttatttaagttaaccacagaattaaaagccttgtaaatatta

SEQ ID NO: 78966 - DNA, 2758 bp, Homo sapiens
tttcttcaggaagtcttctctaataaaaacaatttttaagtcaactaacagactaaatatggattggaaagagagtgcaagcagtctaggtctagagtccaatctaagcaaaagtcctgtgtgaagacagtggtagataaaggaagaatgggaaacgagtcctagaacaggtggtttgcatgggacagatttcacctggaaaggtggtggtagaaggcggtgattagatgagacagaatgatgtgatggtacactggagcttatgagatacctccatcttagcagttctcacttttggttcctagctttgatatcattgtgcttgactaaatgttttatgaatttccaatgacctactgaggagaacataaagtcttatcctaaataatgggtatagtttagtcttctgagctgtgtgatgagagggaaatctctcgtattaacctgaaccttatgatttcttttggcagaacgttctcaggttgaccagctgctgaatatttctttaagggaggaagaacttagtaagtcattgcagtgcatggataacaatcttctgcaagcccgtgcagcccttcagacagcttatgtggaagttcagaggctacttatgctcaagcagcaggtaacagcatgtggaggatttaataaaaatggatcatctccgaaatcttgttttgtgctgccaaacccatgtctggagtcaccccaaaagcaatggcaggggagtttccacaagggaagtgccccagactgtgcctaatgggggacagttaggattccaaagaaagaagcactaaatgccagggtgatgagtccaaagcatttattaggagagcttacttacagagtaggctgcagcagtccccacaagggtgttctccctaggtatatccacagccagggggcgggatgtggagtttatatgagggtttaaggaatttggctcagggccagggccaatttctttcagtgttttgggcaacaacctagatacttttatcagtgcctgggaatcttcaaggccccaggtagggttcaagcctgctggagaaaacctgcggctggctgggtcacagagcagtcaagacactctgatttttggtcaggacatagaagaaaaatggggagacctagaggaccttacaagttggatttcaaaatgcttaataaaatactttatttttagataactatggagatgagtgcactgaggacccatagaatacagattctacagggattacaaggtattcagagggcatctgatggattgggccctctatagcgtgttacttttttgttttctctgcttttttttttttttttttttttttttggagacagagtcttgctctatttcccaggctggagtgcagtggtgcaatctctgctcactgcaacctctgcctcccaggttcaagtgatactcgtgcctcagcatttgattagctggaattacaggtgcccaccccacccccagctaatttttgtatttttagtagagacagggttacagggttcgccatgttggccagactggtctcgaactcctgacctcaggtgatccgcctgcctcagcctcccaaagttctgggattacaggcatgagccactgcaccaggcctttttgttctctttgaggggatgaaaagtagtcatgaaaaggtcatgttatttctctcctgtctccttggtttcatcctttttttttgtttttttgagacagggtcttgctctgtcactcaggctggagcgcagtggcacgatcatggctcactgcagccttgacctcctgggctcaagcaattttcccacctcactccccccagtagctgggactacagacgtgtgtcaccatgcctggttattaaaatttctaacttttaattttataaaattatgatttaaattgtaaaaatttaaaggttataaaaagttatataaaattataaaaagttataaaaattaaaaaatgcttttatagagatggaatctcccagtgtttcccaggatagtcccaaactcctgggctcaagcagtcctcctaacttgacctcccaaatggttgggattacaggcctgaaccaccacgcctggccagtttcttccttctatagaaaggtctgtaaactgtgcatcccaaaaatgtttagcaacagacaatatgttatggaaagagttttgattaggaatcaaaaggcctgggttcaaatcttctcccttccattagtagcctatataactttggataagtcatttaaaatttgaaaaattggaatgttgctaggcacagtgcctcatgcctgtaatcccagcactttgggagtctgaggcaggtggattccttgagcccagaagtttgagaccagcctgggcaatgtggtgaaaccctgtctctacaaataaatacaaaaattattgataattattattagtaataataataattccagcctgaccaacatggtgaaaccccatctctactaaaaatacaaaaattagctgggcatggtggcgtgctcctgtaatcccagctactcaggacgctgaggcaggagaatcgcttggacccgggaggtggaggttgcagtgagccgagattgcgccactgcactccagcctgggtgacagagtgagactctgtctcaaaaaaataataacaataatagctgggcatagtggcatgtgcctataatcccagctgcttgggaggctgaggcaggagaattgcttgagtccaggaggtcaaggctgc

SEQ ID NO: 78967 - DNA, 1256 bp, Homo sapiens
tagagatgaggtctcacaatgttgtccatactgctctggaactcctgaactcaagcagtcctcctgcctcagcctcccaagtagcggggactacaagcatgtgtcactgtgctgggcttctctcatttaatactgaggtgataagcatagtagttaaggtcatgaattttagacttgcttcaaattgcaattctgctcctttgagctagatgctatatgtagtggatgttactggatgacttaaaatacacttcaagctgagggattgtcctatgacaaagagcttgtctcatggactgttaagctttttgttgtaaaggttttcttgctgaaatttaaagtagaaactatgccaagttataaatcagatatatttattttactggctttgtctatacttctacttgtgccttactacaccaagatgaaatgctttccctgacctccatgggctttcctacctctaggatgctaggaggcacttcaccctggattctttttttttaaatcagatacgtttattcaactaaagtttgcgttggtaccacgtgcgtgagacttctacgatcatgttagagatggtagcaatagtgaagaacagtgtatggctatcttagaattgattcctttttctcctcttggataatggcttttacacattggattttattcagttttctttatccttccaggatggatcttctcctgaactcccaagtcttgagagaaaaaataaaagaaggaaaattaaaggaaaaaaaggtatggtgcagaatattttggaagaaagaagttggtgttttttggttttttttggggggtgcgggtttttggtaacctccaactcttgggctcaagcaatcctcttctctcagcctcccgagcagctaggactactggtatgtgacactacattaattcttttatttttttgtagagacagggtctagctatattgcccaggctggactcaaactcctggactccagtgatcctctcaccttggcctcccaaagtgttaggattatagatgtgagccaccgtgcccagccccaagaggttcttgtagcagttcagcgtttgtgcagcttgacacagagcatagcttgtcatttatcaaacactgattgtccatttactttttttggacatttttgttgccttgcttaagaggaaagaaaagtttgatttcctaatacatccagttaacaactgtagaagaaatatatgatgtcacatagacttgtaagccaagg

SEQ ID NO: 78968 - DNA, 5076 bp, Homo sapiens
ttcaagtgattctcattcctcagcctcccgagtagctggggttacaggcgtgctccactacgcctggctaatttttgtatttttagtagagatggggtttctccatgtcggccatgttggtcttgaattcctgacctaaagtgaactgcccgcctcggcctcccaaagtgctggaattatagatgtgagccaccacacctggccaaatgtgccaaatttttaatatttctgagtgatgggggagatggttgtaattacttgaaatttaagtaatttaaaatgttttatttttaaattaataagttgaggaatatacgtttaaatatatcatttaaagatatgaaaacaaccactattagatataaaaccagactcggttacatattctaagtaacgggaggaaagtacaagggaagtttggtgggttatgcctttcaaggtagcataggaattcctttaaatcgctaatgaaaaactgtttttcttccagacaagatgaaccttccaatagcaaccaagaaataaactctgatgacagacgaccccaatggagacgagaagaccgaattccttaccaagacagagagagttacagtcagcctgcatggcatcatcgtggacctccacagcgggattggaaatgggaaaaagatggctttaataatactaggaaaaacagctttccacattctttgaggaatggtggtggaccaagaggacgttccgggtggcataagggtgttgcaggaggctcctcgacttggtttcacaaccatagtaattctggaggtggttggctttcaaatagtggagcagtagattggaatcataatggtacaggaaggaattccagttggctttctgaaggaacaggtggcttttccagttggcatatgaacaacagtaacggaaactggaaatccagtgtacgtagtacaaataattggaattacagtggccctggagacaaatttcaaccaggcagaaacagaaattctaactgtcaaatggaagacatgactatgctatggaacaagaaatctaataagtcaaacaaatacagtcacgacagatataattggcagcggcaagaaaatgacaaacttggtacagttgccacatatagaggtccttctgaaggatttacaagtgataaatttccttcagaaggcttactcgacttcaattttgagcagctggaaagccaaaccactaaacaagcagacactgctacttccaaagttagtggaaagaatggcagtgcggcaagggaaaagcctcgtcgctggacgccttacccttctcagaagactctggatttacagtcgggattgaaagacatcactggtaacaagtcagaaatgatagagaaacctctctttgattttagcttgataactacaggaatacaggagccccaaactgatgaaacacgtaattccccaacacagaaaacacaaaaagaaatacatactggatctcttaatcacaaggcctcttctgattccgctgcttccttcgaggtggtgagacagtgccccactgcagaaaaacctgaacaagagcatacaccaaataaaatgccatcattgaaatccccactccttccatgtccagccactaaatcattgtctcaaaagcaagatccaaagaatatctcaaaaaacaccaaaacaaattttttttcccctggagaacactcaaatccctcgaacaagcccactgtggaagataaccatggtccttacatatccaaactgcgtagttcatgtcctcatgttttaaaagggaataaaagtacatttggctctcaaaagcaatctggtgataatttaaatgatactttacgaaaggccaaagaggtgctacagtgtcatgagtcattgcaaaatccacttcttagcacttctaaaagtaccaggaactatgcaaaagcaagtagaaatgtagaagaatctgaaaaagggtctttgaaaattgagtttcaagtgcacgcactagaagatgaaagtgatggagagacatctgacacggaaaagcatggaacaaaaattggaaccctaggttctgcaactacagaattgttatctggcagcactcgaactgctgatgagaaagaggaggatgaccgcatcctgaagacttctagagagctatccacttccccatgtaatcccatagttcgccagaaagaatctgaattacaaatgacatctgcagccagtccacaccctggcttattgctagacttgaaaacctctctagaagatgcacaggttgatgactctattaaatctcatgtatcttatgaaacagaaggctttgagagtgctagcttggatgcagagcttcaaaaaagtgacatcagtcagccctcgggccctctcctgcctgaactaagtaagcttggctttcctgcctcacttcagagggatctaacccggcacattagtttgaagagcaaaactggagtacaccttcctgagccaaacctcaatagtgcccgccgcattcgcaatattagcggtcaccgaaagagtgagacagagaaggagtctgggctcaagccaaccctacggcagattctaaatgcatctcggagaaatgtcaactgggaacaggtcattcagcaagtaaccaagaaaaagcaagagctgggcaaaggcttacccaggtgtgtgctgcttttcggtgtcttttttttcctcactttcttttaaagtaaccctttgaccctgatcaagagaattctacgtgtttcatttaattaaatgtttgccaacaatatctgttgtagatgtcttgatttaatatcaaatagtgactgatactctatgacagatggaataaagtatttcctagcagagagtgcaggttaaaatggaagcacacctacttgagaaacaaggtggtgacgtaggaaaaaagtcatggctttacaggggtaaaatccgtcactttataggggtagaaaatgacagcataaaaatgtagagctatagatctctgtctttttctagatcttaattttggaatgcgtgctataacttttaaatacaactgttctcattaccttttacttagaacctacgaatagttaacttttctgtatgtactctgggcattatctttatgactacaacatgctttctcttaagcgcttgtgtaatattttggctcttcatcttatgttgaggtactagacttttctgaatgctaaaacagtgttcaacgtaagtttgctacttgaaagtcataactctgctgcatgatgatacagttctccaggcttcaggggcatttctgtacttgttgaaataatgggtttatttccccccactttcctttcccacaccttgtgagtagcatttgaaattgtaagtataaagcacttgtaagtgctcagtaaaagggtttttttttttgttttggtttgtttgcttttaaaaattatatgctgtatgtattattatagatttagcgctccatatgaaacaaaactcaatttttactccctcaaatatattattatagctgtatacaaacctctaatctggtacttgtgacaacgtaatatatttatatctgtaccactgactagactgtgagccccttgaaggcaagagccaccttactttttataacctcagtgcttgagagagcctggcacattaaaaaataatgcccctcccaacaaccatatccaatttatgttttcattttttctttcttccttaaggtttggcatagaaatggtaccccttgttcaaaatgaacaagaagccttagatttggatggggaacctgatctgtccagtctagaaggattccagtgggaaggtgtttccatttcctcgtcccctggcttggcaagaaagcgaagcctttctgagagcagcgtgatcatggacagagctccttctgtgtatagcttcttcagtgaggaaggtacaggcaaagaaaatgagccccagcagatggtttcacctagtaactcattgagggctggacagagccagaaagcaaccatgcacctcaaacaagaagtgacacctcgggctgcctccctccgaacaggtgaaagggctgaaaatgttgctacccaaaggcgacatagtgcacaattatcctctgaccatataatacctttgatgcatttggcaaaagacttgaacagccaggagaggtctataccaccgtcagagaatcagaattcccaggagagtaatggagagggaaactgtctgtcatcaagcgcatcctcagcccttgcgatctccagtttagcggatgcagccacagatagtagctgtacctctggtgctgaacaaaatgatggccaaagtattagaaagaaacgaagagccactggagtgagtataattccctctgctttttgtagaacatcgcatgtggcaagttggttgcttatgaaaaaaggttcaactgtttttcttgggtatctgggattgtgattctctcaacttctagaagaattgtgaggttcttactttcatcctactggtttcttacactgagtaattctgctaaattaaatgtaatctaatatgaatgtacagtaccaggaaaatatgaagtcatatctaaaaccagtgtccaagccaatgattctttgtatcacctgaccaaggataagtcacatattcagctgtaacccaatctgttttcatagatgcgttctgcactgctactgaagaaaggcgttctactgttgcacttgtagggcatggatgattgctggattcaggagtgataggcttaacactaagatggttttaatactattagagtgcatatatatgagcagagtatagaaatatttttagtctgtgtaactctgtccttcgtccttcagttacccaccctggcctttaagagtcttttatttcactgataccacttctgctcttccggcatttctgccgctaatattggcttaaccctctcagtatccctttctgaaaagaaagagttgctggtagtgatacagtctgggatctggcaatgtgaaaaaaaatgggttcttctcttcattatttatttatttattttata

SEQ ID NO: 78969 - DNA, 2454 bp, Homo sapiens
atatcagtaaagggtgagcatccctaatccaaagtctgaaaatgcaccaaaatccaaaacatttgagtgccaacatgaggccaccagtggaaaattccacacctcatttcattttacaaaattattcaaaatattacctaaaattatcatcagactgtgtataaaaggtgtatatgaaacataaatgaattttatgtttagacttgggtcccattcccgtaatatcccattatgtatatgcaaaaatattccaaaatccaaagcagtttgaaatgcaaaacctttctggtcccaagcatttcagatacgggacactcaaaccacatggttcttaaatcatttagtagcttagtccttcaaatgacattttcattacttttaatatagttgcagtttactttatcctgctttaggcagttggagcctctgggagacttctattttgttcttacatactagtgccattattagctttatctgtgtaaataattaaacattaagtcagaatagattagacatttgtatcatagttactattttttgagtcttttgatgtgcctccttgatgacctatttataaaatcatctacttcttttttttttttgagacagggtgtcggtctgtcacccaggcttgagtgcagtggcacgatgacacctcactgcagcctcaacttcctaggctccaacagtcctcccacctcaacctcccgagaagctggaactacaggcatgcatcgccaccatgcgtggctaatttttttttttttatttttatttttggtagagatggggtttagccatgtcacccaggctggcctcgaacttctgggctcaagtgatccacccaccttggcctcccaaagtgctgagattacaggcatgagccaccacacctggacaaaatcatctacttcttcaggagtatttttttttttcttttttccttcatgaatttttaacttagattattctttctggtctatgggtttagctgaatgctcctatcttctgaatctagccaattcatgatgatctaggaattctactttgtgatttatttatcccccagttctcccatttctgatcatatcagtatagctgagtcagtggtctccttggatgccagaagttgcatattgcatagaatcaaaagataaaggcaatttggttaatggttataaaaaaattctgctactgcatgtaataatacttgttactttctaaagagtctcctgtttagaaatgattgtaatttatataatatgagtggatgtttgaacttctaaatagacttttaaattccgtcttgtgaaaaaggaagaagttccaatttgtgtccaaaatatcatagacattgaaagcctttaaagccaattaaagtcagtattgagtttaagatttttaagtcaaggtcagaggaaggaacttaaatgtggaaactttgttttgagatgttgattctctgaaggcctgtggttaagagtatagactctggctggagtcagattgccaaggattaaatctctgctctactgctttctggctatcttattctaggcaagttatgtattctctctactgctcaatttctcatctataaagtaggaataataagaatacatgccatgcctgtaatcccagcactttgggaggctgaggtgggcggatcacgaggtcaggagttcaagaccagcctggccaacatggtggaaccccgtctctactaaaaatacaaaaattagccaggcgtggtggcgggagcctgtaatcccagctactcaggaggctgaggcaggagaatcgcttgaactcgagaggcagaggttgcagtgagccaagatcgtgccattgcactccagcctgggcgacaaagcgagactccatctccaaaaaaaaaaaaaaaatacttgcctcaggattataaaaactaagtgagataatctatataaggtgcttagcattaaatgcctgacactcaggtactcagtaaattttagctagcagtactcagtattttgagcacttaccacatgctaagcaccatgcccatgcacaccataggcagtttgtagaagaaaatggtttttacacctattgctgtgatgcttactgaagcttattcatgtttctgtggactcctcgtctgacatgaacatgaaacagctgtagtttctttttaaaaacctctggctcatgaagctccttatagcacatattatggttactacttgtttggtatatgctattttcctcctgtttgtgaccttactgtctcagctaggttctaaggccttcacaaactggaactgtacataaaagtcttcttataccactaacagttattgaatgggtactggacaaagtgtttattaataaaaataaccatgcaaagtatcatcttatttaaaataggttaagaaatggagtttttcagaaagaacctacaactgg

SEQ ID NO: 78970 - DNA, 1004 bp, Homo sapiens
actgcaatattcagtttagcattctatgagcttttaggtagaaaagtaggctaagatattttccatagttttagagagttttaagacaaaaatattttctttttttttttttttgaggccaagtctcactctgtcacccaggctggagtgcagtggagtgatcttggctcactgcaacctccacctcccaggttcaagcgattctcctgcctcagcctcctgagtagctgggattacaggcgtgtgccaccatgcctggctaatttttgtatttttttttagtagagatggggtttcaccgtattggccagcctggtctcgaactcctgacctcgtgatccacccacctcggcctcccaaagtgctgggattacaggcttgaaccactgcgcctggccaacaaaaagattttctaactggaaaattgagttgattggaatgtttatagtgtaaatgagatattgtagatttgttatagtcctcagactgttctgatgctgcccattgtgatagatttatataattaacttctttgtgtgttgctttgagaaacagcttgttattaacgttcagttggaatgagctaccatcaatttaattgcttgagagaaaagtatcggtatccctggtaaactggagaaagttgaggattattcttttttctttttttcttttctttttgagacggagtctcactctgttgcccaggctggagtgcagtggtgcgatctcagcttactacaacctctgcctcctgggttcaagcgattctcctgcctcagcctcttgagtagctgggattacaggtgcccgccaccatgcccgtctaatttttgtatttttagtagagacggggttttaccagtttggcccgggtggtctcaaactcctgacctcaggtgatccatccgcctcggcctcccaaagtgctggaattacaggtgtgagccaccacgcctggccgaagattattctttaagtgtataaatgtagtaagtgcagtt

SEQ ID NO: 78971 - DNA, 1137 bp, Homo sapiens
gtggatcacagtaaaataattaggaaaaaggcactaaaagcctccctgagctgccaatgggaatgtcaggtttcgcacccaaactcattttctttagaggatagcctttagtacttatttactcacatattggatatagtgttcctgacctgtaacaaatcatgttacatataagagagaagacaaacaggtagcaagaaaaaccagcttacaaaattatagaaaaccccataaaatctcaaaaattgtttacggacttggagcatttactgtaaggacggtcttcaccagcttgtaccatagggacaaataattatcagtcattatttctttaccctgttatcctgagtttgtgattatttcctctggatttcatttttaactactgggtttctgacactgagactttctttttctctttatagttgtgtctacagtttttggttgtgatctggttaagaattgcaaagtatgtgttacttaggctttgcagcaagcttgaataagcaataagtaactggtcttacttggttcatggctgtggacatgtgaaacatttccctattttttcctaatatacttcttcagatgtgtgggccgtaagtaacatctccagatagagactattaaaaaggcacaaacctttatttattcagcagctgttgtcgggtagttagagcaagcttaataaagaaaagcttatggagagagtatcttaagactttgtgtttcacacatgagaggaaattgtgtggtaacaggatgaagctaatttaggccctcctttaaatgccctaaggaaaattattgcctttgctagccaaggagcaaagctgtacatttcccccgtgattattttatttattcacacagtatagtaagtattttaactgattgttaataaataattatcaagtaacctcattaaaatattaacttgctattaggcttttaaaacatggtttcccaaacactatgttgaagcatgaatgcctgttgtgtagagaacagaggtaatagaggtaatatgcttactccacacacacttgaattttcagaagatgtggctacatagagaaagaacagggtagtataaccacatctcctgaaaacgcagatgtgtgtggaggtaaccat

SEQ ID NO: 78972 - DNA, 1370 bp, Homo sapiens
aaaaccatcagatctcctgagacttattcactaccatgagaacagtatgggggaaactgcccctatgattcagttatctccacctggccctacccttgagatgtgaggattattgcaattcaaggtgagatttgggtggggacacagccaaaccatatcacctgtctctatcccctgccccacaaaaaacccccaaaattagctgggcatagtggtatgtgcctgtagtcccagctactcatcagcctgaggtgggaggatgcttgagcctgggaggtggaggttgcagtgagccaagatcacaccaccacactccagcctggtgacagagccagaccctgtatcaaaaaaaaaaaaaaaaaaaaaaaagtagcatgtgtatattccatgtctttggtctatttgtgatttattttgatgtatttgacttctgtcaatttgaagtttggaaacaagatagatggaggaacattgggaacctaggaaataggaattatatcttatcccatgaataatagttacaagtttgtggttttttgtttttttttttttgagacggagtctcactctgttgcccaggttagagtgcagtggtgctatctcagctcactgcaacctccgcctcccgggttcaagcgattctcctgcttcaccctcctgagtagctgggattacaggcgtgcgtcaccacatccggctaattttagtaattttagtagagacgggttttcaccatgttggtcagactgatcttgaactcctgaccttgtgatctgcccgcctcggcctcccaaagtgctgggattacaggcgtgagccaccatgcctagccagtagttacaagttttgatcaggatgtcaacctaggtcatttgaaatttatttttttgtgacctacagtttaaaattctgtgggcaaattaatgtgttattaaactttcagcatctctttagcctattagtggaatttttccctgcccccagtctcttattatgtgaaggttaggtcttagcagcaatataaaggagactgtcactcactcaattttagtatggggagcccttattatttttaatatatacttttttgagacagggtctcactcactctgtcaccaggctggggtgccgtggcacgatcacagctgactgcaacctcgaactcctgggctcaaacaatcctcccacctcagcttactgtgtagctgggactacaggcgtgtgccaccacacccttttggcttttatttttggcttttattttttgtaaagacagggttcctctctgtctttcatttggcctttattttttgtaaagacagagttccactctgtctttcatttggcctttattatttgtaaagacaggg

SEQ ID NO: 78973 - DNA, 1075 bp, Homo sapiens
attgatgtatccatctatattcattcaacaaatgcttattgatgactatatgctaggccctgtccaagacatgggtaaagtaagagttgtagcttactcttgagaaactgtggataaaagaagccaaatagttgaaaagttgagtgatttgaaaggttttttttttaaatgaactttagtaaattctttataatgggatagaatttaacttacttagtttactcttaagtgttttgcttcctaaagataatactttctaatctttttggaaagccacttaaatatgtctttttaagaattctttttatttaaacatgaaatatattaaaaaacacagttaattattaaggaactgatttcagtattaaattgagaataaccaaaaacacattttgacataaggagtttgagccccaatttttgattgaggaggaacagaggagtttttttttttcaaagcaatcctgcttagttttaatctactttcttttattttgaaggagatggacgaacacatgcggagcatgttgcatcacagggaacttgagaacctcaagggcaggtatgggaacggctctcttccataagtttgtgaatgtgggtggatctgagtgatgatggtgcctgtcagtttgttttgcagtaatccgtcaaaagcaaatgttgtcttatggcgtagaacaaccttttagaattaataccaagtgtagtagatttttggcattcaaaagggataaactctgatacctttgggcatctcaaatgtgtgaattcacagcagccctatcaagtagattgcaacaaaggtgagttgggatgagctaactctctcattagtaagctttctcattcctacgtgctagccttgcaactaggacattttgtatttttacttcagcagtgttacaaattattgcatgccataaacgtttagtattgctggaattgtctgagacatccaaagtctgctaaatagcactgaatctcattggtataaacagaattgaaatataaaccttaaatgtatttaagaatgctggccaggtgcagtggctcacgcttgtaatcccaacac

SEQ ID NO: 78974 - DNA, 1361 bp, Homo sapiens
acttaaatttagctcaagtaaaggggattaggcatattggtaagcatctaaatcaaggaggaattgaataacaggaagcattgaataacaggacttgagaagtttttttttttagacggcgttttgctcttgtcgcccaggctggagtgcaatggtgtgacctcggctcactgcaacctccacctcctgggttcaagtgatcctcctgcttcagcctcctgagtagctgggattacaggcatgcgccaccacgcccagctaatttgtatttttagtagagacggggtttcaccatgttggtcaggctggtctcgaactcctaacctcaggtgatccacccgcctccgtctcccaaagtgctgggattataggcgtgagccaccgtgccccaccgaagatgtgtatattaatcgatttttcattctattctgtcactaacttgtcttagttttcaggtccacaagtgttaattttagttagcggccagtcagttgtggctagaagaggtcatgtgtaaagctactctctccttatttttttattttttattttttttgagacggagtcttgctctgtctccaggctggagtgcaatggcgcgatcttggctcactgcaacctccgcctcctgggttcaagcgattctcctgcctcagccttctgagtagctgggattacaggcacgcgctgccatgcctggctaatttttgtacttttagtagagacggggtatcaccatgttggtcaggctggtctcgaactcctgaccttttgatccgcccacctcagcctcccaaagtgctgggattataggcgtgagccaccgcacctggcctactctctccttatgaagcatctgtagagctaggaaggaaacgatggtaatcttcagtaaaattgccatttaaaagaagtgttttggctgggcacagtggctcatgcctgtaatcccagaactttgggaggctgaggtgggtggatcacctgaggtcaggagtttgagaccagcctggccaacatggtgaaaccccatctctactaaaaatacaaaaaattagctgggcatagtggcgcatgcctgtaatcgaggctactcaggaggctgaggcaggagaaactcttgaaaccctggaggcagaggttgtcgtgagccgagatcgagccgctgctctccaggctgggcgatagagcgagactccgtctcaaaaaaaaaaaaaaaaaaaaaaaaaggcgttttgaatcacaaccctgtttatcacactatagtagataactttaagtaacagtgggttgtgttgtattgtttttgacaaatgaactgtatataatgaaaaatttcaatgcaccaaatgcttacagtg

SEQ ID NO: 78975 - DNA, 1385 bp, Homo sapiens
ttgacacccaaaaagtttccggttttggatcatttcagatttcagatttcagatttttagatttggaattttcaacctgtatatgttctaacttaaacttgttttttttttttttttcaaagttggagtcttgctctgtcgcccaggctggagtgccgtggtgcaatctcagctcactgcaacctccgctcttgggttcaagcaattctgccttagcctcctgagtagctggtattacaggcacctgccaccacacccagctaatttatgtattttgagtagagacggggtttcaccatgttggccaggctggtctctaactcctgacctcgtgatctgcccgcgtcggcctcccaaaatgctgggattacaggcgtgagcccctgcacctgtccattctgaattaaactttaaaagaatcttattctaagaatctttggctactctcaaaacactgttttgagaatcagctgtgagaggacaagagcagaaggaaggagtcgtttcagtagtagggtaatgccgtgtgggatgagagatgtgctgggtggtgagaagtgttggaatttggctatatagcaaggtaggtctgacaatttcctaatgagggtggatatggggtgaaaaagaaggatcaaggatggctcccaaaatgtttaccctatgcacctggaaacggaaagatctgggggaggagcaaggtggaggtgaggaagataagacttgtaattttggttatgtgaagatgaatgtaagaaggtactgaggagaaaaggttactaaatgttacttcctcattgcagctgtgacgttgagtgcttcagatctggtcactatggtacgagaacgaaaatgcatattatgccacatcgtgtacagctcaaaaaaggtaataatggaagagggagaatctgaggctttatgactattttttaaagagacatgttattaatagatgttattaatattaatagacatatgttattaataggaaaagctttgacaatgtcttatttatgcttcttttctttcctaaaccatagtctcattccactggtttctttctcgttactgcctcctaaagccagtacctgtattattaaacttctgtccatccagaatttgagcgtattcaaaactagatgacacagaaatttagtaaccagttatagggaagataccttaaaattccaaggttatttgaagtcatactgctttctgtaattttaaaatcatgtactttttgattagctaaggatatagcatctattatatgtacctacaatctgtttatgcctatgcttgtgaaaaatgcagcacagcagaaatggtattaacaatatcctagatgtccacaaggtggggatgttgctcaaagtaaaact

SEQ ID NO: 78976 - DNA, 1067 bp, Homo sapiens
gtagctagtccaagatctgaaactcaggtctggctgttctaaagctcttgcaccttccattcaacttcagaaagttttacaaggaaggagtgttttcaaaatgtagcccgaacagttgccactgactaaaggaaatggcgggacaccaaggaagagagtaggagctacagggaggccgggaaagaacaaggagaaacaaggagaatgaaaaagggaccagggaggctgttcatagcgtccaacgctgcgtactgactctcccgcaagcgggcctgcctttgttcttcctccattctttttgagaaaaacctcttcctgtgtgtccgttgttcactctcttgtgttcaaataaagctagattattgagaactgcggacggcaaaggaaaaaaaagcgagcgtgacggcttcggtgtgcgcctgcgcgttggcggcggctgtggcggggcccggcggggagcgggtccggagcaggctcccggacccaaaactgaagggggcgtctgaggcgtcagggagctccctcgcctggctctcggcggcctgatggagtaagaggggttggctgtgaatgtgagtatcgacgggccggcctgcgttgagcgtatcggagcccaagggtcctggtcgtctgccccttagggaggttgtggggctgcaagacaccaccgggtttctactcctgcaggctgcggctcaggggcaacctggtggtccactctcccagagccggcgcgggtttatgggcaggcggtgctgctggcttcggggtacggattttcgcgggggcgttccagctctgctcccagccccagaaggaaacgtggctccaaagccttgacctttaggggaagccactgacctccttcgtccccagttgggcagggagtccaaagaccctggtccttaaagcccgtaggtctcaggccagggacacatttcaacctctcgcgactgacaacctccgttctttttcctcctttcgtttctctccttgtgggatgcgtcttgataataacaactaataacaaatagtaacaacagcttactgtgtccgtttaatattta

SEQ ID NO: 78977 - DNA, 1056 bp, Homo sapiens
gtaccagcatttcccttttcttgttaagagtgaaagtattttctccagtgagtgtcctggacaactggcatatttagaaatgtttcctgtgttcttcaggcacataacttcaaattttgttactttactaaattggacttttcttcacctactgcttttccatgttcagacaacacatgaagaacattgaacaaccaaaaattcactttaatagtcttttaatgcttgtcttccagtaatgccttgcttctctaagtagaggatccactttcctgttggaaagagtacttccctagaagtcctaaaacctgtattttaggttcacccttggcactcttattaaacattcatttagcctctctcggtcttgatttctttacttgtggtagactaatagatatagaaagaggttcttttatcctgttttcctgataagttcctaaattccataaatctacactttttgctcacacaaacttttatatatccttattcttatacaatatccacatttccatttctgtgcctaatagagttttgattcatcatggataatctgtcatcagaagaaattcaacagagagctcaccagattactgatgaggtaaatgttttacctaaaataagtaaataattctatttcagttttcatattggaggagtgagagagccttcttagggacattttggcctcttcctagtccattaatatcaaagaacacatttgctccttagtgccattgctggtttttattttctttttaactcaccagaaaactaaagtgaaaacaatttgtatgatttttattttttaggtaattattaatattacttaagtgtaacaaagatactctactatgtatttgagaaatgctagacttctatttaacaatttcctaatatctgtaatttacttagatttctacctacattaaatttttattcccatgaacttcaccatccaaatattctcttttttaaaaaaactttttctttcaacatcacactggaagtccttacacattttctcttaaggagcgcctgaaaataactaaa

SEQ ID NO: 78978 - DNA, 1514 bp, Homo sapiens
tttttccacagcaagaggctaggtgcctccggatcagtacgtgaaagattgttatcatgttgaatcgcttctaataccttttgacactgacatactcactgtggggagttattggtagattcaaggttgaagtttgctgttccataataatagcattttctggttgacactgtgaatggaacacaaagtgttaacttcacaacttattcttagaacaactaaaccgcatagaagaaggcttggaccaaataaataaggacatgagagagacagagaagactttaacagaactcaacaaatgctgtggcctttgtgtctgcccatgtaataggtgagttgataaattaagatggtttcaaaataagtaatgagagtaccccaccttctcccaccagctaaggtcagaagtatgactgggcttaatgaggaactctattagataaatctaagttgtctctccttcaggcagattaagctttttgtgtaaatactgcgtgttcactgaaaactgtgacttacatttgaccaatcctgggatcaagtccaatttcaatttgtagtaatacatgaaaaggttaggaagtatagggaaatgtatatctggatgatggaaagcaggatggagttattttcttttcctttcaaaggaggagtattaacaaaatatatattttgtggtaggcacatgagggatggccaaaagagtagaagagttgggaaagaatggcaaaacataaaaaatacataaatctaatgttagattatatgatagtgagcaaggctaaatctaatgttagattatatgatagtgaccaaggctaggtatacagaactgataaaggttgggttggagagcatcttatagaagaggtaggatgtggattgggctttgagtgataagaaggatttggatgaacagggaggaacagtgagggcatttcctatgaaaggttcaaaataaagattaacaaggagcttgacttaactgagctgtgtgactcatgtagatgagaagtggaaagtaagatataagtaggtagtagaggaacttgaatgccaaactaaggagttgacagattggagtggagtataaaaagaaacgacagtatctggagattgaatgactgtactcactgctgaaagttttgttttgttttttttctgagacagggtctctgttactgaggctggaatgcagtggcgtgatcacagctcactgcagcctctctttcctgggcacaagagatcctcccaccttggcctcccaaagtgctaggattacaggcatgagccactgcacacagccaaagtatccttttttttttgagacggagtctcactctgttaccaggctggaatgcagtggcgcagtctcagctcactgcaacctccgtctcctgggttcaagtgatttctcctgcctcagcctcccgagtagctgggactacaggcgcatgccaccacacccagctaatttttgtatttttagtagagacggggtttcactatgttgg

SEQ ID NO: 78979 - DNA, 1158 bp, Homo sapiens
cctcagcctcccaagtagctgggattacaaatatgtgccaccatactcagctaatttttatatttttagtagagacagggtttcgccgtgttggccaggctggtctcaaactcctaacctcaggtgatctgcccgcctctgcctcccaaagtgcggggattacatgcgtgagccactgctcccggccaaaagttcatattttaataactatgacttgtcaatcagagtttagcagattactttaagcaaacaagttaaaatgtacagattatttgatacaaactcttagctatgttttacaaacataattgtacctttctcttgtgttccatgtaccttcttggaagagtacagaagagaggaagtagatgaattttcttgagatcagatgttaggagaacaaggagaaagaagtctcccctaaaatcttagaggaagatcagctctaagtcacgtgttgataaataggaagagcactgaattagacctaagatggtctaatatcatagaaagtgggaaatgcagctacagagtattaattttatgtctctttgtgtatcccagccaagcataggcaagcttttcttgaagactggtgggaaacaaggtagggtatggtcctgaatcagcattcttcagcctctaacctcagtagaaccctttctcagtggatcaagagaaggcattacttttttagagatggcctctccctctgtctcccgggcttgaatgcagtggtgccaccatagctcactgtagcctcaaacatctgggctcaagcaatccacccacatcagcctcccaagtagctaggattacaggtgtgtgccaccatgcccagctaatttttgaaattttttgtagagacaggggtcttgctatgttgcccaggcttgtatcaaactcctggcctcaagaaatcctcccacttcagcctcccaaagcactgggattacaggcttaagccactgcacccaactggcacttctttctttttttttttctggcacttcttgagagatggaatcaaggggctgctgtaacaaaacagttcccttaagagaagaaagtattatctcagttaaagatgtctgattgtaattgtctttcttccacctatttctttcttacaccattgagaccttggccagtatgata

SEQ ID NO: 78980 - DNA, 1209 bp, Homo sapiens
tccgatcttaagtcataccaaggtgtaaaaattcagctccgactaattaaaatgaatattgaattatatttcattcagtggtttagtgcttcttccatcctgctcactggagacacaaatatgagtaaggcatacctctggccctgcctgttttatttatcatgacatgattttttatacctcacatagtattggatatacagtagttactcaataaacacttgttgatttgagtgtccttgagaaacttgttggctggtgggagagtttgacgtgtaaaaagattttttaaaattacaatgaaaaaatatataagaaaataaaatacataatagaagtcattaagagaaatcttaatcactaagaggaaggagtctcaaagcactccattggtttttgccttctctcatattgtctaattttaggaaagaatatcatcacccaaaattctgaggaaaaatgaaatgtgctctggtttaaatagttttcttatttttctttttatctagattctcagatgttggttgtttctatgaaaccaggcaggaaattgaatgcattatgtttttaaaactttaaacctgcttctgttctgtttgactggcatttactattttctgcatttcattctctcacctaatctcttcctttctaatctgcttactaaaaatgaagatttaacatcagaagccgggctcagtaactgatcaaagggaactttaagatgcagtcttgtggcgcagtttgggctgctaacctgctatctaaaggtgatgcttcaaatggcttttctgtgcatgtgcatggattttgtgaatggtgaaaactgtctctaaactgtgtggtggtgtgtagtgtaaagtgaatttgttcttgatgggtgctatctcacaaaagatggacttgacaaaaggaccttaatttataataccatcctttgacaaatgtctctgataactaagtttttgctaaataacatttaagattaccaaaataacaatactcctggagtttcttaagaaatttaaaataggttgatctttgagacagctgctgcagtctagttctgataaaaggtaagggaagtcatgctaaatgcttctctgtcttcatagactttgattttagcatcctgtcttccattaagtttccctacttttttctggttcttgagtcaagatttcctctattaaagttttgcttctaatg

SEQ ID NO: 78981 - DNA, 1082 bp, Homo sapiens
gaaattctaataaaagccccacttctgttacttctgttaatatttgtggttattaactttctgataaactaatatattgcttttgttttatttactagcacttactctgctctagaattttgcctgggacctttcttattattaacaaagaatacatgtgaatatttattttaaaaatatatatcctaccttgttccaagaaaaatttaacatggcttcttaataaataaatgggttaattaataaaaacagcatagaaacataattatgataacttaaagtggtaccatgaaacacacttggagaactagctcttcagtgttcataaatttgcctttgcaatgcctctcacaaaaaaaaattagtagtatcctttctgtaatgttaatgataaagtctaagattcaattctaggtttgccgaaaatgaatcctcacatgcctattaaggaagaagtcacttttttcataaaatctcttccctacctttttaatttttgcaattttaaaacttccttattaatgtaaaatgtagaataaatcagagatcaatatttgagcaacatactatttcgtttttgtttatagaaaagtgaaaactaaaattgaatgaaagcttgactttagccaaataatcaagaaaagttttgtgtcacttttccgtaacagccatttttttttccctgtaatagccactttttctttctttttaagacacttagacttatgatttttttttttttttgagatggagtgtctcgctctgttgcccaggctggagtgcagtggtgtgatcttggctccttgcaacctccgcctcctgggttcaagcgattctcctgcctcagcctccccagtagctgggattataggcacgtggtgccacacccagctaatttttgtatttttagtagagatggggtttcaccatgttgcccaggctggtcttgaactcctgacctcaggtgatccacccaccttggcctcccaaagtgctgggattaccggtgtgagctactgtgcccggccttgatcgtttttttaaagaggaaactcttaaatgaaaaactcctacactacagg

SEQ ID NO: 78982 - DNA, 1047 bp, Homo sapiens
acttgatttacaaaatcatatggtggccagatttggtccttgggccgtagttttccaacctctctcttagggcagtgcttctttagatagacttaactgtgcattagaaccacttgaggggcttattaaaccgtaggtttctgggatgcacttacagtttctgattgagtaggtctggaatggagtgtgagaattagcattctcatgtctaacagcttcccaggtgatgctgggaattaagctttgagaaacactgtttcagagtttctttcttttcttacatggctttaagatactgtgctctctttgatgagtctcccagtttttattatagaatgtttcccaggaatggtaacctatattcttttggatcttatacttgctgagagtcattttggttacttacttttgtgaaaagtaaatccagacttttatttaaattcaacaaaacctatggaattaactgtcttcttgtgatagcataactaatgatgccagagaagatgaaatggaagagaacctgactcaagtgggcagtatcctgggaaatctaaaagacatggccctgaacataggcaatgagattgatgctcaaaatccacaaataaaacgaatcacagacaaggtaaaagctttttattgccacaagaaaatgagacacccagttcagtgtttcagtaatagacatctgtgctagatactgtgggggacacggtagaataagctcctgtcctcataggtcttaattctgatgaggtggtggttctaacacataaaacaagagccaagtcctccctgtcatggtagttggtgcattttgaaaccagagttttggaatatagtagttttacttaaaccttcacacatgaagcttagtatctactttagcttttgagcgtgtttttttctctcccaaatgagttttattttgttaactaattttttaattgagaatggggtcttgctctgtcgcctagggtagtgtggtggtacaatcacagctcactgcagcctgcctcctaggctaaagcgttcctcccacatcag

SEQ ID NO: 78983 - DNA, 1303 bp, Homo sapiens
ctgggattacaggcgtgtgtcaccacgctcggctaatttttgtatttttagtagagacagggtttcaccatgtcaagctggtcttggactcctgacgtcgtgatccacccgccttggcctcccaaagtactgggattacaggcgtgagccactgtgcctggctgagttttcttaaagtgagcttaatttctgaactcttagtgattcatatatgtacataaatctgtgatcccatttcttattgcaccattcaggaacactttatataaatgagtggctttttatttcatattattagtagtatcatggttccattacaggcctattaacatcatacattgtcattagtctttgaagaaaaaatatgtaaatatatatgtgtaacatgagaatttctctctaaagcagggcttaaaattttttggaaaagtttgacaaagcataccacatgaattcagatttacctcaatgctaagaattatgtttagttaggaaaaaggaaagtcattttgacctcaggtagaaaaatagattgctttgagttttatgtagctttagactttaaaaagttagaatttattctgtaactaaaaattatttgaaaaaattatgcctctggtttaattattggtgattacacactctttctcttacccttgtgtattgaactatgtccataatcaagttgatgtggatcctgaaaagtgttatgaacatctgattggtatttgtcacatttattttaaaattagcatctgaacacttcaaagctgtcagtgtgtattggtttcaccaataaccactgcttgatccttacaattaaattttttaactaactaatggtattgttctttcaaataggtaacatgtttctatgactgttatttgggggaaaatagtttcatcagctctcatttaacaaattaataaagcaaagatccatacatcaagaaacactacagcaggaagctgcctttagcatctttccagtatttattgaaaatattgatgggacttaaacttaccttgctaaaaatttattgtgaggttcattttaatcattactagtcttactcacttgagcttaaatacactagtgactggaagggtaatggttctgtgtgagaactacaactcactggagaagatacagttaatgtgggagctttcaaaggctaaagaggaaaatatttaaataaagtgagatgcaactacaccctctgtaatagaaatgctccatgtcaaaatgagtggtttggcagggatggtaaatatgtaaagtaaggtgtaaaacggaggattg

SEQ ID NO: 78984 - DNA, 1038 bp, Homo sapiens
caaatgcaaatcatgcataagtgaggtccataaatggaggtcttgaaagcccgtccatggaacccaggttgaaactttcccacagcttctgctattgagaaaaaagagaggtgaggccatcaaaattagactccatcatgcattagaaatggctgttcacttaaagccctttctgattttctcccataacattgtctggaaacttgattcacttttgaaaggtagtaaatggttaacacaagctctggagtctgaccacctgggatcaaattttggttcattcatttacttctagttgtgtggccttgagcataatactgacctataactaaagaggtaaaaaattatatcccccactgagcttgttttttaacactaagctccctcttcaagtttccagtcttataaccataatgatctgtgtcccctatagccatgcctatttctttgcttcagttttaattcatcttttgtttctatactctaaacctttccatttcatgtgtggattatgagtctgtccttaacttaaacatctatggcccagacatcctgaactcagttgcacttagaattagctttttaaagacatacactgtagtcccagctacttgggaggctgaggcgggaggatcacttgggctcaggtgttcaggaccagcctgggcagcatagtgagatcccatctctctgtctctctctctctctctcacacacacacacacacacacacacacacacgcacgcacacatggccaagaggtatgtgaaaaaaatctcaacactgctaatcatcatggaaatgcaaataaaacctacaatgagatgatctcattccagttatcatggctattatcaaaagtgagaaaatgctggcaaggatgctgagaaaagagaactaattcccacttggtggcaatgtgaatgagtgcagccactatggaaaacaaatatggagatctctcagaaaactaaaaatggaattaccatactatccagcaatcatactactgggtatttattgaaaggaaaggaaat

SEQ ID NO: 78985 - DNA, 1048 bp, Homo sapiens
gtaattacatctaaaataagccttataatgattgggtgttataatgattgttactgggttaatttggacttgaaagagaagaacattttggggatgtaatgtaaacaaagctacctaacttggaatgggggatggatgagaaggggaggatcttccaaatatcacaaaattgctgtcggattgtgccttgggcccctttacaaaaggagcccattatacacacaaatgctctccggcattttgatggcaccctcaccttctaaagactatgttggtaaaatgcaatatctaaaaatggcacatgtgggagttttacatatattaacaagaggcgaagcaggctgccatatagtctttataaacttcatcaaagttgttttcagctctatcacattcaggttttaaaaaaatttttctttgccagctgttctgcctgatgagatatgcaatctgaaaaaactagagacgctaagcctaaacaacaatcaccttagagagctgccgtctacctttgggcaactctctgccctcaagaccctgagcctctctgggaaccaactgggagcattacctccccaactttgtagcctacggcacctggatgtgatggatctctctaagaaccagattcgaagtatacctgactcagtgggagagctgcaagtcatcgaactcaacctcaaccagaatcaggtctagagctttaaggttttttttcctacagcatatgtgtggctttaaggtctcctgatacctgttaacctcttgtttcctaaactgccatcatagagctaagtatcagaggctaaatgagaggtttcttctataggctgaactaatttcaaggcccaaagtgccatggaattagttgagacactggatgtgttagttgtgtaggtgttttggggagggtggggtaggtaacagggagagatcatttcaaaagttaaactactgtctcacaaatcttgaagacttcttcagatcctcctcaaatatatgcccctaaccagctagccaggagctatgtcagggatataatgtggaa

SEQ ID NO: 78986 - DNA, 1045 bp, Homo sapiens
atacacagtatgaatgacttgtaggcaactgaggtcatttaacgaatcagataaataattccatgaaggcgaaaatatttgatttcaaccccggaagctctgagagactgggcctgagtcatttggaaaggtagaggtgattctccaacaaatttagcctttgaatcctttgataaactatcagtaatacaaatctattttgtatggtaccttaggaaataatacaaagggagtgtgttgtttgtttctcttattttttttttaaatatttgagcaagtgatttgtgatggtgaaggttctaaaacaggaattacacattgctactattttactttgtacttcatgttcaaaggcagtgttgaacataatattttctcatattttagactatgggcatgctattccaatgtacctagaaactttttgtgacattctgctactttccttattcatttaccaataggagatgttaaacatgtctaagaaaacagtttcttgttttgtgaacttcaccagactacagcagatcacaaatattcaagctgaaatctaccaggtaaatcattttgttttcactttcttttttttttttttttttttttttgagacggagtcttgctctgtcacgcaggctggaggctggagtgcagtggcacaatctcggctcactgcaaactccgcctcccaggttcacgccgttcttctgcctcagcctcatgagtaggtgggactacaggcgcccgccaccatgcccggctaattttttgtacttttagtagagatggggtttcaccatgttagccaggatggtctcgatctcctgaccccatgatctgcccgcctcggcctcccaaagtgctgggattacaggtgtgagccactgcgcccggcctgaacttttcactttctactcctagtataggaaaacaaaaacaaaagttggccagatgtagtggctcacacctataatcctcgcactttgggaggccaaggtgggaggactgcttgagcccaggagtttgagaccagtgtgggcaacacagg

SEQ ID NO: 78987 - DNA, 1015 bp, Homo sapiens
attagccaggcgtggtggtgggcgcctgtaatcccagctacttgggaggctgaggcaagagaattgcttgaacccaggaggcagaggtttcagtgagccgagattgcaccactgtgctccagcctggtgacatagcaagactccatctcaaaaaaaaaaaaaaaaaaagaaaagaaaatggaatggggtttttttatctagggagaaaatgattaacattgaggtttctctaacattaagttggattccagataggattactgttgtctctttccatttttttatttggatgacaagttgcttaaagtgaaagagaaggacctttttttaatcactaatatttctatgaatgcaggaaggttgttattggctctctaggttgattgtaattcttatctcaaattaaaagtcctgattaaaggagaagaaaaggaacgtaaaacaattaaactttaaaaaatggttgacttttttctttctctttcagatatatggtacatttgctggagttggctgtgactttcattgagagattagaaacccaccttgaaacaattagaaatattcctcatttagctgcaaatctaaagaaaatggtgagtattaatatagcaatcttcagttattttttactagaaacttagaggtgtgctctcccagtttagctttttaatagctaatattacgagctagttaatttttaaatcaagaagtattttcttggcctggcatggtagttcacacctgtaatccctgcactttgggaggccacaacgggtggatcacttgaggtcaggagttggagaccagcctggccaacatggtgaaactccatctctactgaaaatacaaaaattagctgggcatggtggtgcgtgcctgtaattccagctacccgggaggctgaggcaggagaactgcttgaacctgggaggcagaagttgcagtgagctgagatcgtgccagtgcactccatcctgggcgacagcaagactccatctcccattaaaaaaaa

SEQ ID NO: 78988 - DNA, 1065 bp, Homo sapiens
cttaaatgtgggcctgaattttaggaaggaagttaggtttagcaatataaattgagggtcatctgcattgagtgattattgaagacaaaagagttgaactcacaaagagtaggtttgtactgtaagaagtgggaaagcacagttttaaggagcttttgaagtaaggggctggaaaaagatcatgtgttaacctttggtatcagttactgatgatataatgaattaataagagacataatttctcctgtttcccttttcaaatgttacagaaccaggctttagcaaagatggatatattggtgactgagacagaagaactggcagagaatatactcaagtggcgtaaacaacaaaacgaagtttcgtcttgtatccccaaaatattagctgaagaaagttatctttataaacatgatattataatgcctcctttaccttttacttctaaagttcatgtccaaactattaatgccaagtagtcatcaactttatttttgcttaattatgtgtagtcatatgaagtctatttctagttgactgtaacatgggtattaatagtctttgctgctggtaatactgaaagaacctgctttatattggagtatcaagatctcaggttcattaagaccaaactgacttttcctttgtttttcatatatttttattctacctttcagtaaaactagagaagctaaaaaatagccatgacaatttattaatataagtgaattaaccatttctcaggtgggaaattctctttttttaaaaatgtgtgtttatcgtctggtgtggtggctcacacctgtaatcctaacacttggggaggctgaggcgggcagatcacttaaacccaggagttcaagaccagcctgggtaacatggtgaaatcccatatctacaaaataaacaaaaaattagccgaccatggtggtgcatgcctgtagtcccagctattcgggaggctgaggtaagaggatcacctaagcctgtgaggtcatggttgcaatgagtcatgatcacgccactgcgctacagcctgggcgacacagtaagaccctgtctcaa

SEQ ID NO: 78989 - DNA, 1024 bp, Homo sapiens
aaaattaggccgggcgcagtggctcacacctgtaatcccaacactttgggaggccgacccagatgggtggatcacctgaggtcaggagtttgagaccagccttgacaacatggtgaaaccccatctctggtagaaatataaaaaattaaccgggcatggtggtggacgcctgtaatcccagctacttgggaggctgaggcagaataatcgcttgaacccaggaggcagaggttgcagtaagccaagatcgtgcctctgcactccaacctgggtgatggagcaagactccatctccaaaaaaataaaaaatacaaaaattagccaggcatggtagcatgtgcctgtaatcccagctactcaggaggctgaggcaggagaatcacttgaacccaggaggcagaggttgcagtgagcccagatcgtgccaccgcactctagcctgggcaacagagcaagactctgtcttaaaaaaaaaaaaaaaaggtgtttctgaattagaagggtcttcttgaatctgaaaatgtctatgatgattattcctgtgggaatgtcactaagtatgcagaaaagagtaacacagccagcctgacttatcctttgaaaggcctgattataaggtttgtcctcagctgttgcatctgggaacttagatatcagaaggtatcttagtctgttctgctgtcataacagaattacacaaactaagtattttataatgaacagaagtttatttggttgacaggtgtggaggctaggcagtccaagaacatggtgccagcatctagtgagggtcttgccatggcagaaggcaccacatggcaagtgagcatgagaaagatatatgggtctaaacttagccttttatcatgagcccactcccaagatagcagcactaattcattaatgagggcaaagccctccttacctaattactttttaaaggtctcataacacttttacaatgtcaattaaatttccaacacttgaactttgggggacatatttaaaccttaacaggagggct

SEQ ID NO: 78990 - DNA, 1054 bp, Homo sapiens
cctggtaaacaacatttctcacatgttgtcacaattcagttgctggtggaatgaaacaacagatatgtgtgactccactgttagaggactctggaagcttatacctggtttcccccagactttgcctctgtaccttttctctttgctgttttgcttcatatgcttttgctgtaataaatcatagctgtgtgatgatatgctgagtcttgtgaattctcctagcaaatcatggaacctggaggtagtcttggagaccctggcatacaaagcagttcctaagtgtttactggtagctgtaggaataggcaaagaagaaacagcaaagaaaaaggcacactgtggtataactttggaggtttaccttgcaaaatgctcagatattttacctatcagaggttattgtgcatataatagagagtgatatactaacaactgcctcaggatatactctttttaatcagtattgtaactaaccttggcttattttacttttagacttggggttctattttgctttaaaacatgtacatcagttttgttttttgttttgttcttttctttcctttttttttttttttttttaaagacaggatctcactctgtcacccaggttgctgagagtgtggtgtggcccaatcttgacctcactgcagccttgacctctcaggctcaagtgatcctcccacctcagcctcccaagtagctgggactataggcacgcgccaccacgcctggctaatttttgtattttctgtagagacagagttttgccatgttgttgaggctggtcttgaactcctgggttcaaacgaccctcccgcctcagcctccgaaagtgctgggagtacaggtgttagccactgcgcctggcctcattgtactccttaacacaagaagacttcaacaatgataagtagttgtttataaggaagcaggatcattaccaaaataaatcctgctaaaacaacaggaatcatgttttaaagcctagtttgctaatttttgctagtaggataagagtgatcgtaatatctcgaacattacatagacactt

SEQ ID NO: 78991 - DNA, 1021 bp, Homo sapiens
taatatttaagatgtttattataaagatactttgcaaggttagtatagcacagttgtacagattggaagtactctaattggtactttaagaaaactttgaaataactaacagattttcaaaaagaagaaacttcaatacatcaagaaaccattggccttttcaagtaaccattttcatggtaggtaacaaaagaagcttatttcaaatgcggtaatatcgtgtatttcctcatttcttcataactggataatcattgggaaattaacatgaaatctgagtcctggctatttcttatgatacttttgtctgaaactaatgatgttttggtctgagaaatggtagtgagaggtatcacttccagaaagaacaaagaaggtgggaaaagactgcttgaacaagacatcaaagttggctagtgtccatttaggcttgagcctcctcatgattcaggtgggtataagttagctcaggtagtgttctgctcctatgataggtgaacagccatgtgcacaagggaattatagaggttagtatcttctttgaaccttaggcttgtacttgtcctcctaggtagagtggaaaagggctagacagctagtcagccagcctgcaaggtaggtaggaggcaggtgaatcttatcaatctgctgtttgagcagccaaggctttgccagctgagcctgttggtcacccgtcatgtgtcttgtggttctgcttagctctcggtcaagtttccaaggcagcaggaggtctggccagtgggtctacaggacttctctgtttctctgaagcagcagtgttgtcttggtttgagcactgttaaaggccatgtactcagaccccatcatggccagcaagccttgcctcattcacttctatggccacagacagtagcccttgccccagcagctatcagggtactttgcaaaagtccaaacctaaaattggaaaagccatttacttggcctttcatggttcattatcatcatatcacatatgaaagaaaagactatgggaata

SEQ ID NO: 78992 - DNA, 1079 bp, Homo sapiens
ttctcctcctgggttcaagcgattctcctgcctcagccttctgagtagctgggattacaggcatgtgccaccacgcctggctaattttgtatttttaatagagacgaggtttctccgtgttggtcaggctgatctcgaactcccgacctcaggtgatccgctcacctcagcctcctaaagtgctgggattacaggcatgagtcaccatgccagggtggcccttgattttttatcccagcactcaagtgtgtatgaggcatctggttactagtgtttgtaaccattcccttgagctcctccaagaagaaccagcaaagtaactaactttgagtaagaaagatgggactcctataacagtccacagttgtgactgtatttgtggcgtagaagacagtggcctttctgttagcggaaagtatgagcattctgatagctgtttgagacctgcctggccatggcatacgtgtggctgttctgtacataagaggaattaactattttgtataacatttgataaatcagtcatcttagagggggtgtgtgaatgtgttaaaattttatgtgtgtgtgtgtgtgtgtctgtgtgtgtgtattagtatcattaagcttgagtatgagtttggttgtgagtcccgtattttacatttatgtgtcttaactgtataaaaatctagtgaaagcccaaaaggccatagaggagggaaattcataaatatgattcttcttttgcctgatttgaaatttgatggaaagatcaaatgagatccagacaggaagcctgtgcagagagataaaccagtgtctcctgaggtttcttctggcttgtttattaattgtctgagtccctcattggtcccaggaggagttaggataggaaagagaaggaagggaacctctgtcacaagctggagtggagccagaggtcccagagtggtggcaggactcatatctacatgatacaatcagaggccctcattgctttaacacagaaattggagctcaggtttaaccctaatcactatggctctgaggccaccacggacgggtaagaaaggtggaatctatacaatcttaggact

SEQ ID NO: 78993 - DNA, 1115 bp, Homo sapiens
aaacctgggaggcagaggttgcaatgagtcgagattgcgcaactgcactccagcctgtgcgacagagcaagacgccatctcaaaaaaaaaaaaaaagtaatgtatattttatgttcctgtagcagtatgctagtttattttttatttttatttttttagccacaaggtcttattctgtcacccaagctggaatgcagtgatgcaaacatagctcactgcaacctgaactcctgggctcaagtgatccttccgccccagtctcccaggtagctagggctacaggtgtgcatctaggcagcggatttttaaatttgctgtagagatgggatctcactatgttgcccaggctggtcttgaactcctggcctcaagtgatcttcccacctcagcttcctaaagtactaggattatagatgtgagccagcgtgcttggctgtagtatgctaatttaaatcctgataaggagcgggacatgaacatcaagagccggtcttttctctggtcagggcatggcaaatggatgacgcaataggtatgctagtgactgattctgctacctatgtcttttcccaaatgtttaatcataaatagcagcctagaaacaacaacaaaaacaccatttcctttgctaggaaccagtttaagtttgctctgtaaaactctgtgggtatacatatctgtgtaaagcaatactttcaaggcagaccatgagttgatgcagcagtatcaaacttctcatcttaaaagtctgtgtgtgggccgggtgcagtggctcacgcctgtgatcccagctctttgggaggctgaggcgggcagaacatgaggtcaggagattgagaccatcctggccaacatagtgaaaccctgtctctactaaaaattcaaaaaaattagccgggcgtgtggcacacacctatagtcccagctactcgtgaggctgaggcgggagaatcgcttgaacctggaggtggaggttgcagtgagccaagatcgcgccactgcactccagcctggcaacagagcaagactccgtctcaaaaaaaaaaaaaaaaaaaaagtctgtgtgtgtatgtgtgggaggagtaaccataggagacctcagacatagttcagat

SEQ ID NO: 78994 - DNA, 1036 bp, Homo sapiens
ggattacaggagacgccaccatgcccggctaattattttttaatttttagtaaagacggggtttcaccatgttggccagactggtctcaaactcctgacctcagatgatccacctggctcggcctgcctaagtgctggcattacagatgggagccatcgttcccggccctgtttcttttcctttcctcctactctcatatttataggtcctctgatagaacctaatattgtaaaccggatttacacacaatccgttaagctatacacctagaatgggtagaagcattttataaagactaatcaaaatatcttctgcttatatttatttttaacattttaaaacgctttcacatcggtgtgatcagtatggacatttaaaacaaaaggttgaaaagaaaataagcattaaaatgaaatattagaagattcacttccattgtgatggattgaggaggtcaagtcatatccccaaaaagcaactataaagctggacaaaatcctttctgtggtctgaaaatagattaaaggaatgtaacaaagtgagaagtaccacacccaaaataaaatgatgactaaaaacttcctaaatttgttgaaaatcatttatagatctaagaagctcaaaggactccaagtaaaataaacacaaagagatccacacctagacacatcatagttaaactgttgaaagacaaagagaaaatcttaaaaacagctagagaaaagtgacttatacagtagaacaattacgtgatgaatggctgacttctcatcagaagcattgaacccttagaagtcagggggctgagataatataaaaaactggcaataagaacattcccagattggaaaaataaaaagtagaatttattgccagcagacttacctgacaagaaaactaaatgaaatcttctaggctgaaagaaagtgatattagaaagtatcttaaatctataggagacagtgaaatatctgggaatgataaatgtgtgagtaaatataaaaaaaacctacattctttctcgtttcttctcct

SEQ ID NO: 78995 - DNA, 1020 bp, Homo sapiens
atgttttcattttgtcgcaatagggtagacacagggttccttttgataaggttaccttctggtttggggcatgaaaagttgatatttgtccttggttttagagtagaatgctgtcctactaccatcatttctcaaagaggggagtctaaaaaattatgtgactcaaacattccatatcgtgagtctaaagtctttaggaatacctaaaatatcctattgtatgcagaagggattaggaaatatgatacttaagtctgtgttctccaaccattgttttgttttaatatatttgcttcataattccttctttcttccattttcttttttcatcttttaagcccagaactcccaagttttcagcagctgccagagcctcaacagctcagtcagcaatggtggtgacagtgggatccttagctctccttctgggaccagcagtggaggggcaccctcccgaaggcagtcttatatcccataccgagactctgtgttgacctggctgctgaaggacagccttggaggcaactctaaaaccatcatggttgccagtgagtgggatgccagagctggacctgtgttgggactggtactctatctcagagaaagggccatggccccagtgagtgggatgccagagctggatctgtgttgggactggtactctatctcagagaaagggccatggccccagtgagtgggatgccagagctggatctgtgttgggactggtactctatctcagagaaagggccatgaccacctaggtttctcatttcatcaggggtcttatacagcatgggcagtagtaacaaggcaagtgattaagagctgggatggatgggctggcatgtttttaaactttctccttctacctcagcggtgtctcctgcacacactagctacagtgagaccatgagcacactgagatatgcatccagtgccaaaaacattatcaacaagccacgagtaaatgaggtgagaccttttcagaagtcctggtctggtatagtttacacaaag

SEQ ID NO: 78996 - DNA, 1008 bp, Homo sapiens
attagagaactcagagaagagattgaaagactgaaagccctgctgctgagctttgaactggtatgcagacagtcagaacctttccgtacttaagtgaaattctccttctgagcctcttttcttctccatagagtctgggccctgctgcattctatgttctcaattgactctcttacggcagagacaggagcaaagacaaaacagagatttctctgatttctcagtgtagcttcagatggtgtgggcattttttcactttatcatctcttgtcttgtgcctggatggtccttgccctgtgtgggcaggtacggagaatggggccctccaggaaaatttctttgtattttccatctttgtaccaatatgagcccaaatacttaggctcctgatttcttattttaataataaagtttttcctttatctgcatcttatcctcctccacaagtgtaagggtgggacctacctgaagttcagaccaggaaaatatcaaagcacatctctatctttgtgcagagaaacttcagttcattgagtgatgaaaacctgaaggagctggttctccaaaatgaattgaaggtgggtgtgttgggtggactcagttgttctttacatcacctgggagctcctccattattccggagctaggtagggttgctcccttggcagggcagagaagagctgtctcatttaaatacaatgtttgtttcctttaagccttgaccgggggatgtgtttgcctagggggactgttaatggctttctgactttctgtattgttctctcagggattcgtaagtcctttggatagtgagagtagcctgggggcaaaagactgttttcttgtctaaatcagtcaaccaagatgtattcattgtttgaggatcaaataggtgctcagcatgatgctgcaagaggtacagagaggtccctgccctcatatggtttgcagtctagttggaaacacatttagagaatggtgtgtttcatgaaccatgtgatttagctg

SEQ ID NO: 78997 - DNA, 1084 bp, Homo sapiens
agagtacatcatggtgttgtgctcttctcttgcctttttaaagtcttctatggctctctagccccacaggcactgacatgagctttcagacacacaagaatgtgtcctttcattcagagaagacaggaatttcagaatcaaggcctctcccacccactgtctccactcttgagcaccagctctaggagcctgtaggctgggctggtcctgcccagctactgtagccagcatctgtaccaatccctggtggaggtggtgtggtgtggtgctcaagtccgtgattgggcaaagggaccagggagaggaacctgcacgactagagaaaaatataaattgtcagctgggctcccagtctggatttgtggttgtgtgtctacgagtctctccctctgctcttggatgtggttggctccaaagcctccctttattccaggtttcctttccctcatttatctctggagcagcattcatgaggagcctgcaaagctggagctagctccagagccaggggaaattggccagtctgccttccttttctccttgcagcagtaatctggaccagaggggaatttgtctttgaataccattgcctgtgttcttggcattttcccatttggaattgtagggggttaaccttaagtgcctagagcctgggagacactgttgctgcttccgctgccaccaccgctgccactgcggctttagtaagtagatgccactgcaatctgctgcagaagctgccagaccccgaggctgggggacagctgtgagagaagaagcaggagagtgcagtggagtcctcacaagcaggtgtctaggcagcagctgggggatactggagccatcagagatgaagggcaattacctgataaagacagaggtcccttggctggcaggtaaatgaagacttgccctttgtaatctagccagacatgtagtataaggttgctattttctttttcacctgctttctgggaacttgacaaaatgtgcttagcagagggaccattctgtgcggcctcttgggtgaatgtgctgcatctatacagatggcagcagacagcctctccttgcaggtcctatg

SEQ ID NO: 78998 - DNA, 1467 bp, Homo sapiens
cccttgggtaacctcagccgcttctgtgacaggagagcgcttgaagagcaatgtgacgaggaccatcagacaccgagggatggagagacatcccacagggcccagattcagcagcagcagagctacgtagaggatttgaggcatcaaatcctagcagaagagattcgagctgcgaaggaactggaatttgaccaagcttggattagccagcagattaaagaaagtaggtgtccaccacttaatgtgtctgcctcacctccttattctttcattttcatgcttcctcagccttctgtattctctcttttgttttctttgtgatatgatggaatctttggtattaggtgttctcttttcttttagacaccagagattcttataagaagagggctggaagcaagaataaggacgctaatttccttattgtcctcagaattacggacctcctacttactgctcctcatttggtcatgtatccataccctaccgcctgccctagcacgtgcccactgctgtgctgagtcctgagggtcttcattcccttaccttgtggtaagggagccctgtagccctgcagccctcaccctgccacatcaccttggccagctctttcactccacacaggtccagccatggctggaggtatctgagtccaggcagccacaagcagggaaggagatgctgaaattctctctgggtgtttttggttcccagaccagcagtgtctgctcagagaagagacctggctggccagcttgcaacagcagcagcaagaagaccaggtagcagagaaagaacttgaggcatctgtggcacttgatgcttggcttcagacagatcctgagattcagccatccccatttgtccaaagtcagaaaagggtggtgcacctgcagctcctgcggagacacactcttcgggcagcagagcggaatgtccggcggaaaaaggtctcattccagctagagagaatcatcaaaaagcagaggctgctggaggcccagaagagactggagaagctcacgacattgtgctggctccaggatgacagcacccaggagcccccataccaggtcctcagccctgatgccacagtcccacggcctccatgtagaagcaaattgacgagttgcagttctttgagcccccaaagactctgcagcaagcacatgccccagctacacaggtacagccagtagttgtcactgggaagcactcggttaaagtttacaaccttcttgcccaggtagttttctgtttttccccatgcctcatttcctcagtctgtgaaatggaagaatgtgtatatttctctcttcctcatgactttttccatcttctggttactcttctttctgtgtatatcgttttagattcaggcctttcccatcttccttaccccctgagtagcaattcttgcttctttggtaacatcttaggagtaaggatctcggcctcacttttcgt

SEQ ID NO: 78999 - DNA, 1061 bp, Homo sapiens
accaccttctccaagcagggcatcaaaaaggcatcagagggttctggcaactagggtcagaaatattaccaaaaagtcctctcacttgcctcttggcagtcctttgaagagacaacaaaatacaagggacccagacaccatggtcccactcacagatttcagcccagtaatggatcattcaagagaaaaagacaatgatttatctgacacagatagcaactactcattggattctctctcatgtgtctatgccaaagccctgatagagccactgaagccagaggagaggaaatgggatttcccagagccagagaactctgaaagtgatgacagccaactatctgaggactcactggctgagaagaggtaccaaagccccaaaaacaggctagggggcaatcgtcccaccaacaaccgtggccaacccaggaccagaactagagcttctgtgaggggcttcactgcagcctcagacagtgacctacttgctcaaactcataggagcttctccttggatagcctgattgatgcagaggaagaactgggggaagatcagcaagaagaacctttccctggttcagctgacgagatacccacagagactttttggcacctggaggactctagtctgcctgtaatggaccaagaggcaatatgcaggcttggtcccatcaactacagaacagcagctaggctggatgccgtcctgccaatgagcagttcgttttaccttgatcctcagttccaaccccattgtgagctccaaccccattgtgagctccaaccccattgtgagctccagccccattgtgagcaggctgaatcacaggtagagccaagctactctgaacaagccgactctctccaaggcatgcagctttcaagagagagcccactgatgtccatggattcctggttttcctgtgactctaagatcaaccccagcagccccccaggaatagtgggttctttatgtccaagtcctgatatgcaggaatttcactcctgtaagggggagaggcctggatactggccaaatactgaggaactaaagccatcag

SEQ ID NO: 79000 - DNA, 1024 bp, Homo sapiens
gccagggatatttgtgattctttagggaaacacacaacttgcagagagttcaccaacacttctcttcacccacagagaatgaaagcattggctagagctctgccattgcaacccaggctagagaggtcttctaagaataatggccagtttgtaaaagcatcagcaagtctcaaagggcagccttggggcttaggaagtcttgaggaattggagactgtgaaaggttttcaggaaagccaagtagctgaacacgtaagtagttccaaccaagaagagccaaaagctcaaggtaaagttgaagaaatgcctatgcaaaggggaggcagccttcaggaagaaaataaagtgactcagaaatttcctagtctcagccagctttgtagggacacgtttttcaggcaggaaactgtcagcccattactaagccggacagaattctgtacagctcctcttcaccaagacctgagtaataccttgcccttgaattctccaaggtggccaagaaggtgtcttcatgtacctgttgctctaggcatctcttcacttgactgtgtgctggatctcacaatgttgaaaattcataacagtcccttggtaactggagtagagcatcaggaccagagtacggagaccagaagccacagccccgaaggaaatgttagagggcgttcctctgaggcacacactgcctggtgtgggtctgtgcgatccatggccatgggatctcatagtcaatctggtgtaccagagagcattcctctggggacagaggacaggatctcagcaagcaccagcccccaagaccatggaaaggacctcagaatcaccttgctgggtttcagtaccagtgaagattttgcttctgaagccgaggtggctgtacaaaaagaaataagagtcagttcactgaacaaggtctctagccagcctgaaaagagggtcagcttctccttggaagaggatagtgaccaagccagcaagccaaggcagaaggcagagaaggagactgaggacgtcggactga

SEQ ID NO: 79001 - DNA, 1037 bp, Homo sapiens
agcagatccccctgcaagttggggcccagaacctctcactcagcgtggaactcacagaagcgaaactgcaccatggctttggggaggccgatgccctgctccaggtgctgcagagtgggacaggggaggcgcttgctgctgatgaacctgtgacatccacctggaaggagctctatgcacggtaaggacccccagcctggagtcgggaggggaaggggtgggctgtgaggaaagagaacccaagaaagctaatagcttgctgtttcctctgccctggttcatctctgggatcttccaggggtcagagatagatcttaaagtgaaggacattcagggccagcttcagcgaatcgtgttttgcctcaggcaaaaaaaggccattgagaccctcaggagagagcgggctgagcgacttgggaacttctgccggacgcgaagccttagccctcagaaacaactgagcctcctgcccaacaaagatctcttcatctgggatcttgacttgcccagcagacgccgagaatacctgcagcaactgaggaaggatgttgtggagaccaccaggtagtgtggaccgagaaccctgctgggagcaggctctgttgggggaggggagtatggggagcaggagctgaagttttagcatcctggagggttctctataggagacagggtaaatggaaagaggacatagaagggaatggaatgagggagggggtgggcagagagaaggcacaggaaatgatggacagaagggctctgacatgctatgcaagtctgcaggcctgggtctcaaggtggcttggttctctctgtccagcaacctctcctgaggctaaaaaatcatactttaaaaccctgtgggcaaatggaggttgggtcttttaagaaggtggtatcacccaagctagccttggatggacagaccaggactgtcacccacccaccatgttctttccaccccgtgatcttcctcaggagcccagagtcagtgtcaaggtcagctcacacaccctctgacatagagttgatgctgc

SEQ ID NO: 79002 - DNA, 1048 bp, Homo sapiens
cccgagaccaactgcgggagcggactgaacaagagaagctgagaatccaccagaagatcatttcccagctattgaaggtgtggagtggggcatgcctctgatttcaggataggcctggacctcagactggtacaccttcaccgtggccgcctctgagtcttgggacatacgtaacatttggaggaggctgtgggacccctgttgtcaactcaaagctgggctcactgtctttttacatcatcacaccagctcctttccccaggccacggcctgggaggaagaggctttggtgtgaggtgcagggtgtggggaaatacgagcagtggtggctttaaggaagccagggcatgtgaggctaagtcagggaggccctgggaggtgggtgaaggagcagtagaggtgagcagggaaggggtggctttgggtaggaaaaggcgtggcctggggaaagtgagggtgcatcagaagctggttaatggtgatttgtccttcccaggaagaggataaactacataccttggccaattccagctccctgtgcaccagctctaatggaagcctctcgtctggcatgacctctggctataatagcagcccagccttgtcaggccagctccagttcccagagaatatggtgagtaggcagatgttgggaatgagccaggggcctggactgccaaggcaagagtttgagcaggacgctgtgcctcctggagtttgggcaagacgccgtgcctcctggaggccactgctgacatgagcccttcttatgtgcaggcctttggttttccatttagttctgccccctgctccttctgttcattcattcaacaaatgtttattctgtgggtattattttaggatacagcggtgagcaaaactgttcttgtccttagactgtttgagggataaatattaaacaactgattttattgtttagttattgttgcagtaaattgtttgaaggcgggttgctaaaccagcataaaaccaggggtctgacttagtctagaaggtcatagagatactccgaacagaatgtgtttaa

SEQ ID NO: 79003 - DNA, 1080 bp, Homo sapiens
tgagaatttcttaaaccatttttgaggccaggtacagtggctcatgtttcaaactcctggactcaagggattctcccgcccagcctcccaggcaactgtactacaggcacagttatcttttgaattatattttcttgtaatacttttatactcctccatctcccagtatatctttgatccataaagcataaaggatccattttggtatgtctgtgaaatgggtctctgatgcaatctttttttttttcagatggctgcccatttgtctcagcagtacttattgattaatttatggatatttatttttggaagtcagtatccaataatttttggatatttatttttgtacagcactgggaacagattaggttacttaggaatatattatggagtgagaaaatagggcctaggcctgaattttgaaagaatcccaaaatgtcaacagttgaagaggatgtatcaacaaaaaaaaaaaaaccactcagagagatgagaagccggggcctctggaagtgattctgtcagtgaaagggagagactggctaagtcaaagcttgctgagagactcaggaaatgtaggacagaagttatttacatgatccagccacacggacaccgtggaccttggtgactgctgtttggaggagtgacgagggcaaatgttagattagggtgggttcagaagtcagtgagaagtgggagatggcaaacagcgagactggttgcaagaagcttatctgtgaagggcaggagagtgaagaggagggttttaaagatgagagaagccgggcacaggggctcacgcctgtaatcccaaaactttgggaggccgcagaggggaggatcacttgagcccaggagtctaagaccaacatgggcaacagggtgagatcctgtctttacaaattttttttttttttttgagatggagtctctctctgttgtgcccaggccggagtgcagtggcacaatctcggctcactgcaacctctgcgtcctgggctcaagcgattctctcaagtagctgggattacaggcgcccgccaccacgcccggctaattttttgtattgttagtaga

SEQ ID NO: 79004 - DNA, 1198 bp, Homo sapiens
aaagcagagagagaagaatttaaggtgcaaatagatttgagagaatgccaggcgtactccagtcccatggagtcccctcagcctgtggtgatgggagaagcacctcagattgtggtttggtgtttacaggcccctgggctctgccatccagatctaagtattggcgttcacctcctagtgacaaagtacaagtcaagggactgggacgggagaggtgaacccaacaggtcatcattccgctctgctgaggctgctgcttttgcctcacaatgactcatctatctcctaaggacactgggatcacccacaggatgcaggtcactaggttttcggtaacagcagcttcagaaaagattgataaactcctgtcgcattcccttctctccaattccccactgactccccttactgcaaaagcccaggaagccctcaagtctccaggtctcaggccaaagggcctgggcactggagggtgttcaaaagcgagacagaaaaatcccagggggctgtgggaccaagtcagcctgtgctgtgaggccagctgcaaaggatttatcacctgggccaagtagatgactctggtgacttccttcccttccacagtgatgggctgcaagatccaggcactgggcaggatctccccgcgaaccatttttctgctgggtcttggcatggatgtatcatacacagactgggctgccatgacagacaggtgaccctggggacagagggaaatgggagtcctgcctgtgtagtgtggacaaaacaggaacaggctcccgtgtagacagtatggtgaaaggcaacactgggccagccttcaagccacccctaccctggctccagccccaatttgccctccttcccctagaggacctgaggcccacatagattgtttctcacgacacttcagcccaagttcttcccacaacatctttaccaccaaggcaggcacctctttggcttccacgcagacacaacagaaatcccgtggctgcttcagtgcgcacagggtggtgttgcacaccaagtacactggagggacagggataaggaaggtcaggaggcccatggacagacctagtcctaaagccttcctggtcagggagccctccccccaacaccccatcacttgacacctagctcaacctaggctgagcaatcaaggtaacctgagtacctggcctccaaagagggc

SEQ ID NO: 79005 - DNA, 1036 bp, Homo sapiens
cctccatcagagttcgctccctgccataacttcagcctcccagagtactaacaaacagacaaggtttcatgtccatttcagtgtggagggcagttgagaaaaaataatatagccagccaggttgtggtctttagtgacaaaggatgagccattgagaattattacatgctgccttttccctcatctttctatgtattccaggactttgctgaagaattagcaacactgtctaatctgtttctagccgagccccacctgccagaaccccagctaagagcctgtgagttggtgcagccaaaccggggcactgtgctggcccagagctagggctgagaagtggccctgccttgggcattgcaccagaaccctggacccccgcctcacgaggaggcccaagtgcccaatgcagaccctcactggttggggtgtagctgggtctacagtcagacttcctgctctaagggtgtcactgcctggcatcccaccacgcgaatcctagaggaaggagagttggcctgatttgggattatggcagaaaagtccagagatgccagtcctggagtagaagaggtggtgtttgtttatctcttggatactaaatgaaatgaggtgtgtgggcttgtcaacacagaattcaagcctcatttgctatcccagcatctcttaaaactttgtagtcttggaattcatgacagaggcaaatgactcctgcttaacttatgaagaaagttaaaacatgaatcttgggagtctacattttcttatcaccaggagctggactgccatctccttataaatgcctaacacaggccgggtctggtggctcatgcctgtaatcccagcactttgagaggcctgaggtcggcggactgcctgaggtcaggaattcaagaccagcctggccaacatggcaaaaccccatctctactaaaaataaaaaaattattagctgggcatggtggtgtgtgcctgtaatcccagctactcaggaggatgaggcaggagacctgcttgaacctggaggtggaggttgcag

SEQ ID NO: 79006 - DNA, 1029 bp, Homo sapiens
gactctgtagttctgtttcgcaggttctgagcagtgcagagaacattgctgtggggcttgcaacagagaaagcctgtgcttggctgtcagccaacatcacaggtaaggtcctggatgggggagtggctgaatcaagtgtttaaaaagtggactggcagagagtcagaggcatcttgtgggcgatgggactgagagccagtaggaaacagcaaaaggcatgggttagcatggtgaacctgtgcagggccctcccgtgattcctttcccattctccctctgccccacagcactgatcaggagggaggtgaaagcagcagtgagtcgcacacttcgagcccagggtcctgaacctgctgcccggggggagcggaggggctgctcccgcgcctgtgagcaccatgctcccctcccctcccacctcatctccgagataaaagtacacggctaccctactccctttggcttccctgctcccacccccctgctctgttcctggtttttcctttctcacatcagctccaggatttttatgtagaagctgtctgtgctgtccagctagtccccgtttcactcattactgaatgggggttaggtagggcagagctgaattgaatggttttcctaattgtcactctgactttttaatcatccaaaaggggaaaagggcagctaggacatttttgactaaatgcttattatgcagatggtgatgagagtgcggtggtgaatggcttgatagcaaatgagtctctaggaggcagtcgccccagtatttggagacaatttcagaaatgttctatgtgggaggtgatgcttgtttagttacaggcagtaagaataaaccatcagttctcctaactttattttaaaactcaaagactctctagagcaggagtcaagaaacagcccatggactgaagcgagccagccccttgttttgtgagtgaagttttagtggaatgcagccatattaatttgtgtacgagctgcctatggctgcttttgtgcaactactgaacagcagagttg

SEQ ID NO: 79007 - DNA, 1062 bp, Homo sapiens
accatgctaacccatgccttttgctgtttcctactggctctcagtcccatcgcccacaagatgcctctgactctctgccagtccactttttaaacacttgattcagccactcccccatccaggaccttacctgtgatgttggctgacagccaagcacaggctttctctgttgcaagccccacagcaatgttctctgcactgctcagaacctgcgaaacagaactacagagtcaggggctaggggagggctgggtgcaacaaaggatgccagagtcgagcactgaccccgcccccacacaccctcccgcagcctcagactactccgtgcacctccccacaactgcctggcctgctagctgcaggcctccctcacacgtacggctgccggggtctcctctggaagcagcgcccgcacagccccagggctcttcctttgacagaacctaaaaggggacagatggggtcagtgatctctgggtatttcagcctggctgcagaagtaaatgccccgagtgcaccaagcccctgacctgggaggctgtaccttggaaggaggcaccgtttgccctcccgccccaccccaggtgccagagaaaagacaagcccaactgccagccccacagcatcacacacgctcccaaacctaggtttggcttttgtgccacagaaggcctacagccagtgcagggcttatagagaatgggcgcagggagaagaaaaaaggaggcatgaagagaagaaagggaaaaaagagtaagtgtgaaggaggaaagaaaggacagagaaagccaagaggagagtggatcaaatggaccagcgctgcttactcccgccccagggccaatgcctgggccccgtgagggcacagctgggaacacaagatctccaacagctgggctgggtctcccccttcctctccctgtgtcaccagctgctcttggagaagtgactctgcctggcgcaccagatctgccaccagtgtagccctgcagcagggacagcaaggttggggatggttggagggttaatcggaaagaggctgaaaatttatgggaatttggt

SEQ ID NO: 79008 - DNA, 1047 bp, Homo sapiens
tctacacctgctgcccctacatcggtgagcaccggtcttccctggacggtccttggtctgtccctccatgagtacccaaaaggcacccccttggcccagctcccttggatattgctccgttcatagtcattcctgggtatctgagcctcttgactccacaagtaaagtccatgatacttagggaggggagagggttctggaactgagaacttggacttcactgatacaggagagctccggaaactgctcgcttcgtgggtgtcaggcagtagtggacggagtgggggcttcatgaggaaaatcacccccaccactaccaccagcctgggagcccagccttcccagaccagccaggggctgcaggtaagggcagggcggagacagccgtggggaaaatgagggggggttgggggcggggacagggaggctggaggaagccttgctgcctctccctcctccccccaggcacagctcgcccaggcctttttccacaaccagccgccctccttgcgccggaccgtagagttcgtggcagaaagaattggatcaaactgtgtcaaacatatcaagtaagagtgggttaaggatcctggtctcatcgccctaccattttttcccctttttcctcagttgctaaactgagaaggtcagccagagggtgggtgtggggctgaaatggctgacacattttgaagcaaatttctgaccaaattcccataaattttcagcctctttccgattaaccctccaaccatccccaaccttgctgtccctgctgcagggctacactggtggcagatctggtgcgccaggcagagtcacttctccaagagcagctggtgacacagggagaggaagggggagacccagcccagctgttggagatcttgtgttcccagctgtgccctcacggggcccaggcattggccctggggcgggagtaagcagcgctggtccatttgatccactctcctcttggctttctctgtcctttctttcctccttcacacttactcttttttccctttcttctcttcatgcctcctt

SEQ ID NO: 79009 - DNA, 1050 bp, Homo sapiens
agataggctccttccagctccaacttgctggcttcattgcacttctcattctgtcacccacgtgggtgatttcattgctcctgggcctccctgtctgtcctgctgctcccttccctctggagtgccccttctcgattctggcttttcctgtacctcttccagtgcttatgccccacccaccccttcttctcagcttccagtttaaccagcatctcatggacagtctgagcttgaagatccaggagctcaatggtcttgccctgccccagcatgagcccaatgatgaagacggggagtcagacgtagactggcaggtccgaaaacagaacaagggaaataatggggtctgacccaggagggaagggagtatgttcaagaaaaactttataacagatcgggaattgttctggaagcctcatgcttggaccttttacttcccttgattccatgcagggtgagcggaagcaatttgctgtggtgcttcttagcctgagacttttggctaaattcctgggctttgtggctttcctgccataccgggggcctgaacctcccccgaccggtgagcttcaggactccattctggccctcaggagccaggtgaatgggcgggggattctggtgaggagggagcagggaggaccggccaggcactgaagctgactggtttccttggctattctggaaaccaggcaggttaaagggcatctcccagcccttcctagggacctgccccctgactgagctctggccctcccaggtccctccggtcctggatgtgcggactctgctgcagcgagggctgcaggcccgccgggcggtgctcaccgtgccctggctggtggagtttctctcctttgctgaccatgttgttcccttgctggaatattaccgggacatcttcactctcctgctgcgcctgcaccggtgagtggaacaaggctgaggcttgatgaaaggattcgggactcgggacattggtcaagcctgctattaataaagagggtcgagcagtctgcactgtgcgtgtggggccctggccataactga

SEQ ID NO: 79010 - DNA, 1032 bp, Homo sapiens
ttctcctacctataatctttctttaattttgtgttaaggctatgaatgtagtccctgaaagaattgagatcgggccaggtgtggtggctcacgcctgcattcccaccactttgagaggccgaggcaggacagtgacttaggcccaggagttttagaccagcctgggcaacatgacaaaatcccatctccaccaaaaaaaaaaaaaaaaaaaggccgggtgtgggggagtgcgcctataatcccagctacttaggaggctgaggtggaaggatctcctgagcctgggaggtccaggctgtagtgagatcacgccactgcagcctgggtgacgcccagcccagcctgggtgacagagacccccatctcaaaaaaaaagaaaaagaaatggacccctgtggtcttggcagctgagctttggtttctgggtaatgttcctgtcctgctgtcttggtccttgctctgtaaagtctcatatcctccccttgactttcattatctttgatccttggcccatgaccttgcagtacatatctgggcttgcatacctgcgccatgccttagagatcctctgtggtgtgcaggtgcttgcttcctacttgcagtctgtgttctggtctcagtcataggtgctcttgtccctgcagggttctttccaacctggacaaagggaccttgaagctgctggctgagaatgagcggctgctgtgcttctcaccagctctgcaaggccgccttcgagctgcctatgagggcagtgttgccaaggtagtaaccccagcttagttgcccactagcctggacctaacccttcctagctttcataaattcaggcaaccctgctgacgacacttcagtgtaatgtgagctaactctgggcaagaataagagggagaagttttctcagcatgaccctgcagttcctaacgttcctgctgtattttaggtctctctggtgatgcctccctctactcaagctgtctcctttcagccagagactgacaatcgtgccaacttctccagtgaccgagcctt

SEQ ID NO: 79011 - DNA, 1003 bp, Homo sapiens
cagggaggccgggaggcccgccgcggggtagccgcggggcgcgcagccagcttttccctccgaccgaggcccagagcaccgctgccgaggcccctctggcccgccgcgggggcaggaggcggggcccggggccggcccgcgagcgtggaggccgcggcctggaggagggggtcagcggggagagcctgcccggagccgggggccggaggcttaggggctctggcagccccagccgccccagcctcacgctgtctgatccgccaaacctcagcaacctggaggagttccctcccgtaggctcggttccccccggccctacagggtgagactcagctctcatgcaggagatgggtaccacgaaggctctggggagtcagtcattcgagctcggcgctccgcagtggagcgccaggatgggtagaaggctgggggtgatggtgagggtttttgtggggttttttggcaagaggtctagctgttgcggtggtggaggggagatgtttgaagataggaatttgagaaaaacctgtggctactctcagcaggacgaagccttctcgcaggatcaacccaactccggtgagcgaagagcggtcactctccaagcccaagacctgcttcacctcacccccaatcagctgtgtccccagttcccaaccctcagccctggacactagcccttggggccttggccttcccccagggtgcagaagtctgcaagaggagcgagagatgctcaggaaggagcggtatggcctggccgctcctggggatatcggtttcctcgctgtgggggatcttcaggggttttccctgaaattgatttccctcttggggactctgggtttgtctcctgggctgttggtatcttctctggagtgacctgagtgtggccgtagcagggaagccaagctgactgctcatgaaatttctttattccatagctctaagcagctgcagcagtcacctacccccacctgtcccaccccagaattggggtcgc

SEQ ID NO: 79012 - DNA, 1053 bp, Homo sapiens
tcctgaggaatcaatgcccagcatttcaccacatctgaactctgtgtgggcattcttcactcgcctacaaggggtaaacaaggctaccagaacttgaatttgacttatagggagctacccaggaaggggaaagcccttgggactttttccaaaacaatcttctatttgaactgttcatcagccaaagtagtccactgaggtgacaaagctttcagaaatacaaagatgggaagataaaggtaacactggcccacttggggctttgacattggattgggtggactgaataaacacagcctaggtggcctgggcttgagcctcacttacttctccttgatacatagttcctggtctaccttctgaccctttttctaaaatagccagtgtctatttcactaggccatttacttacaagttcccagcttttagggaaaaaagagggaggggggagcatctagttttgaattagatatacatcttagaagtaatgagctattggcagctgttaaatcagattcagccacaaaccagaattctttcttgttgaacaagaccaatgagttagatgactttaataattccacttttctctccctctcttctcctcttcctgaaatcagagagatgagaaactactctttgaaatacctccagaggcgttttattgtgttcctttcccctccaagcagctccctttatacaattttgctcaggcaaccaaggacagagtatcggcagaaacatggagtgcttttgtataggccacctgtacataaaagtgtaattatttatttaattttcccatttgtatcatattaaagctttgtacagtgttttaagttctgttttaaaattattttgtattttatttttataacctagtaataaaatattcattccgcatgcaaaatctagttctgtttgtgtgatggtctggatttcaaaagtggaaaatatttttctaatttaataaagttattgaatacaccagatgttacaagatcaacggggagcagatagtgttactgtaaatgcagtaccacatctagaagt

SEQ ID NO: 79013 - DNA, 1499 bp, Homo sapiens
ttccttccatttttatctcaacttttctagtgtgttgtccccttttctaaatggcattgacaaactcatcaagatccagagataaacagtccatcgtttaagaatattttattttgcatgtagaggaaagaattaaccaaagacgtttctgctctgatactttctaaagaaaacagactaattatatataagtggtatcaataggtctgcttataagtattgtcctatgtagagatttactttttggtttttacaagcatagtttgcgcttttagatgtctctcaggtgaaaaatagaagttggcagccctgagcaagcacctgtgacacagggatttttattttagttttaaagtatgatacagagaatgaggtttttggtttgatttggtttggttgtgttttttagttctttattttttatttgggggttctcttagtgatggcatatttcaggtttcagtgacatagatcaagtaattttaaaccaatttggttattctatctaagatgagggacatggctattaaggtcaagccaaactatactaaaagtagtatagggcagcagttaaaattatcttttgaaaatcaagtattacctggtttcttctgtcacaacagaatagctggttacctagtcagtcacagttgcccttgccttcccttgttagtccctggaggtacttgagtggaacagaaggtagaattagcaacagctcaatcactttaggtagcatttctcctgaattctgctgccaaatcctcagggtctatggattggttgaaatagtaaaatcacacatagtgatttcttgcacagcgtagaggcgtttaattttagtgtatagtgaacaaagaaggaaaactgggtcatataaaatttaaccttaaaacacagattataaatatctttgaatgttaagccctaggcagacagacactctcattcttaactctggtatgcaagctggccttgctgacagtggcatagttacattaactgttttttaagttgcatgttgtgatgtgaatgttttttgtaaaagttgccaagttaatcgagtcctaaataagtagccaaatggtaactgagacccactgtagacattactcgctttatattatttgctttcaaatactaaaacctcagctgctaattcagcgctctaggtgtacagtgtctccttcccttggctcctagcaatgtagggaacttgaggttcttcagtatcttcagagattccttccaggccacatatttttatgctaatacttctatagttgcattcaatctacaaggagaaagtgtacattggtgcatgttttataaacccagacacagatagctaaaaccataattagtttttctatacccagagctttgaattaaaaacagatgctttttttttccccaagagcagacagttctacattcctaacattaggaattggtgatacgagaagcaggatccagaattcagaatgatttagtgagac

SEQ ID NO: 79014 - DNA, 1046 bp, Homo sapiens
gttaagtgtcctcctttagaaacttgagtagaaggaaaactgaccagagtagactgcttccttaagtcttctgggttccaactgtttgtaatatcagcatccaagatgatacgagggaagcacaatgctttggactgtgatttgagatttagaaataaattagatatattattgaggcttagaatcctcaaactttgtattttatacatttagccaataaggaattaatatctggggaaataaatttaggcaaatatttcttttttaatgttttattacctgcttctcctgtgttttagttcaacatttgggcttcttggcctgattttcatacaatctcaatttacgaagctgtaaagaggaagatatttgttctaatctcactcttctaataggaatcaggcaaatgaaagtctaccagacttttaaaatgggctgtttttatactctctaggtgttttgtgttgtaaagaccttattaaggtcaggtaaattggtctgcttgctgttgaaatttgccttctagcaaacatatgtgctttctgtttgaccttgtgtttgctgccaaacctaatacagttgaattgggaaacaaaaaaaaaagaaaggaatacatttcctccccaagtgaacatcttctaatgctgcatcaaagctgccctgaagctgcactgaacttctcttgttctctttatctgtgttgagctttttaaaaaaacaaactcaaaacactattgaggcatataacgtctcttataagaaatgtagcatagtgtggaatcttaatttctctccagtttcaaacactccagaggaatgcaatagataagacatacttgctgtttatctaaagcaactgtaatattggaagatcagtccttctgtattatattgtataatagttgctataacactacttgcatgtcttcatggtaaattatataaatatttataaatatatagagagacatatccttatatagagtcattctttgtcattctccatttgtaatttcgagatcacagatggcgaaattccttttcta

SEQ ID NO: 79015 - DNA, 1037 bp, Homo sapiens
gagtagtaactccgactcagaccttttctcccgcctggcccaaattcttcaaaatggatctcagaaaccccggagcactactcagtgcaagagtccaggatctcctcacaatccaaaaacaccacccaagagtccagttgtccctcgcaggagtcccagtgcctctcctcgaagctcatccttgcctcgcacgtctagttcctcaccatctagggctggacggccccaccatgaccagaggagttcgtccccacatctggggagaagcaagtcacctcccagccactcaggatcttcctcctccaggaggtcctgccaacaggagcattgcaaacccagcaagaatggcctgaaaggatccggcagcctccaccaccactcagccagcactaaaaccccccaagggaagagtaagccagccagtaaactcagcagataggagccaggctgcatctctttgaaaggtgtgagatcttcctcctaaacctgatgcatgtgtgtccctgtactttctatgtaaaaaaatcagtgttgatcttctcttgcaaaagaaagtaacatgatcaattatttataagaagacataatacatgataaggaattacctaaggcaggcagcaagtagattaggaatcaatgtctttgtacaagaaggaaaaatagagcaaaaatccaagggggagaaactcattaaaatgagctctcattttttaagctgcctttgaaacaaaagagttgaggataggagatagaatggaattttaggggggttgcctaatttttttaagcctcaattcaaagattatatagcaaaagtgaaacttcttgtttgatattttcattcaaaactttcccaccctgaagagtcattgatcagatattagattatataagaagtctgttgccagggagccagtattcatgtatatttggcttgtgtgtttatttcgtgtattgagaatgaacacctttactttgcctcattcctagtaccctccctggagttcagatttttttttaaaattttgtatgtctcg

SEQ ID NO: 79016 - DNA, 1099 bp, Homo sapiens
gctctttttctctttacttcccaggagcaagtaggctctattaaggagagatatgaccacaggctcatgttgaaacatctccctccagaattcagcatctttctagaccatatctcttctttggattattttacaaaaccagactaccaggtaaccatctttgtgagttctgtgggttagttattttctctcttagtctatgctttcactcattgtagctttgaaggtgttataaatgagtaggggaggtccttagaatacgactgttttaatacatcctgagaaacatggtgaaattaacttatgatgagagtgtcagcgtgtgtgttatgtgtttcatccctctggatggacttaacttcattcgagttttaggtttattcatcttgcaacagattttcctattcctgcatgattcattcggcgtatagaactgctgacagttgaaattatgtaaattctatagctaatttgttgaccagaaggaaatgtccaactaggtaatgcatctgtcaagggctttagggcagcatatcatatgttaatatgctatgggacagcggtcagtgaaaattggctccattttgcctgtggtcagagaatcatttccttagagcatcagttaatgagccttagaagggttgactaggtttactacaaattacatccctaaccccaaccagcggtatttcagaagattctgttgctctcagggagaatttggtcagggcttaatacctaataattgctaccactgaaaacataaatgcggccacacatagattaataagaatatgtattagtatatcatccttatttacaaaggacaatacatagactttactgcatgttaatggtagttaaattctacagtgttgtcagtgttgtgcagtcaaaagactaagaagtatctatagcacagtaaatgtatttgcatatagtaattattgctctgtgaaattgctgcttttgtataagatacaaacaggatataaagcaaagaggcaacatacagccttgagtccttagagaccttaaattggtgagtttgtcttctcatgcatatgccaatttgtgttgtaagcaatagggactgtct

SEQ ID NO: 79017 - DNA, 1027 bp, Homo sapiens
agcctgaccagcatagtgaaaccccatctctactaaaaatacaaaaattagctgagcatggtggcatgtacctgtagtcccagctactcaggaggctgaggcaaaagaatcactcgaacctgggaggcgaaggttgtggtaagctgagatcgcaccactgcactccagcctgggcaacagagcaagactctgtctcaaaaaaaatatacacatatatatatatatatatatatatatatatatatttatttatttatttttatatatatatatttttatatagagagagggagaatttggaagagattgaacatctcttccaaatttgagacagagcaagactccgtctcaaatatatatatatatatatattttttttttaaatatatatatatatatttttaaatatatatatatttttaaatatatatatatatttttaaatatatatatatttaaatatatatatatagagagagagaatttggaagagattgaacatctgtgtactatttcaagaaattatttgggaatataatactatcaatacctaatgaaatgtgggagtcatcattttatctgtaatatgtatctaatctgatatccctctccccaccaaaccttttgttttcatgaagatttcaagtgcagacaattttaaaatgtttgttttagtaaattatccctttcctcttgggttaaattttaaaaatatctcccctcacccccttactttggtccctttgttctgcgctgactttttccccttcatcccgaactttatgagtaggaaaactgggcatttttatggattatcagtcctttaacttttttgcatggagttgggaaactgagcaagtgattccttgataaaatagggaaaaaagtatttcttgttgattcttttctttaccttgttcctgttctgataagccaaaatgagaacttgaccaatatatgataggaagagtatactgtggtcttaaatgctatgctgcagttaatttggcttcttatggcgtgatta

SEQ ID NO: 79018 - DNA, 1115 bp, Homo sapiens
tgaaagcattcattctgtgggattcttgcatcgagacatcaaaccggtagggaccttttctatccagagcacagaatgagtttgatacttttaatgttatgatgggacacaataaattacaaatgtagctttgtgtatttgctgtggtaaaatacaaggtaatattttcattccaatagagacctggaagcaaaaatataacttacctgttaatttttttaagtgataattacaactacaacttattttcaggagtttttctcatacagtgaaaataaaaactgagactggggcagtggcacatgcccatagtcccagctactcaggaggctgaagcaggaggattccttgagtacaggagagggagagtacagtgagctatgatcgctcctgtggatagccactgcactccagcctgggcagcatagtgagaccctgtctcttaaaaagctttatgtttgactattattatgtgtgctaacattgccagttacttaaccttatgcctaaattggcattattccctggtttcttttatagatatattggttaagaaactatatatgttgcttttagttgttcatactgtgttcttgaactatttgttaagtcaaaaattataagaaatcatcagttgtgaaagaccttatttttctcctgactgctactgtggaaatatagtggggtttttatttgctaatctgtttgtcttagaaattgtcatttccataagtgtgaaataggcttttttgtcctttttggtgtttgattgttcattaggtgaaatgaccgatttctgatataccatatttactataaatgtatcatatgttggtacagttgaaaagtataaccgtcagttgttacatgacttctaaaattagcttacatgaaaatgctaactaaatttaacgtagtagagtcagtctatttctatgcatcattatttgagaactatggtacttggaagagtttctatttttatcagaaagcccctaagtagaacaatattaaaacaaaacaaaaaaaactaacaattctggtaacaatttggcttttaccgtcacaagtcctcttacttacatactcatctttgcatttgtggtcatttaata

SEQ ID NO: 79019 - DNA, 1045 bp, Homo sapiens
aaatactgtattgttggtgacatttctgatgctggctgttgaccaaattttaaaattgtttgtgagtgaaataatttcattactttgttgtggataaacctgtggggaaaggttttgatgttattttcaggcatatgttttcttcttggcatatacatagttaatttaacaatatttaaatattttatcaaaaaacagattataaaattatacattttctaaatataagagatcaattgctttcaagttagaatcttctagtaatttagagtgtgtgtgttcttattttctgtgcagttgagaaagattgggggtgggggctttggagaaatttacgatgccttggacatgctcaccagggaaaatgttgcactgaaggtggaatcagctcaacaaccaaaacaagttctgaaaatggaagttgctgttttgaaaaagctgcaaggtaagccctttgtagaatatacaatttatgatttgtatgttaatttataatttatttgtatcttcctgaaccttaattacattctttaagtactaattgaatgtactggtgtcagccgggtataaatacgctgagcatttttctcttggaaattttataatgagttagtagtagtagaagtatgtaattacttagaataattgggctttgggagttctttttcatggagtaaggataagagagtgtgaattagcagaatttttactgcttcggaaagtattgtcataagtctgctatttgcctttcttttttaaactaccaataacagatacctctgagttgtctctactcaagtctttggatgttaaatatgttttaatcacagtaaggaagctgccttcaaatcacactgcaggatggattaaaaataatactgttgattatatgttgattcatattagcttcagtttcagagaataactgtttctggccctgtcgtcatttttgaagtccgttttactacttgggccctatttgtttttattacaagaatgaataattttttttctgacatgaatccagtggtataaaaccctgaat

SEQ ID NO: 79020 - DNA, 1045 bp, Homo sapiens
gccctcctccagaaacccctgcgtccgccacggcccaggtaggacacaccccccgaccccccagggcgccgccctcccccagtctcgaccccctcctccggccgcacccctcgccgagtgaccgagcctgctgaggaggggaggggtaccggggactttcagttcgctgcaagcccggggctcgtgccagaccccgtcactctccatctcggagatcgttctggttctgcccgatttccccgaaggctgccgcctcgttttgccccaggctttgggtgtcttcactgaacttggagggtcacgaagcttcgttctgcgtctctctctgtgggtgacccacatatcacttgtacccatgccacttctggtaccagcaccgaacacgaaggattcctaggaaatctgagcgcttatttcccaccccgcctccccaactatcatggaaaggaacatgggactactgaatctgtttgctgtgttgtaacgacagtgaaggccgcgactttcttgtacttagggtgctgaagtaatgatctgagggatttgctcgtcatttgctgtggcagagatgatgttgacaccctgggatgctgtgggagggacaaaagactcacgtatatgttctgtcaaatcggagaagtaaataatccattgggatgccaggatactttattctacagcgaagttaattttgtatccgtcgaggctacagtagaggtaaaaatgacattgagttgtactttgctttgaattaaagttgatgggtagcagcaatcctggtattaactcttctctctcatcgctttagaaattattctttctttgaacattaaagaggacagttttattatacacttctaataatgtgaagatgttttgtaattcagtagaaattgagtttctgtgtgtgtaggagggtcatgttatgaatgggcacatgtagacacacacgcagagggaggatccactcagtgtgttttgttaacaatgtttggttctgagccattgataatagttgcattggtatctaaaccctgatttgcca

SEQ ID NO: 79021 - DNA, 1041 bp, Homo sapiens
gttgagccatcttgtttataaataatagagctctcctgaatttgtgcatagacttcttggttcctggcttttgttttttgtatcaagagattgtgatataaaacagcagaagataaatggaaaccttccattttaacttacgttgtttctggggtaatgttagaaccttgaaagatgcattcaaagactgtatcttattttgcccttggctattagtgtctcacatatgtgtgtaaatgttttcctaccttctttttgctcagcaaaggcaagcaagtaaaatatatttgctaagtgattagtgatgcacatttggggctagatttttttggtacttttatgtaaagaaaagtggattttgcagtaagggattggcatgagcaggcgtcagaatcacaatcatgattttctacttgaataattacaattcagaaggtatctggataaatagatacatgtctagtgaacaatttgtaacaataacaggtaaggatcaggaaattcagtattcagtttgtcagatttgccagaatgatgaaagtatttgaacatgtgtgtttgtttcttatataattgtattgagtggattgtttgactgggaaatctgggctagaataggaaacagaagatactgacttctaccctaatagatgggccccaatttagcaaagataaactgactttatttttagtcctttttatattaacttaataaattctggagttaggctctcaagaggacagagggactgtctggcaatggccagccagacctttactgccaaagaacccatttcatattgcgttccactgattgagattgattcagatttttgcactgtagatgagcgtatgtctcagtgctgccccaagccccagggatttctcattatgttcaaatgtcctagtgatttaccttaatcattgcaaacaattatgcttatgaagtttacttacaaacaagcaactgagtcactttattttctttagtgtagtatgtgaaggcactggttcaacaggatggctccagaactgtgtttt

SEQ ID NO: 79022 - DNA, 1159 bp, Homo sapiens
aggtaagaataatgtgcttattaaatgtatttttattctcttgcagattctgcagaaggagagtacagtgcactctgtagctatctatctttacctacaaatttgttcctgctcttccaggaatattgggatactgtaaggcccttgctccagaggtactatggggataaaatattgttgttgggttattatacaatttgaaattttaaaattacaattacttgctaagcttttagttcaatcagcactgattaaaggggtggcaaaagtataggagattcctaagttacacacttaagaagtggggataagatcaacagccataggcagttggaatttctgcttgctccactataactatcattcattttatttactttccccacagctggtgtctcatctgttttaaattgggggtggggggtggggattttgctagcaggcataaagtcacagttagtatcaaaagaacccaaattggaactgtatccaaaataggagcatatctcacatggtagcgcatgtatcaggagagtgactgagaaaagaaggaaggtcatttggtagatcaaaaaaaatacttcagttaaatttccaagagagaaatgtgtccttctttcagaaaaactttttaccctattggttactggccctcttgtgcactgtcaatgctgctaacctccagtcttcttaccctatctttgcctgcaccattttctatcatttttataatcagctctcactgtattgctttccttgcccatcatttcctttattctccttgctttctacctttttctttaattgtcttttttttaaatacccaggtcagtatttgtgtgaacgttggcttctgtctcctaccacccttcttgtgcagtgggttctctgtgttgggttcttttctttgcttcctcatttctctcgaaatattctgatctctagcgtgatcaaaatgaattgtttaagaaaatcagtatcatgctttgtgttgagtacaatcacagtaggttaactaattttacttttatattcttggagtagaaaagtcttaattgctgttctagttcagtcaagtattaaaaattcacactttgaaacagaaagtccttgccctctgtatctttccagaccctccttgtctgaaagtcttctctca

SEQ ID NO: 79023 - DNA, 1074 bp, Homo sapiens
cttcctgtggctttgtatgggtaaaaatcagaatatttatatgattttggaagagtcatcaaaattgctgagattcttccttttgtcctttgagaataagctgaccaggttaccgttactggctatcagcttctttatcttgaactcagttcagtagggtttatctgatctaggtttttcatggtcttgtataaaataggagtccactttccaagtaattgccagcacagatctgttgtttgctcacatacaaaaaagtcatgtatttatctcataggtgctacagtacagttgtgagtgaaataaagtcctttttattgggaggaatccaattataaacaaatagagaaatacatataatgtaatgtcaaatgctgataaatgttgcaaggcagaatgaagcagttcaggaatagagggtattggggccagagtggggaactctctgagatagttttcatagaatgcttctctgtgaggagacattgagcaaacagctacatagagggggttgagttgaacagacagttgaaggaagaatattcctaaatagaagaagttataaatgtcaaggcttcgtttgacgtagtcacagaattgcaaagagatgagtatggctgaagcctaagggggagggtaacaggagatgacaggagatgaggtctaagaggcaaccaggggcagctcacacaggacctttgggccacgatagggaccttgtattttatactaagtgtggttacacattagagccatccgatcaggagagtgactcgatacaatttatgttttaaaaaaatcactgtgacttatttgccacccatgggttttgtttgtttgtttgttttttgtttttttttgagacggagtttcgctcttgttgcccaggctggagtgcaatagcgcgatctcagctcactgcaacctccacctcccgggttcaagcaattctcctgcctcagcctccctagtagctgggattacaggcatgtgccaccacgcctggctaattttgtatttttagtagagatggggtttctccatgttggtcaggctggtcttgaactcccgacc

SEQ ID NO: 79024 - DNA, 1115 bp, Homo sapiens
atttgtgcccagataggtaaattttggcacagttcattatatattttacctttgctcaagactattctttcaataaaaagattcctattttatttttaataacactgtttctagtccttcttggtttttttttttagatagggtctcactgtgtgctggagtgcagtggtgtgatcttagctcatttcagcctcaaccttcttgggctcagatgatccttccacctcagcctcccaagtagctgggaccacaggcatgtgtcaccacaccccactaatttttgtattttttgtagagacagggtttcactatgtttcccaggctgttctctaactcctgggctcaagcgacccactcacctcagcctctcaaagtactggactacaggcctgagccactgcacccagcccttctttgttcttaataacagtctgtctcaagtccctgtccttacgtccattttaggaaggagagactggcaataaaaaaataaaacaaaatgttgagtagtgaggaatactatgagaaagctaaagcagtaggttaaagggctgaagacagactggggcatgaggctatttatagacagagttgtcagggagctcttctctgagatggtgacatttgaacagagacctgaataaagtgaggaataatcactgcttttctctgggagaaaaaaattctaagcacaggctatatcaagagcaaaggctcggttgggtgtggtggcccacgcctgtaatcccagcactttgggaggctgaggcgggcggatcacgaggtcaagagatcgagaccagcctggccaacatggtgaaaccttgtctctgctaaaaatacaaaaattagctgggcgtggtggcaggcacttgtaatcccagcaactcgggaggctgaggcaggagaatcgcttgaacccaggaggcagaggttggttgcagtgagccaagattgtgctactgcattccagcctggcgacagagtgagactccatctcaaaaaaaaaaaaaaaaaagcaaaggctccaagtttggaaccccatgatcatgtttgagtcacaacaagaaggcaacatggaatggagcaagcaaagaccagatcataaaagggat

SEQ ID NO: 79025 - DNA, 1025 bp, Homo sapiens
agtgattttccttatagtactatataaaggattcagtagtatattttcatttgcaaattactaaggttatgatgtctccctactgttttagatatgaccttagacaatgaagtgtctaaggtcaatgaagtgttctttagttgaacagacaacctttaggcatcagagactcttaaatctctaagaagctttagagatagggcatggtatcagttctagatagtataaaacaaacttctccagatttgtttgaatttcattattataaaacacagcttagctgttatcaggctttgtgttcacaatgtaggtttttagttttattattgcaatggaatttttcataagctaaatgagacataatttttttctgtatatttgacttctagattaatttttaggtttttattttgtctatattttatacttcaagaacactgcagttcatcttgtattttccatctatttaggaaaccaggtgtatcaggccatggagtttatgaactaaaagatgaatcactgaaagacttcaatatgtacttttatcattactccaaaacccagcatagcaaggtagaaaaaagtatccttttcagtaaataaacctaaatgctttatgctttctaactccacagaaaattttctgctttttctatagtttcacgctggttcttattaatagaggtcattatgtcacccaagaattaaaattgaatcaataatcttatctagtatacaggcaatattcagattttcctgattatactacatatgtctttaatagctgttttgggaagaggattcaatcaagcatcatggacttcatcatcacacactcatttgattgtcatgtttctttagtttttgttttgttttgttttttgtttttgtttttgttttgtgaaatggagcctcactctgttgtccaggctggaacgtagttgcacgatatcagctcactgcaacctccacctcccaggttcaagtgattctcctgccccagcatcctgagtagctgggactat

SEQ ID NO: 79026 - DNA, 1109 bp, Homo sapiens
cttgcatgtgcagcaagcacaacacatatttttttggctccctcacccttatggaaagcatgtacagttgttgggtgatgaggttaaggtgcttgttttcatcttgacatctcctaaatactcttaattcatctacatttagtatcttcacttgttagcttctaatacttctttagagtctgactttatgcccttatcaattgacaagaactgcatttaggaaaaaatctcaaaggatccatttagtaaccaagcttagaaataatttgcccagggtcacacagctagaaataccagacagagctgggctttgcggttaatgttctaaccctgagcacatacctgagagctgggaattgaacccatgcattctgacccagtgtaacaaccatgttaaaatgttatgaatcctgacagttttatattttgccaagagcagagcaaagagagagggctcagataggtgtatgttgaccaacttgtaattgcagggaatggaagaaatccgaagacaggttgggcaacacattgaagtggatcctgattgggaggctgccattgctatacagatgcaattgaagaatattttactcatgttccaagagtggtgtgcttgtgatgtaagtaaaatttgttagtaggatcagtgcctttttaagttcttagtaattattaatagtatagttttatgttgcagcttccttgatgtaaagtttttattatttatagtagctttttacatatttgaatttctctttttaaatttagggggaaactgtatatacttgagtagaaaatgtgccctgtggtagttttgcttattttggggaatagcagggtttatacatgtgtatgtatgtatttatacacacgtttattccctggaaaatgcatattaataataatataatgaggaccatagtagacttttaaatattccaggaatggagaggggtagattattcattcaagagctttgttgtatgtgttagtttcaaactatagaactaatgtatttccttaagcagcaattttagaccataaccgtctttaaatatgtaatcccaccctagattccctttaagaatgatgacctcatttatttattt

SEQ ID NO: 79027 - DNA, 1020 bp, Homo sapiens
attaaatctttataagtttctttgatgattgtatttttaatgtacatttgcatgttaatgggtatctaaagagtgagaaaaattaaaccacaatcctatctttgcagttcaaaaaaaatgtattttctttgttgctttgtctttatgtacctacattacttctttttttgtgtgtcatgctgtcacccaggctggagtgcagtgttgcgatctcggctcactgcaagctctgcctcctgggttcacgccattctcctgcttcagcctcccgagtagctgggactacaggcacccgccaccacgcccagctaattttttgtatttttagtagagacggggtttcactgtgttagccaggatggtctcaatctcctgacctcgtgatccacctgcctcggcctcctaaagtgctgggattacaggcgtgagccatacattacctcttttatacattattttagtgtttaacattgaatttctgtctactgtgtgtatctgtttttcccactatactatgaacttcaggacaggtgtgtccatgtttatgttcccaacacctgcaatataacaggaatttattctcattggtcaagtgcaaaatagtattttatacttgttaataattacttcctgataactcatttcatgataaacattgttcccattgtatatgaaaccagtcattgtctttacagccaaaagaaatattaatcatacaaattataggctaaaatgagtttgtttatctcttgaaactagtacatcctgatgtgcaagtcaagatgacaggtgcttacatccttcttccaagttctgggttatgaaaaactggaggtagaaaatctgttccaaatctcctgaggctgaaacaatttcagctggccctttggctgatgggtgtgaacagttctagggaatctgtactgtggttgtccagagttagctgtgacaggcttggtcagttctaggttcacttaatcagactaacctctgagaatgtagtgtgtgaagtcaggttta

SEQ ID NO: 79028 - DNA, 1961 bp, Homo sapiens
catgttgtacaaaacaaaaactcctaatggcagtacttaaagttattgttaggtcagtgaatatagaaaaaaatctctctaccatggctatcattactgtgaagtattataactgagttatttttatatccagttaagtggtgcataatcacttgttttatcatattttatgagtctctgactatagctaatctctacggtgaataatttagagccagcacatccctaaatacctacccttatagtagaactttaaggtgtctagtttggaaggcaactttaaatcttctgatgcttacaattcctcccctctatcccaacctaaatatagatatctccagtgaccaggggaagggaaaattaacacctgttctgcaggtactgtgtaattcactctcatgagaatcctgtgagatttattagtaactgctatgtgccaaggagctttgcttatcttacctgattatattcttgcactattcttagaaggtacttgatataatcttactttgtagattgtaaatatttgcctcaagtcacaaacctagtaagtggcagaactgagatttgattataaacaccgtttatctgtaaaactcatgttcctttcactatgtcatgtagcctcacaggatacataaacaacaacacaaaatctactctgaaacctggcctaacacaccaatcacaaaaactctttatttagcaaataattcgtgttaattgctttctcagtctctcattgtagaaattctgtagtcacatcttactctttccctacatgtttatttactaatttcccctgaaaccttgtttttaaattagttagcaataaccacacttaatgtattttctttcccagataaagtctaaattctgtcagaatttgtaggtcttcatagtttagctttgtgtttatctgactgtacctcagcatgaaataagtttgttggtactagtaggtactctgttcagcctgccttaggaaattttcattctctcaaagcagcacattccaactttggatagcttcttccaactattagaaagtttcctattgtatattgaactcttgtctttttttgtagcttttattttctggttctagttctctctttgtccattcagaacaacttcaattctcatttaacttgaagaagtatttaaaggcagcagtcatacctgccaggtcttttctgcattgagttgcatttatttctttaactagtcccatttcatgttggttaaaattccttctaaatcattgtccttctctactgaacctgttccaggtgcatgtataccatttatgtgccaagaaatgaacacagtactccaactgagatctgcctaggaaaacacagaagggagggattgctacctctcttattctaaaaaatttatgtctatttagttttgtcacttgctttttgggaggtatctcatggggtactttgtttctcagttgctaatttattgtggaaatgcaacttagaaaagagatgcagttgaaccttggtgctattgaggaacaatattattcttttattactctaacctattcctttgttccatttccagaaagtatagcacactctcaaaccaaatcactcccttactgtctcaccctgtccacacttttctccctcttttcccattgcttttgccacctatttttatctacagacttcttttccttcccttccttacccttttgtttgttccaatcccttacatcttctttacttggtaagtcatctatagaggttgctcattagctatgtgagattgttagaaaccaaaaatgtaaattctcttctagatcagtgcttctcagattttaatgtgaatgcaaatcatctggggagctgctttttttaatttttatttaacttttattttgagttcaggggtacatgtgcaggcttgttacataggtaaacttgtgtcatgggggtttg

SEQ ID NO: 79029 - DNA, 1044 bp, Homo sapiens
aagatgttctcttctaaaactcttcagatatagaatattggaccatatgtgtgatctgaaatgaaattttgttttcttatacaaaagctaatctccctacttagatgattttttttgtacaccatggttaccccttaaactttgtaggaattctggagggtaaagtatctaacttaaagtaggttaagtatccaactttgtgccttacacataatagatgcctattatgtgactgagtatattcctatttttgttctcccagtatatcagggttgttttgcagctgttatgtaccagtatgggaaagaagttatttgcagccagcatccattctgtttaaggctggattcaatctgattggttggtttttctgggtcatatcagttgttaaatactttgaatatattccctgcccaataccattagagtggaagctgctaaagattgccccagattctgtttggagaaaggataaactataccattgcagtcctctgttttttgtttgtttgtttgtttgttttttaacctatgtgtatattttaatagtttccacttctatctctgctaaattgagtaggtgaatttttacttgatttgttgtttgttattctccttctaagatatttttgctgatcataatatcttgccttaataaataggaattatattacttgacattttatagatagaaacaaacctgcagcagttattaaaattgggattttttaaaggtctttagtagtgatttataattgattctctacttatatatttcagtattataaacaactgcagaaagaatatatcagtgatgatcatgacagaagtatctctataactgcactttcagttcagatgtttactgttcctactctggtatgtattgattattccttttcagtctttctaagtaaaacttgttttgctttgtaagaattccacttaatgttgaatcaaattagaacaatgttagaatcactaagttgggctatgtgaatactttagtgctacccaaggactagttaactaggcgctgccttg

SEQ ID NO: 79030 - DNA, 1001 bp, Homo sapiens
gatatcaataaatagaaataggcagtttttataaatgaattaatagaaacagggataattatgaatcaaaaattaaatgttatgatttatttctttgtcaaaagtttgttcttggccctgcgggttggctcacgcctgtaatcccagcactttgggaggctgaggtgggtggatcatttgaagtcaggagctcgagaccagcctggccaacacggtgaaaccccgtctctactacaaatacaaaaattagccaggcatggtggcaggtgcctgtagtcccagctactcaggaggctgaggcaggaaaatcacttgaacctgagaggcagaggttgcagtgagccaagatcgcgccactgccctctagtctgggcaacagagtgagactcccatctcaaaaaaaaaaaaaaagttcgttctcatacgttatataaatattttcacaaatgttatttgctagtatagaaacagcattcttagagaagagataggtggaaaatgacccactgacccagagcaaagggaggttatcacattcacatatgcattcagtcttcctaatcatttatttgcctgttagtaaaattacaataagaatagaagtgactaattgaaaagtatagcaggaaagaagaacagatgtgtatgctaaagtggggggcaggaattaggtggccaagagttctacttagtttttggaagctaaagcataaggctaaaatttacagctttttaatgttttattaatctatcgtgtatctcttaccttactgtatctttttgtctatctaccaaattagattgcaagggtatacagatcaaggactcctttgaatcttttattttgccttatataaggcaatcatacttgccagtcatacttgttgatttcctctgattttgagttgcagtcaattctgtaagacttaagatagatataggacccaagatggaattggaagcagagaaagaaataatgattgttgtaggcaaatgacact

SEQ ID NO: 79031 - DNA, 1074 bp, Homo sapiens
actataccacttaaaatcaaattctgggctgggcatagtggctcacgcttataatcctggcactttgggaggtcaaaacaggcggattgcttgagctcaggagtttgcaaccagcctggagaaaatggcgaagcatctctacaaaaaatacaaaaattagctggggtgtggtgacacgtgcctgcagtctcagatacttaggaggctgaggtgggaggattgcttgagcctggaagggagtggttgcagtgagtcgaggttgcgtcactgcactccagcctgggtgacagagtgagaccctgtttcaaaaaaaaaaaaaaaaaaaaaatcaaattctatattacttttatggtgttactttcccacaggttggaaactacacagatgttatgtattaattttgtcttttttttttttttttttacttttcctttatttgttgtagtatccaaatatatatgttttttttctaacagggagaaaaatgaaagatactattgtgtccttttcaatgatgaacaccattcatatgaccacgtcatatacagcctacaaagagctcttgactgtgagctcgcagaggcccagttgcataccactgccattgacaaagaggtttgtggtctccttttgaattgcgtttctgttttctgtcagcttcctggcagccagatgttgactgagcccttgctcagtattgtgctaggtctgaccatcctctccatttattccttacatcctaggtaaattggttagaacttcagttttgtgtgtatatcataattttaaataactatttataactttcatcttttattttaaataattagaaagttactgaatttatttggcaaagcgtaggtaagaatgtcatctcaactttagtctggtcctataattatttattgaatgaatgaataagtgtatgaattatgaaaagttggtaatttctgaggtcttaacatgatttatttaaattatttttagagtaatattaattctatggctcagtttatttaacatccatccagagcaaaatgggttcttcaagtaatataagtatataaaaggaat

SEQ ID NO: 79032 - DNA, 1636 bp, Homo sapiens
caatttctggtagccataagtctttcagtgacagtaatatttgctcttaatttataaatgcaaagaggaattctggacctgatatgaagataactttgagttgtgtgagaatttttctacctatgtaatattaggattttcacaaaattgcagcccaaatctaaatagtcattctttgagtttactggctattttcatttgttttgttttaaagggagaaagaagtaagaattctaatcaatagagacattaaatgtactattttgactcttattaggctaaaaaccacttgtggaaataaatgtcatgacaaactgcatccacaaatatgttaatttccaacaggtgttaatgtcagttaaaccttttaagtcactttatgttggtaaacataatatgagccatctgcccataaaaaaacgaggattgcttgagtgtcattttttatgtgggtagcacgggtctttgggttcacacatctgagttctaggccctctcattgcctgttggcattgtgaccatgacatattggccttttaacccctttagtctctgttttctaaaacataagagggctgagaaaatatgcccctcagagttttgaggatcaattgagcgtattgtaaaagtatattacatattgtttaaaactgggaacataggccgggcgcggcggctcacgcctgtaatcccagcactttgggaggccgaggtgggtggatcacgacgtcaggagatcgagaccatcctggctagcatggtgaaaccctgtctctactaaaaatacaaaaattagctgggcatcatggcgggcccccgtggtcccagctgcttggtaggctgaggcatgagaatggcgtgaacccaggaggcagagcttgcagtgagccgagattgcgccactgcactccagcctgggtgacagagcgagaccgtctcaaaaaaaaaaaaaaatactgaacacatatgtagcccgtggcagctgtttttacatatcttgtgagatcctcataacactcttgaatgtagatattatgttccttttggagatgaaaaagcactgtcatctcagcaagattaaaagattaggtgagctgtcttaaggtcctgttgccaaaatggcagtgctggcgcttaagtctatactgtatacttcttgaaactaacttaaatgtacattaataccagtatcacttaaatagaaggtaaaaacaaaaataaattcaataacaactaattgttaataaaatctgtttatttatcattgcttgcttcaaggttctgagcctgaggcctgtctccttttgtcagaataggagataagcaagagttaagggtagtattaaaaacatacagtcaggccgagacaggtggatcacctgaggtcaggagttcaagagcagcttggccaacatggtgaaaccctgtctctactaaaaatataaaaattagccaagtgtggtggtgggcacctgtaatcccagctactcaggaggctgagacaggagaatcacttaaacacgggaggcggaggttgcagtgagctaagattgcgccaccgtactccagcctgggtgacagagtgagattccatctaaaacaaaacaaaacaaaacccaaaaacatacggtcactg

SEQ ID NO: 79033 - DNA, 2102 bp, Homo sapiens
gtgggtgcagcacaccagcatggcacatgtatacgtatgtaactaacctgcacaatgtgcacatgtaccctaaaacttaaagtataacaattaaaaaaaaaattctaggtgttgtatagattattttcgcacactttgcaatctattcttctccattagtcaaaatttaaacaactgttatttaaaaattagagttatgtttcaaaagcttatcaattttggcagttcatttttgttatgatgaagtattcagaatttggaagttttggtttgttggtttgttttttaggtaactaatcgaaaatggtttttgttacatccagttaatattacattgaactcaattaaggttggagtattggtgagcatttattatttgagtcatctttatcattcttcatgcttagtaaaatgtttgaaatcaagacaaactcatttttcctttatcagatgcatacttctactggaggagggttctgtgactgtggagacacagaggcatggaaaactggccctttttgtgtaaatcatgaacctggaagagcaggtactataaaagaggtaagaatgctattttgttaaaaattgttaactattttaagtttgctgagattagataagaataaatgttatgtgtatagattccagttagaaccctgctgtttttattctcatatttaggtgtaaggaggctttttttctagctccaaagaaactaaggatttgataatgtctctaaagagagaatgaatttacaatgaaaagatgaattcagaatatgttttgttaagcaatcaacttgatacataagagtacacaggtcgggcgctatggctcatgcctgtaatcctggcactttgggaggctcaatcacctgaggtcaggagtttgagaccagcctggccaacatgatgaaaccctgtctctactaaaaatacaaaaattagccaggtgtggtggcacacacctgtaattgcagctacttggggggactgaggcacgagaatcacttgaacctgggaggtggaggttgcagtgagccaagatcatgccactgcactccatcctgggcgacagagtgagactatctcaaaaaggaaaatagtacacaacatataagcctaaatgaacaaaaggaagtaattattaatagataagagtagcatatagtgaattagaagtgtagagctgatatataaattcagtaattgcttttcttaaagaaaatgtcaattagattacatagatatatcccagtcaaggaaataaagaagtttgagcaagcccagatatagacaattagaaatgagaataggaaaataaccatagaatcacaaatacagaaggaatcacgaggattataaaatactcttttaatgattttgtgcaattacacttgaaaatggattatcttatcagatagtatagagtgcaatatttttattagaaagcagagagaaaacttggtcagttacattgaagaaattcagaaaattttcacaagaaagtacttgccccagaatgccatgttcagaagttttacagatgaattatttcacaacttcaaggaataaatagtttttgcgctctttaaactgttgtggatatccctaaagcagcaaacacctgtagggcacatatgttgatcttttaagtaccattctgctcttacagcaataaggtatttcttgttgtcagaaatacctggttccaggtctgggtcaggggaagtataaggcaagctcatgcaaaagaacgtaggacccagcttgaaaaggttcacattgaccttacttggataattgaagcatcaaaagaaaaaacaataaataaccaatataattgattgaatcacattgaatatataaaaatccgtgagttcctaatgaaacctaaatgagagctagatgaagtaaaacctgtttctgacaatgacaagtagctgtactatcaatttcttactattaaaattggtaaagggaatgaagtaagcgcttatcctgccttttcaataagaattgtatttcatggtaaccaagtatctctagttcattaggaaaagcttttctttctagagaaatgctagctattagacaaggaat

SEQ ID NO: 79034 - DNA, 1014 bp, Homo sapiens
acaatgaatagaaatccctgcccttatgttgcttgcattctaatgaactttgtctttatccaagcctcatttaacaatgagcaatcagcttttgtaaaatatatttgtttatgtaataggatgagatgatggtagttaatggaaaaagtggattattttttacaaaactatttttgaattgtaatctaacagttcgaaaccaggtcaaggcccaaagttatgagaatgatttcagaaagaaaaccaaacatccagacctacacacttaaatgtggctaaaatgagactaaagttgtgctagcaatattatctttgttcaaaacattttaacaatccagtttttgaagcattttcatattcagtttgtgtaccatagaggaaacttgttcacattgtattatagtcataccttgagcatcagtgggagtcatctaaattttggaatctgatttctgatctttttcagggattgtgcaattgatccaacatgtgtactctgtatggactgcttccaggacagtgttcataaaaatcatcgttacaaggtaagaaaatataaccataacctctgaataagcaggaatctgatggccatctagtccaaattcttgagtagtattcacattcctgctataacagctctgatatgtgaacatagccattttaaagaaaagattggaagagataagggatgtgtgttgctttacagaaaagaaaaaaggagtaattttagggagactcaagatcagatattatgtgatgaaaggaccaagataaaccttcagttgcagaatagtccataacaacttttgagaacaagaaaacaaacaaaattttgagctctttgctctacagtgtgtaatatgacccttctttgtgatctctagcctttcagtagtttactactaaaaaaaaaacttacagtaaacctctgtgtattctttctcaaaaatacatacatagaaacgaacatacacttactgttaaagattgtttttaatagaaatgtttttt

SEQ ID NO: 79035 - DNA, 1028 bp, Homo sapiens
aagcaaactgaaacccatggcaataatgggaggttgtccaggatgtgcccctctcctagtcctcccactgtttgctgaataataaatggaacggctctaccctgggggtgtgtgtggaagaattgttatagaaagaattattttcccttagtcattaaagaaaatgtttgtattctttttttaatgtggatgaatgtttgctttttttttttttttaaattagatgcattcaatattccaagtctggacagcatcaagaattattacaggtactgtaataaacagaagacagaccactatgtagagtcagtgttataaggagggtgtggtcaactcaatgaatgagagaaaactttaaaaaaacattttaagaggcaggggtctcgctattttgcccaggctagctctgaactgagctcaaacgatcctcctgcctcagactcctgtgtagctggggctgcaggcacatgctactgtgcctagctgaaaacattttttaacaggtaaaatttttctataaagaatctctagtaatttaaaaaatgagcctttttgtctttttgtgacagatgcatttctttttgtttagagtttttctttcctttaattctttctgtttcatatacaggcatacctcgttttattatgcttcgccttattgcactttgcagatgttgcattttttcaaattgagagtttgtggcaagcctgccttgagcaagtctatgggagccatttttccaacagcatgtgctcacttcctgtctctgtgtctcattttggtaattctcacaatatttcaaactttttcattatatcttttatggtgatctgtgatcagtgacctttgatgttactattgtaattgttttggggtgctacaaaccttgcccatataagtccaggaacttaatcaataagtgctgtatgtgttctgagtgctgcaccaatcagctgttctcccatctctctccctctcctccagcctccccattccctgagacacaacaatattaaaattaggccag

SEQ ID NO: 79036 - DNA, 1498 bp, Homo sapiens
tcctccctggtatgtgatgagtatagtaggcctgccttcataccaggacttcagaaaatgtttgatgatgctgtagaaatatctgccctaggccgggtgcagtggcttacacctgtaatctcagcactttgggaggccaagggaggtggatcacctgaggtcaggagttcgagaccagtgtggccagtgtggcaaaaccccatctctactaaaaatacaaaaaattagctgggtgtggtggcgggtgcctgtaatcccagctacttgggaggctgaggcaggagaactgcttgaacctgggaggtggaggttgcagtgagccaagattgcgccattgcactccagcctgggtgacagagtgagactctgtctcaaaaaaaaaaaaaaaaaaaaaaaaaaagaaaaagaaagaaaagaaaaagaaaagaaatatctgctctattccacagcagaagggttgaccactttgatctaatctgtttcctttttcataggaaacccagaagttctgtgaacaagtccatgctgccatcaaggcatttattgcagtgtactatttgcttccaaaggatcagggtaagccacataagtgttgcatttatcgtgtagatctttgctaatattgtggattatgtcttgtgacttttacctttacccaacttgaacatgtaactttctcccataaaatacagtgaaggataattttgtaatgtaagtgacttatataaacaagccattattctaagatacagatgctttgttcctatgacttcccatctcccctgccttgcctgactcataaggcttttaattctcacagccttctccctcttcaacccgttttaacaccacagatactggctggctctcagccccatatgcaggctcaggccatccttactttcctccacccatgttatatctcaccctatttctgaacatctgcataggttaaatggcctccagccctgcctgtagaatcatgcattgattataatcatgccaaaattataactgaatacatgtcatggatcttcagggttactcaagtggcttaaacttcaagtgtttcatctacagttgttaagagatcacggtccttaatgaatgaatacatggtgtcacggaaagattttgttccaaatctcttttgaagaaaacactaaggaatggcaggaggggcaagaaaatgccatggggatataagtaagacctgagttttgtgttagcatgtaggttaaagcatgtgggtgtacattaccttatagttctgtaatgcttagactcaggaaagcagatggtgcttctgaaaagaacaccaggttgcttattctttgggtttggccacagggatcaccctgagaaagctggtacggggcgccaccctggacatcgtggatggcatggctcagctcatggaagtactttccgtcactccaactcagaggtagtgatgccacagtttaggttaccagttattggggttccttgcctcaga

SEQ ID NO: 79037 - DNA, 1135 bp, Homo sapiens
tacaaagtaagtatgaagacttctcagatagctttttgtgagtaaaacggaactgctgtccagacgttctcaactccctagctcccatttcaaggagtgggaaagggtgggtgtgggattttctttcagcttcagttgtggggcagctgagattctgcaaagaagcttccctttaaaaaaattttagttttccctgtgctccctcctgaggataggttttcccttgacatcctaataagtttaacttacttctttcctattctattcacagagcaagtcatgtgacccctcagccagaagatagttggatccctttacttattaatgccattgatcattgcatgaatagaatcaaggagctcactcagagtgaacttgaattatgacttttcaggctcatttgtactctcttcccctctcatcgtcatggtcaggctctgatacctgcttttaaaatggagctagaatgcttgctggattgaaagggagtgcctatctatatttagcaagagacactattaccaaagattgttggttaggccagattgacacctatttataaaccatatgcgtatatttttctgtgctatatatgaaaaataattgcatgatttctcattcctgagtcatttctcagagattcctaggaaagctgccttattctctttttgcagtaaagtatgttgttttcattgtaaagatgttgatggtctcaataaaatgctaacttgccagtgattaaatgagtgcccttccaaagtttctttttaccagaaatacagtggattgagactagaacattgctttcatttgggtttgtaggtttaaaaatctgattctaatcagaagtatatttagaacaaaacactttatttataaaagatgactccaaaattcatcttagtatttcaccatgttatatattattatcagcaagtccttctgaatattatcacagattactccatgtctctaaaatatattggcattgagctcatttgttaggtttgcccaccttattgaacagatttattttccttatacatacttgtgttgtccttggttacgtgtgtccccaaatgtaaataccaaatttttataaatcaaaaattttttagtgtgtaagagattttat

SEQ ID NO: 79038 - DNA, 1211 bp, Homo sapiens
ccttgatcctagtaagaaaggcacaagccctttcatagggagaaaagcgcaggtggaaggagagagagggcaggagggggaagggctctgcctgtggagtgggtgggacccccatgcctaccctgtctttctgtgctctggggcacttctccccacatcccctgctttctgggtccttctccctggggaacctctttcaccagcattgtcctccctcctgtattttcaattctctctgtccccactcagctcttttttaaaacctatgtaattatttttatttttaatgtccagaatgtgtactataagggccagggcttcttcctggacttaattttataaattcttgattggttggtgagaccaatagcgatactttttcttgtctaatttggtttccgggaaagcttcgttcaagtcgtcaatggtcatctgatcaaatggtattaagttcctcatcttctccagctgtttctcatattctccaacctggcctttgagagagacacccactcagcacaagttttcccatcttctttttcttcagcatccacctgggcagtatatttatcctctggtacaggaagcttcaggacattaaacttcttctcaaagtcatccaccaagcctgccttggccacattggccttgtagtaagtccagtcaatagctggtggattctcaggtaaagtagccagcctggaggtgagggtctcattccaggatttcagataattagcaatggccttttggttttggggtatcatctctgcaaaagctacccagtcaatggtttttagagcaagttttcacccagccatcttggtatacttcactgaccatggcagcccatggcccacaccccactcacctcttatagggtatatgtgcacaaatgcagttcactattttaacacagcacatccaccttcaactctcatccccagcttccctagcagcccctgccctttctctcaactccacttctcagccaagctccttgcccactgctttgcctcccaccacccctcacctgctgcagactgccttctgtcccacggctgcctcgacgccacgctcacctcccagctctgagggctgggctctgggcgcctttcctgctcttaccctgcaaggcctcctgcagccctgcgggtactgtccactcctcctgggcttaggtgacttctctctcttggttgtctagctgc

SEQ ID NO: 79039 - DNA, 1108 bp, Homo sapiens
cggcgggtggaaaatattgaaccctttgacgaatttgaggagtggcatctgaagtgcgcccattatttcattctggcagcttctaggggagacaccctctcccacaccctagtgtttccatcctcagaggcatttcctcgcgtaaatcctgcttcgccttcaggggtattccctgccagcgtagtcagtagcgagggccaggtcccaaacctgaagagatatggccacgcctctgtcttcttgagcccagacgttattctcagtgcaggaggatttggagagcaggaggggcggcactgccgagtgagccagtttcacttgctctcaagagattgtgactctgaatggaaaggcagccaaataggcagttgtgggactggagttcagtgggatggacgcctttatcacaccatgacaagactctcagagagtcgggttctggttctgggagggagactgtccccagtaagtccagccttgggggttctccagcttcatttttttaagagtgaggataataacactgaggacctgaaagtgacaataacaaaggctggccgaaaggatgattccactttgtgttgttggcggcattcaacaacagaagtgtcctgtcagaatcaggaatatttgtttgtgtatgggggtcgaagcgtggtggaacctgtactaagtgactggcatttcctccatgtagggacaatggcttgggtcaggatcccagtggagggagaagtacctgaagcccggcattctcacagtgcctgcacttggcaagggggagcccttattgctggaggtctcggggcttctgaggagccattgaactctgtgctctttctgagaccaatctcttgtggattcctctgggagtcagtagacatccagcctcccattaccccaaggtactcccacacagctcatgtgctcaatggaaagctgttactggttggagggatctggattcattcctcctcatttcctggagtgactgtgatcaatttgactacaggattgagctctgagtatcagattgacacaacatatgtgccatggccattaatgttacacaaccatactagtatccttcttcctgaagagcaacagc

SEQ ID NO: 79040 - DNA, 1050 bp, Homo sapiens
gcattttaaaatgttctctttctaaatggagagaagcaaaattgtgtcagtgatcttaaccagtagaaaaaaaatgcaaagaaagtataacctgtttctggagaggtaacttttgactgatcaagcaaaaattttcctctttggtaaagactgatcttcatgataagtggtaagtaaattaagcaccttttagaggagaggtaactctaatagtttcattcaacaaaagttgactgagtgcccacaatgttccaggcactgtgctaaagtctgagagagattgacacagtttctgcccctgagaaatttataattaggttggagagacagacccataagcagatactgcaacatagtgtggtaagctctgcattagacacacacataaggatttatagggaaccaaaagggcattctctaagcagcgtctcaaaagataccattgaacatagctaagaatatccaccacaggggccctggtctcactttgttgatgagtgttatagagcaaaatgattaaattgaaactttgacagtttaatactctatgggtatattaatggcatgcttgttgctacattcatttcaaaatgaaagttgaaaagctttattaaatgaagtgagaagattctgtgcatttgacctagtgctactaggtggttcagagggtgacaatggggtgccccatatgataaatgaaacgtctatgaggataaactaagagattgtaaatgtagaactgagtgtgagggagatcacttaaaactctagtcaaggtgacctgggtataatctcaaagagaggattggagtgtggctgaaaaaatgatacttgttattacatgtaccagacattattcttaggactactttcagaagtaggtatttttattgttccctttttgtagatgaaaaaataggcttaaagaggttaagtgtaacttgcttaagatcacacacacagagtaagtggcagtactatctggttgcagagctcatgctctttcccattcaagcttatacagtcttagagaggtttgagtaagtagga

SEQ ID NO: 79041 - DNA, 1496 bp, Homo sapiens
gagggccagggtgactctggtttggctctctagcaaaaggtacttgagaggacttaaaaacaaacaaaaaaactgatgctctgcacccatcccatgagattctgttttatttgatctggggtgagtcctgggcagagataggctttaaaagctccttaggtaattttaatatccagccagagttgaaacactgctctggtatcttttcttaagtataaataaatctgtttagttacagctatgcatagataaatttgtaggcccttgtttagactcttgaaagaagcatagtaaataggaaaatagactctaaacaaaaagatggttgtttttgaaaaatccttcctttttcattttgaaacattcttgtttacgttggcagactgatgataagggtgtttttgcaacacacctttctcaagagtaccagctggcagctgaaacatttaatttgacccagtctcaggtgtgggatctgtcttatgaatccatcaactacatctttgcttctgacagcaccagatctgaactgaggaagaaatggaatcacctgaagcccagagtgttacatatttaagctataatgaggtgaactacttctgagtatgtgtttcaatcaagttcctgccatatcccacttagtaaaacagtccaccactcctttgaagcatagcaaccaagttccttgggctctatcaccagcaccttacacatggcaggtactcagtaaatacgtgtcttcaactgactcacaagctctcaggtgcttactgggtgggacttgactgttgttgctaattaaatccccattccaccagtgattattgtgactcagcagtccttccctattagtgatcataaaatttcagggaaatcgaagtttctcatcaggaaatgttttggaattactagtataaagttaggaaagtggggaaattaggttactgccgagacctttaagccttctaaacagctttatattttattgtgcatactttaatcagactcccttcactcgctttaagtttttaaaagtattccccagccggatgtgatggctcatgcctgtaatcccagcactttgggaagccaaagtgggcagattgcttgatcctaggagttcagtagcagcctaggcaacatggagaaaccctgtctctacaaaaacaaaaaaacaaaaaaccggaaattagtcaggcacggtggtacacacctgtagtcccagccaccagggaggctaaggtgggaggagacctgatcccagggatgtttgaggctgcagtgagctgtgatgctacagcactccagcctgggcaacagagtgaaaccctgtttcaagaaaaagaaaagtattctccaagatcccaagaccattgacaccaggccacattgtataccagggatttatgtgaatgcctagggatgaccgtagtgacagataaagctaggtgctgagatctggttttgccctctttatgattgtcccatcggtacta

SEQ ID NO: 79042 - DNA, 1078 bp, Homo sapiens
gctgtaatcccagctactcaggaggctgaggcaggaaaattgtttgaacccagaaggcagaggttgcagtgagctgagatcatgccactgcactccagcctggacgacagagtgagactccatctcgaaaaaaaaaagcccggcgcagtggctcatgcctgtaatcccagcactttgggaggccgaggcaggcagatcacctgaggtcgggagtttgagaccagcctgcccaacatggagaaaccccatctctactaaaaatataaaattagctgggcatggtggcgcatgcttgtaattccagccacttgggaggctgaggcaggagaatcacttgaacccgggaagcagaggttgcagtgagctgagatcgtgccattgcactccagcctgggcaacaagagcaaaactccgtctccaaaaaaaaaaaaaagagctagacccacctaatgggcaaagtctcataacttcttctcgaaatgtaatgggtttttcctgtcaaaatgcagctgaatgacagaatgagtaaagaaggatgcttatcaaattcataggatctattaccttgtcctctgtgcttatattaagggaacaccataggcactgagagggaaaagatgttatccatcaattcagatgcaggcaaagagagggactgaaatcttcctttcattctttagactgccttggggatttgagtctagatcaggaaaaacaaggaacaaacagtggcataaatcctaaagtgaatttcctaagctaactggacacagaatagtagatgaatctcactattggaagactttctaaacaatacatttattgagcctctttccgttatatatcctcaggggcttacttgggagctgactgtgtcagaagcttttcccgtgcatggatttctccgtgcttattaagggcagagcttttactgaagcacttaccacagtcatgacacccatagggtttctctcctgtgtgggttctatgatgtgcacgtaagtcagaactcttactgaaactctttccacagtcaggacacacatggggtctctctcctgtgtgtatcctccgatgt

SEQ ID NO: 79043 - DNA, 1044 bp, Homo sapiens
ctcactgtgcaacattggccagggaagttaaatgggatcggatttggaggaggtgggagaggggcagacagtacttttattctctgctgcttcctggggctgccctggaagtcaaccagaaaagcagtttttgcaaagtctatttactgaagattgtgctaccttagaaggccactcggagcacatggaaaggcaggccagctctggcaagactttagacatatgaatgtattccttctgatagtgccatctttctctgccctaggaagaaacacctcttacagtcatctgcaggggattctccaaggacatgggaagatagatgtaagccctggaacccagactcctaagcgaagggaagctgcattctgctattaatgatggccaaatcagctctaagagagaatggcactaactctgagaccttccgacagcgtttcaggagattccattaccaggaggtggctgggccgcgggaggctttcagccaactctgggaactttgctgtcggtggctaaggccggaggtgcgcaccaaggagcagattgtagaactgttggtgctagagcagttcctgaccgtcttacctggggagatccagaattgggtacaggaacaatgtccagaaaatggagaggaggcagtgactctcgtggaagatttagaaagagagcctggaagacctagatcttcggtgagaagggagggggaattcaaattcaaaagtgtgatactgggtggagggctaaattaagatatagacaggcttaaagagggacacagtctcccttggtgaggcttatacttctggtctggtataggtaactttttcagatagtgcttgtctggagatgcttcctgggtgtaccttcacctaccctgtcataatgagtttttcctatagtttcttaatagggaagaaaggggatttttttttttcagcctgaaggtgggtttactattttgatcgtttccttctggagtttcaactgctttaagctaatggcaatggaataagacccttgttcgcgttaacctccctc

SEQ ID NO: 79044 - DNA, 1013 bp, Homo sapiens
atctacccagagcacctagcacagtttctgccacatagcaggtgtttaggtattgatggaagaaaagaagacaaagatggcaaatattacataatttctgcagagcagtgtcttttacatttgagtaaagggaaaagttgtcatgagtgccaagtgttaatgaaaattattttattatattgaatatgtatatacataagctaggtataaactcaagcataatactcttaaacaactataaaatcaaatatttttataaattaaaagtaaacaaaactaccaaatcaataagttcaaatgaccattattctaatgcaggatttctcagcctgttcctataactgtgttatatagaatggtatcagtaacttcgagttattatttgctgtttcagaataattagatattgaacttttcgaaaactctgccaacaagaaacgctcaaatgccaattttaatagtagtatcacttgataactggtagagctgtcttgttaataatataaaattgcttatgtgtattgagcactagctatgtggttgggatatgtgctttacacatgtattaacttatttaatcctcacaattattttcttcagtttataggtatgaaaacaggcacagacaggtatagtaacttgcctaagctttcaagcaagtaagaggcaactcagggattcaaacccaggcagttgggctccagagaccaggttctttttttttttttttttttccgagatggagtctcgctctgtcgcccaggctggagtgcagtggtgcaatctcggctcactgcaagctccacctcctgggttcacgccattctcctgcctcagcctcccgagcagctgggactacaggcgcctgccgccacacccggctaatttttttgtagtttttttagtaaagatggggtttcaccgtgttagccaggatggtctcgatctcctgacctcgtgatccgcccacctcggcctcccaaagtgctgggattacaggcgtgagccactgc

SEQ ID NO: 79045 - DNA, 1049 bp, Homo sapiens
tattgagaagttaggagaatgtctttctgggcagagttaataagtctgaggaataaatgctttgagatttcatattagaagaatctgctgtcctattgaattggtccacaattggaccaagtggacaaatggattaaacatctttagctcaagtcgtcattttttttaagctctttatttgtgccttagcttattaggggtgttcattttcattaatgtaactagtaaaccagttaatctgccacattgctgcatcatttttaactgtgtaagtgtagaaacagtgctctgctatgttcatgctgtgccagcaaagccagtggtgggtgctcattggcccttcaaagctgattgtcctcatcaaataacaacatccagcttttactgtcactggctgtgtactaggcactgtgctaagtgctttaaatacattatcacacacaatccactaaagggctaagttggttaaggggtgtgcccagtgtcacacagatagtagtaaatgggtttatatcccagctctatctggctccaaagagtgtgctcttaaccactagattaaactatctcccaaaataaaaggagacattctaggcaaatagagttaatgaggacagcataagggagccaggcctagctgcacgtctcagttggccttcaacttccgctggctataggaaggagagtggaaaatagggggattgcagatggctgaatcttcctccctgccagaatagtggtagagaaactagtgtaccaaggctcttcagagtttttaaaatcaggtggtcaaaattctaggtttgggttgagaatggagattgattgcagacaggcacaaaggcgctttttggagtagtggaaatgttataaaactggattgtggtaatggttgcccagtgtttgaaatttactaaaaattgtttattagtatgcttaaaatgggtgaatttcattgtaaattatacctcaaagtggtaaaaataaaagtctggggaccgggcatggtggctcacgcctgtaatcccagcacttcgggaggccgaggc

SEQ ID NO: 79046 - DNA, 1051 bp, Homo sapiens
ctggctaacacagtgaaaccctgtctctactaaaaatacaaaaaaaattagccaggcgtggtggcgggtgcctgtgtcgcactactcgggaggctgaggcaggagaatggtgtgaacccaggaggcagagcttgtagtgagccaagattgcaccactgcactccagcgtgggcgacagagcaagactccgtctcaaaaaaaaaaaaaaaaaaaaaagtctgaagaacatagaggcagaggatttttgaaaaagtatataccttagaagtagactgaattgggccttaacttgaaataaaaagctttccttggctttggtgttccaactctaaatgattctggttgctttaagtgcagtggttctcacactttactgtgcattagaatcacctggagggcttgtggaaacactgagtgctgggttctaaccaagagtttgcatgtctgatgagtctccaggtcatgctgctgatgggagagaggtccctctttgagaaccactatgtgtaaatcttaggagaaagtttatccccagtctctcctagattgtgccctcttggttgaatatggaataagaatgtgtcttgcatggactcttagaatggaatccagtttgacaaggccgtattttccacagattcatggttgtcaaatcctggaaacagtctacaaacacagctgtggggggttgcctcctgttcgaagtgcactggaaaagtaagtcatggcttaactgggaattggtggtggaggtgggtggtcaaattatttgacttctcacatgttttattttcaggtcatttcaggtttccctcttgggaaggttataaccaggatagaaaaagctccatgagcagaggagcccatgtaacctttattatggctcaggccttgcaaaaagggctatagagtgttgagtgacaaagccaggatttaggtgcctggatgaccttgaggcaatctttttaaatgtttagatcctgttatccttgcaggaattccattacatgtgccagatgttgcttgctgtgtctaaacatgtgtatttgag

SEQ ID NO: 79047 - DNA, 1021 bp, Homo sapiens
ctctttccttgactagcgcctgattgaggaagagaacatgctggcaccatctctgaagcagttttccctacgagtggagattttgccatcctacattccagtgagggttgctgaaaaaatcctatttgttggagaatctgtccagatgtttgagaatcaaaatgtgaacctgactagaaaaggtagaaatctccttgtccaatgtaccacaccctcaaaatctcttcttccttaatactatgtggccccacagcatgcctggtcagagcgagtggtcgataatattcctatcctgagattgtagcagaatcatgacgtttgtctgagaagcaggtgaagttgctgccccactgagattagccctccccagaaaaccctaactgtcctgggtattctccgtcctcctttgacggtgtcttcctattttgcaggatccattttgaaaaaccaggaagacacttttgctgcagagctgcaccgtctcaagcagcagccactcttcagcttggtggactttgaacaggtggtggatcgcattcgcagcactgtggctgaggtttgtgtttcatcgtatatatatatatatatatatatatatatatatttttttttttttttttttttttcttaggcaaaattggactagtttcctagaaattgagttacttggtcgggcgcagtggctcacgcatgcagtctcaacactttgggaggccaaggcaagtggatcatctgaggtcaggagttcaagaccagcccggccaacatggtgaaaccccgtctctactgaaaatacaaaaattagtcgggtgtggtggcatgcacctgtagtcccagctacttacgaggctgaggcaggagaatcgcttgaacccgggaggcggaggttgcagtcagccgagatcacaccattgcactccaacctgggcaacagagcaagactctgtctccaaaaaaaaaaaaaaaaaaaaaaaagacactgagttacttgacttttgtttttatcttgatgtcttgatga

SEQ ID NO: 79048 - DNA, 1058 bp, Homo sapiens
atgaactcacagttccacatggctggggaggcctcacagtcatggctgaaggcgaatgaggagcatagtcaggttttacgtggcagcaggcaagagagcttctgtaggggcactcccctttataaaatactataaaaatatataaaatatataatttattataaagtaaatcacccctttataagagtgatttattccctctcagaagaacagcatgagaaagaccacccccatgattcaatcacctcccaccgggttcctcccacaacacgtgggagttatggaagctacaattcaagatgaggtttgggtggggacacagccaaatcatgtcactatgaaataagactgtacccttcttttcctgtattttgcttatgtggttttggaataaagattctacagtcctcataaaatgggctagttaggttttgttctttttctattttttagaacagtttatataagacaggaattcttactgaaagtttgaatttacctgaaaaataatctaagctagatatttttaggagggaaaacttacctagttcagtgtatttaaaacctattgacataaaacaggtatttcttgtattaattttggtattttctaggaatttacctatttcatctagatttaatttaaaaaaatctagtcatttatgttttatttatttagaatttctttttattgtttagtcttattagtcttttcaaagaacaagcttttgtttttaatcttttttcttttttcttttttttttttttgagacagagtctcactgtggcccaggctggagtgtattgatgcaatcttagctcactgcagcctccacctcccaggttcaagggattctcccacctcagctcctgagtagctgggattacaggcgtgcaccacaacgcccagctaatttttgtatttttagtacagatggggtttcaccatgttggccaggctggtctcgaactcctgacctcaagtgatccacctgcctcggcttctcaaagtgctgggattataggcgtgagccactgggcctggctttttctttaat

SEQ ID NO: 79049 - DNA, 1034 bp, Homo sapiens
ggctggtctcaaactcctgacctcaagtgatccgcccatctcagcctcccaaagtgctgagattacagacgtgacccatgacacctcgctgaagccaggagtttgagaccagcctgggcaacaaagtgagaatccatctctacaaaaaataaaaacaaaccagctgggtgtggtggcatgtatctgtagtcatagctacttgagaggctgaggcagggggatcacttgagtccaggagcttgaggcttcagtgagctatgactgtaccactgcattccagcctgggaaacagagaaagaccctgtctctaaaaaataataaaataaaataaaataaaatgctttttttattttaagaaacatgcttggtgatataactcctgaattttcccaaaccccaccattttatcaaatagaaacttgtagtccctattcaatactccctgccaacctcctagacgtttttccgtaccccttccttctactcatctcttagcacagacctggagatagtactgaagattatccaccaaaaatgccatgtgatttcttaggcgccacttgattgcatcagtctggttcgacttgaggtgcttgcgctgcatttgtagggcccagcagtgctgcagctcagcttgcacccggcgcacactcagtaagtacttaaaaacaacattgtacctaggacagaaataacaggatattcaagacaaaaatttcatcccctgcacttcccccacacgacagactctaggactttgtgccacccactcctctcacaaacaggcagtaaggaaagagtgactagagatgtagacaaataaattataatttatttatacaatggaatattatatagcagtcgaatgaactccagctatacaacaagatgagaccccatctctgcattttttagataacttgggaaatttcagtgtggactggatattagattatacccttataatctttttgaatggttgactcgtgttgcttctcatattcaaaaacatgatttttgaatgaaaaaggtaa

SEQ ID NO: 79050 - DNA, 1301 bp, Homo sapiens
gatatatattaatagatgccactccagagggctggctgaaaacaaccaagaactactgtgatgggtagatgctgtccttatgtggcatagatgtatccatagggaaaagcagaataacagagcaggtcatcatcattaaatatttattgagtgcttactgtatgcaaggcactggggatacaaagaggtataattcatggctctgcccttaaggagctcacaatctagttggaaaaacaagacatatatatatatatacatacaaaaatcagtaacaacacagaggcctgaacaattgccaagtggacaacagtacagataataaagaagcaagaaacgagggttcactaaaggctatagtggggaagggagtgcttcactgagagagtgggacttgaactggtattaaaaacaagagcatcccgggcaaagggaacaacactcacagctcagaggcaggaagacactctgcgggtctaagaaatgaagagttaaatgtggctagattggaggtttggtgcagggctaagagagtaatactcgcttagccaggaaaggatgcatttgttttacgcattttgtgcgtctgaggggctggcaggccttgcacgtggcagtgtctatcctgtcagatttgggaggtcagctattaattagatcagctattaatcagactgttctcctaacactttaacttcatggatgtaccttccttcctttcctaatgccaactctgtttcccgggtaggtgtttcactgcctgaatgaaatcctagatctctgtcacagtttttgttcgctggtcagtcagaacctaggcccactggatgagcgtggagccgcccagctgagcattctcgtgaaggtgcgtctgcctggaagtatgcagccttgccgaaaggacagaggtggttttgccaatggagaattcatgatctttcctctgagtcagtaaagcatttcctcaatacacacacgtacagagataagatacaaagataaaaatgttggtatcagttgattttgaagcaggtaatactgtgccacctcacagtgctcaaaaatagttcagtcctgaatagtttattcagcccatcaaataagcattgggttgttctaacttcctcacatcctcccccctccttacttccttgaactaacccccatctcactgagataattatctgcttgtaatcaaaacgggttctccccaaccccagtacttgacaaaatacattaactggaaaccagctactaaattcctactgatgaaagagtactttcataggaagtcatgcatg

SEQ ID NO: 79051 - DNA, 1260 bp, Homo sapiens
gccgtgggcaccccgccttgctggtccctagcttccgcatctgtgaaaggaggcgaccaccccttctaactctaaactttaaaaaaaactgataccgagattcagtggtagctggcttcccagaggtctgtcattcccattcagaaaatcacttcattgtcctttctctctaaaatgtctgcaagcagatttttttctaagctattgtagcagaagagtcaaaagaaactcttcagttttaagatgacattatttagatcacaggttatcctgattcatatttctttgaaggtagtcttgggaaagcatgacacttaataaggctctttttctcttttgtagtttcgggatgtgaaaatttctggctcataaattgaaataacagccacgttcccaaggttgtaacagaagattcaaaacatcccattctagccacacacaaataaatatctgcggcttagtgataggactctaccttttctcctagaagcagttactgaacatccaggagtacaactccttcccatcattcccatgtggaagggtctctcccatcaaggagaacatgtggcatctctgatcctttacattgagaacatttgttggatatgttcatttattcaatagtcatttattgagcacctactacgtaccttggtactgttcaagctgtgggagatacagcggtaaacaaacaatatagagcagaaagttaaatattttatggttcatatgtgaaaaagtaattatgtttataaatagactaactgctggatgttaccaccaagtaagaaagcaacaggtaagataggctttctctctccctataccaagtaatttatacctacacagattgggcaattctagctaatgaaaatatacttaaaagtatttcttaggccgggcatggtggctcacacctgtaatcccagcactttgggaggccgaggcgggcggatcacctgaagtcaggagtttgagaccagcctgaccaacatgatgaaacctcgattctactaaaaatacaaaaattagccaggtgtggtggcatgtgcctgtaatcccagctactcaggaggctgagacaggagaattgcttgaacctgggaagcagacgctgcagtgagctgagattgtgccattgcattccagcccgggcaacaagagcgaaattccgtctcaaaaaaaaaaaaaaaaaaaaaaaaagtattattctccaagaaaaaggtccttaagaaaaaattgagatcaagttgttag

SEQ ID NO: 79052 - DNA, 2348 bp, Homo sapiens
ctcagagaaagtactatgtcttgtcatttgttctgagattaagctcaaaaaaacagatgaagaaatcccagttactacaaccaaagagattcaacatttattttatcataaaagttcagcaaataaaactatatacaagatccatgcaaggaatccagttacacacaagacacatttaaaacctggttaaaacacaatctccacgatagcagggaataaaaccagtaagaccaagtatctttagtgagaaacataatcgtgtttatattttggatgctgcttgaatccaattctctccccaacaatgaggcactggatcacccactcttgtgacaccacaggcagctgcaatgcttcagcacacttcagcaccgaggctgggcatgaggggtccgtcaccaccacatcaaatacccctaaagcaatatctgcaaggagcaagggaaagtgaagaaggaaaggacactcaacttagccctccattagaaagagagatttgattctaaccaatacatcccactctgcacaaaccaaagccctattatgtcaaacacactgctactgatcatgaccaaaggcagagttataatcactatgtgctgaccttgtagaaatatttaacaaatatacgtccagtgcttcacttatgttgactcacctcttgaaggtggtacttttcttctctaagaaacatggatacggtcaacctattaggcctgagccttggaccacaaggcctaacacctacaggtctaaggagatccctggaacaaagacactacacacactctttcaggtacctttgttatgggcacttgaatggtgctgcttcacagaggctgcaccaccagtcatgaggatctcagaccagagctccaggaagttctgctgttggtctgataccaagagtaccttcagattctggaaaggattttcacggggttgcctatgaaggagacaggaaaggaccttagcatgacaagtaatatccaacaaactgcctttctgcaaagggactcatgtacatctgaatgctttcaaaaataaatgccccatcagacatagtgtctcaagcctgtaatcccagcactttgggaggctgtcgtggttggatctcttgggcctgggagttcgagaccagcctgggcaatgtggtgagaccccatctctacaaaagacaacaaaaaaattagctgggtgtggtggcgagtgcctgtagtcccagcagcttgggaggctgaggtagggggatcacttcagcctgggaggttgaggctgcagtaagtcgtcactgcgccactgtactccagcctaggtgacagagcaagacttcatcttaaaaaactaagccctatattagggtcccccttctcttccttctttctatgaatgatctgtattccttgcattcctggctttctaatttccatgtttgttctggggctgagaataatccaaatcatgctcctgagcctatatatttttaatgcttgcttaaaacttagttctctgactttacaggttgagaatattgaacctatatacaaatcttcacacatttgcaaaaggttcctagccaatgtaacctagggaaataaactagataaactcctgaagtcatttcaaacccactcaaatttatcccacagacattccaatttctagaaagctttactctctcacctagattctcttccctccaaagcttgctgtcctcctgcctatacaattctggatgggcttcaaatacttaccagtccagaattctttgctcctcaaggctgtacccagctggcaacagataattacggtagttctggagctggttggcatggcaactatcatggacccagacatgagacacacaaggaatcccactggcaaggcacaggaagtacttccgggttcgacaatgctgatccgcaattagaagacactggtaagctgtgttacactgcaagaaaagaagcagagccaatgggtttggtgacttctgtggaaagctcctaagcagcagccataatgagccatgaagagcagatctgaagactcccaactactacccaaaatgtgatttagtctatcctgcccaaggccactcttctcactggaaggcccaagtaatttccatagatgttctctctgcctcacctgcagcatactgaggacctaaatcctcaacggacaaccaaaacctatgaactcagcctttcaggctaaaaatcagcaaccctaataggggtttctactactaaacataaacatcaatcttcttttgtcccagcaacagaaccatagccattaactaacccaaggtcctaccttctcttccctatacacaacaaaaa

SEQ ID NO: 79053 - DNA, 1049 bp, Homo sapiens
ttaatggctatggttctgttgctgggacaaaagaagattgatgtttatgtttagtagtagaaacccctattagggttgctgatttttagcctgaaaggctgagttcataggttttggttgtccgttgaggatttaggtcctcagtatgctgcaggtgaggcagagagaacatctatggaaattacttgggccttccagtgagaagagtggccttgggcaggatagactaaatcacattttgggtagtagttgggagtcttcagatctgctcttcatggctcattatggctgctgcttaggagctttccacagaagtcaccaaacccattggctctgcttcttttcttgcagtgtaacacagcttaccagtgtcttctaattgcggatcagcattgtcgaacccggaagtacttcctgtgccttgccagtgggattccttgtgtgtctcatgtctgggtccatgatagttgccatgccaaccagctccagaactaccgtaattatctgttgccagctgggtacagccttgaggagcaaagaattctggactggtaagtatttgaagcccatccagaattgtataggcaggaggacagcaagctttggagggaagagaatctaggtgagagagtaaagctttctagaaattggaatgtctgtgggataaatttgagtgggtttgaaatgacttcaggagtttatctagtttatttccctaggttacattggctaggaaccttttgcaaatgtgtgaagatttgtatataggttcaatattctcaacctgtaaagtcagagaactaagttttaagcaagcattaaaaatatataggctcaggagcatgatttggattattctcagccccagaacaaacatggaaattagaaagccaggaatgcaaggaatacagatcattcatagaaagaaggaagagaagggggaccctaatatagggcttagttttttaagatgaagtcttgctctgtcacctaggctggagtacagtggcgcagtgacgacttactgcagcctcaacctcccaggctga

SEQ ID NO: 79054 - DNA, 1891 bp, Homo sapiens
tccctgtgtctgaaggatctctgatggtgtgccacccaacaagattaggtaccaaacttattaataaatatatctcataagatgaatttaaatattttactgagctcctgttgtaagctggtgtctaagaattcctatttatctgtaacatctaccaaacagtttcttaaaaactataattctgtagaggattgttttagtattagatgtcttccgccttcttgagattgagaaacccccaagcattctcatacactgaaaatatcaaggattctggtactgttgggctgcgcccaaggatgaaggcaccaacataaagacacattcaccataaccacactgtctatcagaaacctgaagatcccttcaaaaacactgtccaaatgcctcattttatttttatgagtacagttttattacatctcacgcaggcacacggattttaatgaaactggacagcctgcatctcataccagtcagctttcttgactatgctgaaccaagcaacaaacaaaacatctatacagctgccttgtgaagtcctggtttcaagtccagcaatattgtaaaagggggaaaaaaaaacccatgaccatgaccactgttttaatgccatgacacacctctatgcagaatcctcaaaagactcccaattttcctgtccaggaaactcttcaaataccttattcccactgtgcctatctgattgtttgacaagctaggtgttgcaaacactggaccttgaaatcccaccacaccacatctactcactcccacagcccaactctcccaaaccaaagcctgcccctgatcatcccttccatgtccttgtacatatctacacatggctgcagtcggtgagatatagttttggttaattaggaaagagtcatccacacacctgaaatgccaaccctcacagatgtccagtggtgcaaattatgacaaccatgttgcctaattcaattccctcttgcaagacaacattagtcagaactctaacttgtacaacatcattccatctggacctttagcctttacagacacattcagatactgctgtcagtcacatttacagtgtatacatttatatctgctcattccctctcctagatcactcatttttcagacctctacccactgcagccttccttcaaaaactaacagacaacacagaaataaatgcaatgtacagatttaatttaaggttaaagagaggtataagagttgaaaaggcctagaagctgtttctttgcaatcaccctgaggaaccaggcaccccacagtcccagtcttagacctcaggagaatgaaccttaccctccacatgggtttgctctagcagatgcccatagaacgcaaatggggaagatggcagggcattcagacctgattgacttggatggttgcagtaggctaaaatgacagagctctagtcacaggtttgtcattattgtggacaaaaaaaacacaattatttaacctttaacctctccaaacttgtttcctcatccataaaatagataagatctatctcccatctgcctcacaggattgttttcaggaaccactcactgagaggaattttgtgaaaacagtctagaaactgttaaaaagcaggatacagagtaatttctgtgaccaagatcccagttgctacttgccttgcctcctctacatacaacagggggaccaccagctcataagtgactggaaaagaaagaagtgcctatgtgtcagagctcccagggcttcctaaggccttaccctcctcttcttcactgcttcctgtaggaccatctggcagtttggagcggctggccaacttgtcactggttgtggccatggtaaggagaaatgcgtagcccagaaacaaggtcttgttgagagg

SEQ ID NO: 79055 - DNA, 1453 bp, Homo sapiens
aaattctgctcccctctctcttgtgcttaggccctctagctttctcagacttcctattgaaacatggctgggcatggtggctcacacctgtagtcccagcactttgggaggccgaggttgggggatcacttgaggtcaggagttcaagaccagcctggccaacctggcaaaaccccatctctactaaaaatacaaaaaaagtagctatgagtggtggcacatgcctgtagtcccagcttctccggaggctgaggcagtagaatcatttgaacctgggaggcagaggttgcagtgagccgagatcacgccacggcactccatcctgggtgacagagtgagactccatcaaaaaaaaaaaaagtcatatttcagtatgctcttccctctccccattatccccgaaacaacccctttccagtccctagcattcaataattaagaaaggagttcattccatctgttgttcattgagtccctactgtgacccaggcccagctgctatgggttcaggagattacagaggtaaaatcagtctattcccttttggaactttctcaggctagcaaactgatgaaactccattgattgttacattgtcctggcaccagagcttcttttgtttcctatgtatttgaattgtgtcatctccttatctacccaactgctgctgtgtttcagggtatttaaaaacaatagttcattgaatatttactgtatgaggcatagcactcagtacttcacacataatacctcacatacaatccttatgaagtataggtgctagaaggagttttccagttgaagactttgaggcacagaaaagttggctaactttcccaagatgacaaagtaagccaggattcaaactttggtggtcttcacttctaattccagcctcgttcatataacgtcatattgcctctgagactgttttcttgctcctggttttattttagggaggcatgcatgacctgtctgtcatcttagcctcctaatgaacctacgattcagcttctccaggtcaggtatctgttttttttctcaaggacttattgggggcactcttggcatgggtgttctggctggctggttcacttacttacccaggtgttgaaaactaattcagttgaggcaggctattttgatgtggcaccatctatgtgtaaaaacactttattaccaagtattctctgcaccattctggtgacggtcagtgatggggtgggaggatctatctacaaggggcatttcttgataataaaaaagtgttgggtttttttttttttccaaaggctgcttcaaaatatctcataccctgggggaaatcagagcacgggacagagaaagtgggctgaagatttccaaacatttttcactctcacctactatttctttgtattagaaccacctctttcttcagatgacctcagaagtatttggtgtggctatatga

SEQ ID NO: 79056 - DNA, 1338 bp, Homo sapiens
tgtattgtatatgtgtgtgggggtgggggggtgtgtatctatagctatagtatgtgtgtgtgttgtaaattgtttattcattgataggaagaagtgttctttttcacaggcttagtaatgggtcctgcccaagatcacacagcttggtggcagcagaattaggcctaggctcagttctcctgaattatagcttagtttccttttacatcccacattttgttccttttaacataaaggccttatcaggttttgaatcagagcaggaaagtagataatagagaggaagattaggtaggagaggcaggatctgttttttcctttctttgctctctaattttgctacacacacagagagaaaacacacacatgctgtctctcttagaatgatgtcatttttcacctacagcttaactcaagacttactactcagcctcccagggaaccaagaaggaaatgtttagaagttataatggaattgttaggaaaccacatgccatttcacttcacggaaatcatttgaaccaccagcaatccacaatggctgtctttgggaagctttattttataactaaaggctaccttctgtcaagaaactttccttgtcctaatcccagtgtagtagctacatatatcctaagtgttactgtttgggattgacaactggaattttgttaagtcctaacttcagtccactgttggatctctaaattccctaactcaggcctgctttacagagcccttgtgagagggtgctaaggagcctaagacaacagcaagcttcttttatgctttccaccccccaggagtggtgaaaggacataggaaggagtctggggaactgtactacagcattgaaaaagaaggccaaagaaagtggtataagcgaatggctgtcatcctgtccttggagcaaggaaacagactgagagagcagtatgggcttggcccctatgaagcagtaacacctcttacaaaggcagcagatatcagcttaggtaagacttttgcttcctgaacagctgcttttgggctcctgttctgcttacagtgggaggagattctggacctgtcagtaatgtttccctaacttttattattcctatgtgtggcttctcagatggtggatgagctgtcattttctagagctgctgccttacctgtttccttcttagtaccaaacagaaagtccttagggtttttctggcctcctcagttctataggggactaaacacatttcagtcatggcaaagactagataaaaaatatggccttaaaaagaagcttcttggcctcatgggaagtgggggaaggaacactgtggtgtctgaatcagggtc

SEQ ID NO: 79057 - DNA, 3026 bp, Homo sapiens
cccatcccgctggacactgaagtgacggccctctcggaggatgagtatttcagtgcaggtaatgaaagaagcagagtttgtagagatttttttgtgccttggggcaataatactctgttatgttagtagttaccaagacattacttggtacttttccagtgtctctaaagtcagaaatttcattcctacaaaattggttactcttgccactgacttttctgtttgttcatttgtttttgaataaacttattttggaatattttagatgatttacagaaaatttgcgaagtacaaagtactgctagtacagagagttcctgtatacccctcatccagctttccctattgttgacatctggtgttagtatgggacgtttgtcaaaactaaaaatccaaccttggtgtattactattcacaaaactttagactttatttggatttcactagcttttccatcatgtcctttttctcttccagcatccaacattgcatttagtcatcacataccctttggtctgctctgatttgtggcaatttctcagtcttttgtttttcatgaccttgacagttttggggagtcctggtcaggtattttgtggaatgtccctccatttggatttgtctaatattttctcattagactggagttatgggatattttaaaaataatgccacatagatgggtgggtgtggtagctcatgcctgtaattccagcactttgggaggccaaagcagggggatcacttgaggtcaggagtttgagaccaggctgaaacatagtgagaccctgtctctcaaaaaaaaaaaaaaaaaaaaaaaaaaaaggaacataaattagctgggcatgggggcacatgcttgttgtcgtagctactcaggaggatgaggcaggcggattgcttaagctcaggagtttgagtccacagtgagctatgatcatgacactgcactccagcctgggaaacagtgagaccctgtctcttaaaaaaaaatatgccacagaggtgaaatgcccttctcatgttatcatataaggacctgggaaggtttgtgatgtatccacatgacatcactgatgcaggatgttaatcttcatcactggttaaggttgtatttgccagatttcttcacttttttttgaaacagtctcactcactctgtttcccaggctagagtgcagtggcgcaatctaggctcactgcaacctctagcttccgggtacaagtgagtctcctgcctcagtctcctgagtagctaggattacaggtgtgccccaccagacccggctaatttttgtatttttagtggggatggcatttcgccatattggccaggctggtctcaaactcctgagctcaggtgatctacctgccttggcctcccaaaatgctgggtttgcaggcgtgagccactgcaagagagggacaggtggccttctctaaagttagtgtttttccctttccatactctcttcttttttaaagcttagctacctgctttgattggaacccagtaggtgatattgagatatttttgcttagggagaagtttttagtgctgtgtctgtatgactgcacatctaccacttattctctggtttgaagaacagtgcctttttatttttgaagtaggtaatattggtgatagtgagaggtttatgcttgtggttatgcttgttgttattgtttcatgtgctagttctttgaatatattgtctcctttctatggaaataatttgaagatacctatttgtgttgagtttgtcatttaaaaacatctttctgaggactttttgaacatggattggcatataatgggggaaaatggctttctttctatctttttttttttttttgagacacagtttcactctgcctcctagactggagtgcagtgagtggcgtgatcttggctcactgcaacctctgcctcctgggttcaagtgtttctcgtgcctcagcctcccgagtagctgggtttacaggcacgcaccaccacacctggctaatttttttttgtgtttttcgtagagatggggtttcgccacattggccaggctggtctcgaactcccaacctcaacttatctgcctgcctcagcctcccaaagtgctgggattacagacgtgagccaccatgcccagccaaaaaatggatttttttttttttttttttttttttaaaaacagagccttgctctgtcgcccaggctggagtgcaatggcacgatcttggctcactgcaacctccgcctctggtgttcaagtgattctcttgcctcagcctcccaagtagctgggattacaggtgcatgccacaacacctggttaatctttgtatttttagtagagacagggctttgccatcttggtcaggctggtcttgaattcctgacctcaagccatccacccgccccagcctcccaaagtgctgggattacagtagtgagccactgctcccggctggaaaaatggctttctgttggagtccatccaggcttctcttgtatttggaatcctctgagtaattgttgtttgccctttgttcattattaaatgggccacttcaccttctagttctggataacattgttagctatatatgggatcagttgggagtagcacatggattggggtcttttattgtgactcatagtttgtatgtatcaaatgcattcgttcttctttcaggtgtaaagctactcttaggggttcatatttggccttttaaagacggagttctgtaacaagagtgaactgtggcatcaaggtgtggggattctgtgtcccatttcttgaggctgtttgctcatgtcaacactagactacttctagttctagtagctcttcattagtgtgaagtatattgttggccttgggcttctttgtgtttttgagggagtctttgtgacttagtttggggatagagatttaagctaggagatgaacaagtaagggaaaagggagtgattccacaggatagatagagaaccaaggcttgctttctctgtgttattttccttggg

SEQ ID NO: 79058 - DNA, 1044 bp, Homo sapiens
acatgtcaggaaaaaaatgcagaattaccattattgcatttgtatatgtaattctttttaaagacttggctactttgatactgaatgctgaaagtaaaatcagcctaccataggggagataaggtgagagacaaaagtgtgcattttctcttcagaattacggagttagtggggtgtaggagggaggataaagatgtgaaaaaatgtgatatagttgttattagaaaacatgtattttttcagaaatgcaggactgaaattctagcacttttttttagccacaggcaggtcctaggtaataaaggccgaaagtctcaaactaactaatgattcgaggtggtaaatagggctttaagacctaatttgctaagaagttatcttttaaaaattattcagatctgactaaaatatgaactcgggctgtctgtaaatagaaaattatgaacaagaaataatgaagctggatgctatgttagttaactcagttattcttttgaatagcagtagttgttattagtttgttgtatttttgtaaataagaaatagtgcatttgaattttttcagtgttgaatgagttttacctgtcctgaattttccagcagttatttgtctagtatagtacctggcacccttaagttattcgataaatatttgcttaatgttttttgaatgaaagaagctcaatcctcctaagtaatattatttaatagttatcataaaaagtagggtcttatttagccctacattattcttgtagtagaactagatataaaatcttaatttgctaatttttccatttctggacactagctcaactctttagtcataatctgttctttggaatagatgaaatattttatatttaattctaggagagatcagtgtatattgttttaggtaataaactgtggttttcactttaatacaggaaaaacagataaactgagattaacagatacatcattctggttttatataaaggactaaagagtgccttccttttatctaaagagctattgcaaatgtaaactcgtttactaatt

SEQ ID NO: 79059 - DNA, 1280 bp, Homo sapiens
acgctactgccctccagcttgggtgatagagtgagactgtctcaaaataaagaaataaataaataaaattacaagaaatgtttgtatgtttatacttactagttttacttatttttatttctttttgttattttttgcaaatactagtagagcagagtgaaggtttaggtgtgatactaactaaattctgtttctctttcctttctctccttggttttgtttttattcagagcctgcaactggtgaaagaaaaaatggatctactgctgttgctgagtctgttgccaggtaaccaaagctggatgctatttagagtttaatacacagctactggtgatgagggtagatggtttatcaacaaaggaaaaaagttaaaatgagaaagttaaaatgagactctttcataaaggatttagcaatgttttgaatggatcatagactttttagttaatacttttttaagttcagtgaagcttttttctacacctagaactaagataattgaaatgtctttacttttgttcatgtgagagttcctttccccccttttttctgttgctgatacaagagtctccacaatctcaggattgttgatccaattgatgagaaaaagaaggattaacaagagatagctacagaccttgttccttctgcaatcgcatactcagctgcagcctcaggtcattttctcttctgcctgccaaattaactactatgttgagctgttatttttgctttgtcatggatgttgtaatgctttgaggacgagtatgaccccatactgaggttttggttggtaagctttgccatctggtggctgtgagaatacaattgtttcaggcatgagtcatccagcctgaaaacgctaatagcagttggtgaaacataggcaagaattcttcttttattttcttttttattttttgagacagaatcttgctctgttgcccaggctggagtgcggtggtgagatcatggctcactgtgacctcaacatcctgacctccagctatcctcctgcctcagccacctgagtagctggggctacaggcatgtaccacctcatctggctaatttttgtattttttgtagagatgaggattttactatgttgcccaggctggccttgaactcctgggctcaagtgatccacctgccttgacttcccaaagtgctaggattacagatgtgagctaccatgccccaccaagaattcttaaattagaggctaggcgggtactgttaataactaaagtggctaggtacaagacagagtgttt

SEQ ID NO: 79060 - DNA, 1048 bp, Homo sapiens
ataaaaattttaaaaagggtttgtcaagagagagagtatgtgatagccttaaatcttactttacctttggatctgaaattacaactagcgaagtgttaaggatggttatatcagtaaattttactacctttcctaataccaggagcatagtatcaaggactgtattcagtgttacttacatcatttcatccttacaacaaactttttaggtttgttgtgtttttatcttatagaggaggacactgagactcaaaatgacaaagtagtttactcctaggttggactattaagtgcaatagccagggtgtgagccaggtttctatttcagagccagggctccaactgaatttcagctgcctccctgatggactgtttagattatgttgggtcatgaatattttagaaataattaaaaaccatttaagggttgttttctctaaggctggtataaattgtaaatgaacaaattttaatcccttgaaattagtgacattgttgtgagaatatgggatttttttcagtacgacctttaatctgttgctgcatgttcttgaaaatgtcctttttgtttctttttgttgttattgttgttgagacagggcttctccctgtcacccaggctggagtgcaatggggtgatctcagctcactgcagcctccatctcccaggctcaagcgatcctcccatcttagccccctgagtaggtgggactacaggcacgcccaccacccatgcctggttaatttttgtatttattatagagatggggcttcgccatgttagccaggctggtgttgaactcctgggctcaagcgatcctcctgccttggcctctcaaagtattgggattacatgagtgagccaccgtgcctggccaccctttgtttttgaagtgtctgtcctaaagcactttgggaagaacttgggtaccttctatttgtgggtgctctaaaaactatttaaaattagttcatcaacctaaaatattttctacttattttattaagttcttttatttttaatttgtttttaatatgatataaattt

SEQ ID NO: 79061 - DNA, 1017 bp, Homo sapiens
caaggagaggaactcaaagaagaaaatatggagagtgttccgttgcacctttctctgactgaaactcagtcccaagggttgtgtcttcaaaaggaaatgccaaaaaaagaatgctcagaagctatggaagttgaaaccagtgtgattagtattgattcccctcaaaagttggcaatacttgaccaagaattggaacataaggaacaggaagcttgggaagaagctacttcagaggactccagtgttgtcattgtagatgtgaaagagccatctcccagagttgatgtttcttgtgaacctttggagggagtggagaagtgctcagattcccagtcatgggaggatattgctccagaaatagaaccatgtgctgagaatagattagacaccaaggaagaaaagagtgtagaatatgaaggagatctgaaatcagggactgcagaaacagaacctgtagagcaagattcttcacagccttccttacctttagtgagagcagatgatcctttaagacttgaccaggagttgcagcagccccaaactcaggagaaaacaagtaattcattaacagaagactcaaaaatggctaatgcaaagcagctaagctcagatgcagaggcccagaagctggggaagccctctgcccatgcctcacaaagcttctgtgaaagttctagtggtgagtgtgattgtagattattcttgtctccacctaaattataatctggaatggaaagttggcgagaactgcatgcttatgtcaggagtgaacactatctttggtttatgtttatgaacaaccaataataattgggaaattaaattttttggattgcctttttttttttttgagacagagtcccgctctgttgcccaggctggagtacagtggtgcagtctcagctccctgcaacctccacctcccgggttcaagtgatttctcgtgcctcagcctcccaagtagctgggactataggctcatgccactatctggctaatttttgtgtatttttagta

SEQ ID NO: 79062 - DNA, 1031 bp, Homo sapiens
tggaaatgagatggtgaagaatagctaatacagtaaatttagtattatggatactagccattttctttttttcttttttttttttttgagatggagtctcactctgtcacccaggctggagtgcagtggcgcaatctcggctcactgcaagctccgcctcccgggatcatgccattctcctgcctcagcctccctagtagctgggactacaggcacccgccaccatgcttggctaattttttgtatttttagtagagatggggtttcactgtgttagccatgatggtcttgatctcctgaccttgtgatccgcctgccttggcctcccacagtgctgggcttacaggcatgagtcaccacacctggctgccattttctgttacatggctactatgtcttcaaatcttcaatatgatattaagcctaggtttttcatattcatctgggtaacagtttactaacttaatctgtttattagttaatctgacacagataggaatttaaaatctagcggaaaggacataaaacttaaaaggatataatttgtttcacacctctttaacctccaccaatctttcattccacagcctcagagagctagaaagcttgagttaattaccagcaaaacatattatgttggttgtaaggcgggaagggaagaaggctatcttcctttgctatgctgtgatacaggttgctgtgcaagacattcagagggtcaccgaggaacctttgttggtctcttactaaagttgtaaggttttatttaagaaattcttttacactgggattaatatagttgatactccatctattgctaaggggaagggaccaacaagagactcttcatagtataaaacagtaatggctgctcataaatccttttactcctttgagcaggcccaaatcttgaaaactgctgcatttataacatcaagtgtcatgtgcatttttttgacttctcccatctgtatcatggcatgagcttgacttcacctaaggtagacgttggaataaaaggctcatttgct

SEQ ID NO: 79063 - DNA, 1689 bp, Homo sapiens
agtggacaaagagcagctacaatcagtaaccaccaactctggttataccaggctgtctgatgtggatgctaatactggtatgaaacatgttttctggcatttggagttgttgtgttttctcccatattagaggtagttattttttctttgataagttttgcagctatccaaattaatataatctaagtaatttagtaaggttgaagagttttctggtaaatacttgtcaattgttggtttgtgggctgaggttttaagttattggttactttcctttatagactgatgcctgtatatattttaaattggacttctgttaaaatctttgctttttaaaaaacatctgggactgtatctagtattttgaaaacttaattatctccttcctgtcattttataaaactctcagcaattaagcatgaagaacagtccaacgaagatatccccatagcagaacagtccagcaaggacatccctgtgacagcacagcccagtaaggatgtacatgttgtaaaagagcaaaatccaccacctgcaaggtaagccgaactttctaaaaaggatttacgagttttgctgtagggttatactaatgtcattttaccagatgaaaacatttttagaaattgttgatttttaaattattttccccttgtactgggcatacttgtggtccattggaaacgttgattatttatgaagtctcaagaattgttttttgtctgtctgtctgtctgtctgtttgaaacaaagtctcactatgttgccctgggctcatgtgattctctgccccagcctcccaagtactggggccacacttgactactaatcttatctttaggcattctacaaagacctttttttgttgattaaaaaaatttttttgttgtagaaatggagtctcgctatgttgctcaagctggtctcgaactcctgggctcaagtaatcctcctgcctcagcttcccaaagtgctgggattataggcgtgagccactctgcctagcctgcaatgatgttttaaggctgctctaactataagcatgactccgtaatctttggttgccactcctcctttgtgatctttgtctacagagacactgcttgtctgtgggaggtcttcttagcctctctggtgttatgaagagtaacatgactattttatttgaaagcctactgtttctatacttgaggagcacccagattgctttgggttcttaggtatcctgcatctggtattttatggtatcgatagatgtagggattttctcaggttctttaggctcttaacttggtaggaattggggaatgtgcctctgcttcatctctcgtgatttttataaccaaagcttcattacctctggccagtaagtgaagtttgaatatggcagaagaaaactgggatgcttccagtttgggataggggataaataaacagtattgttttgttatttccttcaatggaaagagtggggagagagtgtcctaagcaaagttgaatatcaagagaaattgtctttctaatgtaaaacactcagcataacagtgactttttaggcttttcttttagatgctgccttccatctagttatgctattctgtttaccctggggagtggtagaacaggtgaacctcataagtctctggaaaggggccagggatgaatgtcttatacatgttagtattgatc

SEQ ID NO: 79064 - DNA, 1107 bp, Homo sapiens
gctgagattgtaccagtgtactttatctagcctgagtgacagagtgagactccgtctcagcaaaaaaaaaaaaaaaatttaggagtattatcagaactattaggcatgttttccatctatcaactgaagtaccccaccagttttagatctagaatgtttaattcttaccctaaacaagattcaattgttaccatgtcttttgcatatctttataatacccattttttgagttcatgctctgtgttaggtcctgtattggacgtttggcatatagtataatgttatttaatcctattcttaaagcagctgtacgatgaagacattacattacttccattgtatagacgggaaaattgatggacaaagaaattagataacttgctttagagtacattgctagtaagtggcagagctggctttgaacctggtcctaatgactctaatgcctcctctttcattctaactaatcagtgcttctcagtcttccgccccaatatttctaaggtccaaggagaatgtagagaacttcaggagttttggggtggtagaaaggggaggtggttagagaggagaatgttagcttgagatggttaaagactattgttttttcttaaaaagaaatggtttttggctgggcgcagtggctcacacctgtaatcccagcactttaggaggctcagacaagaggatcacttgagcccaggagtttgagatcagcctgggcaacctagtgagaccctgtctctacaaaagaaaaaaaaaaaggactgggtgtggtagctcacacctgtaatcccagcacttcgggaggctgaggtgggcggatcacctgaggtcaggagtttgataccagtctggacaacgtggtgaaacccggtctcttaaaaatacaaaaattaacgaggtgtggtagcgggtacctgtaataccagccactcaggaggctgcatcaggagaatcacttgaacctgggaagcagaggttgcagtgagccgaaattgtgccactgcactctagcctgggtgacagagcgagactctgtctcaaaataaaataaaataataaaaaaaaaaatagcagggcatggtggtccgtgcctgtagcccc

SEQ ID NO: 79065 - DNA, 1149 bp, Homo sapiens
tatagtagtcacctttccttaattatctctcctccttttccactgctcctaactgccaaatctttgatcacttcctgatcactgatacttatagatgctgctaggaagttggagaaaataaggctaatatgactaaagctccattagcctaggaatatatacagcaattttatattaatatatgtgaggctgacatcttcctgatgtgactggcttcctgtaaagcaggctactcactcttttgagaatgtttctgtttagaattactcatgtcatggcttcctccatttatccctaatgatgaaaatcggcagttttaccacttagtactcctaggagctttggtgaaaggccagatacagggatgacagaggatgaaattaatgactgaacagaagtttggggattatctgctgatgttaataattcacactgaatgctctaaccttgtccttttggctacagagacttgagagtaggctgctttctggaataatgtaagaaatgaaaagaagttaaaccaaagtacttagccattcttcagattaagatgcagcgatacttgggaagacacttacagagagaacatagttattctcaggcacttcttagaaatgagcattgatatataaacacctactaggccctttccatcaaagagtttgtctgtggtgtcctcaaggagcttagggccatgtaccctagatcagagcttactttggcatactgcatatttttaggtttggacatttttatcatggtctgtctatgtcacaggagaatagtagagaatttcctggaaaaacccacacagctcaagacagccacagccccacccctgctggctcctctttcagctgtccccacaaacaacagtcagcccagagcagctgcagacactgcccctccctccagccttctgttagtgaggacgcaaaggggaccaggcagctgggatgagctcaaggggatatgctagtgccttatggcttgactaccccacaggctgggccaccattcctatcacctatcctcaagccctgggccaaaatgctgagaaagcagacaaaaatgtatcctacagtgacaaggagagtgcacttattcctaggcactgccccctccacattgacatacccacacacagaa

SEQ ID NO: 79066 - DNA, 1481 bp, Homo sapiens
tgtgcgtgtgctttttccaggaaatgctccccaaaacaagatcttggagggcctagaaaagcttcggcatctggacttcctgcgttaccctgtggccacgcagaaggacctggcttctggggctgtgcctaccaacctcaagcccagcaaaatcaaacagcgggctgatagcaaggagagcctcaaagccactaccaagacggccgtgagcaagttggccaaacgggaggaggtggtagaagagggagccaaggaggcacgttcagagctggccaaggagttagccaagacagagaagaaggcaaaagagtcatctgagaagcccccagagaagcctgccaagcctgagagggtgaagacagagtcaagtgaggcactgaaggcagagaagcgaaagctgatcaaagacaaggtagggaaaaagcaccttaaagaaaagatatcaaagctggaagaaaaaaaagacaaggagaaaaaagagatcaaaaaggagaggaaagagctcaagaaggatgaaggaaggaaggaggagaagaaggatgccaagaaggaggagaagaggaaagataccaaacctgagctcaagaagatttccaagccagacctaaagccctttactcctgaggtacgtaagaccctctataaagccaaggtccctggaagagtcaaaatagacaggagccgtgctatccgtggggagaaggagctgtcttctgagccccagacacccccagcccagaagggaactgtaccactcccaaccatcagtgggcacagggagctggtcctatcctcaccagaggacctcacacaggactttgaggagatgaagcgtgaggagagggctttgctggctgaacaaagggacacaggactaggagataagccattccctctagacactgcagaggagggacccccaagtacagctatccagggaacaccaccctctgttccagggctgggacaagaagaacatgtgatgaaggagaaagagcttgtcccagaggtccctgaggaacaaggcagcaaggacagaggcctagactctggggctgaaacagaggaagagaaagatacctgggaggaaaagaagcagagggaagcagagaggctcccagacagaacagaagccagagaggaaagtgaacctgaagtaaaggaggatgtgatagaaaaggctgagttagaagaaatggaggaggtacacccttcagatgaggaggaagaggacgcgacaaaagctgagggtttttaccaaaaacatatgcaggaacccttgaaggtaactccaaggagccgggaggcttttgggggtcgggaattgggactccagggcaaggcccctgagaaggagacctcgttattcctaagcagcctgaccacacctgcaggagccactgagcatgtctcttacatccaggatgagacaatccctggctactcagagactgagcagaccatctcagatgaggagatcc

SEQ ID NO: 79067 - DNA, 1079 bp, Homo sapiens
gccgaggatacctctcaccacacagctcccatgtctgttccagagccccatgcagccacagcgtcacctcccacagatgggacaactcgatactctgcacagacagacatcacagatgacagccttgacaggaagtcacctgccagctcattctctcactctacaccttcaggaaatgggaagtacttacctggggcgatcacaagccctgatgaacacattctgacacctgatagctccttctccaagagtcctgagtctttgccaggccctgccttggaggacattgccataaagtgggaagataaagttccagggttgaaagacagaacctcagaacagaagaaggaacctgagccaaaggatgaagttttacagcagaaagacaaaactctggagcacaaggaggtggtagagccgaaggatacagccatctatcagaaagatgaggctctgcatgtaaagaatgaggctgtgaaacagcaggataaggctttagaacaaaagggcagagacttagagcaaaaagacacagccctagaacagaaggacaaggccctggaaccaaaagacaaagacttagaagaaaaagacaaggccctggaacagaaggataagattccagaagagaaagacaaagccttagaacaaaaggatacagccctggaacagaaggacaaggccctggaaccaaaagataaagacttggaacaaaaggacagggtcctagaacagaaggagaagatcccagaagagaaagacaaagccttagatcaaaaagtcagaagtgttgaacataaggctccggaggacacggtcgctgaaatgaaggacagagacctagaacagacagacaaagcccctgaacagaaacaccaggcccaggaacaaaaggataaagtctcagaaaagaaggatcaggccttagaacaaaaatactgggctttgggacagaaggatgaagccctggaacaaaacattcaggctctggaagagaaccaccaaactcaggagcaggagagcctagtgcaggaggataaaaccaggaaaccaaagatgctagaggaaaaatccccaga

SEQ ID NO: 79068 - DNA, 1051 bp, Homo sapiens
ttagaccaatagactggtgagaggagaaaggagcttatcccccagaccctgctttataccattcacatcccagggctgtgtccagacagcacaaaacggcaaggagagcccaagccccaatgccagaattcttccaaactccctgactctttgaagtttttactcaccccatttcaattatcctgatcccttctcatcccctgcttggcttctctgcatgtggtcatctgctgtggcttggtgtttaatgggttaaaaataagccactgcctgacatcccaacatttgacaccccagcaatgtgtgactcccccaacattccactatgccatcctgcagctgaaatgggaacactggctgcctctccaaacccgctcttggacagaggatctgggaggtggaagccaggccagaggacttggggaaaatgagatggaggaaggaaaaagggagaagctgagccacagcttaactcctacagagtgaaatgaaaacgggctgaaaataccaccccaggagaggacctcgccccaagcaagccagtgagcagccctgccagactactgccagactgagaaacccagaagctggtagtcatgtgggcttgccttctctgccaaacgactgggaaaccaaaatgagcccaccttgtgttcttcctagctccaccctccccgtgctgctgtgttctgctcctccccacgcttccctgctatagttcccagctgctgtaacggagccacctccaactctaacaataaaccaagttcattgcagatagtgtagtgctgcttaggctttttctgactccatacatgcttagttactgggccctggcttctacctctctgcttcaaccagtattgaatttatcttggaagactccaatgcttttgattactggaaacacttgtgcctgagtatgaagaataggagcctagggtggatacatacatctggtctgggggagggaagaggggcagaaggcctcctgggaaggggatatgcattccgtggggtcaagagttgaggaccaaataaccaggatcag

SEQ ID NO: 79069 - DNA, 1044 bp, Homo sapiens
agtttttaagtgtagtttccatgtggcaccagcctacctatgataaagctattgcagagaagtttgaagagtggagatgtctgctggggattctgggggagcttaggaaggaataatattttaagaacattgaagaactgggtctgcccacactaaggtgggagagcttggagatctctgtaaaccataaattgaagggtatggtctctttgtagggtatagcaggagaacccaggctcactctctttcaaagttttatccttggtatccttatttgtctctctgtattatattttgtcttcagggtaaatctaggttttttaggtatggttttcttctattcaagagctaagactctctgagggaagtaaaactaggctggcttcctgactagaaaacctctacgtgctaatctcctattggctagcaagtgacagctgctagattttagcccagtcaggttgtacatcttcacaaggcactgctgaaatctctccctaggttgaccagcctatgctggctcagtttatccctgcccccaggctcccaattgtgcctgtggcaggagttcccgttcagagcctcatgggtgtgccggctcatttagcttcaagctcttctggccttcatgtgccacagccatctccagaatagaacctgatgcatgaatagcatagcctgggacttggacttagggtccacaatatagtacaaggaacgtgggctcctgaaatcagagctaaatcacgtatctcctagttcttaagtgccatgagaaaagacccaagtccattaaacagaccctcagacgtatgtacctccaattccccgaagtactgttcagcagcctcacccgttgaagaagatttaattctgctaaaaggagttgaggaaaaaagagctggaaaatgcaggtgttgtgcaggaaaacaaatttaagatctccaatgccctgcacacttcctcaggggccttgtggcctcctttgtttttcttgtgctggagcttggaggctaacatgcttaagaagccagaatctgggct

SEQ ID NO: 79070 - DNA, 1049 bp, Homo sapiens
aggatgcgccctttggccctgaggactacgatcaggtcaggctcaaaaatagcctggatccccaattcctagaattctaaatagtagggatcaataataacagtatttactgcatgccaggcactgttttagttattttacacatatattatttaatccttacagcaaccctttgagataagtacaggtccacaatctcttatgcataattttgaaaattaaaaagatttttttcttgacattgagattcatttggcagctaaacctgacacgaactgtcataagacttttataatccttagttttcccacttagtgtaaatagtcgtgcattttgtggcagaaatattaatgtgtttggttatgccatgggccctgatggaggtattatatacatatggcatatgtactgtattaacttctaaagtcccacagattctcagttccaaagcacagctctgatcccaaggatcctgaacaaaagaacgtttcagttatccattgttgcataataaactaccccaaaacgtagtaacctaaaacagcaaccattttattatctctcacagttctgggctcatctgatcttgcttggagtctctcctgaaattgcagtcagatattgactggagctggaaccatctggaagttcagctgggactgtgggatggctggctctctccctcttcatgctctccctgtaacctcagtgcctcttttctccacatggttcttcatatggtttccgtagcatgatagccagaagtattaaatggtagctttagggatattcaaaagcagaagcttagaagctttcttaaagtgtaggcccagaaatagcacaacataactttgttattttttattggttaaacagttacagggccagccagatttaagggaagggaaggaaaggaagacaaagaattgatggtcatctttaaagcactacaaggactgtagaccacaaggactttcctcccattttacagatgaggaaacctaggctcagaagaatctaagcaattttcctcatgtcatccagctaat

SEQ ID NO: 79071 - DNA, 1028 bp, Homo sapiens
ggcagctgagctctctcattcctctgcctttgaattaaattactgaattcaacactactgtgaggaggtggaaaagggctaggaacattgtgaaatgagtccaaagtttgaaatgtcactctaaccttctcttctggtaggactcaagagtagccttcctcgaggacctgcctttcccatttgctgcctgaagttaatgtttcttgctggccaaatcagggacatgccggcattgtaagggctgattatctgatcctcttactaatttattggttggggtggggtgagcagggaggaaaagggataccttgcttttcttttatggctcttttagcatctcaagtcatagcccatatgcctcctttcttgttgatccttcttcctatagctttgttttgtttccccttatagttccctcttatgcttttcatctccatccccagccccacccacagccagggggcttgggttctgagctgatggggtacccccctctgcagagcgggatgagtgggtgttccggcagggatgtggtcattgacggccagtgagggcgagagtaccacggcccacttcttccttggagctggagatgaggggctgggcacccgtggaataggcatgaggccagaagagagtgacagcgagctccttgaggatgaggaggatgaagtggtaagaatggggaaaatgatgtaacttggggttggagcctctgtcctaaagagttaagattctattggttagagatacctctctgttctttccgaatgcatagactccctgtcataaacaggccctatcctagtttaggggaggggcagtagagattggtaggttgcctctcttagaaatccctgccctggccgggcgtgggtaatcccagcactttggaaggccaaggcggccagatcatttgaggtcaggaattcaaaagcagcctgtccaacatggtgaaaccctgtctctactaaaaatacaaaaattagctgggtgtggtggtgggcgcctgtaatcccagctactcg

SEQ ID NO: 79072 - DNA, 1212 bp, Homo sapiens
tcacccttgcacacccacagggtagacggatcgagtttcagcttaaaccgaggggtgtgggggaagggtgttgggttcagctagtccacgtgggtgctgtcctccacttggtgctgaaatctgggcggccacatccccggggcgggagggggctacatccccggctttagacgcgcgagtctcaggtcccgctaattacctggcgggtgctgcccacccctgccctcgcgcacctagcgcggtggcaggcgggaaggcggggcctgggggagccccacccctggagactgcggctggggcctccctctcctccgcccgcccgcctgccactagctcattgcgcctctcctgcagtctgattggcaccggctcccattccggctccagcctccaatccgacccccatttcggctgcagcctcggacctagctccggccctcggtctatccggttgcatcctccctccctgttccggatcttatcttgcgccagcgcctactccaggatcccgtagccagacctcaagccatggctggtcccttctcccgtctgctgtccgcccgcccgggactcaggctcctggctttggccggagcggggtctctagccgctgggtttctgctccgaccggaacctgtacgagctgccagtgaacgacggaggctgtatcccccgaggtaacagtgcctgaggcgcgggaggaggcgggggcaggaggtgatgggaacgaaggtgcgggtagaagtgagaatccgggcaacagagaagggctataatcacgaaggccctggagctggagggctgtgcagtctgcagacctcagtggggtgggggtgggggccaaaaccataaagcaagaacattcctggggacctgccaagaccagctctggccctacgagttctagctgcactggctgcccaaatccctaattgtaaagccaggaactatccttttcgctcccctccatctccttccctcatttcctcaattcctctccttaggcttttcccctcctccatccgtagtgttgtgtcatgggaggaaagaactgagcagatctgaagaaactgagctggccagccagaggcaactagaactattaggaaagcatagactctgaaagtccctaaagagattaccaaggtttaccctctttctaattccccctcctcccgcggagcaaagccagacatggccaactggacagct

SEQ ID NO: 79073 - DNA, 1048 bp, Homo sapiens
aggagaatttaggctgggtgcggtggctcacacctataatcctagcactttgggaggctgagactggcagatcaccttaggtcaggagttcgagaccagcctggccaacatgacaaaaccccatctctactaaaaatacacaaattagctgggcgtggtggtgcatgcctataatcccagctactcgggaggctgaggcaggagaatctcttgaacccaggaggtggaggttgcagtgagcctagatcgcgccactgcactccagcctgggcaacagagtgagactgcatctaataaaaacaacaacaaaaaaaaacttcaaactatagaatgattagctaaaaactgagtatggtagaaaaggagccaaaatcagaacaaactacaaagaaatgctttatgtttctttaaaagtaagaatggtaccatttttgaaaggtttaggtctctgcttctgtctattcacatgtctttttctttagggacctcccgaattccctggtaacagtgttcattctcttcaccttggatcattggtatgcactgcttcaggacgtctggaaggtgcctgaagtcagtcgcatcttcagcagcatctatttcatcctttggttgttgcttggctccattatctttcgaagtatcatagtagccatgatgggtaagcatagaggaggtgaaacttgtttgggaagtgtggttgggaaaaagttattctgaaagctgggattggtggcttatgggtataaagaacctagtgtagcaggaaggcttgggttctggattggatatttcacttggattctccccacccaagccctcttcccaagtctagtcattaccatctcccagctcctaatggccctttggggcagttactaactttcagaatatcaggaaagagctgaatgaggagatggcgcgtcgggaggttcagctcaaagctgacatgttcaagcggcagatcatccagaggtctgcttctcccttttcaaccccaactttccttctcaagggtttcctgagctcatttcttgtttctacttct

SEQ ID NO: 79074 - DNA, 1209 bp, Homo sapiens
cccgtcccaagtgtgtccactccaacactccttcgggggctagctccttctctcctccattctcgcttctgggcctcacctcagcccaggttctcttcgcccactcagtcctgacttcacgcttccacctccagctcaggcgccccctgagcccggctacccctacgcaggacgagctcagggccggctcccagcctcactgcgccccatttcccgccccgcccgacccccaggtttcggctcaccccgggacccggccctagcccctgcccccagcccaggaccgggcccagccacgctcgcccagacactcgccgcctcggccccgccccgcgctccggccactcggcggtaacgagttggtcccgcccgcccgacgaaggcgacgcgcagccaatcagcggctgccacacagcggcccaagccgggtttgggggttgggacctccggctgcaggtccgcctgggccagacgcgcgagcgcaagcagcgggttagtggtcgcgcgcccgacctccgcagtcccagccgagccgcgacccttccggccgtccccaccccacctcgccgccatgcgcctccgccgcctagcgctgttcccgggtgtggcgctgcttcttgccgcggcccgcctcgccgctgcctccgacgtgctagaactcacggacgacaacttcgagagtcgcatctccgacacgggctctgcgggcctcatgctcgtcgagttcttcgccccctggtgagtccattctgccgaggcgggggaagaaaggcggggctgggccgggggcgagagcgcggggaactgttgggcctacgcagcgccggggcccttcattcctgtgggcccctgctgcggcgggcacatttctcattcccgggagctggaggcgcctcgccgagagcgggggagtcggtgctgatcggcccaaggaaaacccgaaggctgcgctcacgcagggcctcatccttatctcggtgctcttgtggcacttcctatttgcagagggttttgccaccccttcccccagtccaatatgtagctatatcttttctgcgtgagtcagtattaatgctcctccagtctacagactaggcatcccaaagccttgtagtggaagcggacgtttcaccaaatgcagaagtcctggatccctagggtatttcctttcatcttacctcacgccgcacagccattggtttctagcca

SEQ ID NO: 79075 - DNA, 1075 bp, Homo sapiens
ggtacgtgtacaggtgttggtacctttgataatagctctagatgatttgcaaaatcaaattacattacacctaaaggatatgtaccaccatcgatatatccccttggtgatagtcgtaatcaaagtaagccactgttaataatttaagtgatttatccctcatgtgttctgaggcagaaaaaagatgaagaccaccgctttagctaatagagactacaagggcagaatttaaacaggaactttgcattttatgtgaggcctaggaatctcaattttaaagaattccttaggcagttctgatgtagttaggcaagctccagtctgcctttaaaatctaatgttctgtggcatatatgccaagaattccttgatccccttaggatttgaccaatcctagtattttgagaatataggaagaacctgcagcagaaacttggataagaaaatagtttgtgtattttgatctttaggttgattgcactgccaacactaacacctgtaataaatatggagtcagtggatatccaaccctgaagatatttagagatggtgaagaagcaggtgcttatgatggacctaggactgctggtaaggatcctgaattacattctggaaactgatgttaagtaccttattctttgtagtggaaacataaaaatgtgtttttctacacagtatactttcagtcttaaaacttcctcatctaagaggtcagtttggtggtaacaaaagacctctctaaatgaacagattatataagtaatatagaaaatacacaaacttgatttataaggtcagctcgacattttttcattttacaaatatttattgagtaattactgtgtgccagatattctaaatatactaggtcgttggcatttattgataaaatagacaaggtccctactcttgtgaagcttacattctgggggatgagggggagaaggcaacaaacaagttttaaaaatatagatgagctgggtgcagtggcacgtacctatagttttagctactcgggaggctgaggtgagagactgtcttgagcacagcctgggcaatataagtttgtccccat

SEQ ID NO: 79076 - DNA, 1037 bp, Homo sapiens
aatcttggctgggtgtggtggctcacgcctgtaatcccagcactttgggaggccaaggtaggtggatcaaaggtcaggagatcgagaccatcctgtctaacatggtgaaaccccgtctctactaaaaaaatacaaaaaaaagtagccgggcatggtggtgggcacctgtagtcccagctactcaggaggctgaggtaggagaatggcatgaacacaggaggcagagcttgcagtgagctgagattgtgccactgcactccagcctgggcgacagagcgagactctgtctcaaaaaaaaaaaaaaaaaaacctgaaatcttacaaggaggaaactgggtgactagggacaagggtggcaagaagatttcatcttatacccttttgtaccttctgaattgtgaatgatgaataattgccttctcaaaaattataaataagttgtgttgtcataacttttattttgacttctaagatggaattgtcagccacttgaagaagcaggcaggaccagcttcagtgcctctcaggactgaggaagaatttaagaaattcattagtgataaagatgcctctatagtaggtaagtagcaaatattaaaccgtgccacagaattgtcagtttggtttccaaaaccctccatgtctgggaaaaccacagaattaaagcagttaaggaaaccttggggcagttgagaaggcaactgacagaattgggtcagcaattactataatgtactatatagtacattatataattactatataatgtaattataatgtggggggcaattggtgttttatttgagtgggtttgtgttctcatagatgtaaaggtttaatttcaattaaagggactggaaggggtgggtgtggggaaaaaaataaaggactaggataggaatatcttcagcgttttctaatgcttcttaaactctgagatttgactcacaatagggtagttatgactgaaaataaggttttaaggtaggaagatacaagtaaataataaacctctgctattttcacagaaattaggg

SEQ ID NO: 79077 - DNA, 1055 bp, Homo sapiens
ctagattttactgattctttatattttacaaggagttagcatgtatttattaaacatttatgttttagtcacttttctaaatgagtagttctgaagacaaatatagagaaggaaaaaaattgggtgaagtggtttacagtttattttgacatgtcatcttaatttaatccttctgatacctgaaatagtccctgaaactcttaagcaatttgcccaaatttgttcaattatgggaaagtaaaatgaagacttgaacactgacaaattttctcccttggctctctcaagaaatgtttctgtaaagggtagagggaaaattctcatcctaaatattgtgcctgtctgaggtagtcatggcaaagcagacccagtcctcaaaatagaatgaaatgtttatggtttatggaatagacgtttatggtttggaatgtccatctgtcagcacttattgcttcttccttgtgtttaatattttctgtataggttttttcgatgattcattcagtgaggctcactccgagttcctaaaagcagccagcaacttgagggataactaccgatttgcacatacgaatgttgagtctctggtgaacgagtatgatgataatggagagtaagtgactgagttgaatctcctgaccaagtattattgtgtgaactggtgatactgattgactgggacaaggtttcactctgtcacccaggctggagtgcagtggtgcaatctctgctcactgcagcctccacctcccaggttcaaacgattctcgcgcctcaacctcctgcatagctgggagtacaggcacgcgccaccacaccctgctaatttttgtatttttagtagagacagggtttcaccatgttgcccaggctggtttcaaattcctggcctcaagtgttccacccacctcggcctcccaaagtgctgagattacaggcatgagccaccgcacccagctgaattggtcatttttatacctaatttttcccaagggtttattgagtactttcaaggcattatgctacatgcccagaaactattgctgccttcaagg

SEQ ID NO: 79078 - DNA, 1990 bp, Homo sapiens
gcctactgagacttttcttttttttttttaaggggtatcatcttatttcgtccttcacatctcactaacaagtttgaggacaagactgtggcatatacagagcaaaaaatgaccagtggcaaaattaaaaagtttatccaggaaaacatgtgagtacttctttgtatcttgtctgggatttatttgcttgattttagtttgtttacctcagttattaagccgagctatattttggcgtaaacagtctatttggggggattgtaatagtaatagtttgagtttatattaaagcagtaatgtgtgggtgttagaactcctgttgtcatcctgtaaggtatatattgctcagtacttgttctaaatgtttaaaatctctttccttcataaatgctatcaattattttgtggcaactttatgatatagctaaaaacttggcaagccagttgataatggattatttcatttcagttttggtatctgccctcacatgacagaagacaataaagatttgatacagggcaaggacttacttattgcttactatgatgtggactatgaaaagaacgctaaaggttccaactactggagaaacaggtaataagaattatgtttttccctcatgaacaagtttacccaatgtatagacagtcccttctaactatcttgttggttccttaagaatctgtaaaacaataaatggttccttaagaagaggtaaaaaaaaaaaaaaaaaaattaaagtaactatcctgttaccatgtgtggtataaaagcaggaaagaatgggaacatttggcttccaaattgtctacaattgacttcaaatggctacatttgaagccataaggacaaataaactgttttcacaatctgttgggcatgtatttcgtaggtgtttctttgctttgtgacacagtgactccaagtagaaggtggaaatttgatataaaatgcacttaaaacattgtgcttacttgcacattgagcctctcagtgcattttacccttacaaattttgttttcagatcagttattatgcctataatagatttcagttatatattacagcaagatttagcaggaatgcaccagttgattgggtatcaccaatttgccagtgaagttcagtaaggcattgaagtatatcataaccctgtgtcagtgcccaagagctcagactgttcagactgattccagaaggctagaactatagaacttagtctttgctttccaatcacttgcttcttagtttcaaaagtgcttgaccaccctgtatagtcttggcacaaatgtctcttgtttcccacagggtaatgatggtggcaaagaaattcctggatgctgggcacaaactcaactttgctgtagctagccgcaaaacctttagccatgaactttctgattttggcttggagagcactgctggagagattcctgttgttgctatcagaactgctaaaggagagaagtttgtcatgcaggaggagttctcgtgagttgctagttgggctttgattctccaaggcaattattaaagccttttatactacaaaggatttctaaagaacaataaccctggaatgtgaagataggtcttttaatcaagacctatgactgtcatttttctcaatttaaatataggtactttagaccaggcgtggtggctcacgcctgtaatcccagcactttgggaggccaaggcaggtggatcgcctaaggtcgggagttcgagaccagcctgaccaacatagagaaaccccgtctctactaaaaatgcaaaaaaattagccaggcacggtggtgcatgcctgcaatcccagctactcaggaggctgaggcaggagaatcgcttgaacctgggaggcggaggttgcggtgaaccaggatcgtgccattgcactctggcctgggcaacaagagcgaaactctgtctcaaaaaaagaaataaataaagaaaaataaatacatataggtactttaaggattatg

SEQ ID NO: 79079 - DNA, 3912 bp, Homo sapiens
tttctttttgaaatagcacatgggtctaaagtgaactcagaatcgggaagatctgaagaccccggaaacaatttttaccctcactttctgagattttgggagattgagacaagagaaaatcttccttgtgagccagtcaataaaacaaaatactgtaaatagtgtgctccagagcaataagaccttgttttcttacaaagatgaatctccagaagaccaatgattctcctttctctgaactttgtaatccacaaagaacacactagaaataaaaggaacggtttgtttcttcagtcggtagttctgcatattgagagatgagagtcccccttttttagccttgaaaagctaaaatacatagtaactattcaaagaaattgctgtaattttctcagcggtgggaatagattaacaagccttacccttgttttccaattgtaggcgtgatgggaaggctctggagaggttcctgcaggattactttgatggcaatctgaagagatacctgaagtctgaacctatcccagagagcaatgatgggcctgtgaaggtgaggtgctcacagcctcatcaagctatgagcaattgcctgtcctcatttctttgttccaaaactgtggggtctaaatgaagacttcgttggccatctctttttttttttgtccttactcccgagtcataaaataagcattggcaggccaagcggtggctcatgcctgtaatcccagcactttgggaggcaaaggcgggcacatcacaaggtcaagagtttgagaccagcctgcccaacatggtgaaaccccgtatctactaaaaacacaaaaaaatcagccgggcatggtggcgggcgcctgtaagcccagctactcgggaggctgaggcaggagaatcgcctgaacccaggaagcagaggttgcagtgagtcaagattatgccactgcactccagcctgggcgacaagagcgaaactccatctcaaaaaaaaaaaaagcattggcagggctcataatgcttggtaggggcaagcgtgtaaagcctgcgtagaattttctgatgaaatttatattgggctaagttactcttgaggatagagcaacccctaagaacagtgtgttgctttgaattttttatagggatgtggtcttactctgttgcctcagccttctgagtagcttggactgcaggcatgtgccaccaagcttggcttgaaattattttaaggaatggttgggtagcacttctatgtcctgtaacttcctgaacatagtttgacaggtgacagacataggaacgagttggtatctagtgaatgacaacatctttaatacaatctgtaaatgtgatttgggtttccatgacttattttctgtggtaacacatcaaattagagagggattgggtctaggaacaaatacagttgtgaatttatttttttatgttaccaactagagattcttctgtgttttccaggtagtggtagcagagaattttgatgaaatagtgaataatgaaaataaagatgtgctgattgaattttatgccccttggtgtggtcactgtaagaacctggagcccaagtataaagaacttggcgagaaggtaagtgtgaaccctattctgaggataacatttgagcgggagcagtaagtttatgtatgtattcagcattggctaatttggttggttcctaagtactgatagatttttttcccaattacttgctgtttactcactttctcgtgactgccccctagtgctccagcctgtgcagtgcctgagatacccacttttaacattccattcctcaggctcaatctagataatggttaaaaatatctaaggacttctgaattttggtaatggcttacatgaatccatatggtccttcatcttaaaacatttggcttagcccctgtaatgtcttattcagaccaggtaaatttgaaggtggcaatatgtagagtcttaatacaagagaaaaaagggaagcttgtggaaagtgaggtactaccatctgcaaaccactcttcccacatgaacagcagtttatctgctggaattacaggtgcgcaccaccacacccggctaatttttgtatttttagtgtttgaagaatgagattgttttaagtcttcaattgactaagtgtccctctgtcactgaaaacttgaaatgtaaacatttaacctgttttattaacagctcagcaaagacccaaatatcgtcatagccaagatggatgccacagccaatgatgtgccttctccatatgaagtcagagggtaagtggcttaaaacttaacaaaagtgtctaggcaatagataggaataaagcttgtaaccaccaggaaatcattactagacatagttttcatattcagttgaaggcagaaccactgattccttcttggcttaagagttctgcagtatgggcccacataactgcttgaaattaataaatgtttctttccccagttttcctaccatatacttctctccagccaacaagaagctaaatccaaagaaatatgaagtaagtgaattgtcccatatccccacaaatatatacacagacgtaaacacacaaccttaaacatagttctttaattgggtttatttatttatttaattattttttgagacggagtttcgctcttgttgcctgggctggagtgcaatggcgtgatctcggctcaccgttcaagcgattctcctgcctcagcctcccgagtagctgggattacaggcatgcgccaccaccccggctaattttgtatttttagtagagatggggtttctccatgttggttgggctggtcttgaactcctaacctcaggtgatcagcctgccttggcctcccaaagtgctgggattacaggcgtgagccaccgtgctaggctaattgggtttatttaactaaaatctctttaaactctcatgggcagtatatgtggctgctaatatgcttttacaaactcagaagtcttcctgtttgggtggggcagatcagggttctttaaaaagttacacttttaagctgatctttctgttttcagggtggccgtgaattaagtgattttattagctatctacaaagagaagctacaaacccccctgtaattcaagaagaaaaacccaagaagaagaagaaggcacaggaggatctctaaagcagtagccaaacaccactttgtaaaaggactcttccatcagagatgggaaaaccattggggaggactaggacccatatgggaattattacctctcagggccgagaggacagaatggatataatctgaatcctgttaaattttctctaaactgtttcttagctgcactgtttatggaaataccaggaccagtttatgtttgtggttttgggaaaaattatttgtgttgggggaaatgttgtgggggtggggttgagttgggggtattttctaattttttttgtacatttggaacagtgacaataaatgagacccctttaaactgtcttattttccaccagattgagaaccagatgttctctacacactatcactgttcaatagagctttcttcagtgatggaaatgctctgtaatctacactgttcagtacaggtagctacggagcatctgaaatatggctagaaactacatttttgttttgattaatttaaatagccatacagttgctaccatactggtcacggcagctgtagactgactgggtccatagttcatcacctcaaaattctttcaaaatttattatctctttctctccttacatgtttatttcccaggcctaccctggtgattagaacagctgaagggcctttcttgttaggctgtccatgccctaaggatgggttcctgtttatccttgccacgcagctgagcttactgcatgtttatatctcccaagga

SEQ ID NO: 79080 - DNA, 1128 bp, Homo sapiens
acaacactccagcctgaggtgactgagtgagaataagaaaaaaaaaaaggatggcctgagcccaggagtctccagcctggggaacagagagaccttgtctctaaaaaaattcctcccatataacgagcttccaatttctaaattttagcttgactaaaagtgcttttcaaaatagtctttgccactgtttaattatattaatgttacaaaaaaaaagcccttgccattctaacttaccttgtccagacgtttccggctggcagaggaaggcagtgcctgaacaggttctctgtttggaacatgggtctggcttctaggatattttaagggaatgggacagatgaagaccagggtaggaggtggaactggatcttttattacaacatttaagagtggagattagaaaggaagacaatgccaaagcttcccatgttagtcccaccccatccaaagtacctcacttcccactgtgccatgtgctcccttgaggatcctgggagtgactgtccttggttgcttgccagtggatctgacactgacacctggtggggaaagtggcaggagcacttggttccctggagtactgggataccttggacttcaggctttgccccaccttatcacaactccctgcaatttctggcctcacccacctcctctagtgccatctgtggctgtgatactgcatctccttcagaatagcctcctgtgttctgccaactctcaggatgtctggcatcttcagtcaggttgtgtccctgaactgatgatggggctgggatagaatccatggctgcccaaataatgaggcgctccctgagtgagcccaggcagtggaggctgttaggcccagacctggaaaaggatggtggaaaaaaataggagggtggagacctcttaagcacctctccacatttccctcccccactttccacaaaccctttcttgccggctacctgttccccctcacctgaggaagcgttggcacacaaggtccaagctaccaccagcgccctcctgacaacactgggacactatgaaggagaagaggcaggaccaaccagggcctgggagtctcagatactgggggtggaaggagacggtaagccccatgaagtcagcccctcc

SEQ ID NO: 79081 - DNA, 5983 bp, Homo sapiens
gagctgtgaacaactcgtgtccaaataagtggctgagaggtggtcctaagtaagcacaagtttagtagtagagtactcgtaacacagaactggctgaaaccccgccctcttgtctacgggcgttctttcagggcgactttgtcagtaccccaaactgtccccgcatgaggtcactctgcacggtcacgtgctcgagcccgcgggagcgccacatcgccagccgcacccctccacccccaacctgcccacgtgacccggcctagtttctccaggcccgtccctacgtctcactcgggaagccccgccccacgctgagcgctccgcctgcgaccctccgccacttacccaccccggctcaagcacgacccgtggatccacgtgctttttcttgtccaatgggagccggctcccgggcgcgaaggggcggggaggaaaggaacgactgtgctacgttgccagaaggggcgggacctgcaacgtccgacagaacgaggggacgtaacggaggcaggttggagccgctgccgtcgccatgacccgtgagcaccgagcccccttctccttgcccttttctttccgttcaccctaaacaccaccggcgaggcgccggctttgaccttccgtagcttccctagcaaggcgtttctctgggcgcgctctgtggccaccctcacactcggtgcccggaaatcgagccctttgcccacggctacttcacgggaccaccctcccgggttaggcataggccctcccggatcttccgcggtgtaaggagaaggccagcgcccctgtgataggcccagagcccccactccacaagccagcccatcccccacggagacccaaaccgtccacacacaccttgccagctgtttgggccccacgccgccccaaaacacgcctccagctggccccttgggacctcccttctctagtccgtattttgacctggcccgtggcagattcgccactcccccctaccccaagcagcctgggcctcgatgggccgttgtcggggcccggagattgaagtggtgttggatcctgctgctggccgcgctggggtagaagggtcgccggtgtgtgggcagagcggcccccgcgtctcacctttaattttctttccttaggcggtaaccagcgtgagctcgcccgccagaagaatatgaaaaagcagagcgactcggttaagggaaagcgccgagatgacgggctttctgctgccgcccgcaagcagaggtagccccagggaggggagggaaagggacggtggagacctgggttagaccaagggttatagaaggaaagagagctacctcagggcttgaatgtggactagtcgtgaggagcagagtgcattgcttcctctagggttttatttcctccccaccctccaaattgttagctcacagccttacaggaaaggacgggggcgggcgcctgccctcagtctgatttctgagcgtccctgggtctgaccttaagggcaagggcagggagcttcacatttcaaatacagttgtggttacggcagcccagtacttttggccctccttgctgttcggttctcctcccttctcccaacctcctcactggtgttgctgggtgtggtcctcaatacagaatagagacccttgggcctgtgtcaccagacttctgaccccttgggcaacagccagatggagactggtcgccttttgagcctcagctctcttcctcttgttctcctagggtgggagtacagcagccaaacgctgaacttagtcccatccacttccatcttatcctttgtgcccttcatccccctgcatcttgtcctttttgccctctggtacctcccagtgccccatcatctctacccccagggactcggagatcatgcagcagaagcagaaaaaggcaaacgagaagaaggaggaacccaagtagctttgtggcttcgtgtccaaccctcttgcccttcgcctgtgtgcctggagccagtcccaccacgctcgcgtttcctcctgtagtgctcacaggtcccagcaccgatggcattccctttgccctgagtctgcagcgggtcccttttgtgcttccttcccctcaggtagcctctctccccctgggccactcccgggggtgagggggttaccccttcccagtgttttttattcctgtggggctcaccccaaagtattaaaagtagctttgtaattccttgagcgcctggtttgactggggacttggggggatggggttggaagaatgactgccctttcccaccaaaaaagggagaactctttagattcagattgtgggtatgtagacttaataagtgaaacatcacagaagaagcctttattatacaatgacaaccaaacaagtactccggatatgcagtagaggaatcctctaagaaccatagagacttcttttctgtgatttttgttccccacccttgaacaccatctctaggatggagttggcctaagagtgaatgctgcaagatctgtgtttatgcctcttttcctcattcttcctcagtttgttcgtctgcttgaaagttggccaaaaaatcctgctgctcaccgacttcccgtggtcagctgctgtcaagcgttcactttctcttctgtcattcctcatggaatgagggtggttttgtcttcccgcttcccttgacctcaaaatcaggattaaaacctggggtagcctctgtgctcctttcttctatgccctggtttgttctgtggttctgggcttcttatatccgtgtgcccagggctgaactccttattttcctttctccaagggcagagccgagtcttcagtccctgttggtctttccccacccccacttccagcccaagagccaggaaagggctggtgccacactgtctgctgggatcagcggtggttctttgagctgctgatttgggtgttaggctcttgagctgggatgcagatgtaacagtagctccagtgagtcagacactctgcccagcacattagactgtgtttgaccacttcttccagttcatagtattgacttcagcccaaacggagataactccctgtgtgtccttgaggtattgagctgggctggacagctccccttgagccaactctaggagtacaatgtcaggggaaccccagtttgtgaaaaggacttagactggaggatatttgttatctggggatatgatgcggtggcggcggcgcctcaagataaggggctggggtttctgggtggggggccaacagagtggtgccagtaacagccccagatagaggagtacgcaggcccagcatgaggcaaccttgacccagaaggtggcccagctacccttgatgaaggtcttttccagttctgctccctcatagctgtgtaaccaaaggctctggttagagaatatgaagggccttagcttttagacctgttctacctcctcaccaaatataatggcagacccatgtgtgtctggaatggccttgaattgctctttccttaaaatagctagctcttcaggagagtatctaaggcccactccatcttacctgaaccagttggtaagggtaaccatgacatagagtgaggcaaggaagaagacgaagtggaaggcagaatagttgtaggaaagatgctggacttggactggaggagctggaggggtttcttggtcagctggcctcgcagccccacccctttgccctggagagaggaaatggctgctgggagcagagctgctgaaacacctcttcccctctcccccaactacctttgttaaggctcttgagggttcttatggcactccacagagatctaccacttcttatggttcctcacttggcactcacctttgtctgcctccactgtttcagggcagcagaaacacagtgagggcttctgcaaaacagaacgcaggttttggaatggtcttaaaagatgtgagggtgttaatctaggaaacttcccccgtgaaaagattggtctagtattaaaaagtggaggcacacctgggttcaaattctagctccagcatataagtggctgtgcagactttggtaagatgtttaatcttttgtgcctcgatttctccatttgtaaaatggagcaaatacctacctcacagggttgttgtgagggttaaattaaatgagattatgtaaaagtatctagcacagttgcctagcacattgtgggtactcaataaaaggtaacagcagctataatctgagcattctgggtagaggttggtaggatgtgtgtgtgtctttgtgtgggggagggagggtgttggggatatggagctctttatcctcacctgaaactcatagctgtaaaccttgacaatccacaggggtccaaatacctcagccaggtaggaggcctcattgctgagaaagaatagagttcttaagctggtttagttaaatagggattatctgggggcatttactaccaattggtccatactggtaatcctcaaaagggtaccatactccctgtgcccttttccaccaaagatttagaattctattcatgtgagagccctaaggtctttggacatattttaaattctcaagtcattccccccacccccttcatctcatacagatcatctgacaaagtactattcttagaatttgtccctgtttgtggggagcttttctcactctagtcttgctctaaactttaaataatggtcccagacattgtcctgaccatccttccctgtcttgggcaccctcctttcatacctccacccttgacacctttacgcaccaagcaaaaagcacacaagcatacatgatgctagcactcagcattgctagagagatatctggtgtttggggttccattttactcaggccaggcaggcacagggtgtgattctgtccttgaaggattactgggaagggacaacagaagagatgggtattaacaatgagctaggtatttggcaggggcaaaaaaaggtcttagcatggagaatccaggtcctgtcccttacctctctctggaggacggctggacagtgcagagaaagtcagatacatgatatagcagctgatgacagaagcttgtaggaggccagagcggggttgctctggggagtaagtataattgctttagtctacaggctggtaatttcctccatttctacccccacttgtacttctgtctccccatcctttggtggggatagggaagcagagattcttttatcaaataattgagattagggaggtaatgaaacttgctatgcttttaaggcccccaaaacctggaatgctgtaggacatgtacccactgaggcggatgcaaggagcgatggagaggaaggagatgaggccacagaagcaaaggtgcagactgaggagcatcttgttaagcaggcagccagctgggtgtgtataatagtggaataggagcacagctcccacacctgccatgctgtagaatcctagggtggccagcaggacagccaggaaccagctacagtcttgagctgcacctgtctgcctaagggtggaaagtgggcaatggcttggagctccagcattttttttttttttgagttgggagtcttgctctgttgcccaggctggagtgcaatggtgtggtctcagctcactgcaacctccgcctcttgggttcaagtgattctcctacctcagcctcctgagtagctgggattacaggcacctaccaccatgtccagctaacttttatatttttactagagatggggtttcaccatgttggccaggctggtctcaaactcctgacctcatgatccacccacctcggcctcccaaagtgctgggattacaggcatgagccaccgtgcccagctggagctccaactcttttacccattaccaactactcccctgctctcagaagactggtgtgactagccatcctacttggcccacgcagtcatcacattcctaagcttttttgatactgctcagtgggaagctgtgggac

SEQ ID NO: 79082 - DNA, 2622 bp, Homo sapiens
actctccccttcgcaccctctcacctgacagaagggacttttcactaggacactgctgcctccgctgtgctgctgtgccaggcccagggaggtgccggggctggggccggccttggcacccaccatccttgtcccagggattaggcttaggtccaccagatggaaggcagatgagagcagcagttgcttctgtcctcagcccattggactgccactgtgttggggctgagcacccggtcccgggcagaatggagacgtccggaagagaacactgacctccaggttgcggtaaatgcaaatgccctgtgaaggagctttgtccttagggcctcaacactgcggccactcaggctgttctctccagattagggggcagtttgtctatctggccccctgtggattagcattctttattggtttaggattagacgtcattcaggttgaacggagttccctgaggtgggtgggtgcgtgtttatgtgttgaggggactattcctagtttatgaggtggttaaggatatcggtggggtgggctggagcggtgtcgggttaggtctgagagaaggcctcgcacaaaacactgtacaaacccgaaaggaagtctgagagacgaaccgccttcctccctgaagcttctagaactggagcagaaagaaggtgtggcccagggccagccccgcctcctccccgggcggaagctgtgtcagttgccggaagtcggcgtgaggtggggcttatgcggcggcgtggtgaaatagatatggcgaccgagggggatgtggagctggagttggagactgagaccagtggaccagagcggcctccggagaagccacggaaacatgacagcggtgcggcggacttggagcgggtcaccgactatgcagaggagaaggagatccagagttccaatctggagacggtaaggttggccaagagcatgtcggggcgggctgagagcagaggggggctctgaggctgtagctggaagccagcgctccaagacggggttctgatcccgttggcaggaggaggcaatagggtagagccgagggaaacagcggtcaccggagcgcgccgcttgcctaaaggagcttgatagtgggcttaaggggacctcaggtgcatagaatggaattaaacatagtccttgctacctggtaacacttgtcatcgtgaatccatgcatgaaccgcttgttttgttggccttttagattattgggaattgtgggtagcggtgcagtaactagacctgcctttcccataggccatgtctgtgattggagacagaaggtcccgggagcagaaagccaaacaggagcggtaagtcttcaggggcagccaactttaacagttcttccctccccggtccccagacaaaaataaaaaccattattaagcctttataccgttcttcaaatttatcaccaattcctgcagatctaggcgccacaactttactcttgttagcagaaggcctcctggcaacacctgctgccaagactccaggggaaaggagtattagtgggagtttttattttcaatcaagggtttatcaagatttatttacagggcacttctgggaatgacccttcctgggagtttatggtgttggttgagaatgaggactaatatatttaaatatttttgcagggagaaagaactggcaaaagtcactatcaagaaggaagatctggagctaatagtgagtggtagtgcctaactagtgtatgcggaggggaggctattctgcttaatttgggttgtttcctgaaacaagcggagtcagtatatttggtggcacattaatgcctgggaacctatgtaacatgatttttttctgcagatgactgagatggagatatctcgagcagcagcagaacgcagtttgcgggaacacatgggcaacgtggtagaggcgcttattgccctaaccaactgatgcgtgctttctcaaatatacctactggattaatttatggcaataaaatttttttttgtctttttcagttttatcatcttgggtcaagtagagtgtatactatatcctatgttgtggagaatttatatgttggagactaactgaatttaagtgacccattaaaatctagcacacctgtatgaaaaatcagtgtagaagaatacctcatgtgcagatgctaggtggcaggccagtctcattcatctgactagctctcaacagtattcaaggtacatctggagtctcagcagagttactgtactcaaatggcatgtgtctccaagacagcttatgaatatctaaaaggccagctacctgcctaggagccactatatatatagatagatgtaggttatgaacccagttcataggccaccttgagttagaattttggtacctacaacatgcttgattttgagtgattaaaaaaaaataatttggctgggtgctgtggctcacacctctaatcccagcactttgggaggtcgaggcaggtagatcacgaggtcaggaattcaagaccagcctggccaacatgtgaaaccccgtctccactgaaaatagaaaaattagctgggcatggtggtgggcgcctataatcccagctattctggaggctgaggcaggaatcgcttga

SEQ ID NO: 79083 - DNA, 1029 bp, Homo sapiens
acctagggtccaactgcttattcttccaactgtggaacacaaggggagtctcagcatctggtccttgatttggttttttcattgtttccttggcccctgtatccagatattggacttactgctatacttgtgatactgggtagcccagactttgaaggtgctttgtgaggtttggactcatgctgagaaacccacaggaaagcactgtccaggtaggattagaggcttcccacttaaaactatttctgagaaatcttaggttttatcactgctatggtttcccatatttacttgggactgttctgactttctttttccagcccttagcttgggttagaaaagtggacatgtaagtgaacaatgcattacttctaccttaggtttaggagtaatatacccggaaatctaagctcatggaaacatgttttccatttttgcttggagtccgtttttctagttgtacatactttttgatccatatatgtgtgcatgtcaagaaataaaagaatcacacaacaaggagatttttagcatgatactggaaataaaatgtccaagctgacaagtattaattgcctattaaagtaaaagataacaattgtcaggcagaaggtgtttcacattttgataattccctttgatctcagaaacaagctcaggtactagcttggctttaggtagcatctggatttattccatgaccaaatacagatgtttttgagaagaccaaggtcttctcacatcctttaaatgtcccactggaagaatcaaatagtttagtgtcgtacgataaaaatgaatgcaaataattactatgaggtggtaaatacataaagatgaacacaggtacaagtcactgttgtgtgggatacaatctaagaattatcctagagtcagaatgagggtaaggccttgaaactcttggagaaatgtctgtaattgccatttgagtgtccttacagcagactcaggggccgttgcagggttttttttttgtttgtttgtttgttttaaagagacggctctgtt

SEQ ID NO: 79084 - DNA, 1024 bp, Homo sapiens
ttcattatgttagccaggatggtctcgatctcctgacctcgcgatctgcccgattgggcctcccaaagtgctgggattacaggcgtgagccactgcacctggcctcaatttggatttatattgtctttgggaaatgggaattattagatctgttagggatcctgtaagaaaaggcacaggacttggagttctaatattctgttttcttttattgatctgaataggtaaatgaatataaagaaaatcaaaacatcgcttatgtgtctctgagaccagcacagactacagttttaataaaaacagctaaggtctatcttgcccccttttcactcagtaattaccagctagaccagcttatgtgccccaaatccctatcagaaaagaattctaacaatgaagtggcgtgtaagaagactaaaataaagaaaacttgcagaaggattatacctccaaagatgaaaaacacatcttccaaggcagaatccacgctgcaaaattcatcctcagctgttcatactgaaagtaacaagctacaacccaagagaacggcagatgcgatgaatctcagtgttgatgtggaaagtagtcaggatggagacagtgatgaagataccacaccatccctggtaagaacttaattagtagcttgttctggtttctcttttttgaaatttgaagttctgataaatcgaagtttttcgaggatctctctggtacaaacaagttatttcatcatctaatgtaagtataaatgtaataatacatttttattatttttaaggtttaacaaataacttccttgggttatttttgctcttgctgttgatgtgtcaatgaaaggattgacttaatctttactctgcttccttttttctttctctaaactaactgcatatatttttgggtttagtcatactttatggtgcctttctcacctttacatgtttatgtacagtatatcagaagtcatcagtttgtgggacatggtattgactgacctttgatatcagggtagggaaacata

SEQ ID NO: 79085 - DNA, 1014 bp, Homo sapiens
aacactatattgtttagctttgtctttttttggtgttcacatacaatatgccttttttatattctgagattttcttattttgctcatctttacatatttatgcttttaaatttacccatgttgatgcgcacagctttatttcgttctttttttctgctatatgatattccactgtatgaatgtactacattttattctactgttgatgaacaattgagttgttatttttattatgaaaagtgctgctccaaacattcttaagtctcttagtgcttatgtatgggagtttctctaggagtagatttctaggattgtatgacagcccatattattccatatactcaggtgtcttttttgaggattaaatatgagatggaatgttgactacagtttttagtatatagtatactttcaatcagtaggttttactaattctcgaagtaatgtggactataactgataattttttatgtgaatttttggaaataatttcagaggcttctctttccccaacattttaaaatgaattacttttttaaaaatgaaaaaatagtgcataaaaaaatagagaatgtatattatttaaaaagtaaactacagtgtatggaagggaatgcagtgaaacgttttaagtttccttcctattttagaccttagttttccaggccttttccctagaagtagtagttttatgtgtattcctccaaaggtaacctcagcatgtacaaatgtatgtgtatatgtaacctttttgtatacatgtactggactttgtttttgctttttataaccaagggttcctttcagcagtgcataaagatctatatcattctttttatggctgcgtattattctattagatatgtataccataatttaacagacctcacctctttttgatgaacatttaggtttgttttttccatacttcttattaagataattgtggccatgtatatatatatctatgcagtttataaatatatctgtggtatatattcctagaagttatct

SEQ ID NO: 79086 - DNA, 1052 bp, Homo sapiens
gggcaagttaactcctcttaagtttctggggtttttttgtttttgttttttgtttttttttgagatggagtcttgccctgtcacccaggctggagtgcaatagtgcagtcttggctcactgcaacctccaacacctgggttcacacgattctcctgcctcagcctcctgagctgctgggattacaggtgcctgccaccacgcccagcaaatttttgtatttttagtagagatgggatttcaccatattggccaggctggtctcgaactcctgaccttgtgatccgcctgcctcggcctgccaaagtgctgggattacagtctctaagtttcaatccactgtctttaaaatgtgatacctcatttgctaggttgttgagaggattaaatgagataatacatgttattattactttatagggtacctggcattcatttattgaacaattattttgaatgtccatgatatgccaccattactgttgatgttgaaagtgaagttgtggggaaaacagacaaatacccttgccctccttgtgtttatattctagggcagggagcccaacaaataactttttattttttataacagcctttgttacctcctgggcctttagaaatgacttctgaaaatcaagaagacaacaatgaacgatttaaaggatttctgcacacatgggcaggaatgagcaaggtatcacttgggaaggccaatagcctttagaatcatctgttaaggaaatatatatatatgtaaaaatatatacatactaacttagttctttcatctctcccaatgtttcagccaagtagtaagaacactgagaagggattatctagcattaaaaggtaagttgaaattccttgtgtttcttttatattttttgagatgtttgagttataaagactatacgccattttagggaattttgaaagtgagatgaaatgtttccaccctaacaactgttgtttttgtgtatttcctcacaagtgttgccatatacaataccactaggatataagcttcatatacaataccactaggatataagca

SEQ ID NO: 79087 - DNA, 1020 bp, Homo sapiens
taattgtagacacagctgatcagtgcctttgtttcttttttgttttgttttgtttcttttttttttttttaattttcagttagaaggaataagttctaatgttcagtagcagaatagggtaactatagttaacaacagtgtattgtatattttaaaatagccagaagagaggacttgaaatgttcccaacacatagaaatgataaatattgaaggtaatggaaccccaaataccctgactgtgtttccattatgtcctgtgcatctgatggggatgatgagaggataaatgaggttatttgggtaaagtgttttataacccttttaccaaagaatttatgctttggctttctttacaagaagagtgtgatataagctgattgttacttatattcttaggtgtatagaaatgaaagaagtagcttttcctccttcgacttcttggcagaagatgcctccactttaatagtaggacactgggatggaaatatgtcactggtggatagacggacacctggaacttcttatgagaaacttaccagttcttctatgggaaaaataagaactgttcatgtccacccagtgcatagacagtattttatcactgccggattgaggtatggtctttataagactttatgacttagaccttttaatgtcacaattacatggtttagtttggttgtcaaagatattgtaatacaatattacaaaaggtattacttttgtaatacccaaaggccaagtaattttcctttctatactgattgagacttgagtgattttttttgaaaatgaaaaattcttttagatttgataaatagtgaaaaagctgaaagaaatttttgttttccttggcattatatgcattcgcctcttatgagaagaaaatttaaatttcacagaaaaaaaagttacatgtgacctataacttgttggcctgtgttaacttttttctaggaaggattgaaaaaccaactagaaacttgacagctgggcgtggtggctcatgcctgtaatc

SEQ ID NO: 79088 - DNA, 1045 bp, Homo sapiens
gaaaaggaaagaatttgtaaagaacagaaaatatatttgagtaagtattgtttggtaaaacttagttacatatgcatatatatttgttaggtatatatgtttatgtgtattctgatgtaaaatatatatatatatatattttattactatagtaccatgggtaatggataaagaagttaaagctactgcttagaatgaagaaggccccaggcttacctgtcccgatctttaaactgtccgaaggaaattcaatagcctgttaagtgaataccttcattcttacttgtatttgggggaatattatgaaatactcaccacttttggtattttatgaaaatgttttcttttcagaagttatggtaatttcaatgtgtttgttgttgggaggggagctgccaaatcagttactaatattactgtgtgacatctatccaacttttttcattattcttcattgccaaatactgaaagacttgtaaatggctttggcaatatgtttgaattctaagaggaaatattttcccataattgtatatcagagaaatatagtgatatacaatttccttgaaaaccaatttctaaataattttcttctctgtaatctaagtgtaaaaaggtttagttttttaataggtttaggtgtttataagcaatagttctctattttctagttgatataagtagaagaattgacaagtgagatggaaatgttaatttataaagggaaagaaaagctaggtgaggttgagttataattaaactgttcaggaaacatcgtaaaggctttaggctccctttttcatttctataccaattaatctcatgggttctagagtggttagttctacgggaattgtttttgtttttgtttttaaagatgctgaaaactactctcaatcaaattagtaccatcatttaagctttgaatacttggcagtaattgcctgggctcgtcaataaatgttagcaaattcttgatgttcctcacttttgtggtttcttttgccattgtggcttcataaacagtgctatttatattcagtta

SEQ ID NO: 79089 - DNA, 1113 bp, Homo sapiens
ttttgtatttttagtagagacgggggtttcaccacgttggtcgggctggtcttgaactcctgacctcgtgatcctcccgacttggcctcccaaagggctgggattacaggcgtgagccactgtgcctggccgcttctcagtttctaacagtatttatctgggggtaaggacaaggataataggtggatacaagcaaaataattatgttatatgatccaagtgaatagtagtcagctgtgtaaatcccaccagtatccttttatctatgtgttagtaactttaagggaggaaaagtaagacaggctattattaaagaaagagcccactcttccatgatatttaaatatttatttaagtttaaaaataatcttcatggcaccaatgattttatgctaactacatactgcatatgtagaaaaaagtacattgctttgaaggaaaatgtaacttaagagtttttggcacacagaaggttaacaactatatatttttaaatgtatctaagaaattcacatttgcaggtagtttaccctctactgcttaaagatgcagtatgctattctttagtaagagttttatttcctgatagatgaagctatgaaaaccattgctttttctacaatgagataaactaattttgagagaaaatgagagacatgttagaacacagtataaccaggttaaaaacttgaacaatttttaaaggtggagatataccaaaaaagactagtcaccaatcaaaggaggtttattattcaagcactatttgaaaagcaaactgaaggaaacttttctatccatattttctgggatgagccctggaaaaaaacaaccctaaagtttctgtttacagagcaaaatttagctgttagaaatggcatagactactgtactgttagaactctagacacaaggaacatactaggatatggaatactgcatctgtctctaatgtgaatatgaaaggtcagagttgaggctatcactcactgcatagaaacaccagattctacaaactgaggtaggagcactacactaaaaggtaatcttctatgttgcataagacagtagataccaggtggacaccagccccctgtctcctgacagcctttt

SEQ ID NO: 79090 - DNA, 1418 bp, Homo sapiens
atccttaccagtatgttagcagaagagggtcagtcagctctgtttccatgcctgacatgtatcaaagatctgggacctcttcccagtggaggcactagggttgcttgtttaaagggtgcttgaacaactaaccagcaaagagatgtctgatgccaaatgggcaagatcaaatactggaatgctaaaacacagctggaatctaagaagggaagagggcttctctgaccattttcataccagcaacaatttaggcagaattataaacatctatttatcgagtgacaatacaaaccgaaggagatcctagtagagattaggggtcagttaaaatcaactagccactgccacttgtcatctacatagcaaaggctttatttagcacaggactaacgtgaaaagtagacccagagatgaaaaggctgtcaggagacagggggctggtgtccacctggtatctactgtcttatgcaacatagaagattaccttttagtgtagtgctcctacctcagtttgtagaatctggtgtttctatgcagtgagtgatagcctcaactctgacctttcatattcacattagagacagatgcagtattccatatcctagtatgttccttgtgtctagagttctaacagtacagtagtctatgccatttctaacagctaaattttgctctgtaaacagaaactttagggttgtttttttccagggctcatcccagaaaatatggatagaaaagtttccttcagtttgcttttcaaatagtgcttgaataataaacctcctttgattggtgactagtcttttttggtatatctccacctttaaaaattgttcaagtttttaacctggttatactgtgttctaacatgtctctcattttctctcaaaattagtttatctcattgtagaaaaagcaatggttttcatagcttcatctatcaggaaataaaactcttactaaagaatagcatactgcatctttaagcagtagagggtaaactacctgcaaatgtgaatttcttagatacatttaaaaatatatagttgttaaccttctgtgtgccaaaaactcttaagttacattttccttcaaagcaatgtacttttttctacatatgcagtatgtagttagcataaaatcattggtgccatgaagattatttttaaacttaaataaatatttaaatatcatggaagagtgggctctttctttaataatagcctgtcttacttttcctcccttaaagttactaacacatagataaaaggatactggtgggatttacacagctgactactattcacttggatcatataacataattattttgcttgtatccacctattatccttgtccttacccccagataaatactgttagaaactgagaagcggccaggcacagtggctcacgcc

SEQ ID NO: 79091 - DNA, 1080 bp, Homo sapiens
ctttaaaattatgcaaatctctccctaagaaccccaattattccacagttgtcatattgtaaacatggacatggttctaccatctcgggggacaaaataggggaggtcaagtctacaagtgacttgttctgttctgcgtttggggctgtccaattagggtatcagcagctgctctacttttgtgtgggtccaggaatatgtccattgaccacccttaaataagccctcaagccccagatgacttagaaatctctccctgagatgaaaacaggatcttgtgtgtgattggttttagagttgaagagcttgggcctaggatcccacactcgcccttcatatgcctgtgctgcgtgcttcgaggacttccctctgcaaggatggtgatgctttcctagaacttatgcagaggatgaccctagggggcagcatttctacatctaagtgttggtctctgccacggtcacattctgtgttttgtaggcatctcttagaaatctattttaaaagattcttttcctggtcccttctaaggctgttgatcttggaattctattttctgaagcttttcattctcaggatcagtttctttcttgcatcgtttagttcatcaggctctattttcttaatccataaagtaaaaacaaaatatgaattgttaagaaaataacatttcgttgttaaaatataaattgaaatagtctttgggtcaagggggtgtatataaaataagcactgctatccaaatctcaacagtctctcaggtaacttaactctgctttctcttaactacactttgtccaacatttctgacagaactatctatctctggtaccactgaattcgtttaacgcccctggagcactataaaagtcttgaggttcttcggaaaaaaaaaatcacgttaagtctagtttcattatacaaaactatggtgatgcccactaggctctagactaaggggacagacttaccccacccctgatgctgctgttgctgtagcggtggtcccttcagatgcccactctgctcagatttgaaaaaacaaaaggaaaagaaaatccaactcagaccatcataaga

SEQ ID NO: 79092 - DNA, 1035 bp, Homo sapiens
cgagtttgaacaattccactatcaatacttttgtcccctcaggcgatggtttgcctgcaaaatccgctcagtggtgagcctgctcattgacacctgagaaggcatgactcctcccaaaaactagccaggtggaccaaggaacccggctacccattcccagcaatgggacccatcgcggaaccatcggcacatataccaagtcctcctctcatgactcaaagtccactgcagcctaggagggtgtttcccagaagaagaaagggataggctcatgccctgtctaaacaaactgggaaaactcattttcttcagaagttatttcaagaaaggctcagcgactctgtttctcatctttccaatttgcaggataatttttggttttgaattttgatttttcatagatgtatattattttgaagtatcaaataaaaataatttattttactattactgattattgcagtagtatcacctagcagaggggacactagttgaaaactagagagctgctgtcctctgtattctgcaggagcttttcctgctggtgccactgggttccagtagactcatcactgcagcctcagcagggcaggccagggatctggacaatggggactgtttagttttttgtttgttttttttgccagccagaacttttaaaaaagtaaacatccatgtagaatgattaaatggaaagttgcttcttatgatggtctgagttggattttcttttccttttgttttttcaaatctgagcagagtgggcatctgaagggaccaccgctacagcaacagcagcatcaggggtggggtaagtctgtccccttagtctagagcctagtgggcatcaccatagttttgtataatgaaactagacttaacgtgattttttttttccgaagaacctcaagacttttatagtgctccaggggcgttaaacgaattcagtggtaccagagatagatagttctgtcagaaatgttggacaaagtgtagttaagagaaagcagagttaagttacctgagagactgttg

SEQ ID NO: 79093 - DNA, 1032 bp, Homo sapiens
agagagagtttctaccccatcattccacaaagtcagaacagctagaacggaggctgaagagactgagagcagctgcagaaatccaaaaatattgaccttataagctcaagatgctgtatgctgggtttttacaaggatattcggtatttgatgaaacccagttaggcatgacatattccccttctccccattcctacctctcttttattaaaaattttatagttacagtgtctatgttgcccagcctggtcttgaaccctttggctcaagtgatccacctgccttggcctcccaaagtgctgggattacagatgggagccatcgtgtctggcccattcctgcctcttaaagccctccacccaacaggcagacttgagactcaaaccgtggtcccagctctgcatcaggggtagtttggaattcagattctttcaaactggggtaaaaaccaggcccagagttcagagttcaacaacaagcttccaagatgccgcccaaaggaaaaagtggttctggaaaagcggggaaagggggtgcagcctctgggagtgacagtgctgacaagaaggctcaaggtcccaaaggtggtggcaatgcagtaaaggtcagacacattctatgggaaaaacatggcaaaatcatggaagccatggaaaagttaaagtctgggatgagattcaatgaagtggccacacaatatagtgaagataaagccaggcaagggggcgtcttgggttggatgaccagagggtccatggtgggaccatttcaagaagcagcatttgccttgcctataagtgtgatggataagcctgtgtttacagacccagcagttaagacaaaatttggatatcatattattatggttgaaggaagaaaataaaatcatatgaaagactgaaagaaaaaaaaaaaaaaaaaaaaaaactaggcccaggacaccaaaggcaagaaaggcagaatctttaacaaattaggggctgggtgcggtggctcacacctataatcccagcactttgggaggccaggagt

SEQ ID NO: 79094 - DNA, 1186 bp, Homo sapiens
atgccttggaaagacagtggttctcagtgtgagcaggatcatgttcccttgggtgggaggagaaggggagcaaatcagaaactttaaaggggccttttcttttcttttttttttttttttgagatggagttttgctctcgtcagccaggctgaagtgcagtggcacgatcttggcgcactgccacctctgcctcctgggttcaagcaattctcctgcctcagcctctcccaagtaattgggattacacgccgacaccaccatgcctggctaattttttttttttttttttgtatttttagtagagatggggtttcaccatgttggccatggtggtctcgaactcttgacctcaggtgatccacccacctcgacctcccaaagtgctgggattacaggcgtgagccaccgcgcccggcccaaaggggccatttcaaaccacaggagcacccccaacacatacagattctgacgggctccccctggaagatgttcccctctctgccacattgagaatcactgcccagagccatgttatccctttgtaatatctcctttagtccaatatgtacagtccctgaattttggacacagacaagcagagaaacatggaagacgtgatgcgtgaatccaggcccagggagtgatcagtgagtaaggggcaaaaggtttgcatccacatcctgctgaagcctgtggaaggtgggagttggaacagtgagaggcagagaagtgctcactcactctctcccacacaccgtgtggcatttcgctgtgggaagcagagtgaagacgagcttgatttggtagatccatcttaattattcactctacatgatgtcttttttcctttcgtttttcttggcaaacatttgggcagagtagggttggtgggagtgaggggatgggttcttattaacttccaggctaagactcaccttccctttggtctgaggaaggcagtccatcctgctgtggttagaagatggcttttgaattttcttaggacagcttcttaaattttaatctatacacaaatcacctggggatcttgttaaaaggtgtaggtggaagtgtaggatgggcctatattctttatctccaataagctctcaagtgatgctgatacccctgatatgtgggctacactttgagtagcaagcgctgaggagagaagatggcttggtt

SEQ ID NO: 79095 - DNA, 1045 bp, Homo sapiens
actctgatttggacagggataccatctccaggaatacccttaccccagtttgatcctctgttctttcctacactgatctcactgggtattaggagttgaagactcaggaaggaggagctcatcaggtaattagcctggtcatagtcatttagtaattaatcaacaaatacttcttggccgggcgtggtggctcatggctgtaatcccagcacattgggaggccaaggcagaaggaccccttgagcccaggagttcaagaccagcctgggcaacatagggagacccccctcttcagaaactttaaaaattaactgggtgtggtggcgcatgcctgtgattccagctattctgaggctgaggtaggaggatcgcttgagcccaggaggtcaaggctacagtgagcggtgattgtgccactgtactccagcctgagcctcagcaacagagcaagaccctgtctcaaaacagaaacaaaaacccacaaatacttcttgaggatcatgtacagggcactgggctgtgaaccatgaatgcaaacactggacaccatgcttctgtctctcccagtaatggagaggagagtggaattaaacatgggaaggttagcattaggacagctaagcagtacaggcagtgcatatcatgagatcagagaaaagatggcttttcccaagtcactttttcaggtatgtctaaaccgcgtgtctctgcagccttgagatagctcaggtagtgccttgctcagattagaccctcagtagatacacactgaattgagtgtttttcccaatggttttccatccactttttggccttcaaataacacaatattcagttggcagcagatgttaagatttttttcagcagtaatatcccaaccaatgtgcagaggcacagaagatgacagggatgcgccagaggcctcagggagccgctgggctcaaggttcctgcctcccctccactcacccctactcttcttgaccaaaaactgaagaaggagcagtcacacacttccagaaaacttgcctcctctgtttgctctc

SEQ ID NO: 79096 - DNA, 1050 bp, Homo sapiens
aaatattgaccaaattcactcattgaatttgctagtcttttaacaagcaaaaatgtctaggaaaaaaaaatctcagatgtcagtaatcttaacacaaaaaatattgtcagtggagtcctctttgaatccaaaaggtaggcatgtttctaaatcatatattcacagagtgatggagtattagccctggaagggactttggtaatcatctggtctagggatgtaaagtagttggtgtcccagctagagtcagagttcttgtgtctcatctcccagtcagttcattgtgctcacctgacttctatagttgcagctattaaaatctaaatcagctattaaaatattcatatcgactattaaaatctaaattatgattattttcaggcgcataatgtcagctttgctaacactacctcagatccatttgatttcttgggaactaccaggactgtatttggtttatttttaaagccaagcagctttataaaccttaaaatatttcgtcttcgaaacctaaaaggctctttatttagtccatgatgaatatttgagtagtgttaaatttatcattctggcagtactcacattgtacttgtcattaattgtgactcatcaaagaatgttttgatgttgagtccttggctaacagatggctctgtttagaggaattgaggcagtgagctatgaggtccaaggagagagacttcttaaataattattcactagaggttgtttgaatttgtaagaaagcacagtaatctgtgggggagggaagtttagtctttgtgttaaggcttgagaaggctttttttcagctcccttcagaggatgcataagagagttgatgtcagtgttgtttgtatgccaggtgtgggctggaatgacacaaatggccagcagagatgcacacagttgaatacttgtttgtttctgtttctaaggagtctgtcaccacctttgtgacatagccatagagaccaccacacgggaaagaacaggagctcaagcaataggagtactaataagaacttgagtatagaatgtaaagcaatg

SEQ ID NO: 79097 - DNA, 1060 bp, Homo sapiens
gggaggccgaggcaggcggatcatgaggtcaggagatcgagaccatcctggctaacatggtgaaaccccgtctctactaaaaatacaaaaaattagccaggcgtggtggcgggcgtctgtagtcccagctactcgggaggctgaggcaggagaatggcgtgaacccgggaggcagtgcttgcagtgagccgagatcgcgccactgcactccagcctggaggacagagcgagactccgtctcaaaaaaaaaacaagaaaaacaagaaaaggatattaactaaaatctagaaagaagtcatatgatgatccagtcataagaattagatattcggcctggggaagggaagacttggaagacatgggataggatagtatcaaatatctgaaaagcaatcatgtagaagcctgggtggagttgatctcttatccttcggaaagcagagctagggtcagtgggtagaagttgcacactagaagttacctaggagaccttacttattattaagaacttgccacaaaactcttcaaaggtgaatgggactacctgtatgaggtggtgagctctctgtcatgcacgtggaggctagaaaaccatagccctgagattaggactgtacagttgtataggttagttattgtacaagggcacccggccaagggggcaactggggctgaaatccagccagtgctgcagtaactacatcatgtatcctggcattggttacccagaggaagaggtacctttttatagttcacccaaagatgccccagatctactagatatagaaaggttttcttatcaggtgagagatcagattagtaaccgctaaccccctgccacatcttattgtccattagtctatggtcacagctatatttaattaaaactcaataaagtaaggtgaagaaaatccaagcaaacaaattccatttaacccaaaggagaataacttatatatgctttttaatatattgatgcatttaaaggcctccctaaccccatcccacatgatgttgtgtgatgtgctgcaggaggggataagagagagatggagttggt

SEQ ID NO: 79098 - DNA, 1003 bp, Homo sapiens
ccatatatatctttgttaaagtgtctgttcaaatcttttgcctttttaaaaaaattgcgttgcttgtttttttatggaatgttgagggttctttttattctacatgcaagtccttcatcagataaatgctttgcaaagattttctcctagttcttggcatgtcatgtcgttctctcaacagtttcttttgaaaagcagttttaaattttgataaagactaatatatccatttattttatgagtagacatttatttgttttttatgggttgtgtttttggtgttatatttaagaagtatttgcctaatccaaggttacaaatgttttcttctataaattttattgttttatgttgtacattttggtctatgatccactttaagtttttttttttttaatatatggaacaaggtatgaattgaagtctccctctccctttttttttttttagcacatagatatcccgctgttccagcaccacttctttaaaaggctttcctttctctgctgaattcccttttacaccttgttgaaaatgaacatgtgtgggtctatttataggctctttattctgttctgttgatctatttgtctttctttgtgtcagtaccacactgtcttggttattgtagctttataatatcttgaatctagatcatattagtcctccaaatttgttcttcttttgcaaacttgttttgcatattctagatccttttattgccacatgaattttagaattcatttgctagtttctacaaaaaaagcctcctgggattttaattgagattgcattgactctatagaccaatttggggagaatggacatgttaacaattttgaatcttgaaacctataaacatgatatatccctctgtttaggttttctttcatttctctcagcaacgtcttattgttttccttgagttgttagagttttaaatatttgctaatcacttgtgtgtaaagtggtgtctcattgtggtttcactgctgacgaccag

SEQ ID NO: 79099 - DNA, 1038 bp, Homo sapiens
gagtattgaaagagaaccaagggccagcttctcattaaaatcagaggcaagaaagcatctaaagatcaaatgacttaaatggtagcagaaaagactttaggaggtaaataaggaaatgtttgtttgaaggcttaatggaggatattgtgttagaaatgctgagttattttccctagtactaactttctaatagcaatgatgttaaggatatctccccacaccccaccagcattctcagttactgaaggacttctgcaggagtgggacagtcccctattagaaaagctggcatagttgaggttctacctatatttaagcagaggtagattttattagagaagcactcaagtgtagcttttgatttttttggaagcatactttatagggcctgaataccttattaaaagcaacataatactacattaaacgagtaaacaagcatctagggaaatcacacttacaatcaattagatttatagactagtatttcgaagcaaaaacaggaggaattcaaatggaacatctaggattctgagcagcacattggtcttggaattcaactacaatctaatatgtcttggttcctttaccttaaatactctgttctccaattagagttggttttgttcttcaagtctttattttcacagcatcgcccgacttctatgttgcttcttctttaattttttttaagtaagaaacattctgctttatctcattatttaaccattcagggacacttcccaggcttttctatcatttgtgaagaacagtgggtaaaagtaaagcacaatcattctggaaattctttatgaaacagaaaatatataaaaatattcagagtatctccactaatgcctgatgacaattcatttggacttttgaactggagagaaagaaatcatccaatagttttgtgtattgctatctatgtttctttttggtcagtaatgtatgtgttatttccaaatggccttcctccatgaccctcatccaattcatgaggaataacatattttgaatctcagaaaagactgc

SEQ ID NO: 79100 - DNA, 1316 bp, Homo sapiens
ttcatacgtttcgtcacaaccactttcctcatttacattgattagtttgccttcactaagttcctctggtgcatatctagagtcccttaaatagcagcaatgtcaataatctcacagttagctatttcttctataaccctatttacattcctgttaccactttttgttactttgctgcattttcatcttcgttagccagttccctctttcagttatcatttttgggtttcatcattggaagacaaggaggcaaccccaccgcacactttgttgtttgtgcattaactgaataacagatgcacagtgactagtcaccgacagactgtgaaagaagtgacgtgatttgtcactgatcgtgatacacatctgttatttatgttgtgaactgaagagctagcaatcaagtttgtacttcatgtaattactcacagttaataaaccatggcaactgaaatttcaaccctgttgtttggggactgacattctttcatctaagaaccatgcaaagtgaggacaacctcagtcaattcctgcattccttcaggcccactgctaattttctgattcctggtcagttatctactctgacattcagatctttttctggtatatatgccttactaacttcatcttagtgaagtttctctttctcctccaggggcaatacctttgatctttcctctctgacatttatgctcttggcttctgaccattccttcaatctctaagtttgtttgaaatactgatttgccccgctagcttgtgatcgtttgcaaattaaatagacatttctccattcattaatgtgaatacttatccgcacagaatgtcaattcctgaataccagcacaggttcacccagccagctcatccttatcctttggtcatatggtccagtcagttgtgtaagggactctgtaaaggtcctgggtggggcctcagaatctatatatttaaatgttctccatattatagccaagtttgatttataatataaaccatgctttcctggttcttagtaatcttactatagactactagaagtttagatctgacaaatatactagagattgtcttgtcaaacctactcattttataagtgagagaactaaggtccagagttgccagatgacttgcccatggcttcccagttacaagcagagtaggaactagaactgatggttccaaacgcccaatcttttttttttttttttttttttttgagacggagtctcgctctgttgcccaggctgaaatgcagtggtccgatctcggctcactgcaagctccgcctcccaggttcacgccattcttct

SEQ ID NO: 79101 - DNA, 1073 bp, Homo sapiens
caataccttagttccacattgaaccagttgaagatgttaattatattatctaacaaagtctctttagtgtgatgtaggaaatacctcacacaaaggaccattttactatatataatataacatcatgttgtataccttaaatatatataataactttttttaagacaggaaaaagaggcctttaagaggcctactggaagtagaccggagatctcaatgtcatgaacattgaagaacatatatttttgttgtcattatggttttattgtggttgtttggaaacaacacaagtcatatggactgaaactgttaattgtttcttgtggcgtgcatgatcattctgatttttctataaagagtagagatagatagacgtgtttccttttcatcatttgcaagcattgtctagattatggggaggcaactgccactgttagatttcaataatataaaaagaatagaaatcaggcccaggggaaaaatccactcactttggtagtagaactacatcaagaaagctcaggggcaaggagacaacaggcaaggagacagtttctcctatggagacagactaggttctatcagcaattctggtatcctgtgtcattgccagcaggcaccctgaagggaatgagatgaaccacaagagaatgtgttggtaagaatatatcctttgcaaccttactgcagaatggggaatttcttttgagcttgatccgtttttgttccctagagtcaaaaatatgttttcttgaggaatctcaagagtagaatctttgggtgtggattggggagaggagtgcgcagagaacaggacaacaatgaaggctggttttagagaggtagagcaaagatgccgtaaacaagcatagtagttagagtattgtgagatgaaatttgggagttacccttcaggcctttatcatcataagagtcattttctttctggtgctagcagcattcttctgttaaggtaggtcccctgtgtctgtcttcttgaaagtgggagttcaaactttctctcttttctttcttctcatcatgactagagtatacctgagcagatatttgtg

SEQ ID NO: 79102 - DNA, 1074 bp, Homo sapiens
agactttggaagtgtcatttattcagtggtgcacttacagtcagccctctctatccgcagtccatttcacttgtctttgggatatctttgcttgagaaacaaaatgtgaacaagcagtcacccttttaggaatctaggatttcttagggagatttattaagtcaatatttgtcagtatctgctgaatccttaaaatgaaggtctttagaaatttgcacatagcagtgaaagtgaacagatggtgagttcaggaaggaaaaagaagagtcaagcagtaaagacagatggacaccaacaaatatgaattgaatagcccatttgttccctctttagctgttgcacttgaaacctctgatttctgatcccaccaaaagtctagtgaaaaatgctcctcgatgtctcgctggcatttttctcaagccccatcctttttgacctctgggtagcattttctgttgtgacctcctacaccctcttgagcctctttcttgctttgtgacagtctgctgattctcagattactgctctgatgattccttctttgatggcgtcatcagggtctttttcttatcctaaatgcaagtattccctaaggttctgccctttacccttctctttcctcctcctttgctatctcccttgatgatctcatccactttcatggcatcagctcatttgtatgcataatagtctcacatctatagcttcagcaatccagacctctcctcagggcttcagtcgcacatttccaacagcctgtcaggtggcttcactaacacttcattgtgtccagaaccacacatcatctgtccgaccttcttctatttctctcctgggcacctgttcttgaatgacatcagcattctccaagtcacctttgactcttccctcttagtgatccccacaacagttagttgcctggacctgttgatttatatcctaaacatctgttggctctgtctctcaattcccattgctacaaacttcactactaccgtattaatttctccagagagcagttcttatcgtcttcagttctctacttaaaacttttaaggatgtaaagtattagga

SEQ ID NO: 79103 - DNA, 1357 bp, Homo sapiens
tacaacagttattattattatctcttattatccaaggccactctatttataaaattgtagtagctagactcgaacccaagtcttcattttttttttgttttgtttttgagatggagtctcactattttgcccaggttggagtgcagtggtgtaatctcggctcactgcagcctccacctcccgggttcaagcaattctcctgccttggcctcccaagtagctgggactacatgtgcatgccaacatgcctggctaattttttgtatttttagtagagacagggtttcgcatgttggccaggctggtcttgaactgctaacctcaggtgatccacctgcctcggcctcccaaagtgctgggattacagttgtgaaccactgcgcccaacctccaagtcttcatttgccagaaatggtagtttccacaatgccattgctgcatccctatggcctgtttcagggtataatgaagaaatacattattcgtatatataaatattaactaccttataaggactctgatggtttcttagtaaaacacttcagtggtataattcccactagattgctcagttctcttggtcaaatattatgggtagttttggtaggttttttcttttctgaccagatctgccacattttgtcagcattctgggtttgcagatgttgctgtttaattagattgctctgtagaggatgagagaaccaggaggttcatttgcataactgataagtggctgggttttgaagcaagagataatgcttctttgggtcctatgaactggtgggaaggcaaggtgttagtctttttctgttggagattatctgtaaaccgggaacttctccacatctaggcactccctgtatctgaatattgtattctgaaccttactctgtactctagcaagatgataaatgtaatgcagatataaatcaacctttcatttacttaaaataataattctgcagtaaaggaaaaaacgacagctactctgatccttgaatactgggcaaaggcaagccatctatctgtaagtgcatagtccttcagtatgacgtaacctttctcatttaatgaacattttcccctagtaactctttgtgctggcaaaccatgaaagaaagcatgtggacttggcagcccaaccctgaagtttttgtctcaaaaattattgcaatttctgtactaagggtccaaaggacatttgtttggacacagacttttctgaaattaaaaagaatgaccttatttcacttagtgaaatgagttgtactcttaaatagagtccattttgaatagtttttcttagagcaacactgtcaaaaaagaagatatattttatattcttctcattatt

SEQ ID NO: 79104 - DNA, 1050 bp, Homo sapiens
tcccagctactcaggaggctgagacacgagaatcacttgaacccaggaggcagatgttgcagagagctgagatggtgccactgcactctagcctgggtgacagagtgagactctgccccaccctgccccaccaaaaaaaggaattaaggagggtggaaggaaattaggctgaccataattgccagagcctgtataagtaaagtgaatgagaaaaggtgtgattttcctggatcaggtttcagaacttatcctgtttaacaaagaaaatcatatgttgctgattcccagaaaggcggtaagtgagcagccaccaagcctggctctcaagagtggtaggctcctcacctgtcattcagtgggcatccatatctgttggctttctgtatactattcatatttaatactccctattttcttaacactcccagctctaattcttccacagatcctactgtaccaaattttattccaaagtcaacagcatttcacatttatacttagaatactaattaaattatgagttaccatttaatgcatagagtaccctaataacctgaaaaatgaagacttgcttctgatgttgacttactcagttgttcctatactttggcagactgcatagatgtataagatattagatataatacatataattacatatatttgtgtgtgtgtatatatatgtgtgtgtgtacattctcccatgcatctcttttgtttgctagaatatccttcttatcaatatctaacttcctttaatgtccatttaaatggcatttcctctatgaagcctccattcactctctcttaacccctagctagacgttacctcttcccatgtctacattccaatagcatttaattatttttttcatagggagttttaatgatattttgttctatattatagttatttgtatatatttgtatcccccctaataatggtgatggtggtagcagctaccatatgttgagaactttctgttggccagccactggattaaactctattcctcacaataccactgtgagttaagtattactacccca

SEQ ID NO: 79105 - DNA, 1514 bp, Homo sapiens
agaggttgcagtgagctgagatggcaccactgcactccagcccgggcaacagagcgagactctgtctcggaaaaaaaaaaaaaaacaaaaaaaaaaactagaaaagaaagtcagcacaggtttccaccagccctctttattccttctgccgtgaaagtggcatgaccaaaatcagggctgttgcttctgcaagggtcgcagaataagagtcatgtaacagaaaccaagctgcccctgacctgaatccaaactgcactgtagtgagaaaattttgtccttataaacatgaagatttggggttgttactgcagcaaagctgacttaattctttccaaatattccatgttacataacaagaggaactaaatatggaaaatattctaacctctagtttttttgggttttttttgtttttgttgttgttgtgtttgttttttgctctggagaaagaagtgaccatcgttatggaaataaatgctatgcatacagcatatccaggtgaaaattagtaattaaaggatagaaagtcttattttaagattgtgacattgttatagggacgtaatatagagaagaaggtactaaccctattcagtggtgggttaattctgggttgtgatcccagggtcattgtccacagtttgtgaacaaccatgggatcctttctgtctttatttgtgtggatgcaagcgatatagctcagattccaacaaacaccacagattcttcttgctattttttattgcattgtattttaggaatttgtaaacatgtaagatttatttagtggtgaatacacctgtttatttacttacgccagaggcaagcaaaagaactggtagacaatgaagaaagaactgttgatcccacagtgatcattttagctaatctgtgcacacatggtaatcaccatgagcagaataaattttggaaaaagaaaaatatagtagctttttcctttagaaatgcttaggattcctctggatttgagtggttggaatttccctgctgatatatttctggtttgtatatagaactgcccaccattttctgtttgagaaaaatcatttcatcatgctcaaaccttgggtttgctaagaaaaaataatagtcctaacttcggatactttattgtgatagacagggcttgcaactgaatctgataacagattcgtagttcagttctcttgagtaaataaataataagctgtgaagaaaagcaacaatgtagggccaaatcacttttaaagtaattgttcatgtgctataaatgtggaaagggaaaaaaactagatagaacatgagaaatacagtaatagttaatctagtgtattttaatacagtcaaatgctattttaaatcgtagaataggtatgacagaagagggtaatgagtggaactttttgcttaagacaaaacatactgaatgaaatttgtttctatcaagaaagagagaggccagatgtgggggttcatgcctgcaatcccagcactttgggaggccaaggcgggtg

SEQ ID NO: 79106 - DNA, 1058 bp, Homo sapiens
gtgaaccaaatgtaagttaaatatggtggcaggagccattccataaaggttacaaacttgttttaggagtgaagtggggacttttttggcttggtgccaaaatggaactggcattgttttttcaattcagcctgcctggtatttctatcatagctttgctagttgatcagtttcctctcactatggcctcttattcattccttcatttggcaaatatttgttgaatacctacttatgtcaggcactgttaaagcagtggatgtagtggtaaataaaatagaaatggtttagtctatttctttgagccttcctcagagaaaatgtcacttctttgtcaatgtctttacagcctttatcctgagaccaggagagaaaaattacctaaatatccagtctagtttaaagcttaaactgatccagtaattcagacagtcccttggggtagtgtcataaatgatggccataggtgtctcctggtctcaggggcaaggtccctcatccactttagtgctgcttgttctgctgtcatttagggctgaaatatgtggctgtaggctgcttgctcagaacccagtagcactctggctacctgggcctccccctgacttctggttgcacccccctgagcctctggtgtgtctgccatccagttcatcctcttataatctctcagtatctgtgccttatgggaactatgggggctcaggaaacctgaacctcagacacttctctaccagacctgctacaacgctgagtcactgtttctgtgcaccatgttgtggtggaggctgcctgagagttgatcttctctagactcccaaacatgaagaaggagtgggcacttggcctttgattttatcctcacttatttaacaaactgatttatctccaggctgaggaaatcagtgttgctttgctgcacttccatctcgcatagtctggaagtctggaaggactttttcctacattatatccttctcttgccatagacctagcatggcagttatagttggatggaatatctcctctacactcccttttgtatgggcatgttggtt

SEQ ID NO: 79107 - DNA, 1046 bp, Homo sapiens
agttttgggttttacagttaagtctttatccatcttgagttgatttttgtatataatgtaaggaaggggtccagtttctatcttctgcatatggatagacagttttcccaccaccatttattgaatagggagtctttttccccgttgcttgtttttgtcagctttgttgaagatcagatggtcatagatgtgcagccttattcctgggctctctattctgttccattggtctatgtgcctgttttagtaccagtactatgctgttttgggtactgtagacttgcaggaattattttctaccctgcttgaattttaaaatagctctcaagggacctgatccataaagatttgcatctataatctatagagttggagcagaataatcatttgataaaaatgaaagatgtccccatttttagtttctctaacgttcaagtaatcttaaagttaaggcagatgtaaggataagatgattggggaatatcatgaaaatagccaccaaatactggactacgtgaaataggaccaaaaggggttaacattgccatggactgaacatgtttgtaccctgcaaaattcatatgttgaaacctaatccccagtgtgatggtattagaagatggggccttcgggaggtggttaggtcatgaggatagagtactcatgattgggattaatgaccttataaggggttgaagataccagatttctccccttccaccatgtaaggacatattaagaaggcaccatctatgaaccaagaagagggcccttaccagacaccatgaatggctggcaccttaatcttagattctcagcctccagaactatgagaaataaatttctgttgtttataagccacccaggttatggtattttgttacagaagcccaaatggactaagacaaacattaattttgtttttatattttcatagagaaatgatgggataactgtaatatccagttgtgtgtggcttttttttctcccctgtggaagaggggccctgggcagaactttatattcttgcacttttcaaggacttc

SEQ ID NO: 79108 - DNA, 1028 bp, Homo sapiens
caagggcccagctgccggtgcctatactctctaaacaacttctctcctctattttcaaagacagagtcagaaatagtaattagaagggacccaggagggttttttttttttaatttgaagataagagaatgttgagcaggtgcgtgagggtgaagagggactaattgaaggaacttagttctggaagagattgaaaaaagaaaaaacttgagagaagttcaaccttggtcaggagaaatgtgcccttatcctctgacactagcttaagggttgttatgtctgaaacaaaccacagagtttggagtaggcatttctggtcttgttttgatcctgttgacaagtgccctctcagtacatattatgggcaatgctgcgttaggatttgttcctttaatttttgtgacatatgacgcagtttctctggccagaggcttctcttaggtcagcatacatttctcacttagttcatccaagcagtgccttcagagagagtttactacgaggaagatctgtcaggagcacatgtataacattttttagtcattctagttagttggcttcaggacaaaataaaaacctcccagctgatgaatacaaagtacctgatgtcaccttcttaaatgcctcaaagtagcatggggctactcaagttttatgatatataaacataaaatataaaacatagatttttaaaaaatgggatcaacactgctcaggtggcagttggtccaaagaaaaaatagtcaggtaccaacctctaataagaaacatttgcataatggcacatccctgacagatccaaaagggtctccaaattttattacttctgttttaccctagcaacattaataagtacatcataacaggcattttttggccaagaaaaatcaaatactctttgggaggtaaaacggattttgatgccttcaaatgaatgctggaggaatttggcaaaagacattctagcaaatgccaaaatagcagtcatccaggatactgtgtgtttgactcacagccagtcaggcaca

SEQ ID NO: 79109 - DNA, 1202 bp, Homo sapiens
gtattgtggtgtttccaagaatttgcaaacactaaaatgtaaaaaggttaggaactgcttagaaaaattatagtgaccattgctattcttggaaaagtaattacaccaacattgtattttaattccagagccaaaaaaatgtgtgtcagagtcagctagcaaacaccaggaaagcggctgtgaaggaagattgaaatttaaattcatattagcctcttgagccagtatttttgtgcatggcccattgtacttttctatttgccttgagttggcactggacattgaataaaccttgaagacataaatgaaaatgtgtatgggtatggaaatgtgtaaggatatggaagtgtccttggtgcaataaagcgcataatgcattttctgtcatttgtcatcaaaattattttttcactatgtgtggcttgtctacttccattcttgctgtgaggtattagcacatttgtagctatttattaattcccctttttattttctcttgagttctgtcctacttgttccttattcagggttaaatttaaaatgttcacatctttttctttggggaatatttaagaaaggaagactacgacatcactccatcttcttcaatgaaaggagaacttcattcattcattcaggaattatttgctgagtatgtactctgtccagggtattatgctaggtgttgggtgtttctaaattaatcaaggagatgactgcagagctgatttctaaggtactgtttaaagtaacatttcagtgctgtgcataatgatagcagcaaagagactatacaactgtaggtcagaagaaacagaataattccactgaactatctgtgacagagtgacaaatgacaacagatcttgttcaagccctgatcatgagctgaaggaataactgcatttcctattagtcagatagtgctttgacctgatattaaagtcagctgttctcatatttaggatacaacagcattgtattcacttatcaaagagaatgggtgacaaatactacatttctcctttctgctcttctccttctgccccttccttacactctgaatgccctttctaaccactcctatcattttgtttctcctccttctatattagtgtactgtctattgaagaatagtctttattactagttttattgtcaactgatatttcttaataaatcatctgatcttccatgttgaa

SEQ ID NO: 79110 - DNA, 1025 bp, Homo sapiens
aacgacagtgagataccacctcatacccattaggatggctataattaaatggatagacaagccttgcttgtgaggatgtggagaaactagaaccctcctatactgctggtaggaatagaaaatggtatagccactttggaaaacagtttggcagttcctcaataagttaaactctatgtttatagagttaccatgtgacccagcaataccactcctaagatgacaaccgagagaattgaaaatagatgtccacacaaaaatttgttaatgaatgttcatagcagcatttttcataatagcttaagagtggaaacaacccaaatgtctatacactgagaaaaggataaacaaaatgtggtatatccatgtaatagaatatgattttgcaataaaaagaaagtactgatacatactacaacatagatgaagcttgaaaaagttatggtaaaacccaaagggccacaagtcgtatgattccctttttataaaatgtccagaataggcaaaccattagagacaaaaaatagattagtagttgccaggcgttggtagggattaggaaatgtgttggcaggaatgagaattagctaatggatacagggtttcttttaggagggacaaaaatattctaaaattagattgttgtaaacatatcaaaaatcactgaattgtgccctttaaatggtgaattttatgataggtaaagtatatctcaataaatccatttttgaaaaagaattgtttgtcatagatgtttgtattataaaatttattgatctttatggtagggaaagggtcaccccaccaacacataacatttaaaactttccacaggcctaggaacattaagctaaaggacaaatcagacagcaggccagagggcacccgtgtctggcctagtaattggtcagaggaagtttaaacagttttttctttttccctctcccctcctttcccctcctctcccctcccctcttttttgagacagtcttgctctgtcgcccaggctggagtgcagtggcacg

SEQ ID NO: 79111 - DNA, 1026 bp, Homo sapiens
acaacactgtttgtcatgttattagtagctgttaatcctttactataactgccagagattttgtgttttaaaagacataagtgatcatatatacattacataaagcagttgaacatgagaaggcacacaaccatagatatattccataggagtgttttttataaaatgcacaatttcaatgctttaaaggttgggtgcttacagtttgctatttgctttcacacatgtgatgacgtttaatcctgactataattctatgaaatggaaattattaatctcattttgtgaataacttgtcttgctcagtgcctcttcttttcatattctgaattctttcctaaactatcttatctgtgcttacagcttcagttaccatctataaaattagtaactatatcaaatttatatttctcaccctgagcttcagtttttttatatctaattatcttgttagcctttccatttggatatctcagaatgaactgcgctcgtggacttccctatcaaacctggtcctcttacagtgttttctttattaatgaatgacatcatccatcgtccatctgattgtgcaaaactagaaacctaggtcttgccttaagccatccttattcttgtttcatatccagtatgtcacagagtcttctcaattttgcttcctacataactcaaatctgtctgcttttctccatctccactgccaccgctcccatccaagctctctagcatcatctttttctgctattccagtaaaaatactagtatttgggcttttcacccactcatattcattctccacacagcaaccagaacgatccttgcaaaacactaatttcaagatgtcactacccatcccaccctccttaaaactctaatgaactttacttcaagaacttcccattgctcttaaaataaagactaaatctttaccatgactggcaaggactactgtggttgctttccttccatgttcatcttttgccagtatccccctaactctctgagctttttaatgtaccacattct

SEQ ID NO: 79112 - DNA, 1087 bp, Homo sapiens
ttcatgacttccaaaagaaacctcatgccccttagcagtcactccacagttccccagcttccggtctgaggcaaaccacaaatctactttctgtctctatagatttgccaatgctggacatttcatataaacataattatacctaccatgtgtggtcttttgtgactggcttccttcacttgatactgcttgatatttgtttttttgaaatattcttgtatttataacttctcctcagaacagatgtggtcttgtaattctcataagtccttctgtggcctggttttattggatttgtgagatttggttaagttgcagaatatactgttacacgtcaaataacattggctgctgatgataatgaaaatggccctgtttcagagctaagattaggttatagatgtatttcataaagctgatccaaactatggatgtggtcaaatgaattgggatatataggactccatggttttcacactgacccattttctaatgggttatttgaggctttgaggtttttaattcctaaggatcataaagcgctggaactggaagggacccagcagtcatgaagcttagtccctcttctctaactcctatcccattttacagaattcagaatgttcattgttcaagatcaaatagttaattaataacagaaccaattatagcaaaattagaactaatgtgtgtcgattcctaatccaaggttctttacttccttttggattttgttgctgttgtatcctgggttctctagaaacaagagcctgactggaaattaagtgaagctttatttggtggtacaatttcagaagagtaagagtgaaggaaaagagatgagaagtgagaagctttgagaagcaaagcaaggcgattagattaccatgttagcaattgtgtcatgatgatcctcaaagagacacagctggttattcagcaagtacatatgcttgaccatgtgcaatatctccagataggatagatagaacagttcagccaggcgtggtggctcacgccagtaatcccagcactttgggaggctgaggcaggtggatcacttgaggtcaggagttcaagaccagcc

SEQ ID NO: 79113 - DNA, 1053 bp, Homo sapiens
atgtaattaagtggcttctcaccttttctttttttaggcagtcgtcatagaattatcatttctgccctcttgttccattatggaatgaaatttctgttgtcctaggtcatcagtgcctaagccatttggggactaaaaaaataagtgtgctgtatagttgaggattttattatttctgccccaaatattttgactttaattttgaagggaatatttctaagatgtacctttttaaacagagaatgtttatcttactttaatctattgttgattcaaggtcatgtttaggaatgtcagtgttctgtgttgtagatatatatggtgcagggcatgaagctgaatgatttaatttgtcactgtagagctcagcactgtcacagccccttctcccctgggcccttgaactgccttggttttcacgcttctgggtatccacctagtgtggatactaaggagcatgtccttaggcactctttgcatgctgtcttccctcgctgccttcaagggctgcttatgagctggtaactctttgttggattaggctgtagaatgagtttcttttctccctcttttgtaactggctttcttatgtgccagtgtctgctacttgcaaccttgctgcctactctgtcatcatttccaacctctgcttctgcttctaatctctgttctatctgacagctctctccacttaccttcttgtcttctcctttgtgtcgtacacattgtcagcagattggaagaaggcttttcctacaaatagccagtgcagctctttagcacttttggctatttttgttgccaggtgttcagggacttgatctgaaacttaaatactattttttaaaggtgtttctgaatttgaaaccagggatttgtccagaaacctgtctctatataaatgaagttttactttaccttataaaatatagtgaccctagctgggtgcagtggctcacacctgtaatcccagcactttgggaggctgaggcaggtggatcacgaggtcaggagatagagaccattctggctaacacggtgaaaccccgtctc

SEQ ID NO: 79114 - DNA, 1948 bp, Homo sapiens
gggattggttccaggacccattgaggataccaaaatcccttatataaatggtatagtatttgcatgtaacctatgtacattctcccatatacttttttttttttttttttgagacagagtctcactctgttgcccaggctggggtacagtggtgcaatcttagctcactgcagcctctgcctcccaggttcaagcagttctctgcctcagcttcccgagtagctgggattataggcacccaccaccatgcctggctaatttttgtatttttagtagagacggggtttcaccatgttggccaggctggtttcgaactcttggtctcaagtgatccgcctgccttggtctcctaaagtgctgggattacaggcatgagccacagcgcccagcctgtagctactaacttttgaagtaatactgatacttcttcagaaagaccgtgtcttctagttttaatattggaagtaacatctctgtggtccccatggtggatacagtattttgtgtggtatacatattcataatcaacttacttgagaaggaaatttgggacttaaatttttataaacatgaactttttaaagtttattgctgccaaaaatgtttattgcaaagtaaaaaggcatcaccacacaagaaaataaagtctttatttacatcaggaaaataaatgacaaaatcactgtgaaagagtatacagactactatctaaatatgttgcagcaaggctgttcagattgtatttcctgcacttgtatctaacctacaatttctcacatttcccactgacctcactatctggaagcctagcagctttgtgcatctcacaaaagacatggtcaggaagaatgaactgtccctagccactcatgtacctgtacacttcatttgttcagcaagcatgtgcatgccatctttgaaagagaagtattacgtccggtatcagaaaatggtgggggaaagtgattgctggccgtatttcagatttaacaccatatgggaaatgttaatgcatctcgccattagaaaagaccatgacaaaggctggaaatttaaagcaaagatcctgcaacattcataaccacccaccccagcttattttaatgcaacgagtaataatagtttttgaaaagttaacattctgattcaaatgtcaaatgtcaaactttatggacttccctgacagcagcaggtaaattggactggcataacaaactgggatgagtagttacacatttatggcctatatcagaagctctaaacaattcaaagcataaagggtaatgataatagtccagccaaagggccagactaatagtgagagaccactggccgccctttattgctaaaaagcagtaatcttggtgaagcttgggagaaccctacacttttctttaggactgaggctgtgagagcatccatggacattacagtttgtctactttaagcccagactgaaaccataatctctcccaaatgcattgagacttgtccctgaaatctgcccctagattttgactgtgaaggagtcagagttaagtaactatgatattgagaaaagctggaatgtctaggttgtgggaagtgagagaaaagagaatataatgataaaattgcatctgtaaatcacataagagtagggagtcaggaaggacataggatttccccattgatgtatctttgtgtcaagagctgaaaaatgtaggagggtactgccttactcttctgagctaatcaaaagcagcagcaagtacacagtgaaataagatttagttgttaagtggcagagaagagtgttacagtttgaaagtttatgttgtatactagacattatgtctaagtactgtggaggatagagagacaaataagaaacagtttcctcctgttcactgagcctatatatttttaagggatataaaatgtttgcacacaggggcctgtctcagtt

SEQ ID NO: 79115 - DNA, 1050 bp, Homo sapiens
aacatgttctctcaactctgatagatctgaacaactcatttttccgtgaacacccccttgccactagtttcctgcgtaatgccttttccccagaatgcctgtcttccttcagttcttcctatggaaattctgtgtaaaatttaaatgccttgaagtctctgttgatcatctcttccccttccaccagagggcgctctccaatctttgaatccctatcacatcgtaaacgactgtgtggcccttactatttgacctcgtattatagcttttgaaagtagattgtgaattctgtgaaggcagagacttacctatctgtggacctctccagcagccacccagagctagtagagctagtaggtatttcttgaattgatttattgaattgagtatttcttgaattattttgatttaaattgaaaacaagaacctggacacctacatctgtggagaaaaatcttgaaaagataaagcagaaaacatggggtagacagtgggaggtgaaactgagaaggtaatttatgctttagctttacagcaaatcagagcacctggagttgaaaacctcatttttctgaatgtcagttttgtttttgaaaaacaatcagtgcatagcatatttactctttaatctcaaaacattaagagtaaaaaaaaagtggaactggttgagtaaaatgatataaagtcaccttatctgacaaactgtatcatctgttttgaatgaaggccctagaattgttgtgaaggatgtcatgttcatctcccaattatggagataaaaagtaatgagtgcaggaactttgtaaactctaaagcactgcatataagttgacctttaaagttaaaaatatttcttacaaaatgtaggtcagtttatatgcttattgactactgttagctggttggtaggtggtagcagtctctcagctggctctttaaggatgggtgggtcatgaaatcaatatcatgaccaaaatcaatatattctcaaggataaacccagtcccaaacttttatattaaactgtctaagtcaacctgtgtactagat

SEQ ID NO: 79116 - DNA, 1057 bp, Homo sapiens
tcatataaacggaattctgcactaagtggccttttgtgtctggcttttttcatttagcataatgttttaaagattcatccatactgcagcatgtattaatgttagtacttcatttttatggcaaataatattcaattatatggatatcccacattttctttactcattcatcaagtgatagacatttaagttgcttccactttttggctatcatgtataatgctgctatgaacatttgtgcgcaagtttgtgtggctatatgttttcatttctcttgggtatataggaatgaaattaattgctgggttatatggtaactctatatttaactgtttgagaaactgccaaactgtttcccaaaatggctgaaccattttatattaccaccagcaatatgtgagagttccagtttctttgcactcttagcaacacttgttattttttattatgtccatttgtgttttttactatgaccatcctggtaggtaaggaatagttcactgtgtttttgatttgcatttctttaatgataaatgatgttgagcatctttacatgtgcttattggccatttgtatttacttgaagaaatatctgtttcaatctttgcctatttttaaattgcattatttggtttttcattgctgagttttaagagttctttgtatattctgggtgccagatgattatcagatatcaaatttgcaaatattttctctcattctgtgggttgtgttttcacttttttggtagtgtctgctatggtctgaatgttgatatttccctcaaatttatatattggaaataatccccaatgctgtagtattaagagttggggcctttaggcgtgattaggtcatgagggctccaccatcatgaatgggattagtatgcctataaaagaggctcaaggggcttgtctctgccctccaccctctgaggatgcagcaacacggcatgatccatgaggaacaggccctcaccagacaccaaatctgctggtgccttgatcttggacttctagcttccagaactgtaagcaataaattatactgttta

SEQ ID NO: 79117 - DNA, 1073 bp, Homo sapiens
gagataattgtagatttacatgcagttgtaagaaataatacaaagaggagagcctatgtatcttttacccagtttttccctatggtaacatcttgcaaaactgcagcacaatatcatagtcaagatactgacaatgatgcttgcagtcaggatgtagaacatttccgtcaccatgatgatccctcctattgccttttatagacacctctcaccctctcatccttgacacttggcaactactaatcctttccccatttctataatttagtcatctcaagaatgtcatataaattgaatcataccatttataaccttttgggatttttttcactccacataatttcctgaagattaatgtaggttgttgagtgtatcaacagttttttttttattgctgagtagtattccatggtataacagtttgtttaacctttacctgttgaagtacatctggattgcttccagttttcagctattatgaataaagctgttatgaacatttgtgtaaaggtttttgtgtgagcataggttttcatttctttgggataaatgcctaggaatgtaatgctaggttatgtggtagtttcatgtttagatttgtaagaaactgccaaactgtttcccagagtggctgtaccattttacattcccactgacaatgtgtgaataattcagtttctttgcatccttgccagcatttggtgttgtcactattttttattttagccatcctgataggtgtgtagtgatatttcatggttttaagttgcctttccttaatgctaatgttattgaacatcttttcatgtacttatttgccatcagtatatcctctttggtgaaatgtctttgtatgtcttttgcctattttctaattggattgtttgtgtttttattattggattttgaaagagcctgggctttatagatatcaatttcagcaatgtgctattcattccttgactctgccttcctgccttcccaataccttattcacagtaaccctcacatctgacttctatgatgtgttgtagcctgagaaaatcatgattccattctgaatagatctggaa

SEQ ID NO: 79118 - DNA, 1080 bp, Homo sapiens
aggtacctcatcccctttattgaactgtggccatggacttctcaatgatatccctgtaaccctaagacctagtgaaaaacctggtacaggaaaaagtatacagtaaatattagatgaagaataggcaggagaatcacttgaacccggggggtgaggtgcggaggttgcagtgagccaagatggtgccactgcactccagcctgggcgacagagcaaaactctgtctcaagaaaaaaaaaacaaaaaaaaaattcagctctgtgatttccattttttctcctgccaaagatcatgttaattatttctgtttctcatggcctccatattttgaaatatttattattctctattgattaaataataattcatttgtttcctaattttactgaccaaagccaaccaggacttctggtcaatatgagaaaattacagttggttagctgcagctcagaaaaaagaaaaaaaagatatttgtgtaacaaataagctttttgaaataaaaataacttccaggcccaattattactttgggggggcttctatgattctgaacacgcagactaaaaatcaataatattgtctaaactactcattttatagataaacatggtaatgcttcaggagttaggtagaaatgacttacctgcaaagccaaactaattgattcccagttcagagtctatttaggatggatatataggatagggcttggagagggtattctagaatgaggccttaagttcttggctcctttttaagaatacatggtgttggattactgttaacataaatttggacagaatttatggatagaatcccatttaacaaatactgtattatatctagttatatataatgtcattacatatccccatgatctaactcacagttcataccaatgttttattgtcgtaagctgcaaaattctattagattttaaaaatttcatatgaataggtgtcatagaggacttgtttttgtctgggaaggatgtgggaaccccctccttatggccccaggagagggaatggcttgagagtgcatgttattaacttgagatcaggactaggcatccattag

SEQ ID NO: 79119 - DNA, 1050 bp, Homo sapiens
tctttttgtaatctcttacagttttggtttagttttttgacaatgcagttgaatatattctccatgtgtttaagaacattttaaataagtgcccatttctttgtaatgatttttctcagaaacaaacaaatcctcaagctactctagtaatattcctactccagagtagtacaccatagctcttgagaagaaaaggaaaaataatagtttctgtgtgttttaagtggaaagtagtttctttgatttacatgaacattaaggcatgataggtaatgacaatttattcctaaaatgtattcagttacccattgacatggatatgtcataacctgttatgcttgacttatagatttccccagggaaaatgttccaagagagtgagcaaaagaaatgttttctggggaaagtatcaaggcgagagtgttgttatttcagacatcacaacatttccctatagcagtctatatccaagaataaatctgtgctagccaagcagatgaatctggcatttctgagaatacatgtgatggttgaattgagatttttggtaacaactgtgggtcactctaagatacccatttctggacatctcagactgagagatgactataagaggtatcattttaagtctggagaccagaaagcctctatacttgttcatagagctttttttttttcttttcttttttattattataatttaagttttagggtacatgtgcacattgtgcaggttagttacatatgtatacatgtgccatgctggtgcactgcacccactaactcatcatctagcattaggtatatctcccaatgctatccctcccccctccccccaccccacaacagtccccagagtgtgatgttccccttcctgtgtccatgtgatctcatagttcaattcccacctatgagtgagaatatgcagtatatggttttttgttcttgcgatagtttactgagaatgatgatttccaatttcatccatgtccctacaaaggacatgaactcatcattttttatggctgcatagtattccatggtgtatat

SEQ ID NO: 79120 - DNA, 1029 bp, Homo sapiens
gtacgtaggggaacatttcctggtagccatattagatttccataggtaaatctcttggtgctcagatcacagtcatttgtgtgtaatgatatctggatgtggtttataccacacccccagattgcttccccagattgtatatcaaagtcacgatcttttggcagaattataattgcccatggggaatggtggcctctgagtttcatagctcagggatgtattgttggagctgctgtcagtttttcactagagatataacaattgaagtgtcttacatttctatagttctttttaaaaaacaaatttgagatacaacacataccatttaaagtgtacaatttaaatttaaagtgtacaattcaatggaataaaagctaaaggattattagcctggagaagagagaaaacttataagaatgtgacagcttcctccagtattagaaggtctatcatgtggataatatacaaaaaaggtttaagtctgtgctgtgttgccccagagggaagaaccaggaagttgcaaggagatagatttatatcaacatttatatctgaattcatatcagaagaatttctaacagttggcattagttgaaaataaagtgggctgcctcgggagttcataaaactctccaacaataatagtatccaaacaggagcaagatgactggtagtggggaattctgtaatggtgattcaggcatcccatgggttgtattaggtgatttctgcggtctctttctaccatgagagattgattctttgaaggctagagaaaacaaagggagaagaagtttacagcttgcaaaacagggggtatgtataatgtaaagataggtgtgttatcatcttcttgaaatttggtagtcaaaacataaaatttgagattagccgcctcattatataggtgggacattcagatacagaggttattaaacattgcccaaggtcaaatagccagtcagtggcagagttggaactagattccctattgttttaagacaaataatggaattattcattttaata

SEQ ID NO: 79121 - DNA, 1013 bp, Homo sapiens
caatgtaaccatttttagtgtatcattcagtggcattaagtacatttacagtgttatgtaacctcatcactcactagttccagaatactttcatcaccccaaaaggaaacccacttagcagtcactcctatttctctcctacctgcagcccctggcaaccactaatctgctttctgtctctgtagatttgcctattctggatactttacataaatagaattatctaatatgtggcctttggcatctttcacttaacatactacattttcaaggttcatccatgttgtatcaagtattaatactttattcctttttacaactgaataatatttcattgcatgaatataccacattttgtttatccattcatctgttgatggatgtttgggttgtttccatcttttgggtgttatgaatagagctgctataaacattcatatgtaagtatttgaacacctgcttttaattcctttgagtgtattcctagaagtggaattgctatgtcatatggtagttctatgtttagtttattgaggaaactctaatatcccttgtataattttatagatattgtataacacatatggatattattgcttgtatcattattaaacacctctgtttctctcattcctgcagtcttcaggccctcttggttctaccttttaaaattatctcctgaatatgacaggagataataaaaaagcttccatttccattcaaaccatcagactcttagtatattttacctaaccagttgctaagtgatttgggcaaattatttaatgtcttcaagtctccatttcattattgataagatagaggataatgtatatatggggttgtcataattgagataatacatataaagctcttagccttctgattgcataatagggctcaataaatgtttgtgattattaataatcttttaacttgtctctcttcctcaggtttggttacctcaaaattcattagccatactgctggtagagtaatttttctaaaatgca

SEQ ID NO: 79122 - DNA, 1071 bp, Homo sapiens
caccccaaaaatgcaagtattatgatatataatggtgaagacttttattattttttttttcagtggggctgggttgtattgctccattaagatattaggggccgggcgtggtggatcacgcctgtaatcccagcactttgggaggccgagacaggcggatcacaacattaggagatcgagaccatcctggctaacatggtgaaaccccgtctctactaaaaatacaaaaaattagccgggcatggtggagggcacctgtagtcccagctactctggaggctgaggcaggagaatggcgtgaacccgggagatggagcttgcagtgagctgagacggcgccactgcactccagcctgggcgacagagcgagactccgtctcaaaaaaaaaaaaaaaagatagcatggttgcagtgttttgtcaaccaagtattgtctctcatccatgcttttgcataatctaatggatgtagtcatttctacccttcttcacctgactagcctcattcaagttcaagtttcagattaaataactcttcaggagaagtgctcatcagccagtcttccttgttgcttcatgcccttccctttccctacccctgataagatcaagttgttttttttttgtcctgaaggaaggaatggaagagagtttagaaaatatgtacattcctaaaaatactccctatctaatgtatacaagtttctgtgctaatttttataagtaataaaaagggagtaatggctgggtgcggtggctcacgcccataataccagcgctttgggaggttgaggtgggtggatcacgaggttaagagatcgagaccatcctgaccaacatggtgaaaccccgtctctactaaaaatacaaaaattagctgggtgtggtggtgcgcgcctatagtcctagctactcgggaagctgaggcaggagaatcacttgaacccgggaggcagaggttgtggtgagccgagattgtgccactgcactccagcctggcgacagagtgagactccatctcaaaaaaaaaaaaaaaaaaaaaaaggcagaggatagaacaaatatacaatta

SEQ ID NO: 79123 - DNA, 1034 bp, Homo sapiens
agctaattttgtatttttaggagagatggggtttctccatgttggtcaagctggtctcaatctcccgacctcaagtgatccacccacctcagcctcccaaagtattgggattataggcgtgagccgccgcacccggccagtttactcttatgtagtaagagtaggtcagccttcctggagtctgttaaggatggaagtgggctttcaaggccaggccatatccagtcaggcatgcctttgagtgcagcatacagttggaaggactagggcaagaatggggagaaggtataggagcagttcctttatcttagtgggtttccagttggccatgccaggagggaataaagtaactgaactctggaaaagctacagaatcctgctgcagggggtacatttgaggagaagccagaacattaaatgaaggtaagaaaatgcaagaaagaagaagcagcacaggtgaatcagagctccttcagcaacatctgacaggggctctcttttgggcatgaagctcagggttcatttttaaagtcatgctaaacagaaactgtgaattcaagccaggcgtgttggctcacacctgtaatcccattactttgggaggccaaggtgggaggattgctgtaacccaggagtttgagaccaccctgggtaacatagtgagactctaactctacaaaaaatttttaaaaattagccaagtgtcgtggtgcatgtctgtggtcccagctactcgggaaactgaggcaggaggctctcttgagcccaggagattgagggtgcagtgaaccacagttgtaccactgcactgcagcctgggcaacagagcaagaccctgactcaaaaaaaaaaaaaagaaagaaattgtgaatcccctggaggtgcttgttagatgaatggagtccaagtcctgtctcatagagattctgatcaggtctcagatggactcgtggaatctgtatgttttcaaatgctctagatgagtcttatgcttgggtaattttgagaaatactctgctgctagattatattaa

SEQ ID NO: 79124 - DNA, 1038 bp, Homo sapiens
ttttctacaaagcttgctgttcctacaggtgagggtagctgtttttttctccccttaggtttactttactctcactcatcaactctggcaaagtggatttaaccatcagatgtattctttatttcagagaacaaagtggttttgttggacttcttgttctctcactagcttttgtgaaggaaaaaaatcctgcatgttccatactaaaatgatagcattataattttgcatcattacattatttaactgttatcagtaaatctatgaataaactcttcgagacatccattctctacttgtgtttgttgattcattatcatgctttttgtactttccaaagcagaccccacattttttgtatgaagcatcaataagggtgagatatggcaagggtcactcaccatcatccctgcttatcactgtctcctttcttgctcctgacatttttcagtgagtagtacccctgtgtgacagctggaatacagagtggtgactgcacattgaccttaagaacacatttgtggttgtgaaatgggctgggtcaaggactgccctcctgcaaattcccttctacaaaatttattttaaagatacacactactaggctgggtgtggtgacctcacttacaaagtgctgtaatcccagcactttgggaagctgaggcgggtggatcgcttgaggtcaggagtaaaagaccagcctggccaacacggtgaaacctcgtctctattaaaaatacaaaaattagctgagtgtggtggctcatgcctatagttccagctacccaggaggctgaggtaggagaattacttgaacccaggaggcggaggttgcagtgaaccaagatcacaccattgtactccagcctgggcaacagagcaagactctgtctaaaaaaaaaaaaaaaaaagatacaccgtactagattgatccttcagtaatacactgtagcatttgttttaggttgttaaatgagtgggcttatgctactacgattgctttagtgtttatatagcataagtgtggcatttgtgatt

SEQ ID NO: 79125 - DNA, 1040 bp, Homo sapiens
ggcatcacagagtgggaaagactagtttatttccttcttttcttttttcttttctgtttgtttgttgtttttttttttgagatggagtatcacttggttgcccaggctggagtgcagtggcgcgatctcggctcactgcaacctccgcctcctgagttcaagggattctcctgcgtcagcctcccgagtagctgggactacaggcgtgcaccatcacacccggctaatttttgtatttttagtagggacagggttttaccatgttggccaggatggtctcgatctcttgacctcgtgatccacctgcctcggcctcccaaagtgctgggattacaggcgtgagccactgtgcctggccccaagactagtttatttctagctgcaggaactagttcccttgtttaggccatttagtctaatgaataaaaagaattcagaaaaaccgggtttctttccatacagcaacttctttgggaggtaaagaaaaagaatcttagtctcagaagtcaagctatctgtggttcacatctgccttgggagatagcacctccttgcactgtgtctcattgatggttgtcactttctgttgttacaagagagcttgggtcccatgtgaggtcactaatattaataatgtagaagtggtttttagttcagaggagcagcttgtcaacagcttgtatttttaaatattgtactaggaggaagtatactgtattcatagggtatgtgcttctttattagtaatcttaatgcatttatgagcagtttgacatacactaattatttatagtgctgtggattccatttgctgctaggtgacaatgtggagagttgggatgcaaaactgtgattaagaagctattagttggcctggcacgatggctcatgcctgtaatcccagcacttcgggaggccaaggcgggtggatcacctgaggtcaggagctcaagaccagcctggacaacatggtgaaaccccctctctacttaaaaaaaaaaaaaatttagccgggtgtggtggcacatgcctgtagtccc

SEQ ID NO: 79126 - DNA, 1030 bp, Homo sapiens
atttttactttttaaactttgttaaaaactaaggcaaacacacattaacctgggcgtacacaaggtcaggatcatcattatcactgtcttcaatctccatatcttgtcccactggaaggtcttcaggggaaataacacacatggttaatgataaaaagtatagtataataatacataaaacagtaatagtcattgctattatcaagtgttatttactgtacataattatatgtgctatgcttttatatgactggcattgcagtaggtttgtttacaccagcatcatcacaaacatatgagtaacgcattacattatgatggctatgacaccactaggcaataagaattttcagcttccttttagtcttatgggaccactgtcatatatgagatccattgttgaccaaaatgttgtatgagctgcataactgcataggcaaatccatggagacagaaagtagattaatggttttccaagactggggaagaaggaagttgggaaatggggaatgattgcttgctaatggatatgggaggatttctttttggggtgatgaaaatgttctaaagttgattatggcaaaggtcgcacaaccttatgtatgtaccaaaacccactgaattatacactttaaatagatgaattgtatggcatatgagttatccctctataaagctgtttgatctatctgtatttcaacagttagagtgataacttgaatattgaaaactttgaaaatacatgttgtgagggaaggtaaaacgccaaagactacattttaccagtatatgtctaatcaaaactattccataaaactccttcctaatttgaatagaatgattttttcctttgaaggtaaaaatcctctatatcttttaccattttattaatatttaattccttcttccttctttctggagaaactttggattctgacagagctccttctatactgacctgacaagttctcagagactggtactgttgcagctaatgagtcaagtggacactcatgctggctgtgttccc

SEQ ID NO: 79127 - DNA, 1065 bp, Homo sapiens
cgtacagccatggattcaaccaactgtggatggaaaatgtttaggaaaaaaacaagaaaaaataataaaaaaccaatacagttaaacaaccatttacatacatttacattgtattaggtattataagtaacccagaaagataaagtatataggaggacgtgctagcttatatgcaaatactactctattttatataagggacttgaacatttggattgtggtatctgtgggggttcctggaaccagtccccaaggggcaactgtagtgagcttaataagaagaaattgtgtggtaaatactcaccatccatttagttctaatgggcagtagtaattatgggttttcttgtcgaagctaatgaaggtaaaaaataggtccatttttttaaagactaagttgagaactaatagagctaaaagcagtacaggcatgaaaggaaaaatgacaagctacaaataaatagtagtaaagtgaactctaaacctttaaattctcaactcagtataaatgacaaaacatgttaccaaatctgcatcatttttattgccaccatttaaatctaactgatggtttcctacaactagcacactaaaaaaaatgaagaacagaaatgtatttcccacagtctgggaagttcaagatcagtaagttagcgccttggtcactctgcttctaggatggcaccttgaatagcacaggtgttttaaagaaattttgccttccacacctttgaaataatttgagctgggcacagtggctcacacttgtaatctcagcactttgggaggctgaggcaggtgtattacttgagcccatgagttagacaccagcctaggcaacatggcaaaaccctgtttctacaaaaaatacaaaaattagctgggcgaggtgttgcgcgcttgtggtcccagctactcaagaggctgaggtgagaagatcacttgagcctgggacatcgaggctgcagtgagttgtaactgtgccactgcactccagcctgggtgagaccctgtctcaaaaaaaaaaaaaaaagaaaagaatttgagtgatataggctctttact

SEQ ID NO: 79128 - DNA, 1048 bp, Homo sapiens
aaagaggcagaagagatgtgtaataaagagcatatgaggactgagaaagataaaaagatgggagttgtgtggaatagaattgttaaagtggtacatttcctacccaaaagatcaatttttacttaaggtttcgttcagacttttgtccttctgtgtcgttcctgtttttggttttgttggtacagaattacttttagcttctttattatttttcctaagactggtgatgtttatactactttattaccactcttccttggctttgcctctctgtcctcagctattttctctagctatggttaaggttgtatcccccttcccttcctttatatcttttcatttgcctatcaaccttctcaaatatttcgtttgtgaatgaaaatacattttgtaatttgtgaaacaaacaacccacaataccattgtgctggggccctgggtggtccctgacaccctttcagagagtccttggagtcacagatattttcaaaaaatgctaagggttatttattaacttttcttttcttgaattgatgcatattttaaaaatttctcagtttaaacatctaaaatggtaaaaatataccatatatcatccacataaacaaagctcattgatgttctcagtcatttttagcagtgtaaaggggtcctgagaccaaaaagtttgagaatggctaatgtatttcatcagcaaactaaaaacatttattaagcagctttgtattttcagtcccagtactagttgtgtagaatcggtggcagaactttgcctcacagtttagaggtgaagacatacttctcaaaggataagtacagttggagtcagtaagtgcagagatcttacacaccacgggagtccagagggaagtatacttaacttgtgattatgttactggtgataggggaggggtcagtgagaggctggaaccacatttattaagccttcctagaggaggtgaccactgaaccaattattttaaaaatcagaatgaggcaggtgaaggatggttgtaggaggccttctagacgaagcagcaggagcaaa

SEQ ID NO: 79129 - DNA, 1026 bp, Homo sapiens
tgatctcggctcactacaaactctgcctccagagtttaagcaattctcctgcctcagcctcctgagtagttgggattccaggcatgcacccaccacgctcggctaattttgtatttttagtagagacggggtttctctatgttggtcaggctggtctcgaactccagacctcaggtgatccgcctgccttggcctcccaaagtgctgggattacaggcatgagccaccgcgcctggccttattttttttatttttatttttttaaagagatctcagagtctctggctttggactccggggctcaggtgatcctctgatccttccacctcagcctctccagtagctgtgactacaggtgtgcaccactgcacctggcaagggagactgttaaaaataaaagtccagacagtaagtattttcagtttagcagactatttacaatttcttttgtctattattcttttttaattttgttttgtttttataccttttaaaaatgtaagaaaccattcttagcttgagggctatacaaaaactgtatgagggctcagtttggtttagtctataatttgtttacccctggtctagactttaagcttttgacctcagtgcacatgactacttaacaaaatccaaaccaattgcacatccctgaaaagtctgtagaaaggaccaaaggcatatggaaattgagaattaattgtcatatttctgtggcttttgttgctgtaggagcaatgatataacaaaattaaagaagtaatttaaatcatctgtaattctaccaccctagcacaatagccaaatccaaattactttccaatcctggcctttatgcagcatattttaagaacagtaatttttaatgtattttcagcatgtaaaaataacttcagcatttctaattttaaaatctcattaacattttttatattttaatggaatgttaaaaaatttatcagttgaattccaatcatgcagcttcatgagagctgttgctttcccccctctaatcatataaccttt

SEQ ID NO: 79130 - DNA, 1013 bp, Homo sapiens
ctgtagtcccagctactcgggaggctgaggcaggagaatggcgtgaacccgggaggcggaggttgccgaggtggtgccgctgcattccagcctgggcgacagcacgagactctgtctcagaaaaaaaaaaaaaggaaaagagagaagtattcaacaaatcagttttggcgtatgggtttcctcgtgttgacttttgaaatactgattggtgactgtcaccaaccaatattccctagctccttcgtgcacctcaaatgactaagaatggagagagtactaggagtagcatctatttcttttgcagagattagaaacaagacgcttcttgctctgcttcttcaaagggttccgattgggtgattaagaacaactttaaatgttttggagttgagagaaagttatgagtcctttttcagcctgagacttttctgttatgaaggaatgcatacgcagtgagccttccaaggatactagcagttgctttaaaatattcttagggacattgttttatagacaagtcccttgaacctgatgatcaagagaaataaattgatcgggcccttgcaggagcagtttatcaccctggaatacttttgacaattgctgaaaatgcgtgctggcaggaagttttttaattaccaaaaccatcagatcatttgcttggttctttcagagtcagtgaaatatatgagtgagtaatggagtctgttcaagaaaaaattagctaagcattgaatctggcactgtccctgttgcagatggaaggccagatgttcaggagcagtcacgaatcatcaggttcatatatatagaagcacacacatatatgtatgttacatatatatgtatacatgagagttaaaataagaaaggaaagattttgtagttcataggagaacgtcatatttacagcaggttgaatttctggaaaaggcattttaattaaatggaagtggttttcttaagtttaatttggttttcctttggaagtagcattataatagagttgtatg

SEQ ID NO: 79131 - DNA, 1030 bp, Homo sapiens
tcattttactggatttaggatggaaaggggttcagttatgtgcataaagtctatcatctcaacccagtcttagtttttattattttacatatatgtatctgtagtttcatataatatcatccctatgtatgattgactcaaaatgttattaaagatctgaacattatttctagttttctttactgtaaagaaacgcatttccagctgaagtatacttaaaactatagaatatgttaagtttattttgcaagttgatccaagattaaaagaataaaatgcaatgtgacatatatgtttgagtagtgcagaaaactactgtttttatggagataaaagttgatgttgataacagaatttattactggcttattacatgtattacatgtaacgcatgtagatagtttttatgtatctgtttatgagaagagtatgttgtatttatataatttgacttatgttccaatattagtgttttttatataacataagcatttttcagagttgcagaacagaattcaaactggtagactccaggccagatcaggctatagaaatgttttgtttggtcttcataatattagcttactcagttttttttaaaaagtgaattaattgccaatgtttgaaagtaaagctatttcaggaagagttcctgacttgtagcttctcttgaaaaatcagaagatttaacaactttgggtccacattcctctgtggcagtaaatgaccagtgctgagtagtggctgcccttgttagctagtagttggccacagtcttcgtcattctttataatctctcaagccagtctacttttctctttattgcttctttcctgatcctgtaggtgtttgagtttgtgacccctactatataaatcattattttaaagtattatgaaatattcatggaataagggtactacaattatcagatttctttctttttaaaagtgtatataattctgtgattttcaactttgtaaacatattctttcacattggcattataacctggaagcagaagtataga

SEQ ID NO: 79132 - DNA, 1061 bp, Homo sapiens
gagtgcaatggtgcgatctcagctcactgcaacctctgcctcccgggttcaagtgattttcctgcctcagaccacgcccacccccctgccccaccccctgagtagctgggattacaggcccacgccaccatgctcggttaatttttgtatttttagtagagacagggttttaccatgttgcccaggctggtctcgaactcctgacctcaggtgatccgcccgcctcagcctccctaagtgctgggattaaaagtgtgagccactgcacccagcccgtgcagtcacactttaataaattttgtaaggttacatgaagtttctttgaggatccaagaattctgttttctgagcccaagggaggaatgatgcagacagaaaagattggtaaccaacactggggagcgaggggcataaaggagatagtgctgacccttctccctctctcccaaccctaacctgttgcagacaaccggttccttgtttaaccctttagccagttaatgaaagtgtattatgctggcaacaacatgtctacttgacatcttcagatgcttttgtgacagttttcaaaatgtaccctttctctggctgttgtagccctgtagtcaggacacaggctctgccagttgttaaagccaaagaaatatatttggagctgggtgtggtggcgtccttagtcccagctgccccagaggctgaggtagggggatcacttgagcccaggatttcagagttaaagtgagctatgattgtatcactgccctccagcctgggcaaagagtgaaacagccagaccctgtctcttaaaaacaaaacaaaacaaaactctccctctctctctctctctatatatatataatatatatagttatatatgtatataaaatatatatagttgtatatagatatattctgaaacattattccatctcccctaataaatcatctttcctcctcttccttatcgcactccttcccctggttagcattcatctgagcaactgtcattttgaggaaggctggcaatcaaataggggtgacagaacagggcctgaattatt

SEQ ID NO: 79133 - DNA, 1246 bp, Homo sapiens
tccaccaaaaatacaagaattagtcggtgtggtggtgaatgtctgtaatctcagctgcttgggaggctgaggcatgagaattgcgtgaacttccttgagcctgggaggtggaggctgcagtgagccgatattgcaccactgcactcaagcctgggcgacagagcgagactccatttcaaaagaacgtttattaaatgactatatgaaacatgttctgttctatagaatacagaaagattgttcctctctaggtgtttattatttaaagtgaccaattgcagaatgaacattcattaggatcaaagtacttaaaaaagtatttatagttcatgaatgtagcagtgcccagtgattggtatgagggaagtacattagtttaattagcttaacgttctcttgactggactattccccttacttctagttacttgggaaagtttttatgaaggagactaatttccaaagttatttaggcaatgacaggttggaagattggtcagctgagagtgggaggaacataacgtatgagagccaaaaggaagggtggaacaatgggctggtaaagagaatgaggactagataaattctaatgagggaagagtctagggcctatgtgggagagtatgaagagtagagggtccttggagtgtggcaataagaatgtgaaactcagattggaattggctcctggtcaagaggatggtgtgatgtttctgcaaaggtttatggcaggatcatgtcattgtggatggaagagaaactcagtgttttttagatgctcacattttattaggaactgcatgatacccatagtctctaaaactggcataacacagatcacatacaaacttagattattttaaagatttattgtattagttcatgcatttcagctttttctaaaaatgaagtttgatctaaagtaattactgtggcaaagaagaaggttaaatctatggaaagtagcacctgtcatagggaaatgccattatctcaaacactttgaagtgcctggatttcaaagctgtcagttggagccatatttcttgaatctttttttactcaccaagctggattgtgtcattttaatgtggtaacatatataagagaaaaggagaaaatgatcctggtactgattatctcttgggaggaggttcagagaggtgaatttttaatgagactttggtgtttgtccagcagaatcattgcagtagctgacttcacttatattggtttttttgatact

SEQ ID NO: 79134 - DNA, 1038 bp, Homo sapiens
ttttgtagagttggggttttgccatgttgcccagactggtctccaactcttgagctcaagtgatccacctgcctcggcctcctaaagtgctgggattacaggaacgagtcactgtgcctggcctttcttggatttcttatgagagcaatgatagcatgcaaataatgacatttttgatatttcttttttaattcttgtgccttttatttttcttcttgctttattgtattgtctgggacctccaaaacaatgttgtttagaagtggtggtaacgggtatctttattatcttcttgactacccctctttacacgtttagttgtatttttacaaagttttttatatggtaatttcattgttgttcagttttagtatttcataatatctatttagatttcctccctatgagtttttctagtacgttattttctctatatatgattatttctgtttactttttattattgatttctaatttgcattgtgcataatgtgattagtatattattcttagaaattagttgatactatctttgagacaatagtaaatttttataaatgtcttatgtgcttaaagccactgtatattctttttctgtttagcacagttttatatctatatgtgtgtatatatgtatacacacatatatgtatgtggatatatacatagacacagacatgtattgcatatgtgtatatatttatgtgtatatatgtatatgtataagatcagacttactgttgtgttcagatttgctgtatccttggggaatttttgtccatttagtctgtgagtttctggtaacacagtattaaagtctcccatcatgactagttgtgtcagtctctccttattaattgtatctgccattgcttcatatgcatttgagagcttatattattaattgtatactttcattcattatagcttctttgaagagtattcttttttatcattatgtcatgtctttttttttttttttttttttttttgtagagactgggtctcactttattgcccaggctggtctccaagtcc

SEQ ID NO: 79135 - DNA, 2431 bp, Homo sapiens
cgagtagctgggacaacaggtgcgtgccgccacgcccggccaattttttgtatttttagtggagacggggtttcaccgcgttagccaggatggtctcaatctcctggcctcgtgatcagcctgcctcggcctcccaaagtcctgggattacaggcgtgagccatcgcgcccagccgaaagataatactttctaccatctagtaatgcgttctgatacctctattatagtttgttgggaaatgtaaaagaatgggtttttgtaattaaatactcataatatcttattaatggaacccttggaaagatgccttaagtagcaaaatatttattccatatcatagttcttcatggccagtgaaaatttttggctatatgcccatctccttatatacaatgtctttgtagatagctggtttcttagtccccaagtgaaaagtttgtgtctgaggaccactgagagaaccagatagaagtaagtctcttaggtgctcatgtgtgaattcaccaggaagatcaaatgaggaacagtttcaaagcaggctacatgaaggtagcagaatattttctactctctagtttcagtgttcagggtgtactgtgtctgatacatcctttgtgattaggtgggataggtgccccatgttttcttgggagctgagttttataacttatctggattttgaacacgtttattctttttctttctttcttttttctttttttttttgagacggagtctcgctgtgtcacccgagctggagtgcagtggcacagtctcagctcagtgcaacctctctgcctcacaggttccagcgattctcctgcctcagcctcctgagtagctgagactgcaggcccgcgccaccacgcccagctaatttttgtatattttagtagagacggggtttcaccatgttggccagactggtcttgaactcctgaccccatgatccacccaccttggcctcccaaagtgctgggattacaggtgtgagccactgcggcccggcctacgtttactcttcttttgtgaggaagtacagcatttgcccagttgtatacctgtctgccttctcttaatttaaactatcaaagtaatgtttttgaactctattatccttttacatttatcactctccccatattcctctccaccccagggggctccatttcttagcgttaccagttctttttctgtgaatgatagattttaaagaaattttctggcctgcatattgtggacatgttttttcaatagttatatatttcccatagagactataataattatgttatgaatgtgtggagtctctataatttggtctcttctgtaacttgtgctaatttttcagaatttacttaaaattttttgagtggtttgtgagcatctgagagaagatgtacaagttgtttgatgctaccatgtgttcactaaaatcaagtgatgtcagactatctcacttctatctcacttctttgaaaagctttgtagattggcagatcatggaaatgcaacaagcaaagctaaaccaaaactgagcaggacattttaccttgtcttataagggttttgatggccagatagaaaaatatggactgattgctaatataattaagtggatcagtattaattaagaggacattttctgttatgtctctagggttctctatgtaaaccttcttgatcaacattttaaatcagttatttggatgaagccttctatagaaggcaggattattgattttgtgaatgacatagtgcaggatgggataatgaatacatctgatgacataaagagattatggaaaaggccacagacaaggacaacaagcctaatttaatgacagcaatgagtagatgtaagaataaggccttacacttggagaagacaaaaaaaccctatacaaatgagcccaggatgtgagaggttaggtagctgttaacttagctgttaaatagatggcaagtgcaatgttcatcattccaattttgtagtgaataagtaaagctggtgtggtctgaggtaggttgtgtcaccagaagtctaataacagcacttggaaagtgatgctcacactctaactctgcagcttccgaattacaaggagaattcagttctgggtacagagtgcccttcaggagaacaagtaggacagtttaaagcctagaaattgtatcaagtaagaaagtcaaaggaatcacaatgttataatttctgtggaatgtcctgcagttttgcttttcacatttagggttcttttttcttccatcaattttattttgttatatggtagtgatctaatttgccttatgcatagctaatcctagctccttttattgagtggtctgatttccccctgatttgtagtgccaccattgtctagaaccaaatttctgtgtatgtacttgactgtttctgaattatctgtc

SEQ ID NO: 79136 - DNA, 1001 bp, Homo sapiens
taattttaaattttagtaaactgaaaaggataagagcattctgcttccagaacactttatcaggacaaattcattagtaactctatgatactgggcactggccaggtttcagtcaggaccctttcttctcctatcctgcataccaaccctgcacttaggaccagctttctacacttaggaccagcctgctacagaaagggaacaagcacaggtttcctcaatcttctcacattttaaaacgcttggaaggacttgactcactccgttgcagtttcccccttctggaagaattttgtttttgagaaaatgaatggaaaatcttaagtataacaatggcatatttatgaattatgcaagtgtttgaacatcagtttattatgggaagatgtgttttaaatagatacagtattctaaatggtgatgaggttttcaagctagttcacagaaaccacttagctcagggtgcccctggaaagagaagttgtgtattctaggatcctttggggaccctgaaccacaaagtcctctgggcccaagaccctctatagattaaactcttgtatcacatggagtcctgtgaatgaaatagatggaaactcctgagcacactcctttttctactcactgatttactgtgtccttggctctacccactatccatgcctagctgtcacccagtggataagagataagagggaacattcagaccacaagctgatacagaattggaggctgagttggacttatttacttacaagttccttttccggatgagcctttaactgaaaagatgaagaaatatttataaaaataatacctactctatagatatcctcaacttacaaagcttttgtttttaagcagaagctatgctagaaaaaaagaagacgagaaggaaatcctataatgaagtatgacgaacactggcagatggagcagataaaatttaaaaattattgaatgccacttttttggacactgaaaagttctcagggacttca

SEQ ID NO: 79137 - DNA, 1862 bp, Homo sapiens
atagaaagtagttcccatgttgagcaggaaaaaatccattatatttatgttatttcatcaaattatgaacaaagttttaaaatttactgtctgttgcctcttatcttgctagtgaataggctaacatcattaatttctgttattgtatggtgctatttatgagtatgtcacaatctatcttctatgtggtccctgatccttaggctgattttaatttgcagaatagtgcatctgcaaaaaaaaaatgaccaataatatgtgaacatggtaagtagtcagtgttgttaagtgaatccataaaagttggaaatagtatatttttcttataatgcaaaaaaaagtgcttacaaaaatagtacactattagaatgtaccatgatcaagtagggggaatttcaggttaagctatcattaagtaagtaagggctttcagggaaaccaaagaaaacatgatcggggatagacattgtctggaagggagtggggctgaagaaatgaaaggtggggaggacagtgagaaacaggaaagaacagatgaggattgaaggagagaagcattttgtttgcattcttaggaactggtgcggaggttaaggagcagcataaaatggatctcaggtttgaaagacttccccttgctagaagcaaggcagagacagagaatgtaaagttaaaagatggatgatgatgtctgtcaacatttaatttggcctatacagaatgaagtggaggaacttgactaggcaacattcagggcctctgatcagctgcacactctccccatgtagcaagagaagtggccttattaaaaatcttagaacagagagaagagagggagatagcagtttttaccttttcctgagaccctgcagaagttgttattcattagacgttcactttattcccttttaagtctggtaaagaatgaatacttggacgttttgtttcatgcagatttagttagcaactcgattatcaaatggtagaatatctgtatgcactgaagccaaattctcagtaactcagcttttgttagtcatatgaggatgatgaataataggactccagagcagttaacaaattgatacaagtggtaggaaaatttgatatgaagttatcaaaacaatgtaatgaatctgttaaagctaaagaagtgtaccatgaccacattcattatttatccactcagtcgttcaaaaagtattagaatgcccaacccctctattccaggcactagttatgtacacgggggtacagcagagaaggcagacagacctattctctgcccttgaagagttcacagtccactgaagaagtagacacattgaatataatcaagaagtgttacaaggatttttaacacttccttaatatcctgagagagtcaaacataatataagagctgaaagatgcggatttggggagacataggggtttttttgttttgtttttttgagacggagtctcgctctgtcgcccaggctggagtgcagtggcgcaatctcggctcactgcaagctccgcctctcgggttcacgctgttctgctgcctcagcctcccgagtagctgggactataggcgcccgccaccacgcctgctaatttttttgtatttttagtagagacggggtttcactgtgttagccaggatggtctcgatctcctgatctcgtgatccgaccgtcttggcctcccaaagtgctgggattacaggcgtgagccaccgcgcccagccttgttttttttttttttttttttttgagacggagtttcgctctcgttgcccatgctggagtacagtggcccgatcttggctcaccgcaacctctgcctcccaggttcaagcaattctcctgcctcag

SEQ ID NO: 79138 - DNA, 1019 bp, Homo sapiens
agtaggttttgggaaatctgtatttgagaagaaaactttaaaaaataatatttaaaaataagaaggagcaatttatatgttgatactatctcttctccaggaacaaaagagtatgtagtagttctatacacaggcaataagtgaaaggctgaatattatattcacctctgaatatgtttcagtaataattacatatatttttctataacacatggaaaggagtttcagtagtattatacctaagtatggaaatagttatagttaccatatttttaaaaagtatattcaggtagtctaactgaattttatattctcagaaattatatataaatagctatcatttggggctaaaaacttccttgttttgttattgtatcatattggagctcacatattttgatgagaggtgataaagcaagggtccccagaaatctgctgttgttaaggaaacccatataaaacctgaccccacatcttctgggatttcctggaaatccactgacatttcctggaaagagagatgtgcctgaatattttcaggataactctgttctcataagctttctgcctgttctctctcctttcaactctggtttcttaggagcttcacttctctctactccctttccacctggtgatcttaggtctcagaggttttttttaaaataactatcttctcttaatttttttttttatggaaggattctaattccaaaggaatcatttggttaaaggtcaccttcatgtaaggtctggaggaatggcggagaatctaggggactgttttacattttccttgtggaagatagggtatagcataccctgaagaattacatgcaaggtgagaagaaaaggcgacaaaagcctttacatgcaaggtgagaagaaaaggcgacaggaataattggggaggtgaatagagtaaatctgagtataatacagaagccaaaagtaagtattttattagatgcataatttttatatttaccagcttctactgaataaaattgaagttggtt

SEQ ID NO: 79139 - DNA, 1600 bp, Homo sapiens
tttgatctcaagtttccaaatatagttttctgtatctcctaaatgtaaacttgccttttaatttttttattttatttatttttgagatggagtatcaccctgtaacccaggctggagtgcagtggtgtgatctccgctcgctgcaacttccacctcccaggttcaagcgattctccttgtgtgagcctctcaagtagctgggattacaggcacccaccaccatgcctggcaaatttttgtgtgtttttagtagagatagagtttcactatgttggccaggctggtctcgaactctcgacctcatgatctgcccgcctcagcctcccaaagtggattacaggcatgagccacagtgcccagcaaaacttgccttttataagtcagatttattggggtacaatttacatagattaaaattaacttttttagctgtacagttctatgaattttgacaaatatatgcaagttgtgtaactaccttgtatggaatattttcagcaccctgtaaatttctcttatgcccctttgtgattagtcctctcctctttctccagcttctggcagccacaaacctgatttctgtccttacagttttgccttttccacagtgttataaatggaatcatacaatatgtaatcttttgagtctggcttctttcacttagcataatgcttttttgagatacaatttacataccataaagttcatctgtttaaggtgtacatttcaacagtttttagtatcttttcagagttgtgcaaccatcaagatatctaattttaaaacatttttatcaccccaaaataaaccttgtactcattagcagttattccccaattctgactcccctcccatagctccctatcctaggcaaacacctacttttcatctctccagatttgcctattctagatatattaattaatggtatcatacaacgtggtcttttgtaacttctttcacttagtataatgtttttcaggttcattcatgtagtaacatgaatgctttatttttttaattgccaagtaatttcccattgtataggtcatagatataccacattttgtttattcatcagttgatggacatttcaactttttggctattatggataatgctatgaacatttatgtacaggtttttgtgtggacatgttttcctttctcttgaatacattatgaacatttttgtacaagtttttgtgtggaagtatgtttttatttcttttggatggatacctaagagtggaattgctggattgtgtggtaattctttgttaccacacgagccagcaaactgccaaaccctttttcaaacccttttccacagtgctcaaaccctttggaactgtcaaacccttttccacagtggctcaagggttccagtttctcctggccaatcctcactattgtctgcctttttttttttttttttacatattttattttatgaactttcttttttttattattatactttaagttttagggtacatgtgcacaatgtgcaggttagttacctatgtatacatgtgcctttttttattacagccattctaatgggtgtgaaggagtatcttattgtggttttgatttg

SEQ ID NO: 79140 - DNA, 1092 bp, Homo sapiens
gcactgcagccttgaactcctggcctcaaatgatcctcccactccagcttccgaagtggctgggattataggcacacaccactgtgcctagctacagttgttttacttctctctgatgataacttggagtgaattgagagaactgtgttaaatgcctggcactgattatctttgagaccttggtcaggtaacttaatctctaaaattgcaatgtaaccctcttatttgccaaatgaggaggcacaaatagatgatcccgccagccccttttagcacagatgttctgtagttcaagaaatttatccttggctctataagttgtttgtttaatgtgtgtgtgttccctctgtgaaggatattatttataaatacagatgttccttttaaagaaagagatgtcaaaggaagagcttggtgactgcttccatctatgatctggtctttgagtttgcagaacacaaaatacagctttatatgctcattcaactgatttcaggttctcgggaattgattcatgctaaccaaaattgtaagagcttttgttttttatgtataatccagaatcttagtttgtcaattataatggaatagtgaatactggtttctgccattgtaggcacttcttttaggatcagagactttggaaaaccagattagaaactatttggaaggcaaagggaatcaagtgggtttgaggggtatttttcagattcaaagtcttataaatgatctctgttctgtagtagagttctagtaattatatttggaatcagttttctttctcctttaagtagtagttactaatggctggtagtcttctctttttctcctgcttcatgcagattattgtacctatgctaatatgactttttttcagataggttaatttttccttttcttatttttttaaaggtacatcccagtctacatgatactgtttactttgattagacttgggtatttatttatttatttatttatttatttatttcaagacagagtttcactcttgttgcccaggctggagtacagtggtgcaatcttggctcactgcaacctctgccttctgggttcaagcgattctcctccctc

SEQ ID NO: 79141 - DNA, 3374 bp, Homo sapiens
aaatcaggaccaaatctagctattcttatgcctcatttgagtcattttactatgtcacaattcaggggcccttttccttcagtagaaattgtgaggcctctcaaagcatggaaaatgaaataagggattggataaagcagtggttctcaaagtatggcccctagataggcattatccatatcacctgggtacttgttagaaatgcaaattcttgaccccatcccagacctagtgaatcaaaaactccggggatggagttcagcagtctgtttaacaagtcttccaggtgattcttaggcttgctgaggtttgagaatcactactactgggttacagagatatttagtaggtaaaatggacaagtgttgattgactggatgtaaaatgtgagggagagggagaggtgaagaaggaatctcacatttctaacttttgatttattcctgaattgtcttaatagattctcttcccttgcaaggtaaatgctaggttgtctacagatatgcatacctattttcaagtgggtaggagtctaaagattctgcagtgcgtcattataccagtttgatgctgttgtatttattggttagtattttttgtctctcctgacctaaaaacagtagattattgtatatttgtatattttttaaaaataaattttgttcacaacttgacgcactaggggaaaggaaaagtcaaggcccctgttgtcgaagggcttacaacttagggattgcaaacacgtaaataacaaactataaagcatcatggaatttggagctaagacaaggggatatgttgtggcaatgcagatttgggttggagtttgggaaatggggagggattccaaaattaataattgtttttcaaaggagatgaaatttgaaccaggttatgaaaaattgccaaaagcagggccaggcactgtggtttatgcctataatctcagtgctttgggggaccaaggcaggaggatccctcgaggccaggagtttgagtctatcctgggcaacatagcaagaccttgtctctacaaaaaatttaaaatttaggctggcatgttggtgtatacctgtagtcctagctacatgagggggctgaggtgggaggattttgtaagcccaggagtttgaggttacaatgagctatgattgtgccattgtactccagcctgggctacagatggaaacgctgtctcctaaaaaaaaaaaaaaaattgccaaaagcaaaaatggcatggggatgcgtaaagagcattagaggctgagttaacagcagactacttctaagtggaaaagttaaaaatgtaaagtctttagtttttttctttagtatgtttatctgacttactctggtatagttgagtcaaacaacagaaatctgcttggggaaaattcctgtcagtaaatttcaatcatacttgacatgcagagaggaatcaatctaaactaataatgcataaagctagtgttgaattaaatctaattctaaaattgtataacacaaattaagattcttcacaaagcaatggcattatgtcaagaaaaggtggattcagatttcaatcttcattctgtggctgcagtaactacatatgaattttatttccaagaggactcttctcttcaggatcagtttaatcatctgacaaaaaagagggtatcaaattgtaacatttagccgatgtttgaaaatcctttgatgaatacagtgcagccccaattgtgcattaacagttaagaaatgtgacccatggagtcctaaaaggcacatttcagcatctctgttcccaaacctaagtggccaccaaaaatagcttctcttgaggaccgaggattgcgtctctgaattccccagtgaacccctgacagcttcgaagttcccagccttatacagggtgtacttttagcactcaacacaatgccaggctagagctttggggatgggaacctccaagaaagcactgttcggcatttgggcaatcagtgttcggcagaatgccaatgctaataggttattttgctctggaaaaggagaaaaagaagggatagtctaaagactgatgaataggggatgactgacaatacggacactccactttattggagagattaagggggcttgctgtgaagtggtattgtgggagccagaaaaattagcaaaggcccacaggcccaagacctgaaataaatagtggtacatcaaacccgcatgccctagggcacactcaaatgtctggccactttcagtgaacttgtagcaggaaaaagccaaatcattaggaaccctcatagtctggtactccatccaggcactccttagtcaggcaaattatccttcacctccagacaggtgcagagccttttttctctacaccctgacttaacccaagggcctgtagtctgggcctcagtctaattttgaggatactgagtggaaaagttggcttcaggatttccaaaggattccaaatactctaggcaggaggtgccactaagattcttgttttgttagacttgaaccaagcaggtaagaacattgatcataacacaagaaaggccgggtgcggtggctcacgcctgtaatcccagcactttgggaggccgaggtgggtggatcccctgaggtctggagtttgagaccagcctgaccaacgtggagaaaccctgtctctactaaaaataaaaaattagctgggtgtggtgacgcatgcctgtaatcccagctactctggaggctgaggcaggagaatcgtttgaactggggaggcgaaggttgtgggtgagccgaaatcacgccattgcactccagcctgggcaacaagagagaaactctgtctcaaaacaaacaaacagacaaaaaacacaagaaagcagaattagtgaattcacataaggatctcatgtacttccagaggtaatttaagatggagaaagcatctagcctgccctcttttagattttttgcctctagagcatttttttttttttaagataagagtctcactctgtcgcccaagctggagttcagtggtatgatgtcggctcattgcaacctctgcctcctgggttcaagcaattcttgcgtctcagcctcctgagtagctgggattacaggcatgcaccaccacgctcagctaatttttgtatttttagtacagaaggggtttcaccatgttggctaggctggtttctaaactcctgaccttaagcaatccacccgcctcagcctcccaaagtgctaggattacaagtgtgagccaccatgcctggccttgcctctagaagactctaaaggccccaaagttattatggaattggaggtttgtaggtcagaaggactccatggattggcaatgatgcctggaatgttat

SEQ ID NO: 79142 - DNA, 1063 bp, Homo sapiens
cttacatagttttaattcaataaatatttgttctaatttgtttgtgctacatgattgctatgttaacttcacttcaaattttcttattcctgaaaacaataaacagttctaacacctgtataactctttatagttttaatccattccattacaaaccgttttgctgtgtgacccctctcccgggtgagaagtacagtatgttagtgtggtatttatgaggtctttgaggtatttatgaagtcaatttctgcaattatcctttgttgaattagtggagtgccagttggtatagctcctatgactttttggtttgtctcttaggatttcaaaactttcaggtccccctgcctccatctctgcaagtttagagggcttagatcaaatgaatactgtgtgatgcagtacttcatggagtgttagagttctgccagaattaggattttggatgtagggatcaccatagctacagaagtttccttcacacttttccccttagtaccccataaaagaggagacagacctcctcacagcctcattttctcacctcttgctccaagaggaagtggaccatgcttcccatcctgtttctagttatatctattttaagttgaattcacctttgatagcctcatctataacatcctgtctgactctgcgagttgctcgtctctcaaatgtgtctagttaaggcttgtactaaagaagtgaatatcatggaggattggcagcaaccttatagcttctgtttctcacttctgtagtgcccaggaaggacagtgctgctttcctggaggccaggtgatggttgttgcccctgttttctggtcttgactttttggggcttaggccaaccacctcagtggttttcttatgcagctgggaaatttgaagggtactaaagcatctccattcccatgttgcagggagaatggtgtttcccctaagacagcaaatcgccaattcatatgtctatcctagcaaatgaagcaggtcttccattcctttttaagaccctagaccctggtgaccaataaaactctttggacttttggctagacatggt

SEQ ID NO: 79143 - DNA, 1315 bp, Homo sapiens
ccacactgtagtaagtgtccactgtctagacatgttaatgattgtgcattgtgatttttgcatggaatctaaagaacacagggattgttaagtatatgtaatgttgtcattctttggcatcactttggcgaattgcttttgtttttacccatgtgaggaaatgtagcaaaaagacagtatcttatatgaaattaacattttctgcatgtagcttttttgaacatttagaaattgagcttttcttatcagcttttcccttcatgcatttctgtagtgagtgtgtgtgtatatgtgcatgtgcttatttgttaaatactgggcataggatcttttaaatcagtatggaaaggatctgtgaacttcttattaggttaagcaatattcccaacattttaggcattgtagcactgtatattttatggtgataatttgaactcattttccttaaagtgttgtatgccatatttttgtttaaataaagtatctattttagaatgattttactgccttagcataatcagagactacttaggatattacagaatcagaaatgtatcactgggttggagtcatgatagttccatttggtaaatttcagttataagaaattctgtcaaagtatttgtctatcctttcataatgcagcatttattccgatctggcatttaggatgtaattattaaggtaatgaaaatgccttatatcttttcaatgaaggttgccacagttaccagactattctttcactctttctgatatgcaaatgtatttgtagaccatgagaaatgaaagtatacataggagggttgtagtataattgctcccctgtgaagaacattgttaacagctccctgccagttttgaaggtcatttcctcgtaaatgcagatctggtctactcatctgtttttcattcatctgtttcatttatggagatacatatatatatatatatataatatatatatatatatatatatatatatatttaccacatttatcagcttactttgttatttggagaaaatagggaaaattaaaaaatgaaaagataactaatatctttgaactcagtatactgaaggagtcatttacgtgcttaggcatgtaatatcctaaggaatttttatgtttttaagaaacgggatcttgctatgttgcctaggctggacttgaattcctgggctgaagtgattctctcgcctcagcctcccaagtagttgggactacagaagtgcaccaccatgccctgcttataaggaatagattattttattattattattattatttttgaggtggagtctcgctctgtt

SEQ ID NO: 79144 - DNA, 1011 bp, Homo sapiens
tcctcgagcccgcccgagtaaggtgcacctttccggggcgcccggagggaggcgggtagggcggtaggctcctagcccggccgccccgtcgggggcgcaggctttggctctctgcccgggcaaggacgtatggctggcttttcttatctttcttgggttggaaggataatggtttatgtcataattcctccccccaccatttgtgagtcagagctttcagaaggtagaactgaacgcgcagcccatgcggagtggcctattgaaggaagcccagtcctctgggttttagagatttaggccccctcccgccttttgatccccaaattttattgtgttgggcggttctaggggacgtgaggtaaagatttagcaacaagtcccagcgatttggggcttggaagtggccaggaagaatcggcgacttaggaaaaacgccaacaatacggtaatgctcaacagcatttctttcagaacctggtatttttgaagggatttttacaacctcttgctcatgttccttcgctactgctgtgtgcacgtcaggagtagtagtctttcccgggaatgcagtcacagccctctctcctcccttatgaaaaagtcagagattgaaaacattgacaatgctcccgtgtttagttcatcagccaggaggatcctgcgctcatcgccggaagctgctctttgtggagaagctaattgagctggacccagaggggtctcacctgatcctttgcctttgcagcaggaaaacaggaggaggcttctggctcagatgtgacagacaaaaactgtcggcctgggtcctaccctcagtgtcttcttgccccccgcctccttatttatttatttttgctgacagtgctcaatcgcggaaaatagcggtgtgtgagaaagacactgggtagtgtatgagagcagctggtctctgctgactccgtgctcagttcagccttctcctcactttcccttttctccctcccctcgaaaccagctctgggcataagtgct

SEQ ID NO: 79145 - DNA, 1026 bp, Homo sapiens
ccggcgggctggccgcctgccctctctcgtgctggtggtgctgctggtggtgatcgtcgtcctcgccttcaactactggagcatctcctcccgccacgtcctgcttcaggaggaggtggccgagctgcagggccaggtccagcgcaccgaagtggcccgcgggcggctggaaaagcgcaattcggacctcttgctgttggtggacacgcacaagaaacagatcgaccagaaggaggccgactacggccgcctcagcagccggctgcaggccagagagggcctcgggaagagatgcgaggatgacaaggtaaggacgacccttttctcttcaaaccccatggtttcttttctccccggggtctggggcgggatgttaatccgctagctgttgtcttatgccttccagtatttcagtcctgaaggctcctttcacccccaacaaccctgtttctgtcagacttttcccagtttatcagtgccacgttctctggtccctgccagaaaaaaatgactgtaaattctggttctcaagagtggactgtgtgcagatgctgcctattctctaagctcagctggtgagttggcagtagtaatcatctggcctgtgtggcccccttaccttcaaagacacacaaatctggcgactgccaggtttggtgtggttattgtctcatttttattccgtgcacactgatcaatattaatttcgttatttaaagaacgaagccgcctctgactcctctacttatggtagtcatcatatattttttaagctgtgtgacttttaaaatctctatagggtgatgtattgaataactaaataatcagctatgactgcctttttgtgatcaaaatgttatgatagatgggccctcgagctatatgtgagacacacttgtgtcttggacatagttgatccatcattatctactcaatttgaattgttaatgaaatcagccaaaagattagaatctgaaaataaattttaagcagtggaatgtcatgtcagtgtcttcattgaaagaa

SEQ ID NO: 79146 - DNA, 1059 bp, Homo sapiens
gctattagggttggtgttttatgcagatggaaaactatacaaagttttaaatataaaaagtttaaaattgaactgtaatcatacttgctactaaataatccttgttttcattagctcattggtaactatattaatagtttatgacttagcaacttctgtaggtatagtagagttatgaaaatttctgggcaggatagtagatgcctttctatacacttctttggtaatcttcacatttttgtgtgtaaatgcccattataattacaagttttactttgcatatcaaaatcacttaagggtaagtcattatgaattaaactgtctgtgagcttctaactttcctgttgacagcctctacctggctttcttatttcatgaagattaaggccctcagctaagtgcttccctataaccccctcctcttcaccataacatagacatgctatgatagggtcaaggaatcagtacatttatatgtgcgctgcatgcttaactctaaagactgaaaaactctcgggcagagtaggtagaaatccatgaaagtttggagtattaaagtaaggtcttcctacttggcatggttgagcattacaattcacattcttctctctggtctcaaaggaaagtctcttgttgtaattaatactcttgattccattctttcatccattggactttttgttgttgtcgttgttgttgttgttgttgttttttgagacggagttttgtttttgttgcccaggcaggagtgcaatggcgtgatctcagctcactgcaacctccgcccccccggggttcaagcaattctcctgcttcagcctcctgagtagctgggattacaggcatgcaccaccacgcctggctaattttgtatttttagtagagaaggggtttctcaatgttggtcaggctggtcttgaactaccaacctcaggtgatccgcccgcctcagcctcccaaagtgctgggattacaggtgtgagccaccatgcccagcctctttttttttttttttttttaaagagacagggtctcattgtgttgcccaggctggagtgc

SEQ ID NO: 79147 - DNA, 1013 bp, Homo sapiens
accacacctggcctattctaccaatcttttatccagcttctgatccatgtccactatgaagccccctgggacttctgacctggaatatgcttttccttcttttctttttctttttttttttttttgagatggagttttgctcttgtcgcccaggttggagtgcaatggcgcgatctcagcttactgcaacctccgcctcccaggttcaagtgattctctagcctcagcctcccaagtagctgggattataggcacccaccaccatggccggctaatttttttttttttttttgtatttttagtaaagatggggttttaccacattggccaggctggtctcgaactcctaacctcaggtgatccacccacctgggcctcccaaagtgctgggattacaggtgtgagccactgctcccagccatgcttttccttctttatacaccatttacatttattgtttgagcttcattaacttattttgttcattttttactaatagcttattgtttgtgaacttcgttttctcaacgaaattttaagttccttgaggaaggactatgttttaaattttttcctgcgggaaaaattgttcttagtgctgttacaaaatgtacgaggttgatttgtatcccctaaaaggatatattgaagtctaaatcacctgtgaatgttatcttagtttgggaatagggtctttgcagatgtaatcaagttaaaatgaggtcatactggattagggtggcccctattccattataactggtatccttataagaaaaaaaaatagaattagggagaacaccaggtgcatgaatacacagagacacacagacacattgcagagaccgcatggcagataaaggcagagattggagttatgtttccacaaaccaaggaatgcccagggctaccagaagccagaagccaggagcctccccctagaggctccagtgggaacagggctttgccaacaccttgattttggacttctagcctctgaaaccatcctctag

SEQ ID NO: 79148 - DNA, 1118 bp, Homo sapiens
cagcctgggctacagagtgaaactccatatcaaaaataaaaaatatttgtcttacttcccctttccaggaaaatttcttgaaaagacattttatctctgcattttctgctttcatctgcattttctcctcctactcctgataatctcagcatcttttccccagcattctatgttcttggcttcttatctctcagtttacttcttagtctcctttgctgacttcacctgtattcattattaaatgttatagttcatagttttgtgtctgtaatcttctcattctactctcttactacgtcatcatactcacttataaaacttgttacactttatgtgctaatgactccaaatctgtatcctttatccagacttctctcttgtttcttatatattgctgtatctttaggctttacacagtgtctttcacttagcaggtgttcaataaatgtttctttgtgactggctgactgactaaataagtaaactttatagtaattctttgtgattcttcttaacagaccaagatcaaatcctttgtatccctaggtctagcacatagtgggtactcactaagtgctttataaatgactgattgaataaataatgaataagcaccacaataaaataaaatttcttaataagatgaatgagtgaatgaaaaaaaactttgtgctgttcattatagccagtcaagaccaaagaccttgtttattctctttgaaaatgtaactgggggccaggcgcagtggctcatgcctgtaatcccaacactttgggaggtcgaggtgggcagatcacaaggtcaggagattgagaccatcttggctaacacagtgaaaccccgtctctactaaaaatacaaaaaattagccgggtgttgtggcgggcgcctgtagtcccagctacttgggaggctgaggcaggagaatggcatgaacccaggaggcggagcttgcagtgagctgagatcgcgccactgcactgcagcctgggcaacagagcaaaactccgtctcaaaaaaaaaaaaagaaaagaaaagaaaatgtaactgggtaggccgggtgcggtggctcacacctgtaatcccagcattttgggaggccaaggcaggtggatca

SEQ ID NO: 79149 - DNA, 1049 bp, Homo sapiens
acctggctgcttatcagaatcacgtaagatttttaaaattaaaattcctgggcctttcccagactactgaatcagactggaagtagaatatgtcttttttaaagctccccaggtgattctgagcatcagccaggtttggcagttatgttacagaagatagacttgtctctagaaatcatctgagtatgaaatataatcaagaaaaatatttctggtgtggagaaaaaggagtcaagaatgacatctgtagtaagccaattgtatataacctttggaataaatggtcatagttgtgctgattgcccaagaacagaccgtaatgaaaggaaagcaggcacagctgagccattttcaaggttcccccaaatggaaagagaagcagagcaactgagctgttaagagctgccaaaattaatttagagaagccacgtaggatggggaaacatgaaaagaacttcagaagagagctggtagaaaaataaaaatgaagtttttgatattgcaggaagaaagattaagggaaaataaatgaagtagctggggatgaacaagaagtactatagggaagtatcaggaaaaaagaattcttgctgaggaaaacaaataaagagcataaacaaagaacataaaactcaggagagaggtctcaggaaggacagtaaacacattttaagagattcacagggaaaaggccaaacagagcaaggataattggcctattatagatggactcaaaatcccaaagaaacaagtattacaaaaagagagggataaggtaaagcctaaaggcaatgacggcgataacaaggggaaataaatgaaggcgctcaaaagaaaccttgaagaataattaaaattgtgcaaatatggataaagtataacttaaggtaggagagtgtgtagtacaaagagtatgggacataaaagtctaggggatcattgagcaaacatttattcagtgtttatgggtatcaggaagtttatgtgctgttacctgtgtggaatatatttagaaaaaaagtgaaaatattctggaagcatgatcagtt

SEQ ID NO: 79150 - DNA, 1033 bp, Homo sapiens
caggctaattggaagttattacggagcagttctgagtgagcaaactgatcaaatactgtagttgttggtgtcaggttttttttgcttcccctgtagctttccctcagtgatctcattcctatgacctggattaccatttgaatgtgaatggctctctggtcgtcgcccgagctccatatgtccaactgcctactgaagatctcttcttggatatgtcacagatgcctcaaaatcaataggtcaaaatctcaaaaaatcatttccccaattctctccctgaccccaagtctgttcctcttcctgtgtttccctattacagaaaattatattcttactcatctagtcaccccgattagaaatctaagcatcatacttgatgtttctccttttacgcctgtatataatcaattccacaagactattcttcccctttaatatctcacatgtatttacctctcttttctgattctattagtttagaccagaaattgaaaagaccttttctgtaaaagtccagatagtaaatactttaggctttgcaggccatatagtctctgccacaaccactgtagctcaaaagcagccacatacaatatgtaaacaaattagtgtggctattttcccataaaactttatttgtagacactgaagtttcattttcatgtaattcatatatcataaaatcttcttttgattttttccttcagctatttaaaaaaaaatgtaacagtcatccttagcttccttccctacaaaaacaggctcacaggccatagtttgcccacctctgacttagaccaacattctcacctatgatatggcagtagtacttggtctccctccttctcatcttgcccactctggtctactcttcatgttgcagccagattgactttttaaaattgcaaattgggactgggtgtgcgtggcttacgcccataatcccagcactttgggaggccgaggtgggtggatcgcctgaagtcaggagtttgagaccagcctgatcaatgtggtgaaaccctgtctctac

SEQ ID NO: 79151 - DNA, 1044 bp, Homo sapiens
ttgctctgtctcccaggctggagtacactggtgcaatcctagctcactgcagcctcaaactcctgggctcaagtgatcctcctacctcagtcacctaagtagctaggactacagacatgttccaccatgcctggctaatttcattttttattttctttagtttttgtaggtctcactgtgttggccaggctggtcttgaactgctggcctcaagtgatcctcttgctttggccttccaaactactgggattctaggcataaaccactgtgtccgacctagctgtatattttaaacttcattcttcaaagcacccaggactcgggggggtgaaaaagagggaccccctagactccttctcttgcttcacctagaacatttatattttcatctatttatggacaaacttttattttaaatttgaaagtcgtgggctctcagattgaagaatacactctacctgggactgaaagatactccatggtctttttactccatctttctttccaactcttcttttcatgtgctccagtcagacagtatgttggtggagtcttgaggtatacctcatgctttcttgccactgtatcttttcttataccatctcctccatctgaaatgcccctttcccatctgtttaaatttttacctaactttcaatgcctaatacagatataatcaattccatgaagttttcccggatctctggattcttgtagtaattatactgctttagatggtgccttgtctaatttcttgagactactctcatgttttcttagttgttttatactttcccattgagtggctggacatgggatggtgggggactgggggttgggggtgactataacagattgcatgggccaggcattgtgcctcactcctgtaatcccagcactttgggagaccaaggcaagaggattgcttaagcccgggagttcaagaacagcctggacaacatagcaagacctcatctctactaaaaataaaaaaattaacctggcatggtggcaaatgcctgtagtcccagctatcaggaggct

SEQ ID NO: 79152 - DNA, 1522 bp, Homo sapiens
ttcggtggccagcacacttaggaagaagattgcctgtttttcacccttgctcttgaagaggcacctgtgtaccagtctcctccttactgccatcctgcttggttctaacatatgcttacagagaacccaccctgcccatagcacccaggaagatgcccaattttaggccattagggtaacctagagtattcagcaggctgtcttgcagaatcacacacctcagcatagccaagcagagtcacctctgcctaccaaatcattcatttactgtagctagagattttcaaaagtgttattctttgactttttatcaggtataaaaatcacacagaaaataatgtatcctgcatctccaattgttcattatttgaacccatggtatatgttttacaagatgaactgtttcagaacatttaattaatagttgtgtcggtggtttaacaatttgaactgaaaaatattattaccaaattttgtctaacagcaagagacccaaaagattcaatcaaatgatggaaaggaattggatataaacaatcaagtagtacctaaaaatattccaaaagtagctgagaatgttgcagataagaatgaagaaccctcaagcaatcatattccacatgggaaaggtattattgttattattcttttgttttgtattaataggatattgactttttcttcccattttgaagtggatattttcaatcataaagaaaattgtttgattttagttcacacatgattaagtgtctgcattgtttcaaatttggattgtttgatagaagagaaaaaagagtaagttattttagagttacagctatgtccaaagcaagaggtaaagatgttcagttgatgtagcctattacttttagaaactgattgttacattccttcaaaacattttcaaattatgtaagaaaaacgatagaattctatctttttgttacttgggcagaacaaatcaaaagaggtggtgatgcagggatgcctggaatagaagagaatgacctagcaaaagttgatgatcttccccctggtaagtaaaaattgttagagaattcgactaaagtgatgataatacatttcatgtgaccccattctctttttcggtaacacttggaaaagtcacagatatctggatgatcgatatttctacttaattaagtacccattaattgccaggactttttttggatccaacttttataaaattttttgctaagatgtataaaatacttgtttttgccttgataagaatcacctatatttgaatcttttctttgcgactctgagtttttgcttatgacagttgtactatatagagtcatttatgtttactaaaagtatgcatggctcttttctttcccaccaaatgtgcccagattcctgtgttgttggtgtgctttaatatggcatagtaataccctaataagagttatttaattatttagttttgagggcttggcttgtccttttagtgaattaccccacacttttggatagtttgtttaacattttt

SEQ ID NO: 79153 - DNA, 1006 bp, Homo sapiens
atggcagcaactgtgcagagcactggttaggcagttatttgtacaaagattgcgtgtaagctaataattgaacaatgttatatttgtgaatttattcaaggtattttattttatttctttatttttatttatttatttttagagacgggggtctcgctttgttgcccaggctggtcttgaactcctgggctgaagtgatcctcccgccttagcctcacaaagtgctgggattacaggcgtgattcactgtgcccagcctattcaaggtatttttgttgatcttgtaacagttattcaaatttattcatatatgtgaatgtatagtttgcattaatttaattggctttcctttcttttttctttttttctgttttcttcaaataggaaattccttgatattttaaagcatatctgtgtatcttgaccaaagtattgtgtgaaaaacatttttattacaaagatttagctaacattttaaatataatgaaaaaatatttcctcaaaattgggttgggggattggcctgaaaacttacatctcaacaagaagaggtgtacagtaagagcataacaaataaaatatcttaatttgatcacttaagattttcttcttttttttttaaattttttttgagatggagtctcactctgtcacccaggccaggagtgcagtggcaggcaggagtgcagtggtgcaatctcagctcactgcaacctccgcctcccaggttcaagcgattcttctgcctcatcttcctgagcagctgggattacaggtccacatcaccatgcctggctaatttttgtatttttagtagagatagggtttcaccgtgttggccaggctagtctcgatcttctgacctcaggtgatccgcccgcctcggcctcccaaagtgctgggattacagtcatgaactactgctcccggccaagattttcttctaaacttatatttattctatacatttttttaattgttgccttacctgtatatatttttttaa

SEQ ID NO: 79154 - DNA, 1034 bp, Homo sapiens
tcctaaagtgttaatttagtcatacttatattagagaagtcattggttattaggaaaacattcctaaaaatggtgcccatttctttaagaaatcattcaaattttaagtggcaagcactaaaattaacacaaaagagaaattcttaataaaaattacatattttcagagtcttccctcttatatacttttgtcttggataaccttcacaaaatgtatccttttatatccagtaccccaaaagttgccagctttcacttgtttactttctggtctgccttccgtatagattccttcttttcttctctctttactcttgaattaatcctctacctacttcacaggccgattctttgatgaaaatgaatcccctgttgatccgcagcatggctctaaactggcggattataatggggatgatggtaacgtaggtgagtatgaggcagacaagcaggctgagctggcttacaatgaggaagaagatggtgatggtggagaggaagacgtccaaggtgagcgtgggcctggcctccatgctataaccatgaaacccacctctaagttttttggttgaatttgtgtagaatttcccccacttattagtggcagtgtaacctaaattttttgttttttctttgtgacggaatttcgcttttgttgcccaggctggagtccaatggtgcgatcttggctcaccgcaacctccacctcccgggttcaagcgattctcctgcctcagcctcccaagtagctgggattacaggcatgcaccaccacgcctggctaattttgtatatttagtagagacggggtttctccatgttggtcaggctggtctcaaactcccgacctcaggtgatctgctcacctcaggctcccaaagtgctgggattacaggcatgagccactgcgcccagccaacctcagtattaatacaaagaggttctgtggagtttttcagttttattttgaaaacttttataatagtggaatttgtaaatctgtaaattattttaatttttaaaaattttggtta

SEQ ID NO: 79155 - DNA, 1062 bp, Homo sapiens
ttttttttttgtcgcccaggctggagtacaatggcgtaatctcagctcactgcaacctccccctcccaggttcaagcaattctcttgcctcagcttcctgagtagctgggattacaggcgtccaccatcacgtccagctgatttttgtatttttacaagagacagggtttcaccatgttggccaggctggtcttgaactcctgacctcatgatctgcccgcctcagcctcccaaagtgctgggattacggcgtgagcaaccacacccagccatggtagcgctttctttaatggaggtggcctttcttgacttcagagggaatttaggaattatttaataaactatggatatctttaaaatattcctttaatattcattttaccttgatgaactatttaaaattttgctgcttcctaaaaggaactaaaatattagttcttataattatatttagtggttatctgttattctacattagatttggttaggtgatttcataatcatgtactactgctttacagataaatgcaaagaggttgttggtagaaacttgaattctgggtagaatagctacactgaatatgaactccagttaatttaaaagtcctatgaaattctgaaaacaatgtgaagataccatattaaaactttgctaacaggtataaattaacaaaaaaatacttcatatttattgaggacattgcaagtaatgactgccttcatgtatattattttgaggtaggaaacacagttgttatctctattttcctgagaagataattacaggtccaaataattttaggaactagatcatgtttgttaagtacgtgagctgggagtacatttgtttttctgttcctagacatttgctcttatcctgatttcgctttttatttgttcacttaaaaattccaaaaagggccaggcgcggtggttcactcctgtaatcccagcattttgggaggccaaggagggcagatcacaccctcctggctaagatggtgaaaccccgtctctactaaaaatacaaaaaaaattcagcccggagtggcggcgggagcc

SEQ ID NO: 79156 - DNA, 1021 bp, Homo sapiens
agtttgagaccagcctggccaacatggtaaaaccccgtctctactaaaaatacagaaattagccaggcatggtgacaggtgcctgtagtgccagctacttgggaggctgaggtaggagaatcgcttgatcctgggagacagaggttgcagtgagccaagatcgcaccactgcactccagcctaggcaacggagtgagagtcggtctcaaaaaaaaaaaaaagactacatttatataaaaatattaactcctcaatatttgtgcgttcctaaagttttactagttatgtctatctggctctatttctgtttgtctgtcatctatgtctattttctaaagatttgttaaaattaatcttgcaaaatagttccacatacttttcactctttagccaagcaactaagaaatagaacactatttgtactaggtgtaaaataacaagcaggaaactaccttaaggctatgaaaaactgagacattaattggatttctgcagtgatttaaaaaataatatgttgatacaaaattattttacttacagatgatgaagaacgagagcttcaaatggatcctgcagactatggaaagcaacatttcaatgatgtcctttaagtcctaaaggaatgcttcagaaaacctaaagtgctgtaaaatgaaatcattctactttgtcctttctgacttttgttgtaaagacgaattgtatcagttgtaaagatacattgagatagaattaaggaaaaactttaatgaaggaatgtacccatgtacatatgtgaactttttcatattgtattatcaaggtatagacttttttggttatgatacagttaagccaaaaacagctaatctttgcatctaaagcaaactaatgtatatttcacattttattgagccgacttatttccacaaatagataaacaggacaaaatagttgtacaggttatatgtggcatagcataaccacagtaagaacagaacagatattcagcagaaaactttttatactctaattctttttt

SEQ ID NO: 79157 - DNA, 2215 bp, Homo sapiens
acctccgcctcctgggttcaggcaattttcctgcctcagcctcccaagtagctgggattacaggcacccaccaccatgcccagctaatttttgtatttttaatagagagctaataattgtatatttaataaagacgggtttcaccatgttggccaggctggtcttgaactcctgacctcaggtgatcctcctgcattggcctcccaaagtgctggaattccaggcatgagccactgcgcccagtctacacactaattcttgttagcccaacagctgttctgttctatctacccctcatttcacgctcaaggagtcatacctagaatagttacacacaagagggaaactggaagccaaacactgtacagtattgtgtagaaagtcacctccctactccttttattttacatgagtgctgatgtgttttggcagatgagctttcagctgaggcctgatggaaattgagataacctgcaaagacataacagtatttatgagttatatcttagttcttgaaattgtggaatgcatgattgacaatatatttttaatttttattttttcaagtaataccagtactgtttaactatagccagaactggctaaaatttttatattttcagagttgaagttggtgaagacattcatgatttaaacaccagatcctgaaaggggttaaatctactttgaaatgaatctgcaatcagtatttcaaagcttttctggtaattttagtgatcttatttgattagactttttcagaagtactaaataaggaattttaacaggtttttattaatgcacagataaatagaagtacagtgaggtctatagccattttattaaaatagcttaaaagtttgtaaaaaaatgaatctttgtaattacttaatatgttagttaagaacccgtcaagcttatatttgctagacttacaaattattttaaatgcatttatcttttttgacactattcagtggaatgtgtaagctagctaattcttgttttctgatttaaagcacttttaaatcttatcctgccccctaaaaacaaaaggttttgatcacaaggggaaatttaagattgttaaccctgtttttcagaagggctactgttaattgcacataaacatgaaatgtgttttcccctgtgtactaacacattctaggcaaaattcaaacttatagtggtaaagaaacaggttgttcacttgctgaggtgcaaaaattcttaagacttctgtttgaaattgctcaatgactaggaaaagatgtagtagtttactaaaattgtttttctaccatatcaaattaaacaattcatgcctttatagggtcaggcctacaatgaataggtatggtggtttcacagaattttaaaatagagttaaagggaagtgatgtacatttcgggggcattagggtagggagatgaatcaaaaaatacccctagtaatgctttatattttaatactgcaaaagctttacaaatggaaaccatgcaattacctgccttagttcttttgtcataaaaacaatcacttggttggttgtattgtagctattacttatacagcaacatttcttcaattagcagtctagacattttataaacagaaatcttggaccaattgataatatttctgactgtattaatattttagtgctataaaatactatgtgaatctcttaaaaatctgacattttacagtctgtattagacatactgtttttataatgttttacttctgccttaagatttaggttttttaaatgtatttttgccctgaattaagtgttaatttgatggaaactctgcttttaaaatcatcatttactgggttctaataaattaaaaattaaacttgtttcactgttttgctgattctaatacatacacaaacatcacacccatgatgtaaatacattttaacactaaaatctgagtaagtttagcactcattttaagttaagctaaactaaaaaaccaaatttttttttttgaaacggagtctcactctgttgcccaggctggagtgcagtggcgcatctcagctcactgcaacttctgtctcccggattcaagcaattctcctgcctcagcctcccaagtagctgggattacaggcacgtgccaccacacctggctaatttttgtatttttggtagagacagggtttcaccatgttggccaggctggtctcaaactcctgacc

SEQ ID NO: 79158 - DNA, 1083 bp, Homo sapiens
gtcgggaccatcgccggagcctgaggacacttctctgtcgtcacagttaggtaatccccttcgtccagacgccgccgctgcttccaatctcagtcctcctcctcttccagggccgtctgccgggatctcctccccttctaaacctggtcctccagcggctctggcgccttggtaggcatgcactctttggcgcctcgtacgtccactgtgcggagccgctcctgtctggactttcccctgggaacagaaagggagctcacttcccgccagcttcacctcttaggttgcggcctgcgttgtgatttctggggttagatttcactttgctacccacccccactccgatctcaagttcctagtccccaacctctgggtaattaagttagaagtttagctttttttaacctttttggcccacctcatgttttcagcatttcattctttggagtagggtgcttttaggggggcgttgctcttatctcagttcttataaacaccttttcagaatctggaagaagggatttgactaagttctgtttatcttttgtactgttaaaatctcgagttgacattgttactttttcaaatcgggagtggtagtaaagaacagtccatgtggaaggcgtctggtttccacagtggtcagttaaagagtgaaccttattatccttaatattctctgctttctttggattttaaatgtctgtatgggtgtttacttttgcattcttgaccagagttctgtggtaaataattgcataagtaaatcttgtttatttacttctcaccctagtggtggctggatgtgtgaatgatgttaaacacttcagcgtaccttagggaaacctaaagagatctaagagctcgtaaacttacctgagatcctgaaatgaaacgtactcagtagatgttcctccgaggcagggatttatcttcctaatgctggtaacgcagtaccaagatgaatttcttcagtgggtatacaaattagtgacttgaaatgatggatttatctgtgtaattttcaaattgtagattgctttgtctccccattcttcgcccagttttaaattttcgttcctg

SEQ ID NO: 79159 - DNA, 1024 bp, Homo sapiens
actttaaaaattgtcttttgttgacaatattagcacagattgactatcaaataagcttattggtaccacacacaggttgagggttcagagataaggaaacataggagagttaagttttttgtttgtttgtttgtttgtttgtttttttttttttttttttgagacagagtttcgctcttgttccccagcctggagtgcagtggtgcgatctcagcttactggaacctctgcctcctgggtcaagccattctcctgcctcagcctcccaagcagctgggattacaggcgcccaccacgacggccggctaactttgtattttttttctttagtagagatgaggtttcaccatgttggtcaggctggtcacgagctcctgacctgaagtgatccacccgcctcagcctcccaaagtgctgggattacaggtgtgagccaccgcgcctggccaggagagttaagtttttatgcactggctgtgattagaaggggtgtagaatataggagcattgtctcggaaagatgacaggcatggtggggatagaattgtggtgggaagctttggctgcttggagtcctttgggatcctgacagtaaggaatagtgagactgagtgtggccccaagaagaattgtaagaccttaaagacaaatattttaatgaaggtcacaataggccagttgactgtactagggactatgtattttgtgatatccatatgttcctatattattattttattattattattattattattatttgagatgaagtcttgctctgtcgcccaggctggagtgcagtggggcaatcttggctcaatgcaacctccgcctcccgggttcaagcaattctcccgcttcagcctcccaggtagctaggattataggcacacgccaccatgctcggctaatttttgtatttttttagtagacatggggtttcaccatgttggccaggctgttctcgaactcctgaccttgtgatccgcccactttggcgtcccaaagtgctgggattagaggc

SEQ ID NO: 79160 - DNA, 1103 bp, Homo sapiens
gttttaaacaatgaagataatagttaattgaaagaatgaggtaaaaagagcagaagcatgtatagagcacagtgtgggcaggaaactattagtactgcagtgctaagaatgtggcagctggctgggtgcagtggctcacgcctgtaatcccagcactttgggaggccgaggcaggtggatcacgaggtcaggagattaagaccatcctggctaacatggtgaaaccccatctctactaaaaatacaaaaaattagccaggcgtggtggtgggcgcctgtagtcccagctactcggaaggctggggcaggagaatggcgtgaacccgggaggtggagcttgcagtgagctgagatcgcgccactgcgctccagcctgggtgacagagcgagactccgtctcaaaaaaaaaaaaaaagaatgtggcagcaaatagcaatgaaaacagactgggaagtagttattgtgggtttcatatgcaatgctagagtttagtctttattttgaaggcagttgatgggaaacctgggtgagaggaacaggcaagtttgtgcagtgcccaggatcgatttaaaggggacaagaagaagaaatatttcagaggtaaaatcatcaggatttgatgattgactatataagataagggagaggaataataactgtgatgtttaggatggcttctaagtttctggcttggctagttaggtagatggtagtagcattacttgtgatgaagaatatattaggaaaaatacggtaggaagagctggttttggtatgggggtggtatgggaaaagtgaattcagttttgggtgagttgaatttgaggtaccaagtaaaagtgttgagaacgtggttgagtgtgagtctgaaatttagaggcagtagagattcaagcagaattaatgatgcagtttataatgaacatttgaaagaggctcattctccaactccaacccactacctctttaatccttttacctgggctgcaggcaagtagaaaggaaattttattgcccagttttgaattgctgggcaattaactttttgtattcctgaaaggagatcttgaaccagatcacaaccagtgttgtgaacaagtagg

SEQ ID NO: 79161 - DNA, 1031 bp, Homo sapiens
ctggagttttctgtgttggaggttttttactacagtttcaattttagaaattaatggatatggggctaattaggttatctaatgtgtgagctttggtggtccatatgttttgaggaatttgattttcatctaaattattgagtgtacaggcataaagttgtttttttgtttgtttgtttttgtgttttttttttttttgagatggagtcttgctctgttgcccaggctggagtgcagtggtgtgatctctgctcactacaacctctgcctcccaggtttaagcgattttcctgcctcagcctccggagtagctgggattacaggtgcgcaccaccatgcctgactaatttttgtaattttagtagagatggggcttcactctgttgcccaggctggtctcgaactcctgacctcaggtgatctgcctgccttggcctccaaaagtgctgggattacaggcatgagccactgcgcctggtcctgttggtaatactctgtaaattctccttaaaagtatataggatctatagtgatgttcactttttccttcctaataatggttatttgcgtctttttttcctcaaactgctgaaggtttatcaatttactcatctttgcaaaaaatttaatttctggtttttaaattttttttttaattcatcttgatttctggtctgttgaatgctttgcctcttgaggttgtaatttattccttttttgtgtgtcttgcaatattttactgaatgctggatattgtgaatagggtagtaaagactgagtaaataatatttatacctggaacattgcattcgtggacttttagggtagggagttgagtcagtgtactcaggagttaagctgagtttctgttttgttgttgcagagggtaccttaagtgcgccattggcttcaaatttctctcgtgttactttgtgcttagattggtagttggcatgtgggaaggtgtttctgaattttcctgatcagttctcagcgtttggcttatgtgccttggcctcatgagtgggact

SEQ ID NO: 79162 - DNA, 3636 bp, Homo sapiens
tttgggaggccaaggcatgttcctgaggtcaggagttcgagaccagcctgaccaacatggtgaaaccctgtctctactaaaaatacaaaaattagccagacgtgattgctggcgcctgtaatcccagctactcaggaggctgaggcaggagaatcgtttgaacccaggaggtggaggttgcggtgagctgagatcgcaccactgcactccagcctgagagcgagactctgtctcaaaaaataaaaataaaaaaaacacagagattgctgagacccatcccctcccctgagtttctgatcatcagaagtgaggttaacatttgcatttctaactagttctcaaatgatgtttattctgcttgctagtccaggagctatacctgagaactagtgactttagaaactcctaccccaaattgctgtgccacatatagtaatatattataaatgtaaaattcaacatatgaatgggtgctttagtgttttggtgattaaggataaaagtatcctttgaagtttcttttactatcttgtttcattcaatttctgttttttattttaaggatgaaacactagtgcattgtagtctaaatgagctagaagatgcagcacttacttttccagtccttttccaagatgtcatttatcaggtaattaaaatttttttgatgatttttggcctgataggtaacattctgataaaaaaaacttttgtattttttttgtgtgtatgtgacattaaatgtgtttttctgtagaagtataatggatttcatcaacattttaatgatttattaacaaaattagcatcatgctagatattacataaaacaacattaatttgttactccaaaaatgctaactttcttaccttgagatctcagctagtttcataatctgtttgccagcaggtggaggcaggagcactgacatcatagatcctcaagaggaacttgccaggttaactcctggtgtttttgtttttgttttccaaaaatccaattaatacaaagaaaactcattccttgttgatcattttatttcctatagtagtaatgtggtctgtgaaaattacactttagtacatctcttttataattaatcttagaattccaggacactcttctagttattgttttacttagggcattttagtttgagcatttctctctcatctgtgctgatggacaggtaacagtgcaaaatacaaatatcattaacatttcactgtggattatgtgtgctggccatagtttttactttaaggtttttccattattataagattgagttaataatataagtgaatacactttgaaaattgcaaagtacgtttctgttttggaggttgttatttaactagcattatttgcattatataatagttgaaagattgggaatcgaaaagtttgttgtctgtcaagagggagccagcctaaagattaacttagtaaagtcacagagtgcttgccatgtggatgatgaaaatgtgtttggttgtttatgtgctcttaaaggcagttagaatgtggttatagttttcttggcagataatagttgatgtctcacagaaaccgtgaaatttaagagttaaatagaagtttgtggttcatggctactttaacctactttgtctagtaatgagttgtaagaggatttattttagttgtcagttctagttttaacctagggtaggtattgtagctatggcaataaatatttgaatactgaattcactttttatgtaagctgattttagtcctgatgtataatcgggggtaagcaaaatgtacataaaattaaaagatttaaagatttttctgttccctttcaaaactgatgattatttggtttaaggcaagtatttttcttaagaccttttttatcaaatttgttgttcttgtttagtggactttaaggacaggagtccttgtggcagatgtaaatagtatagtgatatcttagttttctcttttaagctcgataaccttgttggggtttttctttgttttttgcttttgggtgtttttcgtgattgcatttgaaaaaaatggctttaaggctttgaatttggaaaggaaagctattaattgaaaaatatagataaacaatgattttgagatgacttcttaagcttctaggtttgaaattgaaatttatttcttacagatggtttttgttctgtttatgtaattcttagtagtgaataagaaacttaagtaggtaaatttgattcttccctttcatgagcgtttctcttcagtatgatcataaaattgaatttttttcttactgcttctaccatttctgctttaactctctttttaaagttcttattatttcatgtggatctggatagttgtcttattttgaataaaaagcttctagcagcatatatgactaattaaaatactgtatgtatgtactgcatctacctctgtggaattcagacaactctttttcttatgtattctgagttacactttctgaaactgaaaaataaatgatctagcctaaatgagagcacagagcaggtagtttgaaccttataagctatagagatgattgcactttaatacgatttagttaccatatcacagacagagtttagttactttttagtaaatttttgaggatatccgtagttaatattgggtacattcccttggatttcttattttggcatagccattctgtcttttaaaaaataaatgaagaaatctttgggttagggttcccccagttttcagaccagcaagctccctttaaacagggaatgatgtcttttaaactttcagtggtgttgtctccatctactggcaaagaagaaatatacacaagggtctgagatgatctaagagatattggagaaaccacattattaggtaagatgtaacttaaatctttaaccactgtactatgatgtggcccacttaaaggtagaaatctgtaaagtactgcatatactcttattttttaaaaaatttattgaggtgaaatttacatgacaaaattaaccatttttaaatgaacagttccatagcgtgtatctgtattattcttgaatgttagttttatagcatttacatatatatgtatatatattttatatgtaaagatcaaatttttcatctgaaagccagatggagtgtcctcttgggacttattttacgttttttttctttctgtggtatatttgttatggttgacctataactaattttaactctacatgttatttctgtttcatttcaaaataatttaattgtattatatatgttttaataattgtctatatcaggggttggcaacctttttctataaagggccagttgtaaatattttaggttttgtggtccctgtcatgactgctttttgtgctattgcagcatgaaagtagccatggacaatacataaatgaaaaagcatgactgtgtcccagtacaacgttatatacaaaaatcagtggcaggctgcatttggccaccatagtttgctgattcctggtctaataattatgagagtatatacagtaaatttacatattcaaattgtaagtagaagtaagtaatcaaatgttcatcaaaattcttgtaaatgtatgtagaaaatttaaattagatccacagtaatctgg

SEQ ID NO: 79163 - DNA, 1066 bp, Homo sapiens
attaaaagaaaacagatgtcatactctaaagtggatgattccttggattcatcattttttaaaacctattgccacaatgtagcaataggttggaaggatgtcatggaaaaagtttcaaagatgtttctttttgaaagttatggtctgccgggcgctgtggctagcccctgtaatcccagcactttgggaggctgaggcgggtggatcacgaggtcaggagttcaagaccagcctggccgagatggtgaaaccctgtgtctactaaaaatacaaaaaacttaggcatggtggcggagccctgtcagctgagctattcgggaggctgaggcagagaattgcttgaacccgggaggtggaggttgtagtgagctgaaatcgcaccactgcactccagcctgggtgacagagtgagactccatctcaaaaaataaaaaaagaaagttatggtcatattatctgggcctaaaaatcatttagaaatgtttttcctaaaaagactcacatgtaatttttgggggggtcatactgttaaaattatctatgatattagattaaggtttgataaactagtagaaattactaagtatataacttgaaattatataattcgatgtgagttttaatttagactttaccacataatatgtagaatcagtttataagtggattatcattttaatgactgccttttttatttttattttttttattttttaatttttttgagacacagtcttgcttgatcacccaggctggagtgcagtggtgtgatctcagctcagtgcaacctccaccttcgctgttccagtgattctcctgcttcagcctttcaagtagctgggactacaggcgtgcaccaccaccatgcccagctaattttttgcatttttagtagagacggggtttccaccatgttggccaggctggtcttgaactcctgacttcaggtgatccgcccgccttggcctctcaaagtgctgggattacaggcgtgacctaccacgcccagccaatgactacttttttaaaaatccagctatgttaactattaatagcctttcagtac

SEQ ID NO: 79164 - DNA, 1055 bp, Homo sapiens
acaacacctttttttttttgagacggagtctcactctgttgcccagactggagtgcagtagcgcatcttggctcactgcaacctctgtctcctgggttcaagcaattctccggtctcagcctccccagtagctgggactacaggtgcatgccaccacgtccagctaatttttgtatatttagtagtatatttagtagagacagggtttcaacatgttagtctggctggtctcaaactcctgacctcaggcgatccactcgtcttggcctcccaaagtgctgggattacaggcgtgagccaccatgcctggcaccacaacactcttttacagatattctgatagattttcattttaaaagttttgcataatgaacatgttcataaatctgtatcttcaagtagtagtcaatcttgaatagttttttaaatataattatttcttattatggctttaggcattatttttaaacttttgacattttccacaatatatttggtttactgagaaaatattaaaattatttgtactataaataaaatattatcgatttgaagaaacatgtatactagactgaaatgaagcttttggcctttgggagattacataattttgaagagctgcaagtttcaagaaggtaaaatactaagtagagaaaggagtggattaaggaaatgtagaaaatgggaagtaggcagctcaggaaaggaatctttgtatgagagtaaaattagaagaaaaatggagctaatgctatttgtagaatagattttgaagcatttggaggcatgtctatgtgtgcatctgtctgtttttgtatctctgacctaacacaataaagtaatggtagtctcaagagttaaactcattgtattatatgtacctgacagatgttctttatttgttcttaccagacagtacgtagtgcttcttgacttatatatttctgttcacgcttacctatatccaaataacttagacgctgctggccttatgtctcatctctacttctgtttctgagattttcctttgcatcacatggcacaaccccatgtgg

SEQ ID NO: 79165 - DNA, 1045 bp, Homo sapiens
aaattacataccagtgaagtactgtatgctgctattagtaaaaatgacttgatcatcagtgattattattatcccaccaaagagattggtttaagtgatcgcttgtatgtgaaatatacttggtttgagtggtacttagttaatatttctatactttaaaacatgaactttttcattataatcaaagttagaatacagcacatcttaaaaagaagtggtttcccattgtatgtttatttgctgaaacttatctttgtatttccttaggtttatgtgagattaagaccatttttcagggaattcctggaacgaatgtctcagatgtatgaggtaaacatgcttaagctaattacatatgtatttttattttattcaatatagtacccatatttagaccatgtataatgattacttcttttcccctgaatttatagatcattctttttactgcttctaagaaggtgtatgcagacaagttactgaacatactagaccctaaaaagcaactggtcaggtaaatttaattaagaaatagtggaaatgtctgtcacactgatctatgaaattactgattctatttcattttaatggccattttcagttggctgcatatgtgttgaatggtgaatataaatgaattttttaagcccctaaactctttaaaagagttcctaatgatggaactccagacagacgttctttaaaggatacaaagatccagtgcctttattcactgtgacatctatatcctcatttcttttgggattggggaagacgggggttgggggggttgtgtggaatttttccacgttgtgcatgatgtttcatctccatatgtctctgaggtaatgcatgttaatttactttttaatggcatagagaaataaaaattattttttaacagaaaggatcaaattaagcccttgctttttttgaaagcaaatttatcttccatggaaagaaaatgttacatgaatctgattggaaattacagtgggtttagtcactcaggttatcctgactggactcagttccttgtgtgtgc

SEQ ID NO: 79166 - DNA, 1260 bp, Homo sapiens
ctccatctcatatacaacatttagcctaaattttaaaacattttatcccagagattattcaccataaaataaatatggcttgcattcttgtttttaggctcctcttcaatgaaataccattaatttgttaagtttctactatatttcaagttatcatcctactcgatgggaatagaataatgaatgggagatatggtcactgtatttaaggggaaaaaaaagtataggcttttctatattctctttagattggcagtgtcccatcattcacagtgcctacctagcattgtactaattgtaactatttcttgaaggaataatggaatattttatttatattaatgatccttataaaatgtattttaatggaactttcttgtttagttttatatactctgagaagaaatgacactgaaaaaccaataggcttcaatttatttccttatcctctgtctcttgcactattgagttgtcaaagaaaagtctggtgacattacttttcaaaggaacttttagatcagtgtttacttaataaatctttgtttattttttaactttttccaaactaggtaaaatataagtaaaagaggatttaattacttatttattgttttagctttctaatggaatccctatagaaagttggtttatggataaaaatgacaatgaactcctaaaattgattccattcctggagaagcttgtagaactggtaagtgtagcttatctttttctgttgtgtttttgttagctcaactatattgaaataaatatttttaaatgtctttgctttgtgtgtactgacttataaagtcaactgtgagccaggtcacaggtgccatcataggcgcctgtagtgccagctactttagagtctgaggcaggaggattgattgagcctaggaatttgaggtcatactaggcaacatagtgagactccagctctttaaaacataatgatgggccgggcgcggtggctcacgcctgtaatcccagcactttgggaggccgaggcgggcggatcacgaggtcaggagatcgagaccatcctggctaacacggtgaaaccccgtctctactaaaaatacaaaaaattagccgggcgtggtagcgggcgcctgtagtcccagctactcgggaggctgaggcaggggaatggcgtgaacccgggaggcggagcttgcagtgagccgagatcgcgccactgcactccagcctgggcgacagagcgagactccgtctcaaaaaaaaaaaaaaaaa

SEQ ID NO: 79167 - DNA, 5418 bp, Homo sapiens
tagccaggcatggtggtgggcgtctgtagtcccagctactttggaggctgaggcacaagaatcgcttgaacccaggaggcagaagttgcagtgagctgagattgtgccattgcactccagcctgagcaacagagcaagactctgtctgaaaaaacaaaaatttaaaaaagaaatcttcaacgaaattcttttcaaaatcttaaatttaactgcatctgtgtagtatctctatttggcaaataaaatatgtcataaaataaaaactggtatgttttctctgcaaggtaagaatgtatgttatgaggatcatatctttgaaattttatgcctttttaaaaattgtcttttttccacgcagaatgaagatgttcgaccacacatcagagacagatttcgcttgcatgatttgctgcccccagattaagtacaaagacttgtcaaatcactgaagggggagagaatgcaggacccttttggactaagacaaaaacattgccattactgttgaaattttgcatttttgtaccccgtcttgcttttcttatctttggtgcccaataataattaagggttacagaaagagactttatctatctcagatcgaatacatatagtaggtaggctaaaacagaagagtctttagaactagtgcaactccagtgaaattttttatgtacaggacatctgcagtttataaagaattctgtttctgccaccagcagtttgacctgtagtcacacaggattttatgataataacagagatgaaaatggacttttattttctctctgtttggtgctctaagtgggtttgtagccacttttctgttactttatgattctcatttcaacaggaatggccagtaaaagttgttttatttttcctgttaaggtttataacctttttacatttttgacctgtattagattagaatttcattatgcattccttttagttgaggcgcttcatagttttctggagatagtcaatttttagttttttattatacatttgaatggccgttttcctgctttgtctgcctgcacattgtatatttgtttaaaaatattctctacttttagtctatgtaagtttcatttagaaagacatgcatttatattttgtttctgtaatattctactgtaggtgaaatcttttcaaaaatcaagagactgggtagataagaatatatgaatgactaatatacaaaagatttaaaccattgtgatggcgtatattctcaaatggtaatatcttgcaatggcacacagatttaatggataaaggtatacctcagacttcactgtgctcacaaatctttgaggagaaagtttggtcacctgtttggcttgatttagttactgctgcctttggttttctccaggaatgaagtattcagcacagtgactcagtatttttagttattttgcatgggctggtagtacctctgttatgctctcagttacaatcaatttaaaactgtataacagtcttggtacctaacagtagctatgcataatcctgtggcacagtacactcccaagccaccaatgcagttaatatgctctcatagtggtttttctatgctatatgaaaatagtcttcaagccttggttctctaatgcagctaccacaagaggttgatatttttatagtggcgtgtaatctccttttcgggaggctttttatggaaggtagaatttgtaaaagttcgtatgctttgcctctcaactgcattaacatgccacaggctcagactgtttttgtgtaaaggatgtcaaagaacggcactttttctaaagagaagtttgatattttgtatgcttgttaagaaagtacagtattggaaattaaaggtggacaactgataattgaggagtatgtcaattaattttttatgtatattacctgtttacttgtacaacttactgtacaaattacatgcagcttcattttcaaatgaatccttaaaataaggaaatctttttaggaaaacatttaatttttgtatttttgattttaaaggcatgagttatgtcaattttcagtgtattaatgaagattttaacttttcatcaggttgagtgttttcttactatattatctgttgtgtatgtagttagcatattgtgtcactgaactgtttaaaaatctagcatgtagagcaagcctgttttgtggaaaatccttattcattaaaaaaataatcatggcagattttctgcaaaaaaaaaacaaaagcatttgcaattcagaatactgatttttttaattttatttaaagaaaggtattttgcttgcaggaaaaaaatactacagattcattttaatgagaatctttgaaatgtatttatctttagggcatctgggcatctttatgctgtttgtcttctgtctttcttgaaataaaatgtacatacgttacctttacatatgctcttgctcaaaattgtgaacctagttacatttctccctgctcccttcctttttatgctcaaacagcgaaacccaaaacttaaaagatctgaactttcagcatgcattctgattgctgaaagatttcctgatttagtgcattctcaaaagggctttcccataatctaaagggaaatgtaagcacctatactcttgtgcctgtgggcacttcaataataaaaaccaactttttaaactaatcatcttttatcaatgataaagttgttttcagtcccacactaggagagttcctttaagtcagctgatcaagcataagatacttccgtaaagaaataaactaagaaaattttttatggcttgagaaaattccttgaggccaaattaatatatttttctttgttattttatttgagtcattttaaatttgttaatacaaaatttaagataatttacagagacaatttatccagcttccttctaccttaatacaatgttttgtcttcccattatcctctcttttctttatctgttggtagatgtaaaaaacttccatttagttaatcggaggtgtgtattttttaaattgaaatgtgcccagccccttcagctcacacaggaaacatgaactcttaaaaaactgactagtaaatgcaggagaggtggatacctgatgagacacagcgaaagtgacctgtatacacattacaactctggagtacatattaaagtcgtgctatttccagtggtaaatgtctgacttttaagacattcttttaaatatttgtatcattgttaggatgttttaatcagttgttttttaattccatgtaatatatgtagccctcatcagatttatatcaccatatttctccttgtgtcctaagagaattgatgacaattcgtaaccataaattgttttatattagctagtatgtatatttatttttacccaatggctttatctgtttcccaaaatttgtttgggatttgttgaaagcattgtgtaacttctataaacggctattttcttgtaactgtcagtgaaatgaatgtgtacattgttttcttgtatttctctgggttgttttttgtttttttttccaagggttaacatagaatgttttttttaaaaaattatctttggccaatgactttttcatctagatcttactttcattcaaccttctaaagaagttcgtttctcattgttttgttctgtcaacttgcctgaaaaacagagacttcatctcatcaatgaagaaagcatttcattattcctacagatctttcctgcgagcacagaattcttcataaggaccagatctcttccatgtctgtgtcaatcacataaagctaaaatgtaaaggacattgaagcctttatttaattgtactaatatgatggtgttatatactacatcattagctagttaaggttttctgacctgacttctctttgtcttcctaggtatttatttgttatcttttaatcttgtgtatctaaattaacttagttaatagttacccaccgaataactatgccaagcaactagtaaagaatgtttattttatttccccttataggggaagagtggactgggaacaaaaatgtatgggccaaaaggccttagggttgtcattcattgactttcttattcctctcatgagctataattgagtatagtatttttttagtgctgatgtcattacttctcatgtcttcccctgagttgaaagcctacgacaaacatgtataaaatacatttaagaattttcagaatatgaaccacaaaactcagtatcttatatttaaatgctacttaagttattattggaatccaagtctcactaactagggtacatttttataaaatgtttctctgtatcttgaattgaaattacttgcccagaggcaagagttctggggatataacatgatttgagatcttttttaaaaaagggtggggcggcgggggagagagcgacaagtttatactagtttatgcttttgatattagtattttaagatacatcagttgatcccgaaacctgaccattagaattactctgaggagcttttaaaatagattcctggagcctacccctggaaaattgtctcgctggatctcgagaggggcctgagagttctggctttttttttttgtttggttggttttgttttgttttgttttgttttttctttaaagctctcctggtgattctaatagccagtattgggtaatcaatgttttagctaaatgtgacactggtttgagagtaggcaacaaaattaaagttcaccagacatctctttgtggtagagtttttttttttttaaactgggaccagatttcacagagcttattcaagatacatggaggaataataaagaagattaaggctactgctcattatcatttttgtctttcatattttttaagggtttgcatttctaggacttggaatagttgaccatatacatagctaaaggacatgtccctgaatgagaccattatatatattatctgtaaaatatttcactatttttttattttataaatctttgtagaaataagcaatgaaatactactttcatcttttgaaatgggatttttcaaggcagtgtccttttggcattaaggtaggggggagttaatattctctctgccttgtttccacgtgaatcaatattaaagtcatggacattttaaaatctcaatttaatttcttcttatttactatgcagtatagccgtgaacaagtaatgtagatttagttttctcatcttcaaatgccctgatcaccctacctcacagggttgttgtggggataaataaaacttttatggaagcacttctctttgatgatattttatcagccatcagaaacaatataatttctaacaacatttgtacagtgcttttttttgtttagaagcatatctttttttcacattactttcccttttgatgttgaaaaacat

SEQ ID NO: 79168 - DNA, 1545 bp, Homo sapiens
tcagccccctgtgcccctccctctgctctttccgcccctccctccgcccccctccgcccccccctccgcctctccctcagccccgcagcgccaccgaccgcgttccccgcccacttcttacccgcgcgcgtcgccgccgccgcctgagggggcgtggcctcggctcggcgcacagtcagccacggtcccatcctgctccgcgccggtcaacgagagcaaacccagtgactcacctccgccgtgctaactcctcgctagctctccctctcacacacgctcacacccggctcgagatggcggcggcggcggcggcggcgggggactcggactcctggggtgaggagaagttgctggggcagggcccgggccggcgccggccccacgcagtggcaggcactaacacggctcgctttcttccgtagacgccgacgctttctccgtggaagacccagtgcggaaggtggggggcggcggcactgccggcggggaccgctgggaaggcgaggacgaggacgaggacgtcaaggtgggtgcgggctagggcgccgggcagcgcggaagcgggctggcgctgttgccggccgactctgggccccgggtcgctgccggggcctgcgggccgtgggtccaggcgcgagcatagggcctggcggtgctctcttcccctccgcttgccggccatgtgtgggccgaagactggcagcgtggcctcccggactccctcgccggttgagagtctgctctccggcgtggatcccacccgccggctggcgacgaaaggtgacagcatcggccgggtcggcccacgtgcaagcttcgcggtccggagcctctcgcaggaatgagaccgggaagttgggaattgagccttgtagcttatccatatggaaagccttgagactcgcctgtcttttcgagctcaagtcagcccagggccagtaactcatttatgaccctgaggtctacttatacagtttgttcgagggattagatgagtgaaatattgtagttgaatttcaacctttttttcccacacgagacagctagaaacagtaaagggaaataacttttggctctcccttcccccaccctgtggtaaaaagaatgaactgaccactgagatagcccgcagttagtggacagaaacccaggtagttcacaccgtgacctgagaaatggagagacgacagttactcaactacacacatacgacacctaaggaaatattgaagatttggtggtggttgtagatgacgggcccgtggttttttgttgttgttgttgttttgtctgtgccttgtagataatcatttttacctcagtcgtttgattttgaaaactccgaagggttcattatacagctgtaagtgacatttacttctacatggtttttttttttttttacagtagttacagaagtctcaaatccaaaatgttaagactcttattaacaaagttctcaaaatcttgttatatttgtgcagataaagttttgtgtgaaatggaaaatgatttttttttgtggttttgcctaatttagtgaat

SEQ ID NO: 79169 - DNA, 1059 bp, Homo sapiens
attttgtatttttagtagagacggggtttctccatgttggtcaggctggtcttgcattcccgacctcaggtgatctgcctgccttggcctcccaaagtgttgggattacaggcgtaagccggccttgattcttttttttttttttttttttttttgagacgaagtctcgccgcactgtcacctgggctggagtgcagtggcacaatcttggctcactgcaacctcccactcctgggttcaagtgattctcctgcctcagcccccaagtagttgggattataggtgtctgccaccacgcccagctaattttttgtatttttagtagagacagggtttcactatgttggccaggctggtctcaaactcctgacctcgtgatccgcccacctcagcctcccaaagtgctgggattacaggcatgagccacgcacccggcctgactcctttttaatagtgggctttagaattatatagacttaattcattaaccaggcttatgttgtatggaatactacttgaaataaatgagctattggccagagtataggatgctttttacatttggggggaagtaagaactataaagttctctcagtttttatttattaataactgaatcactttcagagaggctattgatttcagctaggttgtcctaactgctaatggagaagctttcttatgaagttagataagttgatatgagggttcatatggaaaaacaaaacatgcaagaaaggccaagaaaacactaaaaaatctgaaaacctacaaggaaggactagctctagctgacattaaagtaaagcctctgtaattaaaacagtaccggctgggcatggtggctcacgcctgcaatcccagcactttgggaggctgaggatcacctgatgtcaggagttcgagaccagcctggtcaacatggagaaaccccgtctctactaaaaatacaaaaattagcccggcatgatggtggacacctgtaatcccagctactccagaggctgaggctggagagtcacttgaacccaggaggcagaggttgcagtaagctgagat

SEQ ID NO: 79170 - DNA, 1056 bp, Homo sapiens
gatcaaaagcccagaaatagaccaagtacatatgaaaatttagtatatggtaagtcacaaggtatcttaaaatgttttttgctgcaatagaatgcaatagactgggtattgtataaacaacagatttatttcttatggttatggaggctgagaagtccagtatcaaggtgctggcatctggcgagggccttcttgctctattatcctggggcagaagggcaaaagagcacaaaggattgcaggaggtgtcagaactcatccttttatcagatatctactcctaatataaaggtattaataattcattcatgagggctttgcctctaatcatttctaaaagaccctacttctcaacactgttggattggagatttcatcacatgaactttggaggacacattcaaaccatagcccagggaaaaaaaccattatttattaaagggtttttaataaatgatgctgtgacaactgggtagccatttgggaaaaaaatgaaattagatccatgttgcatatcataacacaagaaaaaaactccaaatcagagatctaaataaaaaaaaaaatgaaaccctatacattctagaagaaattgtgggtgaattcttaggtgtaagaaaagactttctggctgggcgaagtggctcatgcctgtactcccagcacttcgggaggctgaggtgggcggatcacctgaggttgggagttcgagatcagcctgaccaacatggacaaaccccatctctactaaaaatacaaagttagccaggcatggtggtgcatgtctaatcccagctgcttgggaggctgaggcaggagaattgcttgaacccgggaggtggaggttgtagtgagcctagatcatgccattgcactccagcttgggcaaccagagcaaaactccaactcaaaaacaaaacaaaacaaaacaaaacaacaaaaaaacaagaaaagactttctaattgacttgaaatccatccagaggcaatgaaagaaaagactggggctaggcacggtggctcacgcctgtaattccagcacttcgggaagccgag

SEQ ID NO: 79171 - DNA, 1028 bp, Homo sapiens
aaagctatcttttgtttgcagataaggtagcatacctgtaaaaccctagagaagcaacgataaatctaacttaagtgataaatgaattcagtaaggtagcaggatattaacatataaaaaagccaatagtcatttttgtttatttgttttgagacagggtttttatgatagtgagttgcctaggatagagtgcagtggcactatcatagctcactgcagccttaacctcctgggctcaagtgatcttcccaccttagcctctcaagtagctgagactacaggcacatgccacgttgcccagttaattttttaattttttttttttttgcagagactgggtcttgccgataggtttttatacacaaataatagccacctagaggacataataggaaaacaccctatttataatagcaacatacaagatgaaatacttaggaataaatctaaagagaaatgcgcagagcctctaatagggaaatcactttaaaacacttctgaaaggtacaaaaatgtacttgatcaaatggaaagacagttcttattcttggttagggcagctcagcattataagatgtcaattccccctacattaatttataaatttaatgcagtacaaaaaaataccaacaaacatttctctggagttagtcaagttgataataaagttcacatagaaaagcaaacatgcaagaattattaatggaagtccttttctttaggataactgggatgacgatgatgatgaaaaaaaagaggaagcagaagtaaaaccaggtgagccactggggcgcctccatttttgtttttatgtcttgctgagcatttgtgacttgtattaagacaaatgacagaacgctcacaaaatggaacattttggtatttagaaaccaagtgtccttccattcccactttattctgttttccctgcaacttttctctatcgcctcaaaatataatcagattagatacttgctgtatttctgtatgagtgcttgttagtaggaaagggtagaggttctggcatt

SEQ ID NO: 79172 - DNA, 3871 bp, Homo sapiens
ggaggctgagatgggcggatcacttgaggccaggagttcaagaccggcctggccaacatggtgaaaccccatcactgctaaaactacaaaaattagctggatgtggtggtgcacgcctgtaatcccagctactcgggaggctgaggtatgagaatcacttgaacccaggaggcagaggttacaatgagcgaagatcatgccactgtgctccagccttggtggcagagtgaggctctgtctaaaaaaaaaaaaaaaaaaaaaaaaactaaagtgtttagaagaatgcctgaaacagtaattaccagtgttcacttttatttgttattatatacgcttatttaagaattcgtacaatacagaaaggtactgagtgcatcataatccctgtgctttttaaaaacttttgtctcattttagttagaagaacccgaagaacctaaagtgctaacaccagaagaacaattagcagataaactgcggctaaagaaattacaggaagagtcagacctcgaattagcaaaggaaacttttggtaagacgggattatgattgcaatacagtattaaactgttacaggtgaagacccagaaagttcagaaaacatctccttttcttaaaagaaacatactggctaatgtagatattagaaagcagtttttaatctctgtgtatatttgagatttcattacatgttcagatttttgaataattgttttgagtaaaagattattaagataagtcatttatagcaatgcaagaagggcaaaaaggagtagactcagatgaagtacactactgcatagaatatttttatcagctggatgaaatttgcatgaaatgtgaggtctgtagctttgaaatggactgtagggctgtcctgttgtcttaagacttagacagtaggatgttgctccaggtgagaggcatgcagcttttgctgtgccttcttgtgctcagtgtcatttccttctgcaacccttctttgcccttaccatgccctatctttagagggcctccatttctttgtgcggtgtctgcagctgtggttagtgcgtgagataaaagtgcaggatcctataaatagataaattcagagtgttccagagtaagagacatggctagagaaatagtcaaagccctcgcttcatttaaccaagttatcgttacctgttgagtacttttcagagtagaagatcatgttgaaacagttaaatcactgaaatttataaccaagaaggaaagctctagttattctgatacccctcccccactttcatactttctctactctgaaacagatcaacaggctgactgtagtgattgttttccttttcatgaggaagtatgaccttatctgtcagtggatctgtacaaataccaggagttgatgtgaatgctcctgtgcaccattgtatgcttggcaggtcttaactgcactcatctaattatagagagctcttggctgttaatatgtgtcttcctaggatggtaaaagctgcccatgtgtttattaaagaggcaggtttatgaagtgtgcataaagcctagcatgggacacctgttatagactaaaaggtaaaaacatgcattcatatagtcattgttaataggattttactgttgtgtttctcatactaaaataccacatgtaatattgttaataactaatctacttgacatggaggatacagaagcatacttatcttagtgtaaaactcatctaggccagatttttttttttctaacagggtctggctctgtcatccaggctagaggacagtggctgagatcggctcactgcaacctctgcctctgggctcaagccatcctcccaccttagcctcccaagtagctgggactacaggcgcatgccaccacgcctgggtaatttttgttttttggggctttttttgtagatacaaggtttcaccatgctgcccaggctgttgttgaagtcctgagctcaagtgatctgccgccttggcctcctaaagtgctgggattacaggcatgagccaccatgcacagcctaggccagatttcttctattgggatttaacatgtttacccccgcttagcttctggagttagacaaatactttcacaggatccatctttgtttcttattctttttgttccctctctccccactttactgtgggggtgttcttggacaagaacagagtatcccttttgtaatgtaatatgttgtgttttgtttttagagaaaggttcttgctcagtcatccagtctggaatgcagtggcatgaccatagctcactgcagcctcaaactcctgggctcaagcaatcctcccacctcagcctcccgggtagcgagggctacaggtgaatatcaccacacctggctaattttatttatttttttgagacagagtctcactctgtcacccaggctggagtgcagtggtgcagtctcggctcattgtaacctccgcctcctgggttgaagtgattctcgtgcctcagcctcccaagtagctgggattacagatacatgccaccaccatgcctggctaatttttgtatttttggtagagacagggtttcaccatgttggccaggcttgtctctcggactcctgacctcaggtgatcggcctgcctaggcctcccaaagtgttgggattacgggtgttagccactgcgtctggccacacctggctaattaaaaaaattttttttgtagagatgaggtcttgctgtgttgcccaggctggtctcaaactcctggcctcaagcgatccttcctcttaggcctcccaaacaaaacactgggattacaggtgtgagccactgtgtctggccttgatatattgtttttaaatgaataaaatacttatttataaagaaaacctgttatatataaatagatgtcaaaatactaaaatgacaaatttgtgatacagaattatatgcttccttatcgatgcattaaatcaggtgtagtggcacgtcaaataatgtcatttgagagtaattatgactgaacaatattaatattgtaagatatctgtaatggcaggagagtgtgatctctcctggtaagtcaagttttgctaataccactgtgatttgttgccagtcaattgaaactgaaggaaatgctgaattagaggttaataaagatgtaactttttttctgatttaagtttgtaacccccctcccccctcacccagccattctatccagtgactccagtggctccaggttcagagcccctgctttagaatgaaacgacagggttattcagatagctattggctttgtaaggtttcatttttaaaaatcctaacctcctgatacttttcagtgcttcttttctcctacaggtgttaataatgcagtttatggaatagatgctatgaacccatcttcaagagatgactttacagagtttggaaagttactaaaagataaaattacacaatatgaaaagtcactatattatgccagttttttggaagtcttagttcgagatgtgtgtatttcatgtaagtaattctaatttctagcccctctgggtagatttttagtaggatgttctcttcaggaggttgaaggttattttttattttcaaggatactataatacagactcatgatttgctgtttttagcaattaccttgtgaatgttgttctgcagatacagtgaatttgagtgctggatctttttgtttgtttgtaggggtaagaggacttcttgttttacaatggcttccctaagagatacctgggcttgtcagcaaagcagctaataaaacactggcctattctttttatctgattatcacttgagaggggctgggaagtatcttttgagggaaaaggtctctggcactgtaggat

SEQ ID NO: 79173 - DNA, 1074 bp, Homo sapiens
cttaggtgctaatgtgcaaatgagggaacttggatcttgctgccaaggggttaaaattgggaacctaagttgctactaaatcatagttcaaaacctaataatgttgtcgttgttgctatctgatttcatagcagcagtcactaaattggaaacaaaaggttgcaacgtgacaaaaaaaattgtgtagtatttaccagcaccattcagtaatacagccttaaccatacctccttgaactacttcataacttgtcaagaaaagcagtttgcagcaagggcatgtggtgtgcacctagtattaaaattgctttgtcttaaaattgaacatgaggatattaaaaatacattgtgaagaagactgcttatctcagagtgaagatactgcggctgaaaagcactagtttgatataaaattaaaatgaccaaaaccctccaactttgaagctaaagaaggtaaacctttccattattgcattacatgttgtggaatctctcgagtgcaaagactgtctagttatttatcaggctatttctactgatgaactgcttcaggtgggggagggaaacttatttttatttgcctgatttaagtgtctgagaaacaaatctttgttctcttaggctgcaatggaacaactttaccagggttttggcatttcctttcctttcctttataaaacatgctcagcaaactgcaccagttaactacagtttggtaaattgttatgttaacaattatgacatctgcaatgttttataaagcaactaatttaataaaatcactgttgtgaggacttaaattttgtgttacctcccaagagatactttttgagagtatagaacacagctcttgggagtacagttctctacgttctctactaaatcttaataaatgcttgacatagttacagctttaaaacatgagtgatttgccaggtccttatgttgtcaccatagagcaacaaaggtatagggctgccttcctcttatttatttggggacattattttgttatttagataccaaggcctaattaattaagtacctataagaactatttatttggagtaactga

SEQ ID NO: 79174 - DNA, 1044 bp, Homo sapiens
aaactctccactctaaaagccctcaaacaacctcagagctagacaatccactttcagcctggctcagggtttttgcccctgccagagaaggcatttaagacagtagaggcaggagacagaggctgaggtggaggaggacaaacttattttcttcagtatttagcatcggctgggcacggtggctcatgcctgtaatcccagcattttgggaggctgagatgggtggatcacctgaggtcgggagttcaagactagcctgaccaacatggataaaccccatctctactaaaaacaaaaattagccgggcgtggtggtgcatgcctgtaatcccagctacttgggaggctgagacaggagaatcacttgaacctggggggcggatgttgcgccgagatcacgccatttgcactccagcctgagaaacgagcgaaactccgtctcaaaaaaaaaaaaaagaaaaagaaaaaaaaaatatatggcatcagcatattcacggactgatctgaaccagaatctgaagccactggtgacagtgtatgtcttggggaggtccctaattccttccctccattttcccaagagtctaccctgactgagattattcctgagaaaagctgaggctcctgaattatcagcagtacaccccatcctggagctcattactttgcacctaccggatccaacttcttcctcattagcacttcaaagtagtgctttttatgcagcaaatcaaatatgtatgtcatctcgttgtaccttccaatgccagtgaggagccgtacctgtgaagtgggaggacagctcgcatcagcatcacctggagtctggagttctctgagccagacaactaccatcagtggttgctttcagatgccaagctccaggaggagaagggctaatttccaggctaccatgcttagctccctcccatgtacccaacagggggcctctggaggattcagaaatgtcagtcactgggccaccactggctgttcttttttttttttttttgagatggagtcttgctctgtcacccaggctgg

SEQ ID NO: 79175 - DNA, 3119 bp, Homo sapiens
cagagtagaaaaatagttttttttgtccgggcacggtcgagagcagcctggacaacatggtgaaatcccatctctactaaaagtacaaaaattagccaggtgtggtggtgtacacctgtagtccccactactcaggaggccgaggcaggaggatcccttgaacccaggaggtgcaggttgcagcgagcggagatcacaccactgcattccagcctaggtgacagtgagactccatctcaaaaaaaaaaaaaaaaaaaaacagctttttatttttcctttaaccacattactatgttaaacacgtatattttccccctgatatgtattactcttgaaatgctgtagtggcattttattgactaaatgtttatatccttttctctttggcacaggtccagatgtgaaaaagctttgcatcctttgccagattttgaaggatacatccatagccattaatcatacaattattaccagctacagcattgagaatcttcagcatgaatgtagatctattttggaaagactgcagacagatggacaattcgctttggccaggagggtagcagaattagctgagttacctgtggacaacttggttattaaagaggtatcatcggtctttttttttttttttttttttagatacggggtcttgctctgtcacccaggctggagtgcagtggcgcgatctccgctcgctgcaagctccgcctctcgggttcatgcaattctcctgcctcagcctcccgagtagctgggactacaggtgcccaccaccatgcccggctgaatttttttttttttttttttttgtatttttagtagagatggggtttcactgtgttagccaggatggtcttgatctgaccttgtgatccgcccgcctctgcctcccaaagtgctgggattacaggcgtgagccaccacgcccagcctcattggtctttttaagttatttaaaatcttagcttttaaaatcagcattaaacagtaaatcaaatgagatgtataatttataggagataagacttttttttttacttttgacacacacattactttcagaaatggatgagcctacaattcccatgattgagaaatgtgtgctgcaaatgtaacattagtttgtaggatatgctacaactattttcctttgaatagaattaaatataagggggcttccacttaaaccccattccatgagatcaatcaagaattgtttttcataccataactttccagataaaatatctagggtcatctgtagccaaatctctgttctctgatttgatttggttttaacaagtatgataaggccaggtgcagtggctcatgcctataatcccagcactttgggagggcaaggcaggaggattgcttgagcccaggagtttaagaccagcctgggcaacatagggagaccctgtctctacaaaaaattaaaaattagccaggcatgatggcacacacctgtggtcccagctacctgggaggctgaggtgggaggatctcttgggtccagcaggttgaggctgcagtgtgctgtgatcgccaccactgctctccagcctgggtgacagactgagaccctgtccaaacaagtatgatatacttagggaacattagcatttatgatacttttttatccaagaaaggctaaaatctgctttgttaaatttcacagataacacaggaaatgcagaccctaaaacacattgaacagtggtcactaaaacaagcaagaattgacttctggaaaaaatgccatgagaattttaagaaaaattcaatttcaagcaaagcagcttcttcctttttctcaacccaggcccatgtggcatgtgagcacccaactggatggagcagcatggaggagcgccatctgctgctcaccttggcagggcactggcttgcccaggaggacgtggtgcccttggataagctggaggagctggagaagcagatctggctgtgccgcatcacccagcacactcttggaagaaatcaggaggaaacagagcccagattttctcgacagatctcaactagtggtgaactttcctttgatagtttagccagtgagttttccttctccaagttggctgctctgaacacatcaaaatacttagaacttaacagccttccatccaaagagacatgcgagaatagattggattggaaagagcaggagtcactaaactttttgattgggcgcctactggatgatggctgtgtgcatgaagcaagtagagtatgccggtattttcatttttataatccagatgtcgccttggtattgcactgcagagcactggcctcaggggaagctagtatggaggatctgcacccagagatccatgctctcctacaaagtgctgagctgcttgaggaagaagcacccgacattcccctaaggagagtccacagcagtaagtgaaggagatcagatggcccagagtcttaaatggcactgttagcactgtctccaagaaggaagggacccttgtggcagaatagttctaccaagttaaggggacaacaacttttttccaggtaatctgtagactagccaattaactaggcaatgaaatagaaagatctatgtcttttaaactagctatgtttcaaagttaaagggaatctatctgatttgtagctagttcactgaaatttattctacatattctatacatctgtaaatttaatcatttccagtcttacattgatagtatatagaaatatggctttttgtttttctttttggttttttgttttttgttttttgagatggtgtttcattcttgtcgcccaggctggagtgcaatggtgtggtctcagctcactgcaacctccgcctcccaggttcaagtgattctcctgccttagcttcccaagtagctgggattactggctaatttttgtattagtagagaccgggtttcaccatgttggccaggctggtctcgaactcctgacctcaggcgattcgtccacctcggcctcccaaagtgccgagattatagggcgtgagccaccgcacccggccagaaatctgttttttatgttacctttatatgactttgttaaacttgcttattctaggagatttcttgtagatt

SEQ ID NO: 79176 - DNA, 1032 bp, Homo sapiens
tctcatggcattttttccagaagtcaattcttgcttgttttagtgaccactgttcaatgtgttttagggtctgcatttcctgtgttatctgtgaaatttaacaaagcagattttagcctttcttggataaaaaagtatcataaatgctaatgttccctaagtatatcatacttgtttggacagggtctcagtctgtcacccaggctggagagcagtggtggcgatcacagcacactgcagcctcaacctgctggacccaagagatcctcccacctcagcctcccaggtagctgggaccacaggtgtgtgccatcatgcctggctaatttttaattttttgtagagacagggtctccctatgttgcccaggctggtcttaaactcctgggctcaagcaatcctcctgccttgccctcccaaagtgctgggattataggcatgagccactgcacctggccttatcatacttgttaaaaccaaatcaaatcagagaacagagatttggctacagatgaccctagatattttatctggaaagttatggtatgaaaaacaattcttgattgatctcatggaatggggtttaagtggaagcccccttatatttaattctattcaaaggaaaatagttgtagcatatcctacaaactaatgttacatttgcagcacacatttctcaatcatgggaattgtaggctcatccatttctgaaagtaatgtgtgtgtcaaaagtaaaaaaaaaagtcttatctcctataaattatacatctcatttgatttactgtttaatgctgattttaaaagctaagattttaaataacttaaaaagaccaatgaggctgggcgtggtggctcacgcctgtaatcccagcactttgggaggcagaggcgggcggatcacaaggtcagatcaagaccatcctggctaacacagtgaaaccccatctctactaaaaatacaaaaaaaaaaaaaaaaaaaaattcagccgggcatggtggtgggcacctgtagtcccagctactcgggaggct

SEQ ID NO: 79177 - DNA, 1071 bp, Homo sapiens
aaacatctggttaattttacagtgactcaaagggctattaatttgacagtcactaagtaggaatattttacattaactctgtagttagcattcagtctttaggactcttgcccatctttttcacacatgcagctctataccagaactttccacaaagagacaatgtgcaaagctgctgaggagggcttgtttttgccagtcctctgagccccattaccagttcctgccatttggaaaggaactgagtaagtgcctcatgacaggcgatggcttttgagggaattttagctttcttagaggttcccagatttggaggttttgatttgctattctcatgaaactgctttccctaagcttctctttttctttcatagcttaacacagcagccacaaaggtccaccctgtcatccctgccatgtggctggaggatcaggtgtgtttccttttgaagcttatgctacagcagtgtaagacccagtatgagctggggaagcttttacagctctttgttgaaagagagcatctcttctctgatggtaagacaatccttacagttaagttgctattaagaagttagctttcttaatcttgaaaatactttagaggggtagttaggaaattaaaatgcatgtaacattaacttacagtctacaactgggagtaaacaagttacagagaactttaaattgtggttaaaatattcaagaaataatacaacagcataaaacataaatgatataaccaatcatctcattctaagcagttaccaaatagccacatttcctcctggctggcttctacattaccctgttgtgggggtccaacccacagacgctgacctagcaacagatcaagacatacactgacagagatattttgcctgtcagtccagctaaggggctctgctctgagtctggagcattgcttcataagctggcaaagtttgcatttatttagtacagattaaatggcaaaggttttgagtaaacaccattagacggtaattaacattgccgatcccctgagtagagagcaattatgtacccgcggttgatcaaaggttggtctta

SEQ ID NO: 79178 - DNA, 1057 bp, Homo sapiens
agccttggtttctggttggcagtcacagagaaagacgctttggtggactgaccaccactgtttctttagtgccctctttagcagggaagagggacattccagacagtcctttaatcagcagatcagtggagggcaatcctactctcttatgattagtacttccctgacttttgcatatacccccttctgtctgcttcttggtcttgtgacctgcaacactctgcaggacagtttagaacagtcccttggttgctcattagtttgtttcatgtttgaaggcttttcaagccattttaactaattaagttgggtgacttattctaaacaggaaatatccatctgtagtatttgtacatttgccaggtaatccaggcctagttgttattttatttatcccgtggcagggtgccagtgccatttcttgtctctgtgtttggatcatcacttctgtggaggacaatgttgcaactgaagcaatgggacacattcaggactcaacagaggaccatacctggaaccttgaggatctttcagtcatctggagaacattattaacaagacaaaagagcaaaactctcatcagaggtttccagcttttctttaaggtagtgatagttgcttcacttctttccagagcttaagagattacttcagcatatcccttcttggctttttcttatttccatccctggatttttttttagccaacaacagataatgatgataatattagaagtaccacttactggccaggcgcagtggctcacgcctgtaatcccagcactttgggaggctgaggcgggtggatcacttgaggtcaggagtttgagaccagcctgttcaacatggtgaaaccctgtctctactaaaaatacaaaaattagccaggcatggtggcgtgggcctgtaatcccagctactcaggaggctgaggcaggataattgcttgaacctgggaggtggaggttgcagtgagccgagatcgtgccactgcactccagcctggatgacagggcaagactgtctcaaaaacaacaacaacaacaaaagtaccatt

SEQ ID NO: 79179 - DNA, 1046 bp, Homo sapiens
aagcaattctaagaaacaaacacatgcagctcctattgaaggtatgtggaaggaggagagccctataacataggcttcattgcctacttgctggatcctgaaaaagaaaggaatcaaaatcacatcagcacatgaaaattatgtctcaccaggaaaagcaaatggaattaaatcagtgacagagggagtgccagccatgtgatttgtggcctcctctcccttaccttttgccccttgcacatacccgtttaggttcctggtagcttttcagttgtcttttggcccaagagccccccgcttcccttaagctgactttctaaaacgcttagtcatagtctaaactattcttgcttccaacttcatcaagacatgaagtacaacttctgaaagactgccaacttgtgatcttatcaattatgagtacgtatacaaactacgaagaatatcaatgccacttaaatgtaagtttgacatcatgaagcacatttaaaaaaactcatataggccttttataggaatagaaaatttgggaaagacacaagaaattactattttttatttttattattatttttttgagatggagtctcgttttgtagcccagactggagtgcagtggtgtgattcttggctcacttcaacctctgcctcccgggttcaagcgattctcctgcctcagcctcctgagtagctgggactacaggcacccaccaccatgcctggctaatttttgtatttttagtagagacagggtttcaccatattggccaggctggtctcaaactcctgaggttgtgatccgcccaccttggcctcccaaaatgctgggattacaggtgtgagccatcgtgctcagcccacacaagacattattaaccatgtttttaccatgtggaatgggaagctgagggctatctttcattttcacctttctgaactacttgaatactttaccataaaaaaggtattactttgttaattataaaacaaaccaataaagtaaatctatatttagctgttcattatagtaaatgctcctctcaatt

SEQ ID NO: 79180 - DNA, 2318 bp, Homo sapiens
ctgcctcccaggttcaagtgattctcctgcctcagtctcccaagtagctgggattacaggcatgcaccgccacatctggctaattttgtatttttagtagagacggggtttctccaacttggtcaggctggtctcaactcttgacctcaggtcatccgcctgccttagtctcccaaagtgctgggattacaggcgtgagccaccgtacccggctgaagcatcatttcttaccagagtttttatgcaacttctcaggtacacatctttgtataaaatgaaggctacctctatacactgaagtaaaataaatcagattttggtagattcaaagtgatacgtagtgatgcaaaataattacagcaaccagttttatcattagagagttccatgtgcaaatctgaaattaattatggtgatatacagataattaatattgttttactttccccctagatgcatggagtcatctcccacatttctctagccctgacctggttaataaatatgctatagtggaacgtctgaattttgcttattatttacataatgggcggccatcatttgcatttggtacttttctggtccaggaattaatcaagagcaagactcccaagcagctgtgagtatttaaaatataattttgtctgggtacagtggttcacacctgtaatcccagcactttgggaagcaggaggatcacttgagcccaggagttcaaggaagcagtgagctatggtcatgccactgcactctagcctgggtgacagtgaggctctgccactaaaacaaaaaaagtaaaataaaatataatttgtattctaaaaaagggcatatctgtataatgttttacatgtacattgaaaaacatactggaaacataccacagttaacagtgattacatttggatggtgattattgttgttttcatttgtgcttccctgtgtgtcctaagtttttggcatttagtgtgtgtgatttttgttaattggaaaaaacataaatatgttttgaaaaataataaaatttaaaatcatacaggagtttgtcaaatattagcagttaaagagggaattctaagggagggagaacgttaggacaaatacctaatgcatgcggggcttaaaacctagatgacgggttgataggtgccacaaactgccatggcacatgtatacctatgtaacctgcatgttctgcacatgtatcccagaactttaaaaaaagggaattatatgatgagatgtgaattctatatttaatgtctttaataattcaattattcatttttataaggcacagaattgagaggagcatttactataatgaacagctaaatatagatttactttattggtttgttttataattaacaaagtaataccttttttatggtaaagtattcaagtagttcagaaaggtgaaaatgaaagatagccctcagcttcccattccacatggtaaaaacatggttaataatgtcttgtgtgggctgagcacgatggctcacacctgtaatcccagcattttgggaggccaaggtgggcggatcacaacctcaggagtttgagaccagcctggccaatatggtgaaaccctgtctctactaaaaatacaaaaattagccaggcatggtggtgggtgcctgtagtcccagctactcaggaggctgaggcaggagaatcgcttgaacccgggaggcagaggttgaagtgagccaagaatcacaccactgcactccagtctgggctacaaaacgagactccatctcaaaaaaataataataaaaataaaaaatagtaatttcttgtgtctttcccaaattttctattcctataaaaggcctatatgagtttttttaaatgtgcttcatgatgtcaaacttacatttaagtggcattgatattcttcgtagtttgtatacgtactcataattgataagatcacaagttggcagtctttcagaagttgtacttcatgtcttgatgaagttggaagcaagaatagtttagactatgactaagcgttttagaaagtcagcttaagggaagcggggggctcttgggccaaaagacaactgaaaagctaccaggaacctaaacgggtatgtgcaaggggcaaaaggtaagggagaggaggccacaaatcacatggctggcactccctctgtcactgatttaattccatttgcttttcctggtgagacataattttcatgtgctgatgtgattttgattcctttctttttcaggatccagcaagtaggcaatgaagcctatgttatagggctctcctccttccacataccttcaataggagc

SEQ ID NO: 79181 - DNA, 1526 bp, Homo sapiens
ttgatgtaaaaggccaattgctcaagatctgcttctatacaactaataaaaatatacgtgactttttggtaggtaaaggtgagactacatagtatacattttctagaaagcctgggtgaaaaacttggaagaaaaccttggaagaaaaaccttaagtaattttaatgttcaactaatatctaataagtaaaagtgtgacaaccccttcatctttttttccccttcatctttcttcaatgactattttacatttgtggcaaaagaaaatttgtgttaacatacattaactcaaatgttcaaaatataattcttgaatggcatattatctcatgactttttttaataatctttaattcccagcactaccttatttgataatctcatgacattttttgcaaaagtgcttgattttttgtaaagtcactgctttaattactttttattcaaggttgaaattttaaaagaaaaaaattatttttctgaaaaagagaaaagaactatagacttcgtgcatcaagttgagaagctttatttgggacatttccaagaaaatatgcaaatccagtcatttcccaggtagtctcattagtcctcttttgataatattagaataccgttagatagtatttcatttatagttgttagtgaacacaagtttcttatgtggaactgagcctgcattctccttggagataaaacttgtatcagacagaagggactcgagagttttctgtcattttaatatttgcataatcagaattatgtgttccccaaaagagtggatgttcttgagcagataaaaaggaatgatgcctttttctccaaaattaaaaaaaaaaaaatttatatcactgtttttaggtactggataaaggaacaagattttttcaagcacaagtctgttttggactcattcctgaaatatgattgtaaagatgaatttaacaaacaggaccatagaattgtgttaaattgggctctgtggtgggatcaactaacacaagaatccatccttctccccaggataagtccagaaggcaagtgtgagagagcctgaaatatgaacatactgaatgaggattaaattgggtattgatatttgaatattttgatgtgtctcaattttagaattcctttcgggaaataatattcaggttctttaaaatgcaagtcgttgcattaagatctctttcttatctcagagtttctgggagggatttataatgtgctaataaaagaaaaaaatagttaattgagatttcaaggctgagttttcattccagcttcaaagtgacaatctgttttttcaaatagtcttgagcttcttgtgtaaattggggatctatgccatctgatatgggggatctgggtcataactaacagtggtaaacagtagcaattcagagagtaaaattctggcttactattatggctgaagtttttgtttgtttattatttttaatttatttttttcttttcatccttccccatctgaaacaaagtttttatttacattaagggaaaga

SEQ ID NO: 79182 - DNA, 1101 bp, Homo sapiens
tccctctttttggaacacttatcctcttatctcagtatatctacggaacacttactggtctttaaattttttgcccatcagttactagttacttctactagcaagcctatgtggggggacacgggggtgggggtggtcatccttcttatttaggtgtttctcttctagaccttcctctctagcaccctgggttacttttatcacagcccttatcatacagtactataatcggtgtgtcttccactagctcctggagtgtagggtcttagttttactcaatttaatatcccttgaacctaactccaaatctagtaatagattttaaataaaagttcctttgttagatgttacataaatgtataatcccatgttgataatcataataaggaaatgaaaaagaacttaaaaggcaaacgtttttcttttcctaggaagttattgccagcgccattttaaacaacaaaataccagaggcacagactttcttcaggattgatagtcattctgctcaaaaacttgaggagcttattggcataggcctaaatttggtctttgacaatttaaaaaagaacaatataaaggaagcctctgaacttttgaagaatatggtgagtggtgtaatccataaagtcttaaaatgtatttaatataatttctagttattataaaattggtttgtattcataattatttcataaactaagaaatttatgtagtaaataatgacactaagaaataatgacattaataacactgagaatggctgggtgtggtggctcatgtctataatcccagtgctttgggaggttgaggcaagaagatcgcttaaggccaggaattcaataccagcatgggcaacatagcaagaccctgtctctaaaaaaaataaaaaggacgtggtggcttacaccttgtaccttgtattagtccattctcatattgctataaagaagtacctgagccgggcgtggtggctcacgcctgtaatcccagcactttgggaggctgaggtgggttgatcacctgaggtcaggagtttgagaccagcctgaccaacatggcgaaaccccgtctctactaaaagtagaaaaataagccggg

SEQ ID NO: 79183 - DNA, 1013 bp, Homo sapiens
cgggaagaggagggaggtcctagagcagtttatgttctcttagattgaagtgtagaatgactataccaggtcaactaaactgttctctacttattcaacccttctacccccaccattgtgggtaaatattattgcggatatagaatataataaatctaaactttttttcttagctttctatgggaggattctcgtaacagcagcacaccaactgaaaagcccaaactgctcgctcttggtgaaaattatgaactgcttatctatgaatttaatttgaaagatggaagatgtgatgcaaccattttgtatagctgtagtagggaggcattgcaaaagctcattgacgatcaagatatcagtaagtatctacaggtggtctttcagcatatttaaatttgtgacattaccatgtagttacatacttcaggaaaagtcatagaggtgaaatcaggtctacgctgtctgatatagtagtcactaggcagatggggctattgagcacttgaaatatggttaatatgaattaagatgtactttgtgtcatatacatattagattttgaagacttaatactaaaaataaaatatctcaattttttgtatttaattacatttcaaaatatgaaatactttgaatataagctaatgtatattattaaaattaatttcacctgtttcaatgtggctaccagaaaattttatttatttatttttattttattttatttttttgagacagtctcgctctgtcacccaggctggagtgcagtggtgccatctcagctcactgcaaccttcgcctccccagttcaactgattgtcccacctcagccttctgagtagcttagactacaggcgcccgccgccacgcccagctaacttttatatttttagtagagacagggtttcgccatgttggccaggctggtctcaaactcctgacctcaagtgatctgcccacctgggcctcccaaagtgctgggattacaggtgtgagccacccctgctagaaaa

SEQ ID NO: 79184 - DNA, 1047 bp, Homo sapiens
atttagaagaaggaagtagtgaagcaagtaacagaacatagattgggcttgaacaaggggctttgaccttgtttctgccattacttactccatcctggcctccagctgctgaaccaattgtttgtccacgtggtgacagaacaggggaagtaggttgctggggaaagctaggggttctgccagagaggctgtaggcatttgggctatctcccaggcaatcagaaccaccatgtctgtcctagagagcataaatataaatataagcaaatagatttgcttaagaaacagactcagggccaaggtttcttattatctttccgttactactaccattgtcccccacccccaggtagcaattcagaggtaacatttgcatgtttggtacgtgccaagcaatgcttagtgctttacacatttcccttcctatttaatcttaagaactatgaggggttaataccatcatccctagtttgtagataaagaaacaaactaagagaagtgagaagtgaaagaacttgccctaaagttatattgctagtaagtgatacagccagaattcaaacgtaggtctttttaaaatctaaagcttgtccccttaggtactatgttatactgcctcctagaagaaaccgaaactctagggcactatagaaaaaaagcagaacagctacaacactgctactactttctctatccaacctcttcctcagtacttgaaaatgcctcaggaaatacttcacctggctcagtctgcacatcccgagggtactagatagtatttacaaggcctttatgatcttaccaagctgtatggtcactgttgggttcctctagggaagaatgcagcgataccagttgctccccatggctcagcagggcatagagcaaagatattccaaactgcaagggacatatatatattccagagcaaaatgagttcacactcggcatttggtgctttcctgactcttatcttcccaactaaaggacaggttcacatttagagatagagctcaaaatatccacaagtgctgtcaggttttacac

SEQ ID NO: 79185 - DNA, 1061 bp, Homo sapiens
taagaaaaaaaatggaaggggtggaaacagagtacaataacatgagtaatttgatgggggctattatgaactgagaaatgaactttgaaaagtatcttggggccaaatcatgtagactcttgagtgatgtgttaaggaatgctatgagtgctgagagggcatcagaagtccttgagagcctccagagaaaggctcttaaaaatgcagcgcaatctccagtgacagaagatactgctagaaatctgctagaaaaaaaacaaaaaaggcatgtatagaggaattatgagggaaagataccaagtcacggtttattcttcaaaatggaggtggcttgttgggaaggtggaagctcatttggccagagtggaaatggaattgggagaaatcgatgaccaaatgtaaacacttggtgcctgatatagcttgacaccaagttagccccaagtgaaataccctggcaatattaatgtgtcttttcccgatattcctcaggtactccaaagattcaggtttactcacgtcatccagcagagaatggaaagtcaaatttcctgaattgctatgtgtctgggtttcatccatccgacattgaagttgacttactgaagaatggagagagaattgaaaaagtggagcattcagacttgtctttcagcaaggactggtctttctatctcttgtactacactgaattcacccccactgaaaaagatgagtatgcctgccgtgtgaaccatgtgactttgtcacagcccaagatagttaagtggggtaagtcttacattcttttgtaagctgctgaaagttgtgtatgagtagtcatatcataaagctgctttgatataaaaaaggtctatggccatactaccctgaatgagtcccatcccatctgatataaacaatctgcatattgggattgtcagggaatgttcttaaagatcagattagtggcacctgctgagatactgatgcacagcatggtttctgaaccagtagtttccctgcagttgagcagggagcagcagcagcacttgcacaaatacatatacactcttaacact

SEQ ID NO: 79186 - DNA, 1081 bp, Homo sapiens
gcacaatcttggctcactgcagcctcagcctcttggactcaagcaatcctcccatctcagcctcccaagtagctgagaccacaggtgtgcaccacccattcctggctaattttttttgtgtatttttttgtagagatgggggtctcactatgtttccctggctggtcttgaactcttgggttcaagcgatcctccagtctcgcctctcaaagtgctgggattacagagccaccacactcagccatttcctataataaaaaaatattttgtctgtgatgtagccatcaaagttttagggggaaaaattggcattgtctttccctggagtctagacctataggaaaaaaattgaaggctaatatttgggttctagataacgcaaaataaataataaaacatctgtgattaccttgattgaaaagtttgtgcatagaaattattctggtactttggagagctacaagaaggcctaacagaaaaaaaaactgataaatacaattaaaataacagtcgagcatatattaaagcacttactatgcactaaactctatatatctcctgtcattagttggatgcaattattagacatctttggtcctccacaacataggtgattaaaaagcctaagaaactgaagcgttatctatgtctttggtaagacacacaggcccaagtgaagcctgcaatgatgtgcaggcttcccctcccccacggaccacatggaccacttcctctttttttttttttttttttttctttagacagagtctcactgtatcgcctaggctggagtgcagtggcgcaatctcggctcactgcaacctctgcttcctgggttcaagtgattctcctgcctcagcctcccgagtagctgggaatacaggcatgcaccaccatgcctgactaatttttttatgtgtgtgtttttggtagagatggggtttcaccatgctggccaggctggtctcaaactcctgacctcgtgatctgctcgccttggcctcccaaagtgctgggattacaggcacttcctctttttactgttttcacttagaaaaactgagaggacttttgctgccac

SEQ ID NO: 79187 - DNA, 1103 bp, Homo sapiens
agtctgatcaaagagcaattaaattactatatatgtgctcactttgacagcacatataccaaaactggaactattcagaggttagcatggcccctgcgcaaggatgacaagcaaatttgtgaagcattctatatatttttaaaaaatcactatatatattgcctggaataagttcttacttgtaaaacaaatccaaatatatacatatgtggtatagtatactatagtaaaggtaattatgtattataaatatttatttataaatatactttaatataaatgtaatacatatagacatatatatactatgtatgtgtgactttctgtatgctttattttacagcccagaaaagcattttataagaactccagttgtagaaaagcagatgtacttccctctacagaattacccagttaacaacatggtaacaggtagtttaaaataaaatttagagtaaactcaggtaggaaagaaacaagggaatattgtgttgaataaagctgttgtacttcagatacctagagagtagagccttctctagtaagcctggtaatggaggacacatcacttaaatattgaataaattacctgcagaattgacccaggaatatgcttttaaattttctgtgctaaaacaatggtatcaaggtagggtgaccacatgtccctatttacatgagacagtcccagtttaagctgttgttctggcattagtttttaattctcaagtgtcccagtttggaagataaattatatgaacagctccaatcagagtttcttttgagaatctgatgaaacataggcccctttccttagcatacacacatagaaacataacacacacactgccattccattcaatatcaaatatataaatattttaaaaaccaaacaaaaacataacacacaaactttgcatataattgtaaaaggctcacagatgcccagaagcctatacatggattacccagatgtccatggactccttatttgggtttcctatcctagtgctgtacataaagagaagacaactaaccacggctgacattgagagggtagaaccaagggaaccaactgaaaagtggccattgggatttcaact

SEQ ID NO: 79188 - DNA, 1071 bp, Homo sapiens
tcccagccccctcccgaagccccgccccgcctccgggtctggaggaggctgggaagccccgcccctccacgctagcgccgcccaggctggcacaaaggaggaagcctagtcccgcccctgcgtgcggcgcttctcccaggccccaccttccatccagtgccctggaccctcggctgggtagcgccaccagagcgaccaaacgtcccgcgccttccaggccgcactccagagccaaaagagctccatggcggcggcggccaagcccaacaacctttccctggtggtgcacggaccgggggacttgcgcctggtaagctgggaaggagggtgggaagcataccgatcctgcctcactctcctctgagcccagccatagtcctggcttcccacttccagcctggcgccggccccgcaccttaagcgccctggctgcccagatcccagctggttcccctcggggtgtgggggcagcaggtagtggctgttgcgaagggcagggatctagtcgtgtgcctcccggaacctagccccgtggctggcacgtggccggtgcccaggacggttgcaaactgtttgaatgaagctttctctctcctttgccagctgcagattcatagtccagcctcttgtcattgacctttccaaaggaaatgctaaggctgtctgaattatcggggcagaccgtgcagagcagagaaaggggggccagaggacacttagaaacagcagaacttgtatttaactcccttgcttgggactgataaacctcccttgcaggattatgatgatcacaagagtactcagcacttagtacgtgctcaggaagtgccagctccttctcctttccttccagtctaggcctccatctccagaacccctgctgttccccttgcctgtgccagacttgtggatcttgatagctcccttgtctgtaaggatccttctctccctaagaccctgtctggttcactttccagcagtttttctttccaatcccgtgcctctgtccctttaggagcattctgtatgtgtgtcctctgccttagaccctgccttttgctccctggcttg

SEQ ID NO: 79189 - DNA, 1038 bp, Homo sapiens
gtggttttcttttatagttaggagaacaaaacgaaacaacaatctgagacttaaggattttcgcttttcccttcattttgaatagagaaagtttgagagttggagggaggaaaagggactgatgaccaagttgatgtataaagaagcaaacagtgtcagcttgctggggttctctctaaatggaaatagtacgaagttcccaaaccaggctggggagccagagtggggtttagtcccccttctactgctgctagttgtatgactcaacaaattattttccacttcaacttccccgtgaaatggggataatggtagtattcatctttggttgtatgaggattcagtggaaccaattgtgcgtgtgaaaggcctagcacagcatttagcacactgttaatggtatgtgctaactgtggagataagcaggaagccagagcccctgaggacggacacttaaaccatatcagcttaaaaagaggtggatggagaccagggccttcaaacacatgaacagttttcctaaccaaattattataatgtgggcccaggcaataatcttgctttccactgtatttaccagtttaattactgtatgcccctttgatcagtctattgagacccagaagcttttaattaggaaatgaattatggattcatgaagttagaatataaaatagtcaaattagtttttaccccatagaagctatgtttggtggtgggggtggtggaaagcttgtttttacaatgtagggttcactcgaatggtaaggaaatgcggggaattaatatattgactgcctactgcattccaggcatgtgctgggaactttaatacagggctttacaaactgtccacaatgaagggccaattttactttttccagtcggccatggactgatatgtttgcatcaatatatttgaatgctgtgtcacgtcaaaatgctataaacagccaggcacggtggctcatgcctgtaaccccagcactttgggaggccaaggcgggcagatcacttgaggccaggagtttgagacca

SEQ ID NO: 79190 - DNA, 1028 bp, Homo sapiens
atggcaaaaatcctgtctctactaaaaatacaaaaattaactgggtgtggtggtgcacaacctgtaatcccagctactcaggaggctgaggcacgagaatcacttgaatggggaggcagaggttgcagtgagccaagatcatgccactgcactgcagcgtgggtgacagaacaagactctatctcaaaacaaaaacaaacaaaaaaattatataaacatttctaaatgctcctctcaatttctgtacattgcattacaaatcagttcatcaatcaccctctgagtgcactttatctcccttcttcctgaaagctggctcttccttcaggcaggagcatctgaacagggagaagtataggaacaaaacaggctccatttccaggaaacaacaccatggaggggatgtagtcagatttttgttatgatcagctatatgaggagacaataaattaaagggaaaaataataatttcagaatgatgggttaatgttgtttaattataaagggcagaaaaattaatatattggcatcaagtttaaacattactcggaggtccatgaagatatttcttgagtttttgtccattgaggcaacgtattataccttaggtcaaaagaattgctttgacctaagcatttttaaatactcttatttatttttaaaaataagataaatctatatctgtaatacagcacattcaaaatgtctatactttactgttaagattttggggtgagaagcggatggtataatgagagggcatgaacatgggcagctcagatggtcctgtgcatcatgtctgtttctctgagccagctgcttctatgtgatcagattaaaggggctgatagtcatgaagcaggagctggattaaaccagattaccctgatagtgatgagatgcaggctacttaacccttacaagtcagagacacttgagagtgaaaagagaatgtgaaaatcctccagaaaaagagaaattgggtagcagtaagtagcccaaagaaccatctttcttgcttttatctt

SEQ ID NO: 79191 - DNA, 1094 bp, Homo sapiens
cagatgttattcaagtaatgaacattttttaaatgtggcatatagatatatagtggaatattattcagccctgaaaaaagttttgtcacatgctgtgttaaaaataaaccttgagaatattatgttaataaaaacaagccagtgacaaagtgacagatagtgtatgattccacttatatgaaataagtagccaaactcacaaaaagtagaatggtgtttgttaagggctgctgagggggtaaaatgggcagttgttacttaacaggtattcagtttcaggtttacaagatgtgaaattctagagatctgttgtataacaatgtgaatatagacaacaatattgaattatacacttaaaaagatttaagatggtaaattttatgttatgtattttaccacaatatatttttataaaacaataactagaaggaaaaaaagactccattttgagacatttagaatcacaaaacattattatatatcaatagccctacctggatgtcccaagacacctcagtcccagcatgtccaaacctaagtgtctcgtaattcttgtaggaattcagaagtcatcccagatgcctcaattcccacctcctgcgggatctgaaagaaggagagggattaggcaatgggaaatgggtgtagttggaagtgagatgggggtgtggtggccaccaggtgaggggtttaggagtctccagggtcactggtgacttgatacagatttgcatttcagcaagattgttatcagcagaacaaagttgaatggagccaggagagcttgggctggagaccagctcactggaccttgggaggaaattctacctcctactttgacctcaagtttgccaggaccaacacagctagaacaaagcctctcatgacaaaatagccaattgggaaacctttgaattttcctcccacccttaaaacacgcttcaggcactcaagggaaagggaaaatggaagaggaaaggaagaaaaacagggtctcttgcgccctgcaggtgtgcagggcagccctccacaggcccacaggaggcttggcagcagggagcaggtgactgctgtgcatctgggatgagaccagc

SEQ ID NO: 79192 - DNA, 1077 bp, Homo sapiens
gctttctatcttccaaacagatgaagaaaaaatgcccgcaaactccatgtattagctaccccttttccagcagtgtgagatgggaatatacttggcttgccttagctgggaagtggctgtggagatagagggtggcttggcttgttgcaggagctggaaaaagggcaggccacactgggctgtggaggagggggctggtccttttcccccagagtgactctgtgcttcatcccaagtttcctcacttgcctaggacaccctgggtccccagggaggagggtggctcgttaagctagattctctcatctggcatctgcccatgagcatgcaagccttcataacatctctgcttctgctgttttcaaaggttggaaaacaaagaaccagaccaaagagcgggcagactctgctcccaccctcggacatggtgccatctttgttttcctctccaggtgatcgtgttgccatcgagcctggtgctccccgagaaaatgatgaattctgcaagatgggccgatacaatctgtcaccttccatcttcttctgtgccacgccccccgatgacgggaacctctgccggttctataagcacaatgcagccttttgttacaagttagtgtccacagtcccactgggtcacctgggacctctttcccttcattagcttggtgctgtttcctgtggttatttctttattcttttcagctcataattccaaacatgaggcatcacctggacaggctactcttcttggtggcattgagagagggtagcctccctaggaataagactgactcacagtggttggttttagtctttcagtttcagtttcccttacttagagcaacaatagaaaattattgctgaaatcactcaccctctgcagacatcctggagggaattcctgtggttcatcctctgttattagtttccactgcaaccaccagaaacgtcataacaacaatgacctcggccaggtgtggtggctcatgcctgtaatcccagcactttaggaggccaaggccagtggatcatgagattaggagatcgagaccttcctggctaacacggtgaaac

SEQ ID NO: 79193 - DNA, 1026 bp, Homo sapiens
tcaccagagaccaggagggtttggttagctcacaggacttcccccaccccagaagattagcatcccatactagactcatactcaactcaactaggctcatactcaattgatggttattagacaattccatttctttctggttattataaacagaaaatctttcctcttctcattaccagtaaaggctcttggtatctttctgttggaatgatttctatgaacttgtcttattttaatggtgggttttttttctggtaagatttagacctaaatcgcatcatgccaacttgtgactttgagactattcatcaagaatgaggatatagtagccatgacatagcttgagctatagcctttaattccttactttggctatgggtggagggtgagtttgaagaggttctgattttcttgtaacctgggaaagccatgaccttgtgcccgattctttcagattgctttgggtaataaatattggtggtggtatctgactcatgctgctgtttatggtcctgtttagtggggaatggactcaggttacccatttcccagagggaaggatcccaggatttttgaaggttacatattttctgtaccaaatataatttcattgacatgaattatctctaatcctcatgacaagccacatacacaatcattttgtagataaagaagatataaatgccagaggagaccttaagattgtcttacaacacaacccttcagttaacgagagaggaaattgaggctcagattggggaagtgacttggcaaatcacacagtgggttagtcaatggcccaggattagacagaacccaggaatcctgacatcaaatcctttacaacatgctgcctctcataggcctgaggtgtccagtcctagaggacaaatgatgctccccatgccaccacccccaccaagcagctcctactgatgagaagatgcactaagcagtcttggtggaaacatcttcctcacgccctgtgccccctttcaggtgcccagagaaggagctccagtgtct

SEQ ID NO: 79194 - DNA, 1068 bp, Homo sapiens
cccccgaccccgttctcttccccagccaacctcctccagaagcttccacaccctctgtttctgcccctcctgagcaggctcaccaggcctcacactagtggctgacaggccctctgtcaggaagggcacccctgggccggggaagggattgctagctggggcactttgccttgggccagctcctttactcaggacactgggcagcttgagagatgtctgggccagcctggtgagctggctgggttagtggcttcctctccccatgccccttccggtcctagggcagaataaagaaaccctgaaggcagaaaagtgatttatttggaagggagactactggagcagggagaagagggctgaggagcattgcatacataggtattgggccagggtctgatgaaagaacgtgcttaaaaccttgggtgaaattagttgtggtgttagactggggtgccgagtgggtttctgtaaatggcttgccatgggtccagcctctacctcctgcaaggcatttgccagcccgtctgacagtggggagcccagaagaggaggaggtatgggagtagggagggttctaagatgccagcatccatgctcccactgcatccttacactcaccgccccaacacacatacagacatgcacacacatagtacttgtcaggtcagcttgtcttctgagatttgtttctgaagtctggaagcagaggtttcactttgccccaaatcagtagctcccctacttctcactctagtccctagacactgcccccccaccatttctccaggctgagacacatcctggtcctgggggtccctgagcccacacatggtgactgactatggccacctggaacaaggttgggaggtgggaaatcagagaaggctgaggcagccagaaataggaagaacagaggtgaggtgtgggctcaaacctctgctcaactgggcagtgggcagaacccccgggcaggggcctagaagttctcataatggtgggagaagtgagtccggtcctgcctgttgatgagctgacaggccttttccacattcttggtcatgccagggg

SEQ ID NO: 79195 - DNA, 1022 bp, Homo sapiens
attagttgggtgtgatggtgagcactggtaatgccagctactcgggaggctgaggcaggaaaatcgcttgaacccaggaggcggaggttgcagtgagccgatattgcgccattgcactccagcccaggccaacaacagcaagactctgtctcagaaaaaaaaaaaaaaaaaaaagaaaaagataatagaaaaagtgccggactatagtcaggtaacctgagttctattcttggatttgatacactagctatgtgatcctagggaaatcacttaatatctccgagcctcggtttctacctttgccaaatgagttgatagattatcgctttttttccagctgtcatactctaggagtctgaattgtaaaatcaaagaagcatttcccagaaaagtttttgtcaaaaatttgatttacataacctcagaaatgtgtattgctttaaaaattataaagttcatggagcataccaagcagcctgtataccatttctaaaccaactactcccctgcaagatagatctcttttttatagacagaaaataaattcaaagaggtttgttacttgcccaaggccacccggtaataaagtccccaaaccaggatttgaacccagctctgtctgactccacaaactatggtattccagggctccaccagtgccatattattgtttggtacaggccaaggtaaggggagatgccaggggtctggctcccaaagtggagccctgccagcctgccttagcctgggaggtaaaatggcaaggcaggcctggagacctgctcccaccctggctgacctggctccgcatctgtctgccagagcctcgtttgcatataaatggcttctctgaaatagaattatggtttctcttctctcactaatggaagagctttcactggtaattaaacaacttcctcaaaaaggcttgccagcctggtcctgcagcccagctggtcctaaccccagtaccctgagggtctggcaagggctttgctgtgtcctaatggacccttgggact

SEQ ID NO: 79196 - DNA, 1016 bp, Homo sapiens
gggcacccaagggtgtgtgtgcagaggcatgagcatctgttcgtacatttgtgcctgaatgttgtattttaaaatatgggatgaaggagggtgtctgtccgtacgtgcacgtgcgcatgtgtgcctggggacccacgggggctcagccttcccttatgggctcagccatcaggctcccctggtctgggagggcagaggtgctgcctctgggcctctgtgggttggggaggggagccagtgggcagcaacgttgggggtcggggagggacaggctggctggtggctttgggcgggattagcctgtcaggatggcaccaaggggaaccagataattgttctcagatcgataagtcatttctacagaatggcttggcagggtgatttggagaacggtaatgaactctgaggaggagaaagaaacaatattatcagtgctgaagccaccctgagaggatggactgggggaaggcagtcagctgctttggagggagaagcgtgcatggtttctcaggttgctcctctgctctctcctcccacaatgtggggactgcaacaccctgtgtggcacagaaggctgggcccacccccaccaggggatagatccaggattacgtccccagagccagtcaggcccttcagcatgggctgccctcctagagcattcctttgatcctttctggggctggaagaagtaggggttgggcactggctattcaatagggacctctgaggacctctagggtccttagagtccatgattgatatgttccccacagcccagtttgaaggaccggagaagagctgcctgtcacctggccgggaggagaaggggcggctacctccccgactctctgcagggaaccccaagtcagccaaacccctaagcatggagcccagcagccccctgggggagtggacagatccagcactgcctctggaaaaccaggtgtgagtgtctgtgtccagctggggactccctccccactcctcccctcctggcactggcttccctacag

SEQ ID NO: 79197 - DNA, 1065 bp, Homo sapiens
agggggccccctggccccgggagtcccgcctgccagaggatgatgagaggccccctgaggagtatgaccagccctgggagtggaagaaggagcggatttccaaagcctttgcaggtgagtcctggtggagagggcaggtcagctggggcctctgagcagctttccaggctcaagagaatggaaggagtggaccccaggaacccagagaggcccaggatcaggactccagggaaatgtagttgagttctgtaccatagggggtggggttggcagtgtggacacagcgctgtgtgcagggtcaaggaatgggtacaggagaaggatgaaggcattcccctgcatcaccacctcttggaagctaagaggcttagactacttctctcttttggggactgggtatatttaaaaataaattccaaaacaaacttatgaaactcgtgacatatgttaaaatacttacatttaacaaaagaaggcacttacttcaaacaataaagacagctatgggtgtaacctgaattctagggctctgcctcccagtggtaggccctggcggaccaggggtgtctggccccaaggagatttctgaggagcagagtgaggctgtgagaaatctcttgattgccaaatgaagatcaggtttcttctgtccatcccaagtccaagtccaccatggaaaagttcatgttagtggtctgaggtgggtggagcaagagcctggagtagggagagggcttttgctcctgggtccttgattcagggagaacataaagggctcaaatgccattcgacttcactcctgcctgcatatgcccctctcccctgcttgggcaaggggctcatcctggagctggacccagccctcctctgccctccccaccctgacagccagactggaaaaccacaggattctaatattcttcctgtaaagcacacaccattgaggatgggccgtttatctccagaagtctccttggagaatcaatactgtttggattgcttaatgggaaaatctatgctcgtcattaggaaacctcgttagcagtccagcagccgccagtggca

SEQ ID NO: 79198 - DNA, 1102 bp, Homo sapiens
catgatgaattcttgagcaagagaggaacaggatgaaaatgtcagctttattactgataaagttgattagagaacattacttatgttcactgcaatgggcttatgtgtcatcacaatgggcttcttaatacttcaccacagaattaaacttgcccaatcaggcttgggcaactcagtaggcctagtgggggaaccctgcaaaagaagagccagagcttgtccccatccaagctcagagcctgcccttgggtacctggggctctgggtcaaagacagcacaggagcaggccactgactgcatgaaccagaatgttctttctcttcaggaaaagagagtgtgcattcactgaccaatacaataaactgctcttcctacttgggagaggtggtaagggaggcagagagtggtcaagaatatcccaggactattattccatggagctcttggaaacacaagcctgcagaatggaggttcaccctagcagtaatctatatacggaaagatgagggtgaaggtcactgggtattggcaaagaacagatgggatttgaagaatgaaggagggccaggtccaaggagaacagtgtagtagacagaaatggagaaagtgagaagctgactaccccatttaggtcagagggtgtggaacccaggaagcccccatgaatgccctgaaattatatgtgaaaatatgggagcacattttttgggggagtagctccatagcttttatcatattttcactggggtcagtgatcccaataaaagaactactagctttggagaaggtggtcagtttgaaacaatggtatgtcaaagcgaaaggtctttatggcaatggacccaaatgactggaaatacagatgcagcaagtgccatgaggctgggcatacagttcaaggaattaggatagggaaaaatgcataagacctagtcttgggaaagagaggccaagagaggatctagggagaggccaaatgggggtgatcagaaagaaagtctttgccgggtccgtggggaggatggtcactgcctttccaatagtcattttggagaagcagatgtgacttgtgtgacctgaagtggtacaggaggccacaca

SEQ ID NO: 79199 - DNA, 1192 bp, Homo sapiens
ctcgtagggtttcacaggccccaaaatattaagaactttaaaaaatagatgtacttcatagatgatatccacaggacttgggtcctccaggcacagatttggaaaggagtaaacagacagagataggaagagtaaagtgagggatacagtcagggcatctaaagttgaacaaaatattcctgccctgaggttaggaggattggtaggggctgccagtcaatgtaagaccatctcttagccagtgttcattaagtgtatgtcattaggcgctgaaagggacacagcacctggaagacctcatacttgcctttttggggtttgtttgtttgctttaatgtttcttcttaagacttccacagagtctgtagatccagtctgcttatgttgcagatggagatagagggaggaggagagtctggggaagggagggaggagaaggtaggagtccaggtgaaggaacttttgtagactagttaaacctcttaagcctctgtggcccaggctggccatctgtgctgccgttgctgctttgaggatggctgaggcctgcagctactgggggattggatggcaggcctgtccactctacccagtgctgtcaccccacattgtggcaccaactctgtctggaagacatctgtgcttcttaccttggccagtgagtgactcaatgacaactcagctctggcactttgcctcttgggagccaggaacagctgggaccctgaggaccatgggtgggagctactggctaggctgaacaagccctggctggggcccaggacttggaggatacctgctgcccactccattagccctcaccacagagtcaacatattatgtgagagcaaaagtggggcccaaaccctgcatacggtgggcctgtgggtgcccccagagcctggtgcctagccttagggcttcacaacttggagcttattttaggtctatcactgtgggcctcctccagaaggactcagaaatttggtctttttgtctttaataatatagtggctaacatttactaggcacctaccttgtgcctgataccattttgaagcagctgacatgtgttagaccaactgatccttaaaacaatcctgtgaggaagattctactactatccccagattataaatggggaaaccagagcacaggaatgctgagtcacacttgcacggtttctcagcca

SEQ ID NO: 79200 - DNA, 1032 bp, Homo sapiens
actcctttgtcagctacagggacaggaatgaaatccagcaggctctcccaggagccatacaatctgtggtttctttaatgggtgtgatgagaaagacccaggatgccatctgagttggcccggggcagggatgctatctctctgggccctgacctggggcctcccaccatttagagagagcagctccccacccctttaggagcagagtttggggtctgagtcttcccctaggaaaagctcaaacaaggtacctgagtcccttaccctaaacctaagagatgctgctcctggatgtgagctggcgcatgcccctgtggcccagtggagctggtgtttatgtactatgtggccgctttctccctgttttctgttcctccttctctcaggccttctggcttgctttgaggtctcctcctgacatgtgatgaggcctgggaacagggatgtgctttgtgctggcctattctctcctctggagcccagtggctggggctgggggagtcagaaccctctgagaagggatgggtcatgagatttgatgaaatgggtggaggtgtttctatgacaagccagagggattgagcagaaacccagttagtatgggggcaggagagaaccaggtcctcgacagtaccgagaggcccagggggttcaggaccattagccttctccccatgtggggttctggctgccagcccaccctgggacccactgccgtagttggcaggggtgcaggggtggccatctgggcaggcctggcagggcaggtgtgggagcagcaggagccgcgccctgcaacgggcaggcagggccttgccatctggccagaggaagagcttcacggtgctgggccctcgtctggcccccaggccatgctctggcagtgggggctagagagctgggccccttgctttgctcccttttctcagacctttagcaggaaaaacctggtgtaattagggaaggggatggatatgggaacagggctctgattggacaaagctctcagctgcctgtgaccatctgtgcagt

SEQ ID NO: 79201 - DNA, 1076 bp, Homo sapiens
caagtggctccgggagcacctgggcttccgcggggggggcggcggcggagggggcagcaagccggcgccccccgagcccgactaccgcccccctgcgccctctccggccgcgccccccgcgccgcccccggacatcctggccgcctacaggctgcagcgggagcgcgacttcgaagacccctactccggggggtcgtccggctccgccgccctcgccacccctgtcgcccccggacccacgccgcccccgcgccacggctctcccccacaccgccttattcgggtcgagaccccggggcccccggcgccgcctgctgatgagcggatctccggaccccccgccagcagcgatagggtgagtgccgcgccgggccgggatggccaggagggaaggcggtcaggggtctggaggctgcgagagggacaaaggtggcctggcccgggcccctcggtgtctcagcttctggcagacgcgagcccctgaccccggggttccgagccttcacccacctttgttcagattctcaaccgactaatctgagacggaagccccaaactctgcccctctgccctatcctttgtaatggccccagaactggtgaccctccccctcccgggctggctctccacttcgtagccccctctagcctgatccatgagccttttgctaacgggaattgaggcgcacctcccaacccccactggttgatggcctttctgcccctctggaagcagcggctcagtgccctttgatctctgacccttccccctgggcatagccagcacaaagctcttccctcctgttgcctctttgcttcctcctcctcttcctcctcctgtttctccagcctaagcatccttgcaggtgctgaagccccagaaaggaggtgaagacgggtttctccttgcggacacagcacgagctggcctttgccctataggctgttgttctcaggaggcgaagacaggcagcttacagctcttgccaagggggcttcgtggggtccaggcccactcctccctccttccctcgtcctctcaggtatgaggatagtcagtgctcaggacctgttgcc

SEQ ID NO: 79202 - DNA, 1050 bp, Homo sapiens
caatttaaaacttacgaattatttatttctgcatttttctatttaatatttttggaccatggttgaccactggtaactgaaactgctgaaagtgaaactttggatgaagggactactgtgctacctaagcttccagagaaaaaaatcaggccttcatctcattgcatgcatttgcttctcaaccatgtataaagggtcttctctcgctgctacagaaaaagaggtgaaacttctcaccaactctaatccacacaaccgtcctttgatcctaatctttctcttttttcagaatttgctacatcaattatcatctttcttgtaactccagcaccaccaccgctctgtgtgtgtgggagggagctttccccctcagaaaatagtcatgctcaaaacaatccacagtgcggtctacatccctgatccgtgatcaaggccttatcatgacaaaatgatcactcctagtttgagagctaccacttgctttgcaatatcatataatcaaatagataatcaaaatgtacatacagattccacacatttttaataaccagttggtttggacttatacagatagctcaaccaaccaaaaattctatcataagctttctcatatatttgaactaactttacaacaattcatttgcctacctgatctgtagcagtgtgtagtatgtatctgttgagtgattacaaactataattattgttgctgaagtcaaaatatgcttcaggccaatcctgctccatagggataatatgctgaagggaatttagttcaatatcccaatatatttgattgttaatatcaatattataagttttattagcttctaaaatattaattttacctcatgtggtctacccgccccagcctcccaaagtgctgggatttacaggcatgagcacgtggttttattccttccaattttctattaacccattactttgaggatgaaaagtaatctgataagcctactaaatgtgatgttttggcccctaatcctgtggaagtcttatagttaattataaatggtatcataaaggaggaga

SEQ ID NO: 79203 - DNA, 1024 bp, Homo sapiens
atggaagcaggcattaactcttctggatttattcattccttgtcataacaccagcatcctattccacaattgaggaggtacccacaactgctccctgagttgtcagggaggttgaatattcagagctgtcctattttaagctttggtcctaaattgacttgaattctaaagaacagtttgaaatttagtgactgatatttctattttgtgataggattcaaaagagaaatgataattacacacttttagctcagttagttcaggacttgagtggatttcttccttgcactatctagtacctgtgtccttaagggcagggacctagctatctatacctggcttctagaactttgtgtgttcttaaaaataacaaaaacttgttaaatgacatagaattttcattgtgcaactttctagccagtgttactcctctggaatattaggattttcgtatattcagaatctaaagtatacgtaaagtgcacggtactagttccaaagtggttcactaaattgtcgtacatgtttgtcaggataaaaaacatattattattttggccgggcgcggtggctcacgcctgcaatctcaatactttgggaggctgaggtgggtggatcacctgaggtcaggagttcgagaccagcctggccaagatggtgaaaccccgtctctgctaaaaatacaaaaaataagccgggcatggtggcacatgcctgtagttctagctactctggaggctgaggcaccagaatcacttgaaccaggaggtggaggttgcagtgagctgagatggtgcccgctgcactccagactgggcagcagagtgaaactgtgtctcaaaaaaaaaaaaaaaagaaaaaaaaaatatatatatgtatacacacacatatataaaatttttttggaagtaattcttttttaattgatctatttttattgatacataattgtgcatgttttggggtacatgtgatattttggtacatgcatacaatttgtaattatcaaatcagggtgcttagg

SEQ ID NO: 79204 - DNA, 1976 bp, Homo sapiens
agctcctgggctcaagaaatccttccacctcgggctcccaaagtgctgagattacagggtgtgagctaccgcacccagccatgaaaacttctgtaaatcttaactatcgtgttctgcttaaagtgaggtacacataaagtttcctgtgctttgtttttgtaggaaaaagtacatagtttgtatctttaccttacggagtctatgagatttgagaatttgatttcactttttgtaacttaacccacagaaaaggacattaacttagcagataggaccaaggactgaatgacttctgacaaaaagcgtttggtctatccttcacttgttgagctacaaccatgcattacacttctcagctgagctctcaaagagctctatgccctgtgaaaagcagtggctgagttggatgaacacatagcattattaattttgcactgggaaaacagattatgacaggaccacagaccacaatataaaaacttggcagttctttggtgtgatatattttaattagtatttgcaaataatcagagttacttgtgtacataaacgtgtgtttcacaactatggccagatgcaaccttttggtctgtttcaggaaaagacctattattccactaacaattatgctgccttagaaacataatgggagtgtaattgaagaaagcatgtctcagaaggttttgatatgcagaactggaagctattgtaattcctacatacatttccattagctatgccttatgtaatgtgagtgcagatttttacaacttagagttcccatcagtgtttttttgccacatcaccgggtttcttattttactgttttcttttcaactttgggtgctttatttccattctctaaaactaagtttcttgctcttacgagacttagtgttccttttgaacccaggtgttccacctgacagtgtttgtctttcatagactttccagaatagacatagtcaagatcagacacgtgagcttctctctcattttaatgtgaggaaaatcatctttcagagacaaggcaccgcttagaaatgtatgtccaggtatgaaagaacctttttaaaatggctggttgttccagatccagatttctctgcacactggacttcgtagagtaagtgtggtagacaaagagactacactgcacaaccaccagtgaatatcattgctaagaagactttgggtcgtgtttctcagccactctcacagcttttgtagacttatttgattttgaaacaagcagttagctaaatctattttccttttatgcatatatgttaattggctcaacttaatatggtgttcttacagaatatgagcccatttgaaataaggttttaggcaattttgctgttggctctgatttgtatatagcaaatttaaagttacagagtgtttcctagatagaagattagttcatttggttcattttgtctttgaagcaagccaagctcatgagccagttggttatttgtcataaatgaacacccatcactatatgctatgttgaggggaggcaagtctgatcttcgaataattgataaagtttaatatctttgtagccaaaatacaatttgcaaaccctaactccagatgtgtcgtatgaatcttgacaaccaggtcttgagatttgttttactgattgccaatcaggtatattatttgtgatgttcgtgggagcatgcaaattagaagacagtgttgtgggagttcctcagtattgaattacatgtgtgcactcaggcctgccagtcactgaattctgacttgtaaagggtttaacctgctgttccaatcattgaggaccaatttgctttttgataagattggaaaacatttatggagactttcccagttaaatctatgacagtgtccacttaaatagtgcaatttagtatattctcagataactgcaacacaaaattgaaatgtgccagtatgtcatctttctacctggaagatac

SEQ ID NO: 79205 - DNA, 1090 bp, Homo sapiens
tagaataatgagaagccattaaggatgtgtaaattgacctacttatctaacagaatagcttagagagggtagaaatcagactaataaaaatatattcccagtatatttcagttgtttttttccctgtatcttattcaagatgtaactgtacaatggatagtaatgatattttcttgacattgcagttcctggaagttcatctaaatgggaggaagtacagtccaaagcaaaccatttattattgaacacatttggcatgtatagatgtactattcagcttcagagttacaggcaagaagtggacagaacttgtgcaaattgtcagagttctagtccctaattttatgtattttgggaactcctgccttatttatcctgcagtcacagacttgagagcaataaatgcaaacctaaatgagaaaatggaatccctgacagctgtgtccgtatcaagcatcagtctctcaaacagttgccccagcctgacagtgctagtctctgtttaatggtaaaaggagactttgccataattttcagatgaagatgtttcccaaacactgtttacagaatgagatgtgactctacagatacctcatagaagacaatccaagatcatacttcattaacttgacagagtacgtgtcttaaaggaagcatcaagaattcaatatttgcatttaaaaatactttttaaggccattttatattaagccagtgctggaaaactgaattttttttattatgtataataatctcgacacccagcttctggaattgctgctttctttttacagaaattactacccaacagatttcaggaagtactagtagttatcccaaaagtggaataagcatgtattcctaagtgtttcagaaatgttttatttcacacataagtcttaatgttattgttatgattatactttataaacaaccttttccagatgctacagggttttgaatctcaaagttaacatttttcattatttgtaatcttagaaccaaatctttatttattgtggtcactgttattaaatgatttaggaaatactttcaatattattctgaatggctgaagttagtcttaaac

SEQ ID NO: 79206 - DNA, 1109 bp, Homo sapiens
taaggtcatgttgctaataaactgtggcactaggacaaaaatgcaattctagattatgtattaattccttaattcccacttaacttgtgactttgttgtatttactgcattcttcccttactgatattatgtgtaagcatgaaaataaaagttcttaacaataggcttattatcattatatgttcttttcttttcttttttccttttttttttcttagtttatctgttaatgaagtattctggtttgattggcattcctttttagtgagaatgaatatgtttttaaagtatgtattaccctcttgtatatatcttacatttttaataaaaatatatgtgtacatggtttatcttgaagtattaatattttaaagtatttgtttaaagtgaatttagcaaagccatttgttttctttgataaatgtcatcggtaatgtaaaagttcctttatttccaaaataaattttacttagaaattatatattcctaataggtgtgccaagccatttgaatgtagactatatcaaagaagccttgatgaaaatagaagatgtatattcagtcgaagatttaaatatctggtctctcacttcaggaaaatctactgccatagttcacatacagctaagtatgttgctggtagtaaatgtgggcctggggttggtggacttctgcctttgaaactaaacatccctgcttataattatgtaggaagacttttctgctgaaaagatttgttttaagacaaaagcctttgtctttaaaaaacaaaggcttttgttaacagccttaaacaaaaggctctttaaagggtaagttgcaggtcagtattgataccagaacaataattttctatctctttgagatattacaaactgattttaaccttcagattaaaggtattaagaatatttcctgactggcatggtggctcgcacctgtaatcctagcactttggaaggctgaggcgggtggatcacctgaggtcaggagtttgagaccagcctggccaacatggtgaaaccccgtctctactaaaaatacaaaaattagctaggcgtggtggtgcatgcctgtaatcccagctacttgggaggctgaggcaggag

SEQ ID NO: 79207 - DNA, 1050 bp, Homo sapiens
aatatacataatttgaccctggagagagaggagtggagggtagggagaggtaagggtaaattagtggaggatccatatcagtcaagctgctaaccactttttttttctgtaagtgctaaacacattttaaataagaaaaatgattagccaggtgtggtggcatgtgcctatagtaccagctacttggaggctgagatgggaggatcacttgagcctgggagatcaaggctgcagtgaaccatgcatgatcaggccactacattccagcctgggtgacagagtgagaccctgtctcaaaaaaataaataagaaaaatgacgtgacagaaacaatagagggcttttatctccttagaggaaagaatataaaaaagactatataatatttagttggtatgaagtgtagtaaccatgctgaaaatgtatttgttatatgtgtttttccctctagaggttttgtcagctatgattagtgtgctgttggtgtatatacttatgggattcctcttatatgaagctgtgcaaagaactatccatatgaactatgaaataaatggagatataatgctcatcaccgcagctgttggagttgcagttaatgtaatgtaagctctatttttttcacattaatattttcaagtactgtgaactcagagactattgcatatgcattcagtaatattcagtgatattttgatattttaaaaatgatataactcattaacttttctgataaatgaaacactatggacgttataaattcctcattagtttgcccaggtatattggagattgagtcaaaatcatgaatttaagtaggacaaagttttttgttcttgtttaacttttagaatacttttgtgttaactagattttttttcttaagctatcaatttttttcccttaaaactttttagggaagaaagttttgaaagtttaagttaggccacatacagtggttcacacctatagtcccaacaatttgggaggccaaggtgggaagatcacttgcgctctagagttcaagacagcctggccaacatagtgagac

SEQ ID NO: 79208 - DNA, 1060 bp, Homo sapiens
cgagcccgcctcgctgagccggccgggggcggggagatgagttgcggccccgcggcagcgccccaggtattaaatagatgtgccgccccctcgcggagccccggcggagcgtcggggtcggccctgcgacccgccgccagcggcttcggaacttgaggacagggttgggcgcctttaatttataacgtgtttcgttttccacaggatggggagggacgcgcggcactgccctcgagaactggcgctccggtgaagtaggcgccgccggccgtccgcctcccccaagccgttccgcaccgcggccgctcagcctctgccatggccggctctggcgcgtggaagcgcctcaaatctatgctaaggaaggatgatgcgccgctgtttttaaatgacaccagcgcctttgacttctcggatgaggcgggggacgaggggctttctcggttcaacaaacttcgagttgtggtggccgatgacggttccgaagccccggaaaggcctgttaacggggcgcacccgaccctccaggccgacgatgattccttactggaccaagacttacctttgaccaacagtcagctgagtttgaaggtggactcctgtgacaactgcagcaaacagagagagatactgaagcagagaaaggtgaaagccaggttgaccattgctgccgttctgtacttgcttttcatgattggagaacttgtaggtgagttgtgttgccaactcactttccgtttacctttcctcgagagtctttgtcaagctgtagttacacaggctttgaggtttaacccatcttttcaggaagtttgtatttatcaagacactgatctcatgtgaaaaggccacacggttccaaagtgcagctcaatctaagtacaatataaactccccgagataactttgactttctcttctagttgttcaaccactgtcatctaccgtaaagttaaggacgttatcttcattgtatgtcatgtaacttcctctttttacaaaggtctggtaaaataccaggttaattttcgcaacgtttaaaatagtaaatgatcgtaaa

SEQ ID NO: 79209 - DNA, 1022 bp, Homo sapiens
ccagctgggaacacagggaagaagcaaacgtgtggctcgtcagaagcaaggcggcacctaacgactccagcggctggccggacagaagagattgtcgcacccggaagtgacgggggcgaaaaaactgcgggcttcgatcacgcgctcgagagttggctctgccccatggcgttgtggggaccccgcgctgatatcgtcgtctggccccggacgcagtgtcagcggactcagcagtgtggggctcgagtccctgcgatccgattggtgggagctgggggaggacggtggtcggtttgggctgctcacggggtgggtcacgaagaccggaagagcgttgtctttgttggacgcgggggagccgtcaggctttcttcactgaagctagggagaaaacaggactttcagccctcacgcggcacagctttttagtgttgtctccgtgtttagggaaaaccttcagaacagggagtgctcgctttccctgcgatttggaccattaaaaaattcgatgcctaggtctctgcgagcctcagccttgctaactagggttttgccacttttccgggctccccttgttaagtgtagatgaaagatttaagccctccgttgcagcagctactgaacaaattcggccaagttatcagaaactgcacttgctgagatcctgtggaatgatctcatgaattctgttggaaaacacttagaaaagggcataggcagctttggaccaaagaaaacgatttagctctgccatctctagcttataccctctcatctcaactgtaatggtggcctcctaatgttgctccccaattatgcctgttcagttttctcagctgcaaccaaagcttatttcaaaaaaataagaatttgcaagactcagaaacttgcactggttccccattgcctttatcagtgcattcacacactttcctctttgggcctcttttcctcttagtattagctccttcttattaactctggtaggcagaatactagcccctcaaagatgtccacagcct

SEQ ID NO: 79210 - DNA, 1068 bp, Homo sapiens
gtgagccactgcccctggccctcagactcctttgataatccagtgaaaactataagtcctctgccctgaaaaatatataaagatacagaattttgtgtatgttaatgttcatttatcatagactttaccttatagtagtaacttaaaaacattttttgaacattcatgactcattttttagaggaagctcagaggtaaaagtttaaaaagaaaagaaggatacctgtggttgggagactgtgtgtgtgccctcaaccccatttgtgggctcctttctacctgctactccccaacctccttttattagctgtgtcaatttgaaaggttccggctggtcagagtgcagtggtgtttacaactaattgatcacaaccagttacagatttctttgttccttctctaatcccactgcttcagttgaccagcctaaaaaaataaaataaataaaaggttcctaaatttgatttttgctggggacaggtttaagtgacacttctccagatgaagggttaatagaggacttgactatagaagacaaagcagtggagcaactggcagaaggattgctttctcattatttgccagatctgcagagatcaaaacaagccctccaggaactcacgtaagctaataaaaaaccagatatacactcatttcctctgtggcatagtcacaatttgtataattgtatactgtgttaagacataatattttttaacatgcaattataattgagtatgtctatatctttattgatagcagatgggaatagaggagtacatagtattctaaatgtaaaaagtgaaatgaatactcctagggtgttcgatctcttctaagaagtactcctaaatcttacctagaatctgtgattaggtttggcatttatcattattttatgaaagtattgcctattggggattgttcaggtggagatacacctgtttctgagtagagttgaaaaattgcctccataaaagtcacgcttgttttcagttgctggttcaaataagttgccagagatctgtaagtatcttttctgagatgatctgtttcattcccagtaga

SEQ ID NO: 79211 - DNA, 1058 bp, Homo sapiens
ctgggctcaagcaatccttctgcctcagcctcccaagtagctcggaccacaggtgtgtgccaccacacccagctcattttttgtgtgtgtgtgtgttttttttgtttttgtagagggtcttgctttgttgtccacgctggtcttgaattcctggcttcaagcaatcctccttccttggcctctcaaagtgctgggattataggcatgaaccactgtgcccagccaagagacaaatttatgacctgtagggtatgccagactcagtgctggatagtagagatgttgtaattgccctgagcctgttcgttgttatttcttttttttttttatcattattctctagatagcacagttttacaagcaaatgacatatttttctttgtagcattctttaaaatattcaggtaggtgacccttttaatgtcacttattcctgtgatcctaacattgattgatgtgtaaagaaatatcaaggaagttggcttctcttcctcaatgagttttgaattagaattgtaatgagaaacattagaaattatctggtctgatcttctcactttgtaaatgaggagatttaggccagagaaataaactgaatttctaagatcatatagctaactggctgttggccggggaaagctatgatttccagtcctgtgcttttttcatcttactgcttaattattctttttgacttactatcccttgatacttcatcttcctcacctctaatctgaaaaaccattgttcctcatttcctttatgggaatgttgcaattttaagatatataaaacattgaacttcttgggcaaaatactataaaaaacttcttttttggaataatacagagagttgttaaaagtaacaagtaataaaatacttttaaatgattggattattttagttattagaaattgaagcaagaataaaagacacatttagttatcagaatgtggctttagaatattattttgaaaaatcttattctatattaaataaaccttagagagttaatacatttcctacttaactaactgttaccattaaccaagatgaa

SEQ ID NO: 79212 - DNA, 1699 bp, Homo sapiens
aaaattagtatgaattttttagcttcttaatgaatatggatttaaaactctccagttcttattttatgaaatgacttgcctttctggtaatacaatgctgattttttagtaattgccttttcattactttgttaagaagaaatgccagctgtttaatcacacctacccctggaaaagaggtaaaccttttgaacagttgaatttcatcagaagctctatagctttttggtgagaggaagtgatactctttattacaagaaacaaggaattaacaaaaataaggaacttgttgctacctttcttttctgttgaacattaaaaataatttggtttgtggactgggcatggtggcttatggaaaagaggtgagcctttgtgaagaacataatggaaaagtgcatgtacgggaaataacagcactttaggtgtagttcaggtgagcaagatgccagatagtttctactaaccatatactctttctgcttcttagcgtcgttgtcactgcttctgtggcttttgggttcaaagtagattatatatattcctaaagcttggtggaggtagtggagctatcacacactcaaatgagcttgtatatttataatacaatatagtattatagtaacagttatcatacactgagatatagtttctgtgcttgtaaaaaattcttgaagtgaggccgggtgcggtggctcatgcctgtaatcccaacgctttgggacgccgaggcgggtggatcatgaggtcaaaagattgagaccatcctggccaacatggtgaaaccccgtctctactagaaatacaaaaattagctgggtgtgggggcgtgcgcctgtagtcccagctacttgggaggctgaggcaggagaattgcttgaacccaggaggcagaggttgcagtaagccaagatcgtgccactgcactccagccttggtgacagagcaagactccgtctccaaaaaaaagaaaaaaaaatttcttgaagtggaatgatgtacaccaaatacccactttatagataattacagggatggtgaaaaattagtaaatagcttcacaaaagaggcagcgtgatacctttagtgttttctagaatttttttctggatattatatgtaagaatttattgtttgagggaaatacgaggtttcattgtttaaaatcaagagtgtattgtttactgttttacagtattatttaatatccaactggtctccaatctccattacatagggactgtacagagcctgtgaagatgtatgaatggtatcttttataatccacaatacatttctggtaagatggaatcactacctctgatcacatatcaggctaacgatagagaaagcattaggtttaagttgagggctaagaactggtttgtttaaaggtttaaattgttggaaaagagcatttgccttctttaatgaatgatggtctcacaattcagttgactttgacctaatatttaagaatataaatatattttatttgaaaggctgagtgttgccctcaaacacttgctaaaactgcctagggcaggattcattagggcttgcagacaatgtcacctaaattgctgaatgtactcattataatatgatatctgacaaaggtagtacagcgtttctgagtcatttgggaccaactgcagtggttgtttaaaatgctggttcctgcacacaattctctatc

SEQ ID NO: 79213 - DNA, 1054 bp, Homo sapiens
accatcagcccctatcaggcattcttagccacataaaagattgctagtaaatagcctttcttgttcttagaattatttgaatgcttacagttgttctgaatctgccttcttgctttcttaagtcaaagcttatttaataacatacttgatagccctcctgggaccttgtctaatgaaactcctagttctcatcaaagaaacatagactacaattcaacctttagatgacatactaaagaaaaacagcaactacaaatacataggataaagaaatcattttttttttcctcaagtgaaaaattgtacttcatgttttggatatacaataatgtgtcttgatgtacatgaaatattcaccactacagtaaacaagttagagtatggatttttcctcatacttaagggacccagtaagcaagctctaattttattcttttacagtcttgttttgcagggacaggtatgtgtctgtgccttggtggtggggtttgtctaaaacccaccagagtttagcatttactgtttccaagtgcttttcttgctcaaagtactaaataatactaaaatcatttaaagatgacagttaccattgcaaccaggcataatttgtttgtccataattgacagacaaagaactcacgttttctgcttatatctaatataacaaaagctcagagaatgattctgtgagtcatggaattttgcaactttattaaattttaaataggaaatcagtgaaggcctagagatgaaaaatatctgaagcagcaaatggcatgtatagaattaataaattgtcatgctactcagtgtatttgtttagagagtagctatgctaactaggaaagtgcactcgaaacatcctctgattagaagactacctagtgactatttgccaatacctctaattcctgctggtaatcgaaaatagatgtctaacatggaaatttaaagagaaggattgagaatatatacagagccgtaagatattgcatacatttcatgaaataagaaaaaaaaaagaaaattagttttgaaaagaaaaaattaattg

SEQ ID NO: 79214 - DNA, 1024 bp, Homo sapiens
ccccatatcccacagcctgtcttcctagatatactttatgcttaactggcttgatacactttcctcaccagatttctcatctttggggtcacttcgtttatgaatcctgctctgagccaaataacaggatggaaacttgattaatgaatttattattatacaagaacataggtactaactggttagcatattgccctttcctggtgatacacatgcattgaaaagactttttacccttacccctcaaaaaatgaggttgatgacacaaatgtggagacatggacacatcagaaaatcaggtcattattgacaacatagagctttgcctattgctcaaatgactcaatctaaacaattactagatggtgtaatacaaaaaatatatgtgtaaaccatatatctgaaaaggggttagtatccaaaatatataaggaacttatacaactcaatagcaaaaaataaataacctgtttttaaaatgggcaaaggacttgaatagacatttcaccaaagaagacatacaaatgaccaacaggtctatagaaagattctcaacatcactaataattggggaaatgctaaccaaaatcacaatgaggtatcacctcacatattaggacagccattatcaaaacaacagaaaataacaagtatttagaggatttagggaaattgaaactcgtctgaactgttgggaatgtaaaatgttgttgccgctatggaaaacagtatagagattcctcaacaaactaaaactagaactactatatgatccaacaatcccacttctgggtatttatgcaaaggaattgaaatcggtatgtcaaagagatatttgcactccaatgtccactgcagcattagtcacaatagccaagatatagaaacactgtaaatgcatatgaaaatatgaatagatggatttatgaatgggcagagaaaatagtatgtacatacattgagatattattcagcctacaaggaaggagatcctgtcatatcctgccatatggatgaaccttga

SEQ ID NO: 79215 - DNA, 1393 bp, Homo sapiens
gaaccttgttctgtagtctgctgggacggcatttgagcttactgattccttttgtgtttcttggtgtggcagattgtatattacaataatagttatggtatttttctgctccacgtagttttccagaaccctttaatcccctacataaaaggtgatacgacttccttactatcatcacaggacatttcccttaagctacgacatggtaagtcctgctactttgttgaaacccccatactggagaaacctcatgaaaagcccatatagaaatagagatgtctaaggaattgctgctgtttcagtccccagattttgaaaattcccagcctaggcaccagacatatgagagagtgagctctcaggtgattctagctccatcctctgaccatagctgcacaagagaccctgagtgagaactacctagcttagctcagtaaacacccaaaaccgtgaaagtaattgttgtttttagccactagttttggggtgatagttaagtcatctggtggttcatttatttgttgtatttattgagtacttactatatgccagatgcttttttaatgtgctagtaataaggcagtgaacaaaatagacaaatattcctgctctcacagagctttacttttagtaaggggaagcagataagataagcaaaataggtatgatgttagagataagttgcaaggagtaaaggcagggaggggagagagagaaaaatgtcagagaggaaggattgaaattttagattggataaccagaaaggacttaattgagaaggtaactaaagaccttgaaatgagtcatttgtatgcctgggctaaaagtattctatgcagaataaatgactgcaaaggtattgaggtagaggctagtctgtgtggtgaagaaacagaagacctgcatgtctagaatgaagagtgtcaagggaaagcagtaggtgatgagattaaaggtaataggcagatcatgtaaggtcttgtggatcctaataaggactttggctttcattttgaaagatgtgggaagtacttagaaatctgtcacctacatactgtctgctgatgataccagctccagtcattaattttatcccttggggtaatttggtctgagagatccaaccagccctaatccaagctattttgacacctgaaaaaccattgtgaaaagttctcttggggtggttagaattatttaggccaggccctctattctgtttgcctttggtcatgttgcttgttgaacatctacctgcagtgactagtgaagggtgagaaataaatgatttttgtagtttacattgtatcctagtgcattttgtgtgtataaaggaatgcctgagactgggtagtttataaagaaaaaaaggtttatttggctcatgattcct

SEQ ID NO: 79216 - DNA, 1307 bp, Homo sapiens
gccagaatcttcataaaatattccactatcagttcttgattgccgacgaatgaatggttgaccttcatcttcccagcccatcagtggctgttgttcacttctctccatagctttggcaagacaggcgcagcaaggactgcatttctttataatatattggttaattttaatgtcaaaacacagcaccaaaacatacaatccatatatcaaaagcagtaaagccccttcatacctacaaaagagaaatttgtgtttttaaattaaaagtgaaagtcattttagagttgatagcttttgggcagtatctattgaatgattttctaacaaaagtagccatagaacaatcaaacatttctagatattttttgttttgtagatttgtccagacttgattacagcattattatgtttattgataaaagctggacacttctgtgttgtttttttttttttaaaaacaagatcaacaaactcgtttttacttgtagattccttccaaatgataggtataaaaatgcaaggaaaatgataattggagattttcaaaataaatgtaaaattaataaatagtggtgaacattttctgcctcagctcattggcataatacattccccaacatacataataattataaaataatatagtaactgttaagttatttcaactgtccaagttttctggtataggaactttgtgtaaaatattactcagatatgggaggcttaggctgggatttttcagtttgtcatacagagcatttttaatgatttgaatgtagctgaatttggcttacagtcacaagaaaacaagatgttctaaaatataaaattatacccttggaaccaagaactgtttccctgtactctggcagttagctaatgccatcacatttgaaccttgcatttaccttttatagccagtgaatctctgtctgctgtatcttaaagaacagttctgatttccctaatggaggaagaattagcttggatactctcacagtcactatcccttacagacaactgctgagttctagaaggatttctattctaccaacacagtgtcttagggagacggactagaggacaggatgattagtttagaaattatgcttctggctaggttttaagtttcttgatagcaggtattacgccgtgctgcaaggttatggttctccagatggacaccattacattttttttttttcatatttttctggtgtcctctggagttatgcaatgtatataacctgtgtagctgtgttttacatttcattatcccttatgatatctagcatagtgagaaggac

SEQ ID NO: 79217 - DNA, 2014 bp, Homo sapiens
tagtccactttttgctagcatactattctgagacttacattaatttgggaaaagtcaagggtcaacaaatttttgtgtctgtgaggggccagatagtaattatttaggctttgcaggctgtgtgatttctgttgcagttattcagctttgccaatgtagtgtgaaaacaatcatagataatatgtaaaaccttactaataaaaacaagctgggttatgttggcacacaggcagtagtttgttcacctctgctgtaagttaatttgggttaacctttgtaggagaaattacagattatttttgtctttgttcatagtttttttgtttagggactgtagtggattatggccaagcagcagtagctagttaagtcttaatcatgaaggtagtagaaacctagaataaaattattatgcccttttcactcatttcataatatgtttgtattgccgtgttgaaaagccaaataaaatacaatccagttaagcagtgagcacccattgttttcccaaaaatagagctccttgctttgtttttgtttttttgttcttttttttttttattatggaatggaattcaatataaagagtttattgtggaccccatggaatgtgattaaattattagcataataaaaagacatcctatgaatttgatttcatttataagatctcttgaattgtaccccaggctaaataacagtggaaaatacagtttatatataatatgcaactcacaaactccagtgatcttgttatagtaatacttaatcattttgtaaatggtactaatcttcaatcttgctgaaaagaaatttgctgtgtagctagactactttgagtgaacatatgcaatttgttcttatatgaatattttcaagttgtgctattgtacttaaaatacataccagttattgtgaccatccaaaccaggatatatgtaaatgcggatatccatattgcagacatgaaaaaggttatcacaaagtagtttttccaaaacttttttctacaatctggtgtggttagaaaaagtaatgtaataataggaagggataatacccaaaaaattctttttaagtctgcttcaggcatgttgaaaacacttggtggatctgttgtggaaaaagtaaacacttttgagttttctcaaatggctaattaagttagaaatgcctatttagaaagttatattgaaataaattagctgtatcagtttttaaaaggctgtttaaaacatttgagtacctcattactgatattgctggtgaaaagaaactaattgaaactttagggcagacaatgtaagatgtgatactccgcatttctttatttggggccttaaatctataaaaatgtcttgggccattcgttaaatatattgtagatagtgtttatgaagtgtcaattggacatctcctgtggattgtcttcagtaactttttgcttaagggattaacctggtttctaacctagctactccagttgtctccacttcataatattgatgatgcctctgcctgccctatgtaccagataatgtatacttaaagaatataaaataatcatagcataatttttttattaagtcgcatatcctaattcttagtggaagtggtttttttgtcctatttcattactattttatttattaaattcagactttaccacagttcatagaaataaccttaaagtaggaggtagtatatcatctaaagtacaatttatgaaaattgagtatatttctttattcaatttaatttagtagaaggataatgataatatattggataaaaattcgaattcaaaaatgttcaaaatttgtatggcatttacaaaataatgtaacaattggatgaaatcatgttaaaactaatgttagtacaacaactcataaaaagtttgccaagcttcaaccaatgtgccattaagtaatattagatataattttaacataatcaaagaatttggattggttcttttgcgtttcttattataaacttaatttggagaggc

SEQ ID NO: 79218 - DNA, 3405 bp, Homo sapiens
aattagatttctggtcagttgcacttgtttgcaggggataaaggagtgaaatgaggataaaagggaaggaagagagattagggagactgagcagtaagcaaccgtttattctaaaaataattttgtttaaatatgtaagtttgttatagggcatggtgagttggcggcattttgtgctagcttgacttattgcttataaaattaacctcaggaattagggatttaacataaataaaatacattaaatcctaagaaaatctttcctgattccaattttgtatattctaatatgtatatatttattactttgtatgaattgtattttagtccaaatataatgcttatattatttattttaaataattaatgtttttaatcaaattaattatcacaattggctatgaggaatttcaaacctataaagtgaaatagaacttatttaaactgactagtaattctgtaacttttattttacaggtcatgtaatgtttgcagaaataaaaatggagaatggaaagtcaaaaggctgtggaacagtcagatttgactccccagaatcagctgaaaaagcctgcagaataatgaatggcataaaaatcagtggcagagaaattgatgttcgcttggatcgtaatgcataatttcaagccatggttggaacattcctacatctgttttgctgaatctcctagtaaaagtcatttttttaaagtaatattgtatgcttacaaaagctgtaaaaatgaacttttaaaactcccaccagcttttaacagtataatgttaaaaatatactgtaatttttgttaatctcaagtttgggtttttaaagacagcaagtctggtcattcagtttaaatgaatggttatactgtttttaatgaaataagccattttcttgttgttttcagtactacatagttggatttgtttgttctagtttctccagtttttgtcaacttattgtatggtaaaacatagattttttccccccaaacttctgttttataatatgtaatttttcatgaaaagaaagggctcagaaaaattaggatgtgattttggttggttttaaattactgtaagttttagattctaaggttcaagatttttaaaatttgatttaaatgaagaaatggatttttctctctgcccctccctgccattcatattttctgcataacactattaataatatcaacctccacagccccttattttattatttccaataattccaagttcatatagaactgataatgtagcaagccccaagtatgataataggcagactattcccaactttctgtctagtttccagccattgaagtgaactgctaaaaaaagaaaaataattgaaatgttgagagagatggttatgtaagttagtcctctgctgtttacttctgcaggagctgatccatttataaatgcagttttaataaaccatggaataccaaggcacaacatatcaaacacattggatcccacgatgttagacatagccatatctcctttccctacaaaagaaaagcatactgttaaaatgtgcttaccaatactgtgttttattaataatcttcataagaaaagaaacactggatacttttttgttgttgattcgttttgaaaaattgttgttagagcaaaagtcttactgaatttgtatttttaaatttttcttgggttagtatttaaagtcttaacatttatttaataattatatttattaaaccatttttcaataaggtatatagcttatttgttgcttttcattgtaatttaacatggttaatggttaattactatttaacacacatttcaaatgaatattatttgggggattagattgagtgaaattaacctgctattaaatagtaaacttttcctctggagtcacttttttcccccttcaaagtatgttactgaggaagtaaacttttttttttttttttggtttttgttttttgagacacagtctcgctctgttgcccaggctgctggagtgccgtggcgcaatctcggctcactgcaacctccgcctcctggattcaaacaattctcctgcctcagcctcctgagtagctgggattacaggcacatgccaccacgcccggctaatttttgtatttttagtagagactgggtttcaccatgttggtcaggctggtctcaaactcctgacctcgtgatccacccgcctcggcctcccaaaatcctgggattacaggcgcgagccaccacacccggctggaagtaaacatttttaaagctacttttactcattctagccttgtagaatgaccattgcagcttgagggacctagttcttaccttttcttgcaaccaacacacttgcaattgtgtctggtatgcttgttcctgctgctaataaagtaaggcccattactgtatcgggaatttctagtgtttcccctgtaataaacagatatttcaagttacaaatcttaaagattcactaaccatcctttgcagttattttggatatttccttcgtgaacaaaaataaaataggcacatttagaattcagagccaatatgtgcttgcttattagttttttagctagcaacatatttgaatcaggctggtaattcgggtaacccaggtagcacagatttttaatgacatatctaaagatacgtaacagctaaaattctgccagtgagaaattttcctgtttgatattcttacaaaagatgtttatgtccaccattatctcatcagggctgtgctgaatatttgataatgagactgatcattccgctttttctttcttaaaaatattagtcagagttaagcaaattaattatagctatctttaagctataaatgtgttaacatgtatatataccatttattatgttctactttagtgatataccttaatttagtgggctttggcagggcgggggagggggaacgttcattaatctctgaggaaaacaaaacctgttttctacttgagtctaacatatggtcccaatttattaatacttctgttaaatttgatgtcaggtcaacatttttcagaaatgtatttattctcagaaacagaaccagagagaagttaaacaaaaggttatgtaactgttcctttaatgttgtaattgaaaacttggtttagcgtcttttttttctttctctttttttttcttaaaatgccaactaaaataattagaaagtagcttatttattgcatgcttatacattgatattggaattggaattggttgttaatttctgttactggctttgctagaattcatatgtgcataaataacactaatatttatcatcttgggggctgttctgtgatctattacatgatttttgctctctttttatttttctagtatcaaatgtgttctggctgagtgaatttg

SEQ ID NO: 79219 - DNA, 1049 bp, Homo sapiens
aactgtaaggtgctgtcatttaccaacagcttctttaattaaacttgctttttttcaggtaccagcattcaagatattaagaggactctggaaattgtgctgcatttatctttaaattgttttaaaatgtgttttccagtttcattttatgatgtttattagaaagtgtgattgctatgtttttgctttttttccccatttcattccagttgtgggctaaatattatttggatctactttaaccattatcatgtaatttctctggagattagcctattttataacttttcagaacacatttaaagactatctggcctgtgtaacaagatactggttttgtctcagtatgacatttattatcctagaccatttaattagtgtttagtaggtgagcagttgactaccagttggttttcaaaaagaaatgcagtaatagggagtggatgaaaaagtgaaagtataaagtagtccatcatgttataggtaagagattattcagatcaagatttcaacagaaaaaaatcttccttatggattgatattaaagtttgatcttatcatctggaaagggcttatgcagtttttcgacaggtcctcttgcttttacctttctccttttttttctcctcccttcctagaactaaatatgtctggctgtctgatttggttgccagactaaaattagcccatagtgatctggcaactataatatttaaagtcttctaacttgatttgttttgacatgtacatctagtggggagggaaatattttggtaagtagtcacaccctaaatttatgacctgtttggattgagtgaccatgtattccagtttgcctggggatagtctccctttacatctgttacttatgtgtaattattgataactcccccttttactctcaaaagtgttctattgtagtgatgaattcttatggccactttttattttgataaatggtattgatttacttcaaatacgagtctctagagttagcaatgatattataactgcataaggacaggtttctggttttcttcctctttcct

SEQ ID NO: 79220 - DNA, 6625 bp, Homo sapiens
tcagctatttgttgaatcgtcctttctttataagtaatctgtccttcctgtgcagtttgtgcagtttgacagcaaagaccaaagtcttaaaatcagctacatgtcattatgcaagcaacctaaggtctcaaaaatttcctcttctatggacaatagatgtggaaacacttaaggtgccatataaatataaataaatatttatatcaatgagaaaactaggtaatataatatttgccttattcagtgttatactttcatggttattgactttttagtttgatttgaaccatttaaaaagtaattatcaaattttaagtgggtctacaaatttgggcaagatactcattttcagatatgtgtgccatatataaggtgatatgatattattcaaaatcctctaggtattttattattcctctcagtgtacctttaagtggggtataaggtgtactttgtattatatcatgttttatttcataaaacacttctcattaataaatggttttatagtcgggcttcagtgtgctactttctagacaaaaacaagaaccagtgcttttatatgaaaatttgcagaaattttacagatactactacaggtatatagctttttaaaaaattttattgccaattagttaatcatatatggatctttgtaatgattgttctcatttttgttttaggtggtcttggaggcattgggatgggacttggtccgggtggacagcctattagtgccagccagttgaacataggtggagtaatgggaaatttaggtccaggtggtgagtattctaacttcctcttttctttttaaatgatacatatgctagctaataaagcctccattgatgtggtctgtaataatgtttaaaggactctaattaatagttagatatttacggtgtcacttcattctgaaaaaggaatgaaaccttgagcacagctaacatgaaagagataggcagaagtcaggagggtttctttggggccagctatgttgtagctagccttttagcattttggattttgaaatgtcttgaaggcagaaggagaatatatcatctatgaacagtatttatggagtagctgaaatgctaccatatcataggcagctaaaatctgtttatccatttgggaaggtggcttttcaggtagttatttggctgctcacctggaagaactcacagttcatttttagagattggtttttaaactttggtgttaggacccttttatattttaaaatttgttgagaacccgaaaatgctttgtttatgtagttataattaccagtatttactgtattataaatgaaaaattagaaattaaaaaaattacatattaaaaaatgataaactcattacatgttaacatacataaaagttttaagaaaataaactatttttcaatgcaaaaaagaaattggtgaggagagtggcattgttttacctttccacacatctttttaatgtttggcttaatattgctgttatatctgtttctgcactttagttttttgtgatattgtacatcatatagtgtttggaaaattacaccttaaactcaagagaatgagggtaaaacatcaaataatgtcttagtagtatttggtgacttaaatagttttgacctattgaaccctcaagagtccctggaccatactttgtgaattactgttttaattgatggactaataaatgctatcagattcctattttgtcaagatgctgtagtcacactttaaattatgaggctcattatcataatcattctgatccaaacaagttttctcccttacccttagactctcacacctacctaccctctcctaaatacatactatttatattttgaaaatttttactgctcttttaactgcgatgtttagagagtccttacattctggcctgatctctaaatctgctgtaatgctatttctgtgtctatgctggaaaaaaaaaatcattgatagtagtatttctgtgtttattgtggaaaaaaaagtgaatgattacctagttcaagatattctctaactgaatgttgtgggtgttactagtgaattttgctttcttgtctgataaatgttcaaagaaacccttttgaagattcatgattagacagctgctatggcatagcactttaaaccatgcctcctgtaccctaccgcttctctagtgtttcattgtggttataccagtggtatctattttgctataatgcattatatcatcttttagtcataaaaataaaatatacttaaagtacatactgtgtattttatttgaggtatgggaatggatggtccaggttttggaggaatgaatagaattggaggaggtatgtataaagatttgtttttttgtatgtacccatcaccatttttaataaactagaaactgtgttgagaattccatgaaaaaaaagtcatggtttattgttggctcatgttctaaaggctgctagcagaaattgagcctggtacatacttaaaggaaggtgatgtgttaagaagtagctgcacaaggtagggtggatgaagagcttactggtgagatttaacatttacaaaacgtacctttcagctacatgactgacagttggatctcaaaattaatctttattccataggaatagggtttggtggtctggaagcaatgaatagcatgggaggatttggaggagttggccgaatgggaggtaggtaaatgtatgcagtgggaagtgtgtgcatatttagttttccctattattaatatttcccccctataacttaggaatgtgtgctaaaaatgtcttcagaaggcatataggcactaggggataaggacaggcctggggaatggggatgatatgtgtggcatgtgaggtaaattgggtaaatgacagactattttatatttgtgacttacgcgtcttttcataatttagatacattcctgaatgttttcaacatgtattgatatatttgaaaaggttaatttgttgcacaattttttcagagctgtaccgtggtgcgatgactagtagcatggagcgagattttggacgtggtgatattggaataaatcaaggctttggagattcctttggtagacttggtagggctggctgcatacttctccttttctttttgtaggctataatttttgaaatttggtttctctttttttgtgaaaaatcagaaaatcataatgttttatacaacttattacctgaagaaaacactttaaggattttaatatgctagctctctttttcaacatcttacatatttgaactctattttcagaagactttatgcttttcatttattgtaaatcagagcacatagtaccttgggaattttaaagtatgattatttaaaattaattagtatattatctttccatccttgtttaggcagtgcaatgattggagggtttgcaggaagaataggatcttctaacatgggtccagtaggatctggaataagtaggtttaaattttactagaatttattcagtaatatttgagtgcttgcaaagactttgcaagagtagttatcgtagtatagtaatactttgttcttatacgttaatgtgtcttgctataatttgagaaaccttgataattgagcaaagcctttctgtttgattattgtttgaaatttctaaattaactgtttgaattttacttttttgatatttctaaactatgtgttaacagccaatccaggaaccttctttccaactaaggaatctggggatttctctgatcatgtttcaggagcaacttttgctttagcaccaactttgtttccttgcttattttctataatagctattagtgactagcttattttatttgtaaacatctatgtcttttggtaaatgcagatatagcactcttaggcatctcctgagcttgagtcaggctaaggttgaaagaggtacttaattcttttcctcttgaacctttcccgtaatagcatcaagagtagttgcaacactggggaatgctgaatctcccatccgtctatttccactcctaccttttaggccttatattaagcctgaatacatggattatttatttatttttttaacctcttttgcttactgggacatgtctctgagctctccatactttattgacttcctttaattgatcaaatttcacaaatagaaaatacaacctatttaaactattctaaaagtaaattctaaaatcctgtcagcttaagacgtctacttccattgtatcttgctccttttattcctccttccatcatcttttagcctcagccatttcctattagtcctaacttccttaccttcctcttttatctcagtgtttgtacttctgtttccctgattttatattggttattcacaaaaagccaatttgagggtgatgttaatttttagaatttccatgtttggggatattacatacaagacaaaaggtttgataatgagtaagatgggagcaattgaaaaggacaggaaatcgagtcagtgcataagaatgaagtaggtatgagttcggagctaaattcttaagctctggctaacgggaagtgatagcattttttgttcccttgacaagttccgtgtaatattgagattaaaagttatgttttgctatgagtattgaattaccatgagaataaaaactgggaaacagaggtgaagatgctgaggtgaaagataagctaggaaaggagtatttacttgtaggagagtatgatgagagcggcttgagtgctagagttgtaataatttgcatttatctctgtgtatctttattttagcaattattatgcttgatattattggaaaataaaaataaggatcagaacaactgtcctgttattggaagcagtgattggtagaggatttatatatttatatgatatatttagtgatcagaatacaattttatacagttatatatgcataatgtatttatacagtggctagaatttctcagctaactaaatgtatatgtaagcaaattctgttctttggaaagttgttatctgtatgaaaataattttatgtttttatattatttaattatataaacaaattaatttcccccttctttctcaaaaatgtttatctccttttcctcctttctcctcttctccttttccttatgtttttgaaacaaaaacacaaaattcccaaatccccccgtcctttcttgaaaatccaggtggtggaatgggtagcatgaacagtgtgactggaggaatggggatgggactggaccggatgagttccagctttgatagaatgggaccaggtataggagctatactggaaaggagcatcgatatggatcgaggatttttatcgggtccaatgggaagcggaatgagagagagaataggctccaaaggcaaccagatatttgtcagaaatgtaagcaaataaatattaaggataattcaaattcttttttttcttgtatatatgttactaatacctcttttcattctagctaccttttgacttgacttggcagaaactaaaagagaaattcagtcagtgtggtaagtatgcaaatgactgcagatatgttgatattgattatggaggaaaattggttttaaacttttatacactgtgtttagacctttgcctgtccggatgcctattcctggatagtcttgatagcgtgccaggtctaattccacttcaaataaatgaattatttcactatcttttgacttagagcagtgctattactactaggtaataacaaggtttaggtaacaaggtttaggatataccctatcattgttttctgttaataaagatagggcttattttattacctcattttaaaaagataaatatattatcattctttgcattaaactttttttctcatgagaaatattaataaatggtatatttatttccttgtttatagtatagtgcaggggattatcagcataaccaactgagatgctgatgtccaattgataaaggagttaataggtgagacccattctacatacactgtattcctacccaacacaggaaacctagctggtagcatacaacccactgtcaggaatgccttggacatgggtacattttggttgcccttcttattcttttataaactgttcttaactataatgatactacttatacaaccttaatgtgttccacaggtctgtggaagattaggtggtttatcacttttaaaaaagagctttttatataccatacttaacttttgttacaaatatcttaattgactaaattctcactttttctttcttttgcaataatgagagaattcatgtgagtgttataaagtaaaatattttttgctagtattaatatttttctgctattgcatggaatctcagcgactgtagtcacaataggaaattacataagatagcatatatataatttctgaggtcatgaaggaataggtttagtgttctgtcacaaaatagcctttgtggccactacagagataatattatctcatatttctttatatctaactcttttgtagcttttattatattaatagttatttgttcaagttttcttccatcctacgtggaagctcttgaaggcaagaattgtctttttatcttagctccttt

SEQ ID NO: 79221 - DNA, 12066 bp, Homo sapiens
ttttaattatgcttctaattaagggaggagaaagttctgagaagaaactattaacctttaagagatgaactttttcagagtatcactgtgtaagttagtttttaaaaaagtttttaatgatgcccagaaagttaattctccatcaaaggtggcagttttagataccttagaagtaaaattatctgctcttccctctgttccagtctaatagcatttattaattaagtagtgtgatgggaaaaactgggtgattgtttggatgcttacaactatttaatgtgggaaaaaaatgaggactgttaaatgagaaaccaaatccttgctttgaaatagcattgggtaatttcaaagctctcaggctgattctccagctactttgctgaggtctagcttagtggagagttttgtgaggtgataaatatggaatacttatttaatatagacttccattcttataagcacaactgagggtttttgtttgtttgactttttttaattcacagggagaatgatgaatcagcaaaagaagagaaatctgacttaaaggaaaaatctacaggaagtaagaaggccaatagatttcatccttattcaaaagacaagaattcgggcgctggagaaaagaagggtccaaatcgtaacagagttttcattagcaacatcccatatgacatgaaatggcaagctattaaagatctaatgagagagaaaggtaactatctctgaaataacccactgttggataatcttcatataggcaggggagggaactacacaaacatttttattcctctgagccacacagactcaaaaaattgatttttatttcttgacatgtgaattaatcttttcctcttctttctcttgacacaatttcattacaaggtagtatggatatttttctttttgccattttagtgggatagtagcgagccagcatatgcatgccaccaagaattttgttaaagtgattgctttgtctagttgaagtttttatagattttaaaagggctattgcattagttaagcaatacatttagcgtgttaagaatgaataataaggtctgattatttattttttttccaaaagctgttttgttactatcttggtggagtctggaatctggctgtggaatttattttgtttgcattgtcatgactgccatgatgctgtctttgcagttctaaattaaaattgcattactgctgttgcagttttgttttcagaataatctgaaaaccttcatcttatatacatggttggttttggggaaaaataattttaatacttgatcttgtaaaagttagttttgttatctcttgaaaaattgagtttcaacagtcctgcaaactatgtacttggctttgaggctgatctcttctaataaatttttttttttaaattgcattggtgtatctgttgtaaggtgacaactatttgattggttttattcattgactttatttagaaagtgtgtggcttgctgtgaagcatgatttgtaaatttagtttactgatggcaaacatgattgaagacattcaggtagaaagtcaccttaaaacagctgttgtgtgtaggctgaccaaagttatttgaaaagtgctaatgttgatgttttttaatatgataggttaagggaccatttgtatgtatatgtgcatttgttcaccaactatatcatgctggccaaaatatgatctgtagtatgaattaggttaatatggttgttagcttttttttagagaatgtggatgatgtacatttctgaaaattagttaaatttacatagccattgataggaggtatgttggtctggttttgattgttggtgaataataggtgcttctctgtagagttgtgcacaggtgtgcagtaaagcaagatactggtgtttaaatgtattgtttcttggtatcttccttttgtatgtcttatgtagttggtgaggttacatacgtggagctctttaaggatgcggaaggaaaatcaagggtaagtgctgtgggcaataatctgcttgaggtttaaaagttcctcagcagtttactttttgtataatacttgtaccagtttttggaaacttaagtttcattttgttttactttattatgcaagatttgaggctctataccagcaagtctgacacttatacaaacctagctgcctggaagggatgggttttgtaaacactccaaaggggcattcacttttccaatgctctaaggtaatacttcttcttagccaataagattttagcataggattttttttgttgtattttgatgtcttcaaggatactttaaaagtcactgaattgataatattcctgagttttttgagggctatagcttaaaggtgttagttcagaatgtatttttgaaattttactgaaaagttaaatttggtagcctgcaggactacatgagaggcagtgctctgaccaattggtatgaatgacatttacgattatattgacgtagaaggaattggttgatagtatattttgatttttagcaataagaatgcagtatactgaagaatacaatggaaaactcttagcaatgtttcattatgttagtaaaactagttgggtgcatgatgaataaaaattttgtcattacattcatatgggactttgaatggcaatcacagggaattattttttaaataactctccaaattaatttattattagtttatagatgatttttacatacttccaactgggtgctgttaaatgtgcagccagttttaatctaatagagaacttgttaaaaataaaattaatatttattcactattttgattttaatagagttgaaaaatatgtcgtagacaatacattttttgaaaatatttgtaactacagaaggataggtctattggagcctttagttatttccttgaattcctgttgatttaatttgtgcagtgacattaattttaacttaatgaaaagtcacctaaaagtgaaaaatgtgctccaagcttgttacatgttagagtctactatctttaatagatatatttaaaaatttagagaaaatttgtggttacttgcctgttatgttctggaggtataaaagatgaagtgattctaccatattattaattgccttaatgattgaaatgttagaactgattattaacttcatgtactgatctaaaactttttttcttttgcatattttgacaaatctacctggatatagggttgtgggtaagaaattttttctttaagtatcttaagtcaaattaaactttggaaaaaaattagcacataaacatttcctataaattttttccctattaagtgtggttgaattcaaagatgaagaatttgtaaagaaagccctagaaactatgaacaaatatgatcttagtggaagaccccttaatattaaagaggtaagatttctcatatttagaatttaaacatttgactataaagacatgttttccttggattttcaatttggtaatatatttgcctgactacaacttttttttaaaacataggtgttcattaaagcattatatattgacgaaagttttacttgtacatgattttatatttgctgttaagcagttatcctatatacttgattggttccaagttgttaaaaataaaagcacataatttaaaaaaatttgaggacctagaaattcaaaggggataaactttaggtgctaagtttatttggtacagacattttcaatatttagattttgttatttgagaaatataatatccttgtaattgataattaaaggtcacttaatgcaaatatgttatggatttgaataaaattgatattcactttttatcagagttacttggaaactgtactagattaaaatttaagaaaaattataactttgttagtgaaatttataactagaagttggaatcccctaaaatggaaatgtcttctttgtacaaaattgtagcagtgtaaacaggttgacaaaaaatgactagaagatacaaacaaaaaatttacagtttaaccttgagaatgattggcttgaatagcactcatcttcataggttcctttattttgtattgttaatcttaatagtttgattacagacctgttatgtacatatacttgctaaagtctgtgttaaaagagataaatagtgtaactttgggaccctgaagattttgtactaatactgatgctaatcattggttgtagagcagtactgtcacccatggcatttaatagtatactaatgatttgattcctggctttatcactttctagtgggtgtctagacatgctacttaatttctctaaactgaagtaatggtagtagtactactgataatagaggcataccttggagctattgtaggtttggttccagactactgcaataaagcaaatataacaataaactgtgtcatatgtatgttttggttttgcagtacacataaaagttacgtttatactatattctgtttaaagtgtgcaatagcattatgtctaaaagcacaatatacatgccttaatttaaaaatactttattgctgaaaatgctagtgatcatttgaactttcactgtaacctttttgctggtggagagtcttgcctcagtgctgatggctgctgactgatcagggtgatggttactaaagtttggggtggctgttgcaatttcttaaattaagaacaatgaagtttgctgtatcagttgagtcttcctttcataatagatttctctgaagcatgtgatgttgtttgatagcattttacctacggttgaacttccttcaaaattgaagtcagtcctctcaaacctgctgctgctttatcaattaaatttatataatattctaaatcctttgttgtcatttcaacagtgtacatagcatattcaccaggtgtagattccatctcaagaaatgactttctttgctcatacaagaagtaactcctaatttgtttaggttttatcatgagtttacagcaatttattcacatcttcaggatccacttctaattctagttttcttgctctttccatcacatcttcagttacatccaccattgaaatcttgaagccctcaaagtcatccattaggattagaatccacttattccaaactcctgttagtattgatattttgaccttatgaatcacagatgttcttaatgacatctagaatggtacattctttccagaaggtttttaatttactttgcccaggtctatcagaggaatcactgtctatgacagcaatagccttacaaattgtatttcttaaataatcaggcttgaaagttaaaattatttcttgattgatgggttacagagtggatattgtgttaatagacctgcaaacaacattagtcttcttgtatatcttctttagcactcttgggtgacaagtgcattgtcaatgagcagtaatatttcaaaaggattttttttttgagcaagaggtctcaacagtgggcttaaaatattcagcaaactatccttaaacaggtgtgctgtcatccaggctttgttatttcatttacagagcacagacagagtagatttagcctaattattaagggccctaggattttcagaatggtaaatgagcattggcttcaagtcaattaaggttaccagttgcattagcccctaataaaagagtcaatgtggcctttgaagctttgaagccaaacactgacttctcccttctaactctgaaagtcctagatggcatcttctttctatagaagactgtttcattacactgaaaatctattgtttagtgtagccatctcatcaatgatcttagctaggtgttctggataactttctgtagcttctacatcagcacttgctgcttcacttgcacttttatgttatagagatggcttctttctttaaatctcatgaaccagcttcaaacttttcttctgcagctttctcacctctctcagccttcatagaattgaagagagttaaggccttactctggattaggctttggcttaagggaatgatgagggtgctttgatcttctgttcaaaccactgaaactttcagaccactgaaatgttataagcacaaacaagtgaagtatcttaatagttcaagaagcatcttctgtgttgtgttatccttcttccccaaaggtaaccggtatcttaaattttgtgtttttacctgtttttgaaacagcattaaggctgtttcactttctcatcattcgtgcgttcactggagtagcactttaagtttccttcaggaacttcgatgcaagaggcccggcttttcacctgtctgaacttttgacatgccttcctcactaagcttaatcatgtctaacttttgatttaaagtgagagacttgcaactctttcttttacttgaacacttagaagccattttagggttattaactgacctaatttcaatattattgtgtcttggaatagggaggcctgaggcgacggagagagatggggagcggctggtcggtggagcagtcagaacatttattgattaagttcgctgttttatttgggcacggttgatggtgccccaaaacaattaaaacatcaaagatcactgatcacagatcaccataacagataataatgaagaaggttgagatattgcatgaattaccaaaatgtgatacggagacacaaagtgagcacatgttgggaaaatggtgctaatagacttgccggacacggggttgtcacagaccttcaatttgcaaaaagtgcaatatctgcaaagcacagtaaagtgaagcacaataaaatgaaatgtgcttttatttacctaataggatttttatgaggattaaatgagatacatggtaaagaacttatgttctggcatcagagaacctctctaactcagggcaaattacttaaactttctcctttgttttcataattactaagatgggagtaatgatagcacctacctcatagtgctatcaggactcgaagagttaatatatgtaaaccatttagtgttggctatttattatgcttgtgatattaccagtgtacaaagcactaagcacagtgctcaaaatattttagctacataataaacgttagctttagtaatgatgattgttactcctgtccaagagtcttttgttcctgagtgtgagataatagcttgaaatcaaaggccatgctaccaacatataacatgtatcccagatacctttatttgagcttgcttccaaattattctagtcctgtttgagtctggggtttattattaaaaaagttattaacaggaatgtatagaattagcagagaaaattttgactgttgtggtttgtgtcagccaattattggtggtttttatgcataagccagggccagtgcttcagaaatatattggtatcttaattttctttaaattataataatcagaatgattattttgaggattaaattaggttggtgcaaaagtaaatgcagtttttgccattaaaaaaagctttgaattaaaataatggcaaaaactgcatttacttttgcaccaacctgacaattttctgttttatgttttctgtttctcttcaaaggacatgtactacagattcttagtgtctttttcttttattggaaaaaaaagtttattggatgctaaatatcatccaataaacttccatataatattggatgctaaatatcatgttattgtgttcttttaagtttcagcacattgtagatcctcagtaatatttcagagaccctggagttatataatccaagttgaaagaggatgccgccatttttaacttttttaagagaaaaaaaaaaggctaaatttggcctagctaaatgatgagggatttattcagttgacttttttgaattaatgtcactttggcagtccctttcctgggatatctaatttatagaggggtggatggaatgaatgcttagaactgctactgaggaaagtctaaggaaggtgtatttccaatgttccttaacagactttagagttacatttttttcatttaattaaatgcagaatagtagcagttataaactgctattgtaggccctccaaaagcaatagcagtcagtaaccagcaggctgacagcaaggggaaaagaagagtaaaagtcatgttatatagtaggtggtttgttttatataaattttattttatatatgttttatgtatgtatgcatgtattgtatgtgtatatatttctgtcatatatatgtatataaaagacagatcaacacagcaatacatcttgttaatgttataagcacaaacaaccgaaatagcttactatactagttgaagaaatatcttctcttctgagttatctttcttccccataggtagccactgtcctaaatttcgtatttttacctctttttgaatcctcaggcctaaagaatttatttattaacttatatgttttgaagcattctttgatacattttttttttcttttgtaatcctttttattccttcatagtgaagaaatatgttgcaagccagaatggttttattattttaccttttcaccttttattctccagccatcctagagaatttattaaaatcacttgactttctttttattagtactgtattcccagactgaggccagcaaagtagatttgatggttacctttacacttcatcttagcctaaagatagagaagtgatgatggggtgattacctttaacataatcatttggcattgcagatgatagtctatccatgtgtttatgtggtttttgtttatttatttttgttttttagtattccacctagtgggatgagtgagaagtacatttatgtttgtgtgtgtgtgtgtgtgtgtgtgtgtgtgtgtatgtttggttttgtttaaaggtagggtgtttctcttaaaaaattaatgaacctaacaaaaaaacaatgtttaatatcatttctcacttggacatttagccctcctttatctctcctctcctccatctcagattataatcattgttgaagaaggtaagagtttagaaggtgggtaactgtattttgttcaggaataaaatttacagattacagtcggccatcctatcctctaccccagtatttgggttttataacagtctgttccagtattgaaaagctttgaattagtctgaatttggcattccattgggcatccaatagtgagaaatgaccattcctacattttggaaagaaaagttgcagtgagtacttcgctcttctttgagttacatgtatgtatgcatgtaccctagtgtgagagcaaaattaaactaatttcaagttcttaagtggctttagtgattggaaaaaaaaattaactgacatctctggaggctgaaatattttgtttatccacaggtttttatgggactcaattctctggatgagaaaaaagctcactcttcaagagggtcaataatttgagccagacaggatagctactgtagaatttaaattgttattttaattttgtagaattagtgatgtatttagtggaatttaacattcaatgtgtgttataggatcctgatggagaaaatgctcgtagggcattgcagcgaacaggaggatcatttccaggaggacacgtccctgatatgggatcagggttgatgaatttaccaccttccatactcaataatccaaacattcctcctgaagtcatcagtaatttgcaggccggtagacttggttccacaatttttgttgccaatgtaagttcaagctttagtctaaaatttgtcattcagatagatagctaatttgattaaatgaatgagttataggtttatagaacattttgcttatttttaactaaagtaagtgaaatagtaattattgtaaactcaaaatcaattgacgtatatacatatatatacacacacacacacacgcacaaggttagagtttaaatacaactatttggattttttaaacatggaactgtgcagtttatacacattcaagcagttcttgaaattatatgtgttttggtttatattggtaaatggatttctttttttagtcttgatatttgtgaatatgcatgccatagttggtttgttatttgttctaagcatctgaaagtcagtgaaaacaatacttttcaaaatctggatttctcttggtaaaaatagatatgcaagtttcaaatgtacaaaacaggtttgagcagttgagagatgattttggaaattaaaaaaaataaggataaggaacaatgtagacgtagcttaaatgattttaagcaactgaagatgttttaaaatttgaacattatcaatatattgttgaactagaattatggttctttatggttttaagagtttagaaaagattttttgtatttacagatggggagatggatttattaggtatgtaactttatacaattttatattaagcttgacttcaaagttggttggaagaagctaaaggaagtgttcagcatagctggaactgtgaagcgggcagatattaaagaagacaaagatggcaagagcagaggaatgggcactgtcacttttgagcaagcaattgaagcagttcaagcaatttgtatcctgatttacatttcagcattgtttatgaggttgaagaagcataataccacctttgttttggcggggggtaattgaatttaaggttgcctggcttagagatgtgtgttagactttagtctccagcaaataaaacccttagtaggtccaagtattaaagtcactcttaaaacttgaattggccatattgtacagggctggtatgaagttttttcttttctttcttcctaccacaattaattgtatacatggatttaacaattgtgtaatctattgtatattaatgcagttactttaagcgaagccttacgagtttacttttttcaatggttgaattaaaaatacatcttattgatgaaataaaaccgtaaagcaaagaattgaatatttttttgagtatatgaaagtggctaatatcaataagtattaaagatgttaattaaaatatcagagagttggactctaagattattaaaaattagtttgtgttctgttataattttatagttatcttaactgactttccttgactgaaccaacagctatgttcaatgggcagtttttatttgatagacctatgcatgtgaaaatggtgagttcctgtatatcacttcaacctccaacctcttcagatcttttattggctctcttctacattacagttctttgtggtaatatgttaaccatattataaactttcttgcaattaggatgacaagtctgttcctcatgaagagtaccgttcacatgatggtaaaacaccacaattaccacgtaagtaaaagctattatgagaaacaacataggctttttttggtttgttttattatgtgctaagcaacactttgtttttgtgcctacatcctagtttctcacaatttgggattagtttggagttatgaagatagtttggcgctattgattaggaagactgagaagataagtgttacgtgccattttttttttctctttggtaacttttcctgactaatcagcaatacattctaaaatgtttggtaaatttatacacttgaaggaaaaaaagtcctctgtaatttcaccatctgtgggtaacctcattataacatttttgtgtattttcttctagcctgctatgtatattttttacatagttgggaacaaaaataattttgaattattttttgtttaacattagagtataagcattttttcatgttgaagattcttttcaaatatttttattggtagtataatagtctatcatatagatgttccataactatttcactgttctgtattttaggtgttttaacttttcttttgagtaaccacagagtaacacatgcctttttgttcacaaatctttgtaatgtttttgagtacttccttcagacagatattctgaagtagatttacagttctcatgggttagtattatcaaattgttttccaaaatgactataacagtgtaatatacttattgtattatgtgtctcagtgcctctgtg

SEQ ID NO: 79222 - DNA, 1232 bp, Homo sapiens
aagtacattgtgggagtggttgtctaaatgaacagtttgggaatttagtacttggaattctggatgtagtaccaatattttggaattatgtagcatcatttccttaagagttttcacatatatttttactttctcttccaaagtatttatgacttggaaatagttcagaaattatataattatggctcagtttcttaataattagatcatccctgtagcctctcaactgttatgccttttatagttttttttctttttttgttatacactgggaagaaacttaagataaattttaattctacatcatagatgagcagtttagcagtatttttaagatgcttcttatgggggaaaaatgaagaaatttactttctctgatcatctttgagtaaatattttaaagaaaatattatatataatgttactgtttttaatggaattttcagattgttgtaagcaaatatttaatctatgtaaccccacctaagtcaagaatagaacattgtaagtacttcagaactttgtgtaattttcacaattggtttaatccaggaagaaaataggcaggggaaggggtattaatctagagactatatagatatctgcttactgaatagagtcttagttactttacaaacattcactgaattcatctaagcctattatgtaaacaggccctttgggaattgaaaagaaaggtttgttcttctatctgcggtactcagaaaccagagaaaaggcctttgtgccttttggctgcttgctgccattttcaaaagtgtcactctgtttagacaggtaggtactttctagatttagacagttgagaagactcccccctaggccatgccatttctgatgaaggaatatgtttgatagtgaagatgtcctttttaaggtctaaaaaaaatggcaaagcaagtttggtccaaatgtctctttctttattctagcagtttttctggcaacatctgtgctcagatgagtatggattcttaattgactgttaattcattaaaaaattatagcacaatgttatatgcagtcaccgtgcgaggtgctgctgataccaaagcagatagtttttgttctcatagagtttacatactatatttatggctgtgttacctacaaagaagagtagtgttcaagaagctctgtatatattatgtaacaaatgactgcagttagaggtgtgtggagcattgcaatgtgtggatcaccagaattgc

SEQ ID NO: 79223 - DNA, 1925 bp, Homo sapiens
gatataggggaagtttggtatctaaacctccatcagattttctattcccttctaaagtctcttcatgatttagcaagacaggaaaagagaaaggagaaaggtggagaaagaatccttttctaatttaggaagagaaaaatataaggtgaagaaatgaagaaatattactagtaaatacagattatttccatattgcttataattcgcctctccctttctctttttcccagaagttgaatcgagtccaatttactctcagggatttctcttactgtctattccataagaagatttgtgatggtccagcatgagtcattcaaactgaataactagcgacctagtcctttttttttttttttttttttttacttcgtgaactagtaggagtggataacaaccccaatacataaaccttgagttgattaccatatacttttaataataaaaataattcattgttgattataaaaattaccataatattgccccaaattatgtattggttggaattgaacagagtactgcttgtcatcaggattgaaataatatttgctgaggttaatccatagttattgagggtgggagaccactatgtcttattcttctttgtattcttaaggcctagtaaatatttgtggaagaaatgcagaagtgaactttcatgcttatgaaactcatatacagggaatttagtttgcatattcacacctttagaaaagatccgttttccaactgtagtcttcttctttaacgccaaatggtatactagctctccttttcttaaaaatgaataggagggaaaagagcagtattattataactttattattcatgtgtaattaagtataactttggagtaggtagagattgagagttatattagggtactataaaatattaagcattggagcaaggtaatgtgttctttagctgagtgatttttattaggaataaagactagaactgtttcccccagctttattgaggtaaattgacaaaaattgtatattttgaagtgtacagtgtgatggtttggtatacaaataaattgtgaaatgattaccacaatcacgctaattaacgtatctgttacctcgcatagctaccatattttttggtgttgaaaatacttaagatctattctttaagcaaatttcaagtatacagtaaatatgttaagtatagtcactatactgtaccttagatctacagaacttactcatcttataactgaaagtttgtgcccttagaacatttccccatcccctgctgccctccacctctggtaaacacccttctactctctgcttctgagtttgacttttttaaaagtctgtgtgtaagtgagatcatgtagcatttgtctttctgagtctggcttttttcacatagcccaatgtcctctaggtttatctctgttgttgcaaatggcaagattttgttctttttgtaaggctgaataataatattccagtgtggatgtgttgtgtaaacataaaatataatatatatcatgtttcctttaatcatttatctgtcaatggacacttaagtcgttgtttccatatcttgggtattgtggatgatgcagcgaacatgggagtgcagatatctccttgagatagtgatttcattttcattggatatatacccagaagtggcattgatgaatcatgtggtagttctgtttttaattttttgtggacccttgatgctgttttccataatggctgtaccaatgtatattcccaccagcagtatctaaaggttctttctccacgtcctcagcaacagttgctatcttttgacttttcgataagtcatcctaacaggtatgaagtgatattgcagtctggttttgagttgtatttccctgatgaacagtgatattgagcaccttttcatataccttttggccgttggta

SEQ ID NO: 79224 - DNA, 1029 bp, Homo sapiens
ttccttttggtgaattgcaatcagtcatcaataactatttatggaatgtccgaagggtgcctaggcattgaaatggcaagagacttatatttgcttaattcaaaggatttctaaaggcagtctgaggacttgcaagaagtctttaaagatgcaaagtggtgtgttctttaactgcccctacctggaatgaattgaacagtctgggtgttagggctttgatgtctaatcccgctttgcaagcgaagactccactggtgccaagcgacaggcgggctggtgggcagacatggcaccaccaccgggggctttcaggactggtccagccctcccaggcaggtgtagggccgactgcagcaacagcggccctgaccccagctcccatggctcccctccccccgcactcccaccccccgcacccggcacacaccatctcccagtcacccagtctcgaccggttctcgcgagatccgggttactgagcgctcggggccttttcaaatcgggatccgttaccgcttccccggcagccgccattgtcgcgctcggagcccctcagctcaggcggccgaggcggaggcagcggcggcgggatggcggacgccaacaaggccgaggtgcccggggccactggtggcgacagcccgcacctgcagcccgcagagccgccgggcgagccgcggcgagagccgcaccccgcggaggcggagaagcagcagccgcagcacagcagcagctccaatggcgttaaaatgtattgtcttttcctccgggaaccggggcgaggtggggggcggggagtctaccgggcggctagaggccgggctgtgccccgatgggggacaaccacccccagaccccggcccgcccccgggccatcggcttcctgaggagcaggtgcagctgggccgctcccaggcccttccccgcccgccccaggcctggccgcctgtggtctgggagccggggctgggggcccggggaccagcgctcttccctgatttctagcccgagacagcgaacacccctctt

SEQ ID NO: 79225 - DNA, 1061 bp, Homo sapiens
ttagttataatttagtaattttagaatgaataataattagaattgatatgctgttaagtcaagaagtgaaaatatgaagtaatgagttcaattatctcaccaactggcctgatttaggatttgcagataaaagtgcagagattacaaaggagcaggattgtccctactagtgagcctttgttaagagactgaaaagatacttaatgcattaggcttctattgcattaacttatttagaaaggtaggcaaagacagggaaagaataagactgataggccctattattctttcaacttttatttcctatttcaacagtgtcgtgcctttagagacctctaggagtggtcattactatggaaaggtgctggctttggagagtagggtctgggttctcgctccagctcttgcattgtcctccttgacctggatattctaggctataaaaggggagtaacaatggctgctagaaactggcttgagagtcactgtgagtatttgggtgacagtgctctgaaaagcatgcagtgccttggaaaggcaagatattcactttactcagcagccacagggttgagattagcaatggagaggctttctgtttaagctcttcgtatacttattttgatcaggatgagagtttctttgcagctcagcccaaatccttgttagaaagcacagtacaaaaatagtttcctaagaaatagaaggtggagtagaggttgctggttgtctccccagtatccgtactgtgttttcctcattgtactttcagtgggaatggctccatgccattgtcagccaatcagcacaactctatgtcttcttccagagtaattggccaggtgggcacataacacaggtaaacttgaaccaataagcacccacaactatgctgaccacagtaatgtctcagtggcttaggttagtgaaacctgaaaggagccctggaccctgagctcagtaatttgggaagagacaaactttctctcctacggaacatacatgagcgagtagatagtcctggttgcaattgacagtcatcttgtttttataagtgaaat

SEQ ID NO: 79226 - DNA, 1263 bp, Homo sapiens
tcagctgtctccctcagccaggaaattcatagcctaagcttggtaaactaccaagccctgcctgacagatacaacacagttctttatctcttattttgtccacccgtttttctcctttccttctgcatattttccctaatcacacagatcattgtgagaataaaatgggttaatatatgtaaaccaattagaactgttcctggcacacagtaaaggcttaatcaatgatagctagtattattagtagtatttggccttttttctttgttctttcttcatttttttccttttcaaactatggttgtaaagcatccaccttttgaaagtttgcctttctgccctttcacgctgataagtacctcagtttccaataaacttttgttcaggggcaaacatttacaatgttgacatctcttcacaccaccaaaaatattcatggagaattattttatctaaagctgtctttttaataataaaatagccacctctaccttcttcataaacttttaagatgaattggtaattcatcatagcaaggttgattttagaaactaaagttgcattaattcattaaatacactgaaagtaattttgtatgcttggtcacaaagaaaatataaaaacaattttataaatagatttgcagttattttctttcaatattttcttagtgcctatgattacacaataccacctatggagaaagctgttgtgaaaacggacattcagatagcgctcccttctgggtgttatggaagagtgggtaagtcatttaagaaacaggtaactatttgtcaagttctcctttgtgatagattcttcatgtttcatttggggtaataagcaggcaatattgcttgggctgtgtcctaaaagaagcaccatttgtgatagcaaatgcactctttgaaaggctttatttacatctctgctttgcctctttttgacccttttatttttctccttcctcactggagcttttaggctcacactggcctagaaggctgttctcagaacatggcattttatattatgagagtaaaacttctgacctgttggtcccagaatgtgtaagcctacttaaccttttcttgtttggccatggggttagggtaagggatactcttcagtgttgtagaggcactgggaggagctaggacaaaatggagtacacgtcaacaggtttgatttttctggagcggatcagttgttaccagacagttctttgcaagagcgtaagttctttttgactaacttcagagt

SEQ ID NO: 79227 - DNA, 1256 bp, Homo sapiens
attaattataggcctgatgcttgagtctgcaataataaggtgtaaccttagctttttatttttttcattttttaggattaaaaagtatactagcattgaatcattgagacttagtttttggcatttttacttaactgatattagcccatttatcttactctggttcatgtgtttcctacaggcatgtcttttggcatctgaatcatgaatagtggggtcccaagttgtaggctatggtctgctactatttggttaggtttgtttccctctcccttcctcttcctttcccttcccatctgcattgtacatgttgtggtgtcccatcttaaaaccaaagtcttcttcctcagtagtgtgttcctgctggccatacttctctttcttcccctttgaggcttaacttcttgaaagagcagcctacagttgttcccgcttgctcacctttcagctcattctagcagtccttctcccctgtctgcagcaccacaaattctgactgaagtcacatgggagtggtttaagttagttttgaattaaaaccttgtggaatttttctaaactagtctttccaactttggtaatgcagtatgatgaatatatattctttaattcaaaaccatgtgctaaagttaagatgaagatatagatattataggtgaagagaatgacatgcttaaattgcatcagttatctctgatatagcccttcccccttaaaataaccaatgtctccttttttgttttttagctccacggtcaggcttggctgcaaaacactttattgatgtaggaggtaatatatttccttttttattctgtaaatgtttgcaagtatttactttgtctttaaaaggtaatattcaaatgacagattttatttttaagaaaagaaaatgattagaggaaagcttgttataataggaggaaaagctttgtggttattttaagtaattatattttgtttaactactaacttaatttttaaaataatgattacctaattaataatgacagatttaatgatataataattaagtaattatttaagcaacaaaagttctagaaaacacaggtctatcttgtaagaattttcttcataagagagctatctgtctttagcaaaatttaagaagaaaatctttccctgaagtcaggagagaaaacacttttctctaaatttgttaagacagtcctctgtgttacctgtttcccttataataaagcctttctcatgtttgtctcaaagttaaccctacc

SEQ ID NO: 79228 - DNA, 1147 bp, Homo sapiens
catggatatgtggtaaaaactggagtctctgtgtgattccagcctccttgttctttccactgcaattaattgtggagattaccctgctgcatccccctcaccaactaaacacgtccagaattagctcacttttatgtgccactgcaagggctaactaagcacttaatgaaacctggctatcctagacctgccccttagtctaacatttggtgggtgtggtgtctctccatagtgtcaccaggtggtgctgtgggacaagacaggaccccaaaagtacaccctttagggactaaaggggagctgagttttacatagcagggtggacattgacagcccactcttgggttgaggattccttgggctctgtaagttatgcccgatgttcaaaaatgcttttacaaggtcaactgtggtcattttgggacagtaacttaaggatataaataattgtatatattttcaatgaagtttcaaatgattgttcaaggaacgggagctttggaataacaactggatgtaggtcccagctctgtcattaactagttattacttaacctttctgagcctgtttcctcattttacaatggaaattagtgtgcctgcctctagaggtaggaggattaaatgataatgtgtatgaaatacctaatatagtacttggcacatattagattctgtgagatataatttctgtccttagggacttcacagattgtttttatgtggaaactttttcttttattcgactttgttactaatttttgctctgtttaaaacaactttctggaaaaaaattcatgtaaaagaatggaaagttagtttgcctagtggttggtatggtgttattcataaaatcacattgtggtgtgttcttggatgcagagaatcttaacaatctcccttaggcacaagtttatcatagttggcaacagtttttatttctgaagagagatgttgttagaaatcccaggctctaaataagggtcaaagggaaaagttgagcattcaggattctgttcagaattcacatctggtaggtgtggatagtttttcactaaaaaaggtttccaacaaatgacatgccaaactcttgacacagtaaaacttttgcctgaagtcagttaatcactctgccagttccaatgca

SEQ ID NO: 79229 - DNA, 1243 bp, Homo sapiens
tctctgaggagaaatatccctgatacttatatcctgtaggcagagaaggcttttcttggaggtcgaatggcaattgggtggtaaatgaatttggaactactgaaatttttataccgtcaacattcatgcaaaaaaaaaaactattgagggcctttttttctgccatacatttgaattgacttcaaacttcttaatttcttttagtcacttaaaggtttttcacattttcgtggcccaagcataaagatcacctatctgcaggattcaagacacccaatcatttgagtagttctgataggactgctttacagatacgttagcagaggcctttcaaaaagggagtgtttttgtatgttagaagatactataaagccaacaagcaaatatttgcaacttatatgaaaaagaacaaatgagaaaaaaacatacacaaaatatagacaaggacatgcaaatgtccaacaaatgggaggaaaaaaatccagcctcactagtcatcagggaatgaaaagtaaggcaatgagatagccattttgtactcatcatattggccagaatgtaagagattgttgccatcaaatattggcaaggattttggaaatgggcattctcaaatattgctgatggaagtttgagtggctacaccttttttgcaacctatttgatgaaaataaaaagcattcatatacaaggatatacttaaagggctgcttcatttattatagcaaaatgtaaaagcagcctgtgtctgatattatgcaagagaatagttacatagaaacaatggtacaggttgggcgttgtggctcatgcctgtaatcccagcactttgggaggctgagacaggcagattgcttgagcccaggagtttgaggcttatttgagcaacatagggatactttctctctacaagaaatacaaaaattagccaggtgtggtggtgcctttgtacctggaggctgaggtgggagaatcacttgaggttgaggctatagtgagttgtgatcataccactatactcctgcctgggctataagagtgagaccctgccaaaaaaagaaagagaaggagagagagaacccatatttccatatcttgtatctaaaaagaatggctaacatttacatatattaatctcaaaggataaaaagaaaaaaataaagtagtatgtaagatatatttctgtaacattagctatctcagggagggtaagagaatattataagcttttactttatatgta

SEQ ID NO: 79230 - DNA, 2397 bp, Homo sapiens
gtaagtataactctctgggctatgtcagggacctggctcaagtctcccctgcaaagatcttctccccctgtgttcataatcttaaacaagtattaattacacaaaaaaagttgtactcatgaagcctatgtgctacagtcttctgagaaaccatgctctaagaaaggatggtggttcagattaaaaggagaggaagattatgaactgaaaaatacagcttcatttttagtgtaaaaatggaatattctaatatttgcaagactgctgcttaacaatgtcagcgttgatttactccactgcagagctttaggctttttgacatttttatttatgactcaatcgtatttcaatctgggtattagcgggaagctgataccaggaaaaacctttaaaacccaaatcgtaattttctcctagtctttttggcaagtgtgccgtgggtagacagtaggttggagatggccattgctactgccagcttaaaataggaaatggtcgccatttgataaagagtgacaggttggaaaattaggacctgttttctaaatttttatttgtattttagtaatgtcatttcttggttttgaggctttacatagtaccagggcaagattcacttattcaattgtaagaatacaaatctcagagctacatgataatgattttgagataatcttacacctctagtattccaatagcaaaaattgagataatattacttttcttttctctagctggtgtcatagatgaagattatagaggaaatgttggtgttgtactgtttaattttggcaaagaaaagtttgaaggtatgttaaatatatacattcacataattttagtgaattttcagagtcatgtatgtgtaaattaatattgactcctttaattctcattgaataagacaggatatggcgaatgtgtcagtaacgtcagtaataaactattctttctttgaagtcaaaaaaggtgatcgaattgcacagctcatttgcgaacggattttttatccagaaatagaagaagttcaagtaagtattacaaaggaagatacagaataagtaatataacatcttaagtgaagaaatatatataatcttgagaatttaatatgctgtttgtaactaaatagtatatatgactaaacttattttaagcaaatttaaaatactagttttagaatttctttaaatgtttttcatgtagctattatgtagtattactttggataataagttatttaaacatactgtgaacttctaatattttattagaattttttaaagttatccagtattctaatttatggagctttttagaatttaattttctttctgtaatctcccttttgaaaagatgatatagcaagagtagaattctggctgtatttttcttaggagctggagaggaaaactgaaagaggctcttaaaaaaaactgtgaagcttactacctttctatctttcaggccttggatgacaccgaaaggggttcaggaggttttggttccactggaaagaattaaaatttatgccaagaacagaaaacaagaagtcatacctttttcttaaaaaaaaaaaaaaagtttttgcttcaagtgttttggtgttttgcacttctgtaaacttactagctttaccttctaaaagtactgcattttttacttttttttatgatcaaggaaaagatcattaaaaaaaaacacaaagaagtttttctttgtgtttggatcaaaaagaaactttgtttttccgcaattgaaggttgtatgtaaatctgctttgtggtgacctgatgtaaacagtgtcttcttaaaatcaaatgtaaatcaattacagattaaaaaaaaaagcctgtatttaactcatatgatctcccttcagcaacttattttgctttaattgctttaaatcttaagcaatattttttattcagtaaacaaattctttcacaaggtacaaaatcttgcataagctgaactaaaataaaaatgaaaaggagagattaaaggtattccttgttcttcccttctcttcactagtctaaaaacttctttttaatcttaagattctttgtgatgagggtgagaaaaagaatcctcagtttatttttccactattaatctttcttttgataaatcctctattgactgggtagaggtatgtttgtgaaagacatgtaacttggggatttgttactttaggtttgttcccttgaatttcatctcatcaggcaaattgtactagttgtagttacgagttttccctcagtgaagtagcaataggctgtaatcaagaaaatatgccatttatagagataagataaatgaaataatacttcagccaccaggtttttctgtctcacatacataagcagcatttcattgcagatatgggac

SEQ ID NO: 79231 - DNA, 1266 bp, Homo sapiens
agtgctgggattacaggcgtgagccaccgcgcccagccagagtatcatcttttaaactgctttgttctaatataattatctgtgtccaaattttagaattgattttcataacttaaattagaatacaaataataaaaggaagagagctaacattttttaagtgctatatacaccaggtgctattctagttgtgttccttttacctgaatgaggtattgtaaacctaggggcagaatttactcttagggtgaaaactggtctctttatttttagggagtcagcaagccattctgatgggctactcaaatgttagagtaggatctcagagctcaagggcttgtttgggcaggctgagaaggagaggcagagagatgtgagggactcaggagttggtggcaggggtggttagcagggggcaggaacgccaaaatatggtaggaggctaatcagagaaaggaccagtgagaaatttcctgcatcaaggagtgccaagacacttcttctaaatttatattatggaaatttctagcatatacaaaagcagaatgagaagtataatgaaccccgtgtaatcatcactcagctttaacaatgatcctctcatagctgattttgtttcttccgtatccctacctacttgcccactcccaacccccagtgaattattttgaaacaaatcccagacattgtatcacttcacagattacattttaatctgttttccgagctatctgtacggtagctcccctcttattacccaaacttcagtcaaatccactcctttagtgtcagtgggactttagagggggactaaaagcaaaagagtttgcatctgggccaaaatgggtgaagaaaaagtagtgagaagcctgatgcgcagccgagattaagaataagcagagctcctgagaatccttgaaaagattggaggtgaagggatgctagttcttccatagaagtcagatgggagttttatatagtagtgtgtgtgtctgtgtgtgtgtgtgtgtgtgtgtgtgtgtgtgtgctgttattaaaatgaagagtgactctggaagactggaagacttggggacagccagacagctggcctttgggttacagttgcattttccaagtttcctttccttgcaaggaaagaaaatactaaatttaaacaccatctttcaatttctcagtcaataatttccttttctgtctctttcacaaatgcagtttcaagacatcaatgcaaggcatttattttctacggcgcctttcagaaac

SEQ ID NO: 79232 - DNA, 1039 bp, Homo sapiens
gttctcaaactttagcatgcatctgaatcacctactaggtcttgttaaaattgattgttgggagacatcccagggtttctgattcagtagttctggggtgatgccgagaatttgcatttctaacagattcccaggtgatgctgatgcagcttgttcagggactacattttgagacctccagatacaaatgatttcaacctgcctttcttcctgacatcagttaatattttcaaatattacaaatatgtgccaatttaatacacttgtggtctaaacaaaatgctttcaatattgtgtatgcagcataaggcagaaaattgtattagtgtgaaatttgagtcattttttctttaatatgagagctaagtggcatatgtacattgtatttaacatattgccatgtgtctttccaggatcagtctgagacagaagccaatgtgagtcttgcaagttgggatgttgagaagacagccatctttgctttcaatatttcccacgtcagtaacaaggttcgaatcctagaactccttccagctcttacaactctgacgaatcacaacagatacttgatcgaatctggaaatgaagatggcttctttaaaatcaaccaaaaggaagggatcagctacctccacttcacaaagaagaagccagtggctggaacctattcattacaaatcagtagtactccactttataaaaagaaagaacttaaccaactagaagacaaatatgacaaagactacctcagtggtgaactgggtgataatctgaagatgaaaatccaggttttgcttcattaattcaccatccagagaccaaataattaaaagaaaaacaaatatagataggtagaactatattttcccccaatcagaatcatcatatcataggtacaatctttcaccaagtaaatttgtataaataagcactattctttgtattaccaaagcaaggtacaggtgactaccctagttcaaaacaaccactttctcaggcttctcatgtgtgtagctaagctaccttgtcatatgtgttg

SEQ ID NO: 79233 - DNA, 1051 bp, Homo sapiens
gtcattgccactgccactgagcaagtcgaatttcacggctataaacctgagataataagacatgcacactccctttttgcaagaacagaatgagaattaaacattacagatcaggctgggcttggtggctcacacctttaatctcagcactttgggatgccgaggtgggcagattgcttgaggtcaagagttcaagaccagcctggccaacatggcgaaaccctgtctctactaaaaatacaaaaattacctgagcgtggtgatgtgcacccataattccagctactcaggaggctgaggcatgagattcacttgaacctgagaggcagagtttgcatgagctgaaatcgcgccacagcactgcagtctggatgtcaaagtgagactctgtctcaaaacaacaacaacaacaaaattacagtttaaaatcctctgatagaataaaaggtattatctcaattcatcatgttttggacacattcctggtttcttgcagatactgatgaatgttctgttggcaatccttgtggaaatggaacctgcaagaatgtgattggaggttttgaatgcacctgcgaggagggatttgagcccggtccaatgatgacatgtgaaggtacatctcttaaacagagaacagttgattacgtgtactgatcctgggaacaattggttgattacaagtcttaatattaaatacaactcagggtgtatataataaagatcatctaggcctgatgggccatttgatcattcttcttttgtggcctcttctctgtagggaaagagagatatccaagaatgatacagttgtgtgttcatggcacatctacactgtatatcacagagagttctcattggtgtttccctaccacttatatttagatgcttccgtgttgtttaataccttctttcttactctcactttctccttctttctgtctctcatactccctttctttttcttttctctttttctcttcttttctatttctaggagcactgcacactaagatacccaccatcatcctgtagccatttggaggcaatc

SEQ ID NO: 79234 - DNA, 1050 bp, Homo sapiens
ttactttgtactttataatcatacctggagacaatttgaattattataaggaagaaacacccattctggaactaacacatttcaaagttggaccatactttctaaatatttatttagttccttaaatcaataaggttaatccttttaattcgacaaaatgaattaaattatataaatttaattatataatgtaactctataaagattaatgatttccagcaaatctgtattttcttcctgctaaagaaataagtgaattaaatagcctagtgactttaggctttgtagatatttagtttagatacttagtttaaaaccaggtcaagcctctgttttcctaaaatgagatagtttaggtaaaagctaatgctacaggagttttgcctttttgcttgaattgatcacgtcgttatgactttaaagatctaatgtaaaagagcaaagtagatacaggcaaagtttgggccctttttaagtgtttattttcattgactttgcagatattaatgaatgtgtactgaacagtctcctttgtgacaatggacaatgtagaaatactcctggaagttttgtctgtacctgccccaagggatttatctacaaacctgatctaaaaacatgtgaaggtaaaccatatttttgttcttatactgtgtactttgctatcttttggaatgccattagaaaaccataagactgaattagagtctcctgtattttagacagttatgccagtttagttgaaattctgtggttctacatggcactagtatgtactttgtaagccacttatggtatttacttgtaattggcattttaattgccatcatttaatagataaagaaaatgttatgtgtctgctatttgagctattcattcagaaatcacatacacatttactccagattttctaaataaaaagattcagccaagtcccgtattctatactatagagatgtactagtctatactatagagttattattttggcattccatctagtgtaggaaaaactatttagcccagctttactgtgtgggattaaggata

SEQ ID NO: 79235 - DNA, 1050 bp, Homo sapiens
aaggctttagttgtatatcctttaattttaggcgaattttcccagagagccaagacatgggtgatactagaagtgatgccagtctgggtgatgaataccaaaaggaaagtcttcctgtagtttactattaccctagatttctgagagccctggaagagctaccctggttatacatttcacaaaaccctttgtcttttagcagccattgttctccttcctctgattctgtttttgcctttgtgattattttggatacaaaaatctcttgggagaatatattaaagttactttttatggaaaataagttccaacagttgatttctcttgattttgttactgttctttcaaaggaaaatgagaatgccatttgagcttttgttgctgatgctgcatattatttcctatcttccccattttcaagggttaaaacataattgtcaacatgttataattttagataaatgtcacttcatttttaataagtgcctttctctgccacagacattaacgagtgtgaaacccctgggatctgcatgaatgggcgttgcgtcaacactgatggctcctacagatgtgaatgcttccctggactggctgtgggtctggatggccgtgtgtgtgttggtaagaaaacatcatggctaaccttatgagagaggttcagcctctgtcactcaataaagcccaatggtaacaaacgctctctactgtagcagataagatataaagaatatttgcagagcaacaaaccaacagggtcagttctctttttgtgtaaattgaacattaatttgaggattagaaagatgagctaagtgaaaagcaagggaatccccacctatccttcccccttttcttccctaatcccgtagctgtcttcagttttctccaggcctcctttgttgatattggtcattgaaattgatgtgcatatgctattatctcatgatgaacattttaatagagaattgatgtccatgggcagtatagaatgcaaaggagaatatggataatccagaaacctgtatgatagtagttttatgaggcttt

SEQ ID NO: 79236 - DNA, 1051 bp, Homo sapiens
atgtagcctaaatacatttcaaattccactaatcttagttttgacttatgttcatattcagagcattagaagtaatatgaatctgtgaaataaatatacccactaggctattagcacatttttcagtttgtaaactattattcctaaaaaggatcctgataacttctatggagtcaaattttataaatagatatacctatacatctagccctagagtttgcatgcacatgccaaaactcaagaacttgagatatgtatttcatatgtcccatcttctccttccttagatgatcttatttggatgaaagttagccttaggctgtaataacaaaaagaaagaaatacgaagaaacagaattattttcatccagattggtttccttcgtaagcttactcttctggtcataagaaaatgtatgttttgtattttcagatatggatgaatgcagcataaggaacatgtgccttaatggaatgtgtatcaatgaagatggcagttttaaatgtatttgcaaacctggattccagctggcatcagatggacgttattgcaaaggttcgtgctataaaaccctagatcatgttcttcacgtgccttttctcctccttatgttgtttagaggtactacctttctttactgattctccccacttaaagtaccttgaattttggtttgggaaacctgactgaaactccttcttaaatccagccatccaaagagctacagtttatgcccagaagactattgttatttcagaaagggtatttgaggtcttctcaaaggagtcaaaagctatgtagcaaataaataatccaaactgcctattggtcttccaacagatgtgggcattgttctcaagaagctgagttctacctcttctttccagttagggaataatggtggttaggcttcttggtggctgttatttgccacctcttacatctttacctggacagaatagtgtagactgttatttgcaatgatctcttcctcataatttcctctaggcatcttaagacacagaaattttttttaaggataatttattt

SEQ ID NO: 79237 - DNA, 1049 bp, Homo sapiens
cagcagtaaccctgcacgtaaaccagaattggtataaggaagatggacattttagagatgtgattgacggttttcaggcagaattaaggtgattgtttaaaaaaatagcatatgttgtattgttctgagatagctataaaatatgtcttttaaaattatatgtttaaagatgccagccaaatttcagtataaatagtgatttatactggttaaatagatgtgcttggaaaatggtgaagaagaatctattttgtttacagacttcggatttaaggagtcttattagaaattagagttacatctaatgccattatacaggttttttatcatgtcttttcaactctgataaccctaaatatcacattatttgataaccaatttatgttggagaatattattaagtaattaaaaccaaaagccaagatcatgagtttgcaaatggagggagggggaaataaaataattttaactcccctaaataaagctatttcttctttttaaactttgattttagacattgatgagtgtttacagaatggccggatctgcaataatggacgctgcatcaacacagatggcagttttcattgcgtgtgtaatgcgggctttcatgttacacgagatgggaagaactgtgaaggtaataatagtatactaatgttagtcctctccttccattgcagtttcaatatcaggggtctttaacaagaccaaataatgagtgaaatgtcaaagtatcaaatatgttttatatattttatctcaaaaggaagcctaattttccatgatattcatttcttaatttacatttgtgtgaatcaaataacattttaatatgctaggagagcttgccatttaaagatccctggtgtgatgaaacttctgtggcacaatttcatactttctaattttttacaatcagaatttgtacattttttaaaaataggacacacctaagtctgtgtattatctagccgtttataatctttttgtttaaagtgtctgcctagtaataaaatgctactaatcagtatctgaaatatatatct

SEQ ID NO: 79238 - DNA, 1087 bp, Homo sapiens
gtccaacaatagtgtaacagcattctcagggctacatctctcatcaagatcagaagagaaaactttttccttcatcctcaactcaccccaccttgaggtttcacttagatggatgcatttttattgaaaacagatgctgttatatttatgcccctagactctaacagtgagtacattctaagttatttgtctgggctggataattaaccttgtcagttgccactgtatatcagatgagcaaaagacagctttaaatttaaggtgcaattcataagttacatgtaagacatttaatatctacttgccctgaaactgaataatctaactctgatagaactatctttatgagttggaattgtttttaggttataaatcatcattgaatttataattgatactgcattcttgaacatgttatacatagttattcggggtagttgtgaaaaaatagttctttctaaagacttcttaaaaaaacattttaagtttcaaagaacaataaagttgactcttgataggccaatgtattttagaagttgtactgtagatctaaatttgaagcagagaatgttggcactgaaaggggcaaagaactcagctatttccacactctacattatatattaaggaatggtgtcttgggtgtattaagtaccctgtctgaggccattcagacaagactgctcaaatttacctctttaactcacactctggtgcttgctgagccatattacattgtcctctttcctagatgaaagttattattctggaatagattttcgggccatatacacacacacacacacatacacatatatatatacacacacacacacatatacacacacacatatctttatatagacacacatatatctatatacacacacacatatatatatgacattaacttaacaagccattaaagtttatcacatgcaaaacctacatcaacgataggttgtgttttatcttttaggctttctcagtttaatatattcagcttcagaatatataatcagcttcaagattgaggggagtatagtccttatgacttgtccagtctgtgttttgttttctgaaatta

SEQ ID NO: 79239 - DNA, 1049 bp, Homo sapiens
tacgaagacaaccgaggaatacttacaaagccaacacataccaagttatgcaaattacaaatataccagatctcatatcacatagcacaaactctgcacctaactaccaaggggatggggaatcccaaacctcagagaataacatttgactctctcatcctctcctaaatgatactagcaactgctctttgagcacccagtaaggcaagcatttgttacgtattatcacatttaatccttaccacatcctctgaggcaggtattattatcccaattttataggataaggaaacaagacttagagattaagtgatttgaataaggcttgtaggtggtaaagcccatcaccaaccagggtccttattattattgttatttttattgctatctcctacaggaaagttaggatcctttattgatttaaggtgtgtgcgctttgtctcatgcctggctcgtcttcttgtctaagagtacacgtagcgtggtttcagataagggtatgttgaagagaaaacttaacgtacctctgccaatacccagggtgagcctgatttcatgcagtagcaatttgagtcgcctttagtgggcccatgagtaaaggaggcccatgaattctgccttcttgcctcaaaactctttattatgtgagcctggcttctcctgtgtagcatctgttacttcgttttgccttccacatgtactaagtagaaatagacaaacttaactcttgcagataatagatgactgaaaacagatgatgggcacacaaaacaggctttgtctccataggattttgttggtaaaatacttcgtctttcacttcaatatattttgttcattgttttgctgctgcttagatatgaaaactttcctctatcgtcctaatcttctgatatgccatcatctctttcaacctcttttccgatgccagagtgaatccagtctgcccttgaatactgtagaaacctcttggcagttgttaacaagccttagcatttactcagtcattctgggaagagaggggaatttacactgtttccttagttcac

SEQ ID NO: 79240 - DNA, 1046 bp, Homo sapiens
ttggctcttgtctgccccactatacaagtgcatgcagttttagtctctgttttggtgggtagtttcctacccctctggctcgctatacttgattatgaaattataattggctttcgtttatctctttaggatagaatagtaactgtagctaatctgtggctgaaaatagggagataagaatgaaaataattaaaatggatcactctgggtagcctgaagtgacatggattaatgtactatcagttttttccccctgagaaacatttggtcacaaggaagtttggctttcagaagaaattcagatttgggtgtgtggcttttggcatagtctagcatcactggaatggcctaaagtagatgtttctttttttcccatgccttcctgtgggtgctcagaacaacccggtcttttgactgtagggttatctgccattcgtagactgagcattatcttgccaagtcatatggagaagccagttaccgagtgcacttggagcagaagataatacttggctgaagcatcctagaaagcctaaaaagcttatgtcagagggatataacgtagagtttctaaggagaggtggagaaagagactgattgatcgattgcttgatctccaaagggcaggggctctaccacgtgtttcatagtgctaggaaatggcaaactttaaaaaggtgttcttcagttgccccaagaaatacaaatgtcacgcttgtctgactgtcagggatgaatggtcctagtgcatgcatgatgactgtatattcttctttgatagcgccatggtgtgggtaggtatgaggatctgttggcttagaagcaattggaaaaactggacaaggaaggaaaagaaaatgaaactaagaggctggattgagaaataccaagaagggtggaaatttcaagctttttttaacttcagtaactgtaagagagaaagaaagagaatgaaacagaaatgtctgactgtgtcccttcaatttcaaaacatattttgtagctctccactgactctggtttattcattatttatttaatagact

SEQ ID NO: 79241 - DNA, 1605 bp, Homo sapiens
cagcctgggtgacagagcgagactccatctcaaaaaacaaagcaaaacaaaataaatttacaataaaattggctcccaagagtaataatgtaatttttatatcattaaatcttagagttaatataataatatatttcttgtgatcatataaatatgtttagatgcaggatttaatttgtttgtttggttttctcttcatagcctgtcctgggcttctgatggattgagtgctgtggactaagcaaagagaggttgagaaccaccgtgactggataaaggagttgtggattttaaagccagagtttatttagttcaatagacttgttttgaaaatgagtacacctgaggcttaaggtcatataagtcatgatagcaaagtttgtgagggacctgagaacccaggtttcctcatttgaggattggtcccctataacaaatcgtgttccaaatccatgtgctaacagacctctggtttattcacagccatttgccggcattcctgtggggatggattttgttcgaggccaaatatgtgcacttgcccatctggtcagatagctccttcctgtggctccagatccagtaagtctaacatgtcattatatataatattattttatgtggttataccccattttctcctaaatttgattttggctttcctctttcctgcaatacattttttcactagaacatctgccttctctgttctgcccaaaatacttggaaaggctttccttcatctggcctctcatttcccttctttactctttataggaaaattacctatggggcatagttactatgaatagtataaagcttatggccttttatgtaggtatcgccttattcatctttgtatctccagtgtaaacaccataaaaggtgctcaatgaaatggttgtttaatggacatttttggctcaagaaatctaggcatgcttccttgtggtactgaaatatgaatctgattaaaaacttatttaagactcaagacccctgctttacaagaagaaaatgtaagaagtcattatggaagtttctgggggtgatttataatgaagcataaacatatttttcctttcagaatgttgccactttctgtgatgccagatgaatatccacagttcattcttcagaaccttttcttgcttgttctgttgtttttcttttgggggtttgggcaagtgagtcataattggttgtttaaaaagctgaagttcttgtttgtataaacagcccctcaaaactttgaccgtccccatggcaaaaaacgtaggtcccttttccgtttctttttgtcctgtaagaaaatgcaccccccttattgtgtgtcctattttgacaaagttttaaagaaaaacattgtggaataagtgcattctcttttgtttactgcaagtagagacttcactgtgtcaaggctcattacctgttaagagtctgaacatttgagtgtgtctctcacaagccaattaacaggttagggcaaattgtcctgtgtagcactcctggtgccctcttgcctcccttggcttcatggatgaacacgggggactcttcctgagagctttgtatacttttctggccagagagcatgccagg

SEQ ID NO: 79242 - DNA, 1151 bp, Homo sapiens
taggacagattttagaaatgtataaatactgaaactgaggcccagagaaggtccaggaacaagtgctcaaggtgcttattttcctctccggttcgtaggtgtggaagctgagtcacgtggtagcgagagctgacctaagaggcgcgttgttgggtaatagattgggcctctttgtgttcacaccctcaagaggtggactggtatctgcaagttctctgctatacttgaaataaccaaaccttatcaatcctgtgggcatgggtgttttctttctctcatttatttgatcttaggcagtgtgattactctctcagcggtcagccctgaaggggtgatactgtagcagagttttagatcctcagtactaccctgctctcagtgggaacctccacattagaaaggattgggtgggatgggactttttgagggaggtagttgtcaatgagggtatcagtcaggtggttggaaaaagagaaatagtcttctccgggaatcggaagcatgactcctccccgcaaccctccaccacacacatactcacacttctaattggcagtcaaagagtcaaatgacctgggatcaactaaggcagttctgggtctgtgattaagcttggtttcttgttgtgtaacttgctggctcagttatccaaactatacattaagagtttatgtaataaacatgctaaagaaagaaaaaaattcttaaattcttgtgttttcctccatatcatctcacctagtaatactgtaaaacatctgcctactccaagtgacaactatgttatgagcattagctgcgtttgaataggacccaatgcttcattttcagaatgaacaccctgtcttgggcttgttgatattattatctttttttccaatgattctaggcagaactgccatttggaatatctttctctccctttctgatggggttaatgtctgaggagatgtaggcaaatgcttttcagtgaaggacttgatgtgcagcctttaagtagacaaatagttttttaatctttcatggactgctggtgcttcacaccccagagttgaggccactgacctcaagtttgcaaattttatatcccattaccaccctgtgagctctgtgctccccagggtcacatagtcggtgttttagctggaatc

SEQ ID NO: 79243 - DNA, 1016 bp, Homo sapiens
gatacagaggaaagtaatatgatttgtcaaacaatgaaatgtcagcgttatcaaactccatacctgtcagaagaaaccacgtatttggagccaggaaagatcagtgtgaattgtggacacccatctcgtcataaggctgatagattaaagtcagatttcaaaaaactgagcagtacattaccatcttcagtgtgtcagcagccttcaagaaaattaattgttccgctatctagccaacaagatagtggctttgatagcccatttgttaatctagactaattatggtacagtatttaagaagaatcattaatatattaacaaaaatggaagggaagacctcatactgaaaaaaattgtgagccctgcctcttttgagatgttttaataacatctgttatataagtaaagcattcttctaaaattgcttgagatatttatgttgccttaatattccaaaggcctgatggtgtatgtataatctgcttttgtgtggtgcttatttttggtttctaaaccatctatttttatacttataaattgactcactctgcagtgttaacttatttaaataaacttgcatatggtctgtagaattgttatgaattattttgtggttcagaatacagaaatgtcatattggcatcatgtttgaaattcacccagaaaaaaacataaattttgattatttgtatgtgttagtcagatttagtttttgaaattagtcatgtttaatgaggctatgaacttaatctacatagacttttcctagcaatatctactcaaaattttgatctttttttcagttagaggttttccagggtttactacaaaatacatagctatgtcctggttttattatttaaatattagtctgaatttttttagttcttacttgcattatttcagatcatctgtgacatccaaaaactttgtctcttttatggcttcacatttgttttttcatctgaaatacgaccttttgaaaaattgagataagttttgtcatgtagcaaaaa

SEQ ID NO: 79244 - DNA, 1715 bp, Homo sapiens
taagttattaaaagaccacaactttcaaatagggtttttaaaaatgtggaaatttgctatttttacaagaagaacatctaaaattaaaaatcaggggatggagaatgatataccaagcaaatgcagtgttgatattagataaattatagaggtaaataaaagattagataaattagagttagcattaaaagggacaaagctgatagttcataatgataatggaatagtctcccaagaaactgtaattgttttctttctgtagatcatacagctttatataaagcaagagctgatagaaatacatgaaaaagactggtaaattcccaatcacactgagagatttttaacatatcagtggggaaatggggttcttgaacctctggaaaacttgaagctgagattgttcaggggtccatgagtctgatgttggtaaacattcctcatgtacaagccaaagattatttgtataaattttggaatggtgatgtgaaccttaggtatgaaaaggcagtaacatataacaagaaaataattttctagatctggggcaacagtgtgcaaataatgtccccagtagagaagcaaatccttttcatggactctagggcttgctactctgagatacaatgcctctaatttcatgctatgtggctgctttgtctttgatcagatttagtgtcttaggtaattaaatcagaaagtctatttagctattctagaagtgtatgtgtaggtattgggtgggtggggttctttgagcgaacttgtcagaaactccattcttaacatcagaatcagggcaggattgaaaacattgtggctggatcttgaaattgctataacatctattgcagaaaatgataggtcagatggatagcaataataattatatatcagatcttagtaacaaaattaccaagctttatctagtggatatatgtaaaagaatatttttaaatgtccagcattgatgtattttctttaagaattattacagtatataagcattctttgggaatacagtataaaaacataaattttttcttatttttaattttttttatttttttgttcaaggatgaatcttccctttaaatattaattttctcttaatttcgtgtttccttgcacataatagcactgcccctaacttcagagatgctgattgcagttaaaaaatcaaaaagaaatgatgtgaatcagaaaataccatgttgtattgaaagcaaatcaaatagtgtaaacaccatcaccagaactctgtgcgaacaagctcccaagaggagggcagcttgtaacttacaaaggctgttagagaactcagagcatcagagcataaagcatgtgggatccaaagagacacatttggaattccagtttggggatggtagttgcaagcacctaaacagtttgccaaggaatgtttctcctgagtttgttccttgtgaaggtgaaggaggctttggtttgcacaagaagaaagacctactcagtgataatggttctgaatcacttccgcattcagctgcatacccctttcttggaaccttaggaaataaaccctcacctagatgtacccctggtccttctgaatcaggatgcatgcatataacctttcgcgattctaatgaaagacttggtttaaaagtatataaatgcaatccactaatggaaagtgaaaatgctgcatctgagaaaagtcaaggtttggatgt

SEQ ID NO: 79245 - DNA, 1044 bp, Homo sapiens
caataaataatggaacgtaaattttcagagcactagagaagaatgagtctctccagctcatactgcctccttttcttctgtctttgtgtttgctttttcctttctttctgcttaaccttttctctatattttatttttctcttttcctaactggacataatgtacaattgaaatactaagtttctgtacctcatatttacagtattttcttcgctaagtgttttagaatatgacaaaatttagctggggaatatgccatgtttccttactatatgtagctgtcatcattccgaaagaacttatagagtacttctcatttgagtctaccaaaatgatgatctaaaatattccattttaatgactgtggaaagtataatgtttaaactatacttaaaatcacttcatctaccagaaaattgatctgaagtctgcccctcctgtttctgaaaaagtgctaataaacatacattctgtgggcattttctcacttccctataggtgacatgcttcgttatattcaggagagtaaggaacgagctgcagaaatggtaaaagcagaggtactgcgagaacgtcaagaaaccgcccgaaagatgcgcaaatattatttgatttgcctccaacagattttgcaggatgatggaaaagaagggtgagttcagtctgaacaatgtgtcctgagattaccaggacaacatgttatcatttttaaagcattttccttaaccactaaattaactatttctacatgatcagccatagggggttaagagaggtttatggctgtgctaccctaaatgttggcagagccaataggaaaacagaaaccatggggctaaggcaactcattttttcctttaaactatatttttaatattctggaattccccacagggctgagaaaaagattatgaatgctgctagcaaacttgctacaatggcaaaattactggaaacacctatttctagtaagtcccaaagcaaaactacacagtcaggtatgtcaaagtgagtcgccaaatggtttttctatcttttcttctt

SEQ ID NO: 79246 - DNA, 1044 bp, Homo sapiens
tctgtaagttaacatgtgaagaaaagttcagaaaggttaatttttcctaggcttatcaaccttgtaagcagcaaagttagaatgtaaactgatgtctctgactctgaaattcatgtgttttccttcataccacatggactcttatcagtttcctcatcctctttttaaaagttcaaagaattgtaatctccccacccttaagaaggttctttgtaactctccccacccttgagaatgtactttgtgagatccaccccctgcccccaaaacattgctcttaactccaccgcctatcccaaaacctgtaagaactaatgataatcccatcaccctttgctgactctcttttcggactcagcccgcctgcacacaggtgaaataaacagccttgttgctcacacacacacacacacacacaaagttcaaagaattgaaaatcttacattatttctgaaaaagacacctacttaaggttaactttctttttgttttatatcgaggtgcatgttcaatgatcgtttatatgagcataaactgtctaccaggatccatagggaacatggaattagaaaacctagtaggtttctacagagcttcagcacagttggaaaacaaaacacaggcatctgaaacagttgaaacccaattccaggacagtgtgtaacccaaagcaagaagaagatgggatacagattttaagtgctgagaaaacagagcaagggaatggtctgagtagggtttctaaggggatgaacgttacagaaaagcgactggaaattgcacagtctcttctataaacatttgtattgggaacttaagggaaaagaaggcttaaaaaatttttaactgtctaatatactataaactttctgttatagaagagaataataaagttgttgaagaattaatagaagaaaacaacgacatgaagaataaattggaagaattgcaaacactttgtaaaacaccaccaaggtatacttttactattttaaagtgctattttaaagaaatctaagtacaagtatctttaaatttttttaa

SEQ ID NO: 79247 - DNA, 2470 bp, Homo sapiens
tttttttctcttccagtacagacgtttgtctagggtcagctgttacatttagttgtaatgtatctttagcctcctttaatctagaacatttccacagcctctctttgtctttcatgacattgacatttttgagaaatattctctgcttccaccttcatttttttttaacagaacttttctcatttggggtttgtctggtgtttcttcatggttgattcaggttgtgttttctcagctggagcactgcaaggggtgatatgttgttacatctaaaaattgtggtgtccatatgtcttattggtgaggttacttttcattacctagtgaatatgttgtctaatttcttcactatataattactgtttttttttcacccttgcttatcagttgataagcaatctgtgggagacactttttaagaccatgcaaatatcttcctctcatgaaaaccttctcttatatttggcaaccgttgatgattcttgcttgatccagtctttactatggtggttgtgaaattataattcttccaacttcctccctctatttatcccagttggcactaagcatgttgaatcaagaatcctttcctctcatttgtgtatttattttatctctctgtccatcgatccatctacctacctacttaccaacccacttacctacctaccattcataaaattattggtatgactcataaattcctatttttaatactttataattcattactatatttcattagtgctcaaattgtcccagattcagctagtggagctccttcaaactggctcctatgtccttgtgacatgcctgtatttttgagtactttcttactttctggcataggaagatatttcagtcttattttgtatataccctccccagtactggagtcagccatttcttgaagatccttgactccctttagtagggaatggtattcaataccaagatccagagcaataggtttcatgactatttttaaagtagatggtagtatccagtagtgccttagacaagttaattaatatgctccaagtcacacagccagtaagcagcagaaacaatatgtaaacccatgtctctctatcttaagcatcacactctttcagtcgtgctgtagcctttagtcatgagtcatctgcttttctttctgtcttttttttttttttttaatgatagttcttggtctaaactgatataaaagttttctgtcatttaatttttgcagataagaaaaaggtccttgaaattaaggatttatgctgtggacactgcttccaagaacttgaaaaggcaaagcaggaatgtcaagatctgaaaggaaaactggagaaatgctgtaggcatcttcagcatttagaaaggaagcacaaagctgtagtggaaaaaattggaggttagcatttaaagtagcactgctaccaatatgaatttctttgatccttgttgaaatgttcaaatgtgacattttagttaatgtgtgcactgatcctcttttgggattaatataaactaatttggatcttatttttactaatcaaattattattacaaaactcaaaagaggaagatttcagctctgattaaaaggtcacattcctttcttcctttcttgattaaacagatattgagggcccagtatacgtcaagcaggcttctaagcactggggatgcagcagtgaataaatcatacaaaattccagttctggtggagatgtgttcccttccttcaagaagcttttggttaagtgaggagatctaacaacagattaacaaataattaaacgttgaatgctgttggcagtgttttcctcagaaagaggattgttaattctacctcttattaaagttaagaaaggtttgactaagccttgaaaaatagaggtgtttgccaaggagaacaacgtttgagatagagggaaaaggcataaacaagggcgtgagggtctggactggcctccttctagtccattcatcacaatgctgtgagacatttggaaagggatattttctaccatttcccagtgcccctctgaagaagggaagttttggggcttagatcgctgctccctcttcttacctttcactatcgcttatagcctatacgctatactctacatttgaaatgcttccgattcctgagctggtcctatttcttttactgctggaccttcattgcatatgatgtttgtattctgtcctgtacttttccccaacattctttttagtcttactctcatcctttaggattcaactcagaagatgctttatctgcaaagcccttcttgattttccctagtcagggtgaagtgggctgctcttgtgcggccctgtagcattggctcttcctctattatcaccattaccattctgtattgtaattgtttggtcacttgtcagataccttctccaaattctccaagaattttctgaggagaaggaatatgccatatcttgttcatcc

SEQ ID NO: 79248 - DNA, 1030 bp, Homo sapiens
ggattaaataatacaaaacatgtattaagtgataaagtcctttaaaatcctaccaccagagagtaccactgttggatgtttggttatgttgtcctaatatctcattattatttgaagtacttaaaacattaattatgaaatacttagttcattcaaagaatatatgtatgcatctgtaagttatgaagcctagcaaccaggaacccattattcagcttaaggtacagaacatcaccagtgctgttgaccacagttctatgcctgcaacctctccccagtctgagctaacaaatattctgattttcaaaaattactgtcttttttaatgttttaattatgtgtatgtaccctcaaaaagttgttgcctttttgtgttttaacattataaaaatagtttaatactctatattctttgtaacttgcttttttcctgtttaacagcatgctactaagatttgtctgtgttgatgcaatagctctagttcattcattttcattgctacatagtatttcagtgtatgaatatactatgagttatctgttctcttgttagtggtatttgcacgagttccaattttacaacagtatcctagatgaaaaatataaatgcaatttatggtaccattgtgatgtttcattaatcctttaatgttcattaacataaatggcaccacttaaatcaaactaaaatgtcaggagagagctaagaataattttgctggatcaatgactttacagtaacattttggcccctgagcctgtgctaacttgtattcctgctttattatatcacttatgttaatagtctactttttaatcatttttgtatattttaattttataaattttatgtattactaatgacaatgtctgttatttattgtgtacttgctctgtgccagctactgtgccaaacagttcttatatatttacgtcttctaaaagttttaaatcattttttaaacttggaaataatttcaaacatatagaaaaatagcaaaaagaaaaatagttgcgaagaacattcaca

SEQ ID NO: 79249 - DNA, 1050 bp, Homo sapiens
tcagctggccttccttacaaaattactgtgtatgttaaagtatttagaagcatatgaagtactatataaatttaaaatgatttttaactgttattttcaattcataggaggcagagggttagcattatacttgctaattaacttgttccttgctgtagtaaaaatgttctagattttcaagaacaattctgattttatattgtctttcatgtggtttaatcacgtaaaccattgaaaaatctcaaattcacatatataatgtgcaaaccatatcttctgtctgtctcatagctgcccaccagtcgcctgtcagacagtgttcttatttggaaagtttcataggaagctagttcctagtacagtgacagtacttatataacaccctaagaaaaatattggcgatagatagttcaggcaagatttttttcaggtagtgttttctctttgtatttttaatattagcattttaaatataaaattgtataaagatttttactaagcattaactttgaagatactttatttcagagaaatatggccgagctctctaaggattctgccagccagggcactggccaaggagaccctggacctgctgctggacaccatgctcagcccttggccttacaagcaacagaagcagaagctggtaattggattttgttcccaccagtctttgtagcatccataatcacccatctgaagggttgctttgaggataaaaggagatcatagatgtgaacaaatgggtaataatcgtctgacttaatgtcccctcttcctagatttcattttgtatttagataagagggttaatttaggccctcttcttctatttatggttttcccttcattcacaactgattcttgttacaaggagaatcatgagagttttaatggagaagtcatgtttttattccctgaaatcaagggtttcacatcagagaattgccaagtaatacagactttttcattcaaattactgaaactaatttcaatcactttttaatggaaatctttctgaaatgtattagatgttttctaattgat

SEQ ID NO: 79250 - DNA, 1040 bp, Homo sapiens
gataaatttctacaggagctttatcttttccccatttcttaactccttggagtttgtacgtagacagagtttacacattgacatatttagcactttaacgagaaatacagcctcttatatcaaccctgcttttgtgttgtatgtacgtatatatacatatatctgcatatctgtgtgtattttaaaataaaggaataaggtaaaattatttaacataatcttctggtaactagtggcagatttacaaccagatgaccctcataattaatcaagtcttaattttttcccttcagaggtatcaccctcattctttagtataaactcattctcgacagtaggaaagttcgcaggtgtagggctctaaactagatcagtgtatgtgttcatgcacatgtgtagagcatgaggagtcaggaaggtggtgggtgtagtgattagacagcagttggcaccaagcagtcctccaggaggccttctctttcccaggataaataggagttgttagaaatggtaattggtacctcgtatgacactttctaagatagtactggtcatcaaacattcacagattcccacttcctctgttgcatttgtatgggatgctatgggaagtttacaacaaaaggattagaatccactgtttgggataggtagggtacttgcagtcagtttgactttattatgtagtgatatacagtataaaatactgaaatcataattgctgtttaaaaatgggatcttttttaagttttatacttccctttacctctttcttttgcaatgtcctacaggtagaaatagctgtgcaaaatgctcatcagcgatggctgggagaactaccagagctggcagagtatcaagcacttgtgaaggcagaacagaaaaagtgggaagaacagcatgaggtctctgtgaacaaaagggtaagagctcttctgcaaagacacttcaggaggctgtcttacctgaccccttctcttatctcagtccttggaatttgtacctactcatagaattgttgaaggataaacatgttgata

SEQ ID NO: 79251 - DNA, 1025 bp, Homo sapiens
atatgagtcaggtaacaataagagttaaagggtgtttttttatgtttcatgcattgttttctgaaacacttgctgagtcaggttgcaggttaaataggagctcaattccaagttttaaagcttttagtagcacacagaactttcctcacatgttaacctggctcattgagagaaagggggaaaaaatcatatacacggaatccttcaggttgggtagtaatcagtgaagcctatgaatttgcagacaaggcaaagatggtcaacattcccattcctgatgccatttctatgcacattaaggcttatttatacaattgtaatatgagttaggtaggtgcattttagaagttagagggattttttttgctatccaagacacgcacaacaagttcatgttttaacttggagactgttagtgttgtagagagatgtttatttgaattttgtttaaagagacagctattggaggaaagagaagaatatgtaagcaaactgcaggtggaacttgaaaaaaagtaccaagatacacttatgatggaaaagagcaagtggctgaaagatcaagaaactgatattaaacagcaagttgaaagtgaagtgatcttagccaaagcacattgggataaggaagagcaagaggtgtggattaaaatttctttctggtcaccacatttttaaaatgtggtactaactttagaagacaattcttcttgaaccagatacgtaatttttatttgccaggcacttacataatcatccattttaccttttggaattgagctattagcagttaccacaccagttttatttttaggaatttagccacctcttgacttttcgacccaactcaggatataacaagttttttgggcacttctttgattcctcaaaatgaaaccatgatctgatttcatattgtggaatgattataactctagactaatatttataactaacaaataagccatatcatggattagaaacaaagaagtaatgggcagtctcagaagcccataatttgttac

SEQ ID NO: 79252 - DNA, 1313 bp, Homo sapiens
caccttcaattgattattaccagtggtgagacatagtgatatcatgtgtctcctgcaaagagcacatatcagttcttgacatgcatgccaaagatgcataacctgattttaataaacctaaaaactccaaattgaggaacatcccacaaaataacgggttagtattcttagaaaacatcatgggtttgaaagactgaagagctgtcctagattggaggagactaatgaaacatgacaactaaatgccactcagaatcatggatttgatcttggaccagaaaacagacatttggggcaaattggagacatttgtataaggtctgtagattacttgatagtattgcatctgtgttaatttactagttttgatgattgtgctgtagttatattgggggaagatgagtaaaagctatatggagattatttgtactgtttgcaatttttttaaagtatggaagtatttcaaagtgaaacttagaattttttaaaacttgtaaaacttttgaccttttaatattcagactaaaacagatacctcagaaaaaccaaagaatcaattatggcctgagtcttctacttctgatgttgtcagagatgatattctgctgcttaaaaatgaaattcaagttttacaacaacaaaatcaggtgattaaaaatattttttatattttatgagaatttttatttcctcattaaatacaaaggatataatagagtttttgcaaataaagaggcaatgtgagttagtagacaagtatattagcaggtgattatgagttccagttacttccctttgctagtgaactgttggttagtagtttcattggaaggtaagttagtgtagttccagttctctttctctatggtagcatggctgacagaggtattctttcctccttagccagctcttgacccagaagtaaaactttgcttatttagatggttgctgaagattattgaattctgagacttattttaaggcatcagctagccaatacttctctggttaaatattttcattttatatatttcaaagtaaatacaaaatttaaacgtttagtcctgtcagaaaactacttgtcaaataaatgaatctatgttcttatcaaagcgtgaagagactttttcttttgcagaattgtaaaaataatatgtcaaatattgttataggggagagagaaagcatagaaaatattaaaaaataagacaaaatcaatcagtgaaaatgatgtttattttctgtaagtactaagtttattcttttgtgtctaggaacttaaagaaactgaaggaaaactgagaaatacaaat

SEQ ID NO: 79253 - DNA, 1025 bp, Homo sapiens
ttcaagtacctgtaaaacagttctgttttttactttcagtacagtgttcaataaatttcatgagatattcaacagtttattataaatgaagctttgcattagatgactttgcataactgttggctattataagtgttctgagcacatttaaggtaggccaggctaagctatggttttaataggttagatgcattaaatgcatttttgacttaatgatattttcaacttataatgattttattaggtgataaacccattgtaagttgaaaagcatctgtatgttttttctggttactcttggcacctagtaaatgagataccaattaggtaaaattcctttaccataaatacaaggaagtattctctgtaacaaggaatctgcatttctttaagattggcttttaccaatagtgctctaaaatctagttaaaataaatcctccatagaaatcctgtagtattttctatgagattttcctggcccatgttcttacaacaaaagtcattctatatgaggacattaattatatagtgatgatggtacagatattatatagtggtcgtggtactatgggaaagtacacaaaatctggttttgtcagtcattgaaatccacctctgtattcttcagttcggaaaatgaagctggagcactttgtgacacttttgaatttacagagccaatttcagacaaattgaaactaaacacatgactaataagtaagtcaaagatatttctgtaagatcatgctatcacagagatctttagggctgctctcctttatagatccttttttttacccttccatatttcacaaatcatcagccatctatactcccaatagaaaataatatataaaacacctaataactaagaaaagcaaaagaagagggaaaaggaatgtgggtagtatactccttttcctcctgggtggagataattgtttacttccttctttagtactgttttatctcctatttaaactaggagttgtgttcattagaacagttctgctaaagtatgta

SEQ ID NO: 79254 - DNA, 1052 bp, Homo sapiens
cccacctcggcctcccaaagtgctgggattacaggcttcagccaccgcgcccggcctcctgtactcatcttaaagcacattcctatagataataaacctgagacaccgcatcattattatagtaaaaggaatgatggacgcattcagtgggaaagtgaagaataaagcacagtgtgattagtcactgaggctcggcaaaaagacatccagtgaagcacaagataagcgaagaaacgttttgcttgtagtcatcccacccaccagcagtttattagatgatattttggcttcgtggaaaactaaaagctattatactcagatcaaattcaaaggagataaaggagagaagatatttgtctctttcccctggtctactgtgattcctagaataaggggaagcaataattttcatgtgttgggaattttagttctttgttgacttgggctgctttcaaatcactgactcaaatattggtggctacaagcttttattaccaactacctcctccctcaagctactgcctagtaaattttaagggtttagcctcaatgttctattttacattcatggaatttgagtagctaaatctgcatgcagcttgcagacagcttcctctctcccttattatagttggctgctaagctcaaataataaacatttaacaagtggaatgccttttccctttggtcttctcagcaggcttcataagggactacagtttatttggatttaggagaactgacttccatgggactcagtagtgagcctttttcaggattggtcactaccactgatttttttcccctttgaggaaagaagagaaaattattttagcaagcactttctctctctgacttggctccctctaggagtacaggatgtgctatttcagtggtcagcattcagtaagaaaagaaattggggatgcataatttgttaaccgagcaaaataatcattctgcttaaggttagttcaccatgtcttatggcacaggaagttatattgtaaaatattttatatttcttgtaatttatattttctacttcaatg

SEQ ID NO: 79255 - DNA, 1015 bp, Homo sapiens
catttaaaatattaggtttctaaagtttcagaattataaccctaatacacttcatttacatgtggaggtggggatgctggatagaaaagcatctacaaagaagttaaaggcagcacggtatagttttcttattgcagggtagaaatgggttccaaagaattttttctttgacttaccatgagttggagtgttacgctcctattaaaggacttccggaatgttaaggtctgtaaatgtgactgatttgattcataaaaaggtcatagtagcccatgcctttaactgcccaaggtcatatgggatgccatactaaatctgggaaatgtctggcccagacctatgccttctgggtcccatgggctctatgtattctaaagagacagtagtagtaaagcagaactttactttctgtagcctcagtggattcaagtcttctgtagatcataagcactttgtccccttaattttttcagtatatcctatggttctttcctctgcagggtcagtacaagaggtggctcagctacagttccagctgcagcaagcacagaaggcacatgctatgagtgcaaacatgaacaaggctttgcaagtgagtgttgccacttggaagaggctctatgggtatctgaattaggcagtagttacatcacctttttgaatcttgggtttctctgtataatagaggtggttggaccaccttcaaaccagcccatgggagttgttcaccatctccttcacacagttggcaagtcaaactcaggtctgtctaattgcagagccaaggccctgcacttcctgccagcttgcctgccacctccttcaagtggcatgtcctttcatctttgggtgtatcccagagatcagttcatctatgggggtggggaatgttgaattttgctgcaattctgtcatatcctcctccagtgctatttacattttccactggagggggaggaaaatatgggagaagagttccattattacctccaccttttcaccaccggcaggctaa

SEQ ID NO: 79256 - DNA, 1035 bp, Homo sapiens
caaagtagtctgcctaaatatatatacatacacttatactgacaatataaaatacgcataggaatgtaatacattttctttggcttgaataaaatctaatttttgaataactcattgtcttgtgaatatagagttgaaggagactttagaaggcacctaattcaacctttattagcataattacaaaagaagaaacagactgaagagttgaagcttcacccaagctcttgactcccagttctgtgcactttaccttgtaaaagaggtgatgctcccatgtgatgatcttgtgtttgacatcaaatctaattatgtatcataatttttagtttactctttattaaaactctttatgaaaatgacttcctgaactttttttctatttaggaagacatttgctctcgtctgaaagatcacgtgaaacaactggaaaggaatcaagaagcaatcaagttagaaaagactgagatcattaataagttgacaagaagtctagaggagagtcaaaagcagtgtgcccacttgttgcagtccggtaggtgtctggtaggtccactgtctccccagaaggttggttcaatatgcagaaagaatgtagtaggatccatgacttgtaaaaatccagaagggacagaaaacacaatcagcaataaatttctttaaaaaaaagaaatatatatttttatatatatacagaaggcatatatatatatatacatatatatatatatacatacacacatatataaaaaaatatataaaggtttagtttgtttttattaaataatttggaagctggagaccagtataaagtaccaaataaaaataaccgtaattctactactgagataattattgttagcatttgaatgtatttccttcaaatgaaatgaatgtacacacatagacaatgtcctgcttctttatgtaatgcatttctgaaaacatactaaagctgaacatgcaaaaattgaacaataaaatacattatagggtaatttctatccctgaaaactaaaagtgattataaaatcc

SEQ ID NO: 79257 - DNA, 2025 bp, Homo sapiens
ggctgggtgacagagtgagactctgtctcaaaaaaaaaaaaaagacactctattttggagtccctatattttcccttttctcacttaggcttttagaatcattgaacattatttaactgtactgatggcattctgtcctaaaaagttgttgattccttatgtctgattccttatgtcattactctggatgaagtattccagctttcagagtgatttgtgtttagtttgcactgcagcgtttcctgaggctacaaattagcataaacgttttaatccaaataagagttagtgattgtgaagtgccatgtctgggataaacacacagagtaaatacagattcaaattataattgcttactccttgtgctttctctagttttggtccacgttgaactttcatttgcagaatacttttgtgattgaactctagctcatttcaaatttaattgatggtaaaaatgtctctttctgtaatgctcataacatttattttgagagaagaacttgtgagctgttatagcaaagtatgtgggaagaatttaacattaggtgaatttaagagttcattccaagtgggtcgggcacggtggctcactcctgtaatcccggcactttgggaggtcaaggagggcgggtcacgcggtcaggagatcgagatcatcctggctaacatggtgaaaccccatctctactaaaaatacaaaaaattagctgggtgtgtggtggcgccagtagtcccagctactcaggaggctgaggcaggagaatggcgtgaacctgggaggcggagcttgcagtgagccgagattgcacctctgccctccagcttggcgacagagcgaaactccgtttcaaaaaaaagagttcattgcaagtatgtgtaggataattagtcctcagataacttctttgattagcagggatttgtccccaaaagggatgcaataatagttttaaaggaagtagttctgcttctctaaaaaaatttttttggtatcaggtttgtttttttttttaatttttaatttttaataatttatttatttggggctgggtgaggtggctcacgcctgtaatcccagcactttgggaggccaaggtgggtggatcacttgaggttaggagttcgagactagcctggccaatatagtgaaaccccatctctactaaaaatataaaaattatctgggagtggtggcaggtgcctgtaatcccagctactggggaggctgaggttgtagtgagccaagattataccactgtactccagcctgggcgacggagtgagacgctgtctcaaaataaataaataagtaagtaagtaaattctttatttagttttctctaaatcaactaaagttcatttttctgaattaaatttaattcaacaacatttatatatgatacagacgtgacatctgattgggattgtgacattggggtccctctacaggaacattatttatataaacatttttaataccgtagatgaaaaggatggtttgactctcagccttcgagaatcacagaaactctttcagaatggaaaagaaagagagatacagcttgaagctcaaataaaagcactggagactcagatacaagcattaaaagtcaatgaagaacaggtacctattttaacttatgtatggtaaaaaaattaaaagtttagttatttaacaaaactttttgtagggtaggactaaatttagaagaactttgaagttattgacaaagcattagaacttaaatttcctgactgcaatagtttgcttcagaattggtatcccgagaagcttttatttttatttttcctgctgcttctccatttggagaactgttttttaaacttgagtttaaagtggtgacacattcacattctttgattaatgagatagccatttgatttttggaaatagtcataagtcattggtagctaagcctggtggtggttgattcattttttggcagggggcagggttaaaaatgaaagtgatggccggatgcagtggctcacgcctgtaat

SEQ ID NO: 79258 - DNA, 1220 bp, Homo sapiens
gttgaatctgggagatgggttcgtggagattcatcatattattctctttactttcttatatatttgaaatttttcgtaatgaaaagttaaaagacatttttccaactttatatttcagtcattctagtttgttaagccttttctccttatttgtatagtgttaagtatcctcgcctatcatacaggatacctggacttatttgaaatttaaaaaaattttaaaagactttttatgaactttatatatttttttgactgaagcctaatttggaaaatgaaacatagttttcaatctcagatttttgactatatagaagtgtaatttaatacatcagcactatcatcaacttttttcttttgattttacagtttttagtcaactctgatataaattagtttatattcagaattacttagatatcaggttcagtcatgtggcatttgccagttttttttgtatagtatgtatataaatatgagaatgaaaaaagtgcttataggtactagagaattctgagatgaaatgctagtatcaaaaaacaaaaatcccaaaatataaacccgtatagtgactgtactgaattactcttgtcatactgtctggcacactaaatagcttctaattattgtgcatattgaagagccagtgtaattctagagtgtggcagcaagtgtttttgttttactttttgtttccctttaattagtaggggaaaggtcatactggatattctggcttacctgggctataccaaagagaaaactggacttttgggttgtgacttcatattgttgcttccatcgtacactgggacggcagggtagttacagggggaggcccagaattcattttcccctgaaggagtcaacagcaaatatgaggatggcctctctttgttcttaagttttttgtggaatgaggaagtggacagtgtatatgacataactggttttaggttgagtaaatgaacctcacagcagtggcctgacatctccttagtgtttactctttcagttcccttgaaaagttgtatttgtatctcctggtctttctgcatataaaaacctttccttacctttcttaacactctgcacttcttcaagttgagtcagttacacatttgtctaaatttgacatttggaagttaattaaataacttaatggtagtgccaaattagtgattatagtttcttagcaacagtaatttaaaaaatttgga

SEQ ID NO: 79259 - DNA, 1778 bp, Homo sapiens
cacctgctgctgctgctgttctcatcacctggccagagtgcatctggctactcacattccctgtgggatgcctaattgtcaattccccaaggtctgattactgataaaacaggattctgagacttagtctgcctgccctgtgataacataatgcattgattgtaccattattgtgacttgctgtgtttccataaaaaagtttttgaattctgctctatgtgtatttaaatctgagatcttcgttaaaaaaaaaaaaagccttctgatataaatcctaaaattatgcattcccttttccccaagtgaaatgatgaatataatttgtgtggaacttaagaagttaattaaaggagggaattatgaacttctttgacctctacagtaaaaaaccactcgttccaaggcagctttggcttggtgtcttgtgtttaagttggtatgatattgatgcagaccttttgactcagttgcagcagttactcacagaccttccccatgacatgctggatgacgacctctcctctccagagctccagtattcggactgcagcgaggatggcacagacggacagtaagcacctgaagtcactttcacttgtatattgcaattctataagtctttttcttttgatgaagattaataattacatgattataaaattgtaaattgattcttaaaattttgggtgaagattggaaggaaaaaggttaaaatcttggggttctttgtgttatctatgtacaaataaatgatacgctttaaatcgaaagtattcctttttctcgagaccacatcatcctgagcaattggagatgagctggaatgagcaaatgctgcccaaatctcaaagtgtaaatgtaagtatctggtgtgatgatgactttggtgagggtgggactggatcttcgtgcttttgttttactcttgttatctaatagggctataatgaaattcagagtttatatgctggagaaaaatgtggtaatgtctgggaagaaaatagaagtaaaactgaagaccgacatcctgtgtaccatcctgaagaaggtggagatgaaggtggaagtggttatagtcctccaagtaaatgtgaacagactgatttatatcaccttcctgaaaactttaggccatataccaatggtcagaagcaggaatttaataaccaagcaaccaatgtaattaaattttcagatcctcaatggaaccattttcaggtattgtaaaaacttgactttcaagaacttgtgtgtgtgcacacgcatttgcgtgatgtttgtgtgtgttcaggaaatgtatgtgagtacaatggtaagatgatttaaccacacgaagttctgagagggcacttattcaggttcatggtgaattagtcatggtattttctgtttacagtctaatacaatcatgatcttaagtcagaagtttaaaatagaggctctttggacatagttgattaaacattaaaagttaagtctgccaaagaataactatcctcatttactgctgcttctaccactgcactgtgcttcaatgagaagctgtgttcaggtctcttattgtagtttttaaagcagtaattctgtgtaggtggcaacatttaatttcctcagttttcttgctcaccacccataacaaattttaggttaaacatgtcaaagctgatatctctattgtatggtgatataacagtagacaggatgaatgtgaaggaaaaaccaaaaaaccttgtttttcctgggggggagtttaatgaagtaagacctcaggatatagt

SEQ ID NO: 79260 - DNA, 1028 bp, Homo sapiens
gactgaatggagggcagtgttaggccaggtaattgatgacacctgcctacttttttgttgtgattgttcagagctttgaagttctgaggagtttatgtatagtgtcaggatccctaagtacaagttaaatcagcagcagcttttttgaatgtaagtagttgaaaacccatttcctgctgctgcttctgccgcagcagtcactgctccccagggaactcttgctgttgcttttggaattggaagtccacagtggtggagcttcacagccttcacttctgtttttcccgagtatattgccagaacctgattttatcaagcttaagaggaggacatttaagacttatattttgttgtgcactctatggcattgactgaattgtaaatggtttctgggtagtagtcattcactcatgatttaggggccttcttcttgtaaagcatgatatttggatttctgatattaaaaaaaaatgaagcaatagggtactgcctgtgccatgtttaatatatcacatttgaagttttgtttgagcttaagatttttacatttggcacatttctagtttattattattgtcatcttatttttcatgtcggcaaaaatcttactgttttatactcttcagaccactagaaaggtctattcatagctttattacctatttgcatgttttcttttccatgaattgctgtcatatagctattttcggtgaatcaccattatttttattggccataactgagttatacatattttctcccagtctgtttctgtcttttcactttgtgtatgtatggcatctcttatgtagtttgtcctggggagattttatgtggtgtccagaaaccaaacatctttcccttcccacaggaggaccatgtcattagactttggcagtgtggcactaccagtgcaaaatgaagatgaagagtatgacgaagaggactatgaaagagagaaagaggtaagttgttaaaaaaaaaaaaaaaaagagacactaaacccaatctttaacaagttttatttc

SEQ ID NO: 79261 - DNA, 1021 bp, Homo sapiens
ctgtgtataaaatatatagctaaattagccaattcttaaaaacacttcaataattacttgtcttcacattggctaccaatgacctaaagtatttaagcatgtcaaaccaagacatgctttttttttttttgagacggcgtctcactcttgtcactcaggctggagtgcagtggcacgatcttggctcacgaagcatatggaagaaaagcagcctttacaggatttcaaacccttgttttctaattaatggatatccagtttcccctttaagctttactacttcctcatcttttagcctggggtatagttattttcaaataactattatatattagttccatgatgctgccatttttaaaagtaaaccaaatgttaagagttccaccttttccccaagaaattccacagatgcctaattgtgaattcccattagcaaacaagggacatacaaggtgtctggtgcttagcagctgctatttgagcccaagagcctatctggactcttttccatccagccttgtaatctggcctcaatagcaacaccaaggatggtggctggcagggagggtcaactgaatccaggctgaaaaataccagcactttctcttctccctagctcagtcatccatgaaggaactcaaatacttttcttaagagatttaaagtagtgtttatacatgtagtgtgaaaaataattattggcatttgccctaaatttcttaagggttgtcatcatgttagaattggtgcgcaaacatttactcaaggcatgccctgaatgatttctgttattgttctccagaatcttaatttttttcatactctcttcatgtgcctttagttctttaaattgaccaaaccactgttcctataaaaaacaaacattaaataatttgtggccactatgggaaagtttgtacctgctgcattgagagcacctctgtgctctctaaagctggtgagaaagcctgttgattctaatttaaagtagaaatctggcggcggtgccatggcttggttg

SEQ ID NO: 79262 - DNA, 1083 bp, Homo sapiens
gtttcagatgcattatgagaagaccccgtttgatcagttagcttttatcgaagagcttttttcactgatggttgtcaatcgtctgaccgaagaactcggctgtgatgagattattgatagagagtagttagatgctgttaaaagaggaggaaactacttgaggagggacccaactttccgctatcttttgggttcattccaaatagttttgtgccattgaaaaacttgaccttcaaaaaaatttgtttttcagaatagaacacaataggacagtgactgcacagttgtgaaaaaggaagagaatcattaaagaaaaagaaaaaagattttaagaccgttgaaatcaattatcaagaacgtcctaaaacacctatggctttgactttgttattgatccagattattttccttgcattggggaaaatatctttcatatttgtttgctgtaaagatggttttgcaagaataagtcatgaccaagacaaactgccaatacaaaagcccactgatactaattatataatgagaaaaaaatgtatccaactaggacacatatcttttgagttatttggactgaaagcttaagaaaacttggaaaattctattttgtgatctagtcaagccacagttatcaaaggctacattttcagtgtaagataaatggatgagtaaactcaaatatgtatcacgtgtgctttgtatcttaagatgtgtttccaagagcatctgaaattttgtttgtacatgtatcttgatcatttataaagccactgtgatctataaatcaagaaaatccattgtcataaccatttttaaaagtcaaaaattaagacatccttaattaaaaagtttcaaatctagacactaaatgtgtgtgaatgtacaaagaaaacaaaccattgcttatgctgttatatactagagaaattttgttttgcttgctgttttaacttgacagatgaaggactttagttgaacttcatattgtaagaactgttaataaaagttgtcaagtaaaaagcgctatatctaaaaagactttatgaacagttattctatcaacttttaaaggttttaaacctg

SEQ ID NO: 79263 - DNA, 1041 bp, Homo sapiens
gctgtaacccaggctggagtgcagtggcatgatcaaagctccttgcagtctcaaactcctgggctcaagtgatcctcctgcctcagcctcccaaggagctaggaccacagtcatacagcaccacatttggctaattacatttttttgtgtgtgtgtgtggagatgaggtcttgctatattgcccaggctggtctcaaactctaggcctcaagcagtcctcccaccttagcctcccaaagtgctgggattacaggtgtgagccactgtgcccagccaggtatatttttgaacaaaggaataaaaataaatttcatgaagatactcatttggttcagacagccttggggtccacaagttgattcagatgaagggaaggatttctcaatcatgtggaactggatgagctttaacctctttctagttgaagagatcaaacatggtttcatctattagcaggctgttgaaatagcagtttattattaatttatagcgacttatcaactttgtcatcacaaaatttaacatttataaaatagatattactattaaccctgttttgtccataagaatattgagacttagagaaattaaaaaatttaccaaggtcatctagcaagtcaataggtggtagaactggaaatcagatctgccctgcctcttgtgcattatgggtcaaccaaagtggaataattttaaggaacaaatcttggggaagtgctgaaagccagaagggtcagaataaggaaatgtttaatcctgggtttaagatgccagattccttttttgtgaattctctctggaaggtcttcataaagatactcataaatctgtaggaaaagatactttaatgtccttttgtgatttctaaggagaaaaaaaatgtgtgagatagtagttctcaaactttagtatgcaaaggcttcttaaaacagagaatgttagctgggggtggtggcatgcacctgtagtccccactacttgggaggcttagatgggaggatcacttgagctcaggagtttgaggctgtagcgtgtgataat

SEQ ID NO: 79264 - DNA, 1039 bp, Homo sapiens
tctctgcccttctctaggagtttgtatacctgcttaggagacaataaatgagctaaatgttttatttgctagtcagtcaccacctggacttcagtgactttacaagtttatgtaatggtggaagaatgacaaactatgtaatttttttgtcttccatccaactccccaccacccccaactgtcccccccacccccctcacacacatgcacacatccgtacgtgtgtgtgttttccacttacaagcttccataagcaggcacaaaactgagaaggaaggggtattatccctgccctgattatctggggcagggctttgcctcacagaggcaggagagaagaattgggcagattctttactgaactcattgggactactgtgctagttttgatgttttataatgctggcatttaattactggagagattggattcttggttgatgatttagtatttgtgaattgtgaaagttcaggagctgtgtagaaaatgttagtcaatcaactttattattgtgctaaaaggggacattcttatactgtcctgtctaaactgttctccagtatagacttcctaggcactaaatatccaatatttaaaggaacacagcaggtaaggaatgaagcctctgaaatagtactcatggatttatacatggcagatcttactgtctctacacatttggaagtgttcgttggtttaaagaaatgatagaggttttgaactactgacagtcttaaaagtgaatttaaaaactgttcatactttttatggtgtaaatttcctttgctcgatgtcagtgattcagataactcttgaccttgagatgatggcttttcacaggtttcttatattttatatctcttctgaacatgaattgtcattttagatttttgacatttgtatcaaaagagaagttgaggaaatcttcagaacactggtaacttttagttttgctatagacttcagaagtgtttatttatatgttcggtaaatgctctcgcatatgcagtacctcttctgccagcaaatccaagggac

SEQ ID NO: 79265 - DNA, 1052 bp, Homo sapiens
ttagtattgtcattgttactcagtgagtcaagcagacaaaagaccagagatctttaactcctttcggattttgtttaacagctgggtttattatttaaagcattgccttctgtcagctgttagtattcacgtgagagtgatctgacagtaagtatattctctttatatcagatagtatttctattctagaaatctagactcttaatatcttatatattaaatgttgtactatcagttttcctcctacaaatgcttttgcttttttgtttatattattggcccttcaaaagatcactctaaccaattaataggtttctaagaccctattatatgaagtgaacctattacataaagctatttgtgcaagtatttctaagttcttaaattgagataactggggggatcacagaatatgataccccatctgtgaatagctttaacagttattgctgtgaaggattttaagattttaacatttatgttgatgaattaattttacctttaaaaatgacatatgaaagaatcccagggtgaaagtataatctatgtgagtccaaattacattggtttattctgttccttttccctataccattgtttttgagcaaatacttcctgcctagctttggaaagttaattaaatgtcaaatcacagatgtggagcaaatgaaacacttgggggataaaatgttacatatgtatgaaatgaacagcttgaaggaaaaagggaaaaaaagaatgaagaaaattgcattttgggatgttctagtctttgattgcattcttcaatttggcacactttgacagttaaatgttcctcaatctctgcatttatatatattcttctgaagtagtgtcattcttgtacttatttaactatttttgacagaaatacaaaaaattcccctgcaaacttttttgcactaaagaagaacaggcacagattttcccactacataatataaaagtagaaatttgcttgccttggttattcatagataagaaacaccaattctccctattaagtacctgcttatggtagacatgagggg

SEQ ID NO: 79266 - DNA, 1055 bp, Homo sapiens
aggttgtggtgtcttagccaacagattgttgtgagaagtattcatacacatgaatcttgacgataatgtgttaatttgaagctcaggatatcatcagtatcatgactatctttctgtgtagaacggggccctggaaaatgaattatttctataaggttaaaaaaaagataaatatgtagtatcccaaaacattaagactccaggaatcagaagccctggatttcagtattaacttcagtgcttgctacacatatcattttaggcaaccattttactctcatctttctcatctataaattggggagcatatttgatttaactcactattgttaaaagggtcaaaatgagataattcgtgtccaaataattgaaaactgtagaatgtcaatcaaatgtaactgtatgacctgggttccaaactttttaatttaccctttttttttttggaaactctagtttgccacctaggatttaaagcatcagatatggtttgatagctgtatattctataacataattgcttttctttattttgtatgcagtacttccttcaacttacagtgtctgaaattacatttgcctttttgccagttagccaaacttctcatgttcatgtttaagtgaactaccatacctgtgttataatgtatattgtcatcatttgtacacagttgaagagtaatctgtaattaaagactagtgtaatgacttttaggttattttaaaagaaagagaggaaaagaaggggcgcttaactgtggaccacaatcttttgggatccgaggaaccaacagaaatgcacttagattttattgatgacttgccacaggagattgtttcccaggaaggtaaggagctccccctttctcctcttctcatggaatggtctgaaatattttaatagatacgtaagctatcactagttaatgctcctgattggaagacgtgctccatattttacataaatctctttattcttcagagtggtttcttttaaagatgcttttgtagggagatggttaaagagaaggggacaggtattatatagtaggcct

SEQ ID NO: 79267 - DNA, 1033 bp, Homo sapiens
attgaattctttgaagagtctagtccggttgtactgcagaacatcccacattctggatcctttttccttatgattgacttttatgggatcactaacaaatgtgttttttctggttatcatagttggatgatttacctgaaaactcaccaatcaatatagttcagactccaattcctattaccacctcagttcccaaacgtgcaaaaagtcagaagaagaaagctttagcagcagcccttgccacagctcaagagtattcagaaataagtatggagcaaaaaaaattacaggtacatattcatttttatgaacaaatgtgatagtttacttgctaggtttgatggaatagatagaaggagtgataaatgtagtcatcttaaaatgccacagtttcgtactataacaaaaaaattaattttttatatttattttgtaggaagctttatcaaaagcagctggaaaaaagaataaaacacctgtgcagctagatttaggggacatgttagctgctctggaaaaacaacagcaagcaatgaaagcacggcaaattactaacaccagacctctgtcatatacaggtgatatcattagtctgagcaatttgctgtttgtctctgctaatatatgttagatgttgttaatcgaaatttttaaaattttatatatgtatgtgtatatatatgtgtgtgtgtgtgtatatatatgtatgtgtgtttgtgtgtgtgtattttaagtcagcttaaaccgcaagccttgaaattgtccatgctcctttccacacctagtcctttaacacatcctatctgtcctgcctgcaaaacatatccatactctaactactcaccagatttcctgccaccacagtagcccccattattgtatcatactagactgagtagcctccttactactacctgcttttccctccccacaaccccttgtctgcgttaaaaggagtgacctttttaaaatgtaagctggattatatcacttcactgctcagaatcctctaacagtgcttcatttcacttgg

SEQ ID NO: 79268 - DNA, 1018 bp, Homo sapiens
ttgcagtgagccgagattgtgccattgcactctatcctgggcaacaatagtgaaactccatctcaaaaaaaaaaaaaaaaatcaataatatgttagataagtttagtaattgagccaaaggacttgagagtatatctcaattattttctcaagaatagtttcaatatatccaggtctggcaattgtagtacatgtactcaactgtactattggttctatacttatatttaaagacattagatataattttcaggaaaaaggaagatattaataaattaatttcaatggaaaagatgtttttaaccttattgacaattgtgtggagtaatgcagaacaaggagtatattaataaagtttacatgaagctgtctgttaaacactttctcaaattatctgaatgtgataaaacccagtttgaatttcttttcaattacccacccatctgaaggtagaattattaataaaaatgaaatagtaggtgcagaaatccaaaaactggacatgtgtggatacgcccccatccttgaataattaaattgtttatattttagcatgtgagaaatgacatttcctctttaagaccgactttgaataattcagtaatagaatacaagaaataacttcctcatttttcaatacttctaagcattataaaaagtttaggagtttgccttgaactctttttacttaaaatgtgaaacatttcaggatgaagatgggtttcaagaactaaatgagaatggaaatgctaaggatgagaatattcaacaaaaactttcttctaaagtagtaagtaactctttaaaaagaaaagcaaaatataacatcttttgaacaatggctatgttgaagggaaatattaaagataagtgtaaaggcacatggagcagcagagtgtgcaggagatggtgtttagtacctatctttaatatttcttttccagcatagcctgaacaaagataataccctatgaaatccacagttctattactaaaataccattaactaaatgatatc

SEQ ID NO: 79269 - DNA, 1013 bp, Homo sapiens
ctggttttttaaaaaagtaaccatcagatttaaaaaacattagatttggtctgttttttaaaaaggaaaagtatgggtagcaaagcattctgcccagtatgggcagaatctaagttaaatactttgatttgtcttcctcattattgtctggagtctgtgaaacttacacgtgtaagtactgtgttttgtttcggcattttaatcaaaaaaacagcacagctagtagttatctcttaagcattaatcatttttcccttcagaggacatttattttatcttttgccatgagatgtaaaatatcttaaagtttgagatattctatttttaccttaacatagaaagaatatggagggtttccatggtcatattttttctgtgggtgtgtggtacatactctggagtttcactgtgggagagtgtctcgttatgttccaacttcagttttgattttaagtgggtgtcagttttttattgcttaatctgggaaaattatttgcattcatctggaggttccatgtctgaggaatttagtgtacattctctgccgacgtgtgctttgtggtaatgtttgcccattttccctaacccagtccagcacagtgctctttccggaatgtatgctaaatgcacgtttgttgaattatataggctctcaatgatctgaatacatttgtctaataaactcttttaaataacatttttgtttcatactctgacagagtcttgagctttctagattatttacatcaaaggcattttgtttatagacatttgccttaatgtacacaaaataaaaagtgaacatgaaactgcttaaatatttttacaaagatgattctgggactatgatttttttcattaatttggaaaattctgaaataatttctgaaagatgaagatagttttgctatgtagatggttgtgcttttttgtgaagcaaataatacaagaatgattagactttgttaagtgtagtttacatttattccatatttatttcctttatgaagaca

SEQ ID NO: 79270 - DNA, 1024 bp, Homo sapiens
aggctagtaatttctgcctattaattttacagttggataattagcacctgaattaatgagataagatttcccaaattcctgtatgtgtctatatgtagttgaagccggtttgtattttgaaatcggactcttagcaggcaaagcacagcttcctagttgtgtatacttgtttttacagaagacttttttttttaaaaaaaagctttatgtgaatgtaactctgaagacacaaatgagttttataaaacaatacatggaattaccaaagagaaattgatacagagtctcttggcaaatacacttaggcatttatgtgacccagaagtattctgtatacagcctgtatctagtttaatttaaaaacatttttgaaggtatctatcataaatacctgagatttcaaagcctgacaaatgaatacgaattttccttgaatcatttccttgtatgtgtgttactaatgaaagggttcaacattttgttccttcactaggatgccaggactaaaaccagtaatgctaccttatgtatacttagagttcctttcatcctagaggaaatataattaactatttagatggtaatttttagcatagctgtttgtgattatcctagcagcaagtgctgtgagcaaattatttaaactagagagccttttcccctttccacatctttccaaagtccacgacctattaaaaccttgtagaaatttaagaactaggaaaaaaacatggaagaaggttttctgttgacttttttttcttccagtacttcttgcctcttccccagcctaaccctaaatgaaagaataatttgaaaatcctccacttccctatacactcagaaaatatatatagaaaagtgatgtcttcacctcatttatgcgataggcagttaattcaggggtccatgaatgacctagaaggagtatgcttctttatatgcctttttctagggcaagaatccattattttcatcgtattctcaaaggacggctaagaaccattaacttaatagtagattg

SEQ ID NO: 79271 - DNA, 3568 bp, Homo sapiens
cacagtgtggcacactgtagtcttgaactcctgacctcaggcagtcctcctacctcagcctcctgagtagctgggactgggctttacttttaatgtgaatttttctgttttcttggcataaattgagttaacagaaaagagccttaacattgtaacaaagaaattaggaatcactaaatttctttttaaggattctttcaccctcagagaaaattgtaggggaaagtagtggctaaaatatgtaattgatgaagggttaacttcaaccacaataaaattgttgcaggaatgtgcttcagaagttaaaaatttaagtctttatcatacctgtgttctcggatatattttgaagtgataatgaaatatgtttaaaaatcttctcttcactaattttcctttaagtgatagaaatgaattaaaattagaatgattgtgtaaaattatgaagtctttaaaatgttaattggtatataacaagtcttttgtcttaggagttaaacatagatgtagctgatgtggagagcttgctggtgcagtgcatattggataagtaagtactttactattttttatcacaaaatatttggtaccgtaagttttgaataatagtgacaaaggtaacaattggattcttgattattcataaaaagcacccttgggtatggttttctattagaagagatatatatgtatgtgtgatggtttttgatgaatgagcgtattaaacacatctcagaaaaagttctaaatgatttttcagaaggatttcttattatatacagccaaagaattatttaatgaatagtatttatgtatgtttttaagtatagggtatgtggtacataacatttttgaaattgtatcttacttgaaaacagtacattgtttaaagcttcacaggtgatacttgcctttgattaatcggataaatctatgccttatgggtctttcagtgaaactgatgaaaagtatctgaaatctggtttctatctagagtttgaataacacagtgaagttaaaactaacactgaactcatttaatgtaggcagctgctttttttttggcatttgttgatactgtattttatgaaacattaatccagaaactgtgcttgatgaaagtcttttgtagacacatcttatttatttctttctagcactattcatggccgaattgatcaagtcaaccaactccttgaactggatcatcagaagaggggtggtgcacgatatactgcactagataaatggaccaaccaactaaattctctcaaccaggctgtagtcagtaaactggcttaacagagaacaagcttttacagacgtccttaaggcaacagtgcagagatgtaatccttaaaagaactgggaatggcaaaactactgtcggttgatgtgtcctgaaaattattggagttatggcagaagtgcttttttgatcaactggtttgtgttttgctgctgcatttatcccaagaaaaacagctttaatctccagaagaaaaccaaaataccatgggatttatgctgtattgacatcttgccctaaacgtacaacatcatagtaatttgtcatgggcaacatgaccagagagaagatttttgtcatgattttaaatacactgacacgctactgttggttaaatttaaacatgttttacctgcagaaattctctcacaaataacctgcaataacttgaaatgcatacccttttgaacacttccttttctcatgtataaattaaaatgtttgctgcattttgcaaaatgtcaattctctaaaaatgtgtccgtatatttctgtacctgcagtgtagtaaaggtttagacgaaaccccataattatagtggcatactgtcacttaggtttcaagcagcaaaataaacagtgcagctcagaaattgtagtttggttcttgatgtgtttttattacatttggagttgttttgttttttagtaccttcgaaatttcaaattattttatcttcagttaatgattttaaaaagcctgggggcaaataagttggttatttgctttcaagtttttaaaagtagtctttattgatagagtaaggagaactactttctaacaaaacacgtgcatagttatgacagtgatgctttaaaggaataaaattctttttttttaaagagtgatattccttttcaaaagaatactaactctcagaatgttcactttaaacgaatatgccagaacatagacagctaaatgaatgttactctgcatagtgatcatgctggaaggttatttcctaatgccagcaatctaccattgcccaaaacctgctgagtttactcttttagaattgcattcaaagttaatttgtcacacacactaaactttatgattatacattgttttaaaaaatatagtattaggaagcttgattatttttagttaccattacttggcaccaaatgaaagtttccaaaacttccacctaactttgaggtaatgcagaaagtatataactggctttgaaggcaatcccaaaagagttttaaaggttttttgagcagtggcagtatacttaggagaatgaactgtggccttccaaggtaactaccttaaaggaactcagctcatttgaatgtattgagttttggatgtatttgtttcattttttaaaaagttcacattattttatagtgtcgaaaggaagaactaggattaacataatttctttggtttttctattgcttgttattattatgtaaaaactgggtggcagttcagaaggaagattgtggttacagaagagtgacaaccaagaattttttgatcattaaatcagattttataaacagtggaaggagcatggacttaaaacaaggcatgcttattcggttttgtcaaaattttacgaaaatatgtgatatatatttatactaaaaatatataatccttagatttagaaaagcaatcagttaatgtctttagcagactaaagcagtattaaacacaggtacaagttggaaattgtagaaaacggaaagaaaacaaaagacaaaatgtctatggtagggaataaaagtttaagatattataaaattatgtgtattttctcttttacataaatcatttgtgaaaagtgtgctaaactttttttacaagagtgatattaattaggatttatttttcaatataatttggagaccctttgttatccaaataaaaatgatgagtttttgtgcctgtattcaaatatgtatgcatgtgataacccttgaaagctaaagcccttcttaacttttgagttgatggaattagaattcaaagatttgaatgaaatgatttaacctttatcctccaattcttacagtgcccagttctcctgtgctatctttgctttgtacaatagtgcatcttccactttctagagagaaagcatgcacttgttatttggaaaactgggctaaatatataacagtatccaaagttataccataataatttattgtaattgtgtattacatagctttgtttacccagatataggtgcgttcttttttttctgttagtcatctgtgacttttgttctggaa

SEQ ID NO: 79272 - DNA, 1551 bp, Homo sapiens
ctttggccttctgcaacaggggattgagaaatgttccttttgaaaattttcacagttgctggtagctttctagaatataaaaattaagaagctgcattttctgaataacctacacagaggatatgctttctcatttgaaagacgaggctacaccccttcatgtagtgtacatgaagcctggttcctttcattatgaacaattaggaattaaatgcacaatttcatttgaaaacatcaaacattaaatagttgttaaatgttttattgccaacttttaagagaagtaagatattgaggtgattttaattaactttgtataaatatagtatataaccccaaaagaagatttatttaatctttcttttaaaaaaccaaaagcatgaaaaggaaatttatgttttttttggcagaaggttatgtgtgcttgtttaactgtgatttccatgacagaaagtataatattatttagatttttgcatatgaaagttgagaagcagggtctttggattatctgatttaatacataacttcttcatgtttgacataatttacactttgtttttctattagtgcctatcagaataatgacatcactgaatttgaaaagattctaaaaacaaatcacagcaacatcatggatgatcctttcataagagaacacattgaaggtatgttctttctgccaactggattctattactttctttgccactgtcaaagaaatgccacttaatgaagctgcatggcattaagctgttttctttctgtctattgcaaagtatagatatgtttctaaatgctgtcattggatgggatattccttaaaattatgaagctcttttaaagaaattgaccaatttcatattactatagtcaagtttatatataatgtccattttgtttaaggtaactgtccctttttaaaaaaatctaatatagatgctgttgcatgtttattattgatgcttaggttcaaagttaatttttaaggtttatttttgacaaataacaaaagttatgaaaatatcctgctatagataatgctaagatatatgtactatgaaagataaggcaacactgtgaaggtttcataccagtaagtgaatgaggtttttagcaagttatattgaattaccaaagactacaatcatctctttgctcttggacttcttttatagctccgattttcccacctattatggagctatttgaaggtttttaaatgaccatttggaactaaatttcagatgcatcagaagtaatgttctgttccccatctttctttctcttttaatcaacagacattttaaaagttcttacatgaacctggaatgatactgcagtttatagatatagaaaaacgtagaatctttgtacatgaatttcaacctggttttaaaaaattttaagaactattgtacagacaaaactggaggaaattgtaaaagcattatataaaatatagtactctaggttttgagagagtctaaaacaaggaacttggctggctggtataaatcagagcttctttaaagatattaactgttgagg

SEQ ID NO: 79273 - DNA, 1106 bp, Homo sapiens
atagtaagttttcacttaacgttgttaataggttcttagaaactgtgatttaatgttgttttgttcaacactacattgatgaggggaaaaaatgatttcattgtacattgttttgcttaaggtcatggtttccaagaacctatcgacagtgttaaacgaggacttactatataggaaaaaacatactactatacatagtttcaggcatccactggacgtcttggaatatattccctgtggataaggaaggactactataaaaaaaacctttggctactttttccttatctcataactaaaaagtagaaaggatgtattagtttctttttggccattacaagtggtattcttagtactgtagctcccaattaaaatttgtgttgtgttttcacatggaaatagtattataaatgtaagatttccaggctaatgcaaataagaattactgtctgaattctatcttgtctaaagttaaatatttgctttcctagactgatgatggagaagatgatctgaaaaaaggtacacagttattagaaatatatgctttggaaattcaaatgtacacagcacagaaaaataacaaaaaacttaaagcactctatgaacagtcacttcacatcaagtctgccatccctcatccactgattatgggagttatcagaggcaagtttggtttggagagggtgggcagtggcatggggagatatcaaagtgtttaattaaactcttgctttttagaacttcagtgtataccttggggccagtagtattcaagttacagaatttaaaaactgaaaggcactgaaatagttttcatttggcatttatgaggtggtcagttttgttattacagaactgaaaatgtcctattttctcatgtcttattcttcacagaatgtggtggtaaaatgcacttgagggaaggtgaatttgaaaaggcacacactgatttttttgaagccttcaagaattatgatgaatctggaagtccaagacgaaccacttgcttaaaatatttggtcttagcaaatatgcttatgaaatcgggaataaatccatttgactcacaggaggtacgtgtgttttaattgttaatttctctt

SEQ ID NO: 79274 - DNA, 2031 bp, Homo sapiens
actagatgtcatttttttcaggcagtttgtactctttacatttaaattttatgtaatgccaatagaggaaggtaaacttacatgttttgttagaatattaacacttaatgacactaattctagagttaagctatatatcatggagctttcctaaagtgggaaaatgttttccaactcttaaaaacaagtgtcatcaaaacatattttgtatactgtttataaatattatgccagtaattggagcagggagagggaatcgagtgattttgaaacttcaggactgcatgctctgtgtgtggttatatgtaaggtttttgtcttttgaaagtaacaacagatattgggtgggtggtactctgttctattcaatatgccatcagcagtcatgcataaatagagagtgttttctgaaaatgtgaaattttcctgctcttacagtcctcttcttgatcctgttaagcagagaattagatattcaaacaaaggcaaagccagaagcggggggaagagggtgggcaggggaacttaacaagatgtaaaacaaataatgatttccgtgaaaaaatgccacacagattggtgatttggtggtgattagacatagctaaaattatactagacttttctctccacccacctccatggtttaccagtgacttaaaagctatgcagttgagttacttagtcatatttatagaagaattttgagggaaggagcttattctttgtttcttcaccagcatgcttagtgtttgccacattgtaggctccaaataagagttgagtgaataagatatacactgttagtaataatacaactagttctatgtacatttcatttactgctgttaatatgaaatgagtggctgatgtgagtggagtggtatttacagctaattgagcacaaccagttacagattactttgttccttctccactcccactgcttcacttgaatagctttttaaaaagtaaaataaaatacagaatgtattattagattgggaaggacaaacgtgtactattacagcatgagaacttacagcactatgtttatatggggaaatattttctgggttctataaaacaacgcatcatggtacttgtaaatttggtctgtattttgcttcagtttgttaattttttggactgtagaagacagtaagatacagatagtgtatcttatgtgtattaaagttcaaagatgcacttttagtttgttcaaattaactttattaacaggtacaaatttgctgtttacaattatagaattctgattttttatgtcagatggatttactgcaggaattctatgaaacaacactggaagctttgaaagatgctaagaatgatagactgtggtttaagacaaacacaaaggtaaccgttataatacttacacttttcttttgaaaagtgggtgggtgtttttaataaagtctcctaaagatgcacatcttctgttgaaatcttgattttaataaatttgctttcttgcagcttggaaaattatatttagaacgagaggaatatggaaagcttcaaaaaattttacgccagttacatcagtcgtgccaggtagctttcccttatttttttctgaatatttcttcataataaaaaaaaagtataagcaataattatattcaaaatattgtttagggatgttttagtttaagcattatctgaaaaataaaatttagaaaataagttataaaattatctttttttttttgagagagagggtatggctctgtcacccaggctggagagtgcagtggtgcgatcttggctcactgcaacctttacctcctgggctgaagcagtcttcccacctcagcctcctaagtagctgggactacaagtgcacaccaccatgcccagctaattttttgtatttttttgtagaggtggggttttgccatgttgcccaggctagtcttgaactcctgagctcaggcgatcaccgcctcggccacccaaagtgctgggattacaggtgtgagccaccatgcctggcccctcaatctt

SEQ ID NO: 79275 - DNA, 1903 bp, Homo sapiens
ttcaattcttggttaggtttcagggattgttctcaagttttcttgttctttgtgctgtgcctcagggcagaatgtattgtcataagcaagataattgcagcattattagtttattcctcaccctaataaatacatatgttcagttagtcaaggaaagaagcatttgtatctgccaatgcttcatgtctttgataaaaaaaaaaagaaaatagaactcagtaaaaagagaggttaacagcaattgcagattatgaggattgtggatgcaggttataaggttagacttataaattgacttacaggatatacttaggaatggtaaacctctcccagaataagtctcagtactcctttattttttagacctttcttgtttcctggaacaacctcaatagtacaaatacaaggaataacaacatttactatatctacttttgaatagaaccttagatggggggtcttttcttgacttgaaacgagtattgaggcttgaaaaaattgtttaatttcacatttttatatataaccagccagttgtagggagaaaagaaacaggtaactcttattgcagagcttcctgaggaagggataaaattacagggaagaatatagctaatatcctgcatagcaggtacccaaggcatttgaaagcttggattttggccgagtgcagtggctcacacctgtaattccagcactttgggaggccaaggcgggcagatcacctgagatcgggagttcaagaccagcctgaccaacatggagaaaccctgtccctactaaaaaaaaaaaaaatacaaaattagcccggtgtggtggcacatgcctgtaatcccagctacttggagggctgaggcaggagaatcgcttgaacctgggaggcggaggttgcggtgagtcaagatcgcgccatgcactccagcctgggcaacaagagtgaaactctgtctcaaaaaaaaagaaaatacttggattttatttgtatgttttggcttatgaatattgtagtaggttttatgatttaaatatgttgtgcaatgacaatttctgaaatttggaaaatttagcagttgtacttgtttcataagctaactttatacatttggtttgagtaatctagtcatttcaaatttaaggtaattacaatgttcctgtcatacatagttcctcttttacaaaactatatcaggaactatatgaactacatttcattatgtagtagtgtattctataaccttaatcatgtgtacatattttagtacctaaatttgcatctgataattcatttttcttttctcacagacaaactttccagaaatgatgaatagatataagcagctattgacctatattcggagtgcagtcacaagaaattattctgaaaaatccattaattctattcttgattatatctctacttctaaacaggttagactcaattttcccctcttgggacgatcagtgtgtttattatttatagtaagggctttgttctttatagatggaaaggcctagagcttctatttaagtagttgtgctagttattagtatgctttaaaaatgataagtactattttcctggttatattactgattatataatagtaaaaggtaataactccagcttgatctctttaaataatgccttcagatgctaaaatctgtaaacaacttttcaggcttatgttagactcctatacagttgctaccacaggtccttctaataaactacattaacactttagctagccattctgaggtgttaaatacactgaatcacaggttatttgtgtggatttggttatattaaaatctttgagaagtgcctgtgctcttatcagttagtgtttggcattactcaacaggtgctcagtaaatgcttctgcaaaggatgggtggataa

SEQ ID NO: 79276 - DNA, 1012 bp, Homo sapiens
aaaggatcaggagatgataggactaggtacaaacatgaatcttagatcactaaaggagaagaacttttgagagaaagatgaagttgaagctcagatgagcagggagtgaagcagttggaaggttcaggaactatggcaaattgaagaatagctgatatgttaccactttctttttcccctgtttttgtatttcccatatgatatgtttcctccacctctccattagcttctctatcccgtctgactagtacttgtatccaggttaacttctactaatcttgtacctcttctttttgaggtactgtcactctggtatggtttatctcacctttaataggaggggcactccatggcatctcctacagaagctgttgacaaaatgtctttgttcatttcttccccaaaatacatcagaacaattcaaaacatgttaaatgttattaagtatattgtatattgcacttaaatctagttaaagaatgaaaattatctacattatatttaccctttctactcctactgctttgatactctcaaaacatttctatgttgcccagagccccatgctttctttccattttctgtttgcaagaatattaaacacaaacatttactgtattcagattaataacttagaaggctgtggaagaagcaccaagtgtttcaagggacagaaatttgtgattaaacaattatagtgccattaggggctgaatgtttaactcgtaggttctgtgatttgagataataccaagagtccctatagaaatctgctattttaacgtactagcagtggtttcgagtccatttgaacactgtgctacccttaagacttggttttgccattttaccttgagcagagtgggaaggaagggagagggttttttgcattttatgttattttgtttaccttatctaccttttgtttgctgtagcagcatctgtgaataagttatggttcacaagagtgatttcagcttctgtacctgcccctctcgttttctgattggac

SEQ ID NO: 79277 - DNA, 2668 bp, Homo sapiens
aagcctagattacaagggttaagaagtaaatgaataattatgaaacttatttactacctagtttcatcttgtccctaaaagaagtgttccaagtgattttcatatgttaaacagaatggaattccaggtcttaaatctgtaagactgacagactcaggtcttcacacgaggaaggaattatcctccagagggcgcacattacaaagccactcttgattattgaaaaattcatcttgtgttaatgtatttttgagctttcaagtaacttattatacacagcatacctttcttcactcctatgcttttatgagactgtaacagaatttttcataaatatctcataaagaaatttgttacctgtatttggatttagaaataactataaaactattcttgtctttttgtgtttgtttccaggtactattcttaatttgatataaacttgccctttgtaatgacttaaagctgagaaggaaataatctatatcttatgactcataagataataatttccattataccaatccatgtgtattttgtaatcctcattattaggttgaatgtcctggaactgtgtaacactcttgtttatactgctccacaaaatagttgttttattccagttttcccttctgccttgttttttttccactaagaattgaactcatgtaatagaaagtctcataaaattatataaatccattttgttttatttattttgatttgttataaagctgattaagttaacattagtataaacagctgttgtatagtgcacataaggaaagtattcttattaacataattatatttagtgctagatgactttgccatgtgtagattaccatcctagctggttttaaaccgtgttacaataatgaaatttagacttggggaatagaaaaattagattacagaaccaaagattaataattagaacacatctacgttaggtttccctcagatttcatgactaacgaaagcttagcaactacagaattggggtcattaaccaatattaggttgcattcttcttttatgttgattctatagaaattttagctttcatctgaaagaaagtaatgattatattctgctatacacttgattttgactcctccttcctcctctcttcaacccctggttttatataacagttgaatatcagtggcattttacgtatgtattcaaggttgttttgttttgtaaaaatatgtggtttttctgtcttaacagcattcactttttacgttgctacgtgtgggtttcttttctttttttcttttaatatttctttctttccaacacaggaatactctgaagatagtaactccgagccaaatgtggatttggaaaatcagtactataattccaaagcattaaaagaagatgacccaaaagcggcattaagcagtttccaaaaggtttatattcttttccatttgattctatgtgttaatttttttaatgatatgctagaacaaataagtcccaggtgattttatctcagaaatgtgttttgaatacttaattatcctatcagttagcattaggcagcacaagcaagtgtttcaaaacggttatcctgatgttttttccaatcaagctgtctatggagcagggccattgtcctgaaaaactaggatggttctggcagaagaaccaccaacatgatggtcagtaggtattatcactgcaatcttgtttcttttaggggtaaatcatacagttgtggtttcattattatgaatagcttgatttcttgacttactgatacacttacggattatttttaccataggttggttattcaggggaaaaaatatttcagaaactatataataatcaagaagtggctctttattttgctgatgaaggaactttaagcttgcttatccttatgtaggcatcttacaacttgttttttttaaagactgaaaaatgacattgagaaatggtggtatccttggggaaatgttttttatgcatatagtataaaattaattcaatacttacacattgggcatcattagaaaataatgtgttaatattaagataaactaaaaatttcttcctctttttaggttttggaacttgaaggtgaaaaaggagaatggggatttaaagcactgaaacaaatgattaagattaacttcaagttggtaagatttgttttgaggggaattaaactaataaattttgtaggtaaaaacctcatcacgacaaagtactattatatcttcttttctaaagtacttctttggatgtgtttttatatttagtctgctctgcagttgggactatagtaatactaagtaaaaaaaacaaattcttcataggatacagaagttttctatttaagaaaacttactcttttagatgcatttacagtatttgccttttttttttttcccccgctctgtcacccaggctggagtgcaatggtgcaatcttggttcactgcaacctctgcctcctgggttcaagtgattctcctgcctcagcctcctgagtagctggaactacaggcacatgccaccatgcccagctaattttttgtgtttttagaagagacgggctttcaccatgttagccaggatggtctcgatctcctgacctcgtgatctgcctgccttggcctcccaaagtgctaggattacaggcgtga

SEQ ID NO: 79278 - DNA, 1061 bp, Homo sapiens
gatcataacaaggaactgtctatttgtagtcaatcagtagaacatcagttgtgccgattctcatgtatttatatattttagcaataacatttgtttaagagttgaattgcagttatgcaaaaacattatacatgccatttcttaatccgtatgatatgaaaaaccaaaagaatgtagtcacaaaacgaagagggctgaatcaaatcttttctcagtcattgtgatttttttttttttttttttttttggagttgtaacatctaaagtttagaaatctctatctgaaatctatcaggtcccagaagttacaggtaactactcttattataagtattccgtgactgaatgacaagacactgtgtgacatatgacaggaaatgtcaaggatcctgtttttaacaatgttataattggttcagtaatttccagataattgaagttaatctcttccctttctaaaatactgtttctcatttgctgggaagctccaaaatactagtcctactgttgtcatgtatacctttcagcttctactttcctcttctcgaaacctgacctaattgttttttctaatttgttttgagccaagaaaccaaaaataaatggactctgaatttttactttgtgatcaatgtaaatcagaaatacttttcattttacttccaggttcaaggctgcattctgaaggtttgggttgcaaaaaaaagtaattttctggttcagcaagctattcctctatcttattcaacactgttaagtgaagtttttattttagttattgtatgataaatcatatatggtaaatctgtttatatttgttccaacttaataaaacaattagaaaagagctgatttccgaaggcatagagtaggttttatagctgtgattctttactccaagtcttccctaaagaatacccttaggctgagatctgaaatgataagcagtagttaactagatgaagagaggtagaggtagaggtggaaagagagagaaatagcacataaaagtgggagaatttggcacttgttgagttaaggccaggatggctgcagcaaag

SEQ ID NO: 79279 - DNA, 1050 bp, Homo sapiens
aacacccaccgcaatgtgtgggctaaatgcacacgtacaatgatagcagaaataatacctgtcatataggacgggcatgtcagccttttctccgcgaaaggcttctggtcctaagctgtcccttactttcaccggaatgagatgcgtccagagtcccaagcaagggaggagactgctcctttacccaggaggctggaaactgctcgatgcgagcgcagtttccgacgcccttcggctgagacctgcagcaccggacgatgtcccagttgccagctttagttgctaaggcaccaaccacttcggaggaaacggggggtggtgcagtctcttttggagtcgtagcgaatcagctacaagtcgagataattagttccggcaggaaacagctcctctaagagggactggaaggcggaaagaagctgagagtgacgcctctgagccgcggaggattgtgggaggaggttgtctccaatttctcctccccctcccggccaagatgtctgacatggaggatgatttcatgtgcgatgatgaggaggactacgacctggtgaggcgcagggaatggaactctgagggtggtgatgtgtcttgttttcggggtccgggccggggcgcccgcggcctctccccgtagagcatgtgccgtttacagcctctctcagtgcggtgacaggactggtttacctcctccccgttcccgcaccgggcccgggccctgcttctccagcatgggggaagggagggcaaaggaggcagcgaagggggccccgggccttgccctccgagtctgagcgcctcttcggtttacacggatgcccctggtcccaggcgttcggttctctgtcttctgcctccccaccgcgctagccgcctcggtgaccatgctgcggtgtaggccctggctttgccctttcgggcccagcgttccgggcccccacttcttcacactggaactgagcgggtgcgaaatgctaggagaagtcagaaaacgggggtgtccttactgctcccaggcctgactgcgaaacgcaacttgtgagtctcctg

SEQ ID NO: 79280 - DNA, 1055 bp, Homo sapiens
ctatggtcttcttttctcccttcttcttttttccccctattatagataacttaaagtttggcatttcgtcttctagttatactgaagacaaagtttttgtatacttttatttgttcttgttttgttttttgaggatgtatagagaaagatttaggcagccgcatctaccaggtagtccagtagatgtattttgagtgatatgctagcgatatcagttattgtctccctgctgcaatcttttgttctcatccacagcctctgctgaaggagtaaacacaagtgaccatatttgtaactaaaacaagtgaccttatttttactaaatgacctcaccctttggccacagatgaatttatctttcctgtatggatacaggacctaaactctgccaagctgattatatcttttgagaatttgaacgaaaggacacagaaacgtaatcagttagtataggatgctggagctgttaagtcttgtagagtcaaggccacagtgtcatgaaaactgaaggtatggaggagcagaaactaagaggttcacagaagtaggtggaatgcagagtactcagcagagagaagtttataatggtgtctttggagcaacaagagaatgaggcaggaagagagccaaagaaactggtataaacagtttctgatgactattcaattcccaagagacgagcttgaataacttccaacaatattcaacatatttttctattattttattacattttcttgaggttttttgggtgtgggtctctgtttcttaattaattaatttcctgaatatattaggctttaataaatgtttatcatcctggtgttattacccagatacaatatgatgtgggactacaaataatgagggctattcacagaattgacttgagataatttgagagtatcaagttattaaatatattacaagaattttggatctggaagggacctatgaggaatatctagttcaaattctcaaattttagggaagagaggccaagagaaaatgatttgccgaactttgacattgaattagaggtctcattagaatta

SEQ ID NO: 79281 - DNA, 1020 bp, Homo sapiens
gtttgaatctgggctcttctcagctgtggtaatttaacctcttaagtctcagatttatccataaaatgatgtcattgctatcctgacaaagagttgttaaaagaattacataaagcttgatggtagccatttaataaatggtagctagtattgttattgctacttcagatgggattaaaaaaagatataatgaaatgtattagtataagtattttccaagaaacattgaataattactttgaaaatctctaatgttacatacaagaacaagaaaataaaatgttttcactctcataattgaaaaagtatcaaggaccaaaagaaaattgatatttgctgtttttagagccacttttatattgcaataattattttagatgtagtgacttgcatagaatcatagtaggacaataagaagtaaattttgcctttgtgagctaaaagtaaacaaacaaactgacccatgttttagagagcttgtgttccttactgcctggcagtcctatctgaaactttgtaatgagcagctaggacttagtggcacatccattacagaaatacatcaaatttatttctaatgtgtagtcctatactgtaacagtggtggtttttgttcttaaagttaatgaattcatttctttctttcttttgtgttttcctttctctcagacacatggtaataacttacaggaaaagttattggcaggttttaaatcttcaaatcatctggcttatcatatgcattagtgggaattacagtatttggaagcatttgcctggcaaatgcaattttaatcttccttgtaacaacatgcctttttgcagcatatgggtaaagtggcctaaataatgcatgttgctttgtgttatttttgagcatttcaggttttaaagccttcctgtttggtttgacaatttatgtgcaaaagcaaacttatacaatgaacttttggcagaaaggtaatttaaatgctagcctgttcagaaactttcaaattcaaatactagaaagtttcagag

SEQ ID NO: 79282 - DNA, 1046 bp, Homo sapiens
aaaatgttaaaggaaggaaaggctgggaaacaaagcactgggaggggcccaagggcatttcaggcagagtgaacccataagtgtattttaacagttctctgagccagacttaaaatatgtgtcagccaaggcctagaaattctcttgcagcctcatgaaattccttttaaaactttttgactacagggatgctttctagttgcttaagtccctgaacagatttacttaacttcatttcaggggcaaattagttatatagacaggggttgatactcttttcaggggagtgtttttgaagtttgaaacctgttctgtactggagacctctaaggttcataaacagagtaagtggaatgttcaaagttctgtgccaaatatgtccacattttcacttttctgagtttacaagtgctgtttccttgagaaagtacaaggctgtatttttcttcacatatagctgcatttcagtgaaatatttcttggccttcagaataagaccttgtgcctaaagaataaagacatgtctatgttataaaatgaaaaggatctcaaaattatataaactatgatttgaatgttttaatagtttgttacatggtataagaaaaatcagaaaccaatttgcactgtcactaattattatgcttagaagtccacataaggacattgtttcagtttgcttagaataacaaaacctcatccatataatggttaaggaaaatagtagtttaaaccattccagccagatgttgagtgctaatgaactgcagcagtatggcctctgaaaagatggtaaatccagaatacaagctttgaaaagaatctcttaattaggtgttgaacatggactgaagccatgtgctcactggtacaaaaaccaggaagctatagtgttagctctgggtggcctgtgtttaaatgtgttctaagttttaggttaataatgtaaatacaaaaccattcacgtagttttgtcaattaaaagagatcctctggttgtatccttttttaggagtaggattggagactgaatcatttctttaatg

SEQ ID NO: 79283 - DNA, 1040 bp, Homo sapiens
ggtgaaaccccgtctctactaaaaatacaaaaattagcctggcgtggtggcgggcgcctgtagtcccagctactggggaggctgaggcaggagaatggcgtgaacccgggaggcggagcttgcagtgagccgagatcgcaccactgtactccagcccgggcgacagagctagacactgactcaaaaaaacaaaaacaaaaataaaacacaattggacatatattttcctgtttgcctcaggcttcattactccttaatgttgaattggctgttttagaggaatccagattctttaaattctctttccctgaacacttaaaaaatggtcttgtattctatagtaattataacttgtctttacatttggcttgggacttggctgcttttttatgtaaatcagatgattccttattcatcatgtaaagataacaccaactgtgtagtactttagagcactataaggtgcttttatttgaagttttaaactttagtttcttggatcattacaataatcctgtggctagggaggtgggtatttttctccttattatggataggaggtaatatatggtggtggttaagattatgggtgctggagtcagatcatttgagtttggattatatctttaataattactagcctagtctcagctaataaacccactcagtttcctaatctgtaagccacagagacctattttataggtgtattagtccgttatcacactgctgtgaagaaatacttgatactgggtaatttttaaaggaaagagatgtaattgactcacagttccacattgctggggcagcctcaggaaacttacaatcatggcagaaggcaaaggagaagcaggtactttcttcacagggcggcagggcggagtgagtgcaggcaggggaaatgccagacacttataaaatcatcagatctcccgagactcactcactatcatgagaacagcatgagggaaaccaaccctgtgatccaattacctccacctggtcctgcccttgacacgtagggattatggggattacaa

SEQ ID NO: 79284 - DNA, 1076 bp, Homo sapiens
ggaggaagatgagcctgatgagatgacaccagttctgattcttacatttaatggaaatgccagagagacttcattacttttggacaggaaaataaagtttaatgaccccactttggttatgggtagactgtggaatagtagttcactgttgggagacaaaggaagctgaggcaaaaatgaatgattgcccatatgagattttcagtgataccagtctagggaaggatagagtaaatagaaagatggtagaaactgcttgctctgtggagactattagggatggcgaaaacatagtgtgcacggtcaatatcttattccatacccatagcagacattgttaattgattttggtatattttcctatagtctggagccctttttaatgcagtgctccaggcaggctactattagttgatcagagttggtgctggaattcaaacctgtttgtcatgcctgtagtaagaaatgaatgagaaatgggttatgactactcacagtacaaatcagtttttacctttccaggtggaacttgcagaaatctgtgccaagagtgagcgttacattggcactgaaggaggaggcatggaccagtctatatcatttcttgcagaagaaggaactgtaggtagcattccaagtaggaaccattcagaaattcctagtgggaaaatttacatggagaagaaggccctgagagccccaggatgcttggttatggacagcctactatattaggctctattgtaggatattatttcccaactgcttgtaactcaaggctgccaccagttaatctactctatttcatgttgattgcctttctcttacgcttccagaatgatactcaggtctgtttttctcatgtgtctagctttttcccctcttctatttttcttcattgttaagatgagctttctcaattccctagttattggaacctcatttcctgctcctatcctaaatcacttcatctcatgcatttttataatctcttgttggttttaaacccaaatcatagttctcttaccacatatattcacagtccctctttttataatttactctttggtatcatt

SEQ ID NO: 79285 - DNA, 1033 bp, Homo sapiens
ctcaccacttctcacccctcaaactgtaagctctaaccaaatttccatgcccgtagctccattaacattccatgttgttttttgcccctggacttgcctaagttcttccctcttcttgacatgctttttgaggaaagaaaccctctgtctgccctacttttttcatcttttagaactcagtttagatttctctttttcaactgagtggaacctacagtaggctgtactgatgagatgcttcagctatgtatccatatagcatctgtgctttgctaccattgtaacacaacttggaaaggtatttgtctgtctactagactgtctttcccacttgattgcgggctctatgagaggaatgacagtgtctttcctgttcactgttgtatttccagtgcctagtacagcgcctggaggtcaataagtaatatttgaatgaatgaatgcatttttgacaaaacactttaagataaatacataaacacttgaacattttctgcattctaataaattatatttctcctttcatttttcttctaacaggccaagttgatagaatttagtcctctgagggcaaccgatgtaaaactcccaagtggagcagtgtttgtgattgccaacagttgtgtggagatgaataaggcagcaacttcccatttcaatatcagggtgatggagtgtcggctggctgcgaaggtatgaacttggcaggctagtgaaacttgaagtagggtttttcttgtctttattttcattgttctctattactttatctctttccccaaattttagggcaacattctgactgcacagcattccaactgaaggtctttgggtacagagaaatctgatttctaactcagaagacagatgaaccagttgagtcttctggggtggcactgggaagaaaagggcagcttatatatgtgaagcagaattataggttaggtctatgggtggagaaagatagttggggacaattgatgggaatgaccacagctggtcttgtttcctcaacaaaagtgatggcagcctc

SEQ ID NO: 79286 - DNA, 1045 bp, Homo sapiens
acaaatattgttcagttctggaaataagaggaagtggaattatttctgcagagatcaggaagaaatgtctttgcctggaaggaagtgggatggttggaatcccacctgaaaagctgcggaagggcatttgccagcttcctggaattctctaataaactttctcttcctagagtggtcaacctgtacttgttttcatggagcttacattctcgtggggaaagagagaaatgacaattaaaaataatttgaatggtagtgataagtgctatggaaaaaaatgagaaggaatagagactacaggtttgggtgggtactctttctgtggagtggttgaagaaggtcactctgacgaagagatctttgagcagaggcctgaaggaggtgaataaatgagaacagcaaatgcataggccctgaggtggatacttggctgtcaggtgtgaggctcagcaggatcagcatggcagagggccaggaaggaaggagaggtagtagatgaagtaaggaaggaagtggggagccacaccatataggccgtgtaggccatcggaaggcttctggctttgagaagagaaagggggcaatggaaatgctaggcaattctatgccaaatatgcctgcaaggaagacttagataattgctgtgtgggtataagagagaaatcaagacgactcctgggtttttgtcctgagaaactttccttgtgcctctaaaagccacatttttgaaaagcacacttcaccactgtaggtaagagttatcttagagtaccataaaatattagatcaggaaggggtcttagagatccaggaaggcactaagagatgaaataatttgagtaagtttcacatatgagttcattggaaagcctggctcccaatccaatgattttgccacacgtgcctctccccttgggttatactaagatgtgattacacttaaatgtgggtcatacatacgtgtgtgtacgtgtgtgtttgtaacctattttcatctcctagctttgaagctttatgatggaggcctttgttgtcatagtttcca

SEQ ID NO: 79287 - DNA, 1077 bp, Homo sapiens
tgactttggctatattgggtgcctggatagttaattctgtgaatacacaaggatcaaagagtaacattcctcataatctccatccctcatctgccctagcctttgccatcgtgctttataaagtagaggctgcctttgttgctttaacaaacccttctacattattcccaatctagtcatcacaatcatcaaagtgggatccgagggattttagggttttggtttttgtaattcttgtattgcctctctgatgtgcaatagctcaggagatatatttttaatgttttattgttcttccagaaaaaggcgcaaacatgaaaagttcactaaacacccttggttcacttacttttctttcttaatttaaagggtatatcggtctcctaactttcggtcttctcagaatttctatggcatatgccaaagggcctattaagtaccagcagggaacactgcagacagacctttctgcctttataagtgtatacagctgcgcaggctgctgaccagctgctggggcagccctgacttgtgatcagatgtgccactgacttgggggcagaaggctatttctaatagcacttatcattctttatttgggaaatttgagccctgatttcagaccatgtgattgatgcaattcagtccattttcatctgtagcaggcagggtggtgacagagcagctctggagactcagtagcaaatatctttacctacaaagacttccagcttctgctccctggaaactagtaaaagtctcaggaaaatagacctctggcccagttcctataggttttacagccagattaaaaataatactctgtttgctttaggttcaattttgaaaaaccacagctttcaaaaactgttcaaatgagaaagtataataaaatatgccttttagaagttggattgaggacccttaaagacttgataacttgagtccagcaaaacggcatattttagatcttagaaaatcaagtaagaaggcacagtattcttctctagaccatgtcatggctggctttaatgcccatattttagggtcttccagagacacttcagtgacacctca

SEQ ID NO: 79288 - DNA, 1047 bp, Homo sapiens
tgaaagtgactatgaaaagacttaatgaattctgggatttgtaatggtattgatgggtatctctgtatgtatatcaagagtgggcagaaatgtttggctggtgatggcaaatgactggctttctcttgtggatggactataggaagcactttctgaattatgtaatgatttggaccaaaaagtattttgctgaaatactcaggtaattgagatagcaatggttttatggcatgaattatccaaaaaaatatcagaattacttattattctgtgatttcattagctcattaatgtttaactcacagattgggcatcaccatctagaatttcagtttaagggaggcctgcgcaaagctagttttatttcttaaaggataacagtcatacatagaatactaggaaagccaatattctatttaaaaataaacttctgatgcattttcattcttagcagaaaggtaaatgcttgagaaagcttgagtcaaatttgttaaaagaattttgagttctataaatccaaaaatctgaaacctgaatttatttaaatttataatcctttattttttaataccgtgccattttccacaaaggatttgtggttggtatataattctttaaagatacctggatcagtgtaaaaaaaaaaaaaaaaaggcacctgtcattgttttgctgttccatttacaattttcaccaggtgatttcttcttcacaaaaggtgagtaaaaatttccaatgtgcactcttctttgggggacacacatggtcattctaagcgagggatctattctatatttgttttgatttctctcgataaaaagaactatgtttcagtcttactatcactgtgtggtatctagatattatgagagatgctaaacttacctggaagggatagggccggggccattagaaaaaagatcatgcagtaaatggactttgagcatggccctaaaagatgagtagagtttaaaagctgtggagtgcacactgcagatgagcaaagcctatgggtataggcaaacatggtgtgtgtaggaggctcag

SEQ ID NO: 79289 - DNA, 1088 bp, Homo sapiens
tcgatacttccacttttgttgtcagaactctccccatggggacaagatcagagggtgaatttagattactgctgcaccaggcagtccaacagcagacagaggctatcattctgcacctgacagaaataacactgctctttaagctgagtattgaggtgccgagtgagagaaagcagcagtgcactgggcactcagtgaccgccttgagagacagatgtggaagacagaatccaatccctcaggataattttcatgcttttggtatccaattactaaaaagttgtgctcttcccaataatagtcaatatcatctactccttttaagaatttcttgtcataaattgcctcacttgattataatgaagcactgttagttccatagcaagaaaagggttagccattctgaaaactggccaatgatttggcaatattctcttttggactgttagactgtgatgggatatggcctaacaattggcaaaaggcaaataaacacagcgttgctgaatttgactttggctacaaaaccttcagcgactcatttgtcaacaattctttggataggctcctacttaacaataatgtgttagaagctagcaaatacacatattgcctctgaatatggagatggtaaatttgcttatattctaaacagttcttagcaagttatctaaaagaacaataattcacattatcagaatcaaaaatagcaatgtaaggacaacccctgcctttaaaaaaatagataataagtaacatatctacgcagtcgaaccaaaatcctagcaattatagacaaggtagaatcttgtagaactggtgacccgcattcccttaagtaacttgttagggctttaaattatgaagaatggataaactgctggggagcagatttgaaaatattagccattctttgattagtttttaattttataatcttttctttttggctatcacatgtgcctggcacttatgaagtgctaataagttcattcattgccacgagtgcatctcttatcatctcttttctcttttgtaaatcctcatctagactgacccttatgactcagctgtacaataactcttta

SEQ ID NO: 79290 - DNA, 1025 bp, Homo sapiens
gggcatagtgaagaccaattctagaggagctgtggccctccatgacacccatttttgttcccacctgactgccagctaatccatgcatgccaaaaactataaacagaaaaaaacagtaattcatagttgatattggtttaaggaatatctgcattagagacaaaaagagaaaaagtctttaataattaaatgagctatactagaaaacaagcagtggactgataattttggggcaggggtctgcctactaatattgatcctggagttggtgatcagcactgaagggaggagagggcatatgcataggaagagagaactggggagaagtcaagaaagttggtgaatccactctcaattcgttttagtgccagtagcctgatcttcaggagtcttttggtatcttacggggtctctaactgtacttctgaccataggcctagtttatctggttcatattgaggcagctctcataggaaggtcacttgtaggtgttacatagtttccgcctttgtttgcatgaataatgaagatatgcaaaattttaaaggttaatgacttttttttttaattaattcaaccaagttatttatacctccttttgctagactaagaatgcaatagtaagcaaatatacagtccatgcttttacagaattaacagttgggagtcaagggagaactccaagtcagagtgagtaagtttagggcacatcgcaggttgtcaaacccaacacaaggagaagggcatggaaatcttttctgagaggaaatagcctgaaggatgaaaggacaaaagatagaggacagatgtattatcctcagaggaaatgctttttgtagatgtttggtagtaacagtactgcaagattgggaaatgaaaagtgatttaacatctttccaagtatcaatgctaaactcaccaaggtaaaggttttttttctattaaaaatataagaacatttactctttattaatttgcatgcttcgaatgattgctatgtttattaaaaacataactaccagcaa

SEQ ID NO: 79291 - DNA, 1097 bp, Homo sapiens
aaaaaacagcccactttcttcctatggcaataacttaattgcatatggtatataaagaaccagttccagcagggagatttctttaagtggactgttttctttcttctcaaaattttctttccttttattttttagtaatcaagaaaggctggaaaactactgaaaaactgatcaagctggacttgtgcatttatgtttgttttaagacactgcattaaagaaagatttgaaaagtatacacaaaaatcagatttagtaactaaaggttgtaaaaaattgtaaaactggttgtacaatcatgatgttagtaacagtaatttttttcttaaattaatttacccttaagagtatgttagatttgattatctgataatgattatttaaatattcctatctgcttataaaatggctgctataataataataatacagatgttgttatataaggtatatcagacctacaggcttctggcaggatttgtcagataatcaagccacactaactatggaaaatgagcagcattttaaatgctttctagtgaaaaattataatctacttaaactctaatcagaaaaaaaattctcaaaaaaactattatgaaagtcaataaaatagataatttaacaaaagtacaggattagaacatgcttatacctataaataagaacaaaatttctaatgctgctcaagtggaaagggtattgctaaaaggatgtttccaaaaatcttgtatataagatagcaacagtgattgatgataatactgtacttcatcttacttgccacaaaataacattttataaatcctcaaagtaaaattgagaaatctttaagtttttttcaagtaacataatctatctttgtataattcatatttgggaatatggcttttaataatgttcttcccacaaataatcatgcttttttcctatggttacagcattaaactctattttaagttgtttttgaactttattgttttgttatttaagtttatgttatttataaaaaaaaaaccttaataagctgtatctgtttcatatgcttttaattttaaaggaataacaaaactgtctggctcaacggcaagtttccc

SEQ ID NO: 79292 - DNA, 1092 bp, Homo sapiens
ggcggaacttcccgtctaaccccccccccgctgtcgtcccagcctgttgcttaagccgcgcggtgtgcggtgtgcgcggcccctgccttagcaacgacgctagtaactgcctggctcctccctctggtgtctcccggaaagcgctccgtctggtccgtgcgcgatcacggcccggcgcgtggctcgggctcgggcggagctggagacgtgtggagctgttcgaggactcgcgggtgtgcaggtctgagtaccactccgatccctggtggaggtccccgcgcctctctggagaccagtggtctggccccagaggtgcggccgcgggaagtggacattctttgtcaggaccctagcggaggtcgcgctgggtgtcgcctgtgagggggatcctcggtttctgcgcggtctcttgctttttttaggatcttgcgggccctttgggaaaaaggtttccaaatttttcctcaaaaaaaaaattatttttcctaccaatgattttcggtgcattccgccccaacgaaaagtatgtcctggcaaagtcagttccctaggaaccccatactttattttattttatttttagtatttggagtggtttgtgggggtttggttatcacggaaggggaagcgtagtacagacgtagaattagtgatgccatgcagtgtatttaaaatattgaggttgtggttacataataagcaaaagagcctgtttcttacgtctaaattatttattgggaatgtaggacaaataaggaagtatattaacattttcagtcgccaggcccacaaagttggatggtaaaatcaatactgtagatcgcagcatgtaaggactaacccagtgcaccatgaaaacgaaggcaagacagtttgttaccatatggcgggtggtgtgggagaggccattgatcctatatgaaaaagggtactactaccttggattatgaaaaatgaatgttggacctgtaggtcctatgtgaccaagttcttaaaaacactctaaagaaaattggaagtggtttttttctaatactgaattggtccacaatataggacaggggagtctgtatagtgttccattgggaggtg

SEQ ID NO: 79293 - DNA, 1019 bp, Homo sapiens
ttttatatgtatatgcacacatgtacacagacacactcacacatatgtagtgtgtgtttaagttggagagggttatatcttttagaacataaccaactaaattttgccaattccactagaatcttctatttttcattaatgtcaattcaaagtcagagccaacagggttgaatatatccctgtctgatgctaacgtgaaaccattgcattcctaatatctggaaaacaaaactgccatctctggaacaaaaaagggttcttgaaaaatggattctcagtacctgaactttatatttgaaataactttcagtttattgcttttaatcttatgttttaaagtgtgccaatttggtggtttaaaacatgtttaataagtactaaaacagcacacaattgtgacttaaattgagtaattttctttgtagactgagtaaaatgttttctgtttttatttttccttctcttgatactttttttttacagtgcacctatgatatgtgttttagaaatagccgttaaactttggtttgaatgaagaatgtctctcaatccacctatatttctcaaacgaagtgaagaaaatagttcaaaatttgtggaaacaaaacagtcacaaactacttccatagcttcagaagatccccttcaaaacttatgtttagcatctcaagaagttcttcaaaaagctcagcaaagtgggagatcaaaatgtctcaaatgtggtggttccagaatgttctactgctatacatgttatgttccagttgaaaatgtacctattgaacagattccacttgtgaaggttagtaagaaatttaattgtttgaaagtatgaaaatagattttttaaaaacatctcatgtatacctactctaattgataaacttaataaataatgttattattgttagaaacaagtgcttgttgctgcaaagaaaaactagcacttagacagaaaatttctcagcagggcacatttacttctgcagaagggtgctgcgcctgatcgcaagagcaca

SEQ ID NO: 79294 - DNA, 1053 bp, Homo sapiens
atcatccccaaaaatgctgattcagtaagactatgttggggcccaggaatgtgtatttttataagaaaccccaccgccaaccctaggtgattttgaaacaaatggtctgaggactaggctttgagaaacagtctagtttcccattgtttttcattgttgtttgtttgtttgtttgtttgtttgtttttgagacagtctcgctctgttgcccaggctggaggtgccgtggcgcgatctcgactcacggcaacctccgcctcccaggttcaagccattctcctacctcagcccctcaagtagctgggactacagatgcccaccaccatgcccagctaatttttgttattatcagtagagatggggtttcaccatgttggccaggatgatctccatctcttgacctcgtgatccacctgcctcgtcctcccaaagtgctgggattagaggcgtgagccactgctactggccttctcattgtcttatagctgtataaacaaaggcctagagggatgatatgaattgcccatgatcaagtggatagttaggaacagaaaggtagagatagaacccaaatatttttttctcacttacgaggcactgtttattctatcacaccatcttgaacatgatacataaatgtcagtttgattccatattttgagtttcagcccagggcttgtggactagtaagagctcttgagctccatctgtcagtcaaattctgcagtatatgtaaaggaccagcacagaggcatttatcatgaggattgatccagttgttatgaatttgggggtttctttataacacttaacaggactcaaccctatcaggaatttcagtactcaattactcttttcaattttactatagttacagaaagtcaagactcataaacacttccctgaatcaagcagcagcactgtttcccagagaatatgactttctctctgttgtacatttcaggatcgttctccagggcagggtatgatctaggtaatcacatgggaaaattgtctccaaggataagaacctgtatcaatgttgtaactaat

SEQ ID NO: 79295 - DNA, 1150 bp, Homo sapiens
cactgttcgccctatgggaaaggaaaacttgagtcatactctttcagccactggtgagcaaaagcttaggtgagaaccagacatcttagaagcctccaggatctcccatttgtgcccacaaacatttccagccttaatcccttttgctgatgtaataagattcttcagctggatgatgaaaactgagcccatggtgttgtgattatgagctcagctacctgctactggcaggtgatagctgcacctgtgaggctggtcagcttcccacacacccagggtgcctgcggcctcctgcaccctaagccctgccctgacctggccactaattattgaacagggagtgaggtttcctggtagagattatctattttactgccaggattatgctctatgcaaagcacaggtccaggcactggggatgacatagagatacatgtacatttggcctcaaaggagtttaccatttaatgagggagatagataatcaccatccaatagacaaggaaataaacgaagtgggtaggagaagggctgctggcgggctgcatgtgggataagtaagaccttgggtctacatgtgggaatgctgctttggagcttccattgcaagcctgggagcaggtgagcacccagctcaggtgatcttctttaagcaaaagcaagtcttcaaatatgtgtgatgttttatccttggggcggcagtgggagggggtggtctctgaatactgacagtccttatggaagaggatagtgccttgtgggcagggtgaccctacaattcagtatccaaacagggacacttgagagtgaaggtaatgaaagataaccagcattccaggacacgtatagccagggcttgccctggcaaaccagacatatgatctctggacttaacgggagcttggtaattataaagcggggtagagtcagtgacctagggaccagaagagaatagattctggctgggcacagtggctcatgcctgtaattccagcattttagggggccgaggcaggaggatagcttgaggccaggagttcaaaatgagcctgggcaacatagtgagaacttcatctctacaaaattaataaataaattagccaggtatggtagcacgcacctgtagtcccagccactcatgaggctgagg

SEQ ID NO: 79296 - DNA, 1050 bp, Homo sapiens
acgatggcacacacctgtaaccccagctacttgggaggctgaggcaggagaatcccttgaccatgggaggcagaggttgcagtgagccgagactgcaccactgtactccagcctgggcaacagggcaagattccatctcagaaaaataaaaataaaagtaaaataattaggccatatacaataatgtacagtatatgtgtgtgtggtgtatgtatgtgtgtctgtaatatatatgtacatataattcacaggtatacatgcatggaaaatgatacttcctacagccagcttgttgccagcaggttgtatggcattagttttaagagaaggttgatgtataaatttgacctctagcacataaaataagtttactttcttctgtcttaggtgaagttggacttctggtttgcaaaatcacacaacttacaccatttaatggctatgctggagcaaaggctcagacagagaagaaaaaactgagagatgtctttaagaaaggagacctctatttcaacagtggagatctcttaatggttgaccatgaaaatttcatctatttccacgacagagttggagatacattccggttggtttttctgaatcattgagccaaaaacaaacacacgcacagtttggcttactcctagtggaatcgcattccactttggttatggtgcatttccttctctatctttggcacatcaggtcaaactcctgtgttcccagagaatgaggaatgaagtgcatgaagtgtcactctgcagtgcacggttaacttggctgagcaacaccagatgagaataaggcaggaaacctgtatctgatttctggagacaaaagtacatttaactcctcttgtttctcctgcattattactggtcactcttaggacagccaaggattttcacctttccaatcatggaggtgtttagataaaatcagatgcaaattaatgtggagctgatctagttgaagaggaggtgaggggttcggagccccttcccccaacccctttcatccccaaccagatggtttcccacagaaccccca

SEQ ID NO: 79297 - DNA, 1259 bp, Homo sapiens
ctccctgtaactaaagtgtgattttttttttcctttcttgttgccgtgagaccctgaaataaaatatgaagttctattaaaaagaacttcagaaactgaattaagtagcaactgagttagtaaatgagaaattgagagacctaaacagcagaaaatcgttgagatttctttctaatttccactgcctttcttagctagggctgtattttaacattagaacattattctgtgtattgtgtttcatgtggcaacattgaaattccatattttgttatctaggtctatacttttcccttttatgcctcaaacaagataccccggccaggactaagttggggagtttgaggggccaagatgaggaacacgagatcaggatcatgcagaaatctaaaggaaacaccagctctccgacattgcaacctgggccagaaaccaccagtgacctctgctaactttgtcctttcttccaggtggaaaggggaaaatgtggccaccactgaagttgctgatacagttggactggttgattttgtccaagaagtaaatgtttatggagtgcatgtgccaggtatatacaagatatgatctgtacctaacccatagagtaactgaacataattttggcctcaaggcgaagtttgtcattgctttctcccgccatccagagttaaacagttctttcagctgccagggagtaaggagcttatgtctggcttatgttccactataaaagccaactcagtgcatctgaacatggccttctcttcatttcagctcccagccattcttgggctctcaggcaaacaaagtctcaaatatgggagctccatgccacatttggcacacctcgagaaaagtcgtgtcatgcttaagagctgggaaatgatgtcctagcctctgaactaggaggcaaaaagaagagccagtgcagttgctagaagaaaaagctggggaaaagtggattttgtacagcctcttctttttaagatttctaagcccagttcaccacactaagtttcagaatcatcacacaagaacgttgtcaccgcagcttcatctgcagatccacttctgccagcagagtcaggagggccagtgtctgaccttgaatcctggcttcaacatctgctggctgtttgactgcaggcaaatcactaaaattaaggataatgccagccctgcagttaagcttgtcaagagaacaaattcattttaattacatcaacgctaagcatatatttatcaaatatatatataag

SEQ ID NO: 79298 - DNA, 1598 bp, Homo sapiens
atctcataatgtggagcacaaaattagggacttaaatgttagtgaattgattgaaaaggcaagatgtctaggaaatttcaataggtggctgcttttagctactacggtttttttttttaatttgaaggatgcatgcttatatgtattaataatgtatttttgcaaaaattaaaaaaaaaaccctcttcttttaattaggagagagaagctcttcagaaacagctggatgaagcaaatcgagaagcacaaaaatatcgacagcagctcctaaagaaagaacaggaagcagaggcctacagacagaagttggaagctatgactcgtcttcagactaataaagaagctgtttaattgaaatgaacatgtagtttgattttacttttggtcaagaaagaatacaatcttgaactgtacacaacaaaggtacagccatgggaatacagaatgatagaagagactacagatggataattggacttaagccatgagctctgagttcttgtaacataaaactttactttagaagttgtgaaatgtatttaaaactgaattctgtaaatagtttttttttttttacagttccaaatgagttgataaagattgttgaagagatccaaaaccagaataagccactgtttttgtgaattctttttgattttagtacaaaccttaatttctcagaaacggaacagttttaagggtgatcgttgttggttaggccaaatgttgtgtaataattatggtggactgatgctggaattactcctgtaggtataaacctctgtatgaagagaagatttctcccaggaaatctttgtacagctttaagttgtgtcagattctctgaaaacattttttagaaagcaaaatttttatatttgttcaatttcagctatacccaagtagatttacatgtatatgaagcaaatatttttaaaaatttctgtttgtacatattctgcatgttttataatttcaaaatgcatcacttacataggtatttctcccacagaaatgatgaaagtgaccagaaaaaaacaaaaacaaaacccctttactctgtaggtcattgaaacgaagtaagctggcagctggttttattggaatgacagtgttctcggaaggagcagcctacaagataacttgaatttgccaattctgcaaaatctgtgcttttttgaaaatttaagagtggggacgtgaaactgtattctgtgccttccatcatgatttccacatgaaagcactttaaggcactgattttaagataatgtttttggaaaacccaatgcatatgggtttctgaaatattttatggacttatttctccccaggaaatgattcttacggaaaaaaattgcttttgtatgtagaacaggaactttttgtattacagtgatgcaatagacatgtctaatgtaacttctacttttccttttgaaagctcagtgtctgtgctatgacttgctctcatcacaatattgttgaattccacaatgtatggacattaaacactggcagactgttcactttttcttttttttttttggtaaaatattacttcaaacccctttttcttgctttatttttcagtgttt

SEQ ID NO: 79299 - DNA, 1034 bp, Homo sapiens
attacattgtactaaataaatattagttttactatttttaaatttttatttacatttataactgtcactaagagagtttttcatgttttggcaaaaaattttaaaggccgtggaacaattataattttccccattgtgattattaaaatggcttcgcatggtttcagcttgcacagtcatttttatgttcctgtagtgctgtgcaaagcaaggacagcctctctatataattgcatttatataaagagctactaaaaattgagaaaaagcccaacagtacaatacaaaaacaagcaatgtttatgaactatcagtgctcataatggaatatgcacttagtggatattatgcagctaaataaacagaagctctctatgtagtgatgtaagatattataagtatttggagtgaaaaaagcagatgcagaacaatatatctattgtatagatgctaccttttatgtaagaaaggaaaatgagaatgtatactaatttttaaacaaattaatataaggataatacataataaattaataaaatgatcatctgttagcaggggtgggcatgaggcctctcaaaatatgctcgttaaatattttgatgttttgagtcatgaatgaatatattatctatataattaaaaaaatatttgtaggtactttaataagtagatttcagtaaaaaagcaagaaggtaataaaaaagacaaatatggatagtctcataaaaagcaaatcaatgatttggaattattgttttggaatgtagttattttagatgagtagcatcaacaatgtcaagactagttttatttctaataaatctctctgaaaatgaagtaatacataatttttttttcattttagtattaacagtaccagcaacagacattgctgaagaaactgttataagtgaagaaccaccagctaagagacaatgtatcgaaataattgaaaaccgggtggaatctgcagaaatagaagtaaggagtcttttacccggtgtgctttgccgcagtcatccaaaataaattca

SEQ ID NO: 79300 - DNA, 1169 bp, Homo sapiens
catcagagtgagaccctatctctatttaaaaaagaaaaaagaaaagaaagaagcatagaaagcaaaagtagcagacaaagcaaaaataggtttctattcataccgttacatatgtttgctgagttttcttttttttttttccagtagtggccacagaagaagtagttactgcagaatctgtggatggtgccattcagcaagtagttagttcagggggtcagcaagtcatcacaatagttacagatggaattcagcttggaaatttgcactctattccaaccagtggaattggtcagcccatcattgtgaccatgccagatggacaacaaggttagtagtagacatttatataaagtttgtatgttttttttttttaatttttattttctttaagtcttccctgcagtccaaaaagattgtgtttatttttaattctcaggaaattgtggtatgtgttccaaagaatgtatttttgccttgagttatatttgtataaccctttgcaatagacttaattacctaattttatttgcttaggctaattaaaattcaaattagcttgctttctctgagtatatactggtggaaagagaaattggccccaaagtattctggttgaaaaatgagcttaaatgtcaacacaaataatatccaaaataaataattcaaatcagcattggacagtagtttcctagatcatttaatgcaattcaattaccatgtgagcttttaaaaataccatataagaaaaagctacttaaaaagaagttggagcctgggcaacatagtgagaccccatgtctaaaaaaaatattcaaaattagctaggcatggtgacatttgctgatagtcgcagctacttgggagcctggagtgggagaattgctagagcccaggaggttgaagctgcagtgagccattatcatgccactgcattccagcctgggcaacagagagaaactctttctcagaaaaagaaaaaaaaaaaggtggacttaggacttgtagtaggaatatggtagcacattttagcagctttattgtgaattctaacatttttctccttttggaaaccacaaaggctaacaagatgaaacaaaagtctcagctacattttcagtgaaactaaaaggctgagaaaaacctcagaattccacatttttaagtgc

SEQ ID NO: 79301 - DNA, 1053 bp, Homo sapiens
ggccactctagtgtcatggaatcttcctagaggaagaaacatttaaactgaaaattaaagtaggcgttagtagggaaaagtttggggaagaacattttagcaagagggacatgtgaagcttttgaggcaggaaagagcttgactttttaggggacccagaggccagtgcatctaaacccagtaagtggaagagtcactcaaggtggttgaaggtgagattatataggactttaaaaatgatcactttggcaggtttagaagaatgctttggaagggagttttgtttggaatctaatgcagtcaaccagggaagagttatcataatgatagcatgaatgaagatttgacagagacaataattgaatagattcgagggttatttgggatatagaattagaagctgtgattggttaagatgtaggccttacatctgtagtgtagttatctggccctttaaaaatattttttcatacgtctcttattttgtagctctagcctgtagtcctatagcaactttcctttgcttagctttattcttccttgtggtacaactgtataataccttgattaaatacacatcagtgaccacccttcttttttgtctttagagcaacttctggtaattactaataaagtggtttttccaaaggtgtaatgcatctggtggctttaaaagttccctcttttcttatgtgtcaaaacaggggttaaaaaaagaaaaacaataaaaataaaaaagttccttctttttctccctaaaagtgaaatttgaaccaggtctgttttgcacattgttttttggtctatatcaaaaatagggtgatacaactcaattggctttaaggggtatgtatggggcctcatgaggttgttttgttttgtttttgcttttttgtttttaatttcaggttaaactgccaccataataccttcgaaaagtttattttttcttcaatgaatatagtttccattttattttatttatttatttttgaggcggagtcttgctctgttgcccaggctggagtgcagtggcatgatctcggctcactg

SEQ ID NO: 79302 - DNA, 1182 bp, Homo sapiens
aaacgtagaagaaataattaaattcctatagctacagggcagaaatattttttgtttgttttgtttttgtttttgttttttgagatgggggtctcactatgttgcccatgctggtcttgaactcctgggcttaaccactccttctgcctcagccccctgaatagctgggattacaggcacctgccacctcagccagcttaatgtccagttgttctgtgttctgttaaaaaccttttagatactcgtttctcctctcccaggattttgctgctttacctaagagggggacttgggatataaatatatacccatgatgtgcccctacactgtcagtggaccttagacaaatatttccacttgtactatgtgattcttcttagagaatactcctttatatgtgtttgtattatatggagaatttgtgctatatgttctggttataattctgaaaacactgtggtcattttttccctagattgctatgcagaaccaaatcaacacaaacccagagagtcctgacactgtgacaatacatgctgcaacaccacagtttatcattggacctggaggggtggtgaacctaacaggtctggtatcttcagaaaattcatccaaggcaacaggtattgagatgcatataggataggctttgggattttatgctttagtaggtattcatccttgtaagaaaggacggttggagaatgagggtaagattctatcagccacctttgttttctttggtataactggcaaaaagatttttatgagacaaaacaatctgaagaaaggtgatattacaaaatttactgcagtattacctttcaaaagctaatgctatccaagctttgtttaagagtcagtaagataaatagaatatcagaaatatgcattggattaagctccttagaaattcaaatctattttcttttttcttacagatgaaacgggtgtatctgctgttcagtttggaaactcttctacatcagtattagctacattagctgccttagctgaagcatctgctccattgtccaattcttcagaaactccaggttagaaaaacgagtctaatgtgtacattaaaattgcagattcaggctgggtgccgtggctcacacctgtaatcctagcactttgggagggcgaggcgggtggattgcctgagctcaggagtttgag

SEQ ID NO: 79303 - DNA, 1675 bp, Homo sapiens
ctatgtaaacagataatgtaaagaaaatctgtttactatataaacagaagtgtagtaacaataatgtaaatgtggatttttttttttttctgtggtacagctgggaacttctccacttcatctagcagcacagtatggtcattattccaccacagaggtactgctgcgagctggtgtgagcagagatgccagaaccaaagtggaccgaacaccattacatatggcagcttctgagggccatgccagcatagtagaggttttacttaaggtatgtgttctctttttgcactttgcttttaaaatactttacggttttataagaaggagagggaactagtttttgttaaatgcctacttagtattttatctatagtatttcattttttgtgtgtataagcccattaaatgaaaattgtcttatagctttcatttcatgagggacaaaacttcatttaggtatattcttagttaaatcagctaattgatttcttggaccttggtctatcttatgatgagggactacagcattttttctttttgttttttttttttttttgagacagaatctctgtcacccaggctgcagtgcagtggcacgatctcagctcactgcaacctccacctcctgggttcaagtgattctcctgcctcagcctcccgagtagctgggactacaggcgcccaccaccatgcccagctaatttttgtatttttagtagagatggggtttcaccatattggcttgactggtctcgaactcctgaccttgtgatccgcctgccttgggctcccaaagtgctgggattacaggtgtgagccaccatgtccggcccttaattttttgtattgtagagatggggttttgccatattgcccaggctagtttcaaacccctgagctcagctgatccaaccgcctcggcctcccaaagtgctgggattacaggcgtgagccactgcacctggcctggaacatctatttaacatatacatataaataattgactacattatttgttcttgctttaaagcacagaactaataatttcatatcaggaattttttatgtgatatttcatattttagtaaactctttgaaatatttttgtagcatggtgctgatgtcaatgcaaaggacatgttaaagatgacagctctccattgggccacagaacacaatcatcaagaggtggtggaacttttaatcaaatatggtgctgatgtacacacgcaaagtaaattttgtaaaactgcatttgatatttcaatagacaatggaaatgaagatttagcagagatattacaggtaacttttggcttttaatttaagaaaataaagaaaaagaagccttatcagtagagggatctcttatattgtgcatgatttaaactattgtttgtagcctttcattttggacttagttattttggataggcctttttctctttcacttcctctttgtttattactattcattttcttgattataaggccagtctcttcattaacattagataaggtgattactttctgttttttaagtttctgaatttccctttagaccttttttttttttttttttttttttttgagccagagtcttgatctgtcccccaggctggagtgtagtggcacgatcttggctcactgcaacttctgcctcctgggttcaagc

SEQ ID NO: 79304 - DNA, 1022 bp, Homo sapiens
ctgggtgtggtggtgcatgcctgtagtccaagctacttgggaggctgaggcaggagaatcacatgaacccaggaggcggaggttgcagtgagccaacatcgtgccactgcactccagcctgggtgacaggccgagactctgtgtcaagaaaaaaataaataaataaaaatttaggccagcttttctctgctacttacctcttctatcttttaccagatgtatttggagaatttaaactacttttattctaagtaaaaacttaatgagaaaggaaaatggattctaaaatccaaatataaattgcttttgtatgatctgtaattttaaattaaccatagcacactcttttgaagggataattgagaactgacttattaataaagacaggaagggaaaatgtcatgtcatagtgtataaatggagattttgatgttcagttcatctatgttttgtttagatgtccctggtagatttgggaaagaagcttttagaagcggcacgagcaggtcaagatgatgaagttcgtattttgatggcaaatggagctccctttactacagactgggtaaagaatgattttaatattgtgtgttctttttccttctcatttttgagtttttgcagagaaaaatgtagtcagtattgtgtttataagtggtaaaaagttattatttttgcaaatgtgtttattattttagaattataactgtcctaaaagaagtggtttatattattttctttgatattggacaaccttatccaaatatttcatccacaaagagtttttctttcaaactgtggagtgcattaatgtggcatgaatataaaaatgtatctgcttgggatttaatttaaaggccttataaatagcacaggtagaatttataattcagaaagatactgataaagattggagttagtgttaatagtcactcctaaaagaaaaacaagtttatgtttcaattattacttgtaaaactgttgcagacatgacgaaagaggaagaaaggaatgggaatgag

SEQ ID NO: 79305 - DNA, 1058 bp, Homo sapiens
tcttccttattgagtgcaagttgagtatcccttatctgaaatacttaggtccataatgtttccgattttgggttttttcagattttggaatatttgcattaatacttactggttcagcatccctaatgcaaaaatgcaaaatctgaaatgctctaatgagtatttcctttgatgcttaaaaagtttcagatttcagatttttggattagggatactcaacctgtaatagttgttcataccaggtagagatacactaatcaacctgccattactctctttataatttattttctcttgactacttacctaaccctcagagtatatactttttttgagataaatttataccccaggcacattttttcattgtaaatctcagggattccatatattcccttccccatgggcctaaaattctgcttttccttacttaggatactgtatgacataattgagtaatcttccagctggatagtctttctgggtttggaaactttcttctcagaactgtcatcccttgaatttgaatgtttgtgatacattcaaatcttaatttacctatattctactgtcataatcttttttctgacatatatttcaatatttcttattcaagaagacacaaatacatacacacccatgcacacctcacatcccaggctgggacattagccttttcagatatattaaattcaaggcacaagatattctttcctggtttttttttttttttttgagacagagtttactttgttgcccaggctagagtgcagtggcatgatctcggctcactgcaacctccgcctcctgggttcaagtgattcttgtgcctcagcctcctgagtagctgggaccctaggtgtgagcccccatgcccagccaattttttatttttagtagagatagggtttcaccatgttgtccaggctggtctcgaactcctggcctcaaggatccacctgcctcagcctcccagactgctgggattacagggatgtgccatcgcacctggcctctagcctctaatgagacagtctattcgtaatactattactgtt

SEQ ID NO: 79306 - DNA, 1058 bp, Homo sapiens
ttttagatttattattattcagcctctcacctgctttcaccatttcttttaattttatcatacttaaattttgaagtagtctgcgatgcatacttttgctttatttatttattattttttgtttttttgagacggagtttcattcttgttgcccaagctggagtgcaatggcgcaatcttggctcactgcaacctctgcctcctaggttcaagcgattgtcctgcctcagcctcctgagtagctgggatttcaggcgtgcaccaccatgcctggctaattttgtatttttagtagagatgggatttctccatgttggtcaggctggtctcaaactcccaacctcaggtgccgccctcctcggcctcccaaagtgcaggcgttacaggcgtgagcacagttttttactctttattggctcccagtttgtcttggaattctgcattgcctattatttgcttcctttaaactttagattttccttccttgcatcctttttgcatatggctgccagaatgattttcctgaaaatattttgaacccattgctaaacatataagcctgaggagagaacatgtgctattgacctttgcactgtctattctgtcaaacaaagtgaattgaaccttgctgaataaatgtttgaaagggtcaccatttgctcaaaaatttgaatgactcccagttgtttacaagataaagtccaaattctactttctgactttcaaacctttttatattcttcttcagccttattccttactgtttaacattatcaagctggtgtttactctgtaatataccttgcttaagcacaactccatgcattcttcctttccttgcctgtcagagcctactcagggatgtttgccctgcggctggcactgttctaatctctgatgttatagtaatgaacaaaagagaagacaaagtcccgttttcttggagctgacgtttgtggggagggacacatagtaaacaaatacgtgatgttaggtggtaatgagtaaaatgaaaaggaataaaagtaggtaataaaagatgattgtttattctgact

SEQ ID NO: 79307 - DNA, 1669 bp, Homo sapiens
gtagatgacactgtgatacctgtctttaatgcacccattctgtgcatgtagagactgaggtggttgtaaaattacagtactgaactttggaattaggtcaattcttctcattatgataacggttttggatgtatagccccttctgactcctggaatcctttatttccacagcacttcccatgtatccaaacagaggaaaaaataattagtagtatagtgcttgcttcagcagcacatatactaaaattggaacgatgcagagaagattttcatggtccctgcacaaggatgacacataaatttatgatgtgttccatatttattattatttttaataataaaaaataaaaaaaatttgtatggtgtgtaagtgaatgatctaaaaaatttcctttgtgccctaaatgacttgtgtgaactctgtgatctttgccaatgtgattattcttcctgtgttcctttacttgttccattcatagtgaccctcagtttcttgccctaagtgctatggtctaaaagcttgtgtctccccataattcatgttgaaatcttaacctccaagatgatggcattaggagatggggcctttgggaggtgattagctcaggtgggtagagccctcaggagtgggattagtgctcttaaaaaagagactccagaccgggtgcagtgggtcatgcttgtaatcccagcactttgggaggctgaggtgggtggatcaggaggtcaggagtacaagaccagtttggccaagatggtgaaaccccatctctactaaaaatacaaaaattagccgggcacagtggcaggtgcctgtaatcccagctactcaggaggtggaggcaggagaatcgcttgaacctggggggggcggaggttgcagtgagccgagatggcgccactgcactccagcctgggcgacagagtgagactctgtctcaaaaaaaaaaaaaaagactccagacagcttgttagctctttcttccacatgaggttacagcaaaaagacagatgtctagaagctggcccttaccagatactgaatctgccagtgccttattttggacttctcagcctcctgggctgggtgaggtggttcactaccagccttggcaccatagtgagactcccatctctacaaaaaaaaaaaaaaaaaaactttctgttgtttgtaagctacccagtttatggtattttgttacagcaacccaaacagtctgagacgtttagcttaactcctgtatgcactagatacagtctgcactttgacatcaatcacttattttatattttactggactcctgttgtcagatttttccaccatcgatttcttctgttttccctcacaggtcacagcatatttgtggaggaaggtgagtaattatgaagatttcttggccactataaatttacgctgaacaattccaaataggcccctcctacttcttggcaatcatcttattaattgcatttttctgttgtctcatattccttcttcctctttaactcttaatagatgccatttacttctatataagtgaaaaaggaaaacagggtacaagcttgcacatttttttttcattgtaaccatgacaaatcactgttctttcatcttattttgtaaattgaacggaagaagaatcctgctgccacagttaactttacctc

SEQ ID NO: 79308 - DNA, 1078 bp, Homo sapiens
aaagtatgcttggttttagtgtgttttttcccataacattgtgtcattgtaatggaccacatctcctgtaccatgaatttttttttacttttttcttttgcccctcagtaccagaaatattaacaggtaacaggtaaagtgcacgtcatgaggaattcagaaattcagaaattacatgaagttttgcatcatgaatttatttttgagggtgcacgaggcagttacccagtctctgtttgcaagtagcctgagttcagatgaactcactgatggcctccatctcttctgactttgcaaacgttgaaaaacaaacccacacaaaatcttgaagttgagagcaacttagtttccttagtgtcatccctctgctcccctctcctccccaacaactagtatggtttccagctagtaatcacaatgtttctatagctctgatgtgcctacattgggatagctacaattagtattatagttttctgaagatgtttgttccatcatgctttctagaaggtaaatctagcactagatgagatcagtattagggcctgtgttttttctcagtgttgacatcacagtgctctatacaaagaagatgctttggtgcaatcagctgtcagttcagttggtgggctagtgcacctttctgtctccctccctccctccctccctccctccctctttcctctctccttctccctctgtccctctccctctctctccttccctccctgttttcccctttgcacctcttctttctttgacagggtcttgctttctctgttacccaggcttagtgcagtggtgcgattatacttcactgcaagctccacctttcaggctcgagcgatcctgcctctgcctcagcctcctgagtagttgggactacaggtacctgccaacatgtctggctaattttttaattttttgtagagacgagatctcactgtgttgcccaggctggtctcaaacttctggactcaagtgatcctcccaccttggcctcccaagtgttgggattataggcgtcagccaacacacccatctgtgaataattctgaagttggtagaacagcttatt

SEQ ID NO: 79309 - DNA, 1039 bp, Homo sapiens
cggcgagggtggcgggtcctgggcgccctgtgctgcggggccgagaggcgctcgggtcgcggcgggatcggccggaccagacagggttaatggaagagcctggccagtcccgcgcggggcccccgcagcgacagccttggccgcggggactggagtcctgagggggagaagcctgccgttctgaaggctcgggacttctgccccaaagacttcgccgccgagaactgcgggtgcactgcctcagggaagaagttgagaattttgccaggtcatctctgccagggcacagttcatcactgtgtgtttagtgtgtttcggtgaagctctccaagtgtgttgaatcagcgtgcctagcctcaagggtgcatcgtgaaaactgaaaccaaaggaatgatacaggcctgctttgtgtgtgtcttcccactttaagcttgttttcagtacaaatactcttgctttaaacctgattggactgtggcgagcggacatctgttcaaaggaggggccgagaccacagtacttctgaagggggcttgataatgtggaaacattttaagttttctctccggactgttttgctctctcaattcaggcaagttactgaagtacgttttttatctagaaaaaggtttgatgtagtctgtaaatggtccttgtaaagtacattgccatctcagaattaaaagatccactctcatttattatgcagaagttagtggtcattctttcctgtagatagtttatctcatgtaaagacccacccagcttggtttaaatttttttctcactgacgtataaccatcagctttgatacttccattttcaggctcagactttgaatttaaggaaactaaagatgactttattttcttttctcttggttttttttttccaaaaacaaaaaataaatccattacatgttaacatagatgataagagtgacatcttgcatttttgcaaatctttttaatgcctggtttaatagaagattctcagatctacgtcagactgttgtggttagcacaccatgtaacctctg

SEQ ID NO: 79310 - DNA, 1055 bp, Homo sapiens
tatatatgttttgctttctcacttgatgagcggaaaataccctttaccttctgtttgacttctgcagaaacgtgtgtgattgtagaggctcaaatagcaattaaaacaatactgaaagtatttttaacactaggcatccttaagtgacggtataacttacatgattttgttaataaaaatagaaacaactatggtttttaatggactttagacattatcagagaagattgttacttatttgaactgtttccaaaaatcaaatggggacagaaaaggaagcttttaaaaagtacagtctttctcctagaaacccttcctaaaatctttggtgacatcgtaatcttatccctgtactttccctccttgtgtctaatcatttgccaagtcctgtcattctacctttgcagcatctcttattatatctgcttcctctattccatctctactgccctagttctgacctttgtcatctttccctaggatcattataatagataactagtgttttccctatctagtttgtcacttaccgcctaactttatactcttcttagttttaatcacttacctccctacttcagaaccctgctacctttagaaaacaaagtaaatgctttagtaacattcaaggccttccccgttccctgttccaagtctgtttttttttccactgccatgtagatctttgttcattctatgtagtggctaattcctaaagatgttctttactttcttttcttcatcctgcttttcatctctttgaaaaaccttcccccaccaagactcaaatcaaatgttgtctctttgatgatgacttccaagatccttctagtcatacttaatcttctctcttaatttttcttatactgtaatatttgtaactctatagtttgatatcatactatgctgtattactactgcttaaaactttctcttccacattagttttttaaactttgttggtttttttgttttgtttttgagacggaatctcactttgttgcccaggctggagtgcagtggtgcgatctcggctcactgcaacctcacctccc

SEQ ID NO: 79311 - DNA, 1489 bp, Homo sapiens
gcaaattggggtgcttttggaattttcataggtgagcagcagccttcccatcccctgctccaagttgtactttacttagctttttaggattagatgttcattgatgtccatttgtttaatgatagtgaactggtagaatgaagattattaagagattggaaagaagtagccagacgtggtggcttacgcctgtaatcccagcactttgggaggccaaggcaggtggatcacttaaggccaggagtttgagaccagcctggccaatatgacgaaaccccgtatctactgaaaacacaaaaactagctgggggcatggtggcgaacgcctggaattccagctacttggaggcttaggtaggaggattgcttgagctcgggaggtgaaggttacagtaagccgagattgtgccattgcactacagccagggtgacagggtgagaccctatctcaaataaataaataaataagaggaagaagtcacttaaaaaataaatggatatcaatgagaaaagagaaatatttctagataaaaattccatctacttatgatctaaacattaatgctattttaacaaaagaaacatgtaaacgctttgattattcttactgctagttcctttgacaggtaagattcccaactcttaaggcaaaatgatacaaaaagtaattcatttggttaatgaaaatttgaaaaaaattattacattcttcactcatattctgcatatcttaaactcctgaaatagatattctaaacaatttaaaattaaccctgttagcaaaggatatggtttaggaatttttttttttaaactgctcacttgttttattgtgaatgaggaaaattagtataattatttgtatttgtttcaggaaagaagcacttgtaaggaaatatagcatccattgtgaaagtggaaaagtaaagataattcatcatgcctgctgtggcttcagttcctaaagaactctacctcagttcttcactaaaagaccttaataagaagacagaagttaaaccagagaaaataagcactaagaggtatgatgtatccttcgctagtttgattgaatcaaatattaatttttagttcgtttccatattaaagttagatgaatgttaaagtttatttgaaaaataacaccatcacacgaataaagtaggacctccttagagaaagttgtaatgtaatcgtagcacaatacatatatattctgctcatatgcatattatctactctccagacagatcatacagatatgatctctaggtcataaagtttaagaggcaaagattatgaggcttctaaaaaaaaattcagccagaagtcattgtcttttcataaaacgatacaaaaataattcctttttggccgggtgcggtggctcacgcttgtaatcccagcactttgggaggccaaggtgggcggatcacctaaggtcaggagtttgagacaagcctggctaacatggtgaaaccccatttct

SEQ ID NO: 79312 - DNA, 1008 bp, Homo sapiens
ctgtaatcccagctacttgggaggctgaggcaggagaatcacttgaatccgggaggcagaggttgcagtgagccaagatagcccattgcactccagcctgggcaagaagagctagaccccatctcaaaaaaaaaaaaaaggagtgcacaacctagatccctcacatgtgcagttcacaatagggttcgtgctcctatgggaatctaatgccaccatgatctgacaggaggtggagctcaggtggtaatgcgagcaatggggagtgactgtaaatacagatgacactttgctggctaacccaccactcatcgtctgctgtgcgtcctggttcataacaggccgtgaaccagtaccaatctgtggccctggggttggggatccctgataaagattatctgtggactttgtatatgacctgtattttttcccagatgtcaattgctttaattattattttttctctaattttaagttatgtgcacagtgccctgaagatctttaagacagcagaagaatgcagattagatcgtgatgaggaaagggcctatgtactatatatgaaatacgtgactgtttataatcttatcaaaaaaagacctgatttcaagcaacagcaggtaccttttatttttgcattgttatttcctaagttattttgcataatggagctattgatttttttctaaaaattttaagtaataatgaaatgtagctcaaattatatgcagcatgatctcatgtagatagaaaaagggaactaaagatacagtgttattatttacaaatgtgtataatgtgtgaactcgtacacattcttggatttgccatggattagtacaagtttatagcaacatacagattcataatttttttctgaggtaattaataattgccaggtcaagtagaaggattgagtttgctcattaagtaagaaaacatgactgtgtttttttttatagtacttttattgcgctttcttaagagtcaaggtttagtctcttgttttta

SEQ ID NO: 79313 - DNA, 1379 bp, Homo sapiens
gggattacaggcacccgccaccacgcctggcctaatttttgtatttttagtagagacagggtttcaccgtgttggtcaggctgatctcgaactcctgaccctcggtgatccacctaccttggcctcccaaagtgctgggattacaggcatgagccaccatgcccaaccagttttttttttttaatggtcttgtttactttttgctttattttggaagttaatagttattttttttctatgacaaaattgggaatatttttgtagccgcctttttttttctcttcttgagaaggtagtgagtacatttaaacagatgagatttttccatttccagagtctctattgcatttccaaagggagtatgtaggcagagaagtccaggctgagacgctccctgcaaaggctcaggtaacttaggccattatttcatatgattcagtagttcatttcctgtttttcagtaaaaggatcattttcatttgctctgtccagaggatctcatctgcttctgtcttagaactgttttttgtttgttctgagacagaatctcacttccgtcacccaggttggagtgcggtgggcacagtcatggttcactgcagcctcgacttcctgggctcagctgattctctcacctcagcctccagagtagctgggagtacagacacgcaccaccacacctggctaattttttaatttttagtggaaacgaggtcttaccctgttgcccaggttagtcttgaactcctgggctcaggtggtctgcctgcctcggcctcccaaagtgctgggattacaggtgtgagccaccttgcccagttgcagaactgttttctgttttttgttatatttttctgtagcccagcctctctagtgtacttcagctatgtgaggtgctaaatttactaacaagatattttctattttttaccctttagatgaggtagggactgaatgtatgtcattgaacttccttagaaacttgtattttcactcttattttatactagaaaatgttagagatttaggctgggcgcaatggctcacccctgtaatcccagcactttgggaggctgaggcaggtggatcacttgcggtcaggagtttgagaccagcctggccaacatggtgaaaccccatctctactaaaaatacaaaaattagcagggtgtggtggtatgcatctgtagttccagctactcgggaggctgaggcaggggaatcgcttgaacctgggaggcggaggttgcagtgagccgagatcgcaccactgcactccagcctgggcgacagagcaagagtctgtctcaaaaaaaaaaaaaaaaaaaaaaaagcctgggcacagtggctcacgcctgtagtcccagcactttgggagg

SEQ ID NO: 79314 - DNA, 1245 bp, Homo sapiens
atgggatttcaccatgttggtcaggctggtctcgaactcctgacctcacatgatccgcctgccttggcctcccaaagtcctggattacagatgtgagccaccgcacccagccacctataatttagtagggaatagttctaaattcctcagatatctgctaactgtagttcagatagctgtttaactgccaacaagttggaaatttcagtgaagtcatcctttaaaaaaatgtaacttgggaccttggtaagactttccacagctttttgaatgtttgttttcacatttttattctaaattatcaacataagtgtgatatttgggctgtttcttttgcagaaaaaattaggatttttcctttgaaaagcaaattgcagcagatttgaatcaatataaaaggttgaaattagtaggagagaaagagcaaaaagcactaaataatttcaacttgagaacatacagtttctttttaatagttctgggcaatttgaagtaaatctacagatggcctcaggtggcagatgtgtgaattgtggtggagggagaaagcatatagccatgaaatacctcaaggcaggatactaattttacagaactgaaactcctttaatttccacgattaacgccaataaaagacaatcttgacttattttttcaactagatatgaagaagctgaagtccggaaaaaacttgaggaaaaagacaggcaggaggaagcacagcggctacaacaaaaaaggcaggaaacaggaagagaggatggtggcacattggctaaaggctctttggagaatgttttggattccaaagacaaaacccaaaaggtatttcaaatttaatgtgtgagttaaaagactgtttctgcttgttagatgatttgcttaaaaagagttgagataccactataaagttcttttaggcaacaaggatgaaatttaatgttttaattagaaatttatttaaggctgggcacggtggctcacgcctgtaatcccagcactttgggaggccgaggcgggcagatcacttgaggccaggagctcaaaaccagcccggccaacatagcgaaaccccgactctactaaaaatacaaaagttagctggatgtggtggtgcatgcctgtagtcccagctactcgagaggctaaagtaggagaattgcttgaacccaggaggcagaggctgcagtgagctgagatcgtaccactccactccagcctgggcaacagagcaacactcttgtc

SEQ ID NO: 79315 - DNA, 1063 bp, Homo sapiens
ttttcctatgcaatagagcaatggtgaaaagaatgaaaaatgtgagaccaaagagaaaggtaagtgtgtacagaaggaggaagttgttttaggttctgactgagatcttttaatcagaataagcatcaggttttatacaatgagattcttagcattgttgtctaatctctatgtaagctttatcatttttcctagtctgtacaattatattgaaaatgtctgaggttatttttatgtatttatcatggggggatattttatgaataattttaaccttacatgttaaactggtcatatgcagttgaaaaatgtcaaaaccaaagcttgtacttgttttcttttcaacatgcagtttagcaataatggttaagagcatggactctcagaagtcaaactgccggagtttgaatactggttcctcctctccctttccgcctggttttcagaatgttgcttaaacattctacctttgtttccttgtctgtaaagtggagataataatagtacttatttcatagggttgttgtcagggttgaatgagctaatatatgtaaattcttagaatacatggtaaactttaagtaggacttattatcatttatgactaggttgtagatttaattttttctccccccatccatcctgtggtcaaagactaaattatttaacagtcatttacatcccccataaaaaaaaaatcgaggccaggcgcagtggctcattcctgtaatcccagcactttgggaggctcaggaaggaggattgcttgagcccaggagttcaagaccagcctaggtaacatggtgaaacccctgtctctacaaaaaatacaaaaattagctgggtgtggtggtggatgcccttagtcccatctgctcaggaggttgaggtgggagaattgttcgagcccgggaggttgaggctgcagtgagccacgatcacaccactgtactgcagcctatgacagtgagaccctgtctcaaatccaaaccagtaatatggaaattatccataggtggcgttgatgctctagtgacaaatatgtgacctaaacaagactttg

SEQ ID NO: 79316 - DNA, 1044 bp, Homo sapiens
actgtcctgcgcaatgagcctttggttttagagggaggctatgaaaactggctcctttgttatccccagtatacaacaaatgctaaggtcactccacccccacgacgccagaatgaagaggtgtctatctcatgtatgtatgtgaaaatttttgtttaaaattgctttggtaaaatatggtttaaaattgttttcccggtaacattcttggttgtgtgtgtatttgtcctattagagagcagtttgttttcaggcataaaaatataagcctggaagttcacattttctttaagactgttgtaattgttttttcacttagtttacatttaattactgcattaacacgcatgagaaatgtaagtactgtgtatggggtttgctattctaaaaaacatttttatttttggaattttagtggattttacttatccctcattggaagaatcaattccttctaaacctgctgcccagacgccacctgcatctatagaagtagatgaaaatatagaattgataagtggtcaaaatgagagaatgggaccactgaatatatcaactccagttgaaccagttgctgcttctaaatctgatgtttcacccataattcagccagtgcctagtataaagaatgttccacaggtatgttcttgattttaacattattctcgcttttgttttaatattaaatatatagtatagctgggcacagtgcctcacgcctgtaatcccagcactttgggaggctgagaggggcagatcacctgaggtcaggagtttgagaccaacctggccaacatggtgaaacccccctctctactaataatacaaaaattagctgggcatggtggtgggtgcctataaatccagctgtttgggaggctgaggcatgagaattgtctgaacccaggaagcggaggttgcagtgagtcgagattgcaccactgcaccccagcctgggtgacagcaagactctgtctcaaaaaaaaaaaaaagaattaaatacatagtatagaaacgaagtttaatatataacctttaacatct

SEQ ID NO: 79317 - DNA, 1057 bp, Homo sapiens
gagatcaggccactgcactccagcctgggtgagagtgagactctgtctcaaaaaaaaataaaaataaaaataagacagcatgaaagtttgtatatacaagagatgggttcttctgatgtttggaaggagagatctgtataaaatcagccacagcataaggcagaatatcataattgctctacaaggcactggagcacagagcaaggagaatattctagctgagaagatcaaggacgtcttcatggaggagacagtattttatctgggctttaagagtaggattggaggatagaagaaacaagtagaaaattctatgaccaaaggcatagggcatgctctggggccagtgaacagttttggcatatgtgggcgctagtctctgttggagagaggaagttatgatagtagataagattagaaggatggacaagagtcatcaagagagacttggatcaaatttgaattttgtcctgtaggcacaaggaaccattaaagaattttaaacttgagagtaacatgatcataactatacttttaaaattagggaaaaatagatcaagccaccaaaatgtaaatggaaacaacatttatttttgtttctgttccacctcttattgttaacctcatccccatagtggttcttcctactttattctcaaatacatgcaaaaaaaaagacaaaggattttttttaagaggcagaaagagaagtgaacaggaaaaaaattattttttctacactaacctcgttttctttttcttttcttttttttttgaaaacggtctcactctctcacccaggctggagtgcagtggcgtgatcacagctcactgcagcctcgacttcctgggttcaagcaatcctcccacctcagcctcctgagtagctgggattataggcacatgccaccacgcccagctaatttttgtattttttttgtagagatggggttttgccatgttgcccaggctggtctcgaactcctggcctcaagtgatctatccggctcggcctcccaaagtgctggtattacaggcgtgagtcactgcgcctggc

SEQ ID NO: 79318 - DNA, 1345 bp, Homo sapiens
actattgggagagtgagagtggttacatccatgagattaggaccatgtttgtcggggtggggggaatcgtgaatccgttttggctgtatggggtttgagatacatgtgttgacactcaaatggaaatattgggtaggcatttggatacctggaagtggaacttaagtctaagtatgcccaggtctaggttttatgttttagaataaagacatttttaactcttttgtatacaaaacactcaggaagaattgaaagtgttgaatcaagaggatgtaagttccagtgatgtttgaatatctaccattcaagttctgttttatgagaaatcttgacactgagtaattaacaaatagatgtgctgatagatgttgtctccacaaagtgacacttcttttatcacaacttgatctcaagaactgaggttatttcctgatttttgacaaaaatgttttgctctggttttgttgctctagattgatcgtactaaaaaaccagcagtcaaattgcctgaagagcatagaataaaatctgaaagtacaaaccatgagcagcaatctcctcagagtggaaaagttattcctgatcgttccaccaagccagtagttttttctccaactctcatgttaacagatgaagaaaaggctcgtattcatgcagaaactgctcttctaatggaaaaaaacaaacaagaaaaagaacttcgggaaaggcagcaagaggaacagaaagagaaactgaggaaggaagaacaagaacaaaaagccaaaaagaaacaagaagctgaagaaaatgaaattacagagaagcaacaaaaagcaaaagaagaaatggagaagaaagaaagtgaacaggccaagaaagaagataaagaaacctcagcaaagaggggcaaagaaataacaggagtaaaaagacaaagtaaaagtgaacatgaaacttctgatgccaagaaatctgtagaagatagggggaaaaggtgtccaaccccagaaatacagaaaaagtcaacaggagatgtgccccatacatctgtgacaggggattcaggttcaggcaaggtaagcagaaacagtacaaattgccaacgaagtgaaagaaaatgtatatgaaaatgtgaaaacaccagtggcattccataaaagggcaggcatttcaaatagtcttttcaggggtgatagaatgtactgatctatccacatttgctcatctattctcctttgaggccagtgccatacatttatgaaatgattggttgggaatgaaattgctttttgtatattacatctataaaatgcaatatatttcaaataattgagataaatagctacattcttcatttttatgt

SEQ ID NO: 79319 - DNA, 1152 bp, Homo sapiens
tccctgctacttgggaggctaaggtgggaggatcacctgagcccagaaggtcaaggctgcagtgagccgtgattgtgccgctatactccaccagcctgggtgacagaatgagaccctatctcaaaaaagagtaaagccttctctgattagtaaaggacagacaggatgagagcagtgccagaaggcagaacctcgctgtcatgaactggagcctgttgatgatgaggagaccatgcagggcttgcagccaaaagaaggaagctgaagggatgtaagcaagtcagattcagatgagaatctggtggtgagcctgcaaataaataagtagtttaatgtagtgctacagtatgtgaataatttcatgttgacatcaagaatctactgtaccttgcttaacttttaaatttcctttattgtcttttgtaacaacttttatttgcacaggtcaaatttgttggggcataaaggtgaagtggcagaagaatttggtataatcatgaaagccctgtggacaggacagtatagatatatcagtccaaaggactttaaaatcaccattgggaagatcaatgaccagtttgcaggatacagtcagcaagattcacaagaattgcttctgttcctaatggatggtctccatgaagatctaaataaagtaagaaatttgatttttctaagttgcagagactctttagggttgctcagtagcactgtatttttatagcagtttaaaattctagttggtgatagttcagtgcttgtttattcaaatagtgactgtataagagaattataaaacatcaggtaagtgtaatatttgaagcatatacagttggtatttactaattaacaagcagtattgctgagaaatttgcaaatgttaaaatagttattggcgtttgtgacccacatgtatgtgaaagtaaaatcataaacaaatgatcttataaaagattatagacagtttgagcatttttattgtatgttatgtttatataatatgtatatgttattgtacatatccttattcttttctttttcccagtcccttgctgaaagtggaacatgcctttattcttacacatccttctaaaataagaattacttggctgggcacagtggcttatgcctgtaatcccagtactttgggag

SEQ ID NO: 79320 - DNA, 1037 bp, Homo sapiens
cctctgtcagtgtaattgtaatgttttgttctgcagtttttcctacgatggcaggtggaaacaaaaattacagacatctgtggacttcccgttagaaaatcttgacttgtcacagtatgttattggtccaaagaacaatttgaagaaatataatttgttttctgtttcagtaagtatctctttgaactgaagactttttgtttcaaagcaagtttaaaaaaagttttaagtggtttcctacctcatggaagagtaagaacaacataaagctttgaaactattggcgtattttaaataacaattttaactgaattgatttttttttctatcttgtttggcacagaatcactacggtgggctggatggaggccactacacagcctattgtaaaaatgcagcaagacaacggtggtttaagtttgatgatcatgaagtttctgatatctccgtttcttctgtgaaatcttcagcagcttatatcctcttttatacttcattgggaccacgagtaactgatgtagccacataaggagacataggttataaactagttatcttttaaaaggctcagcaacacaactcttgaaatgcttatcaggataatggtagctatagctggccatttagaggaattctaggacagtgggagctgtgttactagcactatataattccggtcagtgctgacaaataacatttaacaagtattgcagtaatcatcacttacaggtaccatttatttcaaaacaacttttttagtctgctccaaagttaaaataattaactagctaagcattattattcgactggtctaaaaactattgttatcttttttttttccttttcactgttatggccttttcacatttctaaatcccatcttgatatactatgaatactctagaatgatgtaaagcagataggaatgtatgtgtacatatttattgcatacttgcacatcaaatcgatgtacatagtttaacacgtggtccttttgtgaaacctagaactcagaggattgctttttttctttcagc

SEQ ID NO: 79321 - DNA, 1935 bp, Homo sapiens
ttcaagaccagcctgaccaacatggtgaaaccctgtctctactaaaaatacaaaaaattagccgggcatggtggtgcatgcctgtaatcccagctatttgggaggctgaggtaggagaatcgcttgaacccgggaggtggaggttgcagtgaaccgagatcgcgccattgcactccagcttgggcaacaagagcgaaactccgtcttgaaaagaaaataaaaggttcctaattctccatttctaagaaatactaacttttttcttttctctttcttttttttttttaattgttgtgggtgttcaatgtagatctgaagaggaatgattatacgcctgataaaattatatttcctcaggatgagccttcagatttgaatcttcagcctggaaattccaccaaagaatcagaatcaactaattctgttcgtctgatgttataatattaatattactgaatcattggttttgcctgcacctcacagaaatgttactgtgtcacttttccctcgggaggaaattgtttggtaatatagaaaggtgtatgcaagttgaatttgctgactccagcacagttaaaaggtcaatattcttttgacctgattaatcagtcagaaagtccctataggatagagctggcagctgagaaattttaaaggtaattgataattagtatttataactttttaaagggctctttgtatagcagaggatctcatttgactttgttttgatgagggtgatgctctctcttatgtggtacaataccattaaccaaaggtaggtgtccatgcagattttattggcagctgttttattgccattcaactagggaaatgaagaaatcacgcagccttttggttaaatggcagtcaaaattttcctcagtgtatttagtgtgttcagtgatgatatcactggttcccaactagatgcttgttggccacgggaagggaaatgacttgttctaattctaggttcacagaggtatgagaagcctgaactgaagaccattttcaagagggacggtatttatgaatcagggttaggctccatatttaaagatagagccagtttttttttttaaatagaacccaaattgtgtaaaaatgttaattgggttttttaaacattgttttatcaagtcactgttaagtagaagaaagccatggtaaactgatacataacctaaattataaaagcagaaacctaactcactcgtcaagggaagttaccttttgaggaaagttaaagtacttttttccctatctgtatctatagcaacaacccagaacttacaaacttctccaaagattttattgattgttatatcaaatcagaatgtaaacatgaactcttgcatatatttaaaattgtgttggaacatttgaacatgaatgctgtttgtggtacttaagaaattaattcagttggattatcattatgtgatactggcagattgcagtgcaaccttatgccaataaaatgtaatttaacagccccagatattgttgaatattcaacaataacaagaaaagcttttcatctaagttttatgctttaattttttttctttttttttctttttcttttgtttccttggtactaattttaatttttatttggaagggagcagtataaagcttatttgtatttagtagtgtatctcatagatacagacaaggcaagagatgataagctgtttaaatagtgtttaatattgattgggggtggggagaaagaaaaagtgtattacttaaagatactatatacgttttgtatatcattaaatctttaaaagaaatgaaataaatttattgtttacagatgtttagtgagtttaatcattctgaaaaattatctgacattttcagggtgtcaatttgagtatcagtttttttaaatgaaccatttgtatacctgtgcttttgatctcc

SEQ ID NO: 79322 - DNA, 1784 bp, Homo sapiens
tatagaatgtgggtgggattacattaagaagtatcaatttcaaataaattcttgattaatctgactaccacaagggtgaggtatgtttgaatagaagaagggaagcatcagaaatattgagtttctccattactggcatattcagaagcaacaatatattctaattctaaaaagttcttgatccactatctagtaatttatataaactgacatcacagtgtccatgaaacagctctaacttctaagtttaattcagaagtgtgtagaattttagttgcttttttaaaggttttctctaaaatgccagaatttcaaaaatgcctaacattacacatgaattcaaagatattatgaaagtatccttgatttcttacctattgctattaaatttctttgtataaaactacatcttggtccattttatcttctgttccttaatcaaagatgcctgctaatttttattttactttgtcgtttttaaaaagtcacaatttaatcttaaactttttccatttgtgttgcaggggagcctgtcacagtgtatcgtttggaagagagttcacccaacatactaaataacagcatgtcttcttggtcacaactaggcctctgtgccaaaatagagtttttaagcaaagaggagatgggaggaggtttacgaagagctgtcaaagtacagtgtacctggtcagaacatgatatcctcaaatcagggcatctttatattatcaaatcttttcttccagaggtggttaatacatggtcaagtatttacaaagaagatacagttctgcatctctgtctgagagtaagtgtcagtgaatatttaatagtggaacataatttaagctttatattttaacttctgaaatatcaataagccaaatataatcttagtttaaatattaaacaagggttctccccaccctcccttttataggaaattcaacaacagagagcagcacaaaagcttacgtttgcctttaatcaaatgaaacccaaatccataccatattctccaaggtaaatctttaatttttttctgggatcttttattatatggatagcagtcccttttgaccttcatttttgatgttgaatatttaattatccattttgtagatcaattagaattttattaacaaaactgctagtaatatttataactattttttataaggttccttgaagttttcctgctgtattgccattcagcaggacagtggtttgctgtggaagaatgtatgactggagaatttagaaaatacaacaataataatggagatgagattattccaactaatactctggaagagatcatgctagcctttagccactggacttacgaatatacaagaggggagttactggtacttgatttgcaaggtaaatttattaaaatattgctaaggtgaaattctgcagtaggttctcacctattcatatgttatacagaatctgctaatttatagataaataaaatcttaggccaatagaagctataaaaaagcaagttaatcacagtcatagcatatagccatcagggccttgagtaatagaatctggctatctttttttgttcccccgccccctcccccacccccagagggagtcttgctcagtcacccaggctggagtgtagtggtgcaatctcagctcactgcaacttccgcctcccggattcaagcaattctcttgcctcagcctcccgagtagttgggattacaggcacctgccaccacgcccagctaatttttgtatttttagtagacaaggtttcacca

SEQ ID NO: 79323 - DNA, 3130 bp, Homo sapiens
tgcctcagcctcccaagtagctgggattataggcgcccgccaccacgcccagctaatttttgtatttttagtagagacgaggtttcaccagattggccaggctggtctcgaactcctgacctcaggtgatccacccacctcggcctcccaaagtgctgggattataggtgtgagccaccgtacccggccacaaatatatattttaagagaatagaattgtcttcaaacaatataaaaattcataaagaatagaaagacaatgttgtgggaaataacagaattttttattccaccttgttgaatagtcttatggtagttacatttacagtaaatacagttataataaataaatttattgttttatgaaacaagaactgtatgttagttttttggcctttcattcttaaaatataagaaaaaaagttaaaccgttatgcttcatctagagatttttgtctttaaggtttttgtgtgtgtgtgttttttttttactgaaggattggttacaagatagaccatcaaacagagaaatgtaagtaagctttttcttaccattagcttgcgaagtatcatagttattgaatgttgtcttttttcctgctctttacatcatctctttaacatttctttatgagtgatgattatttattctagcatctcctctcttcacatagatgagattaggggaacaagtttattatgaattaatataaaagttaaaatttattattttcatatagttgtaccataattacaactctactaaggtcttcctaatagtgatacaattctgattttattatttagtcctgtttctaacttattcctgaataaatttgttgagagacctagtttgagactttagttttgtacttgcttgatttctctatccatcattctagtcaaaaccttgcatctgcttttggtaagcactttgatgattagagcagtaatacacagtatgcattagaaagcctgcatacaggaagatccactagaaagctgatgtggtaatccaaaaccaaaagtggaaactataggcaatctgacaggttattgtccccagaaagtaaaactttttagtacatattagacataagggtaaagacaaatctaagataatctctgtgtttccatcctaggaattagtattgtagaattccaaaggatatgcaaaaaaataaaaaaaaaagtcttgttttgacacccacctgatactggaagcatggtagagttattctgtcatatggattacttgagcagagaagccaatttgggggaaattattattctgcagtgtttttccccttctgtgaatcagaaataaatctgggccaggcatggtgcttcacacctgtgatcccagcactttgggaggccaaggtgggtggatcgcttgagcccaggtgttggggaccagcctgagaaacatagtgagaccccatctctaaattagctgggtatagtggtgtgcgcttgtggtcctagctactcaggaggcttgaggcagaaggattgtttgagcgcaggagtagtgagccatgattgcaccacttcactccagcctgggcaacagcgagacctagtctcaaaacaaataattttttttaaaaaagaaaataaataaatctgaatatataaagaagaaaataaacctgggccacaggataagcagctgctcaaattgagtttcctgaccctggaatggcatttggaaggcccacctatagtcagacctcttcaaggaatattttcttttataaccaaagccatgggatgtaagtacaaaataggcacttcaagttggtgttaattccggtgtctaacaacagaacattgtcttgcagaatgctgaccctgagaattacccataaaggtggagctgattggcagccctttgagtgctgagaaaagagtgattgattagcagcaggcaaaggaatgatgttaggttcaaaatactttttgtaagaaaatgtttctattaaggtgaaaatcaacaggaaacaacagggtcagatagaatgtaggagctggaaagagacaggttatctactcccaaggtcctttctggatctggtcctttcattcctgagcaaggctacatagctgtgtaatgaaagtgctaagcctctaacccgttttcctttattctcattctgttctcttttccactctacctgtgtgtctagttgacactggaatccttggaagtaaaagaacctgcatttggtgccagtgtatgttgttataaataaatacagttaacattgggagaaatatttttcaacattagaaactaagaggcaaaatgacatctacttacttttctctcagttctttgtccatcaattctattgaaatatttctagcatcctgcaaagtcatctcaatgtattgttacagtactggaatgaatctccacgaatacagaagttatgaaatagtttattagtatagagccttcaatttggcaccaaactgctaataatatttatgcataaattggagatacaagttattaataagtagatacatatggatatatatatatagatatatatatctatatatggattgggattggcttaagggaaatggcaaatattcaaagggaatcaatttcagaatttccttaataatattttttatataataattgtataaaatcaaaaaattaaatgatagccaaaacttaaatcatagcacagcttatactatattttttggtgtttctttaggccatctgaagaaggaacattaaatggtgagtctgtgtggtagattgaacgtgaaaaaaatgagaatcttacatgatctgttacagcaaacaccacattattctaggtaagatattttagacttcaagctagaaaaagccaaggtattgaagagttcttccctcatatactttctccttactgtagatgtttcacaaacacacgaatcaccctgtgaatgatgatatctttactgtcacacttcctccctgctacttggtctctgctatacagcctgctccttttctaatattccatctgttttaacaaatgaaacttttagtcagctgagttattcttgaccaccttgactttgtactcacaaagtcctattgcatttacttcctaca

SEQ ID NO: 79324 - DNA, 1624 bp, Homo sapiens
tcaggaggcagaggttgtggtgagctgagattgtgccactgctctccagcctgggcaacaagagtgaaactctgtctcaaaaaaaaaaaaacaaaactctaagcttaaagtttaaaataacaaaaccctccagacatatatgtttctctaccatttatgttaaatattggcgggggtatgtgtatacacatacaaatatcccaggaagaatatgcaagaaatgaattacctttactgtccccagtcagggtgattgggaacaggagggggagaaatttttttttacttcatactctcatttattgttgccttttcacaataaattgaatagtttactcaaaataaattgaataatttatgggcctcatgtaactcttgtgttcagcgtgttgaggaaaggttgagttatcttatgaaggttatactgtgcctagaatactttgtgtttggttagttggtattcataaaacttcagttgtgtagcttttttatattttttaattttcttttagcagaaaaaatcagtagaaggccatctaccgaagacactcatgaagtagattccaaagcagctttaataccggtttgtagatttcaactaaacagatatatattattaaatacattaaacttttttagataagatctacaaagtggtgatatttgggactatatcaaaaattcaaaaaaatttttcttaagaaaactgactttagcatagtagcagttacagaaaagtttcttacagtgaatagtcaggaattttaaagaaaaatttatgcagaataaaggcaggaatctctttttgtttgaattgaagctaattatatgaactcatttccagctaactgcgataatgattgattttgcaaattccctttaaaagcacacactgacaagacaaaaagctcaggaaaaggcagaaaaattactcctttataatcaagtattatatataagtcagtgctcataattttgctcaagaaaatattgacttacattcaaaatatatctgttctggcatagagagattatgttgttaaaatcatgttattgaaaaaagttatttcagtggggaaagaggttagttaacaaagagattcacagtaacaaatcctcctttctggagggactcttcctgaccctgagctgcacaactttgcaacaaattaaagcctaaccgaagatgacctcacaatggcaatttagaactcatgggagtcaacttacataaacggtatttgatttctgataagatagtggaattattggttatagatgacaaaataagtatgtttaaagtgatgatggacataaaaaagttttaaatataaaacatgagaaaagaaggagatactattcaaaaagactggcaaatttgaaaaactagaaataaaaaaaaaactcggtgggggctgtgtgcagtggctcatgcctgtaatcccagcattttgggaggccgaagcgggtggatcacttgagatcaggagttcaagcagcctggccaacctgacaaaaccctgtctctactaaaaatcaaaacttatctgggtgtggtggcacatgcctgtaattcagctactcgggaggctgaagcaggagagtctcctgaaccagggaggtg

SEQ ID NO: 79325 - DNA, 1065 bp, Homo sapiens
gcaccctacgcctcccgggttcaagtgattctcctgcctcagcctcctgagtagctgggactacaggcatgcgccaccacaaccagctgattttgtatttttagtagagatggggtttcaccatgttggccaagatggtctcgatctcttgacatcatgatccgcccgcctcgacctcccaaagtgctgggattacaggtgtgagtcaccatgcccagtctgagtttttattattataaaaaattcatttggatggatttatgaacagtaggaaaataaggtgttttggtgcagcttttgaaattggcattgaagaaaataaccataatctataatacacccattggtgtccaggtagaataaagcatattgagctaaatagatcaagggactctaatactacttagagtaatgggttgaaatttagttcaattattttcaaattatatgtctgcacaatatttgcagaataacaatacttctgaaaacactttgaaacgagtgagttctcttgctggatttactgactgtcacagaacttccattcctgttcattcaaaacaaggtgagtattttgaccatatgaatagtgtcagaaaacatactcatttacactttaaatgtattttatgtttgtcaaacacatgagcagtgaatggtgcaggagtcagaagacgaaaattctgatctgccatagtgactgtaaccttgaataagtcgtaatcctagcattcattagaatgttttattagaatatgttttacaaattgtttattctgtaaagatggaatagaaaaactttttgtaaatctgctgcttttagcttttgcaaatgtatctgttcatctgtatcatgttttaatctgtatcatcacttattcaacatatttttctagtttaacttttaaaaatcatacatttttggttcaaaattaaaatacacacactctgaaaattttctctctcactctgttcccacatttaccactatttgtctaccctttagagtttcatgcttatacagtcatgtatgacagtacaatcttatacctctcattttttaca

SEQ ID NO: 79326 - DNA, 3366 bp, Homo sapiens
tctgtttctgttaaaatggtaatgtaaaccgaacttctttgttgttctacaaaccatttttacagctctgtaaacaataacaattttagtacattctgtgtacatgagactaatcatactgtgtcaaattatgcttaaaattttacagggactttcaaattagttcttaaatttctctgagtagatacgtgagggagaggtatgagagagatagcggagggatgttgtataggaaaaggaaatcagaagaggaggaggaagtacctgattgtattctgctgacatcacactggtgaagcaaaaaagaaagataattgtctagtgctttagaagcatagtagtaaaagtttaaaaagtgcagatgatggatgtagtcttagaaaccctgaataattcgtaagaattatgagctaaagttgaaaccttgatagctcttccttgattttcttctccttttcctcccatagaacttttcttaacagaagaagatcaaaagaaacttcatgattttgaagagcagtgtgttgaaatgtatttcaatgaaaaagatgacaaatttcattctgggagtgaagagagaattcgtgtcacttttgaaaggttcagaagccctttagttaaaatcggttatatgtcaaaatgggatctattcgttatatttcttatacatggtcattgttaaatttattttgtcaaacaataagcatagttacagttttacatgatgtattggaaagatcgttcagttctattaatacttcatataagtcagttggtcagtctcttatttttttaccctagttacagaagatagaagagtttactgttctttactgtttggagggagaaaagtaaaactgtcctcactattttacagcattttttattatcatcattattattattatttattttatttttatttttttgagacagagtctcctcttttgccccggctggagtacagtggcacaatctccactcactgcaacttccgcctcccaggttcaagtgattctcctgcctcagtttcctgagtagctaggattaccggcgtgcaccaccacacccagctgatttttatatttttagtagagacagggtttcaacatgttggccaagctggtctcgaactcctgacctcgtgatctgcccgcctcagcctcccaaagttctgggattacagacgtgagccactgtgcctggccagcatttctttttttctgttggcttcactacattctggaagcatatggtgtttggtaacagttacagtaacagtaatggtagttctgtatatatgtagctgtatatacattattttgtgttactttgatgtggggtaattggaataagtagcctgtggaacaaaaacgttttttgaaatcttgcattttaatataagattagcactggatccttcttaaacataaggtaggccttgtataattaaataactgtaccttattttatatcttgtttaaatgcatgtgaaatttttctctttttatcattattatttgaggctacaaaataaaattctacattattttttcacatttgtaaaaaaagcttatttctctcctacagagtggaacagatgtgcattcagattaaagaagttggagatcgtgtcaactacataaaaagatcattacaatcattagattctcaaattggccatttgcaagatctttcagccctgacggtagatacattaaaaacactcactgcccagaaagcgtcggaagctagcaaagttcataatgaaatcacacgagaactgagcatttccaaacacttggctcaaaaccttattgatgatggtcctgtaagaccttctgtatggaaaaagcatggtgttgtaaatacacttagctcctctcttcctcaaggtgatcttgaaagtaataatccttttcattgtaatattttaatgaaagatgacaaagatccccagtgtaatatatttggtcaagacttacctgcagtaccccagagaaaagaatttaattttccagaggctggttcctcttctggtgccttattcccaagtgctgtttcccctccagaactgcgacagagactacatggggtagaactcttaaaaatatttaataaaaatcaaaaattaggcagttcatctactagcataccacatctgtcatccccaccaaccaaattttttgttagtacaccatctcagccaagttgcaaaagccacttggaaactggaaccaaagatcaagaaactgtttgctctaaagctacagaaggagataatacagaatttggagcatttgtaggtaagtttggcaaattcgtatttgtatatcaatattatttacttttcaccttagaaataatagaaatatgtactgttacaagtcattatcttttcatagagtataattataaaatttttaaaaagaatcagacacctgtgattctggtactttgggaggctgagtggggaggattgcttgagcccaggagttgaggaccagcctgagcaacatagcaagaccccatctctacaaaaaatttttggaagtagccaggcgcagtggcatgtgcctgaagtcccagctactcaggaggctgaggcaggcgaactgcttgcacccagaagctgaaagctgcagtgggctgtgatcacacaactgcaccatagcctgtgtgacagaatgagaccctgtctctagaaatgaaatgaaaaaaaaaaaaaaatcagaagtaggggaaatagactgaattaggctataagagttatattggcacataacctctttgatggaattttaggttctgtcttttgaatttgaatatcttcaattgggtttcatcaactcttgttgaaaacctaagtgattcttaagtacttggagaacctcataggggaggttagaatcaactggaaaagaacagtgccctataaatagatgaccatataatttttttacccaaaccaagacactttaaaagtgaaagggtgcactattaataattatatcagaacaacaatggaaatctaggaatctactgggaaaattagtacttatggtgtacctatttatatattcacagagaacatttcaaaaaggaatgacttattcttatacctatgatagcttaaataagataagaacaaaaaaaaatgtttattttggcagtaacacattaaagaccttagtgaaaactttcatgcatagagattattcagacagtatgttaataagcccatggaaaattgccacattaaggccagcctaggaagttatctaggcactaaacatgttgatattacttctaggctatatgggattcactctagatacatagatataacttttcctacgttaaata

SEQ ID NO: 79327 - DNA, 1074 bp, Homo sapiens
caggagaattgctttaacccaggagccggaggttgcagtgagccgagatcgcgccactgcactccagcctgggtgacagagcaagactccgtctcaggggaaaaaaaaagtttggacatttttcttacagaaatattatcatatggttgatccaggaattttaccctctttagtgctcgtcaggttaaaccctgcctcgaagggtaaatataacacctaaatatactttcttttctggaatagagttgtaaaacagatagcacccacatttctcacaacatctttttgtgtttgaacactcttaagctggggttcctatgtctccttgcccagatgcttttgctggaatctgtgaaacagatttgtacataatcgaaacttactttaagtaaataaataaccagaaacactcatgaatagcagttactgatgaattactatttttaagttgtttttgtttttttctttttttctctctaaagtgtgtgcaaatgattctgttatccctcaaatctgtggtcctgggacgtggttgactccatttcttcaagcagtctacctctttgtacagtatatcattatggttaatcttcttattgcatttttcaagtaagaattttgttcaattgtttgttataagatgatttaatatgcaattctacatattttgaaggaaatttatagaacttaaaatctaaaaattttattgaggcttaaactactaaaattatatttgaaaaattacaaataggagatgctttttctaatcaaatgagttctaaattttaagtttgattatctttcaacctgcagttttctttataaatttaatcgttatctgggatttttcctcggttgccaacaaatacgcattcaatatagaaaattcatcagtaattccactgttaatatttgggtgtacacctttctatcattttttttgcaaatatatgtaaaccatttttcttttcagaaatagtatttttatttaatttatttatttttgagacacagtctccctctgtcacccaggttggagtggcacaatcttggctcactgcaaccttagttttc

SEQ ID NO: 79328 - DNA, 1466 bp, Homo sapiens
tatacctaaataagtagatgggaggtgaagttttattatagcattctgcttaattctttgaatccttaaataattatgtcaaaatgtacattgtaatttaacaatgaaaataatttttcaatgaattactaggttttagctcaattaggccctttttgaattttattgaaattaaagaattacaaactacatgacttacaaaagtatttgtttcccagacattggtgtcttttagtttttcaacacccatgctaataattcagattgttttgtttggctcctaggaagttttcatatcccaggacaaggcacccatggattcagggtgggtgggaagtgttctttttttgtgtgaagtgggcaaagtacaattaccagaggcaacatggaaaagagagagtctgtgcttccattataagaacagagaagctttaggaaagggcagttgtggaaattgattccctaaatctgtctgtgtctctgtacttcttgaaaatcttcacgtaccacagagataggtacacttcagtttgaaccagtgatacaattcattatgtagataaagatgcccatgacttgcttagcttaatagatttttttttacgtaatctcctagatgttaagatttatatagtgatgaaattcttctgaaagctatcactaggaacaaaaagaatctcaaagattttttgtgtttaatggatttttttggtctattagaacattagaagcttttagaaagatttgtcatagtgtttaaacttccttgtattttaacagtgttcattttttaacaggtggccaatatgttctacattgtagtgattatggctcttgtattacttagttttggtgttcccagaaaggcaatactttatcctcatgaagcaccatcttggactcttgctaaagatatagtttttcacccatactggatgatttttggtgaagtttatgcatacgaaattgatggtaagaattgtatatttacagatttatcttttggttattttgtgttttaaaaccaatattgaattatagtaatattgcatattttcagaagtcaaactattaccaacctaagccccacacaaaggcgttagtgaactccagaagaaacatacaaattaattggaagaaaaaatattttagaatttttttagtggcaggtattagaagtctagtctaaactgtcctaggacacaataagggcatttattaactcacataacaatattgagctaggtctagtggtctttagggttggttaattcatagctaaggacacttgttctttttcttccggctgccaactctataagtttcccttatgattctaagactgtcattagcaacaggaggaaagagacactgtttatcgatggttctctttagaggaaaatgtccctttcatagaaattcccttttgaacctgtcctttcatttcattagcttgagttggcttc

SEQ ID NO: 79329 - DNA, 1066 bp, Homo sapiens
attagttaggtaaatacagctacttaaaccattgagttatttactttctacaaagaaggcaggtttggcagctactaccaggatatccaggtgctgccttaatttgaaataaaacaatttttcaaaagtattttacaatccaggtctagagaactgggttgtaatctgaattttcagcttcttagttggatgaatctctggaacctgggagacggaggttgcagtgagccgagattgagccactgcactccaccctgggcaatagagcgagactctgtctcaaaataaataagttaataaataaaagctatgtgaaattctactgtaatgttatagttgaatgctgtatgtgttttaataggaataaactgattacacttttttttgttgttgttaaacctttagatctttatgtctgaagctgggaaagtaaaccagaagattaaagtatggtttagtgattacttcaacatcagtgatacaattgccataatttctttcttcattggatttggactaagatttggagcaaaatggaactttgcaaatgcatatgataatcatgtttttgtggctggaagattaatttactgtcttaacataatattttggtatgtgcgtttgctagattttctagctgtaaatcaacaggcaggaccttatgtaatgatgattggaaaaatggtaagttgacagatgtttgataatactcgtgggtttattgattttttaaaaaatcacaaaaatgttattaacatagttttatttgagccagtgaatgtcttttattttgtgtttgtttgcctcatacttcacatctgccattccttaagagtttctcatgctcaatcccaatcccctatacccatttagtgctttgcaagataatgttagctataccatctatggtttatgtctgtaggtaactcctttttcctgtcttcactgatccaggctttttttttttttttttctttttgagacagagtttcgctctgtcacccaggctggagtgcaatggcactatcttggctcactgcaacctctgcctctcaggttcagcgat

SEQ ID NO: 79330 - DNA, 1081 bp, Homo sapiens
tgacctcagatgatctgcctgcattggcttcccaaagttctgggattacaggcgtgagccaccgcggcgtgccccagttgtcttttttaggaatactgtttggtttggggaggaaggaggcaggaaacatgtgttccttgatgattatggtggtgaaattctgcagtaattttaatatattatgatactgtaggtatgagttaagcagaattgtgtggcatatgctgagaacataaacctgattgtaaaatcccttctgtgggacgttctaaaggttgacaagagttgtagaacaacacgtttatactctggggaccatttatacaccaataaatgcaatgtctgtgctgaagaagagatatttctaaaattgttttaataaaggaaactaggagataatttacagaggttcatttaatgtctgtttttgtgtgtgtttgaaaatgttcataattaaaagatttattttgtaaccaatgttatttatgtaacctttactttttcattagttggcatatttaggatttctgatgctttatacatttgtggttcttgtacaaatggaacagttaccttcagttcaagaatggattgttattgcttatatttttacttatgccattgagaaagtccgtgaggtatgtctttagtttttttctaccaataatttactgtatacatggaagattttctgttttgttttgttttgggtgtatacgtaggggggtgtgtgtgtgtatgatgacattgtagaagtgtagaacctgtgtaattttgctgttcccaaaataatggcaaaagaatagagattagtgagtatgctgtatactttgttgccattacagataaaatgatttgtgttagaaatgtagcctataaaaatgtaacctgtattttgtttgtttgttttatttcctgaacattcacatttttgctctctgtcactcttcaaaaagtattaaatatacttagctaaatgacttttaatttacctacctgatttagccaattaggtaggtaagttataaataggtctttaggccaggcgcggtggctcacgcctgtaatggcagcaccttag

SEQ ID NO: 79331 - DNA, 2195 bp, Homo sapiens
taaatctatcctatacccttattatcataataatcaaatgttttgttactctttaaaacagttaaacttgggcctctttaaatacaatatataagtaaaaaatcaatttgttgttttttttccctctactgctaggggcaaaatggctaatcacaagatatttaaaatcttttattgtttttattctttgttttgtttttattatattcttgaaggtcattaatttttaaatgcaaaattatgtttctaaaaatttaggtcatactaagcattttagttccacctgccatattgctgttagagtataaaactaaggctgaaatgtcccatatcccacaatctcaagatgctcatcagatgacaatggatgacagcgaaaacaactttcagaacataacagaagagatccccatggtaagcaggaaaacattttaaagtaaatataagtttgttctgaataattgtacaaaagaatttttttttttttaattttaggaagtgtttaaagaagtacggattttggatagtaatgaaggaaagaatgagatggagatacaaatgaaatcaaaaaagcttccaattacgcgaaagttttatgccttttatcatgcaccaattgtaaaattctggtttaacacggtatgtttttaaattacacaagcataatgtttttaagagttaggctttgggggaccattggttcggaatccatactaatgttgatataacttagatcactgaaaaggcatttcacatttaaaagagtgatacatttgccttagtttcatttaaattgtcatcatctagagtgataaacactaacaaattttagttctaattggaaccaaaaatgtacttaacaaatatacaataccattggcctttgtaagttggtagcaaatactaatcaactagtaaaaataatgataaaagatggaccaaaagagattctgatacacagttataattttttgtgctttaggattttgcagatgatacataaaagtctagaaataaacctgtttgcagtgttaattgatgatgataaaaagtaatccagattgtttatatggttttatttatctgtggcttatttctttaattgtattaaagtgtatgcttgattaccttccatataattggcttttctcttgctttatggaaaaattgattttactagcaggttaaagagcatatgtccatacaaggatggactcacctgttattttggttgaaatgtaggtgtttatgtgttgttttggttgttttgtgtggagaatgagcactaggaaatattagttggctgtcttgctggtgctactttccctagcaatggaccaacctgaaggaacaggtgatacagcaaatgagattagcccctacttttaaccagggactgagtaaatgagttcttaactccccgtcataggaaaacccttaatgaagatgttttttaactttgttgttggggagattttttcattttcatcaacaagaatttgtttctttggtgattgctttttcacccacacatgtgaccattaacctgagactaacatttccttacacctctatatgaaaatgttcttgttccttcctattcagaggctggaattgcaaatatcagttatctgatctaatctccaaattctgtctccactgatgaaaatagggcagtttgcttacatttgcattcatgtgaatggctgcgttaaaatagccaacatgggtgactacaggaatttctcttttctttctttactgcagtttactccctagcctgccacagataatcaaataaaggatgtgacttattctaggactggtggagacaagacataaaagtctagaaataaataaaagacagatgagaggattcttacccataatttttcaagggtcaataagtgtgggttttcctctgaaatgaaataaatactcacatgtatttatacataaactttagcacctctctgtaacctgttttgtaaagagtatcaaaggtgggctgtttccttacctgggtcaaagccacttcacattttttccactttttggggttcaactttagtgactgggagctaagaaaataccagttgtctgtctgtcttgtcttgtctttttttcttttcttttctttctttctttcttttttttttttttttttgacagagtctcgctctgttgcccaggct

SEQ ID NO: 79332 - DNA, 1442 bp, Homo sapiens
agtggggtatttagagggcagtgataattgttactgaaaataactctttaacagggatcctatggttacttagtgggacttcaagattcagatgtttttcataattaggttagtccctagtcacattgtttttcctctctaccaggtaccaactgttttctgtgtttgaaatactacataaacttttttgaacagagcattgtagcattgtgagttttgattccctttgagattatagtttgatttctaggaccgggagaatgtgctctggattcaccttctcaatcttgtacataatgcgacatattttaatattttgtgatttccacatagatgtagatgtctgaaaacagagttatggttttaatgcctcataattctgtaagtgtgtgtgagaatattaaaaagtaggaagtattaatgtatataagaatagtggtttaaaattgcagtttgttaatctgagtatattttggcttttatctttttatagtgattttggtcagttggccgttgaattattagaacagtccttcagacaagatgaaaccatggctatgaaattgctcacttatgaactgaagaactggagtaattcaacctgccttaagttagcagtttcttcaagacttagaccttttgtagctcacacctgtacacaaatgttgttatctgatatgtggatgggaaggctgaatatgaggaaaaattcctggtacaaggtatactttagaaataatttgatataaagcatgtgattagataaaaagaacagaagaattagtctaaatgtgtagtaaaatgccttgatgtgtgagtgtaatggtggggggtaaagagggagcaagatggatgattggcatttcatcccaagtggtataatgggcttcttttttcctctacttaacttttgaatccttttcaggtgtctataatgattatggcctctctttgagctagaaggggaacaaatggcaaatattggagattatggcccctagcagccttgaaaaaagttactactttatgaaaagattattcccaaattctgaaattcaagacctatctactaatttaataatctgttacttttaagttacttaaagtatattggatgagtatattgatatacccattatagataagtatatccatgtggcctgtttttatgattaaaaatttgggtaaaatggcatgtacctttggttttgtcatggtgatagatactgctttgaactttgctttttgttatcttatatcttttaaaataaggtgcagaaatgtaggagtcagaaatcaggcaaatagtttaaccataggccactgaataaccaacagaaaacctgttacacaattacaatttcttcatgctttgggattttgcaagtaataagtaaaattttagaaataaacctttttgtttatagaggcacaagctgagt

SEQ ID NO: 79333 - DNA, 1082 bp, Homo sapiens
ggccagtatggtctcgatctcttgacctcgtgatccatcctcctcagcctcccaaactgctgggattacaggcgtgggccaccgcgcccagcgtacattttcatatttaggtatgataataaccaaattaaaatgttttaataaatgtttacctgactcctttcattccagttttacttgattaagaacatgtataacaaaaatgttatctaaccctttattaaaattatgttctattagaatattagttgaaatatttaggcccttaaattttggaaaatgtttattgcaaaggcatttttgttgaaacagcattttcataaaatgaattatgagctataataaaaatcaagtttataaaatttatgctattgtgcagttttatggagctgaataatgtaaagatattttactaaaattttcactgacataaatttcatatggccttattataatgagctttataactttattttccctggaagattgatacagttatggaagaaggaaagaagaaaagaaccaaagatgaaattgtagacattgatgatccagaaaccaagcgctttccttatccacttaatgaacttttaatttgggcttgccttatgaagaggcaggtcatggcccgttttttatggcaacatggtgaagaatcaatggctaaagcattagttgcctgtaagatctatcgttcaatggcatatgaagcaaagcagagtgacctggtagatgatacttcagaagaactaaaacagtattccaagtaagtggtattttatcatttgaaaacattttaaaaattcaaagtaggtattgtttgagtggctgttacagtgccacgtacttaatggtgatgtatttatatgtataatcttattggtacaattgacagaaaattatataagtatatatttttttaattaaaagaaactttctgcctctatgaaaaagaggttattatatttgcaactcaagaattaaatatctcagcaagaaagaagaaatgcagcctgggcaacataggcagaccccgtctctacatgaaatttaaaaattaactgggtgtggtggtacttgtc

SEQ ID NO: 79334 - DNA, 1027 bp, Homo sapiens
catgaagcttggtggcatagttaagtacaattattatgtctttccctttggattgtaaatttctttgaagtaggtattatatctcattttctcccttttttttctttttttgagaaagaatctcactctgttgcccaagctggagcgcagtggcacgatctgggctcactgcaacctctgccttccgggttcaagcaattttcctgcctcagcctcctgagtagctgggattacaggtgcatgccaccatgcccagctaatttttgtatttttagtggagatggggtttcgccatgttggccaggctggtcttgaactcccgacttcagatgatccgcctgcctcagcctcccaaagttctgggattacaggcgtgagccactgggcccagcttccattattttcttttagtatgtgtagcacatttgcgttgaactttgttggcattttactgtccctagtggacagatgtaaaaattaaaaggattattcattgtgctgtagtaaggtttatacctgaactataaagcaatgtaaaataataaaaataaaaattgatcccattagcaagacaagtaattttttaaattgtatgactcaaaggtgttaagataatactgtagttactttcagcatcaattattgatgaagttttaaaacatttaagggcttgcaacatgataaagcagtagttctcaaactttttgattttcagggttcctttacattaaaattattgagaacttcaaagagcttttctaaagaggttttgtttgtgtgtgttggtattttagaatgtaaaaatgagagttttaaaaaatatttgtttttattaaagtagcagttatatttacttaaaatttctaaacttatcccatattaacataaatatttgttcttatttcttttttcttaaattagcacccttctgcctgatactttttttttgttttgttttgtttttttgagacgcagttttgctcttgtcatccaggctggagagcagtggcacaatcttggctcaatg

SEQ ID NO: 79335 - DNA, 1305 bp, Homo sapiens
tttcagtcataaacatctaacaggataataaaaagttgtgtgggatgcgggatagtttctttctgagtagaattctccagcatattgcatgatttctgatgtcccttgaccctacccattaaatgttagtaacagcactcaattattgaaataatccttcccacaaaaccttccctaaacactgagagcattgctttaaggtattctttcccaagatttaattgatgatggattctgttttttcccccatgtaacacttattctcctacagaagtagtgtttgtggaatattctttaagaaacgttgttctagagaggtcttttaatctattccctaaacacctaaagtcttattagctttttactgtgttgcatctttctaattttgttctaaaactgttgggaacaaattaaatgtaaatcctaaggacttaacatttaaaagtgtttgtataattagaatatgtgaaatatgtatttattaaatttgatactcctaggttggatccttggaacaagctatgcttgatgctcttgtaatggatagagttgcatttgtaaaacttcttattgaaaatggagtaagcatgcataaattccttaccattccgagactggaagaactttacaacactgtaagtctacattaaaattctttattgactacattttatcttttgggaaatgttactttacctgaatatagccattcctattgataaaacccttaatgtcttccttagttatatgaaaaaattatagccagtcttagtatggattggttgtattacagtctgaaaccctttccttgtttttagaacccattccctgtcaccataaccacatagggctattaagcctacctctctttcctgtgtatttccctttccctccccttatcaaaactagaggatcaacttcttaattatagggtgattatgtttcttttgactccgttgtctaatggaggaattatgcattgcttttttctctttttttttttctttttttacattcattgtttgacctcatggtataccccttttagcttacatactgttttcattttttttgtaaaggactcctgaaaacttactattctcgtaacaaagactttcacattttattccaaatttttattgtattagcattgaagatatactacccttcttagtggttttctgtgttatgaatatgagtttactacccaaatccttaacttgattttcaaagatcttcatatattgccccatctacttttctcacttggcctttttattgccccccaaatccagggcggggcgg

SEQ ID NO: 79336 - DNA, 1034 bp, Homo sapiens
ggctacttctgaatggtggctgacaccagctgtgtaagttaactaaagaatggtggggagatgtcataagtgttcgtgctgggcactgtggctcacacttgtaatcctagcacactgggaggccgaagtggcaggatcacttgaggccgggagtttgagaccagcctggtcagcagagtgagactgtctctacaaaaaagttaaaaaattagctgggtgtggtggtgctcatctgtagtctcggctacttggaggctaaggcgggaggtacacttgaacccaggaattcaaggctgcagtgagccatgatcacctttgcactttagcctgagcaacagaccaagaccccatctcttaaaaaaaaaaaaagtgttcaccttttaatggagataaattaattgaacctgtcaactattttctttattcgattaggtactaatgcatctgcatttgaccagcttatccttacattggcatgggatagagttgacattgccaaaaatcatgtatttgtttatggacagcagtggctggtatgtaaataatctacatacacaatacaattaaattacactaagtaataaaaaagtatttgcgggaactgtgacctgacttgacattttacctttctgccaatagttcaaaaatagtttagctaagtatttctacaccattccgatccagtttaggatttaatgtatgcctctagataaaaccttatttttttgtagagtatatagatctctaagaatcttagaactgaaagaagctttaaaactcatgctctgtataccagagagtccattctagcattccccctgatgtttagacctattccttttttagtcttcctcatcctactaaatgggaacaacttcttcctagtttctaagatgagactctttagtgttatcctttacttttctctttctcatgtattccaatccaattccatctgtaaatcttgtcagatctagtttcaaaatacctaattttatcatcctggtctagtctgtcatccttcttttgtgtta

SEQ ID NO: 79337 - DNA, 1038 bp, Homo sapiens
gaggccaggagttcaagaccagcctggacaagatagacccatctctacaaaaagtttaaaaattacctgggcatggtggcatttacctgtagtcccagctacttgggaggctgaggtggaatcacctgatcctggaaagttgaggctgcagtgagctgtgatcatgccgctgtattccagtttgggcaacagagcaagaccctatctcacaacaaagaaaaattagctgggcatggtggtgtgcactctgtagtcccagctgttcaggaggctgaggcgggaggattgcttgagcccagggtttgaggttacagtgagccattatcacactgctacactccagcctgggtgacagcaagaccctgtctccaaataaaaatgtgtcactttcttaatcagctgaaaaataagtgtttaaaggttataaggcattagttgatagaatataaagataggattttaaaacatgtcatcttcattatgaagggaaaatttgaaaactagtggtatcttttaggactaagggattgaagcacacacacactgatcctcttattgtctccccaaagacatccaacagatataacaacattatagcgaaaaatcttctcagaaattagaaactatgacggtatcccatctgtctacctgaaagttagtgtagagtgatgtgccaggagcccagcacattaagaggatactgtccttttatttacaagaattttcttgcatattagaccataataaattgccaatacatcaagcatttttaaaatactgtgataaaatatatttatatcatctggaatcatggtatcaagagatcacaagtgataggaaacctagaaaccaaaaaggaaaaaaaattaataaatgggagtgcataaaaataaaaagtaaggctgcgtgcgctggctcacacctgtaatcccagcaatttgggaggctaaggcgggtggatcacttgaggtcaggagttcaagatcagcctggccaacatggcgaaacctcgtctctactaacaatacaaaaattagc

SEQ ID NO: 79338 - DNA, 1051 bp, Homo sapiens
agttgtgatagaactgggcagatgaaagagagcgggaaggagactttcactattaattttaatgttttaacattttatgttttctactatttttgagccatgaaaatgtattaagtattcaaaaaagaaaaatgtgagttcctatgtttaagaacatcgtggtgaaatactagtttatacatcataagatcttcaaattatttttatacaatatcttatgtaagtactgatattgccacacacatactttttgataaaattcacaaagtaattcaaagagaaaaatcactccgtttcatttattttccttctaacatttgtgttgggagtctcatgtaggaagaaataatcccacccaaggtgaagtatgtaatattaatccattattttcaaaggtcttacatggatctacctgtacttcatattgatcctacaaataatggaagatgaaatcagtgaattatgtttccttttattccaggaatcttcctgatgcagcagagcccgatattatttccactatcaaaaaaacatttaactttggccagaatgaagcacttcatttatttcaaacactgatggagtgcatgaaaagaaaggagcttgtaagtagatttcagcagaaatttaaaaagctgataggccatttttctttcattcaaaacacattctaaactggtgaaatacttttgtttttatttggattttaaactttgaaatctttattaaccataaaaatatgtcatttattggtctgttcaagttgagaggtatcatagaaggaggcctgtagttttttatatggtattgagactgtatttgtgcttctgttttaggaaaagttttaggaaaagtaactaggtctcaacagataatgttcagtaccaaggaagaactataaagagttgttaatggtttctctaataaaatgtttggaaaaaaatttttaatgtgcttaagcctattaaattaaagatcagtgctgctttgtttcaatcatgtaaatgtgggcataagttttcagagataaaatttttagcaagcctataaa

SEQ ID NO: 79339 - DNA, 1024 bp, Homo sapiens
catgagccaccacgcccggccaagactgtcattaatttctattttaatgtctcatttggaatcagaaatatatattttaaaaatgaataaaaatcaatgttagaagttcaactaatgtattgtaaagcaaactaaaaaattactgtttacatttcacgtcaagagctcagtaaaatatggaaaacaaatttttacttttaagtagtgaatatataaattatttgctgtctattatatattggattttctaattttgtcatttagagaacagcttttaagatagtgacaaagtattcattatttaatttacttacgtgaactggtatcaggtggagtgcttaaagtcaagtcaacatagtcttagaaattatgtttttactttttaattttttttcagtaaaatctaaaattagagtactgaattttgcctaatttttttttcttggagagaaacttgcttgggatgaaataattttttaatttaactttgctctttttagggattggccagggtgtccctgtggtggcacttatatttgagggtgggccaaatgttatcctcacagttcttgaataccttcaggaaagcccccctgttccagtagttgtgtgtgaaggaacaggcagagctgcagatctgctagcgtatattcataaacaaacagaagaaggagggtaagtgtatgacaacattttaattaattttatttatttatttatttatttatttttgatacggagtcttgctgtgtctcccagcctggatagcgtgcagtggtgcaatcttggcttactacaacctccacctcccaggttcaagcgattttcctgcctcagcctcccaattagctgggattacatgcatgagccaccacgtctggctaatttttgtatctttttagtagagatggggtttcactgtgttgggcaggctagtcttgaactcctgacctcaagtgatccacctgcctcagcctcccaaagtgctgggattacaggcatgagccaccatgcctggcccatt

SEQ ID NO: 79340 - DNA, 1876 bp, Homo sapiens
tgcatgagccactgtgcctggccacaatatcttttatatattgtagtttagtcacttaataatctgataatagtttatttgcactatttagttatttattgcttctctctttgcatgtgatgatgaaatatataattctgcagtatgggtcaagatataatcatgtgtttcaacccattaatgattaatcctcagctgcttaaaagcttacgctttttgaaacattctttgtcatttggtatttatttctgtatgtaaaatagaattttacttcttacttgtctttacggattatttcaaaatttattttacatcatactgtatttaatcctgctcactaactcttttgtttgctattgtttaggtggttgctccttatcaaaccttattgaaccccctgagcaaattgaatgttttgaataatctgcattcccatttcatattggtggatgatggcactgttggaaagtatggggcggaagtcagactgagaagagaacttgaaaaaactattaatcagcaaagaattcatgctagtaagtgaattcacaaatttgttattgttgaaattgtcctgggctgtactaatagccaaattcaaagaaagtagaatgttctttgaagtgctctttcttacatagcaagataacatatgaaacaaccaacagtggttgatcttagacaaaatgataagaccaaggaaaagaagtgaaaattgggtactcagttatcaaggctaaaaccaaaaaaggttcattggaagctctgttgttattgcaattccatttcagcccaaggaattcataaatattctttttttttttttttctttgaggcggagtctcgctctgtcacccaggctggagtgcagtggcatgatctcggctcactgcaagccctgcctcctgggttcacaccattcttctgcctcagcctcctgagtagctaggactacaggtgcccgctaccatgcccagctaatttgtatttttagtagagacagggtttcaccatgttagccaggatgatctcaatttcctgacttcatgatctgcccgtctcggcctcccaaagagctgggattacaggcgtgagccactgcgcctgacccataaatattcttaatgtgtgatttattctaatacatggctgtgaaattcaagattgaaaactaaaagggaaaaaaatcactgaaagaaataaatcagcttaaaatttatgaaatgagtatcactgtttggctaaatgtgtcttaaaaattgtattcctgggactgatttttctttccaaccatgtctgaattttctggttcaacatctaaatttttatttcaaataaaggaaaatttgtaacctaaggaccccaggaagttgagctctgtggtaaagtgaaatagaaataaaaaaactacagaacagtgtttacagattatggtggagtcagaacttttgctaaaagttaagaatgggctgggcgtgctggctcatgcctataatcgcagcactttgggaggccgaggtgggtggatcacctgaggtcaggaattctagaccagactgaccagtatggtgaaaccctgtctctcctaaaaatacaaaaattagccgagcgtggtggcgtgtgcttgtagtcccagcttcttgggaggctgagacaggagaattgtttgagcccaggaggcggaggctgcagtgaggtgagccaagatcgcgtcactgcatttcagcctggttgacagagcaagactccattgcaaaaaaaaaaaaaaagttaagaattgtttatagtcctacagataccttttttttttccattttctctgtgcaccgcaagttattgtaaaagcaaaaattcatattcttcactaattttatct

SEQ ID NO: 79341 - DNA, 1157 bp, Homo sapiens
gtaatcccagaactttgggaggctgaggcatgagcccaagagttcaagacccacctgtctctactgaaaaaaaaaaaaaaaaaattagccggctgtcttagcacgcacctgtagtcccacctactggggaggctcacaagggaggatcgcttgagtccaggagtttgaggctgcagtgagctgtcattgcgccactgctctctttcctgggtgaccctgtctttaagaaaataaaaaaaacaaaatgaataaactttttttatgaacaggtgtggcaaaacatgttggagatgccctcaaagaacatgcttccagatcatctcgaaagatttgcactatcggaatagctccatggggagtgattgaaaacagaaatgatcttgttgggagagatgtaagaattatttttaaaatttcttatgtttgaaattatatgtaaacaaaattatagtaagaatagtgccagtttaaaatatttatgattatattatacttttcaaattaagtttaaaaggtattttcctgaggtttacttctgaatttttggaaatgcataaatataaataattcataactataaataattaagttcataaatataaatgctgttacagtgttggcacattttgctttcagtcttttatgtgtaaaattatttcacattttccatataagctagtctttgtaattaaatttttaatgactacatgacatgagaattaattttattctcactaagactagggaataggagttaaatgctagtgttttgtttgaataggttaaagacatgtgaattggttatagatatttatcaacactgttaaaaagaattactggctgggcgcagtggctcacacctgtaatcccagcactttggaggctgaggcgggctgatcactggagatcaggagttcacgaccagcctggccaacatggtgaaaccccgtctctactaaaaatacaaaaattaactgggtgtagtggcctgtgcctcctagctacttgggaggctgaggcgggagaattgcttgaaactggaaggcagaggttgcagtgagctgaaattgagccactgcattccagcctaggtgacaaagcaaaactccatctcatacatacatacatacatacatacatacaattactgaattata

SEQ ID NO: 79342 - DNA, 1145 bp, Homo sapiens
aaaacgcaacactttagagcaggatttggcaaactatagcctgtgtgccaaatccagcccaaaccttgaataaagatttactggaacattcacttatttactgtattagtctgttttcatactgctataaagaactgcccgagacttggtaatttataaaggaaagaggtttaattgacccacagttcagcatgactagggagcctcaggaaatttataatcatggtggaaggtgaaggggaagcaaggcaccttcttacacaaagtggcaggaaggagaagtgccacgcgaagagggaagagccccttataaagccatcagatcttgggagaactcagtcactatcaccagaacagcattggggaaaccgcccccatgattcagttacttccacctggtctctcccgtaaaacctggggattatagggattacaattcaagatcagatttgagtggggatgcaaagcttaaccatatcagtttatatattgtctatggctatttttgtgctgtaacagcagaggtgaatagttgtgacagagatggtataccctataaagcttatactgtttagccttttagaaaaaggtttttgaccctactgtagagcaaagcattatttccatcactttccttctagtggtaaattgatacaagaatggcaatccattgcctcagcagcagtaagaagtagctttcaaaaattaatttgtaacatactactgtcttttattctatatcttccctatcacatatacaggttgaatataaagagggcagattactttcattgtctaaaataaaacatttaagtcagcttgcaaacatctaattcattatcagcaacttttttttttttttttttgagacagagtcttgctgtcacccaggctggagtgcagtggtgccatctcagctcactgcaacctccacctcccgggttcaagtgattctcatgtgtcagcctcccaagtagctgggattacaggtgcccgtcaccacacgtggctaagttttgtatttttactagagatggggtttcactatgttggtcaagctggtcttgaacttctgacctcaggtgatccgcccgcctaggcctcccaaagtactggggttacaggtgtgagccactgcacctggc

SEQ ID NO: 79343 - DNA, 1021 bp, Homo sapiens
actacaggtgtatgccaccacacttgcctaattttttaaaattttttgtcaagtcagggtcttgctgtgtttcttaggatggtcttgaacttttgacctcaaggtcctccagccatggcctcccacagtgttgggattacccgcgtgagccacagccggtgtaaatactatttctgttatatgcctatgccatgttttgtagatgcctcatgttaaatttagatgatgaattcatcttagactaattatactatttcagtgctatgatgaaggtattaatatatagatatcctaaaatcaaaaagcttatttttatacttatataaaatataaaaattttaaagcttatatttgtcggttcattcacttttaattccattttttcattaactctaattttttgaagggtgttttaatctcacctttttcttttaggtgtttttgtggtcgcttggtcaagcaacatgcttgttttactgcaagtcttgccatgaaatactcagatgtgaaattgggtgaccattttaatcaggcaatagaagaatggtctgtggaaaagcatacagaacagagcccaacggatgcttatggagtcataaattttcaagggggttctcattcctacagagctaaggtatgtcacatattggatttttcttcatttatgttgttatttaaataataaacatcacaatttgtgtagcaatattgacaaaaagttggtctcagtaatttatttgtatattttaaagtacaaaggtgcatacaaatatagaattgtatctttctggtggattgaacctttcatcattataaaatgtgttttgtttcttgtcatttttcttgacatggtttgctttttctgcaatcagtgtagttaagccatctttcttccttttcggttttaaccttttatgtttaagagatgtcttttaattgtttttaaaaatgttgtctgctgtgtatttaagtttaaatttaccattatgttattagttatctatttgtctcacttttttct

SEQ ID NO: 79344 - DNA, 1546 bp, Homo sapiens
tgctgacaatagtgaattttatgtttttggttactggcatttgttgtattccactagcgagttttagacttgctatagcatgcaattagattactttggatcagtttgatcctttcaggtcttgctcttaaactttgtcagggcatgggctgtctaggtctgatttttttgtttttttttgttttttttgagacccagtcttgctgtgttgcccatcctggagtgcagtggcacgatctcggctcaccacaacctctgcctcccaggttcaagcgattctcctgcctcagcctcctgagaagctgggactacaagcgtacgccaccatgcctagttaatttttatatttttaggagagacagagtttcaccatattggtcaggctggtctagagctcctgacctcaggtgatccatccaccttggcttcccaaggtgctgggattataggcatgagccaccgtgcctggtctgtctaggtctaatttagtccttctaatttaatgatactttttttgaggaccctgtcataagccttgtgtgttatgagatctctactctggctggtgggaacataaagtgttccctgccctttatgagcttcagaaattgtttcggctattgctgtccagtagcttttaactttgccttaagtagttattctttttttttttttttttttttttttttttgagacaaagtctcactctttcacccaggctggagtgcagtggcccaatctctgctcactgtggtctgcgcctcccaggttcaagtgattctcctgcctcagcctcctgagtagctgggattacaggcacgcgccaccatgcccagctaattttttgtatttttagtagagacggttcaccatgttggccaggatggtatcgaactcctgacctcaggtaatctgcccgtctcggcctcccaaagtgctgggattacaggtgtgagccactgtacctggccaagtagttattcttccacatgcttaaggagacccttctgcagatacttggaactttctcgttgtagctccctcctctttttgttttctacctcacaaactctagctgccttggcttcctcaaactctcatctgatttttaagattatatcaaatcaatgagactgcccagctccactaggttcctacttatggtgttatagtccagtatgtgcttctgggtagaaagccatctgtctttgtaccccagcctcagacaccattgatcacccttttgtcactatatagattagttcacggtttcttgaattttgtatacgtggaatcatacaaatatataatcattggtgtctaggttctttcactcagtatgatgattttgagatttatccattctgtagtattattagtggttcattcacttctctttattattggatagtattttttctttctttctttcttttttttttttttgagttggggtcttgcttgttctgtcgtccaggatggagcacagtggtgtgaccaaggctaactgcagccctgacgggctcaaccaagcctcccaccttag

SEQ ID NO: 79345 - DNA, 1035 bp, Homo sapiens
gactgtctgccaggcgcggtggctcacacctgtaatcctagcactttgggaggccgaggcaggtggatcacaaggtcaggagatcgagaccatcctggctaacacagtgaaatcccatctctagtaaaaatgcaaaaaaattagccgggcatggtggcaggagcctgtagtcccagctacttgggaggctgaggcaggagagtggtgtgaacccgggaggcggagcttgcagtgagctgagattgcgccattggactccagcctgggcaacagagcgagactctgtctcaaaaaaaaaaaaaaaaattgagactgtcagttaaaaaatagttatttgaattataaatcaaggtatacgtgaactataatatctactgaaaaattaaactaggtatataattttttttgttttgtattttatgtattttatatactttaaaatcagaaagtttttcacctgaaataatttatttacctttttgtgttcaatagatgccttccaggatgtcaaatttgtcagcaactcgtcaggtaagtttaacataactataccgcacaaatttcggaaaataaataaaactaatctattagaaatatgagttagaacacagtggcatgaaactcacatgctattatatttgatgggtactttacctagacttggaaggtgaagggtcagtcaaggctgtttgaaactcaggtgaagctacctaagaagagttgtaaagttgtgtctgttgagcagaagttgaaggacaggaattttaggcagcgagagcagtgtatgggaaggcctgatagtgaaagacatcatggttctgtcaggaaactgcagaatgtaagatggagatttgagagatttgggcctggaaaaatgagagtttcagttactctacaaggctttttgttgcacatgcttttgatttcatgttaaaaggatattgtacaggcaattaataacatgctatattagtattattattattttgagacggagtcttgctctgttacccaggctggagtgcagtggcacaa

SEQ ID NO: 79346 - DNA, 1032 bp, Homo sapiens
gtctcgaactcctgacctcaagtgatccacccaccttggccccccaaagtgctgggattacaagcgtgagccaccgcccggtcatgcattttattttgacaagtgcagagacacatactctggggcaatccttagtagattagaaaagtcattaaatagatttctggatgggtgtaactctttgttaaaagcagcaggaaaagactgggcatggtggctcttgcctgtaatcccagtgctttgggaggctgaggcgggaggattgcttgaagctaggagtttgagaccagcctggccaacgtagataaccccacctctactaaaaatataaaaatcagctggacgtgatggtgtgcgcctgtaatcccagctccttgtgagactggggcatgagaattggttgaatccaggagatggaggttgcagtgactccagattgcgccactgcaccccagcctgggtgacaaaacaagactctgtctcaaaaaaaaaaaaaaatatatatatatatatatatatatatattatatatatacacatatatataatatatatatatataaatgaaataaaacctgtagaaacctatcatgaatgtatcaacaaaagtatcaacaccctgctcactgatagataatgggttgatatggcttactcgcagtgtgaacgtccaagcgtccaagttttctgttttgttttttttggatagtgttttgctctgttgcccatgtcagagtgcagtgacatcatcatggcttactgtattcccaacctcctaggctcaagtgatcctgccacttcagcctcccaagtacctaaaatgacaggcccataccaccaacctggctaattaaaaaatttttttgactgggtgcggtggttaatgcctgtaatcccagcactttggaaggctgaggcgggtggatcaccaggtcaagagatcgagaccatcctggccaacatggtgaaaccccatctctactaaaaatacaaaaattagccgggcgtggtggcacgcacctgtagtcccag

SEQ ID NO: 79347 - DNA, 1030 bp, Homo sapiens
taaagtctgtgaaacactgtttacccctcttactatcatataaacatgtcaataacataacaccttaactatccagctgccagacttctggaaaccttaacctttggaaacaaagctccttgtggaaagtgagcaaaaagcttttgagctaagtcatcaataatatagcaaccctgagacagagttcactgattgaaaaatgtgtgcaaagtgaaatttaacaggcttagttttctgctttctgctggcagtttggtagtatgctggagataacaggaggaaagttacctgagaagcagactattactgttaggaggacactggagaaacataattagactagaaagatagggctatacattagcctttactatatgaaatgatagtcttcctagtctaatttatcatacccagtacccggaagatactctggactaagagaagtgtgtaataggctttaggcacatttttgcattagctaatgtgtcggcatttagctgtggccattgctctgaatgctttgtgtgtgtgtgtgtgtgtgtgtgtgtgtatttatttatttttgagacgaagtcttgctcggtcatccaggctgaagtgcagtggcgtgatcttggctcactgcaacctctgcctcccgggttcaagtgattctcctgcctcagcctcctgagtagctgggattacaggcatgtgctaccatgcccggctaatttttgtatttttggtagagacggagtttcaccatgttggtcaggctggtctcgaactcctgacctcgtgatctgcccgccttggcctcccaaagtgctgggattacaggcatgagccacctcgcccgacactttacatatattaatcccgcaggaaaattctgtgatgtcaatactgttttctccattatttatatataaagagcagagaatcaaaaatcacttgccaacggtcacaaggctaataagtggtagagtaggtgttgacctgccaaactacagaaacttggagaaggcttttgatattcagggacatg

SEQ ID NO: 79348 - DNA, 1023 bp, Homo sapiens
taaaaatgttcattgggagaaaaattatttttaaaactaaatttttatagtagtcctccattactggcaattaaggagcaacccacaaaatgtcattatgtggttctttgattaggcataaaaagtattgcaaacagcttttctattcctttggaatatgaatctttttaatgtctaaagttaacctgcaacattttctagtaggacaagtcaatgtaaattaggtaatttttgcctgttttataccttctgttgcattttgttcaaatgaaaacattttttaaaacatgattgaatttttacttctcagataattggtttgagtgtggaatttcttttttaacactttgatatgtaagttagtgtaaattaatacttttataacactactaggctttatatttttatggaatgttttaaaatttgaaatttttgaagtgttaatttagcagtactttatcattatgtgccaatactgacaagaaaaacaattttttatgtatttaatatactatggtattcaataaattctattttaaaataaaatttgaatttgttttattttgaatgaggaaactaattgaaaatgaactaacagtgtgctagatagatcatgttcatataacacaaaaatggtaataattgcttaagaaattatgtagctatttaggttttacaaattatccttaaaacctagattctggccgggcacggtggctcacacctgtaatcccaacactttgggaggccgaggtgggcggatcacgaggtcaagagatggagaccatcctggccaacatggtgaaaccccgtctctactaaaaatacaaaaattagctggacgtggtggcatgcgcctgtagtcctggctactcaggaggctgaggcaggagaatcacttgagctgaggcaggagaatcacttgagcccgggaggtggaggttgcagtgaccgagatcgtgtcactgcacttcagcctggcgacagagcaagactctgtctcaaaaaaaaaaaaaaaaatag

SEQ ID NO: 79349 - DNA, 1965 bp, Homo sapiens
tgtcccagagtcagcaggtattctcacagtgactcatgaggccatttttagttttcccatttgtatgattggacactgcctggaatagtgtcctggaataagtgtcaggaatatcttccttttgttctggagttctcactgccatgaagggcagtattcatattgggaaatggagataacggaagatccagagaacacaaattggctttgagtcatgtgattaggcttcctgagaggttcagtgtcaccctgactatctccttagaagtgtggatgttgaaccagaacagtgctccagaaggagtgctcagtttcatagagcaatctgtgttttttagaaaaagaatccttttgctaatgtagtgaatattgggggcaagttgaaattttgcatttcctaacgtcttttatttatgcctagatgatggaccatttggattgtgcaacaaatgaagaaaaccctgtgatatctggtgaacagattgtccagcaataatattatgtggaactgctataatgtgtcattgattttctacaaatagacttcgactttttaaattgacttttgaattgacaatctgaaagagtcttcaatgatatgcttgcaaaaatatatttttatgagctggtactgacagttacatcataaataactaaaacgctttgcttttaatgttaaagttgtgccttcacattaaataaaacatatggtctgtgtagtttccgagatgtactatatacagtatatttttctaaaaaaaaatgccttgacccacccctatacttttttttaacgaaatctgtttctttcagctctgatggtagatacaagtagttactatttctgaatgggttttactgtaaagaattatgcaaattggccaggcgcggtggctcacgcctgtaatcccaacactttgggaggccaaggcgggcggatcacgaggtcaggagatcgagaccatcctggctaacacggtgaaacccctctctactaaaaataccaaaaattagctgggcgtggtggagggtgcctgtagtcccagctactgggaaggctgagacaggagaatggcgtgaacccgggaagtggagcttgcagtgagccaagatcacgccactgcactccagcctgggcgacagagtgagactccatcccaaaaaaaaagatttatgcaaattatatctgctctgtagaaataactgtttaacaccatgcaagaaggcggttcaacggtgaaaatttggaccttatatcactgcagaggttagaaatacataattttggaaatataagtgcatatttttgtagtatttttttaaacccaatcctttcataaacttgagaactgaaattacttcagactgcacgtgtattatattaagaacatttttccagatatagagaaacataatatatagaactagtcactaaaaggagacagacactgaaatctagttttcattggtttgacagccttttttttttaaatgtagcttaaatttcagtactaacattcagtttcactttggtatttctgatctttgcaatttggttctgttaatgttaaggtttgattttttaaaaaaattatttttcttaagaaattatgtattaatacatatggctcatcgttgaatacagcattcctaacattatcccacattcccccactcccacccgttatctttttttcttcctgatgcccaccccttttcccataggtaatgattcttaatcttggtggaggatgtacaaagtgcggttcagagaaaagaattggcaacaacagcaagagacttggtgttagtctcagtttaattacaatacaaggaagagttgagtaatttgccgcatctcaagaccttgtatctcagttttctttttttttttttttttttttttgagacggagtctcgctctgtcgcccaggctggagtgcagtggcgggatctcggctcact

SEQ ID NO: 79350 - DNA, 1023 bp, Homo sapiens
catcttatgtttcatgtagtgaactgcttaatgttatctgtcttgatttggcttttgtttttttccccttagaattgctacaaactagtgaccttaaatctaggggatatctttggcaattagaagacctcaaaatggttttgggtcttgaaatggcttgtagagtatcagcaggttttttatttttttattttttttatttttttgagacagggtctctctctctattgcccaggctgaagtgcagtggcgcgatcttgggtcagcaaagcctctgcctctcaggttcaagcaattctcccacctcagtctcccgagtaggtttgggattacaggcgcaccaccacgcttggctaatttttgtatttttagtagagacagggtttcaccatgttggccaggctggtcccgaactcctgacctcgtgatccacctgcatcggcctcccaaagtgctgagattacaggcgtgagccaccgcgcccggcccaggttttgattttgtaagctgtctccattagttgagacagttgtcagccaaaagccttagctcacgttgtattctttctgcctggcaagtcaagagaccctgtttcaagatgattccaccctcttgttcttcttccaaaaaacactaaagccttcagaaccacttttcaaaaataggaacatttatcttgctgatctttccttcttctaattcttgatgaaggaaaggaaaaaagtgcatcgcaatactgaaatttaatcactagtctaaaagtctttaacagtcttcacaaaggcattaaatacttttttctatttttagtaattgtatttgagttgctgaaacactgaaagcatttaaacagtttcttcatccttcatttccaaatataagacaattttttatgagaatataggcagagctgaagtgaccatttgagaaaagtttaactggtaatttctttttttttttttggtcggagtctcgctctgtcacccaggctggagcgcagtagcacgatctcggctcactgca

SEQ ID NO: 79351 - DNA, 1033 bp, Homo sapiens
accgaggctggagtgcagtggcacgatctcagctcactgcaacctctgcctcctgggttcaagtgattctcctgcctcagcctcctgagtagctgggtttataggcacgtgccaccatgcccggctaatttttgtagtcttagtagagacggggtttcaccatgttggccaggctggtctcgaactcttgacctcgtgatccgccccgcctcagtctcccaaagtgctgggattacaggcgtgagccaccaggcccaacccagcacatttctttggttcggtgattttttttaaaaaaataagataaagaagataagggttttaatatgtagaataaaactatacatagtattaaccataagatatctttttaaaagtaatatttaaatgtatattcatatatttatttgcacttgaaaaacaatttaatgccttcatttacatttaggaagattgacctttaattttgtttctttctttgacagtcatgtgtgatacttctaggccttctcctcctctatgatgtattttttgttttcataacaccattcatcacaaaggtatgaccatatttttgaaatgggtgaagaaacatgctaaaaaatgatcatcttaaatctgctcctagattattaattttgcagatgtttaccactgagtgaattctaattctcttaaaagaactgtcattgaaattggccttttaactttcaagcttttaatccattttgttagattttaaaatgtctcttgactgatataaatatgagaatatctgtacttttcttccctttttaaagtattttttcttatgagctaaatgtttactgtaggcaatatagacaataaaaaaaataaaatatcatttctgaagccctagtttgagactaagaaagagcagcacgctggaaatcggaaggcctagaatgtagctctgtaaccttgcaaccataggcaagttacttagccctttctgcttgcatttactaacgcgttgaatgagggagtactgctagctattcatcttccacct

SEQ ID NO: 79352 - DNA, 1023 bp, Homo sapiens
agctatttggatctgtgttaacactggtattttgttaacagctgttttctagagcgagacgtgttaatgcacttatgtctgatatatgttcttctgaggtagccttttcaactttttcttagtgtaataatattcattattctactaggacagtaaaattaccaaatatagagtatatgaggggttttgttgttatgcttgctgtttaataattgaatagtcagaaatcagccaggcatggtggtgtgcatgcctttagtcccagctacttgggaagctgagacatgaaaatcacttgaacccaggaggtgaaggttgcagttagccgagatcatgccactgcactccagcctgggtgacagagtgagaatctgtcttaaaaaaaaaaaaggaatagtcaaatcatagcaattaaatgatattacctcagtgatctatgtcttttgaaaggcttcatctaaacattgataaagcaatagagtaatattttttgattttaggtgggcttggattttacaggatatcttggggattgctttctgtctgaatttaattaaaacactgaagttgcccaacttcaaggtaatgtatacaatactactttgctagttaaaataaatttttaaaagacaactttattaaggcataatttacctacaattaaatgcgccaatttttggcgtactgtttatgaaaattttatgaatgtgtaactttataaccactatcccagtgaagttgtagaacatttctcatctcttccaaaagctctaccatggcctttgcaatcagtccttaacccccaggcccagacaaccactgatttgctagctaaactattgtttttttttctttcttttatttgtataaatttaaggggttcaagtgtagttttattacatggatatgttgggtagtgatgaggcttatagtataaccatcactcgactaatgtgttttgtccccattaagtaatttctcatccctcaccccttctaactcttccaccatgccgagtatccc

SEQ ID NO: 79353 - DNA, 1005 bp, Homo sapiens
ttataatttgaaacaatacaaaagtaggagtattatttgaaacctatatagtccaatatacattggacctacaggtgtttaaatttaaatttaagtaaaattaaataaaattaaaaattgagtttttcattcttattagccacatttcaagtgctcaatagccacatatgactagtagctactatattggacagcacagatatagtacattattcatcatcacagaaaattatattggactgataaacattttattacgtctcatttgttttacttaaaatcaagactttcaaaattgatatttcagtcacttcttatgactgtggttaatatttgctacttcttatatcaagtgaacattgtacttcatctgcagtgttaactattttaatctgttttttaggattgcatgtcgtggcaaaaacatggaagtgagacttatttttctctctggactgtgcatagcagtagctgttgtttgggctgtgtttcgaaatgaagacaggtatgaatactcaatgtatttgcttttagattaaggatgaattgtttcctatcttgccctgatacttattatgattattatggaatttttttgcttctatgccagaacaccagtcttgtaatgaactacttcttaaataagcagatcttatgttaatgcatttgaactcatatagagaaggaaatatgaattatgattttaacacatacactgaaatagactttaaaaatatacttaatttcacgcctgtaatcccagcactttgggaggccgaggcaggcggatcacctgaggtcgggagtttgagaccagcctgaccaacatggagaaaccccgtctctactaaaaatacaaaaaattagccaggcgtggtagtgcatgcctgtaatcccagctactcgggaggctgaggcaggagaatcgcttgaacccgggaggcggaggttgcagtgagcggaggttgcagtgagccaagatcgcgccattgcactccagcctgg

SEQ ID NO: 79354 - DNA, 1040 bp, Homo sapiens
cctgacctcatgatccgcccgcctcagcctcccaaagtgctgggattacaggcatgagccatcatgctcggccaacgtcatctctttcaacaattttgcctgcagaaaaaaatgtttcaaaagttagtggttgaaaacagatcatctctggagagtagcatttaagaggtttttactttctagattaaatatttctttgtagggtacagtttttaaaaagtacattacttgctataacaagatagcttagaaaaataataaaataaaaatattttaataaataaaaatacattgttttcttcagaaacagatttaaattggtgttagagataaattttttaaataactgtacttggctaagatttgctaaagttcctgtgtgtttgtacagggaaaacttgaaagcagtgacaactgaagatagagaaatgaggaaaaagaaggaagaatatttaacttttagtcctcttacagttgtaatatttgtggtcatctgctgtgttatgatggtcttactttatttcttctacaaatggttgggtaagaagtcatattttatgtttgctactgttaacatacattcttttcactgactattactagatttatcttttcctttaagccattctacctggaaaacgtatgtgaataatttggttaatattaatttttttttaattatcagagtgttaggtctctgttactctgagataaaaatattcagattaaaaatacaatatgtgccaggagcagtgactcacacctgtaatcccagcactttgggaggccaaagtggacagatcacctgaggttgggagtttgagaccagcctgaccaacatggagaaactccatctatactgaaaatacagaaattagctgggtgtggtggcacgtgcctgtaatcccaactacttgagaggctgagtcaggagaatcgctcgaacctgggaggtggagtttgcagtgagccgacattgcgccattgcactccagcctgggcaacaagagcgaaactccgtcttaaaaaaaaaaaaaaaa

SEQ ID NO: 79355 - DNA, 1006 bp, Homo sapiens
gggtgagacttcgtctctgaaaaaaaaaaatagtgaagaaggctgtgtacaatggctgatacctgtaaccctagcactttgggatgtcaagatgggaggatcatttgagaccaagtggtcaagaccaatctggtcagcatagtgacaccctgtctctatttaaaaagaaaaaagaaaaaatattgaagaagtgagaatgactgataattatgttttattgtgtgaaccattgtcatgtacggttgttaataaataattattgatttttctcaagtatttttctctctgggaaaatagggaattttaaaatacttaattctaagcctaaatatttctaattcaaaagatattgtcttaaaccaatattgataaccaaaggcagtatttataactgaatgcatttaggatgaaatagatttttaacatgttaaaaagacatttcttattttcagacttccattagtttgatgaatctgacttccacaccactatgcaacctttctgatattcctcctgttggcataaagagcaaagcagttgtggttccatggggaagctgccattttcttgaaaaagccagaattgcacagaaaggaggtgctgaagcaatgttagttgtcaataacagtgtcctagtaagttataaaaacaatcatatcttattttgagttcatgatgtgaaatttcacaaaaatggaattaacgtctttgtgtgtggtttagaggctgagttttgaatgatctgatggcaagattctttgtaaataaataatcaagatctaataggcatttacttggaaagtttttcagtttttctattcctagagcagacaagactttgttaggaacaaatatatatatatgcatatatatagagatatatatgtattacacatatgtaatatgaatatatcataaatgctatatatattatagcatttatcagtttaagttcatgttaaaaggattcaattttgagaacttagagtgttaagaaagaatacct

SEQ ID NO: 79356 - DNA, 1048 bp, Homo sapiens
agcagcggcggtccagtcgtagcccggccgcccgcgcctgtccggtccggtccggccacggaggcagcgcagcggcgggactccgagcctaccccgccgagtgagctgcgccgcaccgtgccgtcccacccggcacccaccagtccgatggggccgcagcggcggctgtcccctgccggggccgccctactctggggcttcctgctccagctggtaagggggcgggaaggcgcgcaggcctcccaggggctgggcggggccggggccaaggccggggctcccttcccctactcctcgcccggcctcccctctgcccgcacctccgcggcctgctctcgcactcctctttcctcccctcctctttccattactcatctctttccttccaccctcctcttttccaccctctttcccccaactttcccgccccccactcggttcccgcccattgaagtctggcgaaatacctaccgcaaaaagatcagaggagccccttaggttgcgttgaccttgatgcttctcgatagttgctcactgtcccagcatatttaaaattgacctctgggttttattgtctaagcctttcttaccgctttttacccttgggaagaaaaaaaaattatacaaggcgccagtatgtttagcggttcgaggactgcactttaattgcactaacacggatgtctttttaaaattcccttcccccactgtagctcctgcttcgccttagggctcatttgattctgttatgagggttttttttttttggagggggggttttaatagcagtaatttaaaataacttttaaaagaagacaccaaaatgtaatgcttttagtggttttcagttttctgcctaatttaaagggatgggtggggagcgtcggttaaatgtaagtaagaaatatgtgttcatagatttgttttcatagtcacagagaagtaatagtgttttaaaattcagcctcaagtaattcgagcttcagtgtgggagtggggtgtcaggaacccggtgtttcagtttttgtttctagtgacttttacttag

SEQ ID NO: 79357 - DNA, 1047 bp, Homo sapiens
cctactgtaaatcaaggagcatcatctgtatgtaacaccttgctcttagcagtatagaaggactactgatgcaattaattctgtcatatgatctacgtagtttttgaagttttgattctcgttagtatattagtacagggctgggcgcggtggagtatagcctcaggcttcaacagtactatcacttctttggaatgttatttagtttctttttaacttgattcatttttgatcccttggtcagttcccataatgctctggatcagggcctgcttgaatattaaattcccattgtttccttctgggaaggtctctgcttatccaatctggagcctatctttcttccttgtcctggatctggtagactattgagaaaagtccttacaaagatttcctgggaactggatttttaaaatgagtgcatgtgggaaaatactctccaagtgcaaaggggactctgtttttacctctacttatatttccagctcctcggggaaaataaaagtattacaggtcaaatctctttacaagtagctcaacttgactgtctaaatatgtggtatggagtagagttttatttcatggattactgcttgcactaggttagacataaactgggctgtggagaacttttggttaaatagagattttcattgcaaaggtatttgttgtagaggaatttacccagtaaacagatatcttccagctaatgtttttaccaggctgattcagaccgggtagcaggagcgggaaaacactgtggacacagtctgctggctagcggtcaaggcagaggcaagtctggcacaggcaaaagtctgtgtgaaatgtggacctgagtcatgaaaggaggggaagaaactagtatgtgtcattctgaaaaagctcttcttagggctctttgggctgtaaccactgcctctctccatagagagtcacagggcctcacttggctcttcctgctgcattttcagacttaaaaggaagccaccggccgggcgtggtggctcatgcctgtaatcccagcactttgggaggccgaagcgg

SEQ ID NO: 79358 - DNA, 1113 bp, Homo sapiens
ccacccccgcggtctcttgcgccctctggtggcctctcgcgagaacgacgctgaacttgttcaggtgggacgccaataaagatttcttattcaaaaaacaggaagtgcctacggaggccgggccggcagcggcggccgggcatgaagccgggcggctacgggatcgcgggcggcggcggcatcgcgggcggcggcggcgatgagcgacatagtggagaagacgctgacggcgctgccgggactctttctgcagaaccagcccggtggtgggcccgcggccgccaaggcgtccttctcctcgaggctgggcagccttgtccgcggcatcacagccctcacctccaagcacgtaggtgcccgccggcccgggagctcagggacatcggagtgaggcccccgcgccaggaggccctggccgggcggcgagacttcagggcctctggggttagccctccggcggggctcaggggctgctgtgtcggttcgtcctttcgtctgcctggaagcttcactttcctgctgggactgacagcagggaagccgagtttccacagttagttctgacactgactctttgatcgggggcacatctctgtaacctctgagcctccgtgtgttttctcaacgttgtggtggaaaagtactgatacataattcataggttttttgtttgttttgaggattgggtgagatgtcaagcgtgtgaaaatacctagtgcgatggaagtgtcagacattatttaccttccacaaagttttttttccctactcagtttccttctctcccccggtgccttcaactgaacaacagttcagatgtcgcatacctgaagagatcctgtgagcctcttgttgaatatctttggggagcttgaggttcttgggttacaacaacgtgttgggcaaagaaaaagcacagttctctcaaaatgtaaaatttgctaagtctctgcctcaagtgggctttgaaaatgagcagttataaaaattcttaaacttttaaaatttttaaatttttattgacggagtctctctctgtcgcccaggctggagtgcaatggtgcgatctcgatctcggctcgctggagccttaaggttttaaaaattttaatt

SEQ ID NO: 79359 - DNA, 1057 bp, Homo sapiens
gaaccactgcgcctggtcaatagagctgatattaagaagtctgtttaaccttattagtttaatggtcagaaatgcttctttatagaataaaactgaaatttattaaagtaattttaaatatcttgttcttagcttctcaaatgttagctatgaggattagcagtgtcttaaaaaaattttctctctatagtcaacctttagggctgttaggaaaaattcttttaagcaattaaatattctattcataaatgttcaactttatatcagaatctcaagaaggaagtattttagaatagtaaaggttagaacacgttctttattcagagaagttgataatgtcatgtcgttaaggactagcattattcataagttatattgctctgtgctatcagatgacggggtgaaggtgacagatgtcttggtaaacattctgagactgagtgcacacaatattccacttgtggaaccctactccgcccaaaacacacttagatcttttaaacttgttatattctttcctccaagtagaatgtcctttaacattctctttctctctttccatattccaaatcaaattttatttctcctgtgatcactcaggtggctcctaccatctgttaccttttgttatcttttcatatattaatgtcttagctcctgaactaattttaagatccctaaaggcaggaatttttttttcgaggcttcaaattagtttttattagtaatttgcttttcttaaaactttgatttttcttaaatattatacaaatatggaatgtaagctcttccagtcatattcacgattttcagttgtcatcccaaaccttgaaaattcacctgtcagaattttcatatgttaaagtctttctaatggtgttgctctttttagcttctgaaagactgtatttgtagtttttttctcttctttggtttggttttgatcaaagaaggaaaacatcaaaaaggaaatttcaaccattgttgagcattttgagaaaagtgaaaaccaacttcatccttttcgtttctaaggaaaaatgtgttagatgtgaat

SEQ ID NO: 79360 - DNA, 1163 bp, Homo sapiens
gtgggagggatcgcttgagtctgggcgtttgagaccagcctgggtaacatagtgagaccctatctctacaaaaaaaaaaaaaaaaaaaaattagctcggtgtgatggtgcatgccttggtcccagctacttgggaggctgaggtgaaggattgcttgagcttggaaggtagaggctgcagtgagttttgatcgtgccactgccttccaacctgagtgatggagtgagactctgtctcaggaaacgaaacaaaacaaatgctttctgggattttcctcatctctttcttggcccgggtcagatttgtttcaactcttaagattgtgagagtaatagctctgctcctccgacctctagtgaaggtgttggaattggtcatgctactacctcttgattgtaagaattggaagtttccgttttctcctgttccatggtagacacagacagcatggatgctgggtaatgatggttatagttaacattagaatccctgatgaaaaggctgaaagaattgagaagaacgaaaaacaatgagcatggagtcagggaatcaggtcaagatagactatgtggagaggcagtaaaatatgggggtttaaaatatggactgacttcaactgtctgggtttgagtcctggctccaccatgtgatagattggaccttgagaaattgcctttttttgggtctctttttttttttttgagaccgagtcttgctctgtcgtctggtctggagtgcagtggcgtgatcttggctcactgcaagctctgcctcctgggttcatgccattctcctgcctcagcctcccgagtagctgggactacaggtgcccgccaccacgcctggctaattttttgtatttttagtagagacggggtttcaccgtgttagccaggatggtctcgatctcctaacctcgtgattcacccacctcggcctcccaaagtgctgggataacaggcgtgagccaccacgcccagtcttgggtctcattatatagggataaaaaggcctatctcattgtgtggttatgaggattaaatgaagtaatgcttataaagtacttgacccatagtgactgtctaattaaagtgttagttattatcaatgtgaagcctgactgagaaaattccttggagtatctagattatatgtacatggca

SEQ ID NO: 79361 - DNA, 1110 bp, Homo sapiens
gtgtgtatgcatttgcatgtgcacctacatattatttttattttaaaaactatttccgagttgcttgagagcaagccccttgagattttagttcccttgagagcaaggaccttggctagagttcctgatatgtttctgtcttaagaaaatgtttgctaatcagtgttctgattttatgaatattgttcccttttatatagtagggtacctttgtattctaatgttttagcctagctttacaaagggaccattctccaggcttttgcttctagaaatcaacttaaggtcagaatccatttgcctgtgagctcctgactagcactaattgggctacatcactgttggtattatagtgttacttttttctgtgtttatgaatctcaactactgattgaaacctgcagtgaaaacgtaaggtgatggagcatgtacacacattagaaatgattgtcttaattatattttattttatatcatgccagcctatcctaacgtggagctctagttggagttactggaatttatgttttaaaatcatgaattttatattaatgcatcagatcttattggtctaaaaaagacttactgccatccattgttatcaggaagtaacttgggaggcatttagtgaatttattaaattcattaactcactatcttcctttttcttgccttcatggataaatttggataatacatatatacaaagatgagtaagctagtccttaccttcacagcactcaggtgaccagtaattaggctcagttattaatagagtggaactttcttataatgttatggaacattagaatgttttctccttttttgtctcaactctaatgagattttattttaacataaatcttacattttgttggacattattgctcaatgtagcaaagtaaaaagttataaccggattctaaagtatttaattgaaaaaaccaatttactggaaaagtctgttgtatttatggtcttttatatctatttgaatattttcttgtgttttgtagttttgtgcttcttagatttattaagatttatcttgatcttgttcacaaatgtttcttcatttcatgtggttaagactcatgccagacactggct

SEQ ID NO: 79362 - DNA, 1052 bp, Homo sapiens
tggaagtagggagtaaagaggtaattttcccctctttgtggccagggttcggaggcgtgggtgttagagaaagcctggtggacagtcagaacttccactcctgatcagcgataatgaggccactccctcatagtgtcactggaggccacaaaggaagcagtaatgaggtacccctctctctcccaggcagggtagaatcagttgatactccctccaacaataaccaggagcctctccatccccaggtatcaaaggagacagagtagagagcctggattccattcccattgggtgatacctcctctctcctgccagaataatgtcagtagatacttatttaacttaattaaagtgagagtaaactctattctgagggataaggtgtcagaagaacttcacattttgtttgagcatacataatccaacccaaaatatctatgatgaaactgcagtgtcataaatggtggaacattattaatttttaatttagtaatttatgctttatagcattttaattagtaccaagagagtaaccaagagtactgaagagtaaccaagttccatgttgtatttttaagtttagaaaccctcagttgtggccgggcaaggtggctcatgcctgtaatcccagcactttgggaggctgagttgggcagatcacttgaggttaggagttcaaaaccagcctggccaacatggtgaaaccctgtctctactaaaaatacaaaaattagctggccatgatggtgcacgcttgtactgccagctacttgggaggccaaggcaggagaatcacttgaacctggggggtggaggttgcagactgcatctcaaaaaaaaaaaaagaaattctcagttgtattttacttcaccaccacagagaggagacagcagagtggctgctctttcaattatgaacttatacttagatatttgtagagttggagaataaaatgacttagctctgggtgagaaaataatttaaaaatcaatttaattcattttcagctcaattatgcctaaggaaactaaaaataagtgctgtttttgaa

SEQ ID NO: 79363 - DNA, 1017 bp, Homo sapiens
ggttcaagtgattctcgtgcctcagcctcctgagtagctgggattataggtgtgtgccaccacgcgtggctaatttttgtgtttttagtagaaacggggtttcaccatattggccaggccgatcctgaaatcctgacctcaagtgatctgcctgccttggcctcccaaagtgctgggattacaggtgtgagccactgtgcctggcttatttatttttactaaagtttaagtaacttttctaaaaagtactatgtcagtgtccacaggaatgtctttaaattatgagttgaaggaattaggtccagtcatctgtgtgggttcattaatataatttcgatctgagcatcataccaataggagtcctgaattctggtcccaggtcttcctattagtacaatttcctgttattgtacaatttaagatgcagttgatgttaattaatgatttctcattgttctcttttatatctataaaattaattaatttcctaccaaatagatagaaatattgaaagaattaatgaagatattcataaattgatttgaacttcttggaaggaaaggcttaataatatcatcatcatatatgtctgtatattatatataacatagcatatactatatgttacttatatataatattacttttgtatattacattttaatatatataattatatatattacttataataataatatacttctttccaactttttctttttgtaaatttgcttcaatgtctacttgggtgtctatataaatattccttttaattcttatggaagaaatcattcaatatctttatttcaaatggtatatgggacctagttaagagtaaaaaattctgtttataaaaatagcaaagatttaaaaagaattttttaaataattttagattcaggggatacatgtgtgggtttattacatggacattttatgtaatgctgagatttgggcgtctattgaacccatcacccaaatagtaaacatagtactgggtaggtagtttttcaa

SEQ ID NO: 79364 - DNA, 1035 bp, Homo sapiens
tctttcctaattgagtttttttttagcttccaagggaggtaaaaaggtaaaaataaaggatagttggtctttaatcacctagtaatatgaagacttacagtagacatttaccaaatggtagttgatttattactgtaagtatttgattagatcatcctcaaagtcctttagagtttaaaaatggctattagttccaggcttgaattattgtggtagtgaatggtaactttgacagttttttgctttgttttaaatatgaacctctgttattattttaaaattctagttctcaattttgaaccatatggactctccttttcttcatctggcttcactggacgacagtctcctgctggcatttctcttggttcagatgtatctgggaatagtgctgagacaggactgaaagagtaagttcatttcttattaaaattgaggttatgggagtgcttaaatgtcttttagcgttccatttgccttctgctcctgcctcatatcatcatggtcattatttgcttattttaggataactttcaagaggtctattgtttcagtggttttcacataattttctttttttttaattatactttaagttctagggtacaggttcacaacgtgcaggtttgttacatatgtatacatgtgtgccatgttggtgtgctgcacccattaactcgtcatttacattaggtatatctcctaatactatcccttccccctccccccaccccacaacaggccctggtgtgtgatgttccccttcctgtgtccaagtgttctcaatgttcaattcccacctatgagtgagaacatgcagtgtttggttttttgtccttgcgatagtttgctgagaatgatggtttccagcttcatccgtgtccctacaaaggacatgaactcatccttttttatggctgcatagtattccatggtgtatatgtgccacattttcttaatccagtctatcattgatggacatttgggttggttccaagtctttgctattgtgaatagtgccgcagtaaacatacg

SEQ ID NO: 79365 - DNA, 1032 bp, Homo sapiens
atttacagtagttctatttttgtataacttaagcagttaagtgaaaattaaatgctctgaaatttttaactaagtctggagttctgcagccttaaatcaaatcctttgactggagggtagagggatgttggctataactaaaataaaatctagagatcaaggttttacttctggtatatagaatataatgtgacagttgtttttaaaaggccatgggcattgatatgttttgaaagaatgcctcaagaaagtaactattagcagttatttaagttgacttgattttattatcaacctccttaggacaaatagcttgaagctggaaggtataaagaaattgtgggggaaagaaggctatcttcccaagaaggaaagcaaaactggtgatgaaagtggagctctgcctgttcctcaagagagtataatggagaatgtagatcaagctataactaaaaaggatcaatctcaagttcttacccaatctaaagaggagaaagaaaagcagctgctggcatcatcattatttgttggtctaggatcagaaagtacaatcaacctggtaagtaatcggttctattcctgtaagaatctttgtcatctgtctgtacaaaaaaaactggctctataaaagctcctggctgtcgtctatatgtatagtgaaaagtggcttccccagttcttactcaccatcatttcccagctccagaaccactaatgacacagctttttatattcctgaaagagaaaatgcagttggctcaacttgagtcaggtgttctctgtagcccagtcagtggacaagggtcaggctccaaataaggttacaggtatgaccacagccactctcacccctgtgggtggacggggcagttctcaaagggaagggggatgaataataatcgttcaacagtattgatatatctttgtaaaaagtactcctcaaaattgtattacataaattctattctcccagaacattattcagctctaagaatgatcaataatattgctttgtaaaatgaaaaaatactt

SEQ ID NO: 79366 - DNA, 1048 bp, Homo sapiens
cccgagtagctaggattacaggtgtgtggcaccatgctcagctaattttttgtattttttagtagagatggggtttcaccatattgcctaggcaggtctagaactcctgagcttaagtgatctgcccgcctcagcctcccaaagtgctgggattacaggtgtgaactactgcacctggcctagatttaattctttgagaaaccaccatatcattttcacagcaactgcaccattttatattcccaccagcaatgtaccagggttccagtttctccacgtcttcatcatcatttgttattatctgtttttttctttaatattagccatcctaatgtgtatgaagtatagtatctcactgtggtttcaatttgcagtctccttagtggttagtgatattgagtatcttttcatgtgcttattagccatttgtgtatcttcttggagaaatgtctgtttaactccttttgcattaaatcatttttcacttttgttttgttttaggcaatgaagggctattggcctgtcagctgctcccatccatcccctgcttactgcattgccgagttcatgcagatgtattagccctgtggttcagatcctcctgttctactcttcctgactatttactgtatcagtgtcaaaaggtgatggagggatcctagcagaagccctgctaaattttactccatcaagatcaatggtttacatagataaacttatttaccaaagtaaaaagaactcatggtacttctaatgaaaatggggattattacaagtgtggtttatatgttttctttgtgattcctggtcaagaaagatccccaaaactgtatccctaacctttaactcaggattgtacagtatgtttaggtccctcaaaaagtgacctaagctaatgttataaactgctaatgatttatatatcacttagtgtgtagagggactgaaaatatttattttgttataaataattttatagcacgtttactctagtgctagctaatttgtaataaagccaagtctcagttttctgcattaaatggaaggg

SEQ ID NO: 79367 - DNA, 2191 bp, Homo sapiens
atttcttgcataataggttcctccttttgaatagatcagattcatccccaggctctcagcagtgtcatgatgaaatgagtgtgctgacttcaggggtgtggtggacactggtagctagccttatcagctccctccttattcctacctctgtcagcagcatgcctcgccccttacctaattctgctgtgactctgacagagaggaagtgccttctcactttgcaaaggaatgcagcatgtcacaaaggaggtgctccaattttttgtgtccttacttccctatgtttgcctagttactgaggctaggtcgagtgtgaagcaataggtgtaagatgctgagagcacatggacagctaccagggagatctgttgcttggttacagggtgtattcatgagtggtagctgcagttgtcgtgagagacatgcttggcatacagagctgtctaatgggtgggagacatgtaatggtagatttagggctgggagcatgattttgggtctgcccaaaggaacatggtgtcacttttgttctttctgacccactaaataaaaagtagtgtaacagggtttcactggaatgtttattagaaagtttacactttttatatttttatgattttaaaaacaaacaataatagaaaaacagattttaaggaacttcagagcagtatatattctgtctaaactcactgaatattttaagttgtaaatcaggtgtccaccaacctttatttttgcattgcaggagatgtgactgtaaagtagggagtttttttttttgagacagagtttcacccttgttgcccaggctagagtgtaatggtgcaatctccgctcactgcaacctctgcctcccaggttcaagcgattctcctgcctcagcctccctagtagctgggattacaggcatgcaccaccacacccggctaatttttttatatttttagtagagacaaggtttctccatgttggtcaggctggtctcgaactcccgacctcaggtgatctgcccgcctcagcctcccaaagtgctgggattacaggcgtgagccactgcgcccggccaaattatttttgtgggtagattcattctctttacctaatagtcataatttagtcagtgaagggacaacatctggggtaagagctatggaggaggtgctcagctttgtgagttttgtgccaggcatctttgctgaaaatggagatggcagcaagtgtgaatctgggggaatataagggaagacagaaaagccttaagagtagacggaggaagaagggtaccagaatagtccctgtggaggcaggcagatcagagctcagggtttgaaagtgggcctgagtaagggtcctgctagagaaactgcagatggaagctgagcagttaccaactgctaatgtgccaagtataccaagcacagcatgtgtcctgtagaggagcattattttaaacaatgttctactatcatctaccaaaataattgtggtaaaagtgtagtattttattttttccttttatgtcagcaatattttaaaatattgatctgtttatcttatatttttatggataaatgtagtatttgcctcatgattgtgagccactgagagtgcactgaacctattcacatgtctttaagatgttttgctgtgttaaaattttaggagagaaaaatacaagtgaataattatttaataggcatttattactttattttggagttgaattctgtcatttgaaaaagttcagtaatgtaataaatacaaagtgatctgcactgttttttggtctatgttctttattaactaagtagctgaataataagtaatattatttaaacaataatttggtagacatcagctaaaaagagcaggagcaattagaatgggatgaaaagaatgattttttcattacagcccccaaagaatcttgtctcgttggctaaaagtaaagatattgctatttctctttctgtatgatggtcagagagaactttgtgggcttcagacaagttatagcatggattgtttctcaggatgcctgtccatatctcctgctttcaccttaggctgaccagagcatttaaagcagaacattgtttccatcatgccttcctttgtagatgtctgaagatgccagaaacacagtaaatcaattagaaacttagtgaccaaagaatctgagtgtgctggc

SEQ ID NO: 79368 - DNA, 1197 bp, Homo sapiens
ccaaatctctgtgtatctaaagcccatatacctttgcatcccctgcagcatcttgcacaggggcttgcataaagcagatcattgttttctcagttaggattaggtttggggcaggaaaacaaaaataatatttatttagcaagttagaagtgatttttctcttgccgggcgcagtggctcacgcctgtaatcccagcactttgggaggccaaggcaggccgatcacgaggtcaggagatcaagaccatcctggctaacatggtgaaaccctgtctctactaaaaatacaaaaaaaataataattagccaggcatggtggtggaggcctgtagtcccagctactcgggaggctgagacaggagaatggcgtgaacctgggaggcagagcttgcagtgagctgagaatgtgctattgcactctagcctgggcgatagagtgagactctgtcaaaaaaaaaaaaaaaaagaagtgatttttcccttatgccaaaagaatcctaaaaggagggtagcccaggactgggaaggtggctccttgtgttggggacccatgctccctctgtcttgccacaccagcactcttggcaccctacctcatagtcccatatggctgcctgggtttcagacatcttattctcatttagccagcaaaggatgaaaagggcaaagcatgcattctcttccttaagggaggcttcctaaatgctgcacatgacacttttgcttatagctttttggctagaacttagtcacatggtcatatccagctgcaagagaggctggggaatatagtttttaactgcacatattgccattccttctttctttcttttctttcttcctttttttttttttaagagacagaggtctccccatgttgcccaggctgctctccaactcctgggctcaagcaatgcacccacttcggccttccaaagagttgggattacaggggtgagccaccatacctggccatattgccatttctaataaaattgataggggagactgggagaacagatattcacaacccatacagtgcctctgccacagctactgaaagaaccaaaaatataaaaactcactaagaagtttaaagccctatctaatatatgagattattattacaaaacacttaactcattttagataagttaattgtcctgacttttaggttgaaaacagcccaatttttct

SEQ ID NO: 79369 - DNA, 1043 bp, Homo sapiens
ttatcatttcccacttagataagctcttaggaaagaggcagtgggtgggaaggttgggctttagtgagatcacttgggccaagggagcagaagggccatgtttttgcttttggtcttttcgtaatatatttttaactccttttgttttgcactaggtttggagattgacaggccatggcctaattcattcatttaaaagtgaacatgctaagcagtccatatttcgaaacattggggctggagtcatgcagattgacatcatccagggcaatcggctcttctcctgtggtgcagatggcacgctgaaaaccagggttttgcccaatgcttttaacatccctaacagaattcttgacattctataaagattggggttttatttttatatacatttcagttaaaaggcacactacagtcatcactaggcaattctgctttctaagcagttgtattgaaaacagagaatctctgtgtagaatttgaatatgacccaagctgagtattatctaaacaggttggtggaatgaatgcgcatgtaccttattatgctgacatactaaaaaaaataaaacctagtattgtatgaaggatagctattctttacagcatttagcaaacctgattcagaaaacatttgagattagcaaattagtaacttgaaataatgaaaaggacgtttataccaaattaaggaagaaaatgttgctgatttgggtttttcttcctgttcttaccactgactgaagcatgcctgcagtctcctcctctgttgaatgaaggataatcataaggtgtttgttaggagcgctagaccacctggaaaactttcttagctgtggagcagtgcgcagtgaccagttctctgctgtgagaggccgtttccattctttcctgctgaatatttttcctgttagtgtttatactgagctagtactgtaacttgcaaatgagtgcaaatttaaatgcaatgttttactcacaatttgcacattcacattttttggactgctagtttttctatttaaatatttgccttcatgtta

SEQ ID NO: 79370 - DNA, 1110 bp, Homo sapiens
atcaacccctatagggcaggaatttatgtagcatcttctgcatctgcttatacaaatgggctttaattttatagattaccagttatgtaacttagatttcttaaaactgtatacagataactaatttttattttgaaatagcttttatgttcttgtgtttatgtaatagtcacattaattttgctcttttggctttgtgttgtgtttatttgatgactgttttattcggtttaattttttcttgattttgcaaattcatttttatcatctttaagtggtggagtggccatttcagcttgaaatatttcactgtctttataatttcattccatgcatgtgttttgtgtttgtgacggtgtggtggtatttagtctatagaagaacatgtggagcaggtcaaccaaaactgcatagcagaagattgccacatcaaggtagtattccaagatcttgtatttagctcattctttaaagttcaaggagctaacgcctcatctctgatactaaccatgacctgcccaactggctaactactcagagaactcatagtactcccataccacttcagtggcacaggggaggagatgcttcactgtatctggcttgctctgtcttgcccttggttcttctctttcttgctccctgtcccatcttcacttgtcactttttctgttttaagcatggctgtttcatcttcttgattctgccttttctttccttcccatcaccaaccctaagccattgcatcttcctctcatcagtctcttttattcctttcgaagtatccctctttacaacttttccttatttctgtctcaccacccttacttcaaagggtggtttctttgcggttttctatggctttttactccactctgtgcctcttaatgtatacacattcttattgcagaatatttatgcacttttggaagagctaagagagacatactactgtataaattactaataaaaatatattagccatgttttataattaatcagtatcttaccatcacagtggaaattggggtgattacaggacatcagagaatttaagcaaattttccaaagctagttttcaacacattaaagttactcttaccctttttt

SEQ ID NO: 79371 - DNA, 1002 bp, Homo sapiens
aggatcaacaaagtgtggtatattcgtgcaatggagtgttactcagctataaaaggaatgaagtactaatgcatactataatctgtatgaacttcaaaaataggctaagccaaagaagccagacacaaaaagtctcatattgtctggctccatttatatgaaatatcctgaataggtaaatccatagagacagaaagtagactgtggttgccatgggctagggggagggagaaataaggagtgactgcttatttggtatagtgtttccttttggggtgaggagaatgctttgaaactagatagaggtggtggttgcatgacatgttaaatgtactaaatatcactgaattgtacactttaaaattgttaattttattttatgtaaaatttgcctcaattaaaaagaaataatagtggttcatcctagggtgttagttatggtcagagtgaaaagtgatcatattctgggtatagtttgaggttagagccaatggatttgttgatgaattgtgtctggggtagggaagatagaagagttgagataaaattattttctgtgatggggaggtttaggagaggagcaggttgacttctactttctggccctcccatacccaattcctgaatccttttgctatttcttttgtgtatcactcatatacaacccttcctctactttttaccacccaccatattagtgcaggctgttcttatgtcatcttccatcttcctctctaattgatcagacaagccatacctcattgtgtgactaaaacttaagaggtgttagtgagaattgcccaaaacataagttcccaggttcatagccacagacttgtcctaacctaactctagactgttgttgatattacttccctccatgactcctgtctaccaaaagtaatttactcctcatttacccaaaccttctttgattatttgtttatattgtccttttccattttcccattgaacttctgcccttcttttaaggcacactat

SEQ ID NO: 79372 - DNA, 1045 bp, Homo sapiens
ctgacatacgtcttatgattttatatacccttataggtgtgagctcacttattaatcttttgagttcagcccaagatgaagaccagccaaaactgaacattttgctatgtgaagctgttgttgctgtttacttaagtttattgatacatgctcttgccacaaattcctccagtgaattatttcggcttgcagcccacccattaaataatcgaatgtgggctgctgtttttggaggcggtgtaaaacttgttgtgaaacctcgaagacaatcagaaaatatttcaggtaagatacgtttgataccagtaatgtatgtaaatgttaatcattttgaatgttaaaattttttttaatgtttcaagaaatttcactttgaaaataagcgatgcttaaagtataatcactcttgttatgacagcaaataattaaacccatgatataataaacatatagtttgttacttttatttttatagaaataacatttttgaggttgataaagcaggacatgtttgaagaagattaaaaatagaggaaaggtaaaggtaaatacagaaaaaatgttaaggaacaaagtcatacaaaaagagtagttcctaagacaataaaatgaaaaaaaaaaagcaaaaacaaaacggatagttcttaattacagaaagaagaaaatttaagtaagtgttcaaaatctttagcgcataccagcagttggcttcagattaaatgtatggtcatgtgcaagatagccattccaatcatacacacagtttttaaattctatttttttattctccaaaataggttcctttagtcttcaatgtgatagtattattccattttccttgtgtgtttcttcttccctcatggccagaatatatttttcatcccacttttgaaaatggtatgatatggtgaggtatagactgatgccgcaggaaagatttctatcttgatgctgatatatagaaatcatcttaattcatccttagaaatggacatattacagatgagaaatcagtggcacacaagtttaatgacactaacctctg

SEQ ID NO: 79373 - DNA, 1087 bp, Homo sapiens
aataatatttagggacatttggttttaggtttaggtatttctaaaatgtgattctctgggttttagttcataactttaatttagggttaaacttgcacaactttgcagagaaaagaaatgcaacctactagtccctgaaactttctgcctactgtatcctagtaccagcagtagtctccttacctcagactttgtaaaaacacaaaataaaaattactgcaaatagaaaagattttaaagtattaaagtggcatctggaaaaaattctaaaggaataagtgtcatctgcccaacataataaaatttgttactttgtttaaaagaaacaataagcatttgtaactaatttcagtaattttctaaaataaatttttattagaacagtgaatgcattttaagaatttttgtttcttaaaataggtgtctaaaatagatgatatacataaagtgcaattttttattacctctcaggatgataaataactgaacctatttgttttagcagtcaaacagaaggaaatcagtttacaggaatggcttatcaaggacttcttttaagtgatcgtagaagactaaggacagaaagcattgaagaacacgcaacaccaaattcatctcctgctcaatggcctggtgagaatttaaatgattaaaaaaaaaaaatcttctagttggcaatttcttcctaaaagcctactgaccagtttcctgcttgttgctggatttagtgagtggttcctttctttctttgttttttgatgatgtttttctgctatggattaggaactattaagtactgcaatattgtctgaagactcaggaagttaaggcttcataaaaccagctatgttaaccaacataaaaaagcaatgtcttaacatccttcataaggatggagcacattatctttcttagaaatgttaaattagagtcttagaaaatcacagacatattttcacagacataccatagaaaatacagttagttgttctcgggcgtgtaaatttatgtattggggtaggagtgactattctgtggtacatatatcatgctgtctgacagtcctttttttcttgttggctctctt

SEQ ID NO: 79374 - DNA, 1643 bp, Homo sapiens
tttagccttggaggtactctccaaaattccaaaagtaaccaaaacatctgccttatctgcaaaaaaagatcagcctgacttcatttctcacaggatggatgatgtaccttcacattcaaaagctctgagtgatggcaatggaagttctggcattgaatggtcaaatgtaacttcatcacagtatgactggagtcagccaatagtaaaagttgatgaggaacctcttaatcttgattggggtgaagatcacgacagtgccttagatgaagaggaagacgatgctgttggtttagtgatgaaaagtacagatgccagggaaaaagataaacaatcagatcagaaggcctcagaccctaacatgttattaacacctcaggaagaggatgatcctgaaggtgatactgaagttgatgtgattgctgaacaactaaaattcagagcttgtttaaagatccttatgactgaattaagaacattggctacaggttatgaagtagatggaggaaaactcagatttcaactctataactggcttgaaaaggaaattgctgccttgcatgagatatgtaatcatgaatcagttattaaagagtattccagtaagacatattccaaagtagagagtgatctgctggatcaggaagaaatggtagacaaaccagatattggttcctatgagcgccatcaaatagaaagaagaagattgcaggccaaacgagagcatgcagaaagacgaaagtcgtggttgcagaaaaaccaagatctcctgagagtatttctcagctactgtagccttcatggggcccaaggtggtggtttggcttcagtaaggatggaactcaaatttttgctacaagaatcacaacaggtgtgaatatcacttttttttcaatcttggttatttcagtaatttcagtagctcttccagttatagctataaagctcttttactactttttactagttaatctaaatatgttcagctcctctctttataggaggcagatatttatactctatgtgtcttagactgaagttttgataataaggagtaggcttaacagcttgagagtattcttgtgtcatatttatctatataccatctacatctagcatagtacctggtacatactgggtgctcaataaatttgtgtagaatgagtgagcgaacatattccctttacacaatgtttatcaccagtatttctgtcagagaactgataaaattttttaaactactttgaaaaaaataattcactatcacccacaggaaactacagtaaagcagctccagtctccactaccactgcctaccaccctacctctgctttcagcaagtattgcgtcaacaaaaacagtcatagctaatcctgtattgtacttaaataatcacatccatgatatactttatactattgttcagatgaaaacaccacctcatcccagtattgaagatgtgaaggtaatgtaaagtttatgatcatttgatattatacaccctgagaaggtaaatatgttatacctgtcttttaattcgaacttaggggaaatatttcaaagtgctacctttctcactcatgatcagttcaagactattagtccaatgaatgtaatttaaaagtaagtgttcttacttctggaga

SEQ ID NO: 79375 - DNA, 1069 bp, Homo sapiens
atcttttcagcttaatctagaggatgggatgttttaaaagttgataaaagcactttgcaaagtaaaaaatgctgtttcctatttatgtatacataaggcattattgaccttccttcttagaagaagtgaagagatgcttgataacaaatgcctgtccttgaagttattgttcttcttttagatttctgtttgaggtttttattttatattattatacattctgtagaacattttaaatttggtttaaccactttatgtttatgctcggtccccaggtcacagcatgatgaaaaaatgacaacatttttcagccacaactttaatgaagatagatggcgaaaagctgctttgaaaaatgctttttccttacttggaaaacaacgctttgaacaatcggctgcttttttcttgctagctggttcattgaaagatgccatagaggtataaataagaaaacacactatataatacttgtaaaagattgaaaacctaagaaggttgtagaggagattgtaacttttggtcatatgtttgttaggacacagaataactacagaggttgctgtacttaaaatagtggcactgtggtaaaggaaaatatgaataaattcaagggagaaacaaatgaaaaatttcaggctgggcatggtggctcacgcctgtaatcccagctctttgggaggccagggaaggtagatcacctgaggtcaggagttcaagaccagcctggccaacatagcaaaactctatctctactaaaaatacaaaaattagccaggtgtggtggcacatacctatagtcccagctactcgggaggctgaggcaagagaatcacttgaacccgagaggcggaggttgcagtgaggtgagattgtgccactacactccagcctgggcgacagagtgagactccatctcaaaaagaaaaaaagaaaaatttcatatatggcacattgcatttcaagactatgtgtaaaatatatgaaaaaaatgctgaaaaatagtttatgaatgtcttcttccagaccatcttgtgattctgaactgtttaaagtacataggtcacaa

SEQ ID NO: 79376 - DNA, 1035 bp, Homo sapiens
ttaccactaggtggtagtatcaagcaaggagttaagtcaagatgggttcttcttagatctatagacttggtatcttctgttgatggtactccttcactgcctgtttctctctcttgggtaagagatgggatattggtggtaggaatggattgtgaaatgcatgtatatgcacagtggaagcatgctgtcaaatttggagacactgaagctgatagttctaatgcagaagaggcagcaatgcaagatcattcgacctttaaatctaatatgctggcaagaaaaagtgttgttgaaggaacagctatttctgatgatgttttttgttcaccaactgtaattcaagatggtggcttatttgaggctgcacatgtactttcccctactcttccacaatatcatccaactcagctgttagaattgatggatttagggaaagtgcgaagggctaaagccattctctctcatttagtaaaatgtattgcaggtgaagtagcaatagttagagatcctgatgctggagaaggaactaagcgacatctctctcgaactattagtgtaagtggcagtacagcaaaggaaacagtcaccgtaggaaaagatggtactcgagattatactgagatagattctatccctccactaccactatatgcattacttgctgcagatcaagatacatcctacagaatttcagaagaaagtacaaagataccacagagctatgaagatcagacagtaagtcaaccagaggatcagtattcagagctgtttcaaatccaggatataccaacggatgatattgatttagagcctgaaaagagagaaaacaaatcaaaagtaataaatctttctcaatatggaccagcttactttggccaagaacatgcaagggtactttcaagtcatcttatgcactcaagtctaccaggccttacccgtttggagcagatgttccttgtagctttggctgatacagtggctactactagtactgagcttgatgaaagcagagataagagttgctcaggtaaatat

SEQ ID NO: 79377 - DNA, 1039 bp, Homo sapiens
attttatgtcttggctgttgtgaatagtgctacaataaatgtgggagtgcagttatccctttgatatactgatttcctttcctttgggtaaacacctagtagtgagattgctgagtcatatggtcattctgttttaaaaagagctctcttttctctatatcctcacctccaaaatacttttaagaagctatgtttcttaaataataacaaagtaatattctagctcctatttatagtaatgatatacatacattttgtaattttataatttatttttaaagctaaagcttcagaaggggcttcctctgagagtctactttcagtccctggacagaagaacgtagattcttctccagaaacctctcctagtgtgagccccatgccacattcttcatcaattgccaatcttcaaactgccagtaaacttattctgagttctagactggtgtatagccaaccccttgatctcccagaatcagttgaagtaataagagcaacgccttcagcaggtaaggtcactttaagactgggcagtggtagctcagagtgataaaatatatgaactctttagtggataaaatagatgaactcttctgaaatatgttctatgttgacattaaaataaagattgattttctattaatgatatgtctagatggttagaaacatgtctttattagaaataatttcctggctgggtgcggtggctcacttctgtaatcccagcactttgggaggctgaggtgggtggatcacttgaggtcagtagttcgagaccaccctggctaacatggcgaaaccatgtctgtactaaaaatacacaaattagttgggcgtggtggcacgtgcctgtaatcccagctacttgggaagctgaggcaggggaattgcttgaactcgagaggtggaggcggcagtgagctgacatcacactactgcattccagcctgggcgggcgacacagtgagactccatacacacacacacacacacacacacacacacacaaacccacaaaatttcctgtgataaatgtaat

SEQ ID NO: 79378 - DNA, 1092 bp, Homo sapiens
ctggttggaacatgggtgaggaggactgttctttttagcagaaagttttgggattttggggttccaaagttaggcttcatttgtttgttcatacatccttatcccaaggcacaagagtcccacttcttctcaacccttgcccttaccttcggtctggcagggttgtacttttaaatggcattgcacatctgcagaccactcaggcattgggccagatcttcagccatgtctgtcttgggctttaaggttgcaaaaatgaagaagatatgataccttgaagttatatgctatttttgtaaacattatagttttctctctgcttaactttagacttaacatgagaatgagtatggaaagttgaagtatttctttgaatgtattacattccattgccaatcagtgaatatttagagggggccttaaatgtccaagatgctgtatcatattgacattagattataatttgttggccattaacattttgtgttttttatttacagaaacttattggagaagtgtttaatattgtgagccaacagtctactgctcgacctggctgcattattgaactcgacgcaataaccaaccaagtaaaaacatgcttgtgaattggtgatattcgtatactttatcccatggtgttttatatgtatatgatatatgtcattctcagaataattttcttgtttgttattaaatgcagacaacttatgttgattcccatagtgaaaatctactaatgatttagggattatttttctccttgggaaaccaagaactgtatgttctcatttataagtgggcgctaagctatgagtatgcaaaggcatgcagagcaatataatggactttagagactcagaagagggagggtggaaatggaactagagatttgaaaaaccacatgttaggtacagtgtacactacttgggtgatgggtgcactaaaatctcagaattcactactagttcatccatgtaacaaaaaaaccacttgtaccccaaaagctatttaagtaaaattttttaaaaaaggaattattcttctccagttgaattgtatttgtagcaaaggaaatttgattcatttaga

SEQ ID NO: 79379 - DNA, 1038 bp, Homo sapiens
ggagatactcctaatgttccacattaggtaccagtgcacatttgggatttattattacaaagacagtacttgaagtcattagatctctaaaggcattagtaatagttaatgttcataaatatgactgtcagtcatcaagaagagatttatgtttagcaggctatttatgaagacagggattaagttttttttattccatttaaagtatcaaagatacagttgttttggtgcctaaaaaataagcttttgaatatctagattggtgagatgctagattggtgagatccattcattcaggtatttagtgagtacttactaaggtattctacaaataaataaaggagaagtcatgatgaaagatagggtggtatagtgtgtgctgctattagtaaaaacaagcttttaaagtaggaatgatctaaagtgtaatttgttttcactcagtaacttatttactcaatctttaatttttattgaggactcactgtgcataaccttatagtacatggaagaataaatgtgcatattgtaccaggtgctaagagtgttaaaatgaatagaagtagtccctactttcaaggatcttgtatctatagagtcatataaatatgtacatatagtatgtaataagtggtaaattagaagaaaaggctgatttcaggatgtgaaattcatttaattggcctccacttaagccagctcattggattcattgatgctgtccattccttctataaaatataggatggatgctcatagggaatagtataccaggctttgttgattccacaagttgacttgtaaccttaacaataataacagctgggaaagttatttaacctgaaaaaaatgctgctactactactactactaccactaccactactactactactactactactactactactactactactactactagcaaacttttatctagtgattattgtatgtcaggctgtcttctaaatgttttatatatattaactcacttaaccttcctggtaaccttaagaaaaatgtaatattact

SEQ ID NO: 79380 - DNA, 1018 bp, Homo sapiens
ttaaaagaagttttaaggcatctttaccaagctgtatgtttaggttggaaaattggaactttttcaagcttgattcaccattttaaaaaattctctggttagaatttgttatcagtgggtggcagcatctcattctgatagttctgtatctgagctggaagtcatatatgttagtatctagagttgaacagtagattttccatttacctataaaaacaactattctaataaaaatgtttccagtattgaaaaccaatgactatttttgagcatctactatgttctcctagatgtagagggaatacaaaatataagtttcagacctacctttaaggagcttttaatttagctgaagagagagcttattaataaaaagttaagtagcagtttaagacataagaagaggagtctaagggtggtatgtaattaattgccaaaaggatggccctagaagtgtttcattattcagaggagagagagagatcagattaaggtaggcatagaattctttattaaggacaatatttgggttcattcttgatgagtggataagatttagaaagataaattctttgtctttgcctgagtgagaaaattgcctggaagtaagtatagatacaggaaagtacatgtgtaaagcttgttccagaaacagtgagaaaaccatttggattggagcttaaggtttgacatagagaaagtctagaaaaatagaatcatagaactagaattggaagatattttaaaggtcacctggtctcaccagccatctgatgctttattcccctctgcttcattcctgccaatttgtcatctggccatcgatgagggagactcaactctaaatgcagctcattctatccttgaatagctcacacaatcatattgaaacgctatttgttttgtgtacattctacttgctagtgctagttctacttagaataaatctaatatttcttgcgtatgagagtacctcaagatattaaaagacagctttcttgtaacctgtgaaccttac

SEQ ID NO: 79381 - DNA, 1023 bp, Homo sapiens
atgagctaaacgaagctgcctttgtcatctctctcaactttattgctatttagatctgtggctgtggtcattttgttgtacaagcaaagcacttgaactttttttcttcagccttctcttaggccatgaatagagatatggtattacctaaatagagcaaggggactggaccataaagaggttgaaaatgacattttttgataagaagctgagatttggtattttgagaatagaagtcttttttttgagaggaggtaaactatttgcactgaatcatataattatgtttttcaggtttctttttcttctcggattcctgttgcatttccctctggtgatgcaagctctcttagtaaaaatatcatgatgtatgcctgtataaatgcgacaaaagattctcaccacacgctgttacaccaggaggggatgtctgtaggcagtcctcacggatcacagccacactctagatcccacagtacacatatgaacatcttagctcccacagtaatgatgatctctaaacacatagatggttctttaaatcagtgggcagtcacttttgctgataagtctgcctttaccactgttctaactgtatctcacaaatttagatattgcggtcatcgatttcacctcaatgacctggcatgtcattcagttttaccactgttattgacatcctctcatcataatgctctattgactcctgaattagattgtcagtgggactcagacaataaattaagtagattaatggaccctgtaaaacatataaaaggttcctcgaaacaacctcttagaaatgcagcaactcgtacatttcatgacccaaatgcaatctacagtgaacttattctgtggcgtgtagacccaataggacctttgtcatacactggaggagtatcagaattggctcgaattaactctttacatacctcagcgttctctaatgtggcttggcttccaactctcattcccagttactgtctaggtaagtgttcattgtaattgtgaaattaacac

SEQ ID NO: 79382 - DNA, 1046 bp, Homo sapiens
acggggtttacatatgaaattagaccatggttagtatcctgtgttcagattttacttactccaaagttaacagctttctgtggtaccacttttagttttgaattcttccttcccgctcttcctcctttttacttttctatttgttacacaagtatttactgaccatctgccttggatcaggtactctgctagcccctgcaaacatcatctaactctatatgttctttggaagccatatccttttctggggaacaggttttgctaaatggtagtaataatgatagggtgaatgaagttttaatttatctaaaagtagtaactgtagtaacattcaattcagacaaaagtttcctttgtttttttttctgactgtaaattggaaaagagatttagtttttaaagatagtatgccatttatttatagtctagtatgtaaatgaattatttaatgcttgtattgataaatatattttctggttcagatttatccctggatagagaatctgaggcaggtacaggatcatcagaacatgaagatggagaaagagaaggaagtcctagaacttactcacgacttagtgtaccaatgccactgcctacggttctgcttgatcggaagattgaaacgctgctaactgaatggaataagaatcctgatatgctttttacaatacaccctgtagatggtacctttctagtgtggcatgtgaagtatttggatgaatataatcctggaatatttagacaagttcaggtatattttattgatgaaatagttattacatttcttaaaatagtaaaaagaaataaatgctttgtagagttagcatgtttttagaattactgaaaattttggttttgataagcatctgagtaaagaatacttctttctttcagaagggatcagtgaccataagcttagcaaacttgattagttagaagataatgaatttggccttgaaatgcagtactgaatatttaaatatatgtgttgatttttgagggaattaataatattttgaataagattaagaaactaccctgaa

SEQ ID NO: 79383 - DNA, 1010 bp, Homo sapiens
cctgcagagacttgacttgcagattaagttatcaacacaggcagccaagaagctaaaagaagagagcaggtaagaataccctggtacaaatgtcaaagtctaaataaatcactattaagatgtccttgctgggccaaatctttcttttctcttttctttgccttttcttttcttttctttctttctgattttttttctttttttcttaatttctttctttcttaatttcttcctttcttaatttctttctttctttctttttttgctttaaaaactgcattttagttctagaaaggcatttttagtatataaactctaaacagagctgctgcctgatgcacaaggctttatctgttgcagtgtttttatctgttatttactataaaaagtttgcttctttgctttaatagcgtcactgtccagctagcacttctggatagcggcaaaataaaagtgtctctctcactgacactttcaagagaagtagtgtcatagaaaatacttgtaaaatattgatagttgcaaaacttgtcaaagacattgtctgttatttgttactgggtgtttcctacataagatctcatgtgaacttttttctttgttttttaaatttgatattagggcaaatctttctctctcctatagaattggtttccttttttctttatgatttgatttcaaaaaagtacaatctactgtgtttccttttttgctctggctattgggaagcttgcaactaaaattgatacctgtgttcaactcctataatatttcttatgattaatacattggtttccttctcctttccttagtcctgatttttttatttctattttattaatcttattgtatatatgccttttgttgttagtaccttaaatccttttgggaaagaggtagaatatagaaaacataaacaaatataaatatgaatataatttagtatagatttaaaatatatgtaaatataagcaaatataaatacataaatgaatgacattatttattct

SEQ ID NO: 79384 - DNA, 1040 bp, Homo sapiens
gagggatgctttgtgaattcccttcacaggggaatcattgtattttattttattaaaaaaaattttttttgagacagggtcttgctctgtcacctgacctggagcgcagtggcgagatcttggctaactacagccttgacctctcaggctcaagcgattctcctgcctcatcctcccaagtagctggaactatgggagtgcaccaccacacccagctaaatgttttgggggatactttttggtagagatggagtttcatcatgttacctaggctggtctcaaactcttgggctcaagcaatccatctgccttggcctcccaaagttttgggactacaggcatgagccaccacgcctggctggggagtcattttcagtacgttgtttttaagttattgatggcagttgttctacctaatttcaccatacttgaacttgtgaccaccctttggctgttactttccttattctataaactgtttcttagtgaccagacagtaaattcatatttcattgagttacactattcaatctaggttaagggagacttttgaaatgaaagcatttgatcagtgtacctccccactcccattcatccatccctaagaaacagaggatagtcctgcatcagtttgaaaggacacattttctagtctcagcattaattggatcttaggaagtgttgaacagagggtaggtgggaaagctatagagttttccagctcttccttggattggatcatgacttttcttagctttatatgaagtgaaattgccagaacagtagacccagctacgttcagacagaagtataaaacataccaaaggaggccaggtgcggtggctcatgcctgtaatcccaatactttgggagaccgaggcaggtggatcacaaggtcaggagatcaagaccatcctggctaacacggcgaaagcccgtctctactaaaaatacaaacaattagccaggcatggtggcatgcacctgtaatcccagctacttgggaggctgaggcagtagaatagcttaaacccgggagg

SEQ ID NO: 79385 - DNA, 1038 bp, Homo sapiens
attttagttagtggagacagtaagtagaaaaagaaaatgtatcttatattgataagcataatgaaaaaaaaaccaagcaggagagggagttggggagggctcgtggagatggctggaatttaaaatggtgtggccagggaagaccttgctgagaaggaggtaagggagggagctgtgcagatatctggtgaagaacattccaggcagaaggaataaccagtggtgcaaaggccttgaggtgagaacataattggcaccttccaggagtactgtggctggtgcttagaatgcagtggggtatagttggactagatcactttggaccttgaagaccattgtaagggctttgtctttttctctgagttgggatgcatttaaggggtttgagccgaagagtgacataatctgacttgtgtattaaaacgatcactctggctgctgctttaaaaatagtttgtagggaagctagtaccaagcaaggaaaccagataagatggtggcttttgcagtaatgcaggtgggagaggatagcagctgggaccaaagcagtagagaaggaaggaggtggtgagatgtggctggggtctggatgatttgctgatatgctgtaaatgttctgcttgtttgtttactgtttagtttgaatatctctcccctagagatgggcctgggcatcctggggatgggaaagaagaatctggagtttcaagaagctggctaggcctgacacctgatggacccaagttcttctgctagtgacttaggaaagatcattatgactctttcctaccatcacctttttagccattaatagccattaaaaactggcattcattattttcttaaccaacttctattgagtctggttggtttgaggccttgggctagatgctggggctagaaggtaatacatgttgttctctttttattcatggtgagtttttcagctactgctttctagtagtttctagctacttgagaagccagagaatttgtttcattgatgtttgtatcttctgtggctagcctggagcctgg

SEQ ID NO: 79386 - DNA, 1122 bp, Homo sapiens
ctctagaggcaggctcagggctctttgggcaaggcattccagggtcctaggtacctgaagtgtggtatagaaagtggcctatatgctggatgggcatatccctttggcctcatggttcctcccctggaggggagaggtacagccacaggaagactagtatggggttctctaaagtgcacgactcagggcagggcctctcctgcccagacccaagggcagtactgccaataagaggggtagaagccaccatttccctctgtgtttaaggactgtagtctcagatctctgtgtggcagaatgcaggattcctcctccagtgttccttccctctgacagtgacttattgatgttggtaccatcctggcaatccaggaatctcggttggatatgaactggcttaattatatgggtctcaatggccagaactgcattctctgctcagtctacttaccctaccaataaggcagtagtactcaatatttttgtttttcttctgatttaaagggagagtctttatccctaaagaaaagcctatagaaactcgtaaagaagaaaaagtgacccttgacccagaactggaagaagctttggccagtgcctctgacaccgaactctatgatcttgcaggttagtcctgaactctgggaactttcctgtctggctctatgacctccgagcatgcactggcacccatggcagcaggctttgagcttctcttaggtaggagaatgacaggttgacacaaggcattatggagctgtaagtcttgatgcaggtgacttaaactctctgagcaaatgttattttgctctatttcagcagcaaataatacccatctcacaaaactcaagagttactgtgagaaattaaagcaaacaagtatgaaggagtgttgagaatttagagaataaaacaacagctcttttgctttctaaggagctttcacatttggcattttatcatcacaacatttctataaagttcttgttcttcccacagtcattgttccattttgattcagaaaacgctaagaagtccattagccttctagtcttaacaatagcaacatgataataattattattatttaaaatgcagatagaaaaaggtcaaagagtacaa

SEQ ID NO: 79387 - DNA, 1325 bp, Homo sapiens
aatgcagtgctaaactaatgaagcaggtgactgcagcctttggctcaagctcacaactctgataactgtcagtgcctgaggttgtgattggtgacattctgacactgcccaaggcaactcaccctctattcctcctttctcccctccctttcttccaattcattgtcttttttttcctcttttctctgtaatttgttactaaacaaattccagaatttgtttagtagctgagtgttcctgagttgcctagtagcaataaaacaagtgaataggaaaataattaatatattattctatttagcttgtaaaacacatggaatctgtttaagatagcccttgtaaaattgaacatttacctgtattgtaagtacccacatctgtgtctctgaagtcctttgaaacatctcattatcttgaaatttttttaatgtttgagaacaccataagcagaatattctaacacctttggcccctgaaaatcctttaattagtttatggcttcatctccttatctatttaaaaaacatagtaaataatgtttatggttttcagtctgatttttccttccctttcacccatttaggtgtgatgtgttggagtcaacttgtacaggcttgccaactgttatattttcaagaattttgcaaactggttgttcaatacagccattatttaaaattaaatgatgtgcacttacaactgaatgaattatattaaggacagaagtaacaaatactgtactcaaaaatcttacattttactattttctaacctcttagattatttacatctagtaggtatgtatgtagaaatattaccaaacagtatgctactgaacgtatcctctcaactccatgttcactaccttcttgttactacagtggcttgaaattggccatggtagaaatatttacaccacagaaattagcaatatgtaagaaattggggttttctccctctccagattgctggttgataaacattcatcagcacaccactgggtgaaattatacatttttttatacatatgtttcgcttatcatgttgccgaagggaagaacatttctcttagatgtcttttctcctctttggatttgttacaaacctgtttaagtgctgagtccctgacctgcctctccaagtaagcctttttcctttttttttttttttttcttactctcattcttgccttgactcttaaaatcctggaccctatagagcattccttgcagccccacagtgctgtgggctgggggctaaagcagttcttggcaaactctggcagaaagcaagaaaaaaagaatcagaattcaatcatggctgtt

SEQ ID NO: 79388 - DNA, 1044 bp, Homo sapiens
cccaaagtgtggaagtggtagctctttcatgatcatgggcacagttaatcctttgctatccattgtgatggggcataatgtatataaaatatttttctatgtatttgttctgccagatactgtgttgagatatttggcaatatctggataactgactgaagggagataacttctccccaggcctatctccctcccccttttagagttgtgcaggtccactttaagtgtaaaatcactcacctggacttgtgggcttgtatcaccaacatctattatggcacatgtagatgacatttaggagaaaaaccttagaagtctagaaatcatatgattagttcagcactgcagctccccatctgcttatagtgtataactggaagctctttcatcctcatcagcatgattaaatgacttcgtttctttcatctttggagggtataatgtaaataagtgtcgtgtgtgtatgtgtgtgtgtactgtcagatatctaactaggtatttggctacatctggacaactgattgaagggagatgctctctccccagtcctcttcccttgtcctttttagaattgctgcaggcccaggttaaatatgaaattactccctaggctttgcagtttatgttaccaaccaccacattttatagctatgtagaggatgactcttaggaaataaatattagaagcctagaaatcatttagttgttctagcaccaaatctatccatttgcctaatgtatttaacattccatcctcatcaacatgatgaagcccctttcttccatctttgtagggcacattgtatataaatattttgtacataaagatcatcaaataccataatggggtatttggcttcatctggaaaattgactggagggagatgctgtctcccagccctgcttccctcgtccctgtccaagttgctgcaggcccaggttagaagattaccaacctggaggggcatgcagttcatcttacaataaaagcccattcatttaaaaactcagaaatcatcccagtgcctgtactcctcaaaccaa

SEQ ID NO: 79389 - DNA, 1120 bp, Homo sapiens
aggaaaggtcctagctctgccttccacttgcagcttccctttacctcctcttattgctttcatctcaaatatccctgctactcaaccaatcctaaagctaaagtactgagatgcacacaaaggaaaggtgtgagagtgcttggaagcatccagctgagcccactggatgaaaatcagacgatagggcctcctgttgtaatatactagccagagaaaagcgccaagaacttcagggatattattcactgctttattgctccctaaccctagatcagattggattttactttgtagttcaggagttaagaagtcaaattgctgaccgaggtggggaaggatgatggaaattaaaggtttacatttgtttaatggcagaactgagatttgctcagcttatctctttcccatctgtctgtaatagcaatgactgaataatcagtagaccaatggaagaggagttgcaagtttaaatttgtaacctgactctgggttctgttctaggaatagtgcatgttttagaggctttgccagttgggatacattgttgacttgggggaggatgaaggagagaactgatgacctagacatagaaaagagtagttaactaactagatgttcttctgatctcttccatggtagacattctgagcacattggcccagttagttggtatggtgaaggggcaccgtactaacagatttggagactgaaacctaatcccatcaccaacacttagcaggtatatgatcatgggcaattcattcaattgcctgccaattatagactatatagggggaagagcactggatttggagtcaagaaacctggacacttggctccacacttccttagctgggtaactttgggcaaaccgcttggtctctcaagcctaaggttcttcagctataaaatgggaataatacttcactaactacctcacagagttgtggtaagaatataatcagataactggataaaaacactatataaactggaaagcgccgtacaaatgtgagagatcagttttattatcaaatcactgttttccactgcctcttgaatcggctttattctaaccaaccattacatctttctcatcttttggagtatgggtaattga

SEQ ID NO: 79390 - DNA, 1005 bp, Homo sapiens
ggtttaaaaacaaaaacccttatatacatggaatagttatattttaattaagcatttattttagttgttttcatccattcaagcaaaatgaataagcagcatttttcattgcacttaaaaatgtaaaatacctgcatgccactaatctgtaacattttaccagttcagatgcctgtaatgtgtgactttatgtgtgtctgtgttgttttgaagagaataaaggaaataatactttgcaaactgtttaaacaagtgtttaaacttctattggcaacatttattgggctaagcagttattgaaaactccgcatagttttattttccatttgaaacttcaatcaaatcaagactattatattcattagggaattaaagactaatttgctttttaaatgtgaagttgaacactgtgtggaaagtaaatgtgtgatgaagcaaaatgtataaagtatgaaatattatacttttaccctggataattattcaggaccccagttggcccaaataggtgcaatttttaatcctttgaaattagccagccagacctaatgctaaggtaaatgtaaactgttttaattaattaagatctttctgctttcgaaggtataatgtatctatttctgtcaggaatgatatttccaaatgaaaatgtaaagaacattgggaaataataaactttcctttcaaagtaaaagtaaagactggttttatatggctaatttttagacagtgtttctttaaaacaaatggttggcatcatgttcttagatgagcacatttgcagaaaactattaaatgcccttatgatgaagaaacaagacaactgcaagtagccataacagagagaaataacttgttatcaaacaaaaatgaacacatttggctaaatagttaaaaatttgttagaatgaatgggaacaggagtacagaaagcccaaacaggttgactattttaccctgaattttttacactaattttggatttacattattattctctttaaa

SEQ ID NO: 79391 - DNA, 1078 bp, Homo sapiens
tgctttccaggaagtccgtctgcgggcgcgggtagggagtcgcaccggccatggtggctgaggagggagaggttgctgcccgccggccgcccgactccaggctccttcccgacgggtccgtctcggggagcaggggtgcgcgggggctgcttctgcgcgaacggcccgggcgggggacgtggggcgcgctgggcgtcgcccgccggtctaggcgcgcgaacctggcgttcccagtgaatcacccgcggcccgggcgcccgggttcgggaccggccccctcccctcccgctgagccgcggccgagctggctccctgcaccctacccagcgtcgccgggacgcgatcacaccgagatggcaccgagcctccttcaaaggcttcggcttgttgaaagtggggcggcggagtgggggagccaaaacttagggcacaccctttttgtgattgaaatgtggctgcccttgcattcaccggtttgatctgtctgctcttagaattaagttcctagctcccaggcagcacagctggatccggctgggaagtttgtgtgttagtttgttttgaggacgtgactgtgtcgttatatttttgcttgcgggggatggtgtgtttcctccgcaagcctgcattctgattacaaacagaaatgggaaacagccacagtttctttttttctttttaatgtttagttaagaatcgcatttccaacttgcccttggcctctgttaaaaccaaaagtcatctggcaatgaacactgcagtaaaacttaccccaggaggccatacttcaacaggaaataagcctgtggagatttaagttagttatgtgcagcctcccttggtttgtaacattttcatgcagctcatgtctcctctccttttctgagaaaccttcagattaatttttttggcagattaaattgattaattggcccgtcaaaaatatattaggcttggaaaaatagctttgccaagtctcatttactcttgctagtttcttcttcctaggcaccttttcacctttaagagtcagcaatcataatagttacagtcccctttcttacacattcctacgaaa

SEQ ID NO: 79392 - DNA, 1030 bp, Homo sapiens
ggattgcttgaacccaggtgtttgaaatcagcctgggcaacatagcaagaccctgtctctacaaaataaaatagattagccaggtgtagtggtgatgcctgtagtcctagctactcaggaggctgaggcaggaggattgcttgagcccaggagtttgaggttacagtgagagacaatgattgtgccactgcactccagcctgcgtgacagagtaagaccctgtctctctaaaaaaagaaaaaaaattatatatatatatatatatatatatatatgaatgacatggttcctgtctaggaccttattctctttgggattaggcagatatacttatgtatagtccacagcacttgtaagagccacctgtagggaataaaaacgtggtagatattcaggagagatattttccagttgcaggagtggggaacaactaaagtcaatatttttttccattcactggtcatctctttccccaggctatactgtctatactgtttgaatgtatgtgacatatctacatagagtatagtggaattctgtaaatttattttatttggaacctgagatgagccagatacatgaacataattagaaccggatgtggtggcacgcttctgtggtaccagccacttgggagactgaggcaggagtaccacttgagcccaaaagttccaggacagcctgggcaacatagcaagaccctgtctcaaaaactaaaacaaaagagaaaatcaattatatctgagcaatatcacagggaggatgagaggctttgcggataaaagtatacctggatagagggagggagaaagataaagaggaggatccagtaaacagtagaggaaaaaaaggcttttagtaaggttttctggtgtcagtctgatgtatactgatatttaggctgtgttgtagctggcaaactactcttcacacttttcagttgctctttaatatgcatgagctctctcgattagagtagatgaggagggcattattctctaggccgtgtggctaaagcgctatcatccct

SEQ ID NO: 79393 - DNA, 1073 bp, Homo sapiens
tcatagtacttcattaggcatgaggttttctacatttagggcctaaggtcaaggtagtggggcagtgtcattttcttgaagaattgactctcttttgccctactattgactgagttcgtgcttttatcccacctcatgagaattataccctaactccaggagttaccaaatctctttttgagtggtattacattccccacctccctcatgaagtacaaaatacattatgcaaattttaggccttgtgcctcttgaaaaacctattgtaactactactccctttcaatctgaaaattaatcatgataataaagcttgatgtatctccaggcccctgacgttgattagagtaataccagtggtatctctaagtcagaagtgtgctgtgtctctgaaggtgcatataaatgccttcaccatgtaagagtgaggcatggtccattgaggagcattcattcttaccagctggggcaccgtactcatgactcagtggtgagcaatggggctagatggtatgccatacctggagcactgctgatcttgagaggaggaaaaagagtagtcagagttggaagagctagaaaggctttggagaggacagacttcagctagtctttgaattgtgcagcgtgtggataagatagagaggtgaaattcgggcctggggtaaaaaggattgtttaagaagagtgacatcattgtgggaaacaaatgaggcggccagctgaagatgaactttggatatctgtgaggccctgaggaatctagcctgattaaagcagaggattcctagtgattcttagagcaagtaggaaggggagttttatcaaaatcacccgagaaactgtcaaactacaaacacctaacaagaaacatttctaagtaaaggagtaaaatgttaaaagcagtgttttaggtgactgtaggcaagatacagatgttagagcaggaaaacaggagcttagagtcagtttgcttgtctagagcctggtctgacagagggcttagtaaagcagtattttttacttcctctttttatgaggttccagaagtttctctaggtcttagaaccttt

SEQ ID NO: 79394 - DNA, 1083 bp, Homo sapiens
ttcaacttgctctcagcatgatttcttttagacctggcctagtttattttaggttttatgtgttcttcaatgcttactaacttggtggattaagaaaattcttgcaagaggaaaaatgagtcatggtgatacttccctttgggggagagaaagaaaactctcagattaatctcaccattatgcacttggcatggattcagcattttgattgatggctgagcattgataaatctttccctgtaagccacttcatatcatatttggttttgttcacagtaggactggtagaagtctctttttcagttaaccagcagagataaagaactctgtaaccttattaccatcagagacttgttcgtatgatgtcatttcttttttttaaagatattttgagtttgcaacaactgggaaaaaacatttcccagtctacccagtctattaaacaaacaaaccaaaaaattaaaaactgaaaaacatttggtgctgagaaactgggtatgctaagggtgtggctattttggcatccatctttggtatgcacagagtgggttcctctttgaccttgccctgtgtctctgatgctgcagctccactaagaagaagaaaaaggggaggtgggacagaactgggagctggtttgctactattcgtcagaaaaggaagtggggcacctacaagagagccacgaagtctctcagcagggtcttgttgaaagattgtttttgaagtggtatgaataacctgtcaagtattttcttgtaataatcacagaactaatctggctactttctactttaaggtagtcctccgtgatctgcttctaattacatctcttctttattctagccctaacaagtttttctgcactgccttcagatttcaaactattttctctgcaatctataaatttcattttttaaaatgcaagatggcattggtagcaatggcaggaaagacagggctacttaggttgattagtttccatgggacttttacacagaataatcaaccactattttttcaactactgtgtgcaaagcagctatctcactgagctgtgctaatatctgagtcaacaaaccg

SEQ ID NO: 79395 - DNA, 1071 bp, Homo sapiens
atgaaataacttttcgaattctttgaaactcagtagctgcctttgagcttttccatgacttttctctggcaccttccaccctttcctccactttatccaaatcaagttgcttttggctctctctccagttccccacttctgcctccatatgtttaatgacatgactgtcctaaactacttcagtatccttgttttcaaacatctcctgaaattttttcctcctctaagaaatttttctcctctgtgcaggaagggatatttttagtacaatgcagcagatggttacctttttgatacacgccaacctctgtctcttcagagcttctatgccaggtggctccagtgtagaatgcctctaaaagattcttcatgaccctaaatctaattgttccctttctgaaagaggctgaccgaattgattacatttccagacattggtagaatagatctaagtaacttcttggcaatacagcagtccactgtggagcagacatgaatatatgtatgtaagctttaacttgcaaggtggatgttgtttgtcttataaattacacaaggctaagatagacacccatgacccttgaattgttattccctgatatgttggaggacgggcagtgaaggaagagcctgaaggtcgtgaaggtaatggttgtttgctaggcttcttttctttaccacatttctttatgccaagacgttgattttaagtatcctctaaggactgagatggagttcattttataacgttgttgttactggatgatgtatctataccatagatcaaatcccttaaccataattactattataaggaaaagttcccagtacatctgattggagggggattactcaggataatgatgctgtttttatcacatcacaacagtatcttctgtaggcagttcaatctattagacctatttgaatcaaatgttttagaactggaaaaagtggctgggtgctcacgcctataatcgcagcactttgggaggccgaggcgggtggatcacttgaggccaggagttcgagaccagcctggccaacatagtgaaccccgtctctactaaa

SEQ ID NO: 79396 - DNA, 1012 bp, Homo sapiens
tataactgagacataggccagcacaggagtgaaagagagtattcatccagcttgttctcgtttggagaatggtgaaaattctcagtgctgattattagttcccatcatatttttacatagcatgcatattctgtctcaaagatagataaggcatagaaccttgtcatgaatttatcacttgaagaaatactgtgtcccagtcttcagtattttttactacctgtcattttgttttgttttgctggggactcctcctctctattgctggtatcatgctccgcccttacctagactaagaattttttttccctgtgttatttcacggatggaccagagccatggctgcaccttatatcctatacagagatgtgcattctgattctgtttgagctgctgactcacccggtatgggctcctccctgccttgcaccgcactccttttcttcctgctgggccttggggtacagccatttatgctttttggttgttttctcttttcctatcctgagaatggaatgcccttttgttctttcccaagaattccacatgcccctccctgcttttttaaaggtaaatttaacccagttgccttaaactaaggacttcccatatgctgtccaagttatttattcacagttatgttagctttccagaaaacctcctctttctcacctttctgagtatgtgatttctttggaggaaagacagacctgatcccttagtaaaccagaaagatcatgattataaacctgcctacatcaagaggattacataaccaccactgggcaattggtttccgctaagtccaaaggtaaaaactggctcttatttttgtaatcatattgtatgaaccctaaatgtcccttgtagacctctgaaaagtggtcttcccaggcactgaagctgatatttgaaatgggctatttacattagtcatgcagatgctggcatctccttttcagaccggtcatgcaatatcatttgaatgattcactgttaactcccttggggt

SEQ ID NO: 79397 - DNA, 1050 bp, Homo sapiens
caacctccgcctctcaggttcaagcgcttctcttgccttagccacctgagtatctaggatttgacaggtgcacgccaccttgtccagctaatttttttttttttttttttagtagagatggggttttgcgatgttggccaggctggtctcgaactcctgacctcaggtgatctgcccacctcagcctcccaaagtgctgggattacaggcatgagccactgtgcctggccaactgtttttgaatgcttactgtgggccatgttgtgtgcacagctcttggacgtgaagtactcttattagccctgacaacagttctatgaaatagatattattatttttaatttgcatgtgagaaagctgacattttaaaataattgggtaacctcaatattttacacaaagtcagtggtaaggattttaacccgtgttatatagtgtatcacttagcagtcgaccgtgttttctagttaatatgtatacatctacatcattcagacatgtgtataacattcctttctacgatgttttgtaatttgaccatcccccttctcatttttaagtttttattgtagaaatgttcaaacacacatagaagaagagagaataatatattcattacccagtttccgctgtttttaacatttgccagccttgttttattcatcttctgtctcccttcctaacccttctacttttttttcttgacgtattttaaagcaaaccctgttcatttgtattacatacctataaatatttccatatgtgtgtctcacaaataaaggcttttcttttaatgtaatcatgatgccatcatcaaacttaaaaattaacggtattttcttcatatcatgtaatacccagtctgtgtccagatttcctctgttctctccaaaatgtcgtttcatgattggctcaaaaaaggttacacactgcatttggttgtttgtctttttagtctcccttaatttcttaacagttctcctccccaacctctttccttttttttttttttttctgtgccatttattttttaagaaactgggtttattt

SEQ ID NO: 79398 - DNA, 1050 bp, Homo sapiens
tgtaatcccagcactttgggaggccgaggagggtggatcacctgaggtcaggagttcgggaccagcctgaccaacatgatgaaaccccatctctcctaaaaatacaaaattagctggacctggtggtgcatgcctgtaatctcagctacttgggaggctgaggcaggagggttgcttaaacctgggagatagaggttgcagtgagctgagattgcgccgttgcactccaacctgggcaacaagagcaaaactctgtctcaaaatacataaataaataaaaggaataatgaaaggtgagaataatgagaattttttttaacctaaatgctagagaaatggtgatatgtgctctgctctgagtcagtagtttatgcaaatgctccatcgtagataagtcagataattatggaggaagctgcattatttgtattcatttgtagactaattcttaggtgtttgtataatttctgaatacattttaaagcaaaaaaaaccatatatttgattaatggaaactaaatataatgaaaattgaaatgtaatgatgttttatgttattgtctttcaagaatatcccaattccaaccctaaaagattttgcaaaggctttggaaaccaacacacatgtgaaatgtttcagtcttgcagccacccggagcaatgaccctgttgctactgtaagtaagcgacttgagaatatcaaaattatgacatgcccagggtgtgttacagtggtgatttttatgaacaagatttaccccttttttatagttaatgttttagctcactattaggcagtatattacttaccagctttttgtgtttattttttcctgtatttccttcctatgaattttttccccctcccagcttccccctccttcctatgaattttttaaaacataaatggaatcatgtagtatatgctgttctgcaacttgatttttcactctgcagtttatctttaaagttttgttgtatcaatacatagggatctaccacattattttaacatcttcagaggattccatttatggatccttagtggtg

SEQ ID NO: 79399 - DNA, 1035 bp, Homo sapiens
ctgagtagctggggctacaggcgcccgccacctcgcccggctaattttttttgtatttttagtagagacagggtttcaccgtgttagccaggatggtctcgatctcctgacctgatgatccacccgcctcggcctcccaaagtgctgggattacaagcgtgagccaccgcgcccggccaatttttgtatttttagtagaaatggggtttcaccatgttggccaggatggtctcaatctcttgacctcacgatccacccgcctcggcctcccaaagtgctgggattacaggcgtgagccaccgcacctgggccctcacccaggttttatagtctggtatgtaggtgtttgctcgtcttcctaaaaggactgttgtggaactgtcttctcactgcatacatctaggtcagtaatctctcattctcctatggttcctatttaattgcttgaggcttgtggcttctgtttgaaatagactttccagccaaggctgaattaaagaatatggtacttagaattttatttctacatgtttccaaaagttgactcttttaaattaggatgtttgccattgaagtatttttaaagatgcatcttagacaagaagtaaaacaagacttctcaaaaggagtgacatttcaacgtgttgccattctcttaagcttcagccatatttgagttcccattctgtaaaagtttctggagcaggaaaaaatagcacttcatttctttaatccagatcacgtggaaaatattagctcaaactctttctgtcctttttatgactgtggtttcccagaagagatgttagctgcttgcttttgaaaatagaaaattggtgtgttttggtgtattgttgattccaaatgtagtttgcaaagtcatgctaattgttttagtattgcttcactagttagcttctattttttccttcaggcgtttaatttggcttcttagagtagcgttttaagagaacttcataaagaagttctagctggacttcataaataattggaaagctttaaaaacacatagat

SEQ ID NO: 79400 - DNA, 1071 bp, Homo sapiens
gggatgttgctggtatcagaattgttattgcttcatttagacataaaacacttaagtgttttcttcactccgtgacctggagagttttccattttttaaaatacatgaacttggcaagggtgtgatttttctttatcaagagaacaaaatgccagaatgttaaaacagttaactcaaaatctagtcatctgtgtaggagctaaagcaggtctccagggagagagggtggtcgtctgtgcattccaggttactgcacttgtctgatgtgacgtagcaacacccaggtcttcttaaaacaaagtcatcagctttgccaggttacatactttatttaaaagtatagtgaggtcgaagttcattccagtgtttcattttaataatgtgggcattattaaatttttgtggaagctaatagtaaaaaataaaagctgttttcaccacctccctccccaccccccaaaaaaggcgtacagccaactcttagttatttagggtaagagaaaaaagaaaactgttaaacaatgaaatcaaagataataaatatgatagatttccagtatgaggcacttgcaaaacagtcatttaaactgatggttactgtaagtcagttggaagctggcatgtatgtaaattacttggtgttacaccatatccgaagaagttcctatgtgcagtgcagaattgcataaacagtatttaatcactgctacaaatcttccaaccaagaaggaaaactgctattcttcataaatctaatttttagtatatgcttcctttcatcttatacttttatcaatatttataaaagtcatttctataataaaagcagtctttcttgctcaaagtattaaggtgaacaattgaatagagtactgtggtcgggagactgatttgagactgcagagctgatgctgggtagagggtctggacttgtattcatgttctgtctcagggcagcccctggagcaggagatggcagaggcatttacagctgcagaaaacagggaggaatggaatctgaggtagccctggcctcaaaattcaggcctggctgtatcatttacagagatt

SEQ ID NO: 79401 - DNA, 1021 bp, Homo sapiens
aaacacatgaaggcacattgtggggatgattaaatataatattaatcatattccttactaaatatggctaacatgatgttaaaaacacaatttttagaccttttgatcctcagttttatgaagatgaatttgaagatgagaaagtgcttgacgaggaagacagaatcaggttaaaattaaaggtaccatcctacactttattccttttttacgtttttccttttataaagtaaagcagggatgacaacttgagacttgagcttgcgaaatcctcttatgattcttgttcaatagctctttagacctaggaattaaacaccttttcggaatatttttacgggaggaggtatgtgcccttttttatccctgtagaattgtcactttcttcttttggttgcagttatgctttttttgacataagtaaagataaaaatttttgaaaattgttagctacttccttcaggataaataataataaggtatatggaattgcctccacattttacagtgggtggatcctggcaatttcccacaacagaaatatctcctttcttcatggatattcaaactatgcacaaaagagaccttgtcattaggtggttccctcttgaaggcctgggacggcaaagtactaccaactgctttcacaggcgtgttgttcttccttaagggggtttcctttaaaacaatttttttttttaaatttaaaacttttgtgtgtttttttttgtttttgtttttgtttttgagatgggcctcgctgttttgcccagaacggtctcaaactcctgggctcaagtgatcttcccacctcagcctcctgagtagctgggactacaagtgcacaccaccacacctggctacaggatttcctaagagtttctaccaggggccccagtggtatcattgggcaggggaaattgttgttgttgttgttacttttgtgacttggagttcaccatatgggtagaataaatttagactcaaaaacagggcaaagcaccgatctcatgttttaatt

SEQ ID NO: 79402 - DNA, 1153 bp, Homo sapiens
tgggtgacaagagtgagactctgtcttaaaaaacaaaaaatacaaagggacgggaatttgattcctcttgatgggaagaatggcaaaggatttgcaggtacgtttgaaatccaccacacacatatttgccttctctgtggagctcttctgcatacactaatcttgtccttactgacagcctctacttttactcttctttcttcctggtgctattagtccaaactgggagtggtagttgtgggaggcttatcctgaagcctggttatagagaaagaaaagtgacatcaagagaagggaggcctaagtcatcatcatgtcactttcctaactcagaaatcttcagtgccagctatttcctggctaatcaaatggaaactcctctacctggtttttaagagccttcattctgactccagtctctccaaggcaacacagttttgtgtgtttgtgttaaacattttaccagtagacacctgtgtcagttgttaagctcttgtctcgtctccaaacctactcttctgtacctggcatggtggtgctggggccaggagtccacaaaccagatttgagcttcaccagctgccccctattagggggcgccaaaggaagactggaagcctggagaactaagaagggattgctccttcctgtttgcttatggaactttctggggggcttcctgttgacttgccattttctgtgagaggacccaccaacacttcttcacctcagcagaggcagagcctttctgcagctgcagagtccagtttgcagttttgccagcacttggagacccggcttcattttctcccctgagagacatccggaccagctgggcagcagcttttcctcaggtatgagttaagctccagggggccctttatgtaagtgtttaagtttttataatcccccctcgtccctatgttccctcagccccacaggtggaagctgttctttgcatatgctatctctgtgaactcttagagttcctctttttatactttcaataacctagtccacaactttaaaccgaattgaactttaaaatattctatctgtacagataactggtgtgttttctgtttcctgactagaacctgactaggtggtcaaggaaacgaatcctcaaagatggagtttaggagttggtgtg

SEQ ID NO: 79403 - DNA, 1224 bp, Homo sapiens
gattttaaacagaggaaacttgtttatagatgccctttaatgtcatcaaatattttcttaaaaacctttatgatgtttttaatgcattgaaacaaattgttccaaaaaaaccaaatcaacagtctttaaaatactgaattttagataatgaaaagaagtgaaatgctgaggaggcagagaaaaaaaatttgagaaattacctgatcatggtaaaaatatcctgacaggaccagtggttagacaggcagaacttcctcgggagagccccgccccttctgtggcaaatcctgtctccagtttcctgcacatcctactctgtgttcaaaggtttccctgtgagagattagttcacagttgctgacacctcacaatctccctcacaacctgcaggaaccgttactttgagttgtcagagggtcattcagctcatagctacttttcataaaccatcctaaaaatgttctttattgacttgtagatttgtaaaaattgtatctgtttaggaaggtgaaccttccggaaagagaaaagcagaagatgatgataaagcaaataaaaagcataagaagtatgtgatcagcgatgaagaggaagaagatgatgattgaagtatgaaatatgaaaacattttatatattttattgtacagttataaatatgtaaacatgagttattttgattgaaatgaatcgatttgcttttgtgtaattttaattgtaataaaacaatttaaaagcaagtctctatgtttaagaaatctacttttccggccaggcgcggtggctcatgcctgtaatcccagcacttcgggaggccgaggcaggtggatcacaaggtcgtggtggcgggtgcctgtagtcgcagctactcgggaggctgaggcgggggaattggttgaacccaggaggcagaggttgcagttagccgagatcgcgccactgcactccagcctggcgacagagcaagactctgtctcaaaaaaaaaaaaaaatctacttttcccaaagcgaactgattttgttaatgctttaaacaaacaaagtcttaggtctcagtgaattcctgctgctctctcaacccccttcctctcattccccacaaagaagccttctgggccaggctgagattctctcacaattctggagacttggagtccaaaatcaaggtgtgggacggccatgctgcctctgaagattcttgacagggatccttccttgcctctca

SEQ ID NO: 79404 - DNA, 1110 bp, Homo sapiens
ctctctgtgccaataggcagagtttttggtctcatttttatggagtttttagctctgtgagagaacttgctttatacaggggtttcacttcaaaatttcttcctcggccgggcgtggtggctcacgcctgtaatcccagcactttgggaggcccaggcgggcggattatgaggtcaggagatcgagaccatcctggctaacacggtgaaaccctgtctctactaaaaaatatgaaaaaattagccgggcttggaggtgggcgcctgtaatcccagctactgagaaggcggaggcaggagaatggcgtgaacccgggaggcggagcttgcagtgagccaagactgcgccactgcactccagcctggacgacagagcaagactccgtctcaaaaaaaaaaaaaaaaaaaaatttctgcctcacatggactcaagttttatcgcctgacccttgtaattcttactgtcttaacacatctcggggttagtgtacatttagtatctgccatctgctcaaatgctctaagctttctctatgattatgattctaggagctcagaaattcacttaagcatatttttttccctgcttttaatttatccaacctctctaggtgattaaagagggtttcagtgttgttcattctcctgccacacatacatctgtcacctctgtatgcttattctgtgattatgtgcctcttgaggaaaaacaagatgcatagagtcatttaaactataattttctaaagtacttgtgttgtgaaacaggtagaaaatactataagatggaggatacgccgagatgaagaaggaaatgaaattaaagaaagcaatgctcggatagtcaagtggtcagatggaaggtgagcacaaaacgcctgaagggtattgacatacccagaacgggtcagagggatcaagttttgaaatactttttagttttaaatttattattagttttagaaatggggtctcactctgttgcccatgttggagtgtaatgacatgataacagctcagtggagcctcagactcctagtcctaagtgatcctcccatctcccaagtagctgggactacttggtgtgcaccaccctgcatggattattaaa

SEQ ID NO: 79405 - DNA, 1043 bp, Homo sapiens
aggtgagaagactggccaggagtttcagaccagcctgagcaacagagcaagaccttgtctctactaaaaataaaaaaaaattagccagcagagatggcgcatgcccatagtcacagctactccaggaggctgaggcgggaggattgcttgagcccaggagtttgaggctgcagtgagctgtgattgtgccattgcactccagcctgtgcagcacagcgagaccctgtctcccccccaaaaaaaaatttataaatatgtattttaccctaaaatttcagtgcatcagactacaaaatgttggtgtttaacataaactgttgtcttaaaaccttggtgtgtgataggaaataaccctggacccttattttcttgagtgatgtttaagactacgctgaccagtcttaaagcatggtgtagttaattctttaagaacaaggaaccagggaaccaggtacagcttatgtacctctctgaggtcccctgtcttcagaaatactattatgtgtccttcatcctgataggttaagacctagcaatgtgtcctattatagcatcattactatttgaatcactttatataatagaaagcattttttagaacggcttctcaattaataatggcctatttgtggtttttttttttttttttttgagatggagtcttgctctgtcgtcgcccaggctggaatgcagtggcgcaatctcagctcactgcaacccccgcctcccgggttcaagcaattctccagcctcagcctcccgagtagctggaattacaggcacatgccaccatgcccgggtaatttttgtatatttttagcagagatggggtttcactgtgttggccaggtaggtcttgaactcctgacctcaggtgatctgcctgcctcggcctcccaaagtgctgggattacaggtgtgagccctgcacccggcatatttgtgtatttatatgtggccaacctattgtatgagatggaagacaggaatagtgacagattgttttgttttcaatctgaaaatttcaaacatacaccaatgta

SEQ ID NO: 79406 - DNA, 1395 bp, Homo sapiens
acagggtttcgctatgtttgtcaggctggtctcgaactcctgacctcaggtgatctgcctgcctcggcttcccaaagtgctgggattacaggcgtgagccactgcacccggccttagaatgttaattctaacagtttttgccagtttcttcattgcttttatgttgggatggactttgggactgccttactctgcctttttttgcttatgttatcctatgtttatatgaccccatagattctgattctggatctgactcagattctgatcaagagaatgctgcctctggcagtaatgcctctggaagtgaaagtgatcaggatgaaagaggtgattcaggacaaccaagtaataaggaactgtttggagatgacagtgaggacgagggagcttcacatcatagtggtagtgataatcactctgaaagatcagacaatagatcagaagcttctgagcgttctgaccatgaggacaatgacccctcagatgtagatcagcacagtggatcagaagcccctaatgatgatgaagacgaaggtcatagatcggatggagggagccatcattcagaagcagaaggttctgaaaaagcacattcagatgatgaaaaatggggcagagaagataaaagtgaccagtcagatgatgaaaagatacaaaattctgatgatgaggagagggcacaaggatctgatgaagataagctgcagaattctgacgatgatgagaaaatgcagaacacagatgatgaggagaggcctcagctttccgatgatgagagacaacagctatctgaggaggaaaaggctaattctgatgatgaacggccggtagcttctgataatgatgatgagaaacagaattctgatgatgaagaacaaccacagctgtctgatgaagagaaaatgcaaaattctgatgatgaaaggccacaggcctcagatgaagaacacaggcattcagatgatgaagaggaacaggatcataaatcaggtaatacatttatgagaaccagaatggctcagaaagaagcattcagatacagcagggacccatttagtctttattcccatctttattaccctgttttttctcttctgtcccctccctttcaaacttttctaactctagaatacattttgcttcttttaaatctttctaatccacttattctttcttactcctttcccttccatttgttaatggataggtctgggggaaaacaatttaaagaggacttaaaattgagtcttagagggagggatatggtgtaagaagagctgataatgagttaagttgattccatttctgtggataactgaagagcatgcctcatgtgagagaatagattagcctggggaaaaaaaccataccattgaagtgtccccacagagc

SEQ ID NO: 79407 - DNA, 1045 bp, Homo sapiens
ggtgtaggctgggtgcggtggctcatacctgtaatcccagcactttgggaagctgaggcgggtagatcacatgaggttaggagtttgagaccagcctgaccaacatggtgaaaccccatctctactaaaaatacaaaaattagccgggcctggtggtgcatgcctgtaatcccagctactcaggaggctgaggcaggagaattgcttgaacccgggaggcggaggttgcagtgagccgagatcacaccattgcactccagcctgggcaacaagagtgaaactccatctcaacaaaacaaaaaaagtttcaattctcagcattttttcaaactgcagattatgatccattagtgagtagtgaaatcattttagtggattacaatttgcattttgtcttaatagagcaaaaaactaaataagagagcattgcccagaagaaagggcaaacattgttttctgcaacttttgtcttggttatgtaacatatttcaacagatctaaaaatgtcattcattatgaaacatgccattattttatgtactattaagaaagtgaaaactctatcaaaatacctcattgctacatccttttttttttttttttagaaaatctcactttgttgcccaggctggagtgcagtggtgggatcatggctcactgtagcctcaatctctcgggctcaagcaatcttcttgcctcagatccctgagtagctaggactacaggcatgcaccaccacacctggctaattattttttgtaaagatgaggtctcactatgttgcccaggctggtctccaactcctaagctcaagtgatcctcctgcctcaggcctcccaaagtgctgggattacagggatgagccaccgcacctgggctaaatcctgatttcaggcattaaaatggaggaaatacttaaaattgatgacatatatagtttatatgaatgtgtctattgggtcataatgtaaaatgtatttatatttattgctaattattgttgtgagctatgctattgctaaaagtttgaaagtcactgccatag

SEQ ID NO: 79408 - DNA, 1898 bp, Homo sapiens
tgctcgggctgtcgccttccagccaatccatcttaaggtccacccttcctggagactgaggcctcttcctctcggattgcccagtgccttgcacgtagtaggtgcttagtaaacgctggcactgggtttggtcactttgttcccttaatgccagggcaggtagtagagcaaacggccccagctgtcttcctccctgcccgcccgcaggcaaagcccccaggagacgccggacgagccgcgtgcctttcccaccgcctccgcggcgcgcgcagcccagtcacgggcgctggaaattccggcgcgtgcgggtgcgctgggcagggcgggggcgggagaacccgtggagtgagcctgtgacgtgagggggcgtggcaccgcgaagccccgccccctcttcctcgccctctctcgcgggtcggggttacatggcggcgactgcggcaaagcgagagcctcggagacgccgctgccgccagcacagccggagacctgagccgacactgggggcagtccgcgagccccgcactctctcgatgagtcggagaagtcccgtgagtgtgtgtgtgtacgtgtgcggggtgcgccggcggggcggctcgggagggcgccgcggcgggcccggcggcggcggcggcggcggcgacggcggagccggctccctcctccattgtgtgtgaccctccggcggctgccgctcaacaaaggcgtttttgttcggtctgccgcccgccccctgctcgcccgcctgcccgcccgctcgggcctggccggcgcgtccccgcgcgggcgggcgggcggcgggctggggtccccgcgtggggccggccaggcggccagcgcgcccctcccacccggcacgcccctcgccggtcgccctgccaggccgcgcccgctccctggccccgcacgcctgctgccgtcccgccgcctgcgcctggctccgcgggttcgaaacccagccggaccggaccggagggcgggcgagcgaggggcggcggcccggggaacatgaggtggcgtggagtctcgccttactggcacgctgcctttcgaaatgctcccgcgtctcctcccccatcccacccggtgactcggcctcagctgactccggccgggcaaagtctccagtggcgtagcgcgcagcgctcacccggctcgtctcagagccctgaagtccgcccaagttttgagtcttgccatgaatgaggtactgaaaactcggagacgaaattcctaatttcctccctcggccctacagtctttccttagcttctttcgggaccttaagtggtggtctgtaaaagtgcccaaatgaaagcttgttttgtcggttcaccaaaaagggccttgtcactttgctgtgcattttagtccgccttgtgagttgtgtcgaaaagtaaaggtgttttggcatccttttgtttcttggcgagtgtaggacccaaccggtttaggtgttagggggatctctgtgcagcgggagcttcttgattcctttcctgttttattttttcttttgcttgttcattggaaaaggtccagtgaaagggactggtgagttggaattagaagcctacttgtattaacggcagaattcgtgttcattgctaaagatgcagtctcagtaatgacttttttttttttaacggatacagatgatttgtcaaggggaaaaattaacacgccatacaatgaagagcaagcagcttcagagtaattttctgatggctgattcttctagcctgtctcttacagttccaattgcacatgtcctccctctttaacgctggaaaactgagatggaaagaatgatctgaccagaagaatgtagggtccaaacagggcctggccctgaaatcaggaatttcttcatagaaatatcagattttaatgtttaa

SEQ ID NO: 79409 - DNA, 1114 bp, Homo sapiens
attagaagtagtcgttggctactttctgttattaaaaaatccagagaagagtgatttgaagtcagttaattttgtaataaaaaaatgcacacattctaaagactaatgttagcactaaaagtgttgcagtgctttacataaattcatttaaagcatcgtgagaatcataactgacaaaatagtaaggtttgctgactcagggtactttgctgaaggggatgggggtcgggtaggaggaagcttacaagtgctgctgcaagttttgagttggatgatgactcatgctgcccacggactgctacgtggctttttttttttttttttttaaatacactgtatttttttctaaatgataggctaaaatgttcctgtccacattgaaattctctctcattttttctgaagaggaacagcagtttctctaaaaaagtaatggcttcttaaattgcattttaaaaggatatcatataccctacaggtggaattgtgtaacatttgctgagaggaaaggtaaaaccaatttctggtcaggtgctgaaattaaatgtttgatactagcagttttttggctactgctgagagagatttgttacaggttgtttataaaggacagatagtacttttatggtgtcggtagaaattgaccttatgtttttattggttatgtgaaagttatctttatatttaatatttaatcagatatggctctgaatatgaaagtttcactcagaattattaaaacataattatatattgtgctttgtgatttatgtgaattttctgttttaataaagacaatttgaaataggtattagtcactatttttcatggtttttttttaaagataagctgaatgtacagttctaagttgaaacttggtaataagataaatcttttgactgattttaaaacagccaacgtttagcaaggtggcttaaaataagattgagagggggaaaaagattgagaatggcagtttaagagtggggctgggtgcgttggctcacacctgtaatcccggcactttgggagcctgaggtggaaggatcgcttgaggccaggagttcaagaccagtctgggcaacataacgagaccctgtctcaatttttaaaa

SEQ ID NO: 79410 - DNA, 1016 bp, Homo sapiens
gtatactgtttatttttccaaagggatttgaggagtttgtggacagtaaagtgtttgttgtttttgtgagacagggtcttgctctgtcaccctggctggagtgtagtggtgcgatcactgttcactgcaacctctacttcccgggctcaggtgatcttcctgcctcagcctccggaggagctgggactacagctgtgtgcgaccatgcctggctagtttttcgtattttttgtagagatgaatgttcacagtgttgcccaggctgttcttgaactcctgggctcaagcaatctgcctgcctcagccttccagagtgttgggattacaggtgtgagcccctgctcccagcccataaaatgtattgttaatgtgaattaaatttttggaactattttggaagagtattgcatgatttatacctagaggttttttttttacaaagtttaattcaaacttaaaaaaaatttcctactagaggaaacataaaaatacaaatataaaagtattgaaaattttcagagcatcacattacttagaggtttaacgtattttcggcattgttttcaaatataggtaattagctgtagtgcataattcagagtttaaaaacaaactgaggccgggggcagtggctaacgcttgtaatcccagcactttgggaggctgaggaggcagatcacgaggtcaggaaatcgagaccatcctggccaacatggtgaaaccccgtctctaataaaatacaaaaattagctgggtgtggtggcacgtgcctgtaatcccagctactcaggaggctgaggcaggagaatcgcttgaacccgggaggcagaggttgcagtgagccgagattgtgccagtgcactccagcctgggtgacagagcgagactccgtctcaaaaaaaaaaaaaaaaaaaaaaccgaaaaacaaacaaaataactggatatcttagcctgcttcctgtctccaaggtactgctttatgaaatgctgagccttcttaccactgctatccagtt

SEQ ID NO: 79411 - DNA, 1007 bp, Homo sapiens
gttggcagacctgtgcattcgcatagagtgagggtcctggtggaatgcctggaaaggaaaataccatatctgggaatcttcactgatgttttctagtggtagatcagaatgtgatcagattctgaaaaattcgaggataggacttcccttctccaaagctttctactcacgtagaatatgctatttacattgattcattcagtacatattttagggtacctactaattaccaggtactatgcttaggaaatgtccccaaagctacttagtcccaaaccttttatcatagacaaagccacagaaaaaaggaggggaatggtgccctggaaaatgaagagtagaggttctgaagaatcacattagattaggttgggggaggatggcaaaagaaaagggagtgaaaatgttattagaaagaggagaaagaaaagtgaaatgttagatagggaggaatccactacatgcccctgtgctccaggagtaataatgtgttcctttgagctcaagattgaaaaaaaaaaaaaaattgacctctgctatagcttaatgcctaaaacaatgcctggcacatggtaagcattcagtaaaatgttgaatgaaacgtaatggatggatgggagggttgaatctgtttagtctgtttaaaagatgttttaaaaacatcttggttcattctgcttctgggcccatgttgggattgcatttacccactcccttgggtatacgtatgaccatgtgacctactttagtcagtaaaatgtgagaagtgaatggtgtcacttttggatggaagcttttttgccagtgagatagtcttacttttctctgctacattgcatgtaattggtagagatggtgggtactttagcagcttggctgacagctacgttgaacttgtggcatgagcaagacttagatttttgggggccatctattatcctgactgctttgaaaatttatattttcatctagttagaatcctcaggtgtccaaaggtgcttgaagaa

SEQ ID NO: 79412 - DNA, 1035 bp, Homo sapiens
tgccagttttcttccttgtttacacaagttcaatttgaaaggaaaaggcaatagtaagggtttcaaaatggcagagaaatttgaaagtctcatgaacattcatggttttgatctgggttctaggtatatggacttaaaaccattgggttgtggaggcaatggcttggttttttctgctgtagacaatgactgtgacaaaagagtagccatcaagaaaattgtccttactgatccccagagtgtcaaacatgctctacgtgaaatcaaaattattagaagacttgaccatgataacattgtgaaagtgtttgagattcttggtcccagtggaagccaattaacagacgatgtgggctctcttacggaactgaacagtgtttacattgttcaggagtacatggagacagacttggctaatgtgctggagcagggccctttactggaagagcatgccaggcttttcatgtatcagctgctacgggggctcaagtatattcactctgcaaatgtactgcacagagatctcaaaccagctaatcttttcattaatacggaagacttggtgctgaagataggtgactttggtcttgcacggatcatggatcctcattattcccataaggtatgtatagaaagccagctgagacagatctttaaactgatacacctaatcaggaataggtacttatattttctttgtatattgtggcagaatttttaatcttattaaactttacatagtgccttttttctgaaacaagtctctctgtttgaaatgaaggtggagtgggataattaaatacaaatttctaaaaatacatggttattataatgaaattttaaagtgtatggttatttattataaatgaaattctcccttagttatttaaaagtggaatatactcttctttctttgggacagaattgtggtaagaggggatgctatttcaactttaggtcttttgtttttgagacagagtctcactctgtcacaaagggtagagtgctgtggcgccatctcggctcactgcaacc

SEQ ID NO: 79413 - DNA, 1051 bp, Homo sapiens
acagttaagaccagaatccagatctcttgaatctcagttgctttttttttcactagtttgtgataaccttaatatgagaccaaacttaaagagtcagttccctatggaaacaaagcagcaaaaactaaatacatcagtaagcagaaattgaaatagataagtagattggtgatagtcaaagcaatgaaacctgctgatgatacaattcaaacttttccccccactggtcattataatatttaaattagtttagtatgtttattgtgaaataagtaaacattgaggaatgtgtttttttgtttgttttttaacctcaggtgcacatgaacttgaacagatgcagctgattttagaatctattcctgttgtacatgaggaagatcgtcaggagcttctcagcgtaattccagtttacattagaaatgacatgactgagccacacaaacctttaactcagctgcttccaggaattagtcgagaaggtattgtgactcgagagtaaccctcacgttaatgcctgtgtgtgaggcagaatctgtgtagggaagctggagctttttatccttagatatggggctttctccaaaatagtctttagacacttaaggtgtacgtaaaacttcaactctcattttccctttttttgtcctgttacttgggctacgatctgtttttttggttcctctgaatcactttccagagcaagtagcaagtattttgaatataggcactggggacaaaatcatgatggcattttttccctcagatatacttggaactcctgtaaatgcctggataaaaagaaagctgctgtatttaatttcagccggttttgcaggcttttcagtagttccacattcttaatcagtctttgagtctgtctgcacaaattccattgctagctcccttgctcgtaaccctgtagccactgtcacaacatccctgttcatatctaaatgagtcctctgtgggaacactttatttttattttttattgaaaaatagagacagagtcttccctgggctggtcttgaactcctgagctcaagca

SEQ ID NO: 79414 - DNA, 1047 bp, Homo sapiens
tcatcaagttttagtagcctatccagcactacagtgctagtaattgagttaagccagtgacttgcagagctaggattaaaacctatatattaggccgggattacaggcgtgagccaccacactcagccagaaaatcgtttttaagttgtaaatcaggtaagttttatttctgacaaattaactttttaattgtgtagtccatttttcccttttataagatggggacctattagtacaattaagatgctcatttcctgttgtgtagtatgtagtgctaaggtaatcacttagctagtcattgaaataaatgagatcaacatttactgtttttctaaaggtaagcaattcttttctgaaaaacttttaccttttcctctgcagcactggatttcctggaacaaattttgacatttagccccatggatcggttaacagcagaagaagcactctcccatccttacatgagcatatattcttttccaatggatgagccaatttcaagccatccttttcatattgaagatgaagttgatgatattttgcttatggatgaaactcacagtcacatttataactgggaaaggtaaattgatcctaaattagaaaaataatatttactgaactttcagtggaccatatgtagtgagtttttttaaaattatgtataagacattgtagaagtcttaaaaatttagtaatgtaaagatacaaaaattagtcaggtgtggtggcaggcgcctgtagtcctagctacttggaggctgaggcaggaaaatcacttgaacccaagtggccgaggctgccgagattatgccactgcattccagtctgggcaatagagcaagactccatctcaaagaaaaatttagtaatggtccttaatatttatatctataaatagccgttaattaaaacatttaataaagtaattactggttagatgatatatgggaaaagttaaatgctactttgaaacattttcaaagtcattaaggcatatttataaagtcctttaactgtgattttatgaatgtcaaaaatttaaga

SEQ ID NO: 79415 - DNA, 1284 bp, Homo sapiens
ttttccctcaatgattatacatgtcagtaataggatagcgcattcagcagcacgtatacacagggagatttttgctattcatggtgatgagttttccagcaaacctcctcctcttctagttgcccttactgtagagtaaacatttagcaaacctcctcctcttctagttgcccttactgtagagtaaacatttgtaaggtacctgattgagatttgagatctgcattttgtggctatgaagtcttttgtttgcatggaactggtggacaaaaaacaaattggaaatgaagttacatactgcattggcaattaccaaatatattaacagagctttcctatcaagactaagttctggtagggcaaggcaggcatatttactctcctataattatcccctcatagacctagcacagtgctgtcacatagaaggtactcggtgaatttgaaaatgaaatcatatacgtagaataacgctagtgtattgatttttttcaggtatcatgattgtcagttttcagagcatgattggcctgtacataacaactttgatattgatgaagttcagcttgatccaagagctctgtccgatgtcactgatgaagaagaagtacaagttgatccccgaaaatatttggatggagatcgggaaaagtatctggaggatcctgcttttgataccaattactctactgagccttgttggcaatactcagatcatcatgaaaacaaatattgtgatctggagtgtagccatacttgtaactacaaaacgaggtcatcatcatatttagataacttagtttggagagagagtgaagttaaccattactatgaacccaagcttattatagatctttccaattggaaagaacaaagcaaagaaaaatctgataagaaaggcaaatcaaaatgtgaaaggaatggattggttaaagcccagatagcgctagaggaagcatcacagcaactggctggaaaagaaagggaaaagaatcagggatttgattttgattcctttattgcaggaactattcagcttagttcccagcatgagcctactgatgttgttgataaattaaatgacttgaatagctcagtgtcccaactagaattgaaaagtttgatatcaaagtcagtaagccaagaaaaacaggaaaaaggaatggcaaatctggctcaattagaagccttgtaccagtcttcttgggacagccagtttgtgagtggtggggaggactgttttttcataaatcagttttgtgaggtaaggaaggatgaacaagt

SEQ ID NO: 79416 - DNA, 2027 bp, Homo sapiens
gagaaggaaaacacttacactagttacttggacaagttctttagcaggaaagaagatactgaaatgctagaaactgagccagtagaggatgggaagcttggggagagaggacatgaggaaggatttctgaacaacagtggggagttcctctttaacaagcagctcgagtccataggcatcccacagtttcacagtccagttgggtcaccacttaagtcaatacaggccacattaacaccttctgctatgaaatcttcccctcaaattcctcatcaaacatacagcagcattctgaaacatctgaactaaaacactcagcagacatttatctttgtattcttcatgaaatgtgttttgtctttttttattactagtgtttaagtcattttttacttgaatcagatggtgtcatttagtaaggattttatgagttcttgttttttaaaatccagactttctttttctacatgtgagatagttttcattttaactggcatgtcatttgcacacaaaaataaagactagagcaaaataatgcaacgcaggaggagaaaagaaatgcactaagacaagaacattctctcatagaacattgatctgttttacaggaaacaaaccttgccttgaaatttacacagtgagactgtacataattgcatgaaaatagctatttttttcctaagacatttttcattcatgaatattttcaagtttttcatactgtacacatttcttaaaacacatgataccagcagcaactgaaaatgaatgccgaatttggtacacatgtgttatctacctcaaggtaacaagagtatgtggcaaaacatataccacccatagtgcttcacaaaatgcacttctatttagccagcgtttattgtagtaaactattcttaataaaactcactcactgtttataaatgttctggtatgcattctttatagtgaagtgttaatacatcacatcttatttattttagcaaatcagtatattttctgtatttaattataaaaaattaacttagtttttaaaatttatttgcaaatatactttactttttccatttggcactatggtttgttgcctacctagctgcatctataatgtcagcttatcctaaggctgtccacgtacttaatttacttaagtgttcattttaagtaacgtgctcactgtgtataggaatttgtattttggaggtgcttgatctatctacaaagaaaaattaattaggaattactttattataaaatgctcctagaagtcttaattgtgtttattttttaaaaaaacaaatgttagacttgtgtgcatggaagtaattaaggtacatcattattgtagtttgaaagttgtacatgataagacattttgtttttactgtatgtttttactgaatgatctattccccatcccaaggcaagcatgaataaaattaggttaaacgtagcatgtggcatcgcagtctcttagaatttgtttcatctattttattttattgaatactgtctgtatctttggttatcctgtttgaagaaaaaggacaaataaaacatggccagcaaatacagctcctgtttcactcttgggttaatgaaaattttctgctagaatgaaaattactaccagaatcactttgaattatggccataaattgctagtctgaaaggctgagaaggttcaagtcttttgacttaaaccatcacatattagaatggaataaagctttataatatttcaaaactgttaggtaaaatgtgtagttgaaactttgaactgtgcagtcagaaaacttgagatttgctctgtaatacatctttgcgtaagaacttacccttttacctatccagctacaaaaccatcctcttcacctcacttttctttcatccttgttttgtacaacaccaattctattaatatctgcccacctaccttctcaacaactccatcctcttcacctcacttttctttcatccttgttttgtacaacaccaattctattaatatctgcccacctaccttc

SEQ ID NO: 79417 - DNA, 1113 bp, Homo sapiens
tattttaaaggcacaggtgtttcttctccaggtcttgcctggtgagtcctttccctttctccttgagaatcctgaggtttcaacatgggaggaggtgaaaccctcctacattgcaggtgggaacatttaataacgtggccacacttcactgcctgactgccgccatcatgggtcgcatgcatgctcctgggaagggcccgtcccggttggctttgccctatcgccacagcatccccacttggctgaagttgacatctgatgacgtgaaggagcagatttactaagtggccaagaagggcctgactccttcacaaattggtgtgatcctgagagactgacatagtgttgcacaagtacgttttgtgacaggcaataaaatcttaagaaatcttaagtctaagggacttgctcctgatctccctgaagatctctaccatttaattaagaaagcagttgctgttcaaaagcatcttgagaggaacagaaaggataagaatgctaaattccatctgattctgatagagagctggattcaccacttggctcgatattacaagaccaagcgagtcctccctcccaattggaaatatgaatcatctacagcctctgccctggtagcataaatttgtctatgtactcaagcaataaaatgattgcttaacaacaacaaaaaaacccaataacgtagccactgtgaaaaacaggttagtagtttctcaaaacattaaacagagttaccatgtgactcagcaattccactgctagatggaattaaaaacatgtccacacaaaagcctaaagttcatatcagcattattcataatagccaaaaagtgcaacaacccaaatgttcatcaactgatgaatggataaacaaagtttggtatgttcaaatagcggagtattactcagccataaaaaaagaatcaagtacagacatatgccacaatgtggacaaaccataaaaacactatgttaaatgaaaaaagtcagacacaaaaagccatgtgttgtctgattctattgatatgcaatgtccagaataggcaaatccatagagataaaaagtaggttaatggttgccagaaggtgagggaagggagaaattgggag

SEQ ID NO: 79418 - DNA, 1070 bp, Homo sapiens
acctcatacccattaggagtcactcccaatttctcccttccctcaccttctggcaaccattaacctactttttatctctatggatttgcctattctggacattgcatatcaatagaatcagacaacacatggctttttgtgtctgacttttttcatttaacatagtgtttttatggtttgtccacattgtggcatatgtctgtacttgattctttttttatggctgagtaatactccgctatttgaacataccaaactttgtttatccattcatcagttgatgaacatttgggttgttgcactttttggctattatgaataatgctgatatgaactttaggcttttgtgtggacatgtttttaattccatctagcagtggaattgctgagtcacatggtaactctgtttaatgttttgagaaactactaacctgtttttcacagtggctacgttattgggtttttttgttgttgttaagcaatcattttattgcttgagtacatagacaaatttatgctaccagggcagaggctgtagatgattcatatttccaattgggagggaggactcgcttggtcttgtaatatcgagccaagtggtgaatccagctctctatcagaatcagatggaatttagcattcttatcctttctgttcctctcaagatgcttttgaacagcaactgctttcttaattaaatggtagagatcttcagggagatcaggagcaagtcccttagacttaagatttcttaagattttattgcctgtcacaaaacgtacttgtgcaacactatgtcagtctctcaggatcacaccaatttgtgaaggagtcaggcccttcttggccacttagtaaatctgctccttcacgtcatcagatgtcaacttcagccaagtggggatgctgtggcgatagggcaaagccaaccgggacgggcccttcccaggagcatgcatgcgacccatgatggcggcagtcaggcagtgaagtgtggccacgttattaaatgttcccacctgcaatgtaggagggtttcacctcctcccatgttgaaacctcaggattct

SEQ ID NO: 79419 - DNA, 1053 bp, Homo sapiens
tctgtttgtgtcttcacaggtctgggcctaatcatcttctgacagtgcactcatgtatacctgagaatttgaaatcttcacatgtaaatagatattacttctagaggagcttagagtttattgcagtgtagcttaggggagcaacccatggctcacaggtcactaagcgtctccaatatgactattaaaactgtcacctctggaaatacactagtgtgagccttcagcactgcgagaataccttcaagtacagtatttttcttttggaacactttttaaaatgtatctgtttttaaggttattctaaattatagtagcctcaactcattctgtcaccagtagaattcagcagttaatatattccatattatttctttgaatcaattcattttcagagcactttaaagtctgatatttctcgatgtgcactgtgatgcctggaaccttcctctggaagtgctgattttatggactgaggactggtgactggtctgtgatagaagcaaattccaattccaaatgtaattagacaaaaatcatttttttagaatgtgtttttattgtaaaagtatctttttcagcttcctgttctattgtcttttttcagatacaacatttttgtctatggtgaactgctgtaaatgacgcagagaaatgcctaaaaaggacaggtggtttgactcatggatgatgatgatgtcactgtgccacttggacagggcgttttctctgaattgaagggaaagccaatggtgtttgtaaacaaatgcttctgagagcaaagaaaagtcttctgtgtgggaacacaagatagtaaacttatttaaaaacctattagtagaattagtggaaacacttaggttaaagtgaatcttgtccatataaattatattcatggccgggcgcggtggctcacgcttgtaatcccagcactttgggaggccgaggcgggcggatcacgaggtcaggagttcgagaccacggtgaaaccctgtctctactaaaaaatacaaaaaattagccgggcgtggtggcgggcgcctgtagtcccag

SEQ ID NO: 79420 - DNA, 1042 bp, Homo sapiens
tgctcataaccactttcttatccctgagctctgggccaagtcttaggaattagatatgtgattgagggaaactatatttatagggggtctactctgtgttctgtgcctgatatcaacacatattatctcactctgcaaggccagtgtcactgtcccccactaacagggaagaaaactagagatcagtgggcctgacataggagcttcctcttccgtcttctgctgcaaatgttccttgagtccctagaaatagagattctgattccaagggcctagcatggttctgatgggcatccagggtcaggagtcacaaccgtagataaagtactttctctctgcaggtactaccccagtggagatgcctttgcttcagggtcagatgacgctacggtatgtttctaagtttttgagagcttttcctagtcaatagagggatctgctaacttattttaagaaaataactatttttctggttacagaagtaacgagtattcaataaagaaaatttaggggaatattaaattaccttgatctccttacccaagaaaaatcatagttggatgaattcctttctgtctttttttctttttaacaaacaaaatgctttataatttggcattttcacttaacagaatgtgaacattttcccaggctggtaaatatttctctccattatattttcttagtgattgagtagtattccatgttatgaacgtgacattcgtcttcaatttttggacatttggcttttctcaaggtttttttttttttctgttaaaaacactactataagtgtttttgtacctctcatcatttccttagcattctcagacataacttgctgagccataaatagacccagttttaaggcttttgatactgattgccaaattattttcaagagaaaaaaatattttcttgttgccttcaaaatatcaaatatcttatgaagtaatggttttcattctaattttctgctaaacaaattacaaaagaatagattgagagttttgaaataatgaaaatttaaaacttctgtata

SEQ ID NO: 79421 - DNA, 1091 bp, Homo sapiens
ttgcaagtggaagtgtttagaaggaaaatgtcatatctgcagtttgcagtcaaatggttcagaatttgctcctgtagatatgacaaaatgttaagtctgtgaatctaagggaagggatctgggtgttcagtatactattttttttttcagttttacagtaggtttgaaaatcttcaaactggccaggcacagtggcttacacctgtaatcctagcactttgggaggccaaaggaggattgcttgaggccacgagttcgaggccaagagttcaagaccaacctggccaacagagcaagaccctgtctctatttaaaaaaaaaaaaagaaagaaagaaaagaaaatcttcaaagtaaaagttggaggaaagggtacaatatatgatactgctaaagagaatatgttgaaaagttcatgtgattggaaaagtagacacatattctgtgactctgcattaatctttggtacttctttctttccatcctagtggtttggataataagtgttctgtgtaccccttgacgtttgacaaaaatgaaaacatggctgccaaaaagaagtctgttgctatgcacaccaactacctgtcggcctgcagcttcaccaactctgacatgcaggtaaataggcagcccccggtgtcaggttgacctgccaaggagcactaaagaggagctgagaggagaggaagctttcggcgtctctctgaacaagatggctgtgctccagtagtttgctctaagaggaagctcctattgtttctcattagttattattattttaataacatgagaaggttggggctagtgattgttggtagtgttgagataaaactgcatggcatattgaaaatcctcctctgattgacttggcgagggtgggagtggagcagggaaccccctggggtgcaggcagttactgtgccctggtctgcgtgctaacgtgtgtaaagcttcactgagctgtcgggcttcagagctgtgcactgcatgcatctcactttacagtcctgttttaaccaatgcaaaaagaaaatgcttcaccatattaaatctttgctctactttaaatacactacagtgaaaacaacac

SEQ ID NO: 79422 - DNA, 1097 bp, Homo sapiens
agaaaaagaaggcaaagaggcattgttttgttcgcccaccaaagactgctgcttaggattgctaccgttgattgaagtttaatcaatactaagcatttcatttattccttcagtaaatattactgggtactcactgtacgccatgctggagaatgtcatagccaacccttatgaagtgttccctttatgccaggcttgaatagttgtccccgcaaccccacaggggaagagaggtggcgagaaagtacatgatttgctcgaggttgtgcagctggtgtgcgacagagccaggctttgacccaagcccccaaatccagagcctggatttttaactgctttgctccagttttgcctctgaagaagatcaaacaagacagcactcctgtcttcctagagctagtggaatttcttaacaggttaccattatattctagcaaattcttattatagaaaccagctggttatattcaccattaaaaaaaaaaattaaatcctggaggaatggtcctccagaaggcaaaggggaaactacatgtgtcctgaaccaagttcacacaaataatacccagcacatattcagctcatttccaggtctttttttttttaacttcctaatgtttaatttttaaaatttgttttaattcagtggatgcaaaatttggcagatagaaacaggatggagtgggttggcagtgatctacatgtgggaagaaaaaatgtagtgagaaaaaataattaatagttgggatctattcaaattcacattatgtaaggagggccctattttggttgggtgaatcatcttttttattaaaagggaaattatcaaaaagctatggctatcctaatgctgaattgggggaagcagcaataatattgatgtaaaatttctaagtaaaatactaaatacaatatgctcacaactctgggccgatagagccttatataaaaggcctatatggctgggcgcggtggctcactcctgtaatcccagcactttgggaggtggaggtgggttgatcacgaggtcagatgatcgagaccatcctggccaacatggtgaaacctgtctttactaaaaatacaaaaattagctg

SEQ ID NO: 79423 - DNA, 1031 bp, Homo sapiens
gtttgaattcttgtgtattgagctgcacaccatatcttttgctttcagttcatgtatgcacagattataaaataaataacaaaagtattccctgaaagttgagagtaagccacatcgtgatgaaaagttaagtttttgccagaattatatttccaaggccctgtgagatactctctaataccctcattttacagagcagggtgcaggctccgaggagatatgcattcacctttaatttgttaactgtgctcttccctcaggccccattttccttttctgagaagcaagggggcttgatgtggctcactggccttcacgcttgctgtttggactccaggggtagatgtgatatttggaacttaggggtagacgtgccttcctgtctggccgtcaccctccctccactgttcaccagctcagctctgccttcatctgttttccgtattggacttctggtaagattttgtccatgagccaaagcagaggcagttgggggagacttctacaggtaaaatgggagcttgaagactaccggtccacatggttatccaactctaagtgccatccagttgggacccgtccatcatgttcagtctggcacgcagcacagggccagcctgcgaaaggtgctcagtccttgcttgttgagtcattcaggtctcttctggctgtaactttccatgattcttccagccaagtggctgccaagccaagacccaggcaggtttcttcactcctgatctaggctctctagctctgtgacccattgatctggctacctcgaagaggtatggctgggcacggtggctcacacctgtaatcccagccctttgggaggctgaggtgggtggaccacttgaggccaggacttcgagaccaacctgggcaacatggtggaaccccatctctactaaaaaaaatacgaaaattagccgggcgtggtagcgcgtgcctgtaatcccagctgcttgagaggctgaggcatgagaattgcttgaacctggaaggtggaggttgcagtgagccaagat

SEQ ID NO: 79424 - DNA, 1359 bp, Homo sapiens
ctcatttaacctcattacctccctaaaggccccatctccaaatacagccacactagggggttagggcttcaatgtatgatttttaggaagacacataaaatccataacacacactttaaaatatttcaactttgtaccctgtaaattataaggttatgaatctcatttattgtatccacttacctcttcatagcagtttgtttccttgaatgctctgcagttttgtttcattttcctatgcgcttccatgggccttctacgagcttttccatttagtctataggttccagggacaatgtttgtagggaagtgggtgggacaatgacagtgtgatagactgtgatcatacaggaaatcagtgcaatttttttcttatagaaggtacatgctaccccaagcatcatgaactcatttgatataaatcagacattaagttttaaggtaaaagagttatagtagctgattattaatttcctacatgtttgtattattctaatattttatgtttaaaattacttttaggaattcatgaagcataatagtccacagcagaataagaattgcttgaacaattttgacctttcagaatacagacagattctcagtgatgtggctatacgaatatatcatcaatttattatcataatggaaaagaatatccaaccgataataggtaagaagagaatggatgaccaaaaaatatttatagtaacattaagactttttaaaacataaacttggtatgtgtaatgtgtgattatgtgtaacattgtttaaaaagccaaggaaatataatcatgtagatatctgccttttaattctttgcttgcttataatgattccataaataatagtacgctgttggtagttttctttatataaggatgatttatcctgaaggaaaaaacttggggaaacttctactactgctatttatgtggtacttctacttcttggcgtagccaagtatttttgaaatcctaaagccccattcgaattcttgtatactttccttaatttcctgaaatttaaatactttaggctttaatgcccaggccatgatttgtcatgctaagcagctttctttcctgtgaagctgaaaaacgtgctgcttcaaacctacaagaggagctgcagccccgctggaaacagccgtccatccctaaccctgacacacaccctggtgtcccaaacccttgattcttttgctttctctatcataagtacatccactgactcttgtagaaaaatgtcccatctcctgaaacaaaccgaagagcgtcgggaacgttccgcgtgtgtctcctggcgtgtcagcacagcctccctgtctctccgcagttccgggaatgctggagt

SEQ ID NO: 79425 - DNA, 1050 bp, Homo sapiens
ttccctattcaaggcagcttcatgtgactgtggacactgtacgccatcctcatcaaagcgcttggagtaggggtgcatggaatggagtttctttcttacaatgggggtctgaaatccagggtttccacaccagggaaaaataaagattctgtctcttattcaaccttttaagaaagagaaagtcctttgtaaacaagaagaggaacaagtgacacctgtgtatcttgtgccaagaaaggagccagatggaattcctcaaagaggaaataaatccatatacattcaggcactgtgtcaagcacagaaaagcaaacaagcccctgcccctagtcacaagttccttaggagaagagctgacctgtcagctgtaatcctcattggctctctctgcttcagacttgaagccccgtggcgtggtggtgaacatgatccccgggctgccggctcatatcctgttcatgtgtgtgcgctacgcagactctctgaatgatgccaacatgctgaagtccctcatgaacagcaccattaatggcatcaagcaggtggttaaggtaggaaatgcctttgacattggcccctggtatcacatctatgggaatgaccagatgcccagtctttgcccatcctgagcctccattgtgtggtgagccacatgattcctcaaacaagtttgaggcccaactagtgaagggagccacactgttagggaaagataaatggatgagcatctgccataggcctcaaagccttaccggcgagactgcaacctggtagccactgccccaccactgctatccccttagggtgtaaagttatcagctgtgaggggtataggttctatctctgtaacaagggtaaatcatgagaaatgaaatggagtgaaaaattattcatctcttcccttggcaattatataattcttcttcctaaaagcacattgtgtatttttattcccagtccacaaatgaagatgaactgtgtattagttaggttagttacttagtaaagttaagctattgtagctatgagacacctgccacctccctttgc

SEQ ID NO: 79426 - DNA, 1035 bp, Homo sapiens
tttttaaaaaatgaaattgtgaacaatttttcaatttactgctttgaaattcaccttctctccctgttacatatgtaggatcagtaagtatccaaatttctattagaaaagtagagagctaagaagcagacatcctgaacatggactgcatggcacacataaagcatcctcgtgagcctctgtgaaagggaccctcctcccttcttccctccttctgcttctgtcactgaacttttctgtgttcagctcctgctcacatttctcactctttcattctttattaccttttccccttcctcccagccttactgccaaggctgtatcttgtttctttttctatattcatctctttgaagagcagctttattcttacttatccaactctcacctcaaatttgaaatgtccacaagcaaactgaggatccctttccttcagtaataaatgacaaatggcagtctgccccatgagagcagggcccaggtctgtgcttcccagcccccgctgcatccccactgctgggatgaatgaatgaaccatcattcaccaccctggctcacctttcagacttctgacctccagagctgtatgattaaacatttgtgttgttttaagcctctatgtttgtgataactttacagcagccacaggaaactaatacagctgtctcagtaaggatcatgcacattggtattttgcacaccaaatgtttcacaagtcttctttcacagtagcattggcatcttgaagacaaggcaacatcttggatttctttcctgttaccatgtgctggatacatatcaggcactcataaggctcttcaaaggataattgggccttttcagcagcagctgtactcactgatgtactcataaagaggaatcactacttggagaaattcttcaggatacaatacagtacagttttaatgtatctgaaagccacagacatttacgtgcaaaccagccagaatggggtaggagagtagtcacattgtgagacctgtgaaagctgcttttgtgtatttagctgattgt

SEQ ID NO: 79427 - DNA, 1026 bp, Homo sapiens
tgtagcctgtaaccgtgagtgcataagtaaacttgatgtacttcgtgcacggctcttgttgtgggtcttcataactgcctcccagcagtccataaaacagaacaaaggccatgtggtttatttcttgacccctcctttaatagtgttttggagagccatttccagtctcagaaggattgctatgaaaaggagattgaagctttgaacttcaaagtggtgcatctcagtcaagaaatcaaccacctgcagaagttattcagagaagaaaatgacatcaatgaaagcatccgtcatgaagttaccaggctaacatcagagaacatggtatggtctcagccaggggccccagtcgtggccatcatactagagttgttctttgtcagtggcgtcaaattcagtttcttggcagtaaaagagtggatataaattactttttccagaagtgaaataacttggtctggtgattaaactataaaatgactgcagaccagagagcactctgatacaagagtgtgtgtgttcaccacaggatggctgcaggcgctgtgattgtctgtgtgtgcgcgtaagtgtgtatgttttaaagcctgtatatttaaatcaagccctaaccccttggaaagtgaccacaaaattgaagggtagctcttgagacaggagtgtgtcagaaggccagtcctgctcatgcctgaaatctcaccttttttttttttttttttgagatgaagtctcactctgttgcccaggctggagtgcaatggcatgatctcagctcactgcaacctccgcctcccaggttcaagcaattctcctgcctcagcctcccgagtagctgggattacaggcgcccaccatcacggtcagctaattttgcatttttagtagagacagggtttcactatgtgggcaaggctagtctcgaactcctgacctcgtgatccgcctgcctcagcctcccaaagtggcataagccaccgtgcccggccttcaaatctcaccttttcaagggcttcctcttccatgacg

SEQ ID NO: 79428 - DNA, 1050 bp, Homo sapiens
gggcaatttaataaaatgctctagagaaaaatgaatgaatggatgaagtaatgatccatgcttggacaatcaaggcttaagtgaattgtttccctaccagaaaagttaaacctgagtgtacctacgttcttaaatgtaagacatttcatcattaagttggaaagcttttaagcttctactaaatatgtgaaatacatattagtagagtatttgtaggattatggaaatagtctctgtaattgtcatgaactagccatgcgtggtttagaagagcttttggaattgcatccgggtggccactgaattccacaactgaagtgtctgtcttttctgggccccgtcccctattgtttaaaagtaggaggtcagaccacatgatcaggaagggtcactttcattcctgtgactgcttcactcttagcagccacatgagcctgatgtcagtcagtctgtgggagtcctgtcatctggctgaggtctgaggtctgtatcttaaatgtaggaacttgtgagactgcgcttgcagagaggtaccagtaggtgtcactcacttcctctttggtagctaagactggttcactctccaatgtgatccattaagattacttggggctgggcacggtggctcaggcctgtaatcccagcactttgggagactgaggtgggcggatcacgaggtcaggagatcaagaccatcctagttaacacggtgaaaccccatctctactagaaaaaaaaaaaaaaattagccgggcgaggtagcacacacctgtagtcccagctactcgggaggctgaggcaggagggtcgcttgaacctgggaggtggaggttgcagtgagccgagattgcaccactgaactccagcctgggtgacagagtgagactccgtctcaacaaaaaaaaaaaaaaaaaaattactctgggtttttgtgttttgttttttgggttttttttgagacagagttttgctcttgtcacccaggctggagtgcaatggcaccatcttggctcactgcaacctgcctcccaggttcaagcgattctcatg

SEQ ID NO: 79429 - DNA, 1050 bp, Homo sapiens
gcgtaggcttcttgaaaaaagttttgaactgaaaacacaagactatgagaagcagattcagtctttgaaagaagaaattaaagctctcaaggatgagaagatgcaactccaacacctggtggagggggagcacgtcacttctgatggcttgaaggcggaagtggcccgcctgagcaagcaggtcaaggtagagcggctctcacgttcagccccgccctctggttacgtcatttgattgcaattccaagttcccacagattagacagctaaaagcatctgtgtaaaggccacaggcaactggagcctgattccttcagtccttccaactgtgcacctccaggctgcctttgatttagcaatcattgtattccatattttaaaagtcaactttctaacttttttgaaattacatttatgtaaagttatttaaatatgtcgatgtagagaatactcccaaattagactgtaaattgaggtgaatccttattatataatccatcactataaatctataaacacctgcattaaagttaagttaccttattatcaaaatctttcatttaaactgttattagaaaatttactaaaacaattatccaatgcacagtgtggtgaatgtagttaataagagcatattgtacattcaaaattgctatgagtaaatcttaaatgttctcaccacaaaaaatgacaagtatttgaggtgataacatgttaatcagcttgaattattccacaatatattcataaattataacatcaataaagctataaattttcaatggtagaaatttttaagtaaatttttataaagctgagaaggaaaaatcacatagaatttttaaaactgcataatgatatataaaaatattgttacctgccgggcacggtggctcaggcctgtaatcccagcactttgggaggccaaggcaggtggatcatgaggtcaggggttctagaccagcctgaccaacatggtgaaaccctgtctctactaaaaatacaaaaattggctgggcgtggtggcaggtgcctgtaatcccagctact

SEQ ID NO: 79430 - DNA, 1069 bp, Homo sapiens
gttaatatctgtagaaaaaagaggttatgtgcagtgctcacacctgtaatcccagcactttgggaggccaaggcgggcagatcacctgaggtcaggagtttgagaccagtctggccaacatggcaaaaccccatctctactaaaaatacaaacattagctgggtgtggtgttgggcaccttataatcccagctactcgggaggctgaggcaggagaatcacttgaacccggggggcggaggttgcagtgagctgagatcatgccactgaagttcactccagcctgggtaaaagagcaaaactccatctcaaaaaaaaaaaaatctataaaaaagaaatcaaacaaatttattaggaatgtggctctctttctcagagtttttccctttgtgctataaaagcaagttttaaaaggaactgaaatgacagctcagcaggtagaatcatttagtaaactcatagagctcctggcactgcttcaagggcccctgtgggctgtgttgggcttgtctaggttatgtatctcttttcaattattttcttagttaatcatcaaatttttaattgagcaaccttctagagcagttggatttacatgcacttttgggcacgtggatttgctgccatttattctagaatttttgaagggctagacccctggacatagcagatagctctattgtttaggatcaaacaaacctccagcaggatccttggaacgaggaaggagccaggacttagcagagcacgccaaggtattcgctgaaggaaactggcccttccaggggactgcatggaacccggggggttgggaatacagtgccccaaaacccagtgtgtcttttaagttcagcctccctagccagtgtgccctgtgcgtgatcactgtaaagccacacctttcaaatcaggaggtgtaagaagttgtctttaacctaagggaagaggaaacagtttgctaaaaataaggccattacctgctggaactgtcacagtaggttctaattaacttgtctcctcttgttgttttcaaaatgatgtattctaattcaaagtaaagactgtagaga

SEQ ID NO: 79431 - DNA, 1001 bp, Homo sapiens
tccataaagcttctgctgggtgggtacagtggaccaccaggaattcttttcttttcttttcttttcctttctttctttctcttctttctttctctccttccttccttctctccttccttccttctctccttccttccttctctccttccttccttctctccttccttccttctctccttccttctttctttcttctttctttcattttctttcttttccttccttccttcctcccttcctcccttcctcccttccttcccttcctttccttcctttccttcctctccttttctttcttttctctttctttcttttcttttttttttactttattgctaagacagtgcaaaattcagagactaccaccaccttcaacttctaccaaatccaagaattaagattcttgcctaggaaataaacctccctcctttccttccccacctattgtccttgttagtttgtcttttatcccaaaagataaggtaagtaatggacctcacagaaattaaggcaggtgcctgaccttgtactgtaccagcccacctttcctatctcaatagcaaaccctttgctaacctccaaggactccaatctgggcttcccttctcttaaggagtcaaaggtttttagatctcaaagttggggtacatggcagggtcccggaaagagatagaacatgcttggcacatctcttttgggggctaggaagctcagggctgcctgtggtggtaggatacaaaacttccccatgcagtgagcaggacagcctgcgtctgggtgaggaagcaggattctaaagagaggagggaatatcacagaatcgctccaggagttaacaaatatatgaagtgtttcatgatcctccatcagtttttaaatatgtctaattaactcatttacctagaaaaatataattgtcgatgagtttttaatgtgaggagaagagctcggctctcggcatctgtccacgtgcagggaccacttgggagtgatcatttcaa

SEQ ID NO: 79432 - DNA, 1069 bp, Homo sapiens
cgattaagaacaaagctttggaggcaccaagcactggggtcgaattgcatttctggcaccacttgctggctgttggtcctcaccatggtcactccttctctgaccctcgtgtgtgacagtggagtcacaggagcccttcacatagggctgtgttagggttataggaggtgacgtgcataaatgctgacaccttaaaagtgctcagcaagctgccttccagcaggagctcatctggccaggtggtaaatttggtgcctctgttttgttcggcccacgttttgcagagtgggattattcacttaaaagtcccagttttctgacttttcttaagaatcaattaatctaacatcctgggccgcattcatccatggctacatccggcaggagctgagtagcagctgcctccccaagggctcctctcagttcttgagcttgcaactccaaggcaactgcagaggcagctgatgaaagtctgaatatggaagccagccatgtctgtctcgtccctgatggggtgtgctgggctgtaggatatgaaatgactttgcccttttcctctaggagctatgaaagcaccccttagggaggcaaaattgtgctgcagttgtgctgctcctcccctcaacagacaaggagagaataggaaaccacattgccttctcattggaggcacaggcatcacagtcaggcagcttcgcagctaagttctgacacaagctgtgtgacctttggcaagtttcttaacctctcgggcttattttctgacctataaagtcagaataataattgccaatatcactgttgttgtgcggactacaccatatggtgacatgcttattttaatgcctggcttgaggtaggtgttttatacctaccagatttcttccgggggacaaccaggaaaagggttatttataaactgactactaggatatcattaaaaccagaagctttgaggggtatttaaaacttgtagaagacatagcaaacgtttaagcttttaagtgtcaaaaaatatctataaacaaatgcatatgtcttgcttcaggttatattttaacttgtttaa

SEQ ID NO: 79433 - DNA, 1055 bp, Homo sapiens
gctggttttctttctttttggctccaggaaatgtgctaatcccctcacggtgactgaatatggtatgtagtcataatttatattctacttactgcaatcaaagtcccaatggggaacatggggcaggctcacaacagaatacaagagggaggggttatttattatttacaactgcagaggtgtgagtggagtctaggggagctattaatacaaggggcagtgggcacctggggggcagcagcagaactgttcactgctctttcccatgtgggcatccaagtgtttctggagcctagaaggagagttgggtaaagtcagccccagaggagcagtgaccttctgtcagtcaggccatgcagccagttggaggcagctttgcagggaagggggctggggaggacgcactcggaaccttctccgctcctctctctgctctcctgctagggctccccatgaatcaaacccaaccaaaggccagagggcatgaaaggccatcgccttggtttataccaagtcccctggggcagagagcagagaatctggaggggcaaacggaatccctccagcaatcccacctaaaaaataattcagggattcagagagcttgtgagcaaaaagaaaaatgaaaaacattcaaaatcaagcacagaatcaaggcaagatgactctccgaggaacctaatgtgaaatgattactgggatattaatttttgtgttgaacttcctagcagccatggcagaggggaaacctgtgtatagacacatgtggtatatgtctacagaggtcgactagaaggaacagtgccccagatgcccctggggtccacttcacgttcctgtcccagagcttggcactgatgctacctgcatatcttgaatgaatccaggtgcccatcttactagtcagagaagagatgcagtattctaatctgggaaaatgtttgtttttaggtttcaaggaggattttcagatggacgtttttaaaatcctggcagccatcctacatctgggcaatgtgcagatcaccgcggtgggcaacgagaggtcctcagtt

SEQ ID NO: 79434 - DNA, 2155 bp, Homo sapiens
tttcttaaatgtacatgatttatgtacatgcttttagaaggtcctactatatttgtattataattagtttaagtaatttttattacatcatgtattgctttattcagtttgaatacatttatttatttatttgcagtatcaaccagaaacactaccaattgcatcaaattctcccagtttttcctggttgtcaatgcggttttcaatgcacaattaagtcatagccatttggttcgtaccaaatgtgtcagaatctaacagcatccgataggctgtaagttggggagttgctaagaaaatgcaacgtggtacaggctgtccgcctcagccctggaaatctcccagacctcccccagcttcatcctgtgtagcacgactcaacgtgcaccctgaatcttctcaggtcttccaggtcatgctgtagctgtcactgccatgcagcccttttttttactccggacagctcatgtactgaagcgtcatgaaagaaaggctgtggtctgagcccttctctcccatctcctgtctttgtcctgtcaagtgctggagccagagctcctacagctgcccttggtggtttctcctgttcagcgatggtggcacaaaggttctgctattccagggctccagcttcctcccaggtctacccagagctccagatgggggtctgaattaacctctcttggtggcctggagatttttagtcattgacaagaataccttgtaaccagggaaccccaaggcccagtaaatgattctgtataccattttcttgaaggtacaagaagattctgccgactatggggatctttgggccagtttgaggattgctttccctctgaggttctttctctctgtcagccacactttctcacccaacttcagacacaccctgccagcctttcccctactcattcactcttccccttccctcaacttaatcgtctatcccgttgcctgctgtttgactgtgcactgaaggcaggtggatggagtcagtcctcagttgcccctgctggccttcctggtgcttaccatcagcccaatctttgcacagtccttgttgttcttacttctctgcatgcattccttcagaagatcagtcatcaactttttcttaattcctctgtgacacacaatgggaattcaaaggaagagatcttaaaagtcacaacagttctttatcttaataatcccctccccattcaccttactacatgcagactcacctcacacccttacaacttgaagctgaaaatttaaaagtaatttccctttttgcagcttttcctcaggttaaggctttgatctgcctgagagtaactctaaaaggagggaagataaatatgggataaaatccacaaagtgtagcttctaattcctttggaagtttaaaaaatttccacatatctgatgcttcttttgtcaggtgcagaagcacaaaaacatattccgaagccaactgatagggaatttggggattattgtcagtttggagaatttgctgtgttatttcttcatttccatggatagctcatagttggctctttctgggtgagtaattatgtgtaatatagatcaaatcttttactaaggttacagctacatgttaggggaggctatgaaaatactatattattataatttcagtgcagtgattgttgtgagaaataactttcatggtaaccctaggaaaatgggcacctgccaccatcctgagaagtcctcacacaatgccctttctctcttacacacacacacacacacatacacacacacacacccccgtcactaattcatagagttccttagcaggcatagtcaaggatcctctgggtaatgtcagctgcttagtgataaaacagagccaaaactagtgcatcctgttgaaagtaatgcagaaacagtacctgggtccagatatgctttcctgcggcgctttcctctgttacctcgtttcatcctcacagcagcatggacggtaggtggggtcgcttctacaatcatttctgatgatagcttgggaatagagataggggcagtgacttgcctgatgtcgcacagccctctggctgtcctgctttcccatatggagcagtggtggtgtgggcacctgtgatgcaggagactttaaaaatgtcgtgaggtcacgtgc

SEQ ID NO: 79435 - DNA, 1841 bp, Homo sapiens
tgtatactccagttaatgagtttgaagaaagagtctctgtgtcgttcattcgtactatacaggtaagagctcccatcttcttctttgattcaccaacacagtcttttgaatggacattttgtaatttattgaaggataatgtgttatcttttattatcttattttacaatgcactaacttttttgataatagttaattgggaaaatgaagtgagtttaaaacaaaagtaaacattcttcattagttgagaatttgagggtagaaattttagtagaaaaaagtcttttagattcaaagaactgatgctctgtttattttttttcctaatcttctcagatgcgtttacgagacaggaaagactctccccagctgctcatggatgctaaacacatctttcctgtcacctttcctttcaacccatcttccctcgcactagaaaccatccagattccagccagcctcggcctgggcttcatttcacgggtctgaaagtgatgtccaggcaaaaattgacaatacatttcttgcccgaaataagaacccattatttccagtgagttactgaaaatacatttttaaagagaaagtactgattatctcccaaatgagaagtcattaactggaaatctccctagaatactttcatcactttggaaacaaagataggctctttcgtgctgtgttatctttatagcaacactcatccttaaccaactaggtaccgtgagtttacatacaggagaatgatggaaggaagggaggaaggaaaggaggagaaaaatgtgtcttcagctggcagcatttattttaaatccttagcactgagtttgaatggtataaaaagtataacttccatagatgagctgttgttaggaaggcaccaaagaacctcctctgcactaaacaggagaatggaaagaaaagtctccattgagtacatatcatgtcagtttagtaatcaattatgttgatattgttaaactggttcaaagaaataaactggcaatatgtaaagtaattcctcatttgtgtcactatgatatagagatattaaaggaatgttggtttgctaaatagtatagatgtccatttgtactatagtttactgagcattttaaattgctgctacatactgtcttcttaaaatgtaagtgatattaggcactacaataagtttctcttgtcaattctgtttacaattcaatcagatcacagttttaactggattatatgcaaatacctacagattcacctgcacaagtagcagacactggaaagtcatgtagtaatatgacaaaatgcttgacatttaggggtaggattagacaaagtggctattgttgatgtcattatttattcaggatgtattacattgatgtgctcattaattttccctgggtggatattgcgtcagggtacagtgttctgtgaagtgacttatttttaactaccagatctgattccttcagtgcatattttcaaccttgacaggttttctctcttcttaatttattaagaattaatctcggctgggcgcggtggctcacgcctgtaatcccagcactttgggaagccaaggtgggcggatcacttcaggttaggagttggagaccagcctggccaacatggcgaaaccctgtctctactaaaaatacaaaaattagccgggcgtggtggcacttgcctgtaatcccagctactcgggaggctgaggcacgagaatcgattaaacctgggaggcggagattgcaatgagatcgaaccactgcactccagcctgggtgacagagagagacactgccttggaaaaaaaaagaatctcactcactatctagagagga

SEQ ID NO: 79436 - DNA, 1050 bp, Homo sapiens
cacaggtatatgtggggcttttggttattcagttacctgatttggagtttgccttaagagagagtgcttcaaggattatcaagtctcaccctgcaacagcaacccagctctgaaattgtaagagaagctacaaagtgttttctggccagctccccaataaagacagagctacattatgttattctattttgtttattagcaagtctaataacttttgccataatgacttcatttccatcttccattaaagagaattacattatcttgtcatttagtcttatataatggtgattataatcctcatgactataataaatttttaagcacagctgatgagatttaagaaaattgaacaaaaatactgcctgtcattttaacataaatcctgacaaggccgcacacaaaaaaattaagacatttttgacaaaattcagcaaatttgcattctctgtatctcttttttttcataggtacaatgtcagtcaactggaagaatggctgcgtgacaagaatctgatgaatagtggggctaaagaaaccctggaacctctcattcaggctgctcaacttttgcaagtgaaaaagaaaacagatgatgatgcagaagccatttgttctatgtgcaatgctttaactactgcccaggtagagcaactttccctgttacaaaataatttaacattcatcaaagatgatctttagggaagtaaagaagtcctctacttattgcttgtatctctgagctgacttcatctgtgttcaagaagatatatgcctctaccaatcttaaagcaaggagattttgccagaaattaatacatttcagtgctaattacagtataaatatatttaatattcagcaaatatttattgagtacttacagtgttctatataacattgaaggcactgggatacacccataggcaaaacaaagtctctgctctcatggagtatacagtctatgcagcttatattccataaaatagctttctatcttatttgataattgagtggattatcaaatagtgactttgtttttagagacagat

SEQ ID NO: 79437 - DNA, 1483 bp, Homo sapiens
gaggtaggaattatagtccagttttacagatgaggaagccaaggctcactggggctcattgatttacccaagttctcttggccacaaggagcagagctgggatcctgggtctggcaccgctgagggcccatgaccctagccaactgccctccatgcctcccatccctttgccaggagggcagcagagaaggtgcccagcggcacttcctgagcactgacaggcagatgatgggaaacacagagatgagcaaggcctagtccctgagaagatggggccaacagaccagaatccctcagaggggtcgttgactgcatcctatcagtccccactttcggaccagtcattaagtaggtggtaaggaggcagatgcttggctgtagggagaatcctcagagtaagcacttgcctttatcacgtagcatcaggcaaacaacgtgttaaactgcaaagtgactggaagaagtgccgcccattcagttccattttaacagataccaccaaagattcccttctaacctctgactgaaaaccatggtgtgggtactacgaaatagagtaaagagaactttttgtatgtattcactagtctctgtagaaatcggtctatttcaagattatatatgtcctttgggtgtagtttttaagaataggactataaagaactgaagttaagagataatttagataatttagtgtttgacagtaaacctgctgtttcagaagtgaaacactctattttttttttttttttttttttttagttaagttcctccaatttgcttcattgacattgctattgggaagacttaaatgctaggttgccaagttaaggtattgttcaaaagctagtaagaactggagggggttatgatggaagcaaacaaacacacatcagcatttgagaatgtcagtcctggcattagtggggaagctccttggacagagcagaaaagagcatgaagatgctgatcaaattggagatagttaaactgaagagacaggttacttcatgtgtatcattaactttgccttatgactctagggctttatgaagcacaacacatctcgccagaatgaacactgcctcaccaattttgacctggctgagtatcggcaggtgctgagtgacttggccattcagatctaccagcagctcgtgcgggtgttagagaacatccttcagccaatgattggtaaggccagggccccactgggcattgcagcctgcctatcattcatgcccatcgataagtagccaccagtggcacatgtttcagggcaggtattcatttggggagcataaagtagtaagatacagggctaaaattagccgaggaatcccagaaacccagccatagttaactgggatacatcgaaatcactgtttccacaagactgaaacagtagtatatggtttccttccctaatgtttactgtttaaattcagttgaatgcattgaattttaaaaaattgtcttaagt

SEQ ID NO: 79438 - DNA, 1058 bp, Homo sapiens
gcaatccatctgcctcggcctcccaaagtgctgggattacaggtgtgagccaccgcgcccagccgggtgaatttttttctgcttaaaggagcagctaaattcgcatcagtttaattttctatgccaaaaaagtgaatggcaagcaaagcaacaaactgatgaacctggtcgctgacattctgctagcaatgacataagacttcacaactgtaatgtgatttatttttataattgtttataatggtaactgaaagaaatgggtcttttggtatctgttcaattttttttaggttgttatttccctaaggaaaaggcaagtttagacttattctctctttcagaaaagaggtgatgattttgaaaccgtctccttctggctctctaacacatgccgatttttgcactgcttgaaacagtacagtggagaagaggtgagaaaaccttgattacaaaaccagcatgctatactttctctgacctttttaaggaaaaaatgtaaaagcacaaaatgtttaaccatttatttaggaacccaaattcagaggtggcttggaagttcttgctttgtttgatgttcactatctatgaagcagtgatttggagaatgacagtttcttctttacattgtgagaaagcatagagaaaaataaaataagcattggtcagtgaatagttaccagaagtaaaactttttgtcagtatgttttagtgggcatttcaagagctaatatcagaatagtgaactatttaaagaaattaatcaattttggcttgccacaatacattaaaaggtgatcaaaaatcggggggagggatggcattgggagatatacctaatgttaaatgatgagttaatggatgcagcacaccaacatggcacatgtatgcatatgtaactaacctgcacattgtgcacatgtaccctaaaacttaaagtttaaaaaaaaaaaagaaaattttaatattaatactcttggacaataagaggaccttaaaatcctttaactctaaaaaaaaaaagggtgatcaaaaatcatgtctttcgatttgtccaaaaa

SEQ ID NO: 79439 - DNA, 1108 bp, Homo sapiens
agagatgaattagggaggccagttagggagctattgcagcagcccagcaggagatgatggtggcctccatgggacatctgtagctggtagaagcagtgagaagtagctggattttggatgtattttgtagatagagccaacagggtttgttgatggattggatatgtggtatgagaaaagaaaggagtcaaaaatgaggatgaggtttgtaatctaggatactggaagactagacctgctatttatttactaagatggggacaacttccaaaaaagtaggttccttagagaagcaagaatttggtttgggagaggcttagtttcatgtgcctgagcagagttgtcaagaaggtagttgatagtgagactggaattcaagggaaaagtcagcgcaggagatatcagtttgggagttgtcattatatggacatgctccacattccagaatttttctacttaaagagctattaaaatacactttttatattacctacttaccttgaatgattgaactcttacatgacaactgtgtttttatatctcacaatgcatgcctcgtgaaaattttccatgttatataaaattattattttttcttttttagaactgaagccacgtggtgtagcagtcaatttgattccaggattaccggcatatatcctgttcatgtgtgttcgacatgctgactacctgaatgatgatcagaaagtaaggtcgttgctaacatcaacaattaacagcatcaaaaaagtattgaaggtcagttcctgttcaacaaaattctcatcatgaattgttaatgatgacagaatctgcactgattgatcttccttccttagagtttagctaagttgcttgttattaaaactttccaatttttatttacttacctatctattttgagacagggttttgctgtgtcacctaggctgaagtacagtagtgcaatctcagctgactgcagccccagtgcaatcccaggctcaagcaatcctctcagctcagcctcccaagtatctgagcccacagttgcacaccaccatgcccagctaattttttatgttttgtagagacagggtctcactatgttgcccaggctggtctccag

SEQ ID NO: 79440 - DNA, 1050 bp, Homo sapiens
ggatattgattgttcctcctgtgaattaaagtcaaaatatgtttaaccatttctgattagtatcaattaattaacaaatctgttaaaccacttactttttggacatttaatcttattaaaaagtaagccttattacataaaaaaaagttttgagtcatgtaaggttatttgatgttaatttacagttaggcaggagtggctttcagagtaagatgaccatataattttgccatctgttcacccaattttaacagaaaaaaattattttaagagaaggcaattaagtggcaaatatggcaagtttcggttgttgtagaatgcattcaaaattataggaacttggagacctctcatgttttttatatggaaaacattttctcctcctttcttacttctcataaagtgggccagatggagaacatatccccaggacagatcattgatgaacccatccgaccagtcaacattcccaggaaagaaaaggatttccaagggatgctggaatacaagaaggaggatgagcaaaaacttgttaagaacctgattctgggcaagtattttctgcattggataaaagttccttctggcacatgggttaatggtgggaaaaactagtcactaatttttgagatattcagcgtaggtttcattagtcatcatcagataccatgtattctagtgctgcagtagtgttctgaccacaccaagcactttcagtccaactgcagggacacatgcctcagacccacctacaaggattgctcaagatcaggtcttctcagccctggctgcacattagaatcacctggaagctttgaaccatactgatgtatctctctccctcttgcccagttaaatcaaaatctctagagagaagagcctggcaatgtctagtactttaaaaaaaaaaaaaagaaaaagaaaaaaccctcaaggccagcctcgggaaaatagcaagaccgcatctctccaaaaaaaaaaaaaaaaaaaaaaaaaattacccaggcgaggtggtacatgcctgtagtcctagctgctcaaaaggctgag

SEQ ID NO: 79441 - DNA, 1058 bp, Homo sapiens
attttagaatttcatagggtggctctcatagagacagtgcttcacacatggggagtgtcagttcctacctaagttcaaccattctttccacaaacctttttgtgcattcatcaaaatttatttttgcctagtcagtcctcctttaaaagaaagcattctactggaataccaatacattctacaaagcattcagttgattttcccacatggagtctactggaaagactctgcagtgagcctgctgtccatcacgctgtaaaggagtttactgcgttgtatattttaacatatggcttttattgtagctgcatttcccatgcctgccaattttagccaggtggtggctccaccaatgagctcttatgtaaaactaacgtgttgtttctgtgatattgtgtctattttcctttgatgcattttagaaggcctgtttcgatttttctaatatatttctctttttgatctttaggatttgatggaacaacttgaaaaacaggataagacggtccgtaaactgaaaaaacaactgaaagtatttgccaaaaaaattggcgaactagaaggtatttaaacctttttttcaagacggtcactgagtcttggtttgagtcttggcttaaagactaggctatataagtggcctaatagaggtttgcatgcaaatattagggataataacaaaatatgacttttggcaaacctaacctcttttgagtagaaatttacatttttaaatgaggaaaaatgttcttttcatgggtagtaataatttacagattttactctgtaagcatctaatgaatatcttctatatgccagacaatgtgctaggcagtatagcataggagttaagaatgtggattctggagtcaagcttcttgggttcaaatcttagctcttctacttattaatcatatgatattgggcaagtttctgaacctctgtatgcctgtgctttcccatctgttaaattagaaagataatagcatctatctgacatggtttataaggattgaatgagctattaggttggtccaaaggcaattacttttaatggc

SEQ ID NO: 79442 - DNA, 1682 bp, Homo sapiens
aaaaatccttaaaaagtgataatttcatatttctatataaagtctatattgtagtgctagcccgattttgagaaaaattgtttaggattggtggtgatttgtgtcttttttaaattaacatttttaatgacctataataaaatagtatgaattttctctgaagatttaacaatctgaattatccctccattactccatttgtgataatttacattacaaacagttttctagtgtcatttattcaaccatcttttatatgaattagaagcaaaacgcaaaggtattctttttcacagtctgtctgtatgaggctccaccatgggaatgagggaggagggtgggggcagtgtgtgggctctttccaaagtgattgacatctcactaatttgtggggaaaattttctgaatcatgaaatattttttgaagtgttattttacaaagctcaagtatactgttgcttaaattaaactaacaatgctttgatgactaagtattaccaaatatactgaataatataataagttgattgattggcatacaagttctgtgctttaaattattgttttaaaatacaaggtgaaatcgtgaaataaagatgcttctgggtggcagatttccagggttttttcactaagttggtcagacatttctcttgcaaccttgtttgcaatattaatttttttggcaatttttcatagctaatacaaaaaatagactaagcccctatattctaagctaatagagcccagttaatgaatttgagtttggggaaaaccttttgtaggtcagctgcttctcctgccatcacactgactactaattcaggaggatggattcaaacataagtacaggaaatgatagactttttcaaaatcattgttttctcaatcttaattgtgcatttctataagaaacacttgagtaggatattaaagcccagcaggagacctgggcttagtgctcttgaaactctaccttgcccacctacctaccaccaacacaaaacacaaaaatgatttttctacctcatctagtgaacaggcttcacaggcctcccccgtgctgtctttcagcgaaggaagatgcacagcttcccaccagcctctccagcttcacaagctaacattgctattattctcacttttattatatttacctcccctattcttgccactgctgctggcggcaaaaaaaaaaaaaaaaaagtgcagcaagttgtgagcatcatgtgttggggaggctgggagtaaaaaggcaggaggttggaggagggaaatgacagccttatctgggcctgctaagtgatggcatcctggccacagcctctttcctttgttcacacaagaaacatctgtacatatgtaattagaataatctatactagaaagataaaagggtaatggaaggtgacaaatcagagcctttcaagtatatatagtttcactatttgtattttaaaatattttaaaattgattttgctgaaagatagcatttccctcaaacacacagacaaaaacaaatatccattgtgcctgttttttcagtattttgaggaattatatgcagatgaccctaagaagtatcaatcatatcggatttccctttacaaacggatgattgtatgtaaaaccatagtgcttttctgctgtcttcccttgctacttatagccctctgtaact

SEQ ID NO: 79443 - DNA, 1060 bp, Homo sapiens
tttttttgagacgaagttttgctcttgtttgttgcccaggctggagtgcaatggtgcaatctcagctcactgcaacctttgcctcctgggttcaaccagttctcctgcctcagcctcctgagtagctgggacaaaaggcatgccccaacacgcctgactaattttttgtatttttagtagagatggggtttcgctatgttggccaggctggtcttaaactcctcatctcaggtgatccgcctgcctcagcctcccaaagtgctgagattacaggcgtgagccaccacacccggcctcctatgaacctttcaagagaactaaaactctcctgtttcttagggcctctgagaactttatataatgcagaaagacacaaatgtgagagcacccgtttctatttctgcttcttgttttagtttcttgactttaatcaagtcagaagataacacagatactaaagaatatctgcttttcctactcttgcaagtgaacacgatgccttacacccgttaggcagcaactcggggtgtcgtctccccttccgacccatgtgtcctctccgcaggctcctggaatcccagctgcagtcacagaagaggagccatgagaatgaggccgaggccctccgtggggagatccagagcctgaaggaggagaacaaccgacagcagcagctgctggcccagaacctgcagctgcccccagaggcccgcattgaggccagcctgcagcacgagatcacccggctgaccaacgaaaacttggtaaggagagctgccgggtccacatgcttcttaacctagcctgcccgacagtctagtttctttttgatcaaacacgggtttttcttgctgggaaaaactcacccctctgtacttgttacccctcttactccagcagagacagagtaaggaaaatacaaatattttggtaggaaggaagaaggcacaggttctctttatcacggagggctgcgtgctcttagacctgccctggaggcagacaaccacctgggtgcaggctgggcttttgatggcaggtgatctgcttcctccatttc

SEQ ID NO: 79444 - DNA, 1007 bp, Homo sapiens
atgctgtctaaaagcaagatgaaatgcatgatttggcactctgtgtggttattatgaaattcacatttgtgaaacagcaaatcaggagagttttctgcattgctatagctcagaataattacccaaattcaacccgttaaatatgttcagaggagagaaaataaaattgaaacagcagcacctttctaacacagacattcatctgctctagtgatatttgtctttaaaatctcattaaaattctattttagtgattaaatttttaaaacactcaaatgtttgttcaaggggcttctgcttattctgctttgttctcatcattaacgcttgtcattaactttggggtgttattgctgcagatctttttgaaatgttttaatcactaaatatttttagtccactgttaacagtttgcttgcaatggcatcattaagttttacccagcagttggcaaccaagggactggaataaaagaatgtcttttctttcttcacattagttagttcttaaccataactttgcatttggaagagagtgactgtagaagcaggggtgcgtggcaaagggaggatgctctgactctggtgttctcactgccaatgcctggtctgctctgtgggcacagctggctgtatgtttgcttggaaaagcaataaccacttttttggtcctattaatatttgtgttctaaaaccacatcttgttaggattctgtttctgatatgtaagtttatgcggagagagaagatgacagatctaaaatatatataggaaatttcagaactatttgtgtggattcgggtaaatctgtatatataaggctggagtggtgttccagcctttctgtctttcagaataggagtagaatataattccctctgcctggaattagtaactgtagttctgaaggcacatttagttaatttggaagtttataatgttggcctttatagtgcagagttgttttgtggcaaaggtgtactgtctttgccaatttaaatgctaat

SEQ ID NO: 79445 - DNA, 2444 bp, Homo sapiens
ggagaatgcttataaaagtatttggttatacttaaattttaatttatcagtttaaattataaacatatgttatatctaagaatgtgttaatatagaaagaactgtattgtatcacaatgttcttccatccacttagctattctatcaccagtgtgcctacttcatgccaggccttgtgccacatactgggaatacagtaataagcaagataaatgcggttcctactctcactgagattataggctgctggggagacagctgagagggtttggactttattccaaagataatggaatcctctgaaaggtgttaagtaggagaatggtgtgatgagatttgatttttggaaagctagccctggctgttatgttagagaatagactgcagtagaacaaaattggaagcataaaggccagagagtattcctgtaacccagtgattatggtgacttgggcttggctggtggcagttaggattgacagaaatgggacgttttgaaagatacataagaagacgaagtcagaaagctgtttggtttattgaatgtgtgggcgagggatggagaagcctgaaggtgactccgtggtttctgctatcttggttaggtgtggtgataccgttttgtgatcgtgggactggagtgtggggaaatgcacagtgaagatgatcagtagatttatacatatggatttaaggagccaggaaaacatccagagaaagaaatctattaggcagttgagtatataaatctgtagacaggagagatgtgtgtactgagatagaaattttgaagtcatcagagtataataatacaatggaaaccgtgtaaataggtgaattctctagagagatatgaactctctagatgtaaagtagaagacaatgcctggaatttgggttatgtaaacataacaacaatatagcaggagtaagaacctggactccagagtcagtgctgggatccactacttaccagctgtgtaacctctatgggtatcttacttccaagcctctgcgtcttcctctgcaatgtggcaaatgacttgttgggttactggggaaactgaattagtacatgtggaaagaatgtagaacagcatctgacactgagcaaacactcaaaaaatattatttttatattctaagtggaaaataaatgattactaacattatcattactaattatacgtttttaataagatgtgatacatctctaatatagcagtttttccaggcatacaattaatttttgacacaaaaaagcttttaaaaatcatgtcataaaagctgagaaccttggacatgttctgatttatgttactgctataagaatttttaaaactggttttttaatgtgggaaattaggttttattaagctaaaaacgttcctacctagaggacttaaaaattcatcttgaaaaatattatgaagtttgccacacaaagacagtagctgaagtttttgttctatatgtgtcataacctctaatacaatatgtgatgtattagatcactttgctagctgaataaaacatcaaaaacagaacctctttctcaccttccagtcatttcttattttgcaggtaaagtagctctacatccttgattattttgctttaatttctatccatttacatgtgatgctacatgttactcatttttaaaaattaaccaaaaataatttttgtggtaatgtcttaaagttgtcataatgaataaaaacaaacttataaaatgttgaaatactgcatgctgctgttgaccatcgtcacctcatcagcatcctgtatccttttgtgttttgcattgttgttccttttgcatggaagatcatctgctctggattaccatgagttgaatgaggatggagagctgtggctggtttatgaagggttaaaacaagccaacaggttatatttgtctcctcaaaatggaatgttattaatttgttgtttttcttactaacagtgacctcctgactttcacccctgtatttcttgtgcattgattgtcttcttgggtaaattagtgttagtaattgtgttatttgttcaaagcttttcagtaaaactgagaacattcagccaaacaccttttttttttttcttttttagacggagtctcactctgttgcctaggctggagtgcagtggtgcgatctcagctcactgcaacctctgcctcctgggttcaagcaattgtcctgcctcagcctcctgagtagctgggattacaggcgtgcaccaacatgcctgactaattttctgtatttttagtagagacggggtttcaccatgttggccaggctggtctcgaactcctgacctcaggtgatgcgcccacctgagcctctcaaagtattgggattacaggcgtcagccaccacacccggtccaaacaccttctttaaaaaccttcactacaagatactattaaagctaaa

SEQ ID NO: 79446 - DNA, 1391 bp, Homo sapiens
tcatgaagtagtagaaagaatggctttgtacattccattaaataggtgcctggttatttttctaatgctgtatatactatattatatactttataaaatatatatatattttttttcacataatgtaaaacacatatatggcccatcagtgattttatttacagggccgtgacattgtagaatcttcccacctttgtagcagagtgctagtgtttctcaggagaaaaactgaaggtacctcttctcaactacctgggccaaactcccctctgcagttacatgaggttggggctgatgctttggtgggtcacaggtatggtggagcacataaccactgccccccagttataccaaataaatgtgttttatgtccaaagcttttgagttgaatcttaatgcgtaaatgtgttatttccctctcagaatacaatgacagattccacaatacttttggaagatgtacaaaaaatgaaagataaaggtgaaatagcacaagcatacattggtttgaaagaaacaaataggtaagttgatccttcttttattcattttggtttaattatattgatctttagccttcaagccagcctcttgtacagtaaaagtgttcatacattcctttatattagacattaactggccttcaaagggaatccaaggtttccagtgtatttctagttaagatcttcattataatataaggtaatagtattgacaaaaggtgtcagggaaaatgtgctttaaatcaaagcaagattttaaaaatatttaatgtcttagctttaaggggctgccttgagaagaaaactacctgctcaggtcatacaatcttaggtagtcactttcatttgttattcaggatggttatttgtgaaggtttgtaggggcaactgcagttttcaatatttgaaacttaagagtgaaaagaagtgatgaggtatctggaatcactcagtgttggccatgtaactctaaaagggcaccatgacttctaggatagaagaatgaaggctcatatctggaattccccttggccttactaccaccctccttcccagcaaagtctattggtctggggctcttgatggatagtttcaggattggtaaacatacatactttataaactgaagaatattgccatacaaaaagaaaggtgcagtcagccctcaatatccattggatccctatctgtggagtcaaccaatggaggatggaaaatattttttaaattacatttgtactgaacatgtacagacttttttcttatttcttttctttatctttcttttttttttttttgaaatggagtttccctctttcgcctaggctggagtgaagtggagcaatctcagctcactgcaacctccgccccccaggttcaagcgattct

SEQ ID NO: 79447 - DNA, 2747 bp, Homo sapiens
acaagatgtttgactaatttgggggaataaaattcctgtaatagtggagttatatagagaaatgggctttcttactttaaaataaatcacaggccaggtgtggtggctcacgcctgtaatctcaacactttgggaggccgaggcgggcagatcacgaggtcaggagatcgagaccatcctggctaacacagtgaaaccccatctctactaaaaatacaaaaaatcaaccgggtgtggtggcaggcgcctgtagtcccagctacttgggaggctgaggcaggagaatggcgtgaacctgggaggcggagcttgcagtgagccgagatcgtgccactgcgctcccgcctgggcgatagagtgagactccgtctcaaactaatcataatcataatcataatcataatcataaaccccttaagccagaaatgagaagaacccccattttggcttgccgtataggttgcaccttaccccagggctgtcacagttggttcccttggctaccactgtggctgggcctcaagaaacaaggcttgcaatctagcttgagcagagtccaaaatcaagattcctttctctagttttcttgagacaaattagtattctttcttaaaaaaatgttaattgacaaataataattgtatatatttatggggttgcaatgtggtaatctcacaagaaattttagtaaaaatcaagagaaaggaaaagaaaaatgaagcaaaggacataaaaacagtccagctaacagagcacatagttctgctatcacacattctcccttgcccggctcacgtaccccatgtgacagctgctctcctgaccctaatgggctgacccggtccaactgaggtacctaagttcctcagctcccagcctaaacatggtagcactcgtgtcccatcctaggagaaatgcccttgacactaattaagatcttccagactccccagggctgtttgtctcactcagtttctagtctgagagacacatcatgtcaccactccattgcagggcagtggtgagcaacaccctgtgagctagggaatgatccagcccaggcaggtcttgtgtattggctccacctctagagtattctgggaatcttcccttggacaaacgacttctgtgagagacataactttaactccacagacctacgataagaatttcacccacaaataacaggagggtcattctctcacatactcaaagatattttataaccagaaaaatcaaaacaattttaaaagaatttcaagcatttgttcctggaaatagaagttgtcaacatataaatatatattagtctctgttttatgacagttccaggaatgttaatgtatatatagagttaattttagagaaacaactcatggctgtttttaaattagcttttatctgttataataggaactcattgatgaaatttatttatggaactaagggtttattgttttctctgttttttgtgcttgctgacttgtgattctcaggatgacaaggtaattatacctttttttttttttagtaaatacttctatttaatcctaactttagtttacaagtatcccccaataaaggcaattgatgctttctgaccaagtctattttgatattttgaatttgtaagtgaatttccgatttgactccttctgatttgggaagtcagtagggaaacagtggttatagtaggctccagtctagattatagaggggactccatgacttctaattcataggcagctctatgactcactgccgtagttctggtaggctgtccacaggctggggagggaagcccttaacttggagtacactcaaaagcacaggctctcctgagctctcatatctaccagtggcgggcttgttggttaagggtgaaggggagcctgaggagctgagcacactgttctttgctgccattttcatctccctgagtgtagagtccacagctagaatgaaatgtggctcgttgacgaggttgcaaagtcaaatttctctaccatatccctgtttctctatgtactgagtgacagatattgctggaattttcctatatagcacaacccttttagaacttctggtcacaggcttaagagagacaaagtttgagcagtgaatcaggaacttcctgaatgctggtggcccaaatctgatcccattccccaagtgccactttttagctaaggtagtcagaatgagggaagaactggtgacttaccacccaggagagaagcatactaagaagcctttcttctcttggattagttaatttgatcaagttacctcatttgctaaaagttcacaaccataccatgtaagtcctgagataccagagcacacagatagcattatttgatgtaaacacttgggtctttgaaagttattacttatgggttttaaaaatctgagtatggccctttataaaacagaaagattttattcctttcagagaaagagaaaaaagaacctctttgtaaaacaggtactaaaatatttacaaaacatagctaaaaaaaatactctgtggttttaatgggaaagatttttaaaattcaataaaatgtaaactatttattagtatatttcatgagattatagttggtcttctcagaggaagcatttataaacttacaaaaggatagcattaagagaaaagtggtattttttttaaggatttttaaaatacacattgaaattcagaaacaagcatttgtaagtctctgattggcattaaagttatc

SEQ ID NO: 79448 - DNA, 1573 bp, Homo sapiens
attagaagttaaaagcctaacatttcaatagtctttccattctgctttataaaggaagtaagaggagactactaaagacttcagggatccacccatctgaatcattcattggaaatatcctggccagctggaccctcagatttcccatatatttatctgcaaacaaaagctaggctccatagcactggctaaactcaccccttgggactcagcaatctctccatgccagtgaacacaccctgggcaggccagaatactacatttgactctggaatttgggctgatgaagcaaacttccattgaccttgctcaattctacttgatgtcagacttccttaatttgcaaagcagggctcctggcagaacctaggaagccattcactagggtaactctgatgaactttttcagcagaattcttctaccagcttgggagaagtttgagcatccaacgtaaagttgaggatgacagcaatgaacttttctttgtcttttcatacagcgtcaagaactagaatcagaaaacaaaaaactgaagaatgagctaaatgagttgcgcaaggccctcagtgagaaaagtgccccagaggtgaccgccccaggtgcacctgcctaccgtgtcctcatggagcagctgacctctgtgagcgaggagcttgatgtccgcaaggaggaagtcctcatcttaaggtctcaactggtgagccagaaagaggccatccaacccaaggtaagcgcaagcacacaattaaactgggtgttcggggactggcctcaatatcttcttatcccttccctccagtttataatgcagcaaacacttaagagcatttttaatctaattgaggattcattatttttttaaaaaaatcccagtgttgtttaaaactattgtaagtataaattggaatgagcaaaaagccaggggaatcccaaatgatcacaaagtttcatctctcatgagttttaaaattaatctttttgtagtaatctggccacaataaattttaatctaaaataaaattttattaaatacaaaaatctctaaattttcttactgcgggaaggcattaaatacaactttaaaatcatttgtcaaaaatagctggtttaattggagaagtaacagatgaaccggttagaagtgacatcagtgagtggaagttacatggagatgatttctgctcactttaggcagttctgtttagtagcggggtgatgtcccagtgggaggggctgtttaaggattcaacagagaggactcctgcactgaggatatagatggccctttgaagtccttccctgccttcatttgagacccagtgctgccgtatgctgaagagagatgggcctttctgtcatttgccaccagagggaatctgagtgatcaccttgaaaacctggcctgcctccctgcccttgtgcacacagcagagcatcacaggactcaaggcagtcaagcatcccaactgtgtggtgtgtcatataaaaaaatccatgatatataatgagctggatgcctgaaaatctgagagtactcctcttagaaatgatatttctgcatgcagtttagat

SEQ ID NO: 79449 - DNA, 1010 bp, Homo sapiens
gtatttcttattctgtaagtttgcctatttttccattgagctgtttgtcattttctcattggcttttatgtcttctggcttgtcttgaccatctttgtgattcctggggtttaggaaccaagtgagaagaaggtacctctggacatgtcattgttccttaagctccagaagcgggtcacagagctggagcaggagaagcaggtgatgcaggatgagctggaccgcaaggaggagcaggtgctccgcagcaaggccaaggtgcgcagcacagcccatccgcagagctgaagctgggctttatgtccatttcagcagtctcttccttagtggagactcagcccagcctatccaagcaccacttggttaaagtagtgagggctaaactctcttcactgttttcggtagagcaagtaaatattttaagagtaaaaatgtgacaattaaaatataaaactttaacttttccctaggaagaagaaagaccacaaattagaggtgcagaactggaatatgagtcactcaaggtaatggggagtttctgctcaagactttgaatattttgttttggcaagaggcccattcagagcctctctttttctcagagaacatccttaagggttggagattgcaccagaggtcctagcttcagccttattcagcattacttcttgtgttgtttctttttataaattccatttcatataagctagactttagtcttaacaggaacaggagaagtagctgctgttcgaggctgtggtagtaaaggacgtggactctagcatctgccactataaaaatccaattgggtatgatggggcagaccagacataggagtaggaatctgctctccagacttctcctgcttcacacaataatgaatgaataaaaacattctctgtagtgtgaatgaagcctggattcacaaagtattagattagtggctctcaaaatatggtccctggaccagcaggatcaatgtcacctggtagcttgttggaagtgcaaat

SEQ ID NO: 79450 - DNA, 1011 bp, Homo sapiens
atgattgtgcatgccatttcaatatattttatgaggtttttgtaagttttatttgattatggcactaaaagtcagtgcttggaagcttcacccagtgcttcactgagcactgcttcacccagtgtgactgaccgctcaaagctttcaacacccaaaggggactcgactaataatcagaagtggttttcatttgggcatttggttttgcaactgttcttgtcctgtcatgccagtgtacctttttctttgaagcggtgacctttttgtaattatttggtcaaaacaatatggaacaaatcacttgggcaccaatacaagtcaggaagtagggataagaaccaagtcaaggtggatgctgtcttaactatgcctagactaattatgttgcattaattatacctgggttatttgccttgcagcatgtgcctaagcctggacacaagagaacagactccacccacagcagcaacgagtctgaatatatctttagctctgaaattgcagaaatggaagacattccatcaaggacagaggtacagtttagacatctgtcactgaaagtaggatatgagcatgctgttgttaacaaggaacatttccattgcaaagcagactccaattggccataaacatagtatttgtttgaatcatttattcttcataagtgacttgtagatacaaacttatttacatttttgtatacttaagtgctgtgtacatacatacctattgcatttttttgtcaatacaaattttaattttaatttttaatgcaattttgatggtgagattttatttttataattctctttacccctaacatgatatgtttacaggaatttatttcagactgaggtaaattattttatttttacttattatttatttactttatatctgtggaccaccgctgtagacagaggtaaattatttttaaagtaagccctttgtccttgaatattataaacaccagtgccccagagtttagcaaaactgatgcctctattttat

SEQ ID NO: 79451 - DNA, 1052 bp, Homo sapiens
caccgcatcgtgcagcaggctaaggagatgacaggtaaagcttatatgcgtactacacgccaaccaacctcacaccaaagttatgtaagttacaatgtcatttgatgagttacacaacattatttagaatttaaatatttttaaaagttgaggctgtcatcagcaaatttataaagttccaagaggcaacagatcagatattttggttgaattcgttgcttgataaacttgtaaatctggtatctctaggtacaaatgtgaactccggttcagtcagtgtcatatgtaatttttttttaaaattaatttgttctgcatgtgtgatttactagttaaggcttataggattcctaatgatttagtaagaatttttgagctgatatgtgtatatttctgtgtgtgtgtgtattgtcttttttttttttttttttttttgctaaatcaatggatgttattctaagattcaccactctttgctagtctaaaaaaacactaatttttaaaatagagaactaactagatatggacatttattctattttctgtttgtggggtaggttagaatggtgataagtttataaggaatccacatatatataaatatggggtaagaagatacagatctatacagtaattagtggtggaaatggaagagaaaagatggtttggaatggggatatattatatgaaaataatacattttcatatacattctgttgattacactggtattcaaaaaaggcaaaaatgttctaagattttacaatgagataacaaaacaataaagatatgttattagtaatacggatattgagaaaaaagtatacatttatgaggcaaattaatgaggccagttgttggagtgttaagtttgatatgtcagctaggacctcaacatggaggtattcagaaagcaaatccagattaaagagtagagaaaaaataagaagggagcctaaagatacccattaaaactgtggtggtaagagagactgcctcacctctcctagctgaaggggctaatactgaggaaagagaagaaaacctggaat

SEQ ID NO: 79452 - DNA, 1056 bp, Homo sapiens
cctcctgccttggcctcccaaagtgttgagactataggtgtgagccactacacctggccaacttgggattttgaggctgttttaatcattcgtacgcatcactaagctagtaaatggtttttagcaacattttgatctgttttcaaaaacaagtatagatcctcctatttctgaattaagaatcaggaaattaagaatttactatgtaactcaccctgtgactatgagaaaatcacatccatcttgcttaccacatcaaacagaattgaattaattgtgcctgttttcttctctgtttgtgtcacctagaaggtattggttgtgctattgcaaatgttgtagtattttggttggatactatatcaatgttatgatgatatagcatgaatatgatgaataaacatggttttcttactaaatacatttgatgatatgtgtatttacttattgttacttatgtgtatgtttaaagaacaaagactacaaatgccttgtggagaaactaaccaatctggaaggaatatacaactctgagactgagaaactacgaagtgacttagaacgtcttcaactaagtgaagaggaagcgaaagttgccactgggcgggtccttagtctgcaggaagaaattgccaagctccggaaagacctggagcaaactcgttcagagaaaaaatgcattgaggaacatgcagatcgatacaaacaagaaacagagcaggtaggaataatgtccatatccccatctactccgtacacaaaagagaggtgctgtcatcatgacttggtccgtgtgactcactgttggttttattagaaatgcagtacaaattttagttgaattactgttcattattactgtttcccaagcatttatttctcattatcaatgagtaggctgtaggtcttttagtagaactttctactctaataagaacagaggcaaagctgtatttttaggagagaatggccaagtacctactaacacttgtatattaaaaaaaaaaaaaaaaaaaaaaagtcagtctggggcatagactccttttaaaaaaaaag

SEQ ID NO: 79453 - DNA, 1145 bp, Homo sapiens
gtggtggggatatctcttattttagtagcacatagtttacaggatgcctggttctgttaattttatagaggatcatctgttgccaacagaaatcatatactaataagaaacctaatgtattttttctttctttttatagttgtttttcttttggtaatctggtgctttttatttagacagcttccaactctatattctgcttagaattatacacataatatgtgcatatgacacatttttatgtatgtttctgaaatcaccttctaaagtctacttttcaaatcacttttaaaaataattttgtagcctccatatatctgtgataagtataatctacatagtacattgtcaattcaacttttatgtcttttcctctaggtaatgtgtggattttcagcccgacatagattgataatcatgagtgtagtccagggtcttgacattgcttgcccttatccttttctgcagatactccgtgagcacaaagcagtcatcattcagaagcgagtccggggctggctggcccgcacacactacaagaggagcatgcatgccatcatctaccttcagtgctgcttcaggcggatgatggccaagcgtgagctaaagaagctcaaaatcgaggctcgctcagtggagcgctataagaagctgcacatcggcatggagaacaagatcatgcagctgcagcgcaaagttgatgagcaggtgtgtttcacaaaggggccctgagagtggagtatgcctgaagaaatccaccaggattattttcaatattgtttttctttgactttacccttcggtcttagtaaaaagtaaaattatgaccgtatttatttccataatgggcatggaagtacttatgaactcataaggtggatcacaattgcaaaaactaaggcaggaagttattattattattattattattattattattattattattattactattatttgagacagggtctcactctgtcgcccaggctagagttcagtggcatggtcacagctcactgcagcctcaacctgctgggctcaagtgatcttcccaccacagccttctgagtatatgggactacaggcacgtactaccacacccagctaatttttttattttgtagaaacagggtctcatgttg

SEQ ID NO: 79454 - DNA, 1080 bp, Homo sapiens
taggaactgtatggggacaaccagctattgaaatgcatatttatttattttaaaaaattcttttttagaaataggatctcgctctgtcaccctggctggggtgcagtggtgcagtcatagtacactgcagcctcaaactcctggcctcaagcagtcttcccactgtggcttcccaaagtgctgagattataggtatgagccattgtgcacatgcccagcctgaaatgcattttaaaatactaaataatcacatacagttattaacaaaacaatgggaaaaaaacttttacctccttctttctctttgtttatataatttgaaaaaaaaagtatgttagtttactgtggctgctataataaattatcacaaacttgttaccttaaaacagccaaaattaattctctcagagttctggagaccagaagtccaaaatcattatcaatgggacaaaatcaagttgtcagcaggctgctctccttccagaagctccaggggagaatccattccttgcctcttgcagcttctggtggctgccagcattcctgtgcttgtagccacatcagtccagtctcagcctctgttttcacagcattttctcttctgtgtatctgacttgacttctcctatctgcctcttataagaataattatgatagcatttggttccacccatgtgatccaggataatcctcccatctgaagacccttaacctaatcacatctgcaaaggccctttttctgaataaatagcatttgcaggttccagggattagcacctaatttccttggggccccctattcagatgactacagagaactttgaatagatagaatatatgacaaacaggttaaaggttattccaagaatgagacaaccttggaagaatttaccatggtgaagaggaggcaaattataacattaatgtggttaaaattgtattgacagatacaatgctccaaaagtttttgacaaataatcttacatctagcaataattaatggggtcaccagagtagtcttaattatcacctgtgaccattgatgaacgatttttatctctttcattttggcaaggtttgg

SEQ ID NO: 79455 - DNA, 1029 bp, Homo sapiens
gactaacagctttgatttttatttgtaggtttgatgagaagagggcagtgcagcagctgagagcatgtggtgtcctggaaaccatccgaatcagtgcggccggtttcccctcacggtgagcctggcatttttcagatgtaagggatcctaatgggagaagatcctagttctttaagtaaactcagatggttttcttttaataggtggacttaccaagaatttttcagccgctaccgtgtcctaatgaagcagaaagatgtgctgagtgacagaaagcaaacatgcaagaatgtgttagagaaactgatactggtgagaatgatttcgcttaccgtcatctgagcagaaggccttgtggttctgaccttggaaagccccgggaacttttgtataacattttactagtccagatcatttcggggtgggatcagagaggggcacactactgtgtttaggatgctggaactagcgaggatgatagtccaccgtcaggaggcagagctgtgaggcctggacccacatttgaaacacattcttcttagacagcttgattattattgataaaagtgtacctagtacttacatctagaagacaccaggccaaatgctgtgtgattaagaaaaaataaagcttgttctcaggtaatatagtcttacttggaaagtaatactttttaaagacgagtataatatttaactgtagtgtctatatcaaatgctgaatgaatggaacaagaaatcaggggatgacaaagcgacgtccagctatgggaaggagagatttcatcaaagaggtgtgttttgagtcaggccctgagaatgggtaaggttatgcaaaaatggaaggagactattataagagggagtaagagcagggtaagcatagggtttgctcagaaaacagttttttgcagtgtgagatttgtgtatgggacagtagagaaatggttaggaaatgtaggttggtgttacagagagtcttgcagaccaggctaaagagttctccaactttactgtgacctggaatgc

SEQ ID NO: 79456 - DNA, 1035 bp, Homo sapiens
cgctgccacgctccttcctttctggctcatctgaaacctcagatcttccctcttcagcctcccaggtgggatcctcaggtgaggagagcctagagctttcactgtgagatcatacgacaccatccactaaaactcttctccacccagttttagacctgtgactctgcataagcctttcccgaaataattttctctacagcttaattctctcgtgcatatcgtctctcagaccaccccatctttgcttagttttctgtttgttttgtctctatatttgtacagtgcctcggtcagctccttcagaacagggccctcgcctttctttgatgtcttatgttctctgagagtgggaaatgttacatacatgcttagtgcctgaacagggagtagggctttgaatggaggctgagcgctcctcagcttgctgtcctgtgcatgggaccctgtgcctggtgtagacagaaacagggcctgacccaggtccacagcctccagtcctgatcctaggtccctaattttaactcctctctgcctatcctttgtcattctctcattcattacctatactcttttaagtcatctgctacgttttccagtatcttccatcaaaattcccactttatgtgattaaatagccttaaagcaaggttatattgttagttacatatgactaagctcataacaggtttctgtagcttcctgtggggaaaaggagtgggagtataggaatctatatttagcagagtaagcatgaaaatggtagaatttaggcaaattttaaccaaaagccctagcattcttgttttgtggcagctcctcttctgaagatgggtcaagtttataagtggcaaagttttctccattagtgtcataggaagggaatttcccattgttttacctcacctttgactttggacaaagccttgataccctcttctgccctttttcatgcagttcagaaactccctgcacctgcttatggagacactcaatgccactacccctcactatgtgcgctgtatcaagcctaatgac

SEQ ID NO: 79457 - DNA, 1050 bp, Homo sapiens
gattcttgctgttgttgttgttgttgttgttgttttgagacagtgtctcactgtcacccaggctagagtgcagtgatgtgatgatcatagggctcactgcagcctcgacctccctggctcaggtgatccttccacatcagcctcccaagtagctgggactacagatgcatgccaccatgcctgtctaattttttgttgagatggggtttcaccatgttgtccaggctggtcttgaactcctggtctcaagggatccacccacctcggcctcccaaagtgctgggattacaggtgtgagccaccacacctggccaggttctcattcttgaggcatctttgatcagttatctttattctgatttagttttctaattggcttttgagtccttagtcatcataaggtgggtatgcattctgacaaatcatttgcagtgactgccagtctgtgtaacattgtttccattgaagtggggacagtgtgtgatttacctaacatagcttggaggcttcctctgctgctggtctttgctgaaacccaatctaggagtatcaacttcataatttcactgcatctgatagaagccagtatcacatagtgtaaatgtgttctcttggaagtactaattttagaagattaatatctgtgttatgtgttttgagtagaattatttttgtagtaatacagtgtggagtatgtttgtgtatttatgtgttttgtctttttttttcctgcagcctctagcttacaatttgaaaaggagtttaaaaaaatatatatatatatggaattataaacttatcagaaggtgctttatttgatatttttccaccataaagaaatcttctgtggccacatctaatatcaggaagcatataaataaattgcaacttgactaaataccactgaatttcagttctaccaaataccattaaaatgagttttaaccctctactttctgtatagctgattaataaggggaagcacagttcatctactgagtttatgcctcagatctctcatctataaaatagaatcatgatagcatctaa

SEQ ID NO: 79458 - DNA, 1988 bp, Homo sapiens
ctcaaaaaaaaaaagaaaagaaaaaaaaaacactgcaaatgagccaagagtggcattacaataagtacagaatacagtgggaaagttccagacacatgaggagagtatgcattggaaatcttgtggcacgtaagtttcacagggcatggggtcctagaaaatatgggtcatttgatcatcaccacgaaagtcttttcttcccacaaaaatagcaagatttgtgaaagaaccaaaggagacaaaagagataagtaaaggaaggcagaaactccccaagaatgagtagcagtcattagcatctgtagagactagaagtggtggtgtcagctgcattggctgggcagtggctgggcagcaccctgaaacaggagctgtggcagtgattggattgcccttcccacccggactagcttggctgccattcatctttagagactaaatcacacagccctcctcagggaagcctcccctgaccagcctgtgtccaaactagatgaggactcttgctcttatagttcacgttattttcctttgtaatactactacagcttgtgattatattccttatggttatttggtttctgtccgcttcttccacttgtctccaagctccatgagggcaacatccacatcggtgttgttgcccatgtgcagtgactggcacatggtagacagttaatacatatttttatgtgaatggagatgagaagcaatggtgaggacagtggctgaaggcttcatcggaaatagcaatggactagcagttgcagttgctaacagaatttaatgtggaaaccagaaaagtgagtcgtagactccatgactatcacagataatcagggcagtcaggagaaagaccagtcattaactaattctgagccacgtgaacttcagcaccacagtcccttaggagaagtactttgttatgctgaaagcattgcccagcatgattcagtagcctggagggcatcaacatagttgttaaatgccagctaaggcattcctgtgtcccatgttgttagcagcactctacgataacttaagaagccaaaagtacatagtgcagttttgaaaatatacataatcaaaagatcacaaagattgctacattgatcagctatttaaaatatttatatacctagatttacttgtttaccaagaatcctacgtagctgaggttttcctgttgttttatttgctttctctgtgtgtaaatcatgcttctcccgtgaggttgttgttgttgaaagccacagattatctcaaattatgttggtatcatcttgactacattctttgttacaatgatccagtaatgactgctttttttctttttcatttcagcatgtcttcaaattggagcaagaagaatatatgaaggaacaaattccatggacactcatagatttttatgataatcagccttgtattaatcttatagaatcaaaactaggcattctagatttactggatgaggaatgcaaggtaagtatgatttcctggggtacttggtttatcaaaatagatgtatcaaggtcagaagataagtgggttcaaggagagattcattagtatatcatggaatgccgtcgtggtgacaagtaggggttatgctttcattccaaagggacactagaccccaagggttctaattacaagtgaaactaggagaatttccctcctcttttcagctgattctaaattacatgaaaaattgacgttagatactaacaattttagccacttttgttattaatttgtttagtactttttggtcagcgatagaatttaaagaaatgcaagaaactgtgcagaagatattttgaataacagttctaaatagttataattgtaaaactaactagttgttccttattactgacatatttgagagggatggagttgtatctttaatatttaaagatgcaccatgttggaaaaaagcattagatccccagctttaccactgagtgatcgtaggcaaacct

SEQ ID NO: 79459 - DNA, 2729 bp, Homo sapiens
gccacaaatgcccgcgatgctttggccaagcacatctatgccaagctctttaactggattgtagataatgtcaatcaggctctccattctgctgtcaaacagcactcttttattggtgtgctagacatttacgggtgagtatatttggctaattggtctgccagagaacatttctttctagaacttatctagtaactctaagtgggcatttgattctgtttcctactggtaaagagaagggaaactttgcctatgacaattcaagaataccttgatgatggtgatgcaattgcgtgttgcttaaaatttaactaaaacaaaaaaaaatagttcacatctagagctaatttacttagctagtgcatagacttaattggttttcagatgctcatgtggtaaattatcactgaaattctaaaaatctaattttatttgctagtttgccttatttgggtacctgtctttagctgttaaaatccttccttcatatttgtgcctgtttcatacttaatttttcattctctggttctctttttcaaaagaacctgtaggatctctgttcctatttccctcctatatgtgtgtaacaccgtgagtcagtatattgacaagagcaatggctttattataattctgatgttccccacttgggggtgaatgagccctcaaaaactcatagtgttgaacacctctgcatgctggggcctttggaaaaaaaaaacaaaaaaaacctctctgctgcatggctgatgctcatctgctgggtacatattccttgttactgacttagaaatctttattttcactgatatggaaagaaagttttacaatgttggggaatgtcccacttctttcttcctaatgtgtatattttgaatatttttaaaaagctttttgttccttttctccccttttcatattatttttgtggttacagatttgaaacatttgagataaatagttttgaacagttttgcataaattatgcaaatgaaaaactacagcaacaattcaatatggtaagaatgttcttccttgaataatactctgctataaattattctcttgaattcctagtctttgtttaaaagcttatccctggaatgaagttgtgaattaaaattattatatggaacttagaactgacgattaatgaatggtacaacattagaaaaatgttttatgggccaggtggtattcaaggttatccttggattgcagtctgataataacgaaaatttgggacaaatagattgagagaagcaggcagtgtgttaggtaattgcttgggagtatgaagctttaagcccaaggatatctttcagtttgttattttgaagtttattgtatgtggaatcatgaccatcttaatgcttacttgctatattagcaagatgtcagaactaaaaagcagaattttacatattctcttttcagcagtctgggacattcactgggacaatggcaatgtgaatattttgagtggctcttgtgaagtagtaatattaaatatcttagaggagtattgtggttttgggagattcagagatgcttaaaaatcaggggcagcagattgtaatagtgaaggacacagagcccagaggtgaactgtgtgagttggaatcctaccctgtgtcagttatctaggagaccttgggcaagttagttgacctccctgggccttagcttcctcatctgtaaaatggagataataatagtaccttctgtgtgtggttttatggattaaatgagttggaatatgtaaagggtccataatgtgccaggcacagttctaagtgcaagagtgggagtgattcttagtgttgatgaaagaggatattaaaatgagatgcccataggaattagaagatagagctcaagggcaggaaagacacccttaataaatcctcatcttgtaaagagagaggtcaagtggtatggtttgtagttgatgcacacaaaccagatgtttaaagacactgcaagttacaaatttggttaaaaaacaaaagaggatctaaaaatagtaatatagggagaatagtggaagagcgggaaggaggtgttgtatgtgaatttagccttgtttgtgtcataacgaaatcactaggtgtttcatagtgataaatcagaaggtagttgataagcatactctttagaaatatgtaggtaaatatcagaagaaatacctaagggaattaaaaatggttgcctccagggagcgagattggggttggggagagatgggacaaggaattgctacttgtcattataaaaccttttagactgtttgattaaatattccatatactttgaaaaaacttgaaccatctttatttagcaaattaagcttcttaccacagtgaaataatgtagaagtgatcttaaaactttaggcttatgactatttccataataagatgactactaatatgatttgcatctctgcataaagaacattaataaaaacttatcagaaactaaactgagcattattgtttctcaaggtgttcctgagtttcttaatactttagttaatgccacagcctttcactctttcccattgtgtttccacacagagtgactggaatgtaaggaagcaatgccagcctctttaggaactggctagtttgtctgtttttcaagggcctcctgtctgcatgtgtgttttggtctcttgcgtctcttcctctttcctgctgtctgtctctatccacctgtttctcctt

SEQ ID NO: 79460 - DNA, 1309 bp, Homo sapiens
tctgtcacccaggctggagtgcagtggcactatctcagctcactgcaacctccacctcccaggttcaagcaattctcttgcctcagcctccccagtagctgggattacaggtgtctgccactacaagcagctaatttttgtatttttggtagagacagggtttcaccatgttggccaggctggtctcaaactcctaacctcaggtgatcctcctgccttagcctcccgaagtgctgggattacaggcgtgagccaccacgcccagcctgacccacttttaaatgatgccgaattctaaatacatacatatatatggctgcttatttaagggagttgagcaggcagtggtgctgatttgtatctaaagtgattacttgggagaaagggggatgaaagaaggaaggggtgcttgagtgtgaagagtctagagatgaaggtgtcaaggagacccaggttctaatgccaactctgacatcaattgccagctgatttttgacaagctatttgttctcttgggtcctatttcctcagttatccaccagagacaatgttcaccctccctatgccccaggaatgtcagatttgactgatacatgtgattgaagatgttgaaaaatataatgtactaacatggattaaattagacaagtatttatcaaacatctactcatgcaagtctcatggaagatattctagggggtacagggatatgtaaatcatggaagtcattctaatataaaaagtcacacaaataactatcaagttacctgcttacaatccttcagtggcctaccattgcttcaaggataaagaccagctaggatatagcctctgtctgtttctgtgatttcaactcacattttctccctcattcagcttcaatccttcctattgatgatttccttcccaccacagaatgtttttgccagctgtttccttggcttggaaaatccttttctcctcctttcacccagttagcaccttccttttctcaaggcaactgtctcctccttccaaaatagaacatattcctctcacatggactcagcatagtgtccttggtctttgtggtatttttcattttagggagcaatcatttgattaatacccatttccccaagtgactataagttctaggagggcagggaccatgtttgtttttgttttctggtgcatagtagcactcagtaaataattgttgactagctgactgattttttgactgaatgaatgaagatgctttaagagagatacaaacaaatactatgaagagtcaaaggaagagggaatttttgaagtgagccccaga

SEQ ID NO: 79461 - DNA, 1311 bp, Homo sapiens
ccgatactttatgttgaatttgagcaacacacacatactcatacatatgcatatagactataaatcataagatttaataatcagaaataagtattaggaaatataggaaagtataatttatttaaccaactgagataattaaatattaaaatcttattttatgatagaattccctgaattttagattaaaatgctgtaattgaaaactcttcttatttcgaaggcagaagaggagagaaactatcatatcttctatcagctttgtgcctcagcaaagttacctgaatttaaaatgctacgattaggtatgaatatggcattaaatttattgttctggtattgttttctgttaatttccaagttcctaaatttacttgttaaaaaggagcttatctcatgttggaatacttatggataatatgataaaaagtcagcccttggcttcaaaataacccataggggtagaggaggagtaagtggctgtataaatggaacaggattggcctggaggtgattttagatggctgtttaagatgagtaatgagtacctaggggctcattctattagtctctctacttttgtatgtgtttgatatttgctttgattaaaggaaaaaaaaaattaaaggagttgatttgttagaagccagtagggtttcttatgaggggagtaaaggatttgaggaaattattctagtgtgtagattggaataaaacctttaggaaaggactatttattttaccaattaacataaataaactataaatattttaccccatttatttaattaaattttatttaatttttaattttttattaaaatacaattgaaaacacaggcagtcaaactctagatgctgtacactcaactgtgctatcaccacctctgattcagagtggacataaggttagaaggcaaggctttttcataaaccagaaaatttttatttttcttcattacaggaaatgcagataactttaattacacaaaacaaggaggcagtcctgtgattgaaggagtggatgatgcaaaggagatggcacatactaggcaggcctgcactttgctaggtaatgtcactttattcttgagctcttaagaggaatagcttttttactcaagcaacctttgtttagaatattggcttgactttttattaagtggcaagtattgctagaagatttaatattccacatagaacacatttagacagcaaatgggcaggagatttctttttgggatgatggaactgttctagaattagattgtggtaatggttgtgcaactttgtaaatttactaaaaatcat

SEQ ID NO: 79462 - DNA, 1860 bp, Homo sapiens
ctccatttagtaaagaagagtgactcatgcatcattacattaaaacagtaaaaccaagattaccaagatcacaaaatttattttttcctttagtggcttcttgctgattaaagtgaatatagtattagggagtctcttgtgaatacagtgcttatatggcagaggcaacaattgagggagtggacaaaagatactgtttatgtatagaaatttctttccctatcagtttcagaacttagaatcaaataattttattttttaaaaagaaccctagagctccactatcctagtcaatttacatttgaggatactaatgctcctcaaagagattaaataatgacaagttgataatagggcctggtctgataggtcttcgggcttctaattcatttgttctttttaccattgtttgtctatgtttaaatacattttatttgaaaacaaaaggatctgcttcaattctagccaatccctgcctcttctcacagtgtggtggtgtttcggcaggtgggccactctgacgcccagtctgagtaggtggggagagatgatatgtggaaggtggggtaagagttgaggaaggaggagaagctgtggcccacccttcctccacttgcttagttactggcaggaaagtgcttaggacagttactaatatttattgagtgtttattgagtagctgctgctacttctactacatgtaatctttcatttgctcttcggaagaatatattgtgttgagagaaaagtctgcatttataattaatctgcttttctaaataaaatagtgagaccatatacagactttttgctgtggtgttttgtaatatcaagaggggtaacatctgagtaaatgaatagataaattatctgaggctacattagatccttctgtaattttgccaggaagatattcttatttttctagaaaagcatttaaaatgttaatctaaaatatagcagtgtcctcactgccaaaacaaaataggatgtctacactctatttcagaaagtgaaaatatattttctttgattgatcaaagaatctaatgtgttgacttgtatggctgtgttactattgttttcattacttacatttgtatcactcttaaaactacattgtattttcacatctttctgtctgctgtggtttcaatttactaatcctgacataggctttacacaagtgaaagatattaatttttttgaaatttgcttattaaacatttaatatatgcattatgtaaacacttggttttctaactacatcttttttttttttgctttgccttaaaaaaatttatagaagcgagttacctaaatcagaaagacatatgtcattaaaatttttaaggttatataaaacatttagcagcaagttatattctctgtattctgtagcagatattttgtaagctagatttaactatcaaaatccaaagccaaattttactttttctggttctgaaaatggcctttaaattgagtgggtaatactaatactctactaataaatagtctaactggacctttgttgccacaggataaggtgatagaaacatcaggctaaagagaccctgaacaccagagcagcatttccaggaaatattcattggtcttaaccatcttatttatgtaaagcaggtgaagttttttggaaaaaaataaaaacctgaagcttacctaacaaagcctatgccttggcagctcccatcctcgtttgttctctttctttgctggcatgaatgttcagataacccaaaaggttttatgaaaatattctaacctctgagttcaggtctgctgtttctgaaaatcatttttgtgagaataacaagacaaataaaaacaattagtat

SEQ ID NO: 79463 - DNA, 1009 bp, Homo sapiens
tgtctattaataagatttttggaaagttatagttttatatgaagacttattaaatggagaaaaattacttttgttaaatggagagaaattaatttggacatgcagaagcaaaccttccttgttaaaaattcaaatcggcatttttttattcctgtctttttcctttgtcaagctttatttgtcacccaaacacagatggagttaaaatcggcctggtgcacctgtggtacaagtggtttttgcgataatctatgtagaggtaattgtgcttggtttgcggtgctgcgtgtgacacttcagaacagaatgccgtgacctcttatctgtagggctgctctctagagcagcaggacttctactttttgggattgaaaaacaagatatgatggggaagttcagaggcttcatgggctggatgtgctatggaaaaaaatactgggaatactttctgaaataggatgaacaggaagaaacagatgtttgcaccgaaagagagtagtgaaaattttaagcaaatgttaagattttgaaagaatgtaagctacagatacactgctggatgtcactagtgttaatactggggaaatagaatctgtggagccagtttttggtttggggtcagaaaacaacagggcttcttttcttgctgttgttgttttgactggttttggtcatgacaaattcttggtatttgacaacagttccagccattttagtccctagcattagaatatcccaaagtcttgaatgtgatggcattaggtaatcccatttcttccgggcctggaccatataatactaggatttgaagttgtctgtgaagataacttaagtctagaatgaaccttctagaatttttcatgagttgagtgtactattttatgacctctttcaaaaaaaaccagctttattggtttttctgcaacacagatttgaattgtattagtaggaatatattaaaaatttggaatagctactgtcttagtccatttagtgttgctataactat

SEQ ID NO: 79464 - DNA, 1185 bp, Homo sapiens
aggctggtctcgaactcctgacctcaggtgatccacccacctcggcctcccaaagtgttgggattacaggcatgagccaccatgcctggccaatttttgtatttttaataaagacggagtcttgccatgttggccaggctggtctcgaactcctgacctcaggtaatccgcccgccttggcttcccaaagtactgggattacaggtgtgagccactgtgtccggcctaaatctgatgaatgaataagcatatgcacagaaaaaaacaaaaagcaaacaaaacaaaaatctcatgaaaactatgaattgtcttgcctcaaaaaaagtacacatatgtgcacatacacacagagttgttgcacgtaatttcaggggattcttgggtatctagtggtttaaggattcctaagtacttaccacatgccggacttgcctcatttacttttttaccacaaccctgttagcccattttacaaatgaaggatttgggtgaaatactgtaactcaagaccacataaaaagtaagtattagtatcaggatttgaatcctgggcaatctgatcctagagccaagctctcgaccactcttttatattgtccgccacttttttataggtaaaaggggttggaggagagaaacatatttaaaagtttaaaacttctgattcagtacgtgggtgaaaaaggtctaggctatggctttcaaagtatattagcaaaaattgttaatacaggttggtatgtctaatgaaaacgcacttcatattgtttccatctccaccagtttctgtgatattggaaggtgctaggaaaataatgcatttaatagctgagaagcaaatcaggaataggaagtaagcaaaatgcatgggcctctttcacagtccttgccataattcatccagatgctgtgccttgtgcattttcaggatttggaataccatctagatccaaagaccaaggagctgcctcacttacgaaatcctgacatacttgttggtgaaaatgacctcacagccctcagctatcttcatgagcctgctgtgctccataatctcagagtccgctttattgattccaaacttatttatacgtattgtggtaagtatgctttgctttccgaatagactgtggactctttcctctaatggacatagccatagaaatattgtacatggggaaagca

SEQ ID NO: 79465 - DNA, 1018 bp, Homo sapiens
tcagaattgctaatccataccctattataagaagcagatttgccaaccagagtacagtgtctatgtttaattttattaatccttagtattttttaaaaatctagaaatagaatgatacatacctttaataaaagcaagactagggacaggggtcaaacaagaagaacagacattataaaattcctgaactattcaagaatcattctctttttagaaactatagtcacttagggtcctagaataaaatagagaaagcatggcttttgtaatagtagaagagtatatttatttaatgatgtccagtgattccagaggagcagtttatgtccatttaaagcctaactccaagaaggaaatttctgtgaagatgttacagatcttctctacctttcaaattagtgtcttctctaatatttcaatttcagcttctccccacactagccacaaacaaccccaccctgtaatgaagactgaggaaagagctctgggttgcccttctgccattctggagtctcctggctaataccagaacagacaattgtgtatttacagggccaatgcaaggaccagtcagccccaggcaagggtgatattctctgataaacaggcagcaagaaatgctgagtggtaaattgttaatttttctctcctttagcataattcgttcaaatatgatttgaatatttgacctctgtatatatttttagtattaccataactggctttttacaaaaccttgtccctccctacaactaaattgaatttttattcctattcacttgtcctatgttatttgcccctttatatagttaagtgacaatattcatggttggctgtgccatgaagccgtattcccgtgactttaaagtgaatagtggctagtaatggtcactcacacctgtaatcccagcatttgggaggccaatgcaggaggatcccttgaggccaggagttcgagatcagcctgggcaacatagtgagacccccatctctattaaaaattaactgaatagtactt

SEQ ID NO: 79466 - DNA, 1569 bp, Homo sapiens
cagccatgattgattgtgtcatgtctttcccttgctggctgaatctaggattcctgttttcatatgtgatttgttcatgaaaatgggcatttaggtttagtgtatgtgtgttttaaagggaaatttcttcccagagagtccaagcacataaaaacacttcttcaatgtggtattcgaaagatttgtgcatgttagtatattttgttctttttcttcaaaattgaccacataatcttctggcttatgtccagggagtatctagttgaggcaaaatatttgctgctttgggaatccctgatgattaccatgcctttttcatgatgttgaggctacaggagctaagcttattagtgactggctgtgccatttttaccatttcccactcatctttataaaataatgaaggcaaaatgctgaacaaccgtgtttcttcagttttaaaaaatctgttatttttattctcctcttctccctactgtgatggctcctgaaggatgtctgagaaatcactaaggctttgcagagcacaggatgcaaaccaccataaaaaaatccaaattgtgggccgggcacggtggctcatgactgtaatcccagcactttgggaggctgaggcaggtgggtcacgaggtcaggggttcgagaccagcctggccaacatggtgaaaccccgtctctactaaaaatacaaaaattagctgggcacagtggcacatgcctgtagtcccagctactcgtgaggctgaggcaggagaatcacttgaacccgggaggcagaggtggcagtgagccgaaatcgtgccactgcactccagcctgggcaacagagcgagactgtatctcaaaaaaaaaaaaaaaaaagaaaaagaaagaacaaaaaaatccaaattgtaaacccagccataaaaagatggcagtgctgttgaaactggcagaaccacaacaccatagcttcaaaaatagatcttatgtgtacattttaacctaaaattatactttcaggtggcatttactgtgtaaagcaaagtcaagctttgatcataactgttttttcagagcacactttttatataatttgggaatggtggtgctatgagagctaaaatattttttgtttactaatttaaaaagtaaatttcagctggacgtggtggctcacacctgtaatcccagcactttgggaggctgaggcgggtggatcacctgaggtcaggagtttggagaccagcttggccaatatggcgaaactccatctttattaaaaacaaaaaaattagctgagtgtggtggcaggcgcctgtaattccagctactcaggaggctgaggcaggagaattgcttgaacccaggaggcagaggttgctgtgagctgagatcatgccactgtactccagcctgggcaacaagagcttaactctgtctcaaaaaaaaaaaaaaaaaaaaaaaagtgaatttcatgttggccaagatttcttttttcataaattgtttaattataaatagttatcatatgtttatatatgattgtaaaataattgatttgctagtttaaatttttttctttttgtc

SEQ ID NO: 79467 - DNA, 1042 bp, Homo sapiens
gtttctctcagtcatactgagaacccgaccacccaatttggatgattttctctatcagttcaatcataccacttaacatcttagggctgtcagatttaagggaagcaaagtgtactcttgatctctctagatgtttggaaattactgaatgagaatttcataaccttttttttttttttccaagacggattctcgctgtcgcccaggatggagtgcagtggcacaatcttggctcacagcaacctccacctccagggttcaagagattatcctgcctcagcctccagagtagctgggactacaggtgtgtgccaccgtgcccggccaatttttgtatttttagtagagatggggtttcaccatgttggccaggctggtctggaactcttgacctcaggcaatctgcccaccttggcctccgaaagtgctgggattataggcgtgagccactgtgcctggccgataaccttaatatctaattatttgtgctgcttcgttctctagtaattgtcttatcatgatcaaggtgcaagcatggccagcagctggcttgggtctaatgccacttctgtgttcttttcttccttgaggatttctctcggtgatctttttggtacttagtatgcatacagttgtgctttcaagatatcagatgaacactgcagccttgtattattcgcctaacctgtagtatatatttaaaaatattaatgccacaaagtagaaattgtgggttttgatcaaaccttttttttttttttgagacagagtctcgctctgtcgcccaggctggagtgcagtggcacaatctcggctcactgcaagctctgcctcctgggttcacgccattctcctgcctcagcctcctgagtagctgggactacaggcgcctgccaccatgcctggctaatttttttgtatttttttagtagagacggggtttcagtgtgttagttgggatggtctccatctcctgacctcgtgatccgcccacctcggcctcccaaagtgctgggattacaggcatgagccactgcgcctg

SEQ ID NO: 79468 - DNA, 1077 bp, Homo sapiens
accaaaacaatctatagagtagtcagggtggactttttctgagaaaaacgcatatataaactgagaccagaagagtgagaaggaactagtcctaagaagagatgggaaatgaggggaaggtgttctaggcagtgggtacagcaatggcattgaacttgtagtttgggtgttctaggaacaacagaaggctggcacagccagagctcaggggaagggagaagaccccagtgagttgctgttaaacctgtgggtaggggccagatcacatagtacatcgtagagtatagtaaaggaattcagatgcagcacaatgaggtacctgaatcggggtttggcctggggttgggctggcgacaaaactgtgtagtggttttaagccttatctaatttatctgcatcacaactctctgaggcaggtattactaataaccagttttatggatgagaatcctgaggaagaaagttgggtaattgttcaaggtcacacagttggaaagtattggagcttctggatctgtctaactccagagcccatgttctcaaatgtaattgtatatacagtctaattggtttattttgtaagtaagggaattgagattcagaaaaattaaaaataaactagaatgattaagaggatgtgaggcactgtttaaaaaatttatgctcttcttccatctggaaagatgaagaatgaacttttgatctggtggaagcttctaacactatgaggcacctgaagagggcaatgctgacttattcactacaaaaatagcttaggcatcttttgaagcttcagataagtaattcacaggtcaaataaaaggaagtgcttttgatacagttggtagctgattatttcagatacagattaacaatgtttccagtagcttttaggaaatctgtagaacaagttagcaaaacagaaaacctcttctgtataaagcatactaaaatactgatgaaaatgtctgtaagagaagtttaaataactaagaaaatgaggaaaaaatgagtacagggaaaatgaaattttataataataaaaaaagaaagcaattttagttgtaagttttataa

SEQ ID NO: 79469 - DNA, 1045 bp, Homo sapiens
tggggagtgggacatgtttttccaaattatggattggaatggatggggaaggaaaactgagtgctgagaatgggttttttagaaatttctaggcgtgtccttgcacccatagttttttgttgttgttgttgtttttaaatatattgctgagtctctactgcctcccagatgtcactttttctcttccctactcctgaaatttctaaggcattgctaccatcagtgtatcataaattaattcacagtgcttgccatactcacggtcccttcaaagggtaactgtacccctcactctccctgttgacctggggcccctgctaagaaaccaaatgatccagccaagctgattggacaaggggaggccctgacctgaaaatggctcactcgtaagggccttttgatgtggcctggtctcaaaagggcagtctaaacagaagtagcaatgtttaagtgagccatttaggtgtcctgttttggggatttctgtaacaagtatggaaaagataaaccagaggagtggtgtagacacattgacagttctgaccccattagcagtggtgtaccagaaaagccaccaattcctactcatgggcttccagggcctgccttggaaccaacactttgcttcggttttttcctctatgtgacttagctcttctctggttccttatcctgttgtttcctctgtattcatatgtgtgccctgctcatccttcacctgagtgagcttgagtatcagtccattgcaatgatagaagcctaatcacaggagaccttagaaacctggaagagccacgggcaggttggtagtccaggggcatcaggggatagagtcactatttagggccaagaaattaggaatctgggcctcaggctccttgccttgagctgccgcaactcctctactaatggaccggattcacttaaaaaaatttttttaaagccattttaggttcacagcaaaattaagcagattgccctcctccacagtcttaccttttattaaaaaaaaaaattatgaacaggaaattaatgttagggatat

SEQ ID NO: 79470 - DNA, 1012 bp, Homo sapiens
atacaaactcctaagagtttaacctacctgtcagacttttcttttttcttttttttttttgagatggagtctcgctgtgtcgcccgggctggagtgcagtggtgcgatctcagctccctgcaacctctgcctgctgggtccaagcaattctctgcctcaacctcctgagtagctgggattacaggtgcccgccaccatgcccggctaatttttgtatttttagtagagacagggtttcaccatctggtcttgaactcctgacctcgcgatccacccgccttggtctcccaaaatgctgggattaccgacgtgagccacctcgcccagcgttctgtcagacttttctgttccttgtagctgaaagcattcctaatgtaagatgtggcagcttcaatgtgaataaagttaatataaaattggagaatttgtctatatggtgttatttaggcacagaaatacaggtaatatgggaatatgacagcattcgggggtgaaagatcaattctagtcatgctttggacattgcaaaacatgggtattaatgccaaagaatccagtcctagtcataatttctaggttttctggctacctcctcagtcctttcccactgtacttacggcattttaaagtgttatcttccccaggcttagaaacctgaacatgacagaggcaaggattgaagtttcaataatatgggagaagctagctgggtatgagtaagagtgagtgggtggaggacatcaattaaaggatgagtgtgtagaaacatatcagttttctaaccatggttgtttctaggatatcccaagtttatggtatctgcaaattcttgaatttcagtgggggaaagaagagaacaagatatttaaaaaggcaaaaaaaaaaaaaaaaaaagaaggagaaacagcagcaacagcctttgaaggtctagaaaattttcatgcaagcgttaaaagctccttcaacttagggtttcacttccgcctggtttctgaacacttatgtgaagttg

SEQ ID NO: 79471 - DNA, 1066 bp, Homo sapiens
tccagtattttggaagccatataaggatgagttgtattataacctacacattctcatgttagctgaggagactacccctgagtaattaaaggcactcaagatttgtcaagctcttgcatgcatatttaatggaatgatagcctcattgctcagaagctgttggctttagaaatggaaaggttgacttaggctaaaggaaggagaaatatagcagaggcagttattcaagaaaaaaacacatgtactgaatcaggagaagtaatgtgggaaataatctctgagacagactgcgatctggaaagatctgaaaaggagttatttagttaatgtatttcaaataagctcccctggtttgcagattccgtaattaaatgtttctcataatgagtttacaactgaaatgtgtctgggaaactggccaggggttttaaggagcctggttcttcagaaggcattcacttcccttgggtcagaggtggcatctcctagggttgaagagttttctgagtctgtgtaaggagcagtgcctttgtctcaggaaaatgagaatagtctgtggaccatgcagaagttgcctcctcagtcactgcctgtgggagtcattgaggtccaatttgtcttttggagctggggcctccactagggtgtgtttaaggaggatctagacaaaacctgtatagtacagcttagctggttagattgaggattaggatgtctcatttgagttcacaaaaaatcaaagtgatgggtacaattaaatgaaagtcagtgactgtttcacaaatctgtaagactcatttgtaatctgtgccattctatacattagacttaggtcagcggtccccaacctttttggccccagggaccagtttcatggaagacagtttttccacagacctggggagcaggtgtggcgatggtgatggttggttttggggtgaaactgtttcaccttagataatcaggcattagttagattctcatgagaagcatgcaacctagatccttcgcctgtgcagttcataatagggttcatgctcctatgagaatctaatgccactgctga

SEQ ID NO: 79472 - DNA, 1082 bp, Homo sapiens
aactggaacaactgcctcacttatattaaaacataattgagagtcttctatggcaaaagaagttccattacctttgctaataataggtgtgaaatagtataggaaatcactcacaaaattacttgggaactcttttcctttaaaataaactatttaaaaaggtataaaaataataaatgcccagggtagaattttggaacattttgaaatgcaaaagaaaaattgtatgtaatctcactgtcctcagatactcttaatgttttgatgtatgtccttcttgtctttttccctatatatatatatattttttagcgaaatgatttactttatgaatactattttctctaagaagtatattgtgaaggttttcccatgccaatacgtgttattctacagtgtgtttttttcatgacctcagagtattatattgcattaatcagtcatatgttactgaacgagacccctgcgataaggacttctaattttttgacagtttacatttaaactgaagataaccaaagcctttgtgtgtttgtttacaaagaaataaattgtagtcattaattaatttaactgtaattgcaaaatatcccatttttctactataacaatattggaacacaaacttggtgaattatgatatcaattttttttttttttttttgagacagtcttgctctgtcgcctaggctggagtgcagtggcgcaatctcggctcactgcaagctccacctcccgggttcacgccattctcctgcctcagcctcacgaacggctgggactacaggcgcctgccaccacgcccggctaattttttgtatttttagtagaggcggggtttcaccgtgttagccaggatggtctcgatctcctgacctcatgatctgcccacctctgtctcccaaagtgctgggattacaggcgtgagccactgcgcccagccgatatcaatgttaagattaatctagttagatcttagaagaccaaaaaacaaacagaaatatcaaagaactcaggaataaatccttaaaaataattatatatttgggatctcagagtatgccaggcacaacagcttacta

SEQ ID NO: 79473 - DNA, 1065 bp, Homo sapiens
tagagaaatttcagaataggagaagtaaaatgatcagggcagtgaagaggctagacagattaaaggtgtcgaactctctagtttagaaagatgaaggtgagctgggaatacagtagaggttttttttttttttttttgagacagagtctcgctctgtcacccaggctggagtgcagtggcgtgatctcagctcactgcaacctctgcctcctgtgttcaatcgattcttctgcctcagcctcccgagtagctgggactacaggcatgtgccaccacccctggctaatttttgtatttttagtagcgatggggtttcacagtactggccaggcgggtctcgaactcctgaccatgtgatacgcctgcctcggcctcccaaagtgctgagattactggcgtgaaccactgtgcccagccctatagtagactctttgacatccagaatagtggaagtttgtaacatcaaatctcagtttagtagggatatgttttagatcttgaaacaaatcaatatatgccattttaaatgaatttctactttaaacatttacattttacatttctgaaactcatcacttcaagttatggtattagctgaggtacaggatgtaaatagagagggtctgggtaatttatggatgagaggtttggcacattgacttaccaaacctctctttaacagtgttagtcagtttaccagccacagctgttttagttggaagaaacagaaacccaaactcaaagccaaagaggagtttatttgctcatgtgacttaaaaatctaggcatggctggaatcaaggctcagacatggtcattggggctctcttcactgactctcacatgctgtctgacattggtttcatcctgagggcagctttttttaggggtgaaaagatggtcagtggcacctgcagatcacatgatcttacagcactgggcctggaggaagagagcctgatagaggaattctggtcatgtgccttctcctttcattgggcctctaggcagtaggtgaggagcaccatgagtggtcaagtctgtgctcaccccagagaccagggg

SEQ ID NO: 79474 - DNA, 4025 bp, Homo sapiens
aggagttcgagaccatcttgaccaacatggcaaaaccccgtctctactaaaaatagaaaattagctgggcgtggtggcgcatgcctgtaatcccagctactcaggaggctgaggcaggagaatcacttgaacctggaaggcggaggttgcagtgaaccaagatcgcgagcctgggcaacaagagcgaaactctgtctcaaaaaataaataaataaataaataaaaattagctgggcgagttagtcacgcctgcggtcccagctactcgagagctgaggcaggatgatcagctgaggcaggaagattgcttgagcctgggaggttgaggctgcagtgagccatgactgtgccactgcactccatcctgggcaaaacagcaagaccgtgtgttgaaaaaaaattttttttaacctctttgtcattataaagacagactggcttagagatcaagactgaagttggggcttacactgccttcttctaaatatacttatgcctaattaatagtctggttacttggttatttgttggcaaattctttttgtgaatgggccttagcttaatggcaagcagaaatacttatcaggcatcctgtgtgccaggtactttgcttaatgtttagaggatttaacaatgaacaagatacagtcctttccctcaacacgctcatagtctgcttcttacattcttgacccactttgaatctataggggcataaataacctgctgttacctcaacagcaggcagacagctggtatgatatttattagtagaagttagggaatgggttgggacatggggaaggttgggctgattccagagataaaaactactattgtaattactagaggaataggaaaatcattagaagtattatcagtggataagcacaaggatcttccccttgcagaggattataggaaggaagttctaggatagattacaaggaaagatgtattagtgatatgccataattatggtatttaacattgtggttaaatctgaaaagtgctctttaaaaaaatgtcattcagatcttaagggcagattttaatgtgtgatacagatcagttcctattacagtgaaggacaagagactgttcaatttcttctttttagccagaatggtaatggttttgtcacagcaatttaacaaggcttccattttgtaagtttttccagcagtataaacattttaaggacaatagctaggttcttgggatacttgtctggaaacgaatattttggttaaaacatgttttgttgatttttaaaaataacagctttattgagatatgtgtcttataccatataattcaccatttaaagtgtactattcaatggtttttggtttattcacagagtagtatgttgatgtgtttgtggtcaacctgccttgctcccaaaagaattaaaggaaactatgatatctcattgcttctgattttgaaaatatttgctagtcttgacttgccagtggatatctatatcatacatcatccataggtgcttttggtaactagaagcaattctacatttgtggagtagggtttatcaattagacctagaaggattatcgggaacattataatgaatggcatgctattcctcctgtcatcatgttcccagacaccatggatagcaccatggtatccatgctataggatggtcaagattacttgaagctgggtttttttttttttaattttttattttttttgagacagggtctcactgtgtcacccaggctggagtgcagtgaaatgaacatggctcactgtagcctttaactcctgggctcaagctgtcctcccacctcagcctcgtgagtagctgggaccacagctatgcacccagctaatttttaaatttcttctagagatagtctcagtatgttgcccaggctggtcttaaactcctggactcaagtgatcctcctgcttccacctcccatagtgtgggattacaggcatgagccaccacacccagcctattttatttatttatttatttatttatttatttatttatttaggttcagggtctcactctgttgtccaggctgaggtgtagtggtgtgaacatggctcattgcagtatcgacctcccaggtgcaagccatcctcccacctcaccttcctgggtagctgaatctacaggcatgtgctaccaaacccagctaatttttgtactttttacagagacaggatcttgctgtgttgcccaggctgatctctaactcctcaggtcaaatgattctcctgcctcggccactcaaagtgttgagattacagacatgagccaccatgcctggcttatttttaattttaaaaaagttttaatttttttgtttacttttgtgttttgttttgtttttacctgaagctgtttgattaggaggttcccatgtgtgctgagatgctgagtattgtaacagtgcaaagacaatctaaaattccacatttgcaaagcatgttaacttgcctagatgaaacagctcttaaggtcagtagattgtatatgtgtaactttccattcccaacatatcctctcatatatacaggagccacatggcctagattttttctgggatagatccacttttatattctatggcactgtctcttcaaactactgatcttggaaattctaatattttcatgtcgagactgtatttctcagactgcttccaacatcttaaagaggaacagaaatctcatctctgatcatgtgccctgacttggagtttggcaaggatgttagctgtcctcaagtctcctgtcatgccctttccatttgaatttcctcctggtgttcctaggcctgttaacgacttgctgttctcctagttccgcagcttggaaacctccgtatcttttttcttgtctttcacattcgacttcttctatatcaattctaatttcagttgacatccagctgatagctcagatttggaactcccactagtactctttttctctgtcttaatgtcccaaacatgtttctgtcttattacggttactgtatttgtgtatatgtttaccactcccacgatactctaagccccctgacatgctgttttgtttacctcctgtagagcctagcccagtgttacacagaatagctgctcattgaatatttgttgaatgaatacttaagcaggggagggatggaatgaaaataatggtttggcatgatcagtccacttgtagggacgaagcagggtataaagatgtggttaaacaagtaaacacattttcaggcatgttgaacaggatgagtaatagaactgggaaccagggagaccaggaaactttcaggaaacaaaatgtgaagtggtgaaggtctggtggactgaggcaggggcagaaggtgtgggaaagaagaggataaatccgagagacaggtctctccgagatggattacatataggatgggaaggagcaggagtagtatgaaataatgccagtagctccagacttggaaactgaaaattaattcctgtttcatcacaaattttgactgcctctgtggaacttgaatgctactaagaaatacttctttacatagcttgacaaagcaaaatgcccattatttcctcttgaaatttgttactgtttcttgaagtgtgaaagttttgtgtattgtccagaaaagattacagagagattctgattctaatgagaattgctgctgccacatattttagatcttcctggtacttttagctttttttttttttttttaaataatgaaagagaactggaggaagctttatgaatgggcttccagggatttaactgtaacctcaggggaggggtgacagggaatgctaactcgtgtatgggagaatgtgggagaggagagatgatccgccttacttcttacctcagaaggtaatttagtttctctgtttttcattttatgatgaattttgcctccattgggagaattcaggagtacgtggtccactagaggatagacttggatgtatttgtctccacttcaggcaattcccagtgaa

SEQ ID NO: 79475 - DNA, 1044 bp, Homo sapiens
tcggagtggaaagggggcccatgtggatttagcagggcgggcgtgcctcccctcctgcttggctttggaaaattcccggcgggtgggagatgcttgctccagtagatcggatgggttctctcgtggggacacgcgcttaaaataacgtcttgtgttggtatgcagtgccgcttctaccgccagctagcctttctgtgaggttattttgaatcctgcaaacggtggccgtatcacctttagctccccagtttagctgcgctgggggtggcgagccccggggaaagatgctgccggatgaacgcgagctgattcaccggctgggagggtcggtactcatttatcgctgggagtttgcaacctgcgtgtaatcccgcagagccttgttaggctccatgtctttaccatcctctggggcaagcctttcccttctgggtttggtttaagggaagtggcagtcttttcttagactgacatcaatatactcagggtctggcgatctctgaatgacatattatggagaactgtcacttgagtgctgcgcagatttgtgatgacctttgtgaatatatgtaatcatggcattttatactgtacactcatgtgtaggtagatattttgccagatattgattacttctacatgcagttaatagagttgccttttcacattagcttttgcaacagaactttcatttagggtcctgtaatcactggaatcattgtttccaaatgtcactgaagtccagggcccaagttgcagtgtgttttgtagaggaaagaagactgggcatcaagagacctggattcaagccgggacttactaactgtgaccttggacaagtcacttaacatctctggttcgatttcctaatgagtaaatgcagttaattatacttgccttgcatcccttacaagctgttgtgagaatcaaacttaataatcgttgtgaaagctttttgtaacctatgaatttctctgcaaatatgagatatatgattaatttcttcaaccatgaaatgagcttgcatgaaacattgtctgagac

SEQ ID NO: 79476 - DNA, 4039 bp, Homo sapiens
cctcaacctctggagtagctggagttacagatgtgcaccaccacacccagctaatgtttgttttttgttttttttgtttttttttagtagagacagggtttcgccatattggccaggctggcctggaactcctgaccttaagtgtttcgcctgccttggcctcccaaagtgttgggatttcaagagtgagccactgtgcccagtctgaaggggggcttctcggctgttgacttatgctggaactcagtacagagactatttcatctaattaatattcctgtttaaattcttttagaccaaccttatacggacagtatggggttgcatcgacatcttaaatcagtaattgctaagctctaatctgaattttttttgtttttacttatagcaaaaatattttgattctggggattacaacatggctaaagcaaaaatgaagaacaagcaacttcctactgcagctccggataagacggaggtcactggtgaccacattcccactccgcaagaccttcctcaacggaagccgtcccttgttgctagcaagctggctggctgattaagaggctgaactgcatgaatctgctaaatctcattatttctccttaatatgttacttatctactttttatttcctttcattcactagtcatttgagactgacagctttgcaggtagcagtagtgtgtgctgctattgtggaatatacgtgtgtagagtttttgattagtttaacagtgcactggtgaagaggacatgttagagcaacataagtaaactacttgaaaatagttgtatatattacctaacttctagtgtagtactggttctaacaagtaacaagcaagttttaaaattttaatgttttggctttcattacttcatcttaattatagctttgtatgttactcttatttaatataatctctattgtattgatttcttctgtatttaccttttggattttgtaaaacagaagtttaagaccacaagttagaagaaaggtcacatatttcaaacacaactagatggggctctgaaagatttgtatctctgtgcttgaacttgaatggccttaaacctgtttcagctttaacagtagaattttacttgggcaatatttgcccattctggtgtaacttatgtgactctagtgcttaacagctgccgttgaagctaatattcagttctgtagagttagaataccttttgttgttgaagatgtgaatgaagtatgcatgtgcattaactgttgaattcacttttgtgccatttttgtaaatacagtagttttgcacaacctctcacaaatgtctgtattaatttcacatacttaaaaagtagataatgtgccaaccagaagcacaagagttcctacacaaaactctgtaaatcattatagcttttgtataataagagtagtttacaatctcgggcttatagaataccaaactgaaatcttagttcaatctgccatagacttaagcttttcatttgttactaatatccatgacattcagtggccttgtgcaaatacgatatgttgcttaggcatatcttttgtcctatgcagaacctttcattttgatttttatgaaagttgcaattcatgtaatttatataaactttttaaatgtagaaactttttacttccacactcagttttggagaccctagaataaaaggcttcaatactctgcattccatgccctctgccacctgcttttttttcccctttgttctttgactcaaatggtattgagctgtttgttgtatatggaagcataggtgtctatatccttactcttttatataacacaataatggcgttttccttctaatttctcagttgttaacttctttctcttttttttttaggatagggccttgctctgtcacctgagctctagtgcagtagtgcaatcacagctcactgcaaccttactcctaggctcaagttaactattcttgatcctttattattactaatattctacaattgtttaaataaaaggaactttataatgaaacggttcggaatactggctcaagaacctatgtcaagatgagctgaattttggtaaattattttaggaattatgacaagctaattgaattaggcttgtgacaattagagtaatttacatgacaggtaaaactcctattaaaaatgtttagatgtttgcttctgtagatgtcactttagtaaaataccaatttagttttacttgtggcttatctagttagaacttagcagactttactgggacaagtttactgctcttgtaggagctcctctcacaagtagttgtaatgctgtagcatgatactcaggatcagtagcttgagatgctactatttttctcttcatctttgacttgcagagagcctcccgtttttggatccaggcatcttttctgaatcctggttccatcagtatacctgctctcctatgaccccaaatcatagtcaatggtgcctcaaacatagcaccttaagttaaaggctgcctagtgctctgaggaaagcttgctgattatcttcctgatctactcaccccaaaaggcagaaaagcaacacagtcactgctgtggtcatttgtaatgtaaagatcagttatatatatatatttgtaatgagagcaagtatatactcattatagaatcaatttaagaagtttaaaataacccagagtagaatttctatatctagtcttggtttttttcatgaatatttgcaagtaattaccattaaattcacacatgaaagattaatctgaaagatcagagaccatgttattcctgaccacgatagaactgctcctgtggtttgggacaagtaataaaacaactgcttgagttttgtttgtaaaatacataattaatatttgacctacctcaaaatgtattgaggatctgtgaaatgctaagtgcccaaaataaaatattgctgattgtctttttattaaaagtaaatttcctcattaagccaacctgccttctgtaagtcacagtgcttaaatctcaggatttttcattaggagagacctgtcgttaaggatttgtaggtataattgcttagcctccattattggtgcttgggatagagaggttttagatttttgttttttttttgttctgcctcaaagctcagtttattgaagacatttgtaagctattggatcatcacttgaatcaagattttgactagtgagcttaattgtccatttcttacaatttcaaagttacagtctcagaaatggttaattttaataactgtcctatcataaattaatgttggaataaattgaagttgttgataaatacttcatgaaaactaaagtctgaaataaattacttgttttatgtccaatagctactacatttgatagaacagttttgaggaacatttcattcttgaacgcagcatctgacatggttctcagcaagttggaatagtaaggattattggcttgtttcgatgagtggaagcggcatgtttgtagcatacaagttattcaataatcttgtgctgatgacctaaaaatatgtcttaactattcatcaaggaaagcctggtgaagcctttacttgttactacttcaacagttggaattagttgctctttttacttgatgaaacaaaactatacctctgaatatttatggatactttttactaaatcaggcttgtgttcttaatccaaattagtaaagttttatggaagctgaaatgtaatacagtagtctccccttatctgtaagagatacattccaagacccctagtggatgcctgaaacctcagatagtactgaaccctttatcaactatgttttttcagtctgacaaccaaggcggctactaagtgactaaggggcaggtagtatacagtgtggataagcaggacaaaggggtgattcacatcccaggcaggacagagcaggagatcatgagatttcatcactcaggatggcttgtgatttattttattttattcttttttttttttgagatggagtctcactcttgcccaggctgga

SEQ ID NO: 79477 - DNA, 1631 bp, Homo sapiens
taaatcaagactgttgttcaaagtgaatagatggaagaattgatagttctgtcaggaaacaggtttttgatatattaaagaataggatgtttgacatgaacagagtttgtcattttaaacatgggggagagttaggcaatgatatacatagatgtgaggattgacaaaaatgatgtttctcttctttaaaaataacaggatgggccaggcatggtgggtcatgcctgtaatcctatgactttgggaggtcgaggcaggattgtttgagcccaggagttcaagaccagcctaggcaatatagcaagaccccatctctattatttaaaataataaaaatattaaaaatttattataaaaaaacaaatatcaggatcatctgtattcaagaaaaatgtactgataagtaggctgctgttaatttctagtaaagaatctaacttcaaatcatacataattttagataaatagaaaaaattctgtatattttaacagtattaggatgattctctaaatataggcaaagaactgaagagttccatagaaggtgactaactataaatgtattatacatgactggaaaagtaatggcaagcaagacttcagagctgagctatcttgatatttttatccagtgtgtggggtgttacacatgcatcacagctataatagagctatcacatggatcttttgaaaaacaagatagagatgttttaaaggcttctgggtttgatttcttagtcagatgctgtggtacttggcatttaacaactagaattcagaatccagatttttaaaggtgaattattttaaataactgagttgtaatagagaagtaatttatttgaaattattttaggaaatggaagataaagtgactagtccagagaaagcagaagaagcaaaattaaaagcaagatatcctcatctgggacaaaagcctggaggttcagatttcttaaggaaacggttgcagaaaggggtaagttctcatgggtaatttccaaatacttaagccctacaaactcagtatgctgacagattgtgaaacggatatctgtgcgtatagcattgtactttatcaggtatgtacatatgtgtatatgtatctgtaatgggtttttccaatattttgcagtttataaataagcattgtgagaatctacaactcttcagcatttttaataataaactatttaaagcatgtagaaatagtgcagatataacagaacccatataccccttcccagatttaatgtttatattttgccatgttggtttcagttttatctttcttaagaaagaaaatgttgtagatactgttgaaacccaccctatatgtaaatatgagccctttcccttatctctccaaaagcagccactatccagaagctggtgtttatccttctgcccatattttgaaacttccatattttttgcaggtgattcccacacaacattcaaaagcttaaaatacttatttggatgaaatgatcacttaataaatgcacagctatctcctttatgtaatatgtttcacagtcagatttactctaatacaatttaaacattttcattttcatagttcaaattactgaagatattattttcaaattcttgccatgttttgcgag

SEQ ID NO: 79478 - DNA, 1540 bp, Homo sapiens
atgcctgtgatccagcactttgggaggccgaggcgggcagatgacctggggtcaggagttcgagaccagcctggccaacatggcaaaaaaaaaagaaaaagaaaataagggaatgcccggattgtgtacaaggtattttcctttatatatcaaatggaggaaacctgcagaaacactggaaaccagagtaagttgctacctacatacaattttcctttaaaaatttttaaggaattcggggaactattagacttggagaactatttcaaatcaaaggaagaagtggagagctctcacttcctaggctcaagaaagctgaatttttattggaaatgtaggactccagtaacacccttaatttgaaggtgcagggactaaagggtgacaattagcttgggatccttttcagccaaaattatttgaagccagctgtgcagggaaacccaagagtaggcctctcctcccacatccacttctaaactgcagcactgagaacacccttgggctgcagtagatatctgcagtgagggctgagccacatcgaagctgtgcagtgactcagcccgccttcctacattaaacttggtaatcttacatttatgtttatttctctggctttggtgatgaatatggtatagtcatatcttacatggggttaggttctaatgttagtaagggaaaaaaatcacatatagctaaaatcacccttgacaaaattctagagaaggcataatcatattggagactgccccatcaattctcagtagagcaggtagtcacttttatgtccagcgtttgaacagatggctagatggctagggtgattcttaagttgagtgctagctaaggtaataggcttgtattgtacgggctgagattttaaacactgcaatgataaacagcatgttgatgtacttatgctctgcaagatacccaacgagagactaacgtgggaatggcaggtttgcatcacatacctcacacttacctctctggagcatacccttcttgaatggaatgactggtagactcaccactatttaaattctctatttctggctaagtgcacataattgaatgtcgtgcatgtcaagtgagtgaatgacgtggccactgtaaagagataacataaatggatgaatctgcaacataaaaagaggctccacagaaaacagtatttgacagaagcagcttttttctcaaaattctccgagactgaaaatgagaagatctaacaacaaatgaagaagcagttcaggatgaaatactgataatatataaagtgaatgaagctgattataaaacatgtatgagagctggatgtggtggtgcatgcctataatcccagcacattgggaggctgaggtgagaggatagctttgaggccaggagttcaagaccagtttgggcaatatggcctgacctgtaattttttcccccccgtgggtacaaagggaagggaaacaggatcttcatcttttttttttttttttaatgtatgaatataattttgagtgaaatatatgccaaaattttatga

SEQ ID NO: 79479 - DNA, 1066 bp, Homo sapiens
acttaaactaaaaatatggtactgttatagtattcttttcttttttaactccacatgataaagatattaaaattacaatattgacttgttatcagtatatgtgtatgtatataccaattttctttgtttagtaatagtcattcctgtcctttatcccttacatcctaacctatttaacccaaagcttgattagtttatgatttaatctttctgtgattctttttggaaaaaataaacaaataaataactattggcttatctcccctttgttttcattctagcttaagtaaatgtttaggaattcccttgaggtccagaaacgtggagtcacatcaaattgtgttctattttgcatttttgaacatgactgtggataaatcgcttattttacctgcttttatcagtgtcctgttgggagacaggagcagaaaccactttgcatgtttttaaaaaggaaggaatatgatttttagggaataaggttacaaattattagaaggaatagaggaacaaaagggaggaagatggtgtttccagaggtaaggattacagaaagcctttgaccctgcaaggatgagtactgttcagagtccaccatcgtctgcctcccttgtcgtgtagctgctactagagcccctgtttatctgccatatgtccctctgtaggagctcacaggggcgactgctgtctgctgttggtggtggcatcaccaggagcagaatggattctttctctcatgccttttaatctggcatagatgccgttgacagaacctaataagaactcagtaactgtcagaatattaatgcatgtccaagcacttgaactaacttatcattaaggtcctagaactgcctagctctgtagaatgtttctgtaggattcatgaaaacttttgtggaagtcttaatggtgtttaccacatttaaaaatctagattaggtcatcttttcccccctgttaaatccaactgaaattctgaatccagttaggaagttgcagctagcaggggctttcagttgtgctatgtatttggcaagaaagttcaagaatcggcttgtttttt

SEQ ID NO: 79480 - DNA, 1213 bp, Homo sapiens
atatcaaccataaagagatataaattgttttcccatgcttccagtattttaaaaataggagttcatattggtattttcaggagctcttttgacaactacttttggttacctaaaggctgaagaatgtttttgttatgtttgagacagggtcttactctgtcgcccaggctggggtgcaatggcacaatgatagcatattgccgccttgaactcctgggttcacctagcctcccacctcagcctccaagtagctgggactgcaggtgtgagcaaccgcctcatccatgttttctatttctattcagagtgaacacaacatgctcccttggtctctgcaaccatcgattcctaacagcctagaggtaaacctcagaaaagtttttaaatgtttctcttagccgtcttagcagtttgcgatacaacagtttgttagggttgcttcttttgtttgtgcaagacttgaatacttaacttctaatccagaagctgtgtttactataacataaaatattaaagatgagctgatggtgaaatcctcaagtgtgaagaaagtttcttagctttatagctttatggaaacaagtacattgtattttttcattcagatgaatgaacttttattgaacattcattaaatgctaggcactaggcaaacaaagacttaatagaatgacaacagtaattttccatagagcttgatacagtattggtaccttcctggcagtatcccaaaggatttgttggctttcattaatcctttctagttattcgtcaatcagtgcatcagtcaacatgttgctgagcagatagaggagaatttgcttagagtggtcagatttttattgctgacgttgctgtataaccctcctctgccgaaggctgaaaagtggtatcagtcattgagacataattctgctcagtgtataatagactacaaaataatccttagttatttgagtgtcctttttacgtgtatatatttataacttataccccacctattcacagaaaggatttctgatgtatttcagtggtacaattcacaaaaatgcacatgccgagacaataactattattaaaaatactgttcttaagatttttgtttttgttttttggatacatacatcgtatacatgtatctgtgtgtaaacatgtatctgtgttaccatatcctggggttcctttcccagcttgtagccaatagccaaaagtt

SEQ ID NO: 79481 - DNA, 2364 bp, Homo sapiens
cgtcataaggcggcggccattttcgcgggcggaggcggcccggcgggccctgggagagctgggacgggcggcggccgggtggcctcggccacccgctaattgcatcttttcccggcgtctcgtctgcagagggagcactatgtctgcggaagtccccgaggcagcctccgcggaggagcagaaggtgagcgcgcggggcgtgagccctgggccctgcccaaggccgggtctggcgggcggcctgctcccgccaggcggagggccgcgcccgagatgcggggccgaggcgcatgaggccgaggctcctgcgccccacctttggcttcccgccgtcgctggctggtgcgccgacgaattgggagttccaacgtgccccgcgtttactccgaatcgtgccttttgtaacacctccgtgggtcgcggtgttcctcagtcacttatatttacgcgagagcccaggacgcaggctttgggcgtagagcctaagtttttctgtaagcctcaatttggttaggaagttttattttttcctttgaagaactctccaactacttgtattgtgagcgtgcggttcactccaaaagcagtgcctcgtgtgcgggccgcgatgtgggccaggattggcatttcagggccaacccttgtaaccatggtcagtgagtaaagtccggccttcagtgtcttcacctgtaaaggccgaatactggtgcttgcctcccacggcggggtgaggcctagaggaggtgagtcaggtgtagtgtgcagcgcagtctgtgctcaaaaaggtttcagtcgatgggactcaaatatggtacttgactaaaaatcgaaagggtggaattttaaaattttactcacgaaattaatcagggttttattggaaacaggaatattttgtaaacgcccttgtgtcttcctgatgtaggggaataggccgggagtgtcactgtggttcaaattatgaatatcaagcctttgtatttatctaggctggtgtttgtctctcccactgtaattatttccaccgccctgccctcctaggcaggtgtgactggccgagaagtgagaaagggccgaggtatcttgtctcctaaattgtttatcaacaatttttcttacaaatcaggttgtgttgccgttaaatacgattttggtctactgcttgaccttcgtgcgggtttctgcttaatgttgcacttatgtcctaattaagttgggaattggattagtgttctaagcccattccatatgttcttaaaaccgtgttaacttttcttaagttgggtgcttctgttaggatgttaaagtaattgaaaaacaagaaaacatatagcataggtaaaagtccaagttaccacattatttgagaatatcccgtgaaaatagatatatttacgcattaccaaaaaaatggattttgggggcaaaaatacaaatattaaagtttgcaatcttaacagtattattaagtatcacctgcttattgtaaaatgcgtattgtgttcattattgcttgaaatttaggagcccccaaaaataacaagtccctgtctgtggtggtttgccttaaacacttacatcaaacttagcattaacttctggtgcacagtagtgtgctatgtaattttctttgataagttctgttagtatgttgccaaagtatgcagtattgacttctagagtgtaaatacttttacttggaaaagcctaatgtatcttttaacaatattaaggatagcttgaacgttttctcttattgattgtctacattaaacatttaaggtgctttggttttagctgctgtcattaaaatcaaccaaagtgtgttaggaatataatgttccttcttaaattgaggattggctgtaaatgctaagtgcctgtggcgtggatggtgtccctaaccatgaagaaaatgtgcacagtcacttctgtgttcctgtgggccaaatcacctgtttcttctatttggaagatcagttcgatgacctaaaaaattaagttattgtctgtgtacccaattgaccttccacttaaagccaaagtattcagctaaaaatacctttatagtttactggtaggttgcctgttgccgctaaagaattaaggtagatagctgggccttgcatggagtaaaagctaagtcactttctctatcttgagtggtgtgtgcacccttggtaagagaagaaaaccagatagattcctgtcttgtattaggaaacaatatgtacaaacataaaaaataagtataaactcttatctcttaacttgtataccactctaagactaaaacagccaggcgtggtggctcttgcctataattctggcactttgggaggctgaggcaggaggattgcttga

SEQ ID NO: 79482 - DNA, 1049 bp, Homo sapiens
ttttgtactgttgaaaccacttcattggacatgttgcaatagcaaaacccccagttagattagtgtttacacattttctcagttatttaatatttaatgttttccttaatactcaagtgatgtttgtctctagtgttctaatgtagcacaaatcctatgtaaaatcatactatgtatttttgacattaatgttgaaatcaaatatatgcacaagtctttaattttgtgtaatgtgttaagtgctgttcatttaagttattgaaaatgagaataaaatgttgagcttctttaaaagtaacacactatgcaagcatgtgtactttttatatctctcatgtttagtttttataacaccatatccaggttgctatctcacatagtagtcctttaacatattgtattagcagtgcaatgtggactaagctgcttcactttccctttgcaagttcagatcatcatgcccattcatagccaggattccttatccccaaaacagttctatttttccttaatcactactatagagtctttacattaaattactgtcgtatgctagataattttctcaaattgttaaaagaatatgtactttggaaacaaattagtatttatattgtaaatatattcaaaaaaaactaagaaacgtgtacttggcttttatttgtagatgagacatttatgtgattgagtgaattagccattagacattttcattctagctctacagctgcaaagagggagggggaagatgtcttgagtcttgttcccaatttatcactaagtgcatcagaaatctgtcttccaacacccttggaaagaacagggtggtttttagatgtttgtgctcagacagcgggcaacagcagattaaataacaaggcaaaaatactaggaatgctggtagaaatctatgaccgcaggttaaaaaaaaagaccactcaagtaggccagacccaggagacctgggaatctagaacctggtaagcagtctggaattgggaaaggagaaaatctacttttggacccaggcattagaccgcttaagagaa

SEQ ID NO: 79483 - DNA, 1025 bp, Homo sapiens
aggatttgatctaatccaacaagcctttgtatgacctttgacctcagtgtgttcagtactttgtcagatcacttttactcatcatcattgttccaatactgcaaggaatctgtatatttgtttatttcatatcacacaggaatgaaacagaagtatgtaacatgtgtacgtgtgtgtatatatatatatacacacatatatagtaatatttatataagtttgaggaggaattaccacaagaataccacaagtaaaccgatttcttgaagtaaaggagtgacagtgttctcttgccttcggctatgcagctcatgagaaagtgtgggtcagtggaaagctagctgtcagttgtgataataatgaatcataaactcggaggtaacacattcacctcttgtttggagactgccagctttagtggttaattatatgtcttctattctgtatacagtttaactgtgtataaacatgatttgaactcctggcttatgaggtgtggttgttgaatgtattagccttaatcttaagactcactagatttcaaaaactggattatgatattgatatatttctcattttgattcagtgagtgatgtccagtgccacggatgagcttctgaaagcatgggtaccaagttacctattgatgtgttggtaatttggttaaagtcagatcagcagcttggggttttgtttcaaaacgagtactttaaaaataatattccttcaattattcataaccaagcaacaattgaatttaattcagtctttaccaggatacatattttggtctataataatattgagaattttttaagggctagtgttgctacaaattttgaaatgattccatgtatgagtaaatgaagtattagcctactttagatctaattaattaataatagtgagctttgttttctaaacttggggaaatgttcagataggaaaaagtctcttctttgagcacctattttaaattttataataatcatatgtacctaagacatcaaacatgctaattttac

SEQ ID NO: 79484 - DNA, 1117 bp, Homo sapiens
gaagaaatatttaattttaggaaagtgagattttatagctttactatagaacattccacagccttaaagttactgatttaactttcatttttcactttttgtcttaaacatctcttatcccataaagtagtaccaggcaggaactacagacttccaaattgcttttctattttttttcctgtctttattcagaaatccagatatgtaacttaactcccagactgaagaattgactttatttttggccaaggcttactttcctacacttgtgactttttacatgcccgaagaccaataaattacttgcttcttcatttcccctctccctcaagatacatgggaagggtcctattaccttcctttatttcctttttagttaggaacttctttcttttattcctatatcttaatagtaattttgagtgctgtggccattgatgttatatattctttatagcgacatcaccaggaggaacagtaaaatgtttccttaggggtagaaacatagaatgtatctctattaattcaatatgaatgtttttccatagaaatagaattctgaaattttaataaattacatgagttattcttattttagtcttttatgtacatatgcatcagtttgtactcaatttgtcttcttttatttcaagggtgtgattactttagagtcccttggtaaaaggggttatcgagtacctccttcaggaacaatacaagtggtatgtgttttatagcctacaattgcaataatcattctctcacatacatatagaacttagccctttctcctgctactgctgctgcaacaactttggtaagtaacagtggggctgcagctttgtttggagttcccctgctctgccccaggaatgaccatttggggacctccataaaaggaaagcattaataagctaatcaaggtgaatacttaagaaaaatagcatatgacagtttgcataacttcaataggactcttcaatacatatttagaacctaatattactggtgccttctttttaataaaccaaattgagacgaacctgtttaaaaggagaccccaaatattagaattgctttcacaggaaaacttgggaaacaaaattattttatttct

SEQ ID NO: 79485 - DNA, 1030 bp, Homo sapiens
gaatgtgttagcttttttaattgagtttttaaaattattttgtcttccaggaatctgtcttgaactatcgtttcgatcctctcggcattgttgatggttttactgccgaggtaggggcaagtggtgctttctgccccacacatttgactcttccagttgaagtgtcattctacagtgtttcagatgacaatgctccctctccttatatggcaagtattttttatattgtatgttttcctgccaaatcaaccaacttaatgacaaatttaagtgctttgatgcagtacttgaaaatataaatcatttcctaacagctgaatacaaactaatatgccaaaatattacctcacaacttctttctaagctagttcaaacaacagataacctcttttgcatttaaggatggtactaaaaatgtacttatttctctttgtcttgaaaaaatgataaaaattgattagtgacactgtaattccatcttgctgagttcacacacattctcaaatgcttagtgtgcactgtgtcctctagtcctacaaggctttggtgacataaggcttctgtatggcccttttactcccttttcggtttggtttgtctttgggcctatttttttctaatcctagggttcttttttttttttgacagcatctcactctcttgcctaggctggaatgcagtggtgcagtcatagcccactgtagcctcaaacttctggcctcaaaccatcctcttgccttggagctcctaaatagctgggtctacagatatgcgccaccatgcctagctaatttttatgttttgtagaggcagggcctccctatattgcccaggctggtcttgaactcctggcctcaagcagacctcccactttggccttccaagtgttgggattacaggcatgagccaccacaactggcctaatcctagagttctttaggatactagctacttcagactcacgctaatgtcttaatggagagtgaaataactaagaggagttacagcaagcttgtccggcctacagccc

SEQ ID NO: 79486 - DNA, 1060 bp, Homo sapiens
tttctcacacaaaatgttccttgttaggagacatcagtgatgggaaaaacttagtacctaataaatgttttacttcttttaaaaataatagtaaagaaaagtgttctttgaaacatcaaacaagaaatcagtgtcagaacaatcctagtgaaatcatccaaagtacgtatcaggagacacagaacaaaagttctagtttatcaacttcctcaattttgtctcagcacaaagaaaataacttagatttgacaagcagattcaaggagcaagaaatgagcaatggaattgataaacagtattcaaattgcaccactattgacaaacagatttgtacaaataagtataaggaaaaaataataaatgagaactataatccaaaattctttggcaatcttcagtctgatgattccaaaaaaaatgactcaaaaataaaagttactgtgttggaaatgtctgaatatttgaacaaatatgaaagcatgtcctcaaataaagactcaaaaaggcctaagacatgtgagcaaaatactcaacttaatagcatagagaattatctcaataaagataatgaaggtttcaaatgtaaaaagtcagaccaattaaaaaatgaacaagataagcaagaagatccaactaatgaaaaatcccaaaactattctcagagaagaagtataaaagactgtttgtctacatgtgagcaaccaaaaaatacagaggtattggtaagtaacatctaatatgtcaaatgtaagtctcaaatatttgttatggtttaaattttgttcacaggagatctggttataaaggcccaaggttccattatctataggacacacagtctgatagaataataaacctacagaactagtattaacatccttgcaaataacccactctcctaagaacaaatgctaagtaaatggaggaaataaagatcatgctgtttaaaaaataggaagtggtacctttttaaaaaactgttaataggacagtaattgttttcatgacatgttaggtctattatttaggtcttttagctctgttctccccctgctccccc

SEQ ID NO: 79487 - DNA, 1041 bp, Homo sapiens
ccattacttgcttgctctctaatcttcatcacataatctctgagagtctcagtttccttgtctgtaaaatgggaataattccaacttctcacagttagaatgaaatatgaccgtgcttggcacatagcagatattaaataaataatatcgtttattatgttaaataaacattacaaatgcttatatattggttatataagcttatatataagcattacaaatgcttatatactggttatataagcttatatataagcattacaaatgcttatatattggtcaattacaagatatactcaacaaaggtaaataaataatgaaatgtttaataacctaatgctattttgttctgttttgcattgatagtgttcaaactgctaaggctcgagcagattaataattttttaatatatagttatctgagaaaatataaaagctacagaaggatacttgcagtatatgtataatgtatttatattgtcatttgctattacaattatggcttctatatgtagaggatgacatgggtggactaagctttctggaataattagatttttaagtgatgttaacagctgactagagctgggcagctggaaaatttaatgttattccacctttgactcaaggatgtacaagtttggacctggttctagacctgtgtgtatattgaatacctggtgtttcaagagaagtctaaggtgtggtccacggcctgttgcggtggctcatgcctgtgatcccagcactttgggagcccgaggagggttgattgcttagagcttagaagttcgagaccaccctgggcaacataacaagaccctatctctatttaaaaataaataaaatgtggtcttagtgtagaggtaattaaaaacatattaggttatgttctaaatgtatttctaattttgtatttttaatatctgagcttaatcaaaactgctatgaaagattaagacctataaaataaatcataaattagtaatttaaatctactgttttaattcatatttaaaaacattgtaggctgttgatctt

SEQ ID NO: 79488 - DNA, 1033 bp, Homo sapiens
tatcagtcttctgattaatggcaagaaccaattttagaagatgttaatatagtagtggttagtagtgagagcttttcagtcagatatgagtttgattccaaggaacattgtgaagtggggattattttatttggtagggggctggactagatgacagatttccttccaaatccaagtctttaggattggaaatgttaatttatcctacgaattagatgcttattttaaaatttatatatattaaactggttgtttttccatatattttttcaaagtgattagacaaattttctgggtaaaataggtctattgaaatgcaccagaaggaattggagaaaaccatacttaatttagtgatttaaattagttttaggtgttggctattacatacaatcaggcagcagctatgtatgtatcaagtattagtaagtgtattgctcctgagcaggttccttgtgtagaatgccaagtttagatttttagattacatcaatcactttggaaaaatggcaccaaggttagtaattgattctcagaataaacaagcaaataaaatcaaagtcactatttattttgaattgttgtgaaaagttgctttacagtcataagcagttttaaaaatagtatttgcagccaaaactagtgttaaacacaataaaatgtttagttacgtactgatatagatttttaggggaaacaaatttattcatcaagatttccaaagaagttttcaccttaaaaattgtagctttctttagcattctcaggtaaagatgatgggattgtgagtttagtattgtgattatattccataataataacataaacctttagacccatggctttttttttcttttactaaaaccagtgtaagtaatcttttacttagcaaactagtacagaaatattgaaataagcttttcacaaacgtacttacccttactgtgcgcaatgtaatgttgtattttctattctatttcacgttttgaaaaattgctgtcaccacccattgaattgatttcttcaccaatta

SEQ ID NO: 79489 - DNA, 1098 bp, Homo sapiens
catgctgaagtttgttgctgccacaggagacactccaattgctggctgcttcactcctggaactttcactaaccagatccaggcaaccttctgggagccacgggttcttgtggttactgatcccagggctgaccaccagcctctcatggaggcatcttatgttaacctacctaccattgctctgtgtaacacagattctcctttgcgctatgtggacattgccatcccatgcaacaacaagggagctcactcagtgggtttgatgtggtggatgctggcttgcaaagttctgcacatgtgtggcaccatttcctgtgaacacctgtgggaggtaatgcctgatctctacttctacagagatcctgaagagactgaaaaagaaaagcaggctgctgttgaaaaggctgtgaccaaggaggaatttcagggtgaatggactgctctagctcctgagttcactgctactcagcctaaggttgcaggctggtctgaaggagtgcaggcaccctctgtgcctattcagaggttccctacggaagactggagtgctcagcctgccacggaagactggtctgcagctcccactgctcaggccactgaatgggtaggagcaaccactgaatggtcttaagctgttcttgcacgggctcttaagcaacatggaaataaggttgatggaaaataaacatcagtttctaaacaaaaatacttaatttttagagaagttttaggttcacagcaaaattgagttaaagatactgaaatgtttccattttacacccctctcgcttcccatgcacagcctctaccattataaacctctttcaccagagcggtacatttgttacaattgcttaacatacactgatgcattataattacccaaaatctatagtttaaattagagctcactcttggtgttgaacattctctgggctttggcaaatgaataatgtgatgtgtccaccactaccgtgtaatacagaattgtttcactgccctacaaatcttttgtgccctgcctactcatctctccctccccacaatccctggcaaccactgatcttattactgttaccatagttttgccttttacag

SEQ ID NO: 79490 - DNA, 1048 bp, Homo sapiens
gattataatgattgcaaatgttaatattttctgaaattgttctaaaactctttaggtcccagcatgtataaacttacacataggtaaaccatagtttggtgtcacatcttgaagaagttttgagcatataccttgtcctaagataaaggcttcattgtcttacgtgttaccataaagaggggcttctattttaatatgttgtaaatttctagaaacataaactgctgaaaattgaataacagataatattatgagaggtttactgtttacagaatgctaaaaatataagatgtctacttgtattttgaattttagctatcaagtttgaggattataatttgcttttaatatctgtagttcttttgctagtgagtacacaattaactgcttaaatttggttagacttcagttgaggataaagacgcttgacttccagcacatctagtgatttacatgtttatctgatttatgtaccatctgttaccttaaagaagacatgtaacctctctggcctcaaactcatttgtaaagtgagatttgataatgctacctgttgatagagttgctatgatgattcagtaggatgtttgtagagctcattgaacagtgcttggcacatagtaagcactacataaattgttcaataaatcagcgagatgagcttcattataacaccaactataatacaccttaattgacttcttataacatgtcatgctttacctgcgtacagcagaggaaagttacttgacttaagttgcacctacagccggtggtagagctggattcacgttaggctacctgaatctgaagtattctccccctcgctctcagcttttcactttcctaagaagaagaaacagtttaacatgcttcttcaacttccctcctctccacctcaaactatttctttcatgccactctcctttctacctccaagtgccttctctcttttctcagaggtgctgtatccccttcactttccaaagtgaattttttcacgttgtaggtaactccttcctctgggctttgccccatctatatcctt

SEQ ID NO: 79491 - DNA, 1028 bp, Homo sapiens
ttttaaaaaactttatattttactttgttagaatataaaacttctgtgagtaaagttgaatcattaaatggggtcaatcccattctatggggataggggatttattccattctctctctctctctctctctctctctgtatatatatgtatatgtatttaatatatatatgtatataatatattttataatatatgtgaagcccttcttacatgcagtgatttgagaaactggtaggcttgacatagttggggaaaaacttatgtctatttttctgtttatactttgtttttctctcctagttcctacctcattaagctctagaaatagttcaaatttagatatcagctaaggcctctttgaaaaaattttgcaccccattctttctctttttaagtgttgtaagaaaatatactttcaactggcataaagaaagctatgacatcttaagaatttttctataagattctatgaaaacacttatttgaggatgatttcggttctgtcctttctgtgggggaatgtaaaacaaaaggaatagcaggtcattttcacaccttgaattcaatttgtgtctattttataatctatttttatggctgtcatccaattttgtccctctagtttaggttgtatctaatagtatcttggctttgagttaggcaggataggaagagatttgctattaacctggactaacacagactcctgtgacacttaagaggttgtatgaaagggatagaaatggatgtctcactttgatgttgaatatgtggggacatacacacacacactctacacacattctctctctcagaggaaattttaactcagttggagccctggggacatgtaaacaggcacaaggagatttcccataggcttacagggtaagggagagctatccctctcccgtggattagcagaaatggcagatggcatctttctcccctaataatcaccagatggcataaagctatgccctgtggtgcaggaaggaggaaactgggttgatcatgtattttctac

SEQ ID NO: 79492 - DNA, 2732 bp, Homo sapiens
tgcctcttaaagcagtgttagtaactgaaattttggctttaatatgttttgttgtagattgaagaaaaataaagagctacagaaagttcaggatatcaaagaagtcaagcaaaacatccatcttatccgagcccctcttgcaggtgagtactacattgcacatctagatttttgtggtctgtgtatttgggtaccaactaactttgggtattttttcctataaatattatctttcatagtaaatttatgatatgatttggcctataaaaatgtaatttattcagtgtatttcccaattgcagtcagtctatttatatggtgtttcttttttgccttcattgaattctatgttccatatccccccaagttatgcaaaatgatttgcgtaataattttgtagatgatttttgtcttgcacttgtattgattaaaggactatattttttattagtggttctcaaactttggttggtatcagaattaccaacttggggaacttagtataaatacataggcccaggctctttgagtctgggccactgttcagtaacatcccagatgattctgatactaaaattgggactactgtttcttttgctcagctaacaccagtacagtcttttatgcaatttacttatgtagatcacttaaagggaaagaaatcttagtaaaggtcaaattctgtaatcacatattgagtacatttgtgtagatctacttgtattatttttgtaccaaattttattaaaacaaaataggcaaaattctggagcatttgtttcacatatacatgataacaaactgatagtcaaaaagcaccagaaatgaaccattgttatctaagtttttaggtaatcctctttgaggtagatagaacagtgttaagagcaggcaccttggatccagatggctggggttcacatgccagcactttgacttaaatggctttctagttgagtgaccttcagcaagttaatctgtctttgagcctcagttttctcatatttaaaatgggggttgttatgagggtgaaatgagcaaataaatgtatgtagaatgtttatttgatgcatggcatatcataagacctatgttagtttagctactattaaatttcttaggagtggctaatattacttgaaaacatgcaagatcctttataaagtgttggtgtgaattctgtaaggtcacatttaattaagttgtttattttttacttatttttattaaaggcaaagggaaacagttggaagagaaaatggtacagcagttacaagaggatgtggacatggaagatgctccttaaaaatctctgtaaccatttcttttatgtacatttgaaaatgccctttggatacttggaactgctaaattattttattttttacataaggtcacttaaatgaaaagcgattaaaagacatctttcctgcattgccatctacataatatcagatattacggatgttagattgcatctcagtgttaaatctttactgatagatgtacttaagtaaatcatgaaaattctacttgtaactatagaagtgaattgtggacgtaaaatggttgtgctatttggataatggcactaggcagcatttgtatagtaactaatggcaaaaattcatggctagtgatgtataaaataaaatattctttgcagtaaaatattccctttgttaatgttatagaaggggggatacaaaaaggaactaacaatttgtatggcagtgtcagatatttttattttagtatttcctgttttggtttatttgcatcttagaagagcataatgacattgtttgatgaagcctaattatgctggactgttttgacctggtttaacccttctgataggtagttgtggatgctggggatgagaactgaataatctttgcctggagtgacactacactctagaatttccactttggagaatactcagttccaacttgtgattcctgatagaacagactttacttttctagcccagcattgatctagaagcagaggaatcccagcgccttttaaaagttgttatgtggttttcttttaaaaagctcctgtttttggaaagtagaatttatgggtacaacgtatgttcattatttgtacataaaataaaaccatttaaaaagtaatgctgatatttattctttaaaggcactaaacaaagatatgaaatattgatgacctggaagaagaaatcttcctccacacatcccatttaagtaggagatacatttaattaaagagaaatagatacttaatacttaatgttttgtgtttttacattgtttacagttttaagtatgttaaatacattaagtaacgatcagtttgcataatggtttttttagggtagagtttaaaatcagtaattcttagccttacataattataaagtaatggctcattttttgtttcagtattagatagtaaaactaaggctgtagaccagtccctggaccaagtgttaggagacctgagttccaatgtggttttgcctgggtattcttatttgtaaataatattattgattgaagattaggggaaatgatacatgtgaggaaagacatttgtaaaatttcttgggtttttactacataccgtattcattttttaaagaaataaacattttgaaagttacgttttattaggaaacaagtgtcctaccttgccagcgaaggagcaagctgcccttgctttgcgaccatcagtttggggga

SEQ ID NO: 79493 - DNA, 1008 bp, Homo sapiens
cattttacatttactttatccttgtctcaatgtattgaagacataatgctttttccttctaagtatacttaagtgtgtgtaacctaaaaataagaacattctcttaaataaacacagtatggttatctatcagtcaggaaattaacattgatgtaatactattatataatctataaaccttatttagacctcaccagttattctgattacgtccatagcaacacaaagtccttcatatttcttcaggctcctttaatctggacagtttctcatctttcttttacgtgacattgatagttttgaagactataggtcaagttattgtatagaacgttcttcaatttgggtttgtctgataccttcctcattagattttggctaggcacctttggcagggatgtctcagaaatgatggcgtatccttctcatgcatcatatcgggaagcacatgatgtcaccttgctggtgatgttaactttgatcacttgattaaggtgatgtctgtcaggtttctccactggaagattactattttgttttccttataatcagtacgtattttgggggagatacatagagattcagtaaaaagcctattactcctcaaacttgtacctactggttttggttttcattagagtcttgcctgaatcagttactactattgttgtgattgttgccaaatggtggtttttctaattccatcatttcttctacattttttagttgattttctcatgtaagaaagagctttcccttttccatcaatttcaagatttattcctttattcatattacatctgtgtgtattcatggattcttatggtatacattgggttataattctttattgtcattatttattttgaagttctaagtggcccatatttggcctgtgggagttccttcaggcagactgtcatgtcattttgacaattctcctcattctttgagtgcattcatgttttatagctaacaagatgtttcctcttccccagcttggaatca

SEQ ID NO: 79494 - DNA, 1489 bp, Homo sapiens
aggaaacactgccggtcacagtcatttactgattaccatttacctcgtggctgaggttattatgatctgaataaagctgtgtatatataaaagaaatagtagccaaatccagaggtagtgctgttttatatgcctgtcagatagatttgaaaaccaagaaatacctgtagcttttccaaaattgttttgtgtgttttaagattaaaaggatcattaactgtaaaaataccagccactagcaacggtaaccgtgtttggaggggatctgaagaaatgtagggcctgacttttattctgcagagtagcacctcatttatttgaagatatatatagttttcatacctttttgctataacatagatatttaggttgaaccatatgaagttttctctctctttttttttttctgtctcctacaggaagaacatggaattcttgatgttgactttttttgatctgtaaaaaatggcagtttcatatggttcaacataattcaaagttttctggctttgaatcttatctgggaatgggacattgggaaggtttttcagtttgtaatcctgataattgttatatgcccttctgagggatgggggtgttactgtctcctcctttctctttgagaatcactagtatatggagagatgtcttcaatagggaggtgtgtaaaggagaaaaaatttgaaaacctatattctctgagataccctgaggggtgaatctaggtgtatgttcatttagaacacttaggaaaaggaagacgttttaagaaatgtttcctttctacctttcttaaaaccttatttttatctcctctgttccctcttacaggataattcatttgaatttgaaaaacgtagaaatgaacctatcaaataccagcgagagctatggaataaaactagtaagtcacaaagaaataccagtaattttgaggagagactggtttgggataatactataactttaagtgtcagtttgttgtttaaatattgaattttccatttatcattccttggcttttattattttatcctcattttaatggttctgttgtagtcagatctttcatcattttttttttacaattggctggtgtgttcattttaaaataatgtaattattaactttgatactacttgaagtgcccacacagagatgtaaaaacataaaaatggctgaaaaaaatagagacggaaaatactgttttagggtgagtgtgggatggttaaaatacacatgaaacctaacacactttacatgtttagaccatatagtttaggatataaacttgtattctgtataccttataaaattcagtgcttctttaaaattaaaaagtgtagtgcttaaggtcatcattacaaatgttctgagagaatttctaagtgtttgacttaggtaaaaaatgaagttataatcttctgaaattaaaagcaataatatctagttcttgttttttttgttttgttttgttttgttttttttc

SEQ ID NO: 79495 - DNA, 1035 bp, Homo sapiens
gtaacaaaataatactgttagatttataaaatgagtcctaataagacatttcagggacatgttgaagcatcatcagttgtaagttagcactattaaaggattaaatcttgtaggatgaaggtggagagttaaagtagtaaagaatcttgctagcagatctgtgagtaagtcgaaaacgaatctgttatatcaccagttttacttgcttttgaaattattttgtgctttcaacaaggaagatggaaagacccaaaggagatttcagaatggttgtttgaaacttttatccccattgaggtataaagacagtgaattttgaaaattatcctgaattaagaaaggacttaaataaatgactttacttaaaactgttccctttatttgaaataattttactgttattctatataaatgattagtaatttaaaataatattttcagggcccttagcctttggttgggatgatgtttgatagtcaaaaaatagttgtttccatttaatctgatatatcttacacatttctaaatggcagtttaagtagaagggaaagtattttttgtctagcaggggtaacgtcttgtgatagaaaagtttttaatgttgacttctcaatattttaacttttcttgtaggtgttcagattttgcaaatctaaatgtcataaaaactttaaaaagaagcgcaatcctcgcaaagttaggtggaccaaagcattccggaaagcagctggtaaagagcttacagtggtgagtacggttagctatcaatatagtttttacacgtttcacagttttagtatttgaagggtatatgtcatctaatcaatcataacaaggcctcctataacatgattaataagtaccttatttgtatttggctgtggaaataatctcattctcacatgatccttaaaactgtaattctgtggagctactatttttagctcttgcagaccaagaggaaaatcacttaaatggcttgggatgaagttgggaattgctactgaaagattttgagatgaagttaagagataa

SEQ ID NO: 79496 - DNA, 1082 bp, Homo sapiens
cagtacttagcacttggaggatacagagaaagtaaaaaacacattactgccttgaagaagttaagagtttagttggccaattgaatttttaatgcaaatatccagtataaaatgctgttttaagactgccacaaaataaaatattgttttataaatggaaatgaaaatagattttgccaggtgaagtggtgtgcacctgtagaggcaggaccacttgagcccaagtttgagaccagcctgggcaagagagtgagaccccatcttaaaaaaaaaaaaaacacggaaataggtttcaatattattggacatttactccttaatgttactaattatggttatttgacttgggaatggacagagagactgaggagttacacttatcccttaatctttgcaagcatttacaagattcttcatcttttagggaaagatagtgttcagttgctggtaagtttaaataaaagtaactaaatgatattggggccatggaatttgtttttaaaaggctactgttgctgaagtccagccatatctgggaagcccatgatactacagacatactgtgatgtgtaactctttagtttgtgctgaaatacaagactgagcatgaaaatatcctgctatgaggaatcctgttatgatgtgcagattttcaaaatgactatattatgtattatttggacattagaagtatacttctttcttttttttttttttttttttttttgggacggagtttgctcttgttgcctaggctggagtgcaatggcgtgatcttggctcaccacaacctccacctcccgggttcaagcgattctcctgcctcagcctcccgagtagctgggataacaggcatgcaccaccatgcccggctaattttgtatttttagtagagatggggtttctctgtgttggtcaggctggtctcgaactcccgacctgaggtgatctgcccgtgcggtggctcacacctgtaatcccagcactttgggaggccgaggcgggcggatcacctgaggttgggagttcgagaccagcctgaccaacacagagaaaccgcgtctctactaaaaatacaaaat

SEQ ID NO: 79497 - DNA, 1021 bp, Homo sapiens
gcaaaagtcatgatggctttgaagtccttcctccaaagatacagcactagggccgggcatggtggctcacccctataatcccagcactttgggaggctgaggtgggcggatcacaaggtccggagttcgagaccagcctggccaacacggtgaaaccctgtctctactaaaaatacaaaaattatccaggcgtggtggcagacacctgtaatcccagctactcgggaggctaaggcaggagaattgcttgaacccaggaggcagagattgtgccactgcactctaacctgggtgacagagcaagagcaagactccttctcgaagaaaaaaaaaggatacagcactaggttcttctagtttagggaaaacctttactttcatgaaaattgggaacattttttaaaggctatatttggtgagatgggaagctagtgccacatgcttaacaattgcctcaactaacaagtttcttttaacacatttgttttgtagacttaatggtgctctgtgtgcatgttcttccaaaaactgattcattaatttagtcaatctccaaattaaaatttaataatgtctcctgacttttttttcctctttcctcttttgtcttaatttttcatcagcgttccaaaacagggagacattccaaacaagtgcaacattccaaacaaggtcaacaaaaaaacagtcataatacttgtgtcagtactataagacagtttgagaaatattgattggaagaatctagttatgaatttcaatcatctgtaaactctaccatcaaagaatctgttttttatgtgtttcattaatggaaagtgggattttaaatcaaatgaagtgccataaaaatgcacctgaaagtataaacttcttaacatgaacaaatatagatctgctattatcataaacctgtgtttcatgtaactttctaaaaacgacgtttgggcatgcctacttactttaacatcatctaccttttgatgtccttttcacaatatttagacttgcttgctattta

SEQ ID NO: 79498 - DNA, 1054 bp, Homo sapiens
atcttgaaatagaattggggcaattaccttttgatcctcaatactgattcacaattgagttaaattagacaactgtaagagaaaaatttatgctttgtataatgtttggtattgaaactaatgaaattaccaagatgacaatgtcttttcttttgtttctaagtatcagtttgataactttatattattcctcagaagcattagttaaaagtctactaacctgcattttcctgtagtttagcttcgttgaattttttttgacactggaaatgttcaactgtagttttattaaggaagccaggcatgcaacagattttgtgcatgaaatgagacttcctttcagtgtaagagcttaaagcaagctcagtcatacatgacaaagtgtaattaacactgatgtttgtgttaaatttgcagcagagcttgagaaaagtacattgttctggaatttcatcattaacattttataatcttacactcacttcttgtctttttgtgggttcaagagccctctgacttgtgaagaatttgctgccctcttaagagcttgctgacttgttttcttgtgaaattttttgcacatctgaatatcgtggaagaaacaataaaactacaccatgaggaaaactaaaggtctttatttaaaatctggcattgtattaacatgtaattttatactatgtggtattttatacatttcctcagtagtgatatttggtaaagcagttcatacagcttttttctaagttccatgaatcttacccagtgtttaccgaagtatttaagcagcatctgaatatttccacccagcaatgttaatttatctaggaaagttcagaatttcatcttcatgttgaatttcccttttaacttccgttcatagacatatatgtgacttccaattcgaccctctggcaagtgagtgtggaagaaaacagcagttcttttataattgcttgaaattaggaaagcgcttatttcctagaagcaaataaatgtttaagtaaataaaggctacattttgctgagtactgtttcagtcaattttagaatt

SEQ ID NO: 79499 - DNA, 1656 bp, Homo sapiens
tctgcgttttcttgcatatgaaccttgtatttcccaatgtttatactattgaaaatactacccggggggttgtatctgtagaagtaaagacacaaaagcttatggggtattatatcttgaagatttaaattcagcttttaaagcatttgacattttatttcttctctttcaaaaaaaaatgtagtcattgaaagaaaatcttgcaaggtgttggacacttactgaagcagagaagatgtcctttgaaactcagaaaacgaaccttgctacagaaaatcagtatttaagagtatccttggagaaggaagaaaaagccttatcctcattacaggaagagttaaacaaactaagagaacagattagaatattggaagataaagggacaagtactgaattagttaaagaaaatcagaaacttaagcagcatttggaagaggaaaagcagaaaaaacacagctttcttagtcaaagggagactctgttgacagaagcaaagatgctaaagagagaactggagagagaacgactagtaactacggctttaaggggggaactccagcagttaagtggtagtcagttacatggcaagtcagattctcccaatgtatatactgaaaaaaaggaaatagcaatcttacgggaaagactcactgagctggaacggaagctaaccttcgaacagcagcgttctgatttgtgggaaagattgtatgttgaggcaaaagatcaaaatggaaaacaaggaacagatggaaaaaagaaagggggcagaggaagccacagggctaaaaataagtcaaaggaaacatttttgggttcagttaaggaaacatttgatgccatgaagaattctaccaaggagtttgtaaggcatcataaagagaaaattaagcaggctaaagaagctgtgaaggaaaatctgaaaaaattctcagattcagttaaatccactttcagacactttaaagataccaccaagaatatctttgatgaaaagggtaataaaagatttggtgctacaaaagaagcagctgaaaaaccaagaacagtttttagtgactatttacatccacagtataaggcacctacagaaaaccatcataatagaggccctactatgcaaaatgatggaaggaaagaaaagccagttcactttaaagaattcagaaaaaatacaaattcaaagaaatgcagtcctgggcatgattgtagagaaaattctcattctttcagaaaggcttgttctggtgtatttgattgtgctcaacaagagtccatgagcctttttaacacagtggtgaatcctataaggatggatgaatttagacagataattcaaaggtacatgttaaaagaactggatactttttgtcactggaacgaacttgatcagttcatcaataagtttttcctaaacggtgtctttatacatgatcagaagctcttcactgactttgttaatgatgttaaagattatcttagaaacatgaaggaatatgaagtagataatgatggagtatttgagaagttggatgaatatatatatagacacttctttggtcacactttttcccctccatatggacccaggtcggtttacataaaaccgtgtcattacagtagtttgtaacatttgtagattggatagcattttta

SEQ ID NO: 79500 - DNA, 1017 bp, Homo sapiens
aaaaaggctcatggactcttgttgagcacaatcaaatacaccagaacaagcctttctgaaagaatgagaattttctctacaatcatgcccaggactgcatttctttgaatttgtattttttctgaattctttaaagtgaactggcttttctttccttccatcattttgcatagtagggcctctattatgatggttttctgtaggtgccttatactgtggatgtaaatagtcactaaaaactgttcttggtttttcagctgcttcttttgtagcaccaaatcttttattacccttttcatcaaagatattcttggtggtatctttaaagtgtctgaaagtggatttaactgaatctgagaattttttcagattttccttcacagcttctttagcctgcttaattttctctttatgatgccttacaaactccttggtagaattcttcatggcatcaaatgtttccttaactgaacccaaaaatgtttcctttgacttatttttagccctgtggcttcctctgccccctttcttttttccatctgttccttgttttccattttgatcttttgcctcaacatacaatctttcccacaaatcagaacgctgctgttcgaaggttagcttccgttccagctcagtgagtctttcccgtaagattgctatttcctttttttcagtatatacattgggagaatctgacttgccatgtaactgactaccacttaactgctggagttccccccttaaagccgtagttactagtcgttctctctccagttctctctttagcatctttgcttctgtcaacagagtctccctttgactaagaaagctgtgttttttctgcttttcctcttccaaatgctgcttaagtttctgattttctttaactaattcagtacttgtccctttatcttccaatattctaatctgttctcttagtttgtttaactcttcctgtaatgaggataaggctttttcttccttctccaaggatactcttaaatactgattttc

SEQ ID NO: 79501 - DNA, 1030 bp, Homo sapiens
tggttttttccccccatacatgacgcatgtgaatagcatgtctgagtaaagtaacattttgatttttaggatgaaaatatgaagaatcctagttggtttaagattctttttttgagacggagtttcgctcttgttgcccaggctggagtgcagtggcgcgatcttggctcaccacaacctccacctcccgggtttaagcgattctcctgccgcagcctcccgagtagctgggattacaggcacatgccaccactccctggctaatattgtatttttagtagagacagggtttctccatgttggtcaggctggtctcgaactcctgacctcaggtgatccatctgctttggcctcccaaagtgctgggattacaggcgtgagctactgtgcctgtccaattcttttatcactgttgggataaggacagtgctactccagtacagatttaaccattgcagaattcttaacaaatttggccttgagaatggtgcacaatcaccattagccaattattttctgtgctgtactttttgggctttgttgtatccttaaggcaaaatattaaaaaaaaaaaaaattttcatttttccttattgacttacgacctgtgaaaaaataccagggtttgttcatttctctgtataagggaggctgaaacactttttgtacttaaaagataaccccaaaacaacaaagctgagtgccttcaatatagtaagataagaacattacataaattgttctcttggttagagccatatgggctggcctgtgtgttttaatacaaaagatagtgaactgcttaaatgttcctgggtgtatgtaaataaatgtttttaagaactagcctacttggccttacttatattacgttaacgttcaccaccatttgatgaatgattgatcatgggctttcatttacttttctttttttattttattttatttttatttttagtagagacagggtttcaccatgttggccaggctggtcttgaactcctgacctcaaatgatctacctgccttgg

SEQ ID NO: 79502 - DNA, 1030 bp, Homo sapiens; identical to SEQ ID NO: 79501

SEQ ID NO: 79503 - DNA, 1030 bp, Homo sapiens; identical to SEQ ID NO: 79501

SEQ ID NO: 79504 - DNA, 1047 bp, Homo sapiens
agtttatgatagactcaagggaaggtggaacattccagcgacagagaatctgataacctgaggaagacgtaatcttgggtttgggagcagtgaaaagactgcttggactacagcagagtgtaggtatttagaaataatggaataggtggggtgctattatagtcatcccttgatatacatgagggatgggttccaggatgcacccccataccaaaatccatacgtactaaagtcccttgactgcggacctcacatatatgaaaagtcacctctccatatacctggattttgcatcctgccatgtagttcaaactcatgttgctcaagggtcaactgtgtattgtaaaacgtcttggaatctagataggaaagtttgatttattgagtaacctgctatcaggttagagaaaaaagtgccggaactttttgctggtgtggaaaaggtggtatggaaaaatgtagaatagtcagtcagttaagagttctgtaatctggatatttggtgaggaggaccttgacaattggaataacagtgggaatggaataagggacattgaaggaataatggaaaataatggcaatttattaaattgtagaaaatgtgctagctgcttcacttttggagttggggttactggggaagttttgccagatgataaatagatggtaagcacagtttggtttggttttacccaaatttgttctagacaaatttggtttggggcaggtgttgaggtttgattttttttttttttccaccctacaaacaggccccctacacagctggatgtgttggctagaagctctgatgagaagttaggacaagatctgtagcttggaattcttaataggagtgatagcaaaatctgacagcgctgcaacatggtaaaataggcagcatttgtagacatgactaggccaaagattgtatcttgaggataagactttaggtagctgaaggtgcaggaaaaacccccaagtgattagtcagtaatattgtaaaaggccacattaagacagtaatcaagcatatgctatattatacta

SEQ ID NO: 79505 - DNA, 1047 bp, Homo sapiens; identical to SEQ ID NO: 79504

SEQ ID NO: 79506 - DNA, 1047 bp, Homo sapiens; identical to SEQ ID NO: 79504

SEQ ID NO: 79507 - DNA, 1011 bp, Homo sapiens
cttctgtaaaattatttttctacaaaatattcaaaggtcatgtaaatggtgaagttttaatgcaatttggattaacactttaaatcactatccaattttttttgaagtaagaaaaaaagattaagataagatcttctccattgttaccctcatgtttacttgtggagggaaaatcatactcaaatacttattgattgtttcagctagatagtctataaaggtaaatatatatttcaaatcaaatcttattacaacaaatttcaagaaaggatacaaataatagtatctcagtattaaattcaagcaggtatccatcagaaatctaaatacatatttttattaatataaatacaagaaacatcttgcaagctctgactttaaacaggtattgtcttcattaagtttattctaacattacgctatgttgaataatataccttttccacaaatccacatagggtacatgtaattcttcaatctttgcataagaaatacatttttcgaatgaactagcaaaacgaaaagttaagactgtggattatgcaggcaaaaaaatctaaaagtagttaatgtaaagcaagctaaaatttgggaagttgacaagatctaagacatttccttttaaagtgtctctaccccaaattccaatatagcaaagagagtcaaagttcaggtttcaaatactccagtcattgtacaaacacataccttaaataagagactcaggccaggcacggtggctcatgcctataatcccagcactctgggaggctgagtggggtggatcaccttaggtcaagagttcaagactggctgggtgcggtggctcacgcctgtaatcccaacactttgggaggccgaggcgggtggatcacaaggtcaggagattgagaccagcctggccaagatggtgaaaccccgtctctactaaaaatacaaaaaaattagctgggcgtggtggcaggcgcctgtagtcccagctactcaggaggctgaggcaggagaatcact

SEQ ID NO: 79508 - DNA, 1039 bp, Homo sapiens
cgaggaggattaaataaaaaaacagagataggctctcaaagcaccaaatagtatgattaacagattcttgtgtatcacatttgaaatgctttatgttttggctttatgttgatgagttgaaaacccgtgtttttgtttatgttgtttggtttttgtttttggctatcttatgtagaaaggcatgtaagggatggcattgattattctaaataatttttactgggaaagcttttccaagattttgaatagctaaatgtcaacttttttcttaatagtattttcatctcagcctagtgacgatgaatcaagtagtgatgaaaccagtaatcagcccagtcctgcctttagacgacgccgtgctaggaagaagaccgtttctgcttcagaatctgaagaccggctagttgctgaacaagaaactgaaccttctaaggagttgagtaaacgtcagttcagtagtggtctcaataagtgtgttatacttgctttggtgattgcaatcagcatgggatttggccatttctatggtaagtactcaaaaatgtgttatacataacctgatgggatagtgtagaggaacttaagagtgaggactcttgggatctgttttcagtgccattattaaatgtgtggccttgaaaacttgaagcctgtttgagcctcagttttctcattcgggaagtgggtgctgcctatctcacaaagctttttatttaaataaggtagtagttattaagaaatgtaaggataataaccatatatgtttgtgactcttttaaagttaaaagattggaagattaaaaatctgaaatgctcaccatgaggcaaatcatttacatttagaatcacacttaaactaagttgaagtgtgactttattaggaagattatttaaatcccagttgaaatagttacatttgaaatgtgtaaataataagtgttcattatttctactttgaggtttcatgtaagtatcatactttgtaactttcattgttgcttctgtgattcacatgaattgagagtttgtcatctttgtt

SEQ ID NO: 79509 - DNA, 1105 bp, Homo sapiens
aagcattagataaggacatgaatatattaatgtgggttaggctgttttgttagaatatataatgaaggtaatgttaatgtagaattgaacaattatttaaataagttttacaaatggtttgtttttacatttacctatcttaattttatgtcagaaagcctgacttaaatactctaaccatgatcatgaatgcctttgtattatgtaatgctttgtttaagtcttcctttctttctctttgtccaagaaatataatctcacacctgaggcgacggcatctttgaaaaactagtgatcaagaataaccagataaacatgatgggcataagggtcatgaccaaaaagatctctcagtggcatctgtatcactaaatattaggaatattcattcatttcagtagtgccttctgtctttgtgtttattgttgtaagtgtgaaagtgaactgaatactccatgatccatctctgaaaaatattgcctaacctaaatcaccagctttcctgtggcatggatatcctgtcttctgaagaactgtttttgcttttctggagcatgaatgtttgttgttttagagctctttgtattcgagttcatattttatccttatttttagtgcttttcctctaagtagcttgtggaaattatttctgagtaattgaagcttctgtgtcaacataatagtttgttgacataagaaacagtgttaagaaattatgcatttggaaaaaactgaaggtgattttttccagggaatttgtttcctggacttgggatttcttgtgcaaattttccccactagtttgtttttctctactattattttcataaaggagcagcaccagaatagtccttaatatcggagatagctgttgtgtcacttcctcatgctgacatatttactagagggtaaaattaataaccttctagtaagagtggcagtcgaagggaagggctcatctgacttctggaaacctatgttaaaatacagtgctttgaaccttgatcatgggctaattaggttggaaatgaaactagagaccagatacacccaaggaaacttttggtagttattttactttataagtcacaggaaatgcttgtgt

SEQ ID NO: 79510 - DNA, 1038 bp, Homo sapiens
gaaatttgtggggacaccttcagatacattcagtacaagatacagctgttgaagtttattacgtacataacctaaaaagttcagtgagtcttttttgggcttccacactacagagttgtgctcgaatagaaccatggaactcgtgagagaagtgagctcttttttctgtggttattgagggggcaaagatgggcttctcagcttctgcagcccactaggagaatgcagtggtctgatctaattctgagagttgtcaagggatctgatggtgttctcaagctatatgatgagcctgctattgcataattctttactaatagtaggaatcatatcttttattttaactcagatgactataatacttactactgttgtattctaagaaaatgtaagacccttaaatgattgttgaacttaccatctctaaaattatgattcttcaggcagaggaacaaaagatacccgaagacagtatctatattggaactgccagtgatgattctgatattgttacccttgagccacctaagttagaagaaattggaaatcaagaagttgtcattgttgaagaagcacagagttcagaagactttaacatgggctcttcctctagcagccagtatactttctgtcagccagaaactggtaagaatacactgataagagacttaaagacatgtacgaccacattttatataaaggcttgttttctacccctaataatttagtctctagttttgaatatgtttgggtaaaactcaagacaagactatttttgtgtgtgaaatctattaatacctagtgtttcgctagactgttctggagcatagcaatcttttactgtaacagtaaccatcttttgccattaaatagaagacaaaattgcttcagtgagatttgttaaaatcacaaatgctccaaaattcttttggtgctttttagatctttaagagtgggagattggggatgttaatatttttgcttgcagtagtgtacattttgtaatatagaaatagtgaaaaaaattgttattaaagt

SEQ ID NO: 79511 - DNA, 1088 bp, Homo sapiens
tcattttttttttttttttttgagacggaattttgctttttttgtgatccaccggcctcagcctcccaaagtgctgggattacaggcgtgagccaccgtgcccagccagatttgaattttttatatcccacagcatctagcgaagtgccttgtctagagtagttccataaatgttaagtagaaacaaattattatagaaataaccaaatttagacccttattctctggaattcaaatttattgcttgagctcataaaatagagcattccacttttgggctgacctgacttagaatttaaacctgagactccattgtgccattttcctgccataggcctttgtggactaaattgaacaaaagcttgtctaattagatactgttcctttggagtatggcagcatctgagacttttaataatggaagaagcatttacatgtagtcaaatctagctttgaggagctaataggcaaataactgaaagattatcacttttccttaggggtcagatatagaaatgttgaattctgtgacccccactgacagctgtgagcccgccccagaatgttcatctttagagcaagaggagcttcaagcattgcagatagagcaaggaggtaagttgttcacaaattctaattttttttttaatatgatatatgagtgatattatgagtcttgccttctttccaggtgggtggcctttctggctaatctaaggggtcgttggaggattagaacttcagtgtaggttgggcacagtagctcacacctgtaatcccagcattctgggaggctgaggtgggcggatcatttgaggtcaggagttcaagagcagtctggccaacatggtgaaaccctgtctctactaaaaatacaaaaaattagccgggtgtattggcaggtgcctgtaatcccagctactcagaaggctgaggcaggagaatcgcttgaacctgggaggcggagtttgcagtgagccgagattgtgccattgcactccagcctgggcaacagagtgagactccatttaaaacaaacaaacaaagaaaaacttcagtgtggatttggtgaaggcccacagaaccca

SEQ ID NO: 79512 - DNA, 1027 bp, Homo sapiens
gttgccaacatacagacttcattttcttggcataggagcttttcagtttccctgtgcttctcagtttctgcagtcatgtttttcacaccttactgttcattgaaaatagagtcctttactgttgctgcctgctccccattcacgattatccttttccttcacctctgtctggccaaatgctacattttcttttagacataactttctccttcattccaacaatataactgttgagactgttctagtccaggagggtctccttatcttagaagtttgcttctatctgttcatacaggtatgcagtcctgtcatgttctgtatggtaaatctatgggtggcttgtctctgtttcacctggaagacagtaaaccacttttcaaacttagtgtcacatatagtgcttcctatagaattaaaaaaaatgtgtctcatgagtcaatatgtttttgtatttgtagacctgaaagatgtctgaaaattccagtgacagtgattcatcttgtggttggactgtcatcagtcatgaggtatgatatttaatactttttataaggtaatttgtaatattaatgttaccagtgatgtaaactgtgttctttgaagatcagtctttttctacctttaagcaaaaagttccaatggacattttccctctcatattaaacttcactgctgaaaacgcttcatgagccagcatcttctacattattgtacatagctttgagacattaggcaaatatttattgaaggtttgttattgttcaggccctgtgctttactttcattttcatataattttgtctttttttttttttttttttttgagacagagtctcactctgttgcccaggctggagtgcagtggcgtgatctcagctcactgcaacctccgccccactggactgaaatgattctcctgcctcagcctcctgagtagctggaattacaggtgcctgctaccatgcccagctaatttttgtattttcagtagagacgagtttcaccatcttggccaggctgatcgtaa

SEQ ID NO: 79513 - DNA, 1031 bp, Homo sapiens
ttctttaggaaaccaatcaatcagtgtaggagggagaaagaagcagaggtcttgtctttttcctgatgtgattaggaggttaagttctttggtgtgggtttctttgcatttgcccccttaccatgctaaactctggtgaaatgtataagcagccttggcttttcctctcctgggtgctctgtgcttcaacattttatatctttcctcccatcagaaatcctgtgtctttgtgtggcagtagtagttggctagactttaagagaaaagcattttctactaaggtatgaatgaagatagtgggaaaagtgtcattaaatttcttttttaaaaaagtatgtttattaagaatgaatctttaatatctaacatttcagacaatatgaccgcatttcagataccatgggaagcagtacatttagtgaattagctggtactgtctgagggtacttccagtttcctttaggctgttgtgacttttcacagcttcctctcctctaattctgaacttagagattttcttctcatttctaatttttagtagcttattgttccatccagtagagcattataaaagtcacatctgcatcttccaacttatggtacagtgatgggaatttggaagcacccctggagcaaagaggctagggatagcattaacatctcccaagacaagtggtataggggaaatgaaggaaagactgtggccatgtatatgccaggcgttaatacatcagagctgcctgtatttaatttaaaacttttgatgaaactcagtggataagcatctttgtcatattttgtcaataatacattacttgcaattatattaaaacttattctaaatacctgtacctttcttgttctgtagatgtgtagatgatgttgcttgtttgtcaaaatattatcttttataaaagaaagtcctgcttcttatcatgatgtatgtgacttaaatgattgtttcatattaaaactatttcttccttatgtactgtttacatatacctctttttgggatattagttcagtac

SEQ ID NO: 79514 - DNA, 1009 bp, Homo sapiens
ttctgttggaagaaaactattcatgctcctgatgcatattttgattgaataaaacttatttttttaaatacattgttttaattttgacctacaaaaacagcaatttcatatggtacaaggtaatacaaggttttctccatttacccttgactagttagaggtgagtacaaaatattttcagtagttgtaaaatatttatctttacaattttaggaaacaaaatgatataaactatacttctaggtactcctttgtgtgaaaactttaccagttgaagcaggttaaaatgcagtattttgggctgacaggcatttgatggtgttcagtagtgtacttgaagatctcattttacttggattttttattatacatatttctctaaatgtttaaggacctagttatgttgctcctgaaagtttaatgagtgctgatttttaataaatgatgcactgtatgctgtatgcctagttgtagcatcagatcatgatttattattaccctgaatagagctagatgatagatattttgagtagaactttccagtgttctcaggagttaacactttacatggtagtacttgagttgtgatcattactaaaatcaattatgcagtttcttaaaccctttatctctttaagtttcagtagttagctgtttttgtgaaaatgaaataacttctcccaagctagtctaaaggtatgtgttatgcaatataattcattttctatttccacatagttgtttttaaaaacctacaaacaggtgaatttttattcaggtgtttaggtcttcaaagcaccttacttaaataagaatctgtaaatattcaaaagaaaaactcacggttcattctgatagtgaatcatagccaaactgtaatcatagctgatgaatagcgttcatgtgtttgaattaattttcctgctagttctacatttgtctctacataatgctaagtcaaaagttatatagatgcttttggatggaataagtgatgaactgtaagaat

SEQ ID NO: 79515 - DNA, 1482 bp, Homo sapiens
ataatgcactaagtcagaatgtcaacatgcctaatcaacattttagacaaaatcctgctgaaaatttcagtcaaattcctccacagaatgctagccaagtttctaaccccgatttggcatctaattttgttcctggaaataattcaaattttacttctccgttagaatctaatcattcttttattcctcccccaaacacttttggtcaagcaaaagcaccacccccaaaacaagactttactcaaggagcaaccaaaaacactaatcaaaattcctctgctcatccacctcacttgaatatggatgacacagtgaatcagagtaatattgaattaaaaaatgttaatcgaaacaatgcagtaaatcaggagaacagccgttcaagtagcactgaagccacaaacaataaccctgcaaatgggacgcagaataagccacgacaaccaagaggtgcagcagatgcctgcaccacagaaaaaagcaataaatcctctcttcacccaaaccgtcatggccattcgtcttctgacccagtgtatccttgtggaatttgtacaaacgaggtgaacgatgatcaggatgccatcttatgtgaggcctcttgtcagaaatggtttcatcggatctgtactggaatgactgaaacagcttatggcctcttaactgcagaagcatctgcagtatggggctgtgatacctgtatggctgacaaagatgtccagttaatgcgtactagagaaacttttggtccatctgcagtgggcagtgatgcttaatcaaaggcattaactaaagtgggtttattttcctgtgcattgcagaagttcattgacacaggattttaatgttttacattatttttttaaatgcatacacaaaaacattatttacttagtttttattaatcacttcatcactagagcaaattttttattgtctttgcttgctgtcttaaatgagaataatgtatatgggggtgctttagaaacataaataaatgttagttgttgttatttatcacaaacataaaagcctcttgaaacttcaaaataatatataacaaatgtaggcaagttttaacttttaaaagttagaatcattgaaaaacgtgtatttcagtgctgaactttggttgtaccatattaaagatttagttcaaaaagtttatcaaggatccacttaacacgtcttcacaacataatatatgtaactgtaacatgggggaaagcatacatttttatggattaaaaaaataatagtatgacaccagattcctcctccactagggtctttggaatcaatgaatttcatatttcaagtgagttttcaggatatctgtttgtacagatacgagacagatcttagcatatagtaaattctcagtaagtattgttgattaacttgtggatggtaccacatgaaattgctaatattagatcagttgaaaattgactgcaattagtaaagttggtataacgtacg

SEQ ID NO: 79516 - DNA, 1041 bp, Homo sapiens
cggtgtcagctcaagaatattctgagagttaagtaccagaataaaagacaaaacactttttaaaataaaaagtcagtatttttatgttatggggagaattttcttaatgtcattttgtaataattagaacattcattaaaaaattttttggaatattttatgattagctcttctgaagcaccattctgctgaacttcattgccctggagctttttgttatttaatgtaatttatatcatcagactgcatgcaggatgtggtgtttgcagggcataaactctggagcagtgcttttcaaactgtttcccatctgctgatgtgatagagacagacctttttaatggttgtgtatttattttatatgtattaaaagagtcaccaaataccttgcttaggataaggctaagatacatatgtgtataaatacacacatatagcaatttaaatgaattattaacacacatatagcaattacatgaattattaagaaagtaatattataggtagaactcagatatggcaaaactaaaacatgaatgactgaggactttacagtagcatgctctgcagaccaaaagcatcataatcacttgtgatgcttattaaaatatagattcgtggatctacggaatcaggacttctgggatccacagagttgggacttctgcatctttaacaagatccccaggtgctccttatgcatactgaagtttgagaaatgccactaatagacctagattataaaggtgtgagtagaccagaagcagctggctgtggtcttccaaactgtccttatattttaacaatagatttagaattactctttagtgacacagtatcttactcctattttctaccagttcttaacactccacccccaaaccttcaccttttgattataagacagatctatgaggacaggtactatgtcttgattatcttatttgccttgcccatagtaaatgtcaaatgaatgaatgagtgaatacatgaattatgctgctttctgatagtccatttcccctcatactacttttactt

SEQ ID NO: 79517 - DNA, 1013 bp, Homo sapiens
atgattggcttctttttttagaggaaatattttcccttttttcttatccatatactattctgaacagctttgcagatttccttaagttcatagcttgtaagtagttcatggtatatagacatagtcttgacttacaactgaaaaaaaatttatgttacagaagtttattttttctatggaactgtctttaaaaacaaaaatattacaaatcttgaccttgaaatattctgtttcctgttatcacattctggatatctattttgtttgcaaatgaaaattattactgatgattagcaacttgagcctgttaataggaaattgcaaagcctgaatacacacacattgccttagcctatcagtagagtagaggacatatgttaagaaaatgtgtctgcttgttgctgttgttggacaaaattttatgtctgtgtgtatgatttttttttttctattttcttcaaagatgtgaattaaatgaaagtgtgggagccagttaaattattttgtattatgggtgttctggatcctttcactccgtataccattttcttgtaagggcagcatttgtagacttgctaatggactgtagagctgagctatattaattttatacttgactcaggggatcagttctgtgaatgccattgcacgaagaaagcaaatgtttgccttgattttgaatgtatctttttaatgtcttcttaaaacatatttgtttaataatgtagatttgtttttttttttctagtatcatagtaaatattgcttagtacttgcccccaccccactgggtagtttatatactaccctataggtcatgccaaaaatgaataaaagtttaaatgccaaaatgtttatgaaactgctgtctaaatactgattgattgcacaatttaaataaaagctttccttagttaaaaaagacaaacccatgttttcttttattcttcagttttcttttgggggaatagagaatgaaaattttccatttataggaggttggctttcacatc

SEQ ID NO: 79518 - DNA, 1074 bp, Homo sapiens
agatcgtgtcacaagaatttggaattgaaaatatcatttattttttaatgcaagaatacccagatgtggtttcacttcagcagtagctatagtggttcacttatatacatttctgtttcactgaatgtaaattttgaatactgaatgtaaaaaaaaaactccagttatattgaaacagtcactaagactgcacatgtgttttgcagactttcttcctgaccatttgccacatgggtctctgataagattctgttggtttaatagtcaaaataatctttgcagtttgtgagcactgagtagcaggttctggagactaccatatacaaccagttgtctaattgtgatttttttattgatgtttagaagaatgtaaccgtagagttctgtgttaagttgatttatgctcaggacataagatcacaggctaatgcaatgtgtatgtttcaggctttaatcttctcaatttccctttttaagccgttgatggtgtttaagattaacatgacagtcttgtatttttaccagatactgtattatttttcctattgctgctgtaacacattaccatgaaggtggtggcttaaaataacacaaatttttcttaagttctgcagatcagaagtctaacacaggtctccctgggacaaaatcaaggcgcttgcagggctgtttctttttgaggctttagggaaaaatctatttccttttctagttttttaaggctgggaacccctccttccatcttcaaagccagccatgtagcatctctctgaagctccttccgttatcatttctctttgtccaaccccagctgatacaggttatctaggtttaaggattccagtgatcacattgagcccacctaaataatccaggataatctccccaactgaagttcctcaacttaatcacatctacagagttccttttgctatgtttggtaacatattcactggttccagggatttgggcatggacttctgtaggtggccagtattttgcccacaacaggtacattctttctgtggaattctgatccctgtaaaatgtctgtagcattaaagagattggaaa

SEQ ID NO: 79519 - DNA, 1746 bp, Homo sapiens
attttgtttgtttggtttttgatgaataggcttatagttacaatagaactttaggctataactatttgataattatttaacagtacattttttaccttttcattttgttcttatacggactttttcataataattctgttaccaaagaattttcagtagaaaataaaattttgattataattccccccaaattgaattaactagaagcatttatagatatgaaacttacacaagtagttactaacccaaaacaatagggtttatattgattgttgtagttaaatagattagtaatgttaactaccttattgttaccagagcatttaaaataagttgtaatactttctttaccagcagatcgttccaaagaatttcaggtatagttttttcttcagcaagtaaatcttcaactatacagtattaaagtatttttatattgttgaaactacttgttggagagaaaattttttttttttaccaaaaataaatactttggtctcattgaataagatatttagtaatacagcaaagacttctttttacttgaccaaatcaagcttctttgaagtcttaagtatgaaattgtaattaaaatgtgaagattttcactcatttttcatagtggtattacttcatggtattgtacttcaaaggggctaatatgcaaatggtaactattttcttttccaaagatgtatttgctgtaagtactgatacctgcatgtcatttttatgccaaatattacaagatactgctcatcagtattttcataccaaagaccattaagatgtataggttagcctgtaagtaagtaaagatgagcagatttgaaataaatttatttagaggccgatagagaatctagctttagtagcaaaaaatatcaaagggctaagtttacataattaaaagcaatacaattatattggtatttatcagtgtttttattcaagtactttttatcagcaaattaaaaagaaaaaaaccaaagatatttaaggttacctccgcatataggcaaatatagttgtacattaaactgttgtttcttgtttttatgttaaaccaaacatgtctcttcggaacacagtctgtatacaaataacatgcatgaggactttccatttaatctgtgattcagccacatgatgtttttgccaaatgatgtgatactttccaaagcaccttgagtgtgaaatgtcaacagaaatatcagcaagcttttatgttgcagagtattatggtacctctgaattagcctgtatagttctcttcctgctttaagcattacctggttagctcagacggcttgaggcagtcccttaataatagggatgcttttcatctctaaggatgtaagaggcaaacaaatcatgtcattctttaagtgggctatgctttgatagatgtgctctttaaaggtgtgagattggaatttagagttgttaaattgaaatgtttgcattgcaccaaaggagctcagttttcaaactttaatggaaccttgggtaaagggaaaaaatttttaatgaaatctggggttttatattttgattagcctaaaagtaaaaatacagctttatccattaagtgacttttaaaaatcagttttgccataccaaagaaattagattcttagtgtcacatgctatacttttgtctgtgcttgaaacgagcaatgccaacattgggaacaatgacagaggtttgcatcagtttgtcttggctttgttaaggacttctgc

SEQ ID NO: 79520 - DNA, 1333 bp, Homo sapiens
ggcaccactgtattaatcagtgatgaagactcccctagctccccaggtcagacaaccagcttctcaagaccctttggtgttgcagctgatacagaacattcagcaaatagtgaaggcagccatgagactggggattctgggcggttttctcatgagtccaacgatgagatacatctgtcctcagttataagtaccacaccccccaacctctgattctttcactggcagtgattcaggtggagattccgcattgaggaagtgtgaagaccctgctgtgtcatctgttagtgagcagacttcctccttagttctgcagccgccatctgccatgctatgctttgataaaaatgattttccaatctagacggccatgctcaggtattctcaccattaaatctgttcgaaggacaatgaacagggaaccaaagccttttgtgaaaatcttaatatctttatggggtattttagctttttttgaatgtgttttgttttttatttttaaacttgtgtaatttgaatgtttcattgtcagcaatgtgaaagaacggtcgagatgtttgactggattataaaatatatcactggagcaaagggaagacttttgaaagcccctttgctgactatctacctcagtttgcctcccggcaaactctgaagacaactttgttacctcatttgttgttatagtttatctcagctacataaccaatgatacttcctagtagtattgtgttttcattgctgtacgtgtaatgtgtgtgatcaaaggagtcatataggtagatgagtaagaatgtttatctgaagctctgatttttttaaaaaaagaaactatgacatctgcatggtttggataagttcatacctctggctgtgaggaccgttaaaccactgagaagaggaaaagtggggctatttcttctaacgatgaccaaaacaagaaagtatatttcttttgagaacagaactattcaataccaggtagggatcattttgcttaaaaggcctttatgttttgggcattagagtctgagtgctttatctcctatatcccaaacctcaagctgcccagaactgtgccttttctaccttcccctttgcctgacggttggccaaaggctgcactgtctagtttgcaaagcatcctcaactttgccagtattagttgcaaaaccccatgcagaatatggatttttaaagaaaatgggttaaggtggttttttttctttttttaaatcccagtttggcttaaaggagtgaagacatttcatgaactattaagaatgaaggtaaatgcaacagtagacagtaaaatgaactcgaagttattatg

SEQ ID NO: 79521 - DNA, 1033 bp, Homo sapiens
gatctgcttttaaggcatgacataaaatctgttcttgggtctatcaaggaacatctatgttttgtacctgttttataaattatgaattgatgttcatgattgctataataatatatctaaaactcatttaaaatctttaatattgggccgggcgtggtggctcacgcctgtaatcccagcactttgggaggccgaggcaagcggatcacgaggtcaggagatcgagaccatcctggctaacacggtgaaaccccgactctactaaaaatacaaaaaaaaaaaaaaaaaaaaacttagctgggcgttggtggtgggtgcctgtagtcccagctactcgggaggctgaggcaggagaatggcaggaacccgggagttggagcttgcagtgagctgagattgcgccactgcactagcctgggcaacagagcgagactccgtctcaaaaaaaaaaaaaaaaactttaatattggaagagaaatctgtctctgaaatcactgattaaagattactgtgtgtcctttctgctttgatgttgacaatgtcaaaacttttcctatgagataaagaaaaattttggaaaagcaagtacctgagaattataaattaaataatttatttttctgattgattctgagtaaatgtgttttcccttctagtttattcaggatattaccatctggaccaaaaatcaatgactggcattgctgtaggtgttggcatagccttgacctgcatcctcatctgtgttctcatcttgatataccgaagtaaagccaggtgtgtttccattgctagagatgttgaggtgaaaaacatttaaattacggtagccacaggaaacaaatgaaagtcaagtgccttttagagtaactgggatttcctactttaaaataaatgtgcagtattgttccctgagttcttacagctatagaaatgtgctcattttagagggagattattttcttgctgtttgaaaacattatgccaatattctttttttttcttttttcttttcttttatttttttgagacg

SEQ ID NO: 79522 - DNA, 1011 bp, Homo sapiens
aggcaggagaatcacttgaacccaggagacagaggttgtggtgaaccgagataatgccattgcactccagcctggtcaacaagagtgaaacaccatctcaaaaaaaaaaaaaaaaaaaaagcaatgtatattttgttctggctccttttaaatgtattcatttgtaattttggaacagagctcagaaaatagtattttgtctcattgatggctcagtagtgaaagggattacagttacagatttttacatctgtataagcctttctagctatataatagtgcacaggaaaaatattctcttagttgttgtggttttaagaaacatttgtgaaaagcttttgtcatttgttaaatgcagagaacttttttcgtagctaaggccaatgattcatagagaacaaataaatcagtaaaaagcaactgagtttacttttctgagagagaaaaacagtttgactcacatttaaacaaaaagcaaggaatataacatggcatttaaagaaaaattaaaatgtcttttatgtataattatggcagcttttggaaaaggtacggtatagaaaaagatgaaggaaaaaagaatagggagagtgtcagtttctcattaggtttatacatatttacatatatatttaatccacatattttaatacaaatggaacaaggtagtttttgtgaatcaaaacatttaaaaatgtttctggtgagcatataatacttgtggctaaaatggtacatggtagtacaatagttgagcagaaacatcatatgaaattatacttgtatgtaatttaaagtaaataaaaaattatagggcgtggtggcatgcacctgtagtcccagctactcgggaggctgaggcaggagaatcgcttgaactcaggagacagcagttgcagtgagccgagatcgtgccactgcactcagtattaaaaaaaaaagattacaggcctttaccctcctcatatgcagtaaatcagcacaaactgctcaattctttttaaatctaaa

SEQ ID NO: 79523 - DNA, 1013 bp, Homo sapiens
cctactgtctctccatttatgtttaaaagaaaaaaaaccccatgagttgaagcaagtaaagtttacactgttatgaattacaatattctgttgtgttaagctctgttatgttactactgtacattgtctctgctgtgggttttgactagatggtaaatgaagtttagagaagatgaattcttttcagtttgatttattcaggaaaaatgtcctctaataatttgtagtgaaatatggttacttttagaaaataaagaccttcctgttcacattttgtaaaggggcacagaagataagagattgagattagacccaaggaccagtgtttcacagtgcaggaaaatggtcttgttaattttattttgaatatctgtcattttaaaacatggattctttaatttaggtttaaataatgaagagtatcaagtagtcatcggaaatgacacaactcattatattattgatgacttagagcctgccagcaattatactttctacattgtagcatatatgccaatgggagccagccagatgtctgaccatgtgacacagaatactctagaggatggtaagaaaacatgattctagatcatttcagtatgaacattcgtatgttttgtcaatttcaatgaataaatgtgttttaaagaaaatatcctctttttggttaaaaaacaggtatgttaaatttgccgttcaaaatctcactcttgctttttgccagtaacataaggataaagagcactttcagaatataaaatttaataataaaattcttatattcccattgtatttcttcaaaggttactagtttaaattgtaaatatgttgcaaacttttttgtactgaatagaacattttctaggcatgaataactgtaatgactgttacatattgagtgtatgtagtgaccagggccagaggtactggacttctgaaacttggactttatacgatttatcacctgtcaaaaaattcttagcacttagtacctgttgattaactacaatatg

SEQ ID NO: 79524 - DNA, 1044 bp, Homo sapiens
tgaaaacaatagaatcaagctaatattttaaaaggtctttaaagtattgcttgtagcactgtaaaaaggttgagtgtattcctatcacagaatatgttaaataaaatatgtagtctaagcccggcacggtggctcacacctgtaattccaacactttgggaggccgaggcgggcagatcacttgaggtcagaaattcaagaccagcctgatcatcatggtgaaaccccatctctactaaaaatacagaaatcagctgggcatggtggcgcacctgtaatcccagctgcttggtaggctgaggcgggagaatcgcttgaaccctggagacagacgttccagtgagctgagatcatgccattgcactccagccggggcaacaagagtgaaactccatctcataaataaataaataaataaataaataaataaataaaatatgaaatctactacaaaaagtttaattatctttctctcataacaggataactgccctaccaacaggagtattgcagatctatgatgtcagccaaagggattctggaaattatcgttgtattgctgccactgtagcccaccgacgtaaaagtatggaggcctcgctaactgtgattccaggtaccacgcagagtggtttttccatttttatgacgttttattggcgcagttgttacttcttctcctctgctgtaataatgtgccataaagtagaatttcatttaaattattataatctatttggaaaatggtcatttttagttattaagcaactcttctttcataggccagttttctatgttatgtcaatgtctttaagaaatattcagtcttaagaaagattaacaaatattcagtctttggtattctattcaatgccaaaattcactgatgctcaggtctctcatagaaaatggcatgttattttcattcacctatgcacactctcctgtatactttaaatcatctctagattacttataatacctaacaatgtaaattctatgtaaatcattgttatactatattttaaaatttgtgtattttta

SEQ ID NO: 79525 - DNA, 1063 bp, Homo sapiens
ccgccatgcctggctaatttttttgtatttttagtagagacggggtttcaccgtgttagccagggtggtctcgatctcctgacctcgtgatccacccgccttggcctcccaaagtgctgggattacaggtgtgagccactgcgcctggcctttttttttttttaatttaagttctagggtacatgtgcacaacgtgtaggtttgttacataggtatacatgtgcctatgttggttttgctgcacccatcaactcataatttacattaggtatttctcctaatgctatccctcccccagactccctcccctttttcttttttttgcaaacgctcactaacaagtctgtttgttgggactacacccagctaaaaagagttaaaatatgtatttggcataaaggaagattttttttcttttgctatggcaaggagatatgcattcatttttttctagtaattaggctaagcagtttaaatatttagaaggatggatgctgagacatgatgctttttgacagcatttacaattagaatcacatttttgtgagattatttccttgttggttttagaagtagtggattaacctatagaagcctttgaatggatagatgaaagctgcttgagtctaatgcagcttatcaaacactggtgtttgtctggagtgttttgaagaggggaagggaagaatgaaagcagaaacaagataagaggctgatagtggttcaggtgagagattgggactggaacagaagggaatggatttgacacgtgtttaggagttaaaatcagtgggaacaggtgattgagaatacagaaagagtaagtagtctctagcttaggtgagtaatttgatagtggtgtgacaaagatgaagcagagatacagctttggaagaaagaagatcacttcattttggacacgatgactttggagtgcctttgttttgttttgtttctttttttgagatggagtctcgctctgtcaccaggcgggagtgcagtggcacgatctcagctcactgcaacctctgcctcccaggttcaagtgattctcctgcctcag

SEQ ID NO: 79526 - DNA, 1055 bp, Homo sapiens
gctcctgggaatattaaaggggtctctagttctacttgggaaaatcaggactaactttatagaagaggtgaagatagtctctaggagtcagctttttaaatctctgtgtgctgtcttcctgcttaatttataagttttcttctttaacactggctagaaaattaaatagaatcttttctgttttttaaagaagtatagccttcttgaaatttatttttaaagtttacatatagtaaattctgtctttcaaatctatagttctatgaattttaacacatgtgtagagttgtgtaaccatcactacaatcaggatacagaatagtttcatcatcccaaaacggtctctcaggctgtactatatagtcataaccctctctctcccctgactcctagcagcccatatattttgcattttctggaataccatataaatagtagaattatatattatgtaaccttctgtgtcttgcttcttttactcagcataatgcatttgagatttattgatctatattgttaagacttacatattttgttttatcagtagtttgctgctttttgttgctgagtagtacttcactgtatgaatttaacacagtttattcattcactacctttgaaggacaattaggttgtttccagttttggatgattatgaataaagctttcctaaactgtctcatacagacttttgtgtgaatgtaagtttttatttctattgagtaaatatttagagatgagaatgcagggttttgttttgttttgttttgtttttgagatggagtctcactctgtcatccaggctggggtgcagtggcgtgatctcggctcactgcaacctctgcctcccgggttcaagcaattctcctgtctcagcctcccaagtagttgggattacagtcgcctgccaccatgcccagctaatttttgtattttagtagagagggagttttaccatcttggcctggctggtcttgaattcctgacctcatgatccacccgcttcggcctcccaaagtgctgggattacaggcgtgagccaccgcgcccggcca

SEQ ID NO: 79527 - DNA, 4177 bp, Homo sapiens
agatcacctgaggtcaggggtttgagaccagcctggccaacatggtgaaaccccatgtctagtaaaaatacaaaaattagctgggtgtggtggcacactcctggaatctcagcttcttgggagggctgaggcatgagaatcatttgaacccaggagccagaggttgcattgagccgagatcatgccattttacttcagcctgggtgacagagtgaatggcttgtggccaggagttcaagaccagcctgggcaacatagtgagacccccatctctacaaaatgaatttttttaacagttagccaggcgtggtggtgcacacctgtagtcctggctactcaggagactaaagcaagaggatcacttgagcccaggagcttgaggctacagtgagcttgaatcgtaccactgcactccagtctgggtgacagagggataccccatctctaaaatataaataaataaaccagattagttccctgtgtgtgtgtaggaactagtgtacactagaaaaagttttgatatgcctggagatccttgtagagagtaaatgaaaccaaataaattcttccttataggttcaaatggaccacagtcatttacagttgaacagtggggtactcctgaaaagctgccaagagctcatacctggtaagcagttgtttggaccttgatagaacaaagcctcagagagtgagattcctctgttagtctagccacagcagggctagtctcctctgtgttatgtcggtggcaggtatggattatgggtaagaaggagttggtgacacccaacgaacaggtgttttgttaccaagttggcccaagcttgaagtccaggtagctgaagatcagagagacccacctaaactgagtgatgagtgatgggctgtcccaagacaggctagaacattccatcttggaggctgaagtggcagagaactcagacatttggaagatgtggtgggggcagcactccacaaggagttgtgcagagtatccatgcccagaacccagtcctacgtcttacttctacccctggtgaaaagacatattttggtggtgttggaacattctcatcaagaatagcagcattgctctgtttgctgtggtggtacttgctttgtcagtgtctttcataaccacttcctctctgttctttcagttttaatcgcctggacttgccaccttatgaatcatttgaagaattatgggataaacttcagatggcaattgaaaacacccagggctttgatggagttgattagattacaaataacaatctgtagtgtttttactgccatagttttataaccaaaatcttgacttaaaattttccggggaactactaaaatgtggccactgagtcttcccagatcttgaagaaaatcatataaaaagcatttgaagaaatagtacgacaacttatttttaatcacttttaaataatgtgttgcatttacacagttgtttcatgctgtctttagagttaggtgcctgcctaaagccaggcaccaccacacctggctttagagttcacacaataggatataagtcctgtatgacttaaatagtgaattttgtccttaacatttacctcttgtatagtatctgccaggcagttttttcttaaactactgagatgataactgtgaaatatttgtgatacgtgtcatgtgtgaaaagtttgatgcattttgagatggaaaactgaaatttggaaaaagaaatactttactattgagtaaactacaatatatttagtgctactcgcagctatttattattttgtagacctgccttatgcaccttactgcctagatttttgggaaaaaactttggaaagtgtgttacctatatttctagccaactaactcacagaaaaactgtttacttcttcactttcgaagtatttggcttttgttaatatgcagttttactaaacagatggttcataagacatgtgaagcaaattcatatttgcaatgggtaaaaagtattaaagcctttctcttgcctgcatatcctattgaccattggtatagtcatcactttttcatattttagtgtagttagaagaattccttcttcaaacattaaagatccacaaagcagtatttctaaatatgccttgaagaactaaatgaagtgtatagcacttgcctttactagatattctttacacttgtacaattatgtagtaaatgtatgtttacagggtttatcatgtttacagattaagctaatttctgtagtcgcatttttatatttttagtatcactctagtaaaaaaaccaaataatttgtttaaaataaccaaagagttgttataatgcataatttgtattaaatttattactatttcttatgccttttaaaatactgtttactatgaagacaatgtttttaattacaaatccagaattctgtaggcaaaatgctacagttcatatcttcctttaaccaaactgaagtacataaagaccatgtacatgtattcatcaaacgtttattgaatgctgcgtgcctagcgctgtgctatgctctggggtaagagttgtcagcttcagagaagctgagtcctgatcctcaaggaacttgcaaatgtgtctatgaatttgtaaaacaatcaaaagtaggcgtaagcagaataaggcaaaagggaaagtgttctaggttccagcacacctgcaaagataaagtgtgccaagactgtatttatatttcatacttatattgtttcatccttatattggaatgattatatagaaaatgctcttaaaaagattaaacctatttctcagtatggtatcttggtgatttaggaataattgtaaatatatgttacgaatcttcttaaatatatatatatacacaccctgtgagaactgtaaaaagtacctctggttcttggtttaagtttgttggggtataacatgatgagtactcattagcacctgatagaaatctgaaatgtgacagtagcaaaaccactttctactttccaaacaccacagcatcagcatggtttaggggaagcaattcacagattaatgtaccctgcgttttgtcttcaccattgtcaaccagcagtcaaggatgagcaccaggtatagtcctggtttgatatctcaccagccatgtgaactgaagcagcttacttaacctctctggattcatatttcttcatctgtcaaatgagagtaatcatgcccaccctcattgtcatgccagattgtcagaagttccagacagatgagaaagcaaaaagtactttgtaaagtgttatacaatcagaaggtgctttgtgctgaccgtcagattgtgtcaagtcaggtgtgcaaattgaccacactcccaaagaatcatttaaaagtaaagtgacttctaagagacaaggaagtaggaacatttctgatattaaatatataaataatatggatacacatgtgtatatctgtatatggatcttaccatcataattcattttcttcatatcagcaaagtaatagtaatgtgggccaatgcattttggaaatgtcctcattatgtagaatggaatgtgaaaattatttttgttaaaacaggattttgccacaattatttaaatattatgtttgtgaactatctaagcatgagaaaatacaaagctttctttgtatctggctgatactcatttggatgattctgtgactcatagaacatgatgttaaatgagaccagactcaactgccaccagtccccagctgcagaccttcatccccttcatctcccactaggggctcgtggtctggaagaaacatctatcaagcaacacagccccttatcccagatagaaaagtgtctcaaatgcattctactgcgggacagtcagtaggatcattttcataaagcaaggacatcatatgtttctagaaattacaagcatataactttagcctacaatctcttattaaaaatttttaacaaaattgtattacaaatgcatttcatcagaactcaaatttaaatggtgtttgttttgggtttttatttataatgctgaagttattccatataagtatcaagttaaacacaattcattttgattataaactatttgactttttaaaatcttctgacacagtaaatatatatatcaagattgatgtatcaaaatttattgcacactttaaagtg

SEQ ID NO: 79528 - DNA, 2548 bp, Homo sapiens
tgacctccctgaggagcaggtgaagcacaggtgcaggcctagcctgaaagaagaggcggcactgcggtgggaaggaggccatgatgggtgttggtgatggttgggacgcagggatggagaagcttgagggagttccattgtgcataattgcctcttttccctcaaatagaacttacacttacctactgtaaagaaggggtgatgtggaggcttgagaaggatgggaaatttgttttttgttgttgttcttgttgttttgagacaggatctcactttttgccgaggctggaatacctcagcctccccagtagctgggaccacaggttcacaccaccatgcctggctaatttttgtatttttttgtagagatggtgtttcaccatgtttcccaggctagtctcaaattccttggctcaagcagtctgcccacccagcctcccaaagtgctgggattacagaatgagccactgcgtctggccacaggaagttttaaaaatagccactttgaggaataaatgagagagaacagactgtgcacatgtacattttctggccaatattgagatctcagtgaagagcccgtgattgtgtagtggtagaaacttgtgtggatgtgggattcctccagtagcatccagaagctgaggcataggaaaggccattggccctgcccatcaagtttttaaatacatcttttttctagggattctttgaactaataccacaggatctcatcaaaatttttgatgaaaatgaactagaggtaagacataacattttatgttgaaacagaaattgtgaacccattattttccttgtttataatttgacatttcttatgtagcttcttatgtgtggactgggagatgttgatgtgaatgactggagggaacatacaaagtataaaaatggctacagtgcaaatcatcaggttatacagtggttttggaaggtaatttgaaacttctattttcataacttactttttgatagattgaatcatatttaagtcaactcttgattaactatactggtggattacatttaactgatacagaaaaatatacagaccagaaaaaattatctttgattttatactgtatacatgcaccttctgggtctgtaactattactaggtaagtaaaatgttcagaaggtagtaagtggaatgacaggctgagacaggcacttagttttctactaaagtagggactgaaagaacttgtaataacctgcagggtattcctagggactcctgggtggctcttttaaaatttctcatagagaaatatgtatgccattcaatcatattaatataatgtgttttttgagatggagtctcgctctgtctcccaggctggagtgcaatggtgccatctcagctcactgccacctccacctcccatgttcaagcaattctcttgcctcagcttcccgagtagctgggattacaagcatgcaccaccatgcctagttatttttttttgtatttttagtagagacggggtttcaccttgttggccaggctggtctcaaactcctgacctcaagtgatccacccacctcagcctcccagagtgctgggattataggcatgagccactgcacccagcatataatttttaaaagtcatgagtcacatctcaagagaaattttgttacttcactaggttataatcccattctaaaaagttgacatgtagccttagaaataaagttttcaagaactttataaaccatctataaacaaaaatttaactgaaagaaacatccacatctagtaagggattattaatattctaaattccgatagcttatgtttcaggataatttgtttacctctttcccagtgctgttccctaaatgatgtttttatcttattcaggctgttttaatgatggattcagaaaaaagaataagattacttcagtttgtcactggcacatctcgggtgcctatgaatggatttgctgaactatacggtaaggattttccatagatcattaaaaaaatggaataatgcgtattgtctttttcatggctgacgaatccgcaagcttccatcatttactaacacttagcttaattttaaaaagaattaagattttgaaagtgataccattagggacactggagtaggctaaaatatatttacaccttctaatcagataataaaggggaaaactggaaacatcaaatgacttgagtcactttccgttctttaacttcaaattctatgcccagtatgcatccgttacagaaaaagcattaccttggccgggaggggtggctcacacctgtaatcctgcacttcaggaggccgaggcaggcagatcacttgaggtcaggagttcaagatgagcctagccaacacagtgaaaccccgtctctacccaaaaatacaaatattagctgggcttggtggtgcacacctgtagtcccagctacttgggaggctgaggcaggagaattgcttgaacccaggaggcggacgttgcagtgagccaagatcgcaccactgtagttcagcctgggtgacagactgaga

SEQ ID NO: 79529 - DNA, 1486 bp, Homo sapiens
tcgccccactgcactccaacctaagggacagagcgagaccctgtctcaaaaaaaaaaaaattaaattaaaaaataaaaataaaacatttaacacgaagtcacataggcatatgaggaatgtgctaagtgctcctggatatccagagaagttaggttttatctgaaaacttctgtattcattcctttaactggatgataaaatctgtacctccactgcttccacataaacatagattctaaacttttaagtaggcaccaattgattaattgattgatgcatttttactcttgcccttacctgtcatccatctctttttgtaatacacacacatacacacatacatttttgtttatatatgtgtgtaagtaaaggatgtccatctgacctctcatcttttacccaattattcagaccctctacatactgttttttgcaatttcaggtgtgttatagatacaaattttaaatatgtaatttttcccatctaggatagtgaatattacaattccctaagatggattcttgaaaatgacccaacagaattggacctcaggtttatcatagatgaagaactttttggacaggtttgtgaattttgatcagttaaaatggcacataaattgtgagacaaatgtttagatgttaatacgtacacttaatacattcctaggctctgtttttacattcatttcccagtaacaaaagctgtctctgagcaagaatttgtactttctttaacatttgactcgttccatatttattttagtaaaactagtattttaagttttcttagtttttaacttttgactggacttaatttaaaacaccaagtttctcgtataactacaatatgtatactttttaaatttttctcgctaaaataacatatcaagttattgtgtttaattttagacacatcaacatgagctgaaaaatggtggatcagaaatagttgtcaccaataagaacaaaaaggaatatatttagtaagtattttattagtatgtattttattggatataattttgtactttattccagaaagactcttcttaccatctttctctgtccccttgtccagaatctcagtgttctttttctctatcacaatgcagtagcaagcactcatattcagcttttaccttggtctcagctagcctttagtttttgtttctaactagaataattgtgcctcagaattttgtcttggttcacatgaaaatgaaatgttgtttctttttagtcttgtaatacaatggcgatttgtaaaccgaatccagaagcaaatggctgcttttaaagaggtattcattttcttttatttgctcttccataatgtcacagtataacctataagtttcaaatattaggcctcatcacatctgagaaaaataagtatatggcttgttttgtgaaatcattctaaattatatttttatattaactaaatattccattcagtcattcaagaagtctagacaataa

SEQ ID NO: 79530 - DNA, 1253 bp, Homo sapiens
accatcaattgcttctttaggccgggtgccatggcttatgcctgtaatctcagcactttgggaggccaaggcgggaggattgctagagcttaggagtttgagaccagcctgggcaagatggcaagacctcaaaaacttaaaaaattagtcaggcatgatggcatgcgcctgtggtccagttacttaggaatcggaagcaagaggatcacttgagcccatgaggtcgaggctgcagtaagccatgttcacgccactgcactccagcctggactacagagctgtctccaaaaacaaaagcttcttcagatgtaaagaagtctatattactaagtgattaaagaaaatgcagaaactgtctcataccatagaggaaaccaagacaatatacctagttgtgttttccctgagtatattacgtaaggaaaaagagacttggacacagggtgtagagggaatgttataactttatgagagatgggtttgttattatgttgaactgatttaaacagtacgtctctcctctggattttcagaatgacattccaaacaaatttgaaatgaaacttcgccgagcaactgttcttgaagactcttaccggagaattatgggtgtcaagagagcagacttcctgaaggctcgactgtggattgagtttgatggtgaaaagggattggattatggaggagttgccagagaatggttcttcctgatctcaaaggaaatgtttaacccttattatgggttgtttgaatattctgctacgtaagtacctttacaatgattatcggcagaaaaagaaaaatcactgttttaaaagtaagagtcggccgggtgcagtggctcatgcctgtaatcccagcactttgggaggccgaggcgggcggatcacaaggtcaggatatcgagaccatcctagctaacacggtgaaaccccgtctctactaaaaatacaaaaacttacccaggcgtggtggcgggcgcctgtagtcccagctactcaggaggctgaggcaggagaatggcgtgaacccggaaggcggagccgagatcacgccactgcactccagcctgggcaacagagcaagactcctctaaaaaaaaaagttaccattttagccattttaaatatacaatttagagtcattacatacattcacattgttgtgctgccatcccactatccaactctagaactttttcatcttcccaaaatgaaaccctatacccagtaagcactcgctccccattccct

SEQ ID NO: 79531 - DNA, 1599 bp, Homo sapiens
cgggtggatcacctgaggtcaggagttcgagactagcctggccaacatggagaaaccccgtctctattaaatatacaaaaattagctaggcatggtggtgcatgcctgtaatcccagctactcaggaggctgaggcaggagaatcccttgaacctaggaggaagaggttgcattgagctgagatggtgccattgtactccagcctgggcgacaagagcgacactccacctcagaaaaaaagaaagaaatatcatgtggtccaatttaatgtcctactctttcaccagtttttacatagagaaaagccctatatagtgacacatttcctaaagagcggggcaaaagaaatgaccagttagtggtgatccctgagaactgatcgttattccttttgatattatagcctgacagtgatagattttagaaggagaaaatattgtgtcacatatttaggaaataaagtataaattgacttttacaagagaatattttaaatatccattgatgttagaaaacatggtaacagactgactttgattattttaaaatttgtgtgtattgttctttatttactctaccaaaaaaggaagatccaagattgaaaattccagcccatctgagaggaaagacatcacttgatacttccaatgatctagggcctttacctgtaagtgtatagaaatgctaacccatctaacttggctatctcaaatattttgcattttcgggtatagtatttctttatcatctataattaatgttattattaaaatgttgataccttctaagaatggaatggaatatgcaagttaaattaaccatacaaccagtgctatttttctatccattcatctacgcccctctcctaaaataattgaaatacatttttaattatagccaggatgggaagagagaactcacacagatggaagaatcttctacataaatcacagtatgtgcagtgcgatttttcattatgttattttttgtaataaattttatgtgtgagaaagtacatcttttttctttttcttcccttcagatataaaaagaacacaatgggaagatcctcggttggagaatgtagcaataactggaccagtaagtctctctgccagtgtgctctgatgggactgtccgctcacctgtctcttcaagagcagatagtcacgggcataaccctacaggcattgagaggaaagcacattggccgttctctcctctcccccatttcccatactccaagtctcagttatttgaaaagattctataacgtcattatccttaccctacgcaatagcagtgaggggacaagtgagccagacagtcagaatgctaaggcagtgtgggctgctgagctcaggctggtgcctcccactgtctgaacaagaatgatgacagtcctccacaaatcagagaggagcagagagtgtatgcggatgaggaagcagcagcaccctatccactccagggtcattcttaaatttttttatagaaatcaagccaggctcacacctgtaatcccagcactttgggaggccaaggcaggtggatcacctgaggtcaggagttcgagaccggcccggccaacgtggtgaa

SEQ ID NO: 79532 - DNA, 1063 bp, Homo sapiens
aatcgcttgaacctgggaggcggaggttgcggtgagccaagattatgccattgcactccagcctgggcaacaagagcgaaactccatctgaaaaaaaaaaacagaaaagaaaatgtaaaatattgtttatatgcctgtgtttctaattttgcaacgagagaacactcattttattttatagaatgaggtgctgcttgataaaaaaaaaactttgcattgatgttgtggccctgtaagtctacacctttttgcttaacattgttttaaagctctgtccatgttgttatttatagatccagtgtatttctcttaactactaatattccatcatgaatatattgcatttcaattatccatttctgtggtagatatttgccattcattttgtctgcccatcatttgaatctacttctgtgtatgaggaattccccatcctgtgagttttgggaaaacaaagacgacctcctcctataggcacgagagctccccttgcagctagggcttgagcttgcagacctcgctccttcagtcagatgcacccacagcatactgttaactaacatcttactgcttgagaattagttgaaaaattataaattactgtaaaaataaagttttacaaaataatttattggaaaaatgttattaaatgtaatgcattattgaaatgttgggaaaatattaacatgccataactacatttgaaaatgagcctcaaatatttagagtctctttaatggagggtgtgtattctatttgcaggttaagttacctttttaactacatctatttgtgagttctctctataaaatattacaatatgatttcattaatgtgctaggccacagtggagaccagtcagctgacctcaagccagagttctgcaggccctcaatcacaagcctccaccagtgattcaggccagcaggtgacccagccatctgaaattgagcaaggattccttcctaaaggctgggaagtccggcatgcaccaaatgggaggcctttctttattgaccacaacactaaaaccaccacctgggtaactttgatacttttccat

SEQ ID NO: 79533 - DNA, 1108 bp, Homo sapiens
gggaggccaaggcaggtggatcacttgagattaggagttcgagaccagcctggccaatatggtgaaaccctgttgatactaaaaataaaaaaattagctgggtgtgttagcacatgcctgtaatcccagctactcaggaggctgaggcacaagaatagcttgaacccaggaagcagaggttgcagtgagccgagatcataccactgcactccagcctgggcaacagagcaagaccctgtctctctctgtctctctctctctctctcactctctcagaaaaggtaaatatatatatatatatatatatatatatatatatttctagaaaaggcaaaactgtagtaacagagcagatgagtggttgcttggggctgagagtagacatagggacagagggaacttttgggggtgatagaaggattcttaaacttgatgtatttaattcttctgttattcttcactttagcttttgcctacttcatctggattaccaccaggttgggaagaaaaacaagatgaaagaggaagatcatattatgtagatcacaattccagaacgactacttggacaaagcccactgtacaggtatcctgtaatctatcaacttgctttcttacaggatttaaactgtcacatccctatgtaaactattacatcactttgtaggatacactggatacttctaccaccttcttttttttttttatttttttgagatggagtctcagtattgtcgcccaggctggagtccaatggcgtgatcgtggctcactgcacctctgcctcctgggttcaagcgattctcctgcctcaccctcctgagtagatgggattacaggtgcccgccaccacacctggctaatttttgtatttttagtagagacagggtttcaccatgttggccaggctgatctgaaactcctgacctcaggtgatccacccacctcggcctcctaaagtgctgggattataggcatgagccaccgtgcctggtcatagcatcttctaattatttatattctgacactgatgttaagtgtctaccttttcctatgaatctctaatatacacgaattaccacttgttattatataaaacaagtacaaa

SEQ ID NO: 79534 - DNA, 2775 bp, Homo sapiens
attataaagttcttacaccatctttcattctgcccttcacattcatgcatggagtactctactcctggcttaagaccaattctagaaaatgtactatctgattcacaaagatgtatgtatgtgtaactctattactcttataataacatggcaaaataatacaatgaaataatctatgaagcgctctgatatttattcattcaacaaatatttttgagtacctatatgtgttggacattatcctagacatagtgacaaactaaaatatcaaatcagacatgttataccttttcacaaaaccttaaactccgtaaggtactctaaatataccagtctgcctacccatgattgaatctttgcatgttgaaatagcctttggtcaaagacaataaatttttttattgatgtaatgtagatttttttcccaatgatcacagaatctttgacaatcattttaactacttaagacatggatgatggctttttatacttccaatatagggacaacctaacagatgctgagaatggcaacattcaactgcaagcacaacgtgcatttaccaccaggcggcagatatccgaggaaacagaaagtgttgacaaccgagagtcttccgaggtataagtagtttcctagttctccttgaaagacacatgctatagcaataaagtatgtgtggctcaagcttattctgttcattttagaactgggaaattataagagaagatgaagccaccatgtatagcaaccaggccttcccatcacctccaccgtcaagtaacttggatgttccaactcatcttgcagaagaattgaatgccagactcaccatttttggaaattcagccgtgagccagccagcatcgagctcagtaagatgctcttagattttgttacggcttcagtagtttatattatgcatattatactattcaacaactaacttttatgtaaaattttgtcttaaatgcaataatatgtaataatacattagggaccttgggactttacaacatggtcatttttcaaatatcctcattagtagtatggaccagagtcatggcatccaaatttccattatgtcagtgccctccagtcaaaaatcactagggacacatttgtcattgaacaagttgggtttattattcatttcagcaagggagaacacgcaccattggtgttttggtagcagaatgttagaaaagacttcagggatttgggctcctgttaggtgattttgaagagggttttaggaagcaggactttgctctacatgagatgctgttgggaagcagggataattctatgattttgtatctcaaatcttatctgtagtgaggctaaagctatgattagcaaagtagaacagtcactcacatttgccaggatggggaaatgtttggtattttgtggcttggacaatgttcatgttttgtctatattcagccacgattacagagtggtcttgattttgtcttgatcttacctatgagtgccaggccagctcttggatgttagggactgcttttctctctcccagttatgctgaagttggttttttgtttgcttgtttgtttgtttgttttgagacatctcactctgtcacctagactggagtgcagtggtgctatctcggcttactgcaaactccgtctccagcttcaggcgattctcatgcctcagcctcctgaatagctgagattacaggcgcacaccaccacgcccagctaatttttgtatttttagtagagatggaggagtttcaccctgttggccaggctagtcttgaactcctggcctcaagtgatccacctgcctcagactcccaaagtgctgggattacaggcatgagccactgcttctggcctgaagttttaacattatatcacagatgtcaccaacaggtatatatgaataagaactgatatactttgactaaacaaggagatagatgacattttcacttcagccaccactgtaaaaactgttgtccatagggttcagaataaagtatcccagcatatgcttccacgatgagaacttcatagctagctgtctaatatgtatcatcaagggagattgagtagaagacaaagattattctctgaggatgctatttgtcatttccagttgaggtttccctgcctttcatttagttagtaaatatttaatgagagctgatcacatatatgcagagtactatatgctagttactgaggatacatcagtcaataaaattaacaatatctcctgccttcatgggacttacattctagtgcagaggaaagcaaactacaaccggtgggccaaatcagcagctgcctgttatgaataattaccattggaatacagccacatcatttgttttggtattgcccatctctgctttcacacgacatcatctgaataaagtagttacagcagcaaccatatggcccacagccagtatttactgtctggatcttaacaggaaatgtgtgctaacctctgctctagcatcttcttcaagaagcttcacagtagatagttgtacgtgaatatgaatatctgccagtaaatccgcctgcctgcctcctgcccttcctttcttccatttgtctgttctgtcttccattcatttcattttttcacaggggagtgggacaggtcagtcaaagacctaaactacattaggccaggcgtggtggctcacgcctgtaatcccagcactttgggaggctgggattatagatgggttgaagtcaggagttcaagaccagcctgggcaacatggc

SEQ ID NO: 79535 - DNA, 3877 bp, Homo sapiens
tgcttgagcccaggagtttgagaccagcctgggcaacataacgagaccccatctctacaaaaaaattaaaaattagcttgggatggtagtacacacctaaagcctgaggtggaagattgcttgagctcaagaggtcaaggctgcagtgagctgtgatggcaccactgcactccaacctgggtgtcagaatgagaccctgttgagagagagaagaaagagagaaattcccctccagaccttttctcccaaaataatttattctgtcatcttcctactccactactcgtcaccttctatacagagctagccaaactagatcagccttgctgcagaaacccctatccatttctccctgctaccaaaaaacattcctttccttcccaactcttttccctgaggcctcgttttcaggtctagccttccaacgtggaagaattctcttccatcttggaagccgtccactgcctgtcacacagcagtcatttactgctgatctccaggcctagaacagaagctctgtgtatctaaggaaattattctgtgtcagttatcaaagcaccaaaaatgtttgccactttgtcatttggtctttttttttttaatgttatttagtagttttggccatatacaaatgtgggtgttttgttatcaaatttatggatcttctctttcatgccttcaaggtttggtgtcatacttaacagtgtcccacttttaaaatatatttctaaaattttcaaaagtttgttactactactttttggtttcacttttaaacatttagatattattcagtctgtaacttatcctgatataaggcatgaggtaggaattcaagtgaagttttttccaaatgggtgcccattttctaagtaatctgcgtattttgccacagatttcaaatgtctttatcatattctaaattcctataaagtttttttttttttttttttttgagacagagtcttgctctatcgcccaggctggtatgcagtggtgcgatctcagctcactgcaacctctgcctcctgggctcaagcaattctcctgccccagcctctcgagtagctgggattacaggcgcccgccaccatgcccggctaatttttgtatttttagtagagatggggtttcaccatgttggccaggctggtctcaaactcctgacctcaagtgaccccctcacctcagcttcccaaagtgctgagattgcaggcatgaaccactgtgcctggccggaattcctataaagttgagtttctttctgggcaaatctattgagctgcctgtcgatgcatgcaccagaaccacacagctttaattgttgtcatttataatgtgtttttatctggtagggttgatcttcacttcttgcttttctttttaaaaattgtgctgcttattcctgcttgtttatgtttctgttgaacttgagagttgcctcgtatcttttttttttttttttcttatgagacagagtttcactcttgttgtccaggctggagtgcaatggcgtgatttcggctcaccatcacctccgcctctcgggttcaagtgattctcctgcctcagcctcccgaataactgggatttacaggcatgcgccaccacacctggctaattttgtatttttagtagagatggggtttctccatgttggtcaggctggtctcaaactccctacttcaagtgatctgcccgcctcggcctcccaaagtgctggaattataggcctgagccaccgcacctggcctatttttttttttaatcataatacagttttgttggaatcttggcaaatttatagattaacttgggaagaattgacacctttgtgagactgagtcttcccagccaagaacagactatgtctttcccttatttaggtcttcttttgtgtccttttgggagcattttaaagttttcttcaccagtttatttcagtttctaatgctttcctaaccaatcagtatttaatagaatctttgacctactgccttttcttttgtgaggtttctcatataaaagcattaactcttgctactcttttctatcaattccttactttaactgccctaaggctttatgttaattttgccccttgttaatctctgagaaaccaaacttctcagtgcattttttaaaaatctttctttggctgttttatgacttgataaaatgccttgccttggtccagaggagaaagagagaaatcagacaagggaatgagaatgacttttccatcactagagagttcactgtagcagttatttctaaatcatttgccttccccatcttgcccctttgtatatttgacctttatcaaatgattttttccatgtgtcagatagttattgatttctaccgtaagcaaggtgctttctctgtaggaaagacaatgaccaataagaaataatccttgcccttcattcagttgataatttagagaacagcctaagattacactagtagtttaaactatacttctcaatttctcagtactttccaactttccgtggttgtttatttaaacgattttttgtcctttttttctattagattttttaaaattttatttttgattgacaataattgtatatatttatggaggacaatgtgatgttttgatatatacttacaatgcaaaatgattaaatcaggctaattaatctcattaaatcacctcacatacttttattacttttttgttatgaaaattttaaatagatttgttttaaagttctgttttattgttgttttgagatgggatctggttctgtcacccaggaagaacctggtggaaactttacaggcttgtgcctttaaagttttttttgaaaaatttttagacaattttaaacaaaatttaaatggttatcatttttgcaaaaagagtcttcattatcataaagtatttacattatggtcttaaaagttgaggattgtttattctgtctatgcataatttctaaaacttgatataataaatctctttttaaatttcctttagcatataatttagaaagttaaaaaaatcatgcgtaaacttaattgctgccatcctgtttttcagcctggctgggttgttttggaccaaccagatgctgcttgccatttgcagcaacaacaagaaccttctcctctacctccagggtgggaagagaggcaggatatccttggaaggacctattatgtaaaccatgaatctagaagaacacagtggaaaagaccaacccctcagtatgtgctgatggctttcacaattttaatctggaaacactttaactacgaattttcattttgaagtcatgtctcagatggattcataacagtatagtgatccataaactataagaatactaggatttttattgcccaggactttaaaaatcctaactctgctgtttcgttttttaaatgacttgataatattcaaaattacttgactctagatactacccttttaattgcgtcttaattttaataggtttttaattttatgtagccacaaatggtagatttttatttttaggctgaattagaagtcttggagaattcttgtagtttgttattaaaatgtaataaaatgttaatttctatagtactctatttttaaaatataaattatttgtaaaatataaaggactcaataataagggtattacgttaaacgcgcatttgacagtctggtcaatgtccacataacttccagcacgcacagatcaaggacggaatgactttcaacatattctaacttctgtctcctcagtgattttttttattattagactgtatatacatttataaaatctcccattattcatatttattctcaaatccccttccatttttccttccatatagtcttataaagtct

SEQ ID NO: 79536 - DNA, 2256 bp, Homo sapiens
tagtccattttcatactgctgtgaagaaatatcagagactgggtaatttataaagctttaaaaacaggtttaatggactcagttccacatggctggggaggtctcacaatcatggtggaaggtgaaagaggagcaaaggcacagcttatatggtggcaggcaagagagtgtgtgccagggaactgccctttataaaactatcagatctcatgagacttattcactatcatgagaacagcaccggaaaaactcactctcatgattcagttacctctcactgagtgcctaccacgacacgaggggattatagaagctacaattcaagatgagatttgagtggggacacagccaaaccatattaacagcagttactgaaagcaaagcacacagcgtatggcaccaaattgctctggagggttcttatttgttgccttgcttaacactttctcctctgactgagggcctgcttaggtctccataagaacagtgaagctgagggccttccccaggggctaggctctacctcacatgcccatgtaccttgagaaagaaaagctctagaacaggtagtgaatttgcagcagagctttctgggaaaattttaaatgcactaatgagattttgctttgcaggagaatctataataatagaaggaaagaccttttttttttttttttggagtcagagtcttgctctgtggcccatgctggagtgcagtggtgcaatctcagctcgctgcagcctctgcctcctgggttcaagtaattctcatgcctcagcctcccaagtagctgagattacaggcatgtgctaccatgcctggctaatttttgtatttttagtagagacagagttttactatgttggccaggctggtcttgaactcctggcctcaagccgtccatccgcctcggcttcccaaagtgctgggactacaggcgtgagccacggcacccagccaggaaagaaccttttttcttcaaatcacagagtatagatagcccctggtttggtgatcaaagaactctcttcacttatttgattaactttttgttaggtatttttctctgattttcgtataattgtttttaaagttttcaagtattcattcagtagaagtttctctacctggctttttggtgtaccagagtatctcgaataatggaattctgtttgaaatgaaggatatctgctgtaaagaaagaaaattatttatttagtaacttgaaaaaatttaacagcatttcattatttagtaacctgctccaagttttgcccacatgcacgcatcataggaccctattcacagttgagtttctgtggagagaactgcttcacttcattttgcggtctcatgtctcagtgtttgaattccctcagaatgcaccttataatttcaggagatgtaagcttgtaggagtttatttatgaaaggccctaggaattcaaacacatgaatctgtgcttatttaccttctgtgtagctaatgactagaggagtcttgcctagtcctttgacagctagtttgtgactgtatatataaaattctactatttaaggaaaacaattgtaattttgaaatgaagctcactcttaggtagtttgtattctgtagtaaagtatggctataatagataattatgtaacatttgatttttgtaccatttgcaactttagggttagttgtatgtattttacaaaattaacataaaatgttggttgtacctctgaatgctttctttctgaccctctttgacttgattaaattgtgagcaattacatattggctttgcggttagaaattaaataaggttcattgatacttagaaagttattttataaagaatagcagctgatacatatttaataggaaggccttctatccaaaaaattgactgtatagaggcattgtatccagtctttctaagccgtgtttgattgtacaactctacttccacaaatttgagacaggtcttttttaagcccttaattaaattaatttttgttctttctcttcctgaatttactcagataatataaatacattaagcagacatttaagagagaaatctctaagaagctttaaaagaaatattcttttgctaccatttttctagcactatttttataatcctttacagcagtagtgagaactattttattaataaattgtattaatcttaaaggaaaagtaatcaatggttatattcaaccaaaaaatgttaaatttatattttctcaaaagagtaaaatat

SEQ ID NO: 79537 - DNA, 1286 bp, Homo sapiens
tttgcatgacctctggaccatcccaatctcctgtagtcccctttacatgtcctataatctagccaaactcaactactgcaatttccttaattgcaccccaaatttcccatctgtttcctggatcttgccctcttctttactcatatgccttttcctctactgccacaggtaagaatcctccccagtcttctaaccccaactcaaaggccagcttctctttgacattgtctctgatcgttcacttaaacttccttagcatcttctttgtgtcataacaattatttatttatttatttatttatttatttatatatgtttgccttttctctaccttctattcctttccctagatatcttctgccctggaacttgtctttgaacctccctttgtagaccccctggtacctagtgggtgttcattaaactcttattaattgaatacttttctcccggtgttaaagttttatgaatatttattttcttttctacagtcacaaatcaagagttaaaggttatctgagactaaaaatgacttatttacctaaaaccagtggctcagaagatgataatgcagaacaggctgaggaattagaggtgagattttataaatatttggttaaactaaaaaaattttaatttcttattttactgtactctgaagaacaataactattgaatgaagttaacatgtgcaatgaagattatttacttggatgtttatttcacccaagcattaatagttttccctctaaggatatttccgtagaaggaatggccattattgatggccttcttaaaggttaaggagtagagaatagaatataaatctagtttttcaaagttttctaaaactgtatattctccattaaagtaagaacacaatttagtattttgaagttaaatatatggacattttgaggagactccactgattaggaactcttttatgaaatttaagtcctgttaatattcttattatggtgggagggctcataggaaaggaggggaattagggagcaaggaaaatttaagtgatctaataaagagccttctgtatgtggggcaagtagaatttaacaattttcatggatgacaggatgagaggaaagtccaagtcaagatttgtgtagagttacatgcatctggagtaagcaagtaggaggcagaaagtatgtatttggaatagaattggatagggtttggagactggaatcctagttgcacactctgtctagccagacctgtgtgagtcattgaacttttccgaacctcaggatcttgtttgc

SEQ ID NO: 79538 - DNA, 1572 bp, Homo sapiens
tccaacttaaattatgccttaggtgatagttcatgagtattcttgaaaagtacatgcttttggtgttatagatatattttgaaaacccactattttattctagacagaaaatccaagattggagagaccatatacatttaaggattttgttcttcatccaagaaggtcagtaaatataaaataataatagcatattaaattttttatctcttcattacaccttacagtagccttattagaaattcagggtttaaacctctgtaaataagttacttctaaatattattattattattattattattttaaaagcttcattgctatttctgattaaaagtactgtatgcacattgcaaaacattctgaaaatacagaaagtgatcacagccttttgggaaagattcgttctcctaatacttatcagactagaaggctatttatgtcatattgtcatactatgctttaaaaaatcacaaacatgaattcatctaaaaccattacctaactcgacgtgcacaaagccaatttcagaaaaacctaactatattttgcatacttagtatttcagaagactcaaatatttagagaaaataacataagactggaatttaaaacccaaatagcatgcttataattccattttcccaaacaaagttacttgatgtttatcaaaaaaatttaaatttaagctgtaactaaaactccttttgatcttctatacctcattgacaagtaaaatctagtgaaaacgtgtgtggatttactgtcaaaaaggtcaaactaaagcagagaaaggacatctgtgaaagcaacagtatttgtcttgtttcttaaactataaaatgcatttgaaaatgtacttttggaacttagtaaaatttttcacttaaaaatgattttttaaattactgtttgtaatgtaaatattaaaaaaatgaaaaggagtgctcactgactgttaatatttactctctataaaggaagtcacatttaatttctgtagatgtctggaatgtaaatctcttttagtcttttaattttagactgattgtgacatctgcatatcaagaataactaaattgttttttcttatttgattgtcctagcagcctgcttttcaatttgtcacatgctttctagcgtctttatctttaaaaaatacaatttgtttcttctgtctgcaatgaatattattgcaagtgtagaaagaactttattcagatagaaaatgtactacattcctaaatttgtgtgagccccattaagtcaaaaccttgaggcttcttttccaattgaaaagacatgaaacatacaattgtagagaaacttttcaacaaaacattgtctgagcacattttctgtatccatcttttatagccacaagtcagaatgttcacatctccttcagtatggagacacaagccacattagcggccttgggaataagcatcaggatttcactgactactcatgaaaggatacactaaatttgccaaatccatgagaaccatacagagaagagctaaaaagattaggggaggcttgggagtgggggtaggtaatctcttgaag

SEQ ID NO: 79539 - DNA, 2043 bp, Homo sapiens
cgtagagatgaggtttcaccgtgttggtcaggctggtctctaactcctgacctcaggtgatccgcccacctcggcctcccaaagtgctgggattacaggtgtaagcctccatgcccagtgttgatttttgttctagcaagttaacatagctgaactccaaattctgcttcccttttggtgaacatcagctgaaatcagtgctgagccctctcagtcttccatctgttgattttcacttgttcagttcagagtaaaactagggatttaggtaagagtttatatatagatttggaagaactctggtggcttctttttttctgggacgtttctcctctttttctagatatgctgtcaaccccaaactaggccttctgactcctcaagccagtaatagtgcagatttcagcttaagttctaggctctctgcattatgtggactgtagaatactactagaggaaaagccatataaatactgaatcttacctagtgtagttccttctttgaaggattgacatccctccagtttctgcttgtttggggtcattctgttgtactttcaaatagctcttttagtattttgtcacagaatataattgttatctgcagaaggattaatctaatatatgctactctgccattaccagaagttgtaccacattactttttattttccattgatgctgcatatgactgaataaaaaaaaaactctacattttctgtgaatggtggcactatctcatcaaactcttctaaaggaattgagcgtattactaattatattttttcttccttctcttatagacaagagatgatttcctaggtcaagtggatgttccactttatccattaccggttggtataggtgtccatgattttccttttgggcttatttttttaatttaataaatacttacatatataatatagctactgtaaataattgatttatcaaatgtatactacttttatttattgagcatactgttttctaaaaactcatttcaattttccgtttccattttctctttaagatttccgttcatgaaccccagtgagaaatagagaatttctgatgtttgttggcattgtgaaaacattgtgtaaaaaagattagtttgaaaatattctgctgaataactagaatgaggagtgcctaagctcacagaagaaaactaagatagtttacgacaatggaaacataaaacactaagaatcaggactaagaatatagcaaggagaaaaacagattcaggaaacattgcaaaatagaacattattgaatcacatgtctgacatggaggcttaagaaaataagcaagaagtaaagataatacaagttgaacttggaagataagagtggcgtctcttgtagaaaagtgaggaagaaaagccattttgttttgaaaagcaaaaaatttatttttggacaaacagagttttgataggaaacaaagaaaatgaaagtttaaagtagactgctgacagagagataaaaatcagctaggtagggaaaagggactggaaggattgagtgttatcactgtccagataacagcagaatctctgagaataatgggctctcctgatgaaagagataagaacggagggccagccattgaccctcagtcaacgtgagtggatcagaaaagaaagagaagacagacaaggggaaacaggaaaagagccaagtaaaataatgtcatgagaatttaagaaaggagtttcaaggcagactgggtagttaacaatgcagaacatcagagaaggataataaaaactaacaactgctgaattttaaagaaagagaaaaaatacttctttttcagtcttgtgagttatattaattggctctccacagtctttccagagcataatcttttttttttttttttaaacagggtgcaggaccataagctttcagtaatatatttaatccagtcttactttccaggctgttgacttttttgatctcctagaattatctctatgctctaaccaagccagcctgcagacatgtgcatagtccgtgttcttttgggat

SEQ ID NO: 79540 - DNA, 1041 bp, Homo sapiens
tagtcccagctactcagggactgaagcaggagaatcacttgagcccaggagtccaagttgcattgagctacgattgtgccactgtatttagcctgggcaacaaagtaagaccttgtctcaaaaaaaaaaaaaaaaaaaaaaagttctttttgtgaaatacaaaagagcagaagatattatcccaacttctgatagggcagtctaggcaaggaagacaaagaacatatataagatgttttgaaattattaaagaaggatcagagtgttgaaattattgtaagcatcaaggctgcttgcccgtgaattaaggaagtttgcaggaggataatctcagtaaagtctgtagactgaaaactttcataaatcctgagttgttaacagtgttttcaggcccactaatgctagtgttgtttaatacatagaaaaaattgaatatgaagttcagtagtttgtaacttttagattcatttacctttgaaaatgattaaaaccggaatctggagcaataaatctaacaaccaaatgatgagctaaatagtgacttccaactatgtgcagtgtgttggtaggccttacactatatggaaaaacttaggaattatttttaaccttccttttggaacattgtgtaaacattcttagattatacttaaactattaagtggggtagttttatctgaatctaagtccacttgagttgtggatttcacctctcatggatgtgtgttttaattgtggggtaatgtcaatggaagatcagggttataatatcatggcatttgaataatagaaattcacgtaaaatattctaatctgtcaaactttaccaactgtgtgcagattccacagccaaggatgggagtgtggctcatggccactagagggcaggaaaggtcaggaaccggatgtggaagcctggggaaaagtataggggaaagcttggatcaccccttcgtaaggaagacaacttgccacaacttgaagcaaacacaattcagtccctgaggcaggaaagacagtaaacgatgcaggaacataagc

SEQ ID NO: 79541 - DNA, 1030 bp, Homo sapiens
tcaactttttgcattcttggtaatacattgaagtgcaaatatgcatacctgtcactcagaagaagagaatcaacctgtttaaaatgtgtatggaaatacgccgggtgtggtggctcacacctgtaatcccagcactttgggagcctgaagtgggcagatcacttgaggtcaggactttgagacaggcttggccagcatggtaaaacctcgtctctactgaaaacagaaaaattagccaggcgtgttggtgcacgcctgtaatcccagctactcaggaggctatgacaggagaatgtctttaacctgggaggcggaggttgcagtgagccgagatcgagccactgcactccagtctgggtgacagagtgagactctgtctcaaaaaaatgaaataaaataaaaggtgtatggaaatagaacaaggaggaagagaccctaacagccttctagtagagtttaatattggatgttcactgtcactaggacttgaagcctcaactatgatttttaacttggagaaaaccttgatatattcttttcttttgagatgcagtcttgctcttgtccctggagtgcagttgtgcaatctcggctctctgtgacctccgcctccagagttcaaacgattctcctgccccagcctccgaagtagctgggattactggtgcccgccaccacatctgactaatttttttgtgtttttagtagagatggggtttcaccgtgttggccaggctggtctcaaactcctgacctcaggtgatcctcccacctcgccctcacaaagtgctgggattcacaggcatgagccaccgtgcccagccaatgtgtgtatatatatatatatatatatatgtgtgttttttttttttttttgagatggagtctcactctgtcacccaggctggagtgcagtggcacgatctcggctcattgcaacctccgcctcccgggttcacgccattctcctgcctcagcctcccgagtagctgggactacaggcacctgccaccacgcccagctaattttt

SEQ ID NO: 79542 - DNA, 1698 bp, Homo sapiens
aattgtcccctgttgagagtcactgctgtaggtggcagcagcagcatatgcaaggctagaaatgtgaaagaatctccactgtaaatagtccagtggggctcaagcatagggtagcctggggatgtgggaggcggtgatctgccagaagtgggtcagagtccgattaggcctggtgcttcatgctgaagacaaagaagggggtcttcggctgatagttaagtagttgggcaatggaggtctttatttgagagtgtgaagtgctctctttaaggtttttagaagacaatttttcatggtttcatggattataaatgaattaaagttttcctaacttggatgactgggttaacagtgatgttatgaactaagatggagaattcaggagaggggccagattgggagggtgaagaagaaatcatgtatgaagtttatgtgtatcagaggctgccctgatagtgctgttttcaagtagggcagttggacatacaggaccaaggctcaggagagaagtgagagttggaaatgtagattgggagtcaggagtatagtcaaagcctcagataaggatgaacacgttagggaaggtatacagtgagatgggaagggaagataaattataattttggggaccaccaactttggtgaggcggtagaagaggggataaagaagagactaaggaggaaccacacagaggccaagagagcatggaggcatggagagcatggaggcgtggaggcatagaggcatgggtgaaaggtgagggaaggaggaaagcagacagtaccacagagaacataagtatccactggatgtgtcagttaggaggtccattagcaagagtaggctcaggagaatgcggggttaaaagccagattgaagaaagaatcaaacaggtaaggaagcagaaacagccagcataggttgcttgctcgatgtcataaaataagcatgagatagcataggcaaggtatatatgtagttattgttatacagaaggcatatgtgaagtggatataagatgtataagacaaactccctctctacagggagagtacagtctctttttcctggagaaaaaaataaaggttacagtcttacgttctttcaccttggaactatagaataagcaagtatgatgagtgaaaaggaaattcagcaatatcaaatgaaggaaacagaaaattataagtgaaaacttgaaatcgcttatgaatattcacacctcattttggacagcattagtctaactttctcagtcccctctctaccaccaaaaataagacgagacaaaatagagcttccatgtagaaaacaagtcaaggttttaaggcctattcccagaaactacttggataataggcaattctgtctatgttgccggcttcttacaggctatggagcctaccatgtgctagctgttgtgaggcctcacccgtttgtgtccactctccctttacatcacaggtgacagggaaacaagacagaccaggagaagccaggacaagaggctttgtaggctgaaggggcttggcagagtctctgggtgaggccaggcgatgtgttgaggtcaggaaggtggttagcagaaggagcaaatgaatgctgagaaagggaaccagttgtcttgtcagcataccctggaaataatccaaagtattgctcacacgtctggttcagtatcctctgttccttgtgta

SEQ ID NO: 79543 - DNA, 2065 bp, Homo sapiens
ttcagctttattatattagtaatttaactcttatgaatcttagccaaaagttctttatgtaatttggccgttccaaagtatttaaaatggtttgaactgaaatagattttttaaatttctgtatttggaatgttttaccagattccaggaaatttaaaaaattttctaactaaagcaattttacatgacagtacatcatagttttggggggaaaaaaccttaatctgtgtttttgtaacatccattatgtttattaaagattgttttaaaaaaaaaaacttctggataagtaactttaggtgaataaaatagtaattgctagtttattttctctcttctgaaatctggtaaatataataattgttaccaatgcccagatgttaatataagccactactttactaaggataaaaaaagatcagatttcaaattctgatctataatttagaattttaaattccatttaggaaacttttctaaaaccagattttaggagattataatctaatcaactgtttttcttcctgaaagaaagaaatgaagtggcactgagaagaaacgttaatagtatgctagttgaattaatgttacttataaatttattttacacttaatgaaataatctgaaaggaataattcatgtagaaatatttgtagaaataccttaaaatagtttattttgtggtaataattatagtttgttgtggatgcttttgagaagagtattttaaatgtgttttttaatgaaatgtggatcaaatgccttttgcattgttaaaaatatccactgttactggttttatttatgcttaggtaagctaacttaaatattttttgtgacaatcaaatgtataactttgtgcagattctatcttttggtagattattggattataaaataattcagaagtgtgcagtttgctggagatttaaattgtccccccgtttaatgtttattagacttctctttataaaagcattgtaaaccatatagtgacagttaaatttaatttatgctatatctaaatagatctaattgataaatcaaaggcttgttttatggagaagattctagtgttgttttttctaaatatagcagtggcaacaataatgggttttagaaataatcttgtgtttatcaataattatatattaatctaattatagtggtatattgtaactcacttataaataaacagctcccaaaatatttcccatgactccagttagtctgggttagtattctgatatgctgagtccggattcacatttaacaagttgatattagagtagcatttagtaatgtcagctatctgtactgagcagccgtgaaattaaatcactgctttggtcagagaacctggtttctaaagcactgagagtctacaacttcttttcttatatgtttagctaccagtctctagcagtataaaattgagtttctagcttactgtaatcaacagcttattaatgactgattttttaaatctaatgagaacttttacctgtatctgggacactgtctgtgttctgtgtttacaacttagagtgaagatgagactttgtagtctatctccataataatgttgatttcaggcatagcaaacaacataacagtgactggcatatgtttattacatatgccttttgaaatacagtattacttttgtaaaggctatataatgacttttgatctgaaaataaatacttgatattttaacagtatgtgtaatattttgtcagttcaatcaagaagcaggttaaggagctaaggtactatgtatacagttacaacaatgattgctattcagatttctaaatctgtatagtagttacttttctctactgttattttgtttcccccatctgttgttttctaaatctcctatgttatgttgttaggatgctcagagatttcagtaccctattatttaatgtgcattagcatttttcccaagcttgaatgtcttccattctttacttatattcatatttttattagaattattttttacattttttctttttgttataaaagtttttgttcattatatgtaacttaatc

SEQ ID NO: 79544 - DNA, 3918 bp, Homo sapiens
tagcatgtggtataaacaacggaactattttaccttttactttcctatgaatgagccagtatatatttattactggagttccagctataaaatttaggtgaggggtttaaatataccctagagtattatttaaaaataaatttgtttctttcaaatagaataccaaccttggtctatggcatttgagagagaaattaaaatattaaattttgattgcctagtaaactgaaaataaaggttaaataaatacaaagcagaaaaaatatatatacaaaatcacaacctctaaaaggacaaacagtccactgttctctactgtgggagctttatcagcactggtgagtaattccacctctagggtagggctagctctcaaaaatgtaaacaagtatgtacttcgtttatataaagaaatgtgcagcttggtttgtatttctttatagatatcaaacagctaaatggattgtttcaaagtaccagcaggggccagcaaagagctcttagagtttttcagaacagaattggcattgagacatgtttatttgatgtgctaaatcctttttagacttctttacttaccacaacactctcttaagtgaatgaattgcagagacagtggaataaaatatcctgtgtgttcaaactatcttggggtatagttttttttttctaatctgcatatatttttattggaatgtttgcttaggctatttcttggcagttttaatagtcaaaatataaatggcatcatttaaagactgttctacttggctggaaaaggccttaaaattacaggagaaaatgcttagtgacagcttctcttaaactttttttcttgaacctatgcttcagttttgcaatggtattactaggttaattttgtagttctgtccttaagctttcactttttatgtaactagcactttggaagctaaaatatgtatctatttgatgtagtgctaaagttttaattcattgtaaagttttggtatttccaaatttacctaactgtttgaattcacacattaaaaaaaaaaaattaacagtccctatattaactaacttgactagattcctagtatggctactatttggaaattcaatctttgatttgatgcttaattacatggggttttgttcctaccaacttcctgtaattctatacctatgggtaaaaatattagtgggcaaagtcggctggagaaagtataggcactgtgattcacatagttaaatgttcatttagtagagctggggtgaaaaaatactgtttcaacttgaaatgttagaagattgttgttcttgtgttactcattcatgcaaattggagaaggtataattgaaacaaggttggctgtgtttgagtcagtgtgctgcagctgagctcagcttaaaggtcgctggaaatcaagtgctttgtaagtgaaggcattttgactacaagcgattcaagacattttggaaacgtcagtctctggaatgggtcgtctttttctttctatgatatctggtatctaatgttttacttaggataaagactactacttaatagctcttttaggcaccacaaatgattttttcttttgatgcagtgcagctgcttctagcctgtctacggacagagatctttgttatgactttcagcccttaacatgtttggaaatgagaacaaatggcacaaagcttacgattgcactttgcagccagaagaagcaatacttaccctttgtcagaaacctccggagatgacttggatagccatgttcacatgtgcttcaaaagaccaacacggatttcaacgtctaacgttgttcaaatgaagctgactcccagacagactgcactagctccgttaataaaggaaaacgttcagtctcaagaaagatcatctgttccctcatctgaaaatgttaataaaaagagcagctgtctacagatttcactacagccaacaaggtacagtggatatcttcagtctagcaatgtcttagctgatagtgatgatgcttcgtttacttgtatcttgaaggatggtatttacagtagtgctgtggtcgataatgaattgaatgctgtgaatgatggtcaccttgtaagcagtccagccatttgtagtggtagccttagtaacttttcaaccagtgataatgggtcttacagcagcaacggtagtgattttgggtcatgtgcaagtatcacaagtggaggttcatatactaacagtgtcatcagtgacagtagtagttatacttttccaccaagtgatgatacttttttgggtggaaacttaccttctgacagcacctccaatagaagtgtgccaaacaggaatactactccttgtgaaattttttcaagaagtacaagtacagatccttttgtccaggatgacttggaacatggattagagattatgaaattgccagtgagcaggaacacaaaaattccactaaaacgttactcctccttagtcatttttcctaggagtccttcaactacccgaccgacttctccaacaagtctgtgtactcttctgagcaaaggatcctatcaaacttcacaccagtttattatttctcctagtgaaattgcacataatgaggatggcactagtgctaaaggatttctttcaacagctgtcaatggacttcggttatctaaaacaatttgtacccccggagaagtaagagacatacggccgcttcacaggaagggctcgttacagaagaaaattgttctttcgaataatactcccagacagactgtctgtgaaaagtcatctgaaggatattcttgtgtttcagtgcatttcacccaacgaaaagcagctacattagactgtgaaacaacaaatggtgattgtaaaccagaaatgtcagaaattaagcttaattctgattcagagtatattaagctcatgcataggacatctgcatgtttgccatcctcccaaaatgtagattgtcaaataaatatcaatggagaattggaaagaccacattcacagatgaacaaaaaccatggtattttacgaagaagtatttcattgggaggagcttatccaaatatttcctgtctatccagccttaagcacaattgttctaaagggggaccatctcagttactcataaagtttgcatctggaaatgaaggtaaagtggataatttatcaagagacagcaacagagattgcacaaatgaactgtctaattcttgcaaggtaagtttcctttggtcttggtaaatgttaatttatatgagaataacttaatgaaatatttggagaacatttattgtaaccaagcagttttacatattttcctggtccttagctagcagtattttgtagtcataaattttatatttgtaaatctgaagaactctatgtatagttttttactctatttgttattttaccagtgtacaaaatgtatatttttaaaaatcttcctaagtgatttaagctataaaacttttctacaacataaaaaactttctacaacaaaacaaactttgaataacagtctatttcataacattttatcttggcatatttttcctttaaatgatatagtattcttttgtgtagctcaatactttattcctattttcaaatgatcattttgttttctcctcttcttaatcattatgaaatagagtaaaatttagaatgcttatttaaaatattaaacaaaaacccatatcaaagtgtaaagatctttttataaattatcatagagaaactatatctcaaatacatgtgtttataagatcattcataaaaactattatgctgcatgtttaaagcagaggaaaaataaatggcatttgtatttgtatatacccttaaccacaggaattttgtttccaccctatttttctttagccacgagttaatactgccctctaaaatgtaac

SEQ ID NO: 79545 - DNA, 1070 bp, Homo sapiens
ccaggaggtggaggttgcagtgagctgagatcacaccattgcattccagcctaggcaacagagtgagactccgtctcggcgaaaaaaaaaaaaagttattatagatccccacactaaggactaagaaattctattataatcctgcctttcttttggggtattagcttgtaaccctaaacaaattattcaatccttctaaaaataccttctcacatttaaaaaatgaggacaacaatatttgccctgcctatctcataagcatattgtgaggataaaatgagacaatgacgatgaaaatacttggaaaattctttatcatgatacaaatataaaatgtcatttaacattcgtagacttaacgcgtttgtagctctctgatatggtatatcttgtgttagctaagatataccatttagtatatctactgtgttagatgctcttctatgagtgggaaatacagcttttcttgagaaactcggtttaccagcaaaacaaagagccaaagataattagaacatggtggtgtgtgtcattctagtcctcttgatttgttgctagtcttagcaggtaagggaggtatagagatgacctgagatgttatagaacctatagccattggtggagtaacagacctgattgtatagcaacaaatgacctgtgtcattataaatgtcattccgtctttattctgctgaggcactcacaactaaatttaaaatgtaccattttcctagcaaattctcttggaaaatggagggtgaagaacacaagtataatattaagcagaaacaactttagtcatctggaaaacgtttgtaatgtaagtgatatttgctttcaataaagagtaggcttatatcacttttttccagccaattttaagacttgagtgttataaaatattgtcgtttcattatggtgatggtggtggtagtggtggcaataatgacagaacatttcagaatgatgtgtcttaaaaaaactctacccaccaatgcaaaagttagcactgtgtcaccagtctaagatatacacctgtacacattcagccaccggttttaggagccacc

SEQ ID NO: 79546 - DNA, 1453 bp, Homo sapiens
agtctgctcttatttcatgtaattttaaaatgcattccaaataatcggaattagaaaatggcaacttctttttgtttgtttgttttgttttgtttttcttgagatggagtctctctatgtcgcccaggctggagtgcaatggcacagtcttggctcactgcagtcaccacctcccaggttgaagcgattttcctgcctcagcatcccaagtagctgggactacaggcacatgccaccatacctggctcatttttgtatttttagtagagacgaggtttcaccatgttggccaggctcgtctcgaactcctgacatcaggcgatccacccacctcggcctcccaaagtgctgggattacaggcatgagccaccatgcccgaccaaatggcagcatctttaagcatttatttctgagtatctgtgggttgatgtttacttgtttttaaataaagattgtgtttttcttaggttcatcctcagcagcaccggcttctttttgaagtgtttgacgaaaaccgattggtaagttatattgtgcttatatgaaatatgaagtaagggtacatttcagtggagcagccaggggaagtgggtaagcagtctgggatttgagtgatggcttgggggtggttatggagactctgggcaaaatggtgagggagatagaatttgttttcttcctcctggtcctactcgctccctttccattctcctcccaagcacctcttctgattgccaacatattataaggtcttactcaagacctcttgtgacaggagaggacagaaaaccaacctctttgtcctgccttccctctcactcgcccatgacccctggttcctactccatggctctgggaatcttcccagggtatccttcagttgcgcctcctcactacagtggcctttcttagggttacctgtatccaatggacatcctatccactctctcatccccactcttctacagaggaaatctgtcctttttacactgataaggaatgagcaaataaagtcttctcaaagatggccagctcttacagaagcaaaaagcaaagttaaacctgatgttctttttataaaatgattgttctgatttctgaattcctaaagactctcttaaagtcctatccttttcctaattttgtctctgaggatccaatctcaaaccctcatcttagcatcttacatctatattttaaacctgtaagatttgaacaggtaagtatagaaacagtgttatgtgtgcaaagcttatcagttacaagcaccagaaaaattaaacagttttgttcattttttagctaacagagaaactagctttttttttaaaaaaaagtctgtttttagtgttaaactacattcatgttttttttgccctcaagaaatggtaattatactggcaactaaagatattgccaatgaaatctttaataaacatcatactaagcaaa

SEQ ID NO: 79547 - DNA, 1052 bp, Homo sapiens
tctaggtaaaatgcataaacatttaacaattatatgttacaattttagttaccatttatattttatatattaaaactgatgcttacaggaacagaaaaccaaccaccacatgttctcacttataagtggaagttaaacgtgagtacacatggatacaaagacaggaacaatagacaccgcggcctgcttgagggtagaggagaggaggagggtgaggatagaaaagctgcctgttgggtactatgcttattacctgggatgaaataatatgtaccaaaaaaacccataccacacagtttatctatagaaccaacttgtacatgtactcccaaaactaaaataaatttttttaaaaaaggaaaaaaatctgatgcttatattttcattaaatctcctcctgaaatcagacataaagagaaaatctctaataagagggtgtgtgtgcgtgcgtgctcgtgcatgtgtgtacatgtaccatctggaggctaaggtggtatttgagacattctgtcattagggcagttgcccctgttgctttgacactctgttctttcggtggttttcagcttcctctgccctccatcatcacttccatccctgcttcatctgtctgctaggtaactgttgaaattactcagctgctgatggccctctcatcttctttgctgtaatggttttatatcttttacaaactattacctatgatttaaatagactctcccaagagagaagatagctgtttatgttcatgttttaattagtatttttaatttttaattagtattctcactacacattttaaactatatttttgcatttattatatgcttctgaaatacaaaaagcaacatgaataagtcatttgtgatgtttataactcagtagggagatatcacacatatgccaaattaactttaataaaaggaaaaaatgtagtaaatctgatcaactactttgaaaatagaggagtggtagtgaatggggaggtcaggctctagggagaggttggcatttgagctgggcttgaatgatgagcacagtgtagacatgta

SEQ ID NO: 79548 - DNA, 1020 bp, Homo sapiens
cctagtttttgtttttttttttttaagtgaaagcagtttgcctttactttataagaagagtttacacccatgagataacttgagacaacctgaagtcttacaaaaccagcgtcagaatcattgaattaaccatcttatctcaaaagaagaaagaatgtaataaaaatcaaacaaaattttaaaaatctaggaagcttataatcattaggcctgtgattaaaaggttttctttctagttctttgtgtctttcactaacatggtacttcaggtttttaacgagatgcaaaaattactttaattgcttacctgcctaagaatcctgacttttaaattcaggaaataattgtagatataactaacaaggaaaactgtgaattttatagtctgggtaatctgagcttggggtaagcaataattaaaatttttctttctttttttttttttttttaacagtgatccttacgtgagagtgacgttatatgacccaatgaatggagttcttacaagtgtgcaaacaaaaaccattaaaaaggttagacttagcaatattcaaaagtttttaatgtactttgttttatttttataagacaaaaccttatttagttatactatgtttattattttttagagtttgaatccaaagtggaatgaagaaatattattcagagtaagtatatattttattttactaaagtggaaaaagtaagtttttttcttaggaggttagaatgataaattctcatttttaatatttgaagatgtatctcagaatttgcctaaagttgtgaaaatacaaaaggaattgaaattttgtcttataaaaaacataaatgtaagataatggagaggtaaaagactagaattatcttattctagtaaaactgatttagagactgtacagtagtcttactccagttgagcagattcagtgttttctcataaagatgatgcaaattatatttatgtctccccagtcatttattattaaacagattagggcctatcaagtgaatgcattt

SEQ ID NO: 79549 - DNA, 2224 bp, Homo sapiens
caaaagccaaatggttatgaactttcgattttgtgtacatatatagcaataattggaaattcctattagttgcaatactttggctttagattttcttgagcgcagcgataaattcttattcagtgtaataagttgactcaagtttttgcttatctttgtaaataatcaggtcatctacaaataattttctttttttcccgtgtaacttttaataaaattaattattgaaaaagattcttcaattaattttaatatcctaattactttatttgatatatattttttaaaaaattgtgtcttagttaacttataagtacatgaaaatgaaatctaaatttttgtattttaggaaaattcacgaattgtgagagtaagagttatagccggaataggccttgccaagaaggatatattgggagctaggtaagtatatctatttggattataattttaaaactttgcatttgttaattagttttttccaaactttggttaaattagaaatcaaatagtattagtaaattgttgtggaaagtataataataatattaccagttggtggtttactaaatctcttggtatctgaattactaaatttgtgaaattaggcagaagtacaaatgatagcaatagtcacaagatacattattgagctctgcttctggaaatttgcaaaattctaacagactaatcctttagcagataacaaccataaactctggacttaatacaaaaagcagcaacctgaaggcagtggagagtgaacagagcaggcagattctggtggggagttcatgtttggaagaagggaattgtactgagtgagttcctgatactatgaattggtctgagggcaggtagaatcagaacctggaaaaattgtagtcttcatggcctgggaacatagcagaatccaaactttggttcaattaaaaatcaaatagggccaggcatggtggctcatgcctgtaatcttagtaatttgggaggccgaggcaggcggatcagttgagggtcaggagtttgagaccagcctgaccaacatggtgaaaccctgtctctactaaaaatacaaaaattatccagaaatcgcttgaacccaggaggcggaggttgcagcgagccaagattgtgccactgcactctagcctgggcaacagagtgagcctctgtctcaaaaacaaaaatacatacaaacatgcatgcatacatacatacatacatacatacatacatacataccaaatagtattagtaagttgttgtggaaagtagaataatatttccaattgttgatttactgaatctctgaatctgaagaaaacatggcagtggtaaggattctggaagagagagagctgaagagctcagcaactcatctgaagacaaaagatctgaacagagatcacagtcactgcctaagaaacggggtttgggagactgaggcagacaggttgcttgagctcaggagtttgagaccagcctgggcaatatggtgaaacctgtctctacaaaaagtacaaaaaatcagctgggcatggtggcgcatgcctgtactcctggctacatgggtgactgagtcaggaggattgcttgagtctgggtggttgaggctgctgcagtgagacaagattgtgccaatgcactccagcctgggtgacaaagtgagaccgtgtctcaaaaaacaaacaaccaaaaacaggatttgtggctcttgtccaaacaggatgattagttgcatgatagtcttattatgtttagtgttgctataacagaattcctaagactgtgtattttgtaaagaaaagaggttgatttggtgagtggaaagttcaagactgggcctttgcatctagtgagggcctcaggctgcttcaagtcatgacagaaacgggaaggggacctagcgtacacaaagaaatcacatagcaagagtggaagcaagggggaggtgtgccagcctctttttgacaaatcgagaggaacaaatagaatgagaactcactcacttccgagggagggcattaatctattcaggagggatttgctcccatgaccctaatacctccaaccgagacccatctttcaatattcccacattggaaatcaaatttcaacatgcggtttgaaggatacaaatatccaaaccatagaatgataagcagacacacacacacacacacacacacacacacacacacaccagcagcaaaattcacacaca

SEQ ID NO: 79550 - DNA, 3221 bp, Homo sapiens
tgccacgctcaggctttccctggcggtccccaggtccagcttcttatgggaatgacacccttaaccgacaagaaagcgctatgattttccgtttgggatttaagcggggattaagctcacggattcccaggcgtctagtcagaggccgaactctgggtcggatctcagcgagacttgttgctgaggaacactgcagcttggcttcccggcgcttcccggcgctccctggctccccggcgggcccgtcaaccacccacctcccgggaagggaccgagggcgcgccccgccacgcgcgctccccacgccatggtccccgccgcgcgcgctcatcccacccgagccccgccgcacgccctccccactccccgagccccgccacgcgcgcccccgcccagccccaggagcgcgcgccgccggccttttcccgccgcgctgccgggtgccgctagtgcccgctcgccgcgggaggcgctgctgtcgctgagggagcgcctcctcctcttcctccaactcttccccgcctcctcccgcttctcctcctcctcctccacagttgcctgccctgggcgggggcgagcgcgtccggtttgctggaagcgttcggaaatggcaacttgcgcggtggaggtgttcgggctcctggaggacgaggtgcggggaccgcggggctgcggggcgggcttcccttcgggttattcagcagccggacccggggaggtagcggcggcggccacgaccggaggctctgctgtcagcccctcctccctcggcgcgagcctggggagcgcgcgaggcgccgcggggactgtgggggcggctcggcgcgcgggcgctgggggctcgctggagggagcaagcttgtcgggtccacacccgccccttcccggagcggccgccgccttacttgtcagtttccttcaggaagtgttgaggagggggctaggcggtcggcgggggacccacatcaccgcgccagccccttcctgccacccccgccgggtgtgcggagctcccaggcgttgggagacggtcgcagcatccccgctgttgatttgcttgctctggcggaggccgggccgacttaactttacggacttcggtctggagagttccaagtgaattgtcattcgctggtttgtttttttcttctttatctgaaatcctttttaatcccctaactagagacagggatgggagagcaggaacataaattttcctcctcctctttagcaacaagtgtctagtgtgagaagttcatgctttatttcaccggtcgtcgttgatgttaaaaagtgaagccaaaaaagtataaatactttataaagaagttaccacatctgttccctttgaaaactagattaagctctgggatttgaagaaggcaaagctgtttcttttcagctaaataactaatgctgattatgcctatgcttattaaaaatattgtacgaccatttggaaaggttgttccgtcgtaaatgatatgtggcttctgtgtgttcttggagattgtctcaaaaatgcaaatgggtgggagatgaaaaggctgcatgtagtctaacagtgactggttccgagtgaaaaaaatcaagttttttgctttcttgttggctgactaagctgccacatgtaccttttatcaagatgagacccagttaactgaaaatccatcaacctaatttatactgcttgcttaagtattgtaatatttaagttgtatagttccttctcttagtaccttggtgtcgtcaaacattttacacttctcttgagagttctttgtttataaagggtgggcaatttgttaatgcagttatttcaggatattttgagaatgcttacgtgatgcgattagaatttaatttcctagctattgctgccagaagagaaataaagtgatgatggacaaatggtggcggctcatagtccctcagaaacaatagtcaatgtgttacagctaaagatatcattctagctaatggcacctttattctgtagacgagatcagaagataatacagcacttcacctgtggtcgctttcttatcagtcagatttccctgcttgctacgtagactgcccagtgcagttgacttcaaggtggtgtccaacccaatcaggctgaccttggactttctttccctgctatattcacaggtaggccctgctaattgcagatttctcatctcaccgccttccagcagagccagttgatcttaaagaaaatagtgccaaaggtatcattcaccatctgttttctccctcttggtacatgatcagtgtttttaattatctactttagtaatttctctgttttcaatcatcacccctctgcccagctgaaataaaactaattgtggcagttaatgggtggtcggtaaggaactggggccaaaggccagaaactccaccctttgaaatgtggatttcctgaacttgctgaaggatttgtacttctaggaagtttcatggactgtggcctatcccattcacattctgggagttctggctgtcagttccatgactctaatttgcttctgtccccgctctattttgtccacattgaggaagggagtgagataggaagataagagacatgatgatgaagagtcttccacttcttccattgtaattggattattcattcaacagacattcatttactgtttgctctgtaccatgcattgtgctaggcaccagggatagagagggaaaaaagacagtctcagcctcggactgagggaaagataaaagtcactttttttcttgtggaggttgccctctccactatcatttgccatttattttctggtctatcacaaaagtaaaagaaggattgaaaccacactcccccatcctccccacccccaaacaccccttttgttaaaggaagaaagcattgcagctatgtcacttctaaaactcacagactagtctggaaataggcagccctctgctgttgattaaaagtaaagtgctttttcattacaacaaaaggagaggattcttattttaaatttgaaactaaaacagggagaaaaataatttgaaatgggatagaagatagtgaaagaattgtaatttaatcagtatatagtgaatagtcgctgagtcagtgtctgagcatattagcactgaagtatgctaaaatgtagatcataatacctttctctcacttttcagtgagttttggctcttcttccacatataagtgacttata

SEQ ID NO: 79551 - DNA, 1425 bp, Homo sapiens
aattaactcaaagtagatgacacacccacatgtaaaatgctaaactacaaaacccctagaaggtaacataagagaaaaactctagataccttgggtttggtgatcactttttagatgtaataccaaaagcgcaatccttgaaagaaagaacggataagtctgaccttattaaaataaaaaaaaattctgttatctgaaaaagattgtcaagagaacgaaaaggtaagccacaaaatgggagaaaatatttgcaaaagaaaatctgataaagagttgttatcgtccttgcccgcgccctcctggagcgagcagttctccaagcacccagcatccagccagacacgctgcacaccgacggaggggacgtgggcagagcagtggtggccaggcttgggctggggctgctgctgctggcactgctcctacccacgcagatttattccaatcaaacaactgttgtaacaatttcaagtaactcctcccagagtacttcgactgccccaaatccagctactgccaccaccaaggcggctgttggtgccctgcagtcaacagccagtctcttcgtggtcttactctctcttttttttttttttttttttttttttgagaaggagtctcgctctgtcgcccaggctggagtgcagtggcaggatctcggctcactgcaagctccgcctcccgggttcacgccattctcctgcctcagcctcccaagtagctgggactacaggcgcccgccactacgcccggctaattttttgtatttttagtagagacggggtttcaccgttttagccgggatggtctcgatctcctgacctcgtgatccgcccgcctcggcctcccaaagtgctgggattacaggcgtgagccaccgcgcccggccttactctctcttctacatctctcctcttaagagactcaggccaagaaacatcttctaaacttccccatcttctaaacccaatccaaatggcgtctggaagtccagtgtggcaaggaaaaacagttattcatcgaatctactaattccattccttttattgacacagaaaatgttgagaatcccaaatttgattgatttgaagaacatgtgagaggtttgactagatgatgcatgccaatattaaatctgctggagtttcatgtacaagttgaaggagaggcaacatccaaaatagttaagacatgatttccttgaatgtggcttgataaatatggacacttaatactaccttgaaaataagaatagactgagactattatgtatataatgtggggtaaagatattgagtaaattatgggatatgctaattacatcttcctttgactctgaaaatcagtattcttgatgcagaagaaaggagatatacatgtaacataagaggttaagtaaaaacttctaattttcaaattgaattg

SEQ ID NO: 79552 - DNA, 2299 bp, Homo sapiens
gttgaaatgttgggttaaattgtgttttataacatgtagcacactgtatctaaagacatatgtattgtatttgtcttaatggaagtgcctcccgcagcagaaatactattaattgtgacattttaaaagcgtttgctgcagaagtggtttcttcagtaggaaatggttagacttgcctcagttcttaacaagtgtctaaagacagtaggctgtagaagaacaagtattaggttttaaattttataatgtgccccatttattcacattgattgactatccagctgttacaagagcagtcgatctttattttgtgtaagttagtttcatttcatcagatgatctgcacagaactcagaataaaccatcaattttaggtataggctgttttgttgttggcattatcttttagatataaaatcatagctagggtgaactgtagacaagaaagtcttccttgaaacagggataatattcaggttattataaatatttaggcttgaagcatagagctactgtagggtgaaaaatctctgtaggactttctggggcttcagtaccatttacacccacgatgaagggcttaaatagaaaataatggaaaattaaatattactttaaggaaagcaaagctgcactaaaatttttaagggaaaaaaaacaagtagccatttatatttgtgaccttgcattaatatttaaatgttgattttaatatggagctagcacacatagatgcgcaggcacgcacacacaaaacaagcaaatgtaactccaggcatttgtaatttaatataataaatacaagcatgttagaaaaatgctttatgtcttattatttgttaagttaggggaatgagaaggaaaacaaaagcattctcttagtttcatcacaatggctgcatgtacatattgagattctaactgagatttactttgaaatttttcattaaaatattccacaataatcagtttttttcctcttcaattgagtgactgactccctcactcctcctgaatatagtaatgtagtttgatcataggatccctttgaaaaacaggaaggaggataacataaaaaacaacaaaaaacatttcaccacctaaggtctgaagccacaaatctttatatctctgatgaaacaaaggggatatcaatagtacttgaagaagaagagcattttattacttgcttaatttatttattgtgataaccacaattgcaaaagaagaactcaggatttgttttaaaatgtttctctctatggctcccattttgttttgtgaataattatttatgagttgcatgttgacacaaacctactcactggttgaaagctccatttaagtgagtttcaagatcactttcaaagagatttttaaattgccattgtttttaaagctaacataaaaccatttgctatgctaccttgaacctagctaagctttcctttaccttagtaagccaatcagaagactacaatcaatgaatatttagcaaatgtgctgaagggtttaataaggttttgttgttcaataaatttgcaaggtagggtattaacatattttgataaataaatggtgctagagttggcgcagaggtttatatattgatatgtcttagttattggcatttgtgtgtgtttgctgttatcttgatttcatgatttgttaggtatttttttcttgatgctagttatttcttcactgtacattgagacacagcactactgcacaccaaagtatgcaatacccaaaggaaactgtgtgatttctcctgacaaatgatgggagcctttctttatgagatactctgaaaaggagattttgaggccattctaatcccttgtttacattattagcttcctactaatataaaaataatggaaatcttttttgataaaaatattaagactggaggatttttaaccccttgtacagtattgcagcaaactctttaaatttggttgaattcgtccagcaaactttctggggttcatatattgcactaaatttgttgaacctgtggtaggcacatctcttaggataaatgcaaccaatacagtccacagattaaactttttaaatgtgtttcattatgaaaagacaaaatgtcatcaaagtgacagataaaattgtcttatgtagcaatgtgcattgatctcaatgagatatttctattattctcttacatgagaatattacagcaggaagaattaagtttagtttgcttcaccatgttaatacatgatcacaaaatgtgcatgagtgttattgacttatcttgtacagtactaggatt

SEQ ID NO: 79553 - DNA, 2583 bp, Homo sapiens
ttcttttttacattcagatggagtaaaattctaatgtgtaatgattacttaaatgtaggcctatccgtggcttatcagatacaggactagaaccttggccaagttctttagctagtttattaacctctatttgtagataaggaaacagtctcctcctttcctatctcacacaactgaggttatgatgaagggacttttaaaatgagagtaagttggtgctttatgttattattgataataatatttaggaagtattttgtcgtttttcttgttcctattatcatcatcgtgttattaaaatatgaaatacatggtaaccgcactattcattatagggcaaactggagtagacagtagttgtatcttatttgcagtggtttagttacagacatttaaggtagacacatttataagacagtttcccctatgagtgagccatcttagcatagattctggtaggtaacctttacagttgtatgtttcttcaagattttatgtcttcttcctgtaacccccttaaatcattgtttcagcaaatattcatcacaggtgtgaagcttttagtcttaattgaaaagtaacttaatgttcttacatattttttaattataatgcattatggttgcatttgttacatttatgtgtctgattgtgtagaacctggtctagaagaactctcttctaacataggaacttttttctttttaacattaacatttaataaatgacttaaaagtatatacagatacatgaattactatttacaggctagacctgttaaatctgattttttgctatcttttaacaggtccagcggactaggcaattggtaacttcaccgagtccaatgagttcttctgacggcaaagttcttcccctcaatgtacaggtggtcactcagcacatgcagtctgtgaaacaggcaccaaagactccccagaacgttccagccagtcctggtggggatcgttctgcccggcaccgttaccctcagatcttacccaaaccagcgaacaccagtgcactcaccattcgctctccaactactgtcctctttactagtagtcccatcaaaactgctgttgtacccgcttcacacatgagttctctaaatgtggtgaaaatgacaacaatatccctcacacccagcaacagtaacacccctcttaaacattctgcctcagtcagcagtgctacaggaacaacagaagaatcaaggagtgttccacagatcaagaatggttctgtcgtgtcgcttcagtctcctgggtccaggagcagcagtgcggggggaacatctgctgtggaagtcaaagtggaacccgaaacatcatcagatgagcatcctgtacagtgccaagagaactctgatgaggctaaagctccccagacacctagtgcccttttggggcagaaaagtaatacagacggagcactgcagaaaccttcaaatgaaggtgtcattgaaataaaagcaactaaggtctgtgaccagaggaccaaatgtaaaagtcgctgtaatgaaatgctgccaggcacgtcaacaggcaataatcaaagcactatcactctatcagttgcttctcagaacttaactttcaccagcagcagctcaccacctaatggtgactcaatcaataaagaccctaaattatgcactaaaagcccaagaaaacgactgtcttctacattgcaggagacccaggtgcctcctgtaaagaaaccaattgtggaacagctttcagcagctaccatagaagggcagaaacaaggcagtgttaagaaggaccaaaaggttccacattcagggaaaacagaaggttcaacagcaggtgctcagattcctagcaaggtatcagtaaatgtcagttcacacataggagcaaatcaacccttgaattcctctgcccttgttatcagtgattcagctttggaacagcaaacaaccccatcatcatctccagatataaaagtaaaacttgaaggaagtgtctttctcttggacagtgattcaaagtcagttggcagctttaatccaaatggatggcaacaaatcactaaagattctgagtttatatctgccagttgtgaacaacagcaagatatcagtgttatgacaattcctgagcactctgatatcaatgacttagagaaatctgtttgggaattagaaggaatgccacaggacacatatagccagcagctacatagccagatacaggaatcttctttaaatcaaatacaagcacattcttcagatcagttacctctgcaatctgaactgaaggagtttgagccttctgtttcccagacaaatgaaagctactttccttttgatgatgaacttacacaagatagtattgtggaagagctggtgcttatggagcagcaaatgtcaatgaacaattctcattcttacggcaactgtttgggaatgacccttcagagtcagtcagtaactccaggagctccaatgtcatctcacacttccagcacccacttctatcatccaatccacagcaatggcactccaatccacacacccacacccacacccacacccactcctactccaaccccaac

SEQ ID NO: 79554 - DNA, 1031 bp, Homo sapiens
caagctatgagccattggcagaggctctccagagtgcaggtgctgagaagccagagctgaggcttggggtcggaaaggggcaaaacaactggagctggatttgagatgaaaaattgtgatttttaaaaggggctgggggttcaacagatcctcatcattattgagtatggggagagagttatagcttcctcattgtctatttcctgctccccacaccaagttgttgttgttaactagaatgatgaaaagcagaaattgggatggggaaaagaaaagaaagggcaaggtgtaccagcaggatagttgttcctctcctttcttctcttcattgtttttactgcccacaacttactttctaatgatctcaatgccacgccctaaatctgaaatgagcttttaaaaaatttttattttataatccatttttcctaaaatttatattttgcttattttgtcaatttttttcagtgtttatcttactgttttaaaggttttctcagtgacacttttttggaatatcttaactttagtcttgttaagaaattctgcttctgaatttcttctaggtcatactggaatcattgtatagtagcaataaaataatagtgcctatttccatgaattgctggtaggattaaaaactgttttctccatacaaatttattccattatgaggagtggcttcagcaaatatttattgaattattgaatgcccctcatgggctaaatattaaaatcatgaaaatacatgtatttatttctgattagaaatggggggagggaaatttactgacctttgagaaaatgtaaaaatgctgtgttggcatttatctcagcttctgcacatttacgatatagctacggtttttaaaatcctgttgttaactgaaactgtcacctgattttaaaatcctgttgttaactgaaactgtcgcctgagttgaaccatattgtaagatgacaaaactatattgacaattgtttataaattcgaagtctaatgcttcataaagaaattgtgagttaaaatt

SEQ ID NO: 79555 - DNA, 2248 bp, Homo sapiens
gttaaagcccttgtgacactcttaagagttgtttttgtcccagagccctgggctgaagtttcccttccctgtgccaggtttccatctggctattcctttccttctgacctgtttgttactggtggctggcacagcatattaggaacatttattcataaaatttataacagatgagaatcttttcatttaagacagtagtatttaacattctaaaggggtatttcagtttcaaaagagtaaaagtgtcccaagtttttaatattaaggtttttcttactgaagaattcagaaagtagatgttatgtcatgttgatttttttttctcatttcatatatggttacttttaaagtgctgtctgtataagcaattcatttaattttgaatatttagaccttaactgtttattacatattgctacagtggactaagaaaaaaagcttttgttcatatgccaacactgcccaaccttgactttcacaaaactggagatggggtaagaattcagccttttctttttaataagtaaaattgtacctttatattaacattgaaatgcatcctgcaaagtctcatttggttaagcctagcgactgtgccttttacaaataagaaaaaaaaaatcacacagtggctgaaaaatgttagtgtatatgacctacgtcaacatgaaatttgggggaacaaaagtttagaagttactgatttctcgatatttccaaaatacatattgactatatgtgtgtatagtcaagaggaaaaagtcagtcatcatgtaatatgttttataggaattttagaaaaaatgtgtggctattggcatagttttgacattagaaagattcaaaacatcagtcttcttgtatgtttaaaaaccatttaaaatgttatattcgcaaggctgctgactgctgtgcactagtgggtatgagtcccttatttgcaaagctcttatatgtctgccagtgggtcaattcatactactttaacccacagatttatattgtatcttctaattaagaatacatatctttaacatgcttcaatttaatttctctggtcttttacaagttaacatttccttttttctttgcctagttggaaggagctgaaccttctgggcagcttcaaaatattgatgaagaagttatctcttctgcttgccgtcttgtgtgtgagtgggcccagaaagtgttaagccaaccatttgacaccgtcttggaattagcccgcttccttgtaaaaagtcactatataggcaccaagtcaatggcagctctaactgtaatggcagcagcaccagcaggtacaacattactgtgaacaagctaaaaactgacagaggtattattgtatttagaattggtagcaaaagaagagttagatcaaagaacttcatccttttagtacttgcatgtgttcactcttactccgcttaacactaaattcagatgggtctgttgagccaagaaaataataatcctttcattataaagcttaatgctatgtttctatatattgctttgctggcatatgaaactgtagattccccagctgatatgttattaatttttccattgctacttttacatttatagaatgtgtttatatgtacttttatatgtacatatatgtatatgtgtatctaaattaataagagaagtaaaataataagattaaattttaaaattacttgttagattcccattccagaaactaatgcttataaataaaattatctttgcacactgtgacaggtaacttagcctcaaaaaaacaaaaccgtacaaagccttactaaaaaataacaagagtgatattttttactgtgtattcatgactatttttattcaaagatgagtttttggaatcgacaattttgggaattgacagtcttgttagaatgactccctcctaaattaatagttgtgtaaaataacagttctgatgaatttttaaaaatatcttatttcagttataccttataaacctagagtggataaattattctagaaaatcaggatgtctgttaaaaatgtagtgatatagtgatcagagacttatttttccaaggactgtccttctaagtgttaattctgaatatttaaaaatctacaatagatttatcttggccagaattatagtctcttaattaacttcacttctttttttagtatcttttacacattaataatgagtccgttttcttctaattttacatttagtatgtgggatgtatgtgtgtgtaac

SEQ ID NO: 79556 - DNA, 1050 bp, Homo sapiens
tcattcatatttcccaggtagtggttctcccaaaggccttggtggccagaataaggtgtggccttggtctgctgctgaactggtagaggattgacattttacctatgactggcagctctagagaaaaacagaacacctgattccagtagtagttaagacttggtgtgtctccagatcccacttgaagttactgtcttacaaagtaacttttttcctagcaatactagggatggtgggggtagaaggaggataacactaggacctttggaacctctccccttgcctgttttttctcttatcagtaaaatgagagtgttggtgtattcgtagggtcccttttagttcaaacatatcatgtttctaaattttaaaccacctagtagtattatctctgtctgatgtgcatgatatgtatattggaaattatcccagtatgtgagcctgatacatatgtggaaacttacagccctactggctgagctggatatattcatttatgagcactggttgggattgtaattcgaaaactttgtaccaacattgtatcttactgcaagatttatgaatgttattgaaagcaggactatataccctgaggttgaagccagctaactaaacctgagttaacatgcatcaccaaagagtgatgatcatagacattgtggcaaatgacttgaaagatcctttgcttcactttgtcagaaggatcaaattgtattgaaatagcaccctgcgatataattctgaattctgtcactctaaattggtccttccttcttttgcaggagctattgtgacaatcttggttaccatccattaagtgctgctgattttggaaagatcatgaaaaacgtctttccaaacatgaaggcacgtcgtttgggcacaagaggcaaatctaaatatcctttaccagaatggtgttagtaatatctctgtgttctcacttgttatagaacatctattgttgtagttcaactggcaactttatttagaaataaacttcaaattaaagcaactcaaaagcttaagtagaataattgcaaatgt

SEQ ID NO: 79557 - DNA, 1028 bp, Homo sapiens
acaggaagtctatgatgagtacaagtaagtagtatgtgtaatatggcatgctgatatattaaagaggtaaaatactatacttggccatagtgatttgttttattattggtgaatatcaagctggtatatgggaattacacttagaaatctcttaagattcattccagctctaagcttctgtagtagcatttataataaaggggggcaggattaatgaataaaaggatttctgtagagttcttcaggatgacaggagggaggtcagagagtgcaaggacagtggtgtaggattggtgaataaaaggattcctatagaattcttaggtatgataggagtgtgtatctggggttagagagtggaaggcaataaataaatcaatacataaggcgaaactaaaacatgattttttacttggactttttaaaggcccttttcatgaatctaaaagtcttctaattcttctccataccaaagaatattgtatattatttatcaaggacaagagagttgtccttgcacatgttagacactcaaatttggttgtatttacaatttatttaaatccaggatacaaaaatacagaggctgatgagcccttctggttagaaaaaggttaataggtgctaaatatagtctcgtttaacatttttataattgatttggaaggaggaatttattccagcagagtaaataaaagcaaatttgagggcatattgaaaggtcagaccaacaagaattaatgtgttgtacttacaaatttggggcaaaaagtgtcaaataagtgctattgctaaccagtgtaaggtaatgcgaaggaaattgtacttattgagattattggtatctattcacagttcttactacctcaccaaaagaaacataatggagctagaagaaagtctagataaaaatatctgaaatgatcaagagaacaaagttaaactgaaggactctagatttattttctctttacaaaggttaaaactgagagtgcatgtgatccaacttgttcattcattcagtctac

SEQ ID NO: 79558 - DNA, 1011 bp, Homo sapiens
ctggccccaactacttgggaggctgaggtgggatgatcagttgagcccaggagtttgaggctgcagtgagctatgattaagccactgcaattcaatctgggcaacagagtgagactctcttaaaaaaaacaatttgacaaaaaaaaatttcaggaaccatatttaagacattaaagtggggtgacatcggaggtaggaaaaccagctggttagacattttagaaatttaagtgtcattaaaagttcattaagggcaagaactgtggtggtggtgtgttgttcatctttgttgtattgttcactctttgtatgatttgtgatacatagtataggttcatagttattttatgccacttgtggaacatagcagaaaacaaaagtaatgcataagcaaacgaattatccttattcttgaaagaaagacagctgaagacctagactactgtggtggcagtgaaaaatcgagactggaagaagatggggcagagtgttagagggctaaataaaggattaatgtggaatgcaccaagagaaaaagagttaaacacactcccaaactgaacactgtggaaactagagaaaagaaggtgatgataagtagcaattaagaagagaatgtgtgtttgttttctttgaggggagagctacacaagggtatagctgataacattaggtattggagcaagagccaattggaaaatacctgtaggccatgggattttaaaaatgtaaatttgggagctatttgcatgtgattgattaaatcattatgtggatggattctaagattaaacttttgtggatatcttctgataagactaagaataggcttggttatatcatgttaagtattttcaaaaactgaatctctgtttaaactgtgctttattaagtaagaataaattctaccaggaatgccagtaatctgtccacatttttcattgcaatggaattttgcttagattaggctaccagaattttactatgaatatttttattataataggattt

SEQ ID NO: 79559 - DNA, 1051 bp, Homo sapiens
agtcatctgcctctgggaaacactaagctgctttctgtccctagggatttgcctattttggatatttaatataaacagaatcacatgatatgtgtctggcttctttcacttagcacgatgttttcaaggttcatccatgttgtagcatgtatcagtactccattccttttatggctaaataaaaaattataatttttaaagtttatgaagttggtcttttctctggtgctccaaaaatagaataccattatgatttattttataaatccagccaaaggaattttttttgaccaccaacgaatttcaacatagaacagaaaacttttaattcttatcatttaaattgtcataaagcatatcaaataatcagatgtttaacatacttgccacatgatactcttgccttgacaatcaagcaaggttagggtcttctcctaaaccagtgagcattgtttcagaagccactaattagcagtggatgacacagtatatccaaaaccagaaatcttgatgatgagcccagccttgctggactgaaatgccatcactatacacttgagtcattttttttgtttgctttatagaattttgttattatcagttttcatgctgctctccaaattttttcttctatgtgttgtaccccatatggcaatgaaaacagtaattgaacagttacaagttttcattgttttaaaaaaaattaggacactgactttaatctttttcaaaacttttttttgccatcttctaaatcatctctttggtgcttaatactaatttagaacatcttctgaaatttcttctatgttctggaatttcttttctattcttttttccagtatatttaaaatttgaaagctatatagaatccaaggtttctccaacagtagatttttttctttatgatcaaaaatgatatttttattacactttctcagacatggctcataatattaggtattttattattataaccttctcttaatttaatatgattggcattggtgtgattaagtgggtgatgttaataatatttgacagtagttca

SEQ ID NO: 79560 - DNA, 1498 bp, Homo sapiens
tacgtgcctggcgtttgagtttgtggcttttgtgttagattatttgggggcaaggttattataagagctattctttacagggttggggacccataatggtacatatgaggatagataatgggaagaaagcctctgtttttatttcttagtaatatggagtctttactgtcagttcctgctttagctgccattacaacggccagccaatagaaagcaaaaatagtatataacaaagaataatgataactgttttgagtctctgctatagatcagccactgtgtaaaacatgttgccttctcactttcctgtgagaccatccttgattactctattttaaattgtggtttaacataccctcccaacactttttcttcatagcgtttatcatcatcatgtaacatatgttttacttttaaattttattgtatgtcttcctgttactaaaatataagatagtgcctagagcatagtaggcacttgatgctagatgaatatataaatgaataatgttgtttaatttttaaactttccaagtctgtcccatggtttagtgttttaaatcagaagccagtcttcttcatttacttactgctaaagtgttcctgagaaacagacctactattagaatggggccttctaagaggtgacacactcccagcaataaatttgagtagttcactccagtagtaattcttaacaattactttcctgccctccagagatatatgctgcatctgtgaggggttatggatgtgtggagtatgcaattccaaaaaattatcttcttccctttacaagagaaagcatgctttctcacctcaaatccttgctttaatgaatactaaatggtgaccaaggtcaactcaccgacacagacttgattgaaactaaaattttgtttgcattatctaattaaaatatatcaaataaataaataacaaaaattcacctgttactgctcgaaaaaggctcatgggtagaagatcacatttattttgtgatacggcactggagttactgttagtaagatttatctcagaatcttattttttctttctattcacttagtggagaagaaataggcacttttcaaaatgaagagcatgtctgtgcagaatttacttgaatgagaaaacttggcagtggggccagatttaaatagcttgtttggttttgtttagtatcacaaaaagaaataatttatataaggccatgccatttaaaggattgtgaaccttttactctttcctttttttacattaaacacttgagttattgtatcctcctttagtatgtgagaaaaacatggttattaatgttttttttttctctcctgttagggactcgagtggactaaattgccactgagccccaaaaaaataagttctggtaacttttgtgtttcatgattataaacaatgctctaaccattgtcagctagctttcaaatttattacattgtctcaaaaatatgatgggaatttctcatcattacca

SEQ ID NO: 79561 - DNA, 1106 bp, Homo sapiens
gtgtgtgtgtgtgtgtgtgtgtgtgtgtgtgtgtgtgttgagacagagagaggagggaacagaatcttttatgtatcaaatcttacaagctacagattgtagtacatcgttatgacttttaagtgctaagcaaattattgtccagagtggcaggcagacagtaaaaatcataattattgtaagctctgggccatacttgtaagtatagtaataaatctgcacttatacactgttaaaaatttaattgtttattcaaaataaacttaggaaatgttttaaccatgctttaagattaaatttagtacagtaaatgggaaatagatttttgttttgctttgtgaaaaacacagatttaggctacaatccctaatcttaataggaagctgtatttatttttttcttagtaaggaagactaaattaccacatctttttgagaatattgcagatagttaataaacttttcattttactaacctaactttctctttcttttagcaaaactgtacaatctaaagtggactgcattttggtaagtgaaataactaatattaaaatccttttgcaataaggtttttatgacgatataaaatatacagttttcaagtaaatattgattttaaatataatctaactccagtgaataaaatttgatattttaattacagccccctcgggtgaattgtttataagctacctagatacttacctgtatctcatcaataataaaatcacaatctgaggtaattacatgtttttgaatcttaactggctcttactgaaagactgcttaaacgaacaattaaattggatatttatttttctattctaataactctgagaatttgtttagagaaaagtttttgaagatgtttaatgggttagttttgttgagatagtgtgtttttcatgttttggttggcagcctgtaggaattaagccataataatagtttaagtttagattctacttaatagaattgtaaaaatttgttttcaaaaacagcttttaagatgcttagtggattagtttttgtggggttgccagctttcaagatttaaagccacaataatagtttaaatttagattgtgttagtatagtagtagt

SEQ ID NO: 79562 - DNA, 2290 bp, Homo sapiens
accttccacaagtaagtgagaacatgtactgttttttttttctgtacatggcttatttcacttaaaataatgacctctagttccatctatattactgcaatgacaggatgttgttcttttttatggctgaataatactccattgtgtatatgtaccacattatccattcatctgttgatggacacttaggttgattccatatcttgaccattgttaatagtgctgcagtaaacatgggagtgcagatatctctttgacatactgattcctttctttgggctatatagctagcagtgggattgctggataatatggaatctctatttttagttttttgaggagcctccaaactattctccatcatgattgtgcaccagccactgtgtccccctaacagtgtatgtggtttctcttttctccccatccttgccagcatttgttattgtttttctgtgactggcttattttacttagcataatgtcttcaagattcatttatattgtagcatgcatcacaatgtttttcttttttatgtctgatgaataatattctattgtatatgtgtatcatttttttttgtccatttatccatcaatagacacatgcattgcttccactttttggttattgtgaatagtgctgctctcaacattagtgtacaaaggtctgttctagtctgtgcatttattctttttgatacatactcagaagtggaactgctggatcatatggtaattttaatattttgatgaaccaccatactgttttccataacagctacaccattttccatccctaccagcagtacacaaggattccactttcttcacatctttactaacacttgttaattttctgggtttttatataatttttatttttaatagtagctatcctaatggatgtggggtggtatctctttttttaacctgtgagtgtctgattgctttagcaccatttgttggaaaagctgtctttcctccatttaataactttcacttctgtcaaaactcacttgagcatatttgagtgagtttatttccaggttcttagtcatgcttcactaatatatgtttctgtccctctgctaatagcagggtagtgactagcttcataaaatgaattgggaagttttctctcatcttctgttttctgtaaaggaatgtgtagaattggtgttagttcttaaatgtttagtagaaatctctagtgaaaacatctgggcatttacattcaattttaaagttttgttagtcaaacttgtgtcaacataatgagagtgaaagggtaaaatcactctgggaggagaagtgagagaagatagttgcaatataactgaaagaaggttagtatttgagataaagacattttacagatttctaagagagaaacaaaatttgggcaaaaagcataatcaggcatttcatggaaaggaaatgtgttcaaaaacctagagaaacttgttcagacttgttagttctcagggaaaggcaaattaagacagccttttcctacccactggaattggcaaaacttgagtttcctgctactggcaattacagctatctgctctgaaaactaaagtgttactcacaacttcattttatgttctctctcctttggtgatgtagaaagagcatttaattcagaccagggatttggagaaattagacaatattttttggagtatgtgctttgtcttaaatttttgaaatgctctccacaagccatagaaaactcttctttcttaggggaaaatactcttcttttgcctttattgtcttaatagatgcctttataggcattcaggtgccttttggttctagacaatatgatcgttttagatgtttctgtgtatactacttattctcattggtcagttacttctttaaactttgtgctttgaggttcacagattattgagcacgcctagtttgaactgtagcaggtttagagtaaggtgcatgaccctgactcgcatttgatttcattaagttccttttttggtcttaagagcataagactaaaataagattatttggggtaagattttaattacactcatactatattccattgccattattacttgaatgtaggtatgggtagatagtatagctccatagatcattaccttttggttttgatcaaatcaaaaaggtgttcctgatcatttagttattagactttacattaaaatattgtaaggatctagaccctcaaagctttagcctacaatattctcatattgcttacaaatactctggcactgattttccctgggtttgt

SEQ ID NO: 79563 - DNA, 1030 bp, Homo sapiens
ggtctggagttgggttttgccttttgcccaggtcagttatgctctgatgaagctccagcaggataggctctggttgatttaatttctcctgagggtagcgttattaggaacagaatgctttggcatatttcacaatgattccttttctccttcccttgtctaaggcatgaaagttatctccaatattcagaggaggtttttcttaaatattcactgggaaaacctggtcaagctcttggaggtaaaagtgtggagatgcttgattactggatttccctggagtttatctcagacttgttcattctgagcctcttgtaattcatcagttatagtttgtttacctcctttggtacagattctcatgcaggtttgtggcttgtgggtttctgctccagcaagctacaattctctgcattttcctattggtctttcccatttggggggtttgtgatttgacccctgatcttaccactctgacaaatcctaagaagagttgttgatttttcagtttttttcggctttttatcttgtagggcttagtgttgacttacagcttcttacatgctggaccagaaaccagaagtcctagctctttttaaaaaattaatctgcttaacagtcttttgtagagcacaagtccaatttatcagtttttctttctatggataatatgtttggtgccaagtctaagaactttgctttgccctagatctgaaagagtttattgctttttttctcaaatgttttgtatttctatgttttacatttaagtctgtgatccattttgagttaatttttctgtaaggtatgaggcttagcttgatgttaattttttaaaaatttgttttaattatagtaaaatgcaactaagataaaatttaccactttagtcatttttaagagaacagttcagtagcattaagtacagtcacattgattgtagccatcaacactagccatccacagaactcttttcatcttgcagaattgaaactctgtacccattaaacaatacccccccatttcctcc

SEQ ID NO: 79564 - DNA, 1030 bp, Homo sapiens
acatttagaatctgagaagttaacagctttttattaggttgtttcaaagtttaattaggttgtctaagaaaatatgtgattagcctttgatataaaaatattattacaaaatcatttaataatgtcctatagggaagatgtgagtcagcaagcaggtttatagaaggaaacggttatgctagatagtttacttgcttgtagtctccagatataaagataccaaatttcaacctgttgcaggcacctgttgaaggcagagaggaattaagctagaaagacattttggagttcctaacttctaaagtgagatgtgattgggattcctgacttctaaagtgagatgtgaaatgttgtgaattacctacattttcagcctatttggagagaagtacgatttatgtcttgctttaaataatagaataaaatctctataattgtttaaaatcagtttttaagtaagttggagtgcatattccagcactggcagtgcagtataaacaatggagaggtagctcagacagggctttccataatgaagacaatgacccatgagggactgtaactgaaacccagcaagagaaatccggttttataagaaattgttttgggatgtcagttgtacagtgtttgttacttgtttatatagctgaggttacatgtgttaatctttgctatgacttaaaagagataaatgggctctggagttattgtggcagattaaaaaacaaaacaattatattttagacctgcatattttggctgttttggactacagttgttcatcccttgagttccaaatgtaaaaatgttacattcagtaatatctaattgtgaaatcttgtttgttactgctgttcttgttctttttttattcagaatcttaagtagtatttttgttataatactaatacaaatcagtgataaaggaggcatcaacaaatcagcaggaggattatttaagaaatggtattagtgcagttggttagctgtttaaacaggcagagagagagaataaattagcctcaacccc

SEQ ID NO: 79565 - DNA, 1465 bp, Homo sapiens
aattttgtttttgtatttttagtagagttggggttacactgtgttagccaggatggtcttgatctcctgacctcgtggtctgcccaccttggcctcccaaaatgctgggattacaggcgtgagccactgcgcccagccatttaattacatcttaatcattgttgaagccatagctcaagtactctgaaacattcgttagctactgtagtacacattgaccttttcttgacttcatagtgtgtagtgagttctgtacaatttatcacttaatcactcattttttttccagtgctgttctaataaacaagctatttgaaggtggggacaacaattttgcatctttttatttttcacctagtggtaggtactagtgaatatctttttttgtttactgcattcttagaggcacttttatttttttctacatattgtttctgtatttgataacataatgtggtaattttctcccaaaacaagatattaaactgatgttacactttacagaataaaggacttaacagcaattgatacttttaaaaattgcatttgtgaaactgaagtaatcatttgttgagagtttcagttttcccaatcccatatctttcactatgtacctagatttaataatgtgtgttccaaatgaaagccattgtgtccttcatctaaaaaccactgagcagatgactaccacatggttcagcaacctttcgtgactgagtatacaacagtagttagggttttatggactggttagttattttgtattccagcctagttcccaagagataaacttggaattttaaagaccccttaacattgaattggagatggcttttttaagtttggtcctagcagagggtttgagctatttttttttaggagacaagacccaaggctaagataacttgtttgagttatggccaaagcctgaaggtggcaaaggaagcctgtcggtgagggcagataaggaaggaggtagatttatttgggaagtatggaagaaataggactaaaataggaaaacaactgtgagggcctgaagtgtttcaaattcatacaagtggctaccctggctactgatgtagagctttctttccttccttcctttttgggtggggggcaggggtccaaagatcttgcttttaaagaccctttcagctttaaaattgtattttatattgtgctacttggttacagcagtggttctcaaattatgaccctattagcaccacctgggaacttgttagaaatttaaatttgggggctcccccaacccagaattgctataacagaaactcttgggctatggttagcagtgtttgttttaacgagtcttccgggagattctcattctctaactgaaaccgaagtttgagaaactactggattagaggagtcatcttcttaaaaacaaaacaagcactttgggaggccaagacaggcggatcacgaggtcaggagatca

SEQ ID NO: 79566 - DNA, 3563 bp, Homo sapiens
aatataattaatttatcataggcaatcaacagaacattttcattggatgaattattaggatttgtcagtgtttccttgggtgttagctgaggaggacttgcttattgctaccttgtgcaagggttctgttatgtgagattaactgtgcaaatctttattgagcatatattacatttaaagtagttaagagctgtttattgtgcaaaagtaaggctatgcagtaatcctggttgttggggagtttactaactgctggttgagagattgtagtagggaggctgtttgtgtgctgcttttgttttgtcttctttataaagagatgtttaaccttatcccataatagtaatgtaatattttaaggcagtgaatgtcatattgtagattcaattatataaataagaaaagtatgtactctttcagaataatttagtgcagagttgagcttcacagctattcctcttcatctaggatagatattttaataagtaatcgtgacagaatgttctttgtaaattataaggaacatgatagtaagatggttattctacatctctgagcaaagtagaccactcttgtccagtgcctcctattctaccattctctttctgtttagtcttttagttgctttctcttctgctttttggagggttctaagttcgagttaaagatgagaagcatgggccaataggaggaagaatcttcctgccttgggtaggataataaaataaggaacaataaacactaaggccttaatgcacttacttgctgactatgagattaagatatttggcactcaacccacataaataaataccttaaaacatgatttttctttttttgcgactgtaaataggcatttactttttctatttcactaactgtatgcctcctatttataagacaaaatagaaacatgaggtttggttaattatgtacaacctctctatcaggcatctattaccgtagctcatatatatataacaaaaagttgtgtgggaggtgaaattttctatttcctcgtaactgagcacaaactgaaaaattctgatattccttactatttgagtcttgcttttttcctgagtgcagaaagtgaaagatcagaaagtgacagattccaatctgttatgtcttggatttttgggaggcatgagtccatatggtacacactaccatgtcttccaaatagccttatctgaaataaaaaaaataaattatctgaacccatttgttgtctaaatttgaatagcaaaggtttagatagcaaaggatacctttacacccattccaacacgggattagcaaattgattggaacttgcatgctaagtctgattgattagtgatatttctagcaagggcatgggaataagaagtaatgatacacatgccctataattgccaccctttttctttccaaaatcagtaatttttaatttgagctctcttatagatgaagcattacagcaatggctatcttggggagggagagtcactagggctattgtcttgccatttatgatgcctagttttaaggtataaaccaagcatggagagcacttggtttgtgtgtttttctgtttttctgtggcttttctgttttgagcacctgtattgtcaagtagctacaagatgagaacagggcactttgggaggccgaggtgggcggatcatgaggtcaggagatcaagactatcctggctaacatggtgaaaccccgtctctactaaaaatataaaaaattagccagtcacagtggcggggcctgtagccccagctactcaggaggctgaggcaggagaatcgcttgaacctgggaaaagcaggggctgcagtgagccaagatcacgccactgcactccggcctgggcgacagagtgagactccatctcaaaaaaaaaaaacaacaaacgagaacaggggattactgtatgaactggctgcttcaatttgcactatccataaccctttttctttgcttccattatcttatttctctacttacgtatgtgctggtctggtcccattacctgctaccttaagaatgttgtttctgctgatataagtgtctaactttaagatccagcttgtgaaacatgtctcacgaacctttcgtcaactcccaggggaacaatgatctgagttgtgtaatttaatttttttcagtagtttagactggcctttcctaaggtaagtccattttagtgagtttttactgaatttaaatgaaacactctcattttctaatatgtaaagttgataggaatttggagattgaatatatctgaaacaaagtaatcacttgcagaatcagtagtctacaatatgacagtaaaatatgttatttctatatggcaacaccaagaacttaccattgtttttgcagtaagcatgaaatttaaaaatttaattggatgagtgtcacttcagtgacatcttgcttagagtaaagttggtgcttctgggaacctgagaaacgtattccaacaagatgctttagttaatgtaagtgaatcacttccgtaatttgattgcagtcattacatctattaataagatatatcaaagcaatctatgatcaaaatttaactgtcatattattaaatgcatgtccttttttctgaagcaggagccactagcaagcagcattttaggcagattctacatgtacaggtttttaagaagtcagaaggtcaacgataaattctgaatttatagaatcatgtagtcagggaaaactgaattcagtacacatttgttttaatgactgccacatacaaggcataaaaaggttaaaaaagtataagacattcttaccactttaaaacattcaccctcttttgtgggagactcatcaattgagtttatcaaaagtaagttttgttaaatgcaataatggcgtataagcagtggtataaacaaatacagaattaggtgagggagagattcagtgaggacataatatttttactgacaaaattcaggatagtggccttaatgaaaaatcaagggatgggctataaatccaaacacacttaacagtatacttacttggtcattgttaatctcactagcagaaattagattcagagttatgatgacagtgagctttgccaataatgtgaataaatagaggaaaatggcttgggagaaaatttgcttgactaaggaataggatttccactaactaatcacaatcctctcatgttaagtttcgatgtacaagtagaagaaagaatataaagtaatagtagagaagaaaaggatgtgagctgggtgggaactggagcagagtaccagagtacaggttgccacaaccaatgtcaccttaaacttggcctttcacaaccacgatttttctatgccttagtaccttgccacctcaaattgctttcatttactctcatttcatttactttcatttcattactcatttcagttactctaattcttttgatagtagatatcacttttccttctttccatcagtctggcagcattggtttcatcttttatttttctctcatcctcgtgtccagtattttaacaagtttcccagtttgc

SEQ ID NO: 79567 - DNA, 1034 bp, Homo sapiens
gtttttgaatcaggtagtttattaactctgttgagaaatattgttccttcagctacagtggaaaacatgtactataaattcataactttagagtttactttaactgaaagtctatgattttcattttgctttaaaaatacagaccgactagcacatcagctggcttccatgtatttttgattagtaggttgacctcctacctaccctgagtttagcctgtcttcaataccaagcacacaaaagacttaagatgcattttgcatatccgtattgaggctagctgtgtcccaacatggtttctggttccagaaggaaggcagttccttgctctcctatgattttaaactgataaaattgtcttccctattgacaaaagttaattgcaagttaagcaattccaagcctgttgattttcttgtcttgtttaggttgggtagtggatatgtacatatttaaatgattgaccaatttgctctctccattgaaaggtgtcttgaatgatggtatgtgcaggactgatttggtttatgtctaactgtaaatttttggtattaattggggaaaatgagcttcatagtggtagaaaagagagaagtgtcttgttatgaaagatgcattggattaagaattatgttgcattactttttccattagaaaataatattgcatgctaaaattgtgcaaatgaaaattaaaataagccttatcatttacttatatttgaggactttaagcaagaagagtttgtaagtacttaaatgagtatctgctatatacaaagtatgccagagactggcatttgaggaatgcccattcacttgtaatattaaccttgtaaaattgacctaagcaaaaatatgcaataaaacttctcttttattcagttaggggaccaggaaaagaagtgacaagtgtcaaggtaatgcactgtggaaaaagtagaccttagtttcctcatttacaaaatgagagatttttactaagtgaccgtgaaggttcctgagattctaacactgttactaaatcaatattga

SEQ ID NO: 79568 - DNA, 1422 bp, Homo sapiens
cttgcttgccatcaaggttttcacaaaaccagtgtgtatgtgtgtgtgtttttaacctctagtaacgtgacgtaactttgtgtttctgaaatcatcattaaattgaattaagcaccttggttttacattcagatgtgggaaatccaagttaatggactaaaatcttttaagagagacaaattttaaaagttgaatgagtaatgtatattttaattgattatgagaacaagaggggaaaggaatcttcactttatagttttaaaataagtgagttgtggaggcaactgactgaaatgtttgaataatgatgatagtcgagtgcactttttggcaaataatgtgtaaatttaatttttttttatattggcacatccattacagcctaactgctctgactttaacatgagaaaaacttctgaagtagagtgcactccagtttttggtacttgctctgaaaaaataatgggcagcaaacacgtgaatcccaaaatatgaaaatttatatttttgttttaaaattgtaatgatacacttattggcatctaatgatcaactttagaaatcctatttgcaaaaatgatttttatatacttaaaatttcggaataaacaacatttgtagataataaacaaaattagtaaatatacttaatagtgtcataccccctgctccacaagaatggatttatattattcatcaagtgactatgtaaaataaagatatcaaaagtgaaaactcctttactaccatatattcctaagaaatagtatatatgtattaaatcatttttaatagatgattgcagttagatatttcacatttttgagacaataatattattttacaaattattttatcacctgataatattctgagagactatcagttttgtactacttcctgaatcatcctttggtgccattattaatgagagtttaaaattacactcaaaagaaatgtgacatttaaaaattatcaaatgggttttgcatttggtttatcatagtttctaaattactgggcttgcatatcacaaacaagtctgtacttgtcctcctactctacaaatataaatatagtatgtgatgtaggcctttggacaataagttatcagttcataatttactctgtttattaaactgaaatatggtttgataaaagtatgtgcattgaaatatcaggcattaaatgagtctggaaaaaaagcattcaaagttgagtggaaaagagttggaaatatattttaaaggtaattatagaaaataaggttagtacaaaattgacaatgttgttatgtttctataatatggttatgaataccttcaagttaactctaggttaacaagcttgcatgtttcttacccttactcattcttactccatagacaaaaggtccaaatcactgacactattcactagaaa

SEQ ID NO: 79569 - DNA, 1022 bp, Homo sapiens
acttcgtcttcaaacgcccccatctcacccccccacagccccggccgctgacgggaggaggcggcggcgccagcggggggctgaggggcgccgccatgcctctcccgcggtgaagcgccccggccgtgaggagccgctggtctccccggtgatgttccccaggcggcaggcgaaagcgactcactcgagccctggggtaaaggcctagcttatccagcttccttcctcctcctcctcctcttcccctccccctccccctcctcctctccccccttcgtcctcccctcccggtctcttccctcacccttccccgcgcccccatctttccctccctccctcccacccctctgcagcgatggcagaggaacaacaacagccgccaccacagcagcctgatgcccatcagcagcttccccccagcgcccccaactcgggggtggccctgccagcccttgtgcccgggctgccagggacagaggccagcgcgctgcaacacaagatcaagaactccatctggtaagaggatcctccatcgctcgcgtgaaaaagcccaggcacatttctgctgcaaagtgggtggggggcggcgggcggggggagcggaggaggaggctgatgcattcattgaatgtggctttccccagtcgggtgcacatttgtaggatctctggaggtgtgcggactttgcatcaatcagcccctgtcttcttagctaaaaaatgcttttaccccttcctcaattgtgagtgcagataaacaagttttttggttttattttttcactcattgtaacagaaatatgggtcgaaattaagtcatattgcatgatggtggcatgaatttggaactggagaatgtgaaatgtgtttactcctttttgcagccatagaaggaggaagaagtgtattgtgaattttcaccaaacagatactgtgcgtaagaatattaatatgcagcacaaaacctaatgtgtctcttcctttcagttgggttagctgctatttctgaatgtttttgcctcc

SEQ ID NO: 79570 - DNA, 1050 bp, Homo sapiens
tccaccctcttgcctcactttcatttcttgatgtgtctttgccaaaagcttttacccctgatacttcacttttagcatcttcacagtcttctcaacattgaagtttttcctgatttgagacaaatttttctacccatttagtgaatttattttttaaatttcttgtgcctccttctaatttctgctgtatgctgtataagctggaagactctaaagggctggggaaactggagttagaaatattatgtaaaggccttgatattcttacattttccccttaggatggaattttttaacccagaacaaatgaaaggtgcaactagtgttatagaccttatcttcatactatagcatttagaattccgtgcctttatgttatggaaaccttggacaattctgaaatgatgaatgttcagagaggcacttgaatatatcttaatggtttggttttttttctatatgatatattacctatctttactcatttaagagagatcggcaagaagtacgatctaggcctgtttcaacacaaatgaaatcatgtgatgacgaagatgattacagtttaaggtaagtatcttaaattctcaagcaccttcttttaaaaggatgtacatggatcgttatgtaagatcttttttgcatgcaaacattgaaaaatctataatttgaagaataatgtatatatagggggcttataccaatcagacacagtgcaagccctttatctcatgtaattttcaaaatattattttgaaatgtatattcttgtcctcatttttaaaactttagagaggaaacaggaaaagtacataatcgatgtgaataaaactatgaaatcatattgtagcagacggaatgatgatcaccaaacattccaagtctcttacagttgtcattgggctatgaacagaagtttagttaatctcttccaagccaaaacagacaaaaattggtgtgtggacctccaaatgactttccagccatgaagatgagtaaaattccaattggtaaaatctcctagcctggtgtctgggtgaccgtgtgtgg

SEQ ID NO: 79571 - DNA, 1942 bp, Homo sapiens
ttctaagttcagttttcactttatttactttatgggcctataaacttcaaagatttactgctgatattattgaataatgaacttttgctggcagtaaagtaccaaagatagatcctgaaggtttgtgggagaaagcttagacagtaaggtattagtgtatttctttgcttcaaagacacatatactacattttaactgctcagaaattgggatctgtgttacagtcagtggcattttgtaatcacagtggctgcactgaagctgagttttgctagagaagatttatgtttgtttctgccaaactctcagggacattactgacctgagaacactttaaataatctgatgtagtttggaccaccctggtgcgtgtgaatttagtctgcaaacttatgtgaatactacctgtgatttctttctgttgagtggatttattcgtcattgaccttttcattaggactgttgagtacctatagtgccccctaacagatatctcctatttgactccccatcttgagtattttcttctttataaagtaatggtctgtcttacaattgatgtcatcttagattcagcaaaagacagtaaatataattatttaaattcacagaagcacagatcagatttctaaaggccaaactccatgttatgcaggaggaattggataatgttgtatgtgaatgcaataaaaaggtaagttttaaaaacctcttaaaaggctctaatattcaaagatattttaggagcaatttcaattacattttttgaattactttatttagatataaatcatagttaaattttgaattcaaaaattgtatataagtactgaactttattctgagatgttgaattttcacagagctgaaatatcttaaattcttgctacaattagaattctctatattagtcttacaaatgtagtgtaagctattaaatgcaaataaaacatttgacttccatttttgaagataaaaatagactaatttgtttttcatgaaacgtgtataaatatcaaagaacatatgaaacgtctttttttctgctttgttttgataacaaatcttacatattttttcacataatctataactttataactataggaggatgaaattcagaatttaaagtctcaagtaaaaaattttgaagaagattttatgagacagcagcgaacaattaatatgcaacagtctcaagtagaaaaatacaaaactcttttcgaagaagcaaacaaaaagtatgatggattacagcaacagttgtcttcagtagaaagggtaattatttggtatttttcctaacttaatgccacagatacaagaaaattattaaggttacacatttgtatagatgccattttgacagttcagttattttattagtatttactgaaaactctttccccttacatagaatatttttaacaactttattgagatgtaattcacccttttaaagtatgcaattcaatggcttttggtgtattcatagaattgtgcaactatcaccacaaccattttcataatccctaaaagatacttcataccctttagccaccacaccctgaccctgctcccctcaatcccttacagccctaggcaaccactattctattttatgtctcaataaatttgtctattctggaaatcacatatacgtggaatcatataatatgtggtcttttgtgactgacttttacttaagatattttcaaggttcattcatgttgcagcccctatcagtattttatttctttttattggcaagtaacattctgttatatggatataacacatttaatttatctgtttatcagttcgtagctttaggttatttgggttgtttctactgtctgacaattttaaatactttgaatattcatgtacaagtttttgtgtgcacgtatgtttctatttctcttggttatatagccaggaa

SEQ ID NO: 79572 - DNA, 1050 bp, Homo sapiens
tgaatatattctgaaaagatttactttgtcaggtatacagaaaaacagtggagagtttctcttaacattggtctttttgggaggttcccaagagaagaaatacagttataatgagttgtttataaaatagaggacaggtatactgtgtcttgagtcaataaagagagagaaaattccaaacgaaaagtaatttgaaagcccggttcacaactacattttttaggatatatttctctaataccaatttgaggcaagaattccttgagacctctaacacttagtgttcagcctctacccccaagcgtgtgtgtgtgtgtgtgtgtaaagtttgagagaaagcaaggaatatggatatggaagatactgcaaaatgataaagggggaaactatgatatatttataaatgttccataatcttttttactatacaggaattagaaaataaaagaagactgcaaaaacaggctgcaagtagtcaaagtgccacagaggttcgcttgaatagagctctagaagaagcagaaaagtataaactggagttaagtaaattaaggcaaaataacaaggtatggaaaaattgaatagcttttgtagtgatcccttttggtaactacttcttttatgaacatgtcaaaaataatacttaaattataattcttgatgtcatgctgaacatttctcttttcagaagaaatatattcattagcagtatacacatttctaacatgttaggatgatatgcttgtctgtcgccattattgggtgatggcacaactctttggaagattgatttcttcaaccagttttatcaggtgcccatattatatgtcagacacttttctaagctcttagaaaaagttgtttaaaaaaagtatcttttgtatctcaagtcttttattcttctctgaacctcagttttctaatagataaagtaaggctctattttacagggcagtggttctcaaacttgagcatgtatcagaatctctgggagggcttgttaaatcacattgctgggtcccatccccagaatttctgatttaataggtc

SEQ ID NO: 79573 - DNA, 1044 bp, Homo sapiens
agaagaagctagttgaatgtggatctcaaccagtatttctgctctttcaaggatcatatcgcttccagtttctacttattattgattactcatctacaccttcaaatatactttttaaacgtttttaaaatgttttcaaatatattatttttgaaaattcataaatccagagtttatgttggttcaatacaagctactttgccattactggaattagaactgagttattttaaaaacattttttaaaaatgggaaatacctgagcatgactaaaagctatcaaattccagtaattcggtaatggaaagcaatttttatctacaaaaattttatatttcagtttaagaaagtactttttattactgttgtgatgatagtctataattctttccattgaggctgtatattaaaaatatatggcacttttttttccttgtgtaggacatagcaaatgaagaacacaaaaaaattgaagtgttaaaatcagaaaacaagaagctagaaaaacaaaaaggagaattaatgatagggttcaagaaacagttaaaattaattgatgttttaaaaaggcaaaaggtgagtctatcattaaagttaaatcatcatattatttgtaactttcttactaaaaaatttagcatttttcactttaggtatgtttttgacatctttacgcactgaacttcatataaaatgcatcatacatatgaaatcatatgaaatctaacatttatagtgagatatatgtgtcatctaagcaagtggatattttcacataagtaagttagtgtagaaaatgggactggaaaatacagtataggtacttctcaactacagaaagtaccaaattaaagaatgactattaggggactgtttgcctcttcaaaccttagagcgaacatcacttccaaaccactattgctgctttctctaaaaattcatagttctgacactttccttctttgcaaaggtcaggtatttaaaatattatagaattattattatcttaaaagtaagttggttcagtactactgttggacaata

SEQ ID NO: 79574 - DNA, 1027 bp, Homo sapiens
aattctcctcccttacagtagaccaaaaaagatgctttaaaagaaaattccaaatatttatttccctggctaaatcaagtaagtaaagttcgtaaacacagacagaaggcagttcactttggggtagagttctgtattagtcaaggtaaatatactgtcttgaggatggggatgcaaacagtgctctgtagtgttgtagaaatcggattttgaaattatcagtacaaaaataacagcttgattaaaattaatttgtatctgataattgtttacaagttatgaaattcagtgatgatttacaaaatccaaacagacaatggatacctaatgccactgaactgtaaaacaaaagttatgctgacatctagtggtaacatgcaaaaaatctatgctttacccaattttgatgatatcatttctcttcacaaatttcactcctttgttgatatactttcctgaactcttcaccaagcagatcaatatcatcctcttttttaaatactccctacgagaaaaatactttgtgggttacttttgaataccagaatatttcactaaatgcttttaagactgacagacataagattagtaaagttatctccaaggtaatgaaatctattcaacagattaatgaaactttaaaaaaatcaatacttttcaaaaaataagactttacatatatattgaatattcctagactgacccaattttctgatttatcagctctagtgtaggagcttttcataggaatctgagctcttctacaagttctactgcttggattacctagataggaaggcacttcatctatactgtaccctacccttttctttaaatagctctataatatgatataatggtgagcttcagtagattcatgcatgggattagttcttcatgcctcagttctatggctaatcagcaaacagtcaatcttgcagaaaagaatccaggtttggagttaagccatttaagcaaaccctttggaattcttcactgttctatttttcttttcccctacagtata

SEQ ID NO: 79575 - DNA, 1049 bp, Homo sapiens
tattagaagactagagatgggtaagtgcagctttgattttgaggaggaggttggaaactgaaaaatacttatgggtggtttggacagcttttgtaagcaagattctagaatgattcatagttaccatagactttagatgaataaactcaggtgtgcaaaaaaggcttttgtaacagctctttccaaagcagttacgtgttaattctgagtagagaaacaagatggtaaatataaattaaaatttgttcatgagtaacagaaaacaatccaaatgtaagcatattctttatccagctagttttaaagggatggacaaagttatcatgaaaagccttactttttcagtttgtatgatttcatattgtaatactaaatttaaccaaactctatcactctttccttataaatctggtgtaaggaaatagttactaaattaactttcagctgtattgtttaggaagaagcagaaaagaaattgagaaagcaaaaagagatgaagcaagattttgaagaacaaatggccttgaaggaattagtgctacaggctgcaaaagaggaagaggagaactttagaaaaactatgctagctaaatttgctgaggatgatcgaatagaattaatgaatgctcagaaacaaagaatgaagcagctggaacacaggagggctgtggaaaaacttattgaagagcgtcgccaacaattccttgcagacaaagtaagaaaaagttgtggggtttttttggtcattatcattaaacagcaatagctcatctatcatccactaaacatttactgagaagctttatatgccagacaatgttagtatgtttactaatatatatataaattttctgaccatttttgcttctagaaaatatttattgatgctttctatgtgctaaacactggttggtattgagaacataaaaggtaaataaaactaagtccatgtcacttatgaatttatggtcttggttaagaaaaatatataaaaagtaattataaatatgtcatgtacatgtgataataggttatagagctatggatgt

SEQ ID NO: 79576 - DNA, 2747 bp, Homo sapiens
tatactttttcaggcatgtgttttttttttaaattgggctattaaaaattagaaaaatatgtttgaatgcttatctgattttatgtatggaaagacattctaaacataagaagctatttaaatcataaaggagactgggcatggtggctcatacctgtaatcccagccctttgggagccaaggcaagaggattgcttgagcccaggagaccagcctgggcaacatggcaaaaccttgtctctatgaaatataaaaaaaatagctgggcttggtggtgtgcacctatattcctagctacttgggaggctgaggtgggaggatcacttgagcccaggaggtcaaagctgcagtgagatatttgcaccactgtgttcctgtctgggtgacagagcaagaccctgtctcaaaaaaaaaaaaaaaaaaatcataaaaaaatatagatttttttccaaatatatttttttattttaggtacttttacaagttaataaaaatacttaaatttaaactagaaacaggcaagagatatgaacagatgaaaataatgacagccaggactaaaactagttgatagatatcttttagtatgtgattccagagtttctcagaatcttgcctaagaaaatggcctcctcctaaattttactgccatagcgaggattgggaacttggactgttttcctttttggtgggcaaatgtaccttgactttttattttttagaacacgtctttattttgacagtgttcaaaaacattgctttatgaagaaatacataataaatgactttatttttcagtaaacaagataaagctgcttcttcaaaagaaaaaaatggatgtaatgcaaattcatttgaaggctcatcaacaacaaaaagtgaagaaagcataacagtttcagataaggaaaatgaaacctgtcttgcagaccaggaaactggctcaaaaaacatcgtcagttgtgattcaaatattggtgcagataaagtggaaaagaaaaaacaaatacaacacgtttgtcaggaaatggagttgaagatgtgccaaagttcagaaaacataatcttatctgatcagattaaagatcacaactccagtgaagccagattttcttcaaagaatattaaggatttgcgattagcatcagataatgtaagcattgatcagtttttgagaaaaagacatgaacctgaatctgttagttctgatgttagcgagcaaggcagtattcatttggaacctctgactccatccgaggtacttgagtatgaagccacagagattcttcagaaaggtagtggtgatccttcagccaagactgatgaagtagtgtctgatcaaacagatgacattcctggaggaaataaccctagcacaacagaggcaacagtagacctggaagacgaaaaagaaagaagttgaaattagtcattttaagtttcagtgtaccaacgataagggcatttggaacagtgctatcaggtgagctcagtggtgctgttgtaggttcagaaatggaaatatgtaagggaggtcacacatacactttacctgtatgttcaacctatgttatcaaacaaatcaattcaccaataatagcatgattagtagggattcccaaaaagtttttaaaaacacgaacaggattttaatgataattaaatttgcagtggaaaggtctcatttaatggttttcaaggaaatgggatttggttgctgacatgaattgatgatattagtaatatttataaagcctttcaaacttccatcaatcctaagctaaaaatctttattacctgtatatccttttcagttaactgagaggaagggatttggaaaccatgtacttttggggagtaattgattaaaaacaatggctgattggcattgttaatgaaggctttatttgtgaggatgatgctggtaaatggagcatgcttagagtactaaattgatctaatgagaatttggatgaacataaacttaattttggatttaatataacattccagtcagacgcatgtaaacagaatatttgaatctttgtacctccatacaagtgttagcctgccaggctgtaagcttaccttaattaaactttcagtgaaagtggaattattaagatataaatttatatttgtgctttttgtcagtgtgtaagctgtgtagaaattctttgatgtattagttgtattaatgtaaagtagaaacccattgttgaaactcctgtagctattatgcttttaatattgttttaatgatcttccttagaaataggcccataaaaatggtctggaagccaaaccaaagtatggtataatgtagatattgtaaagcagtaaactgaaaacatgtcctggcatgtattcagccatgtttaagtgacttttctgtaattgtaaaataaaaacttcaaatgggacctaaaacagtgatgtaaaagaactggttttggaaatttagcctaatttatctataagatggctgctaaattgatttttcagttctttttatcatctagaatataatagatatagaaatgaataatatgaagaacagtagtttgctttgaaatactaataaacttttatttaaaatgcttcatttttacttcttaaaatgtgctttggattcttaaattttgtttcactgaatgttcaatgttttaaatggcgattaaaatactctgctgtatatagtagtttttgagtaaatatttgcaataaaaatctgcccccgaataatt

SEQ ID NO: 79577 - DNA, 1058 bp, Homo sapiens
gtcgggcatggtggtgggtacctgtaatcccagctactcagggggctgagacaggagaatcgcttgaacctgagaggtggaggttgtagtgagctgagatcataccactgcactccatcctaggtgacagagctagactctgtcaaaaaaaaaaaaaaaaaataggaaggaaggaagttaagttttagcctctttggtaagggaagggataggtgcctgttgtgtaagttgcggggaaggagcatttagatttcccagcaatgctttgtttttactttttatgtactaaatagtagactgaccacctgcaaataccaggtgtttttggttctctgggcaaattgatctcttttccttgcactcctccactgcagacattcattgtaacttcctccatactgctaaatcagtaaccactcttccaatgactttcctgtttctaaacatttggtgaaatctgtttagcaattagtatactttggtgttttcttcatctttatgagtaaaaatattttatttctttgcccttgttttagcagagttttgagacggtgagtagataagtgtgtgtgattaatacaccattatcaattttacaggcttgagtcgatctaccatagtggttaagaggtagatatagatttgaatctttactacttattgtggtattgccttgggttcccactcaagtcttatttctcatatattgaaatagtgtttataaaatctaatatgtagattaaatgagatagtgcatgtaaagttcttaatatactgcttcatgcatcatatgtactccatagctggtaattgttacaagctgttaggttggcctatggcttactgaggttttacacttttcttgcttccctgtaaaacatttgaaataagtagaatgtttcttactttgtgtactgtttcatgtttttggtttgacagtggaagggttaccatgactcaatatgaaatcataaattcagaaatgttttatctaaatacctgtgcctaatatatttatataaaatactgtggatgcatcttgttattcaaattcaagt

SEQ ID NO: 79578 - DNA, 3413 bp, Homo sapiens
tggtgggtcattagctcagaactttgagcttagcaaatttctgtcttctaccaaagtaattgaatgtctaaaataatgactatttcagcaggtatctttagtaaataagaattataggtaagaaaatttttcttttctaaaagtgttaatgatgtgttagtagtattaatcttaaagtatacttttgtagttcaaagtttgagtgtacattttagtgatgcattttataatttaaaatttattgtgtgcttttctaaatatttttaagatttatttttctaaatgtgttcactagttattacgattctgttccttaaagagagtactaatatggtaaaaggcacaaaacaagattgaaatcataggcctcttaatgcaagttatttcaataacttactttgttctcacctaccagtttcttgccagtacaataaagagtgataaaaacctctgtcaccaacctccatcacagagatagcaagaggactgtgtttcctctgttgaaatgccagcaataatgaacatacttaacggggctcattttaatagctgcatacaattaatttattataataggcatatgctaaaatgattagcatggtgatatttcttttataagaatataataggtcttactttgataacatttactacgataagttgagggagaaaaatctttcatgaaatatttaaattgttctgtgaccaatttgtttttcaaactgaatttaaaatgactaaatgcttagaaataaaaatgagttgtaatatacacatttatttcaaaacttcattaatttgctttttcatgctttttgcttttttagactaatgtttcatgttttcttagtacttcataactaattttattcttaaaacttattttcctttatactgcattaaagcagtgaagttatactgtatacttgatgtgatctcatctttataagtattgtgcacaattaaatacttgagacaattacaaaatctttaacccccaaaatgattgacatttgtgtcttttgtcaattttttctgcaagttttattcattttaattggcttaacaagttggttgtaaattattgtagtgcactgccaatatagtggttttacaaaggacataatctatattaagtagcagttttgcctaatagctaaaatacagataagtaatttcatacagttaattattaatgtttaacaaagtataaacatttatagccctaatttttcaaatatgccctcaaaggatggatgaagaaggagggttttgccaactctgtttcattgattagccatgagagtagcttttaggatggttgacgtttctatcctattagatatctttttttttgtcaatgaaatttaagataatatagttgctgcttatgttaaatatgttattccttaggtatagctattaagccttcataaaattatgtatcacttaactcttgattaatgacatttcagatcaggtaggtaccctacttacacagattaaaattgagtttaatgtataatatcacaaataatatttagtcatttctgcagcttctaaaacaaagatcctttggataagctagttcttagattaaattgattattttacaagattttctggatggcatatacctttgttaatgttttaataagttataattaatatttttagaaatcaagaagttttaatatttgagcagtgcttatggaggttttaaagagaatatattcctcaaaattctaattacttctgtgattttactgcctccagagtaagttaactataatattgttatatttagttgaatttcacaatagataaaatatttatcttttttcacttaagtcctgtaatcgtaaatactgatgcatattacttatgtaagcatataacctgcttttaatttttaaagagtaattcttgttttgaaactgttttactaatgtgtatgtcttttattttaaattgtacttagcaaagagaacatttcttaagtgtccttgtttttagagaacaaggaaataaatgtctttattgatttagcacatttatcgaatctactatttagtctcatacgtttaacttttaccttaaaacatttacagaggtcaatttactattaaagtataaaatgtacattagtttcgatctacattttaattattttaggctggcagagaaagaactgtttcatattttaccatcgtacatataaaataaaatattcaatacttatcttgttttcaagattaaaaaaagaagctcccgcaaaggaacaagaacctgtgtctaaggtaaagtttgttttactttataccttaaaggtttatacatttgaaagtattattggtatgatataaaattttttttcaatttcagcatgcatacatcaacaatatttgggatgttgtgaggaagaaaaaaaatcgagatttaaaatttttcattacatataaaaatatctagccctaagtaaaattttaaggtattcttgttttgacaaagacatcttatatttcacttgcctgttatttagttcaactagtgagtaatggagataaatttatgaattaaaaatccccaaatcagtaaaacctcaatcatttggcacactggaaaaattaatctttccaggtttaattttctgggatattttaactgtcaaaaggttaaactaatttttaaaatagaaatattttggatgtatcttaaatatgttttaaacaagtactctgaatgcagaactcagaattatcatataaatgttatttaccggacagtctaatagatgactgtagaaatagttttgctcaactacttgctttcttgatgtcaatttatgttgatattacttaatgattgtttgcctctttttgagtgtaatgaagtgaggtagatttgacatttatcttttgaatactttgtcttgaatggcgcataatataagtgaaatccaggcagaagtatcagccttcttccaagcagctttcttttgtaccatagaaagttttcttttgtttaaaagtttttcaactacaaatttctttaacagatgcaggtttttaaattttttaatctatttcttcttgagggagttttggtagtttgtagtttttttgaggaatgggttcattttacctaatatgttgaactcgaatcttatgtatattgagaaagttgcttatagtatcccttattgtctttgtaatctttggaatctgcagtgatatcccctctcattcatgatattgacagtttgtgtgctttttctattcttattatatattttaattttaaacatgttgtaaatacacagaatgcagtattacagtttttactttagacagtttttttagggcaattaaaaactttaaaattagctttatatttacctttatttttaccat

SEQ ID NO: 79579 - DNA, 3782 bp, Homo sapiens
attttttacagggactatagtcaactgatttcataatcaattaaaccactaatatcatgtatatattgcattatgggattttttttgtgaaatgctgtatcagaagagaatctggacctattctcaaggtgaaatagcactttattctgctattctcaaaccagtaagtcattaattatctttcataaatgtaagcagtaagtaaactcttaggaacagaatggcagcctttttctataaatcttatattttaaaatattatttctgttaagagatacttactgtcattgaacctgtgaccattgaagatatataagggttcattccattattttcctgtgaaattttgaacttacttggaggaattattggctctggtcataatcctaaattataactctgtagctcttatgtgttcaaaattgttgggagacttcatttcattaatttagcaagattaaaaaaaaaaaacaaactgatctattgagttcattttgggcttgtttccttctttaaacttttgaaatgtgaccgggattttagcccctagattctctcatcctaccatagacattaatatctcaaaccgatctttaggaactgtaaaatagttcttccttttcaaaatagacttaatatatttgctcctggtatgtaattgcaagtggtttctggcaatttggacttctgcctttgatatctggtaagcagggagaatttgagacccagtgagatggaaaaataaatgaaactttagtgtagtctttcatttaggacaaactgtaccaatctctaccagtgattctgaggttactaccatttttttcagtctctggttcctgagggttgttgcttatagattataaattaaatatccagggtataattcaatattaccaacaaaccaaaataataaaatagagtcctagactgtcattaaaatcttctgcctacattgatggtcttattttttttcttcacgtttttacacatgaatattttggtcttttttatttcttgtctctctgtctttacctagttctttcttctgtctatctaaaatgattattctgctctttgttataatagctttagatggccaaatcataccctggtgttctaagattagcagatcatttcatactagaaaaaatagaactggtcctaaggagaatagaccagcaatcaaaattaatgtctgttgggttgagggtgaggtggaaacatggtatactaaatttgttgtatactctcaagcagattctgagcaagaagattgattctatactctacccatacccatgacaataataactaacatttactgagcacatacagtgtggcagacacttttctaagtgttttgcatttatttactcatttaattctcacatatttgtgagatatgagctgttactgtctgattttatggatgagacaactgagatacagatatgttaaataatttgcccaaggtcgcacatacctgttaagtggagagcctcaatttaaattctgtcagtctgtcttcagagactaaactactcagtagtatcctctattgcttctctgcttctgcttgtagttccaggtgtacatcctgccttgtttgtgattggccaagaaactggataggactaagcttcagtgttaaggccctctttctgcagaagggtaggcagcaactgacacaatcatacgattgggacagtaatctagcataccagtttactgtcccaatcctatgttctattgctcaaacttcatagaaatactgccctaatgatgtttgggcaatataacatttgagcaaagaatggtataaactggtcttttagtaggattaatttagcagtgatactcagcatgttttagagtggaaaacatatagaggcagagagatcagttaaggttttcagtttccctggcatgatcataagggagcctggttcacaggagaggaattggcttgaggcagtgcagtggaaatttgaagtagaacccacacatttaatcctccttctattgcttaatggctttataactttagcatttttaggcctcagattttctcatctgcaagatgggggtagttgaataatataatctcttaggacccaagtctaatacactgtgatgtttctgaactgaattgtcaactgtttgaaaaataacaaagtgtattaaaaatggaggagtcattctctggatgttgattttgaagttatatgaagagaagtgatggttggtggccaggtgtggtagctcacacctgtaaccccagcactttgggaggccaagacaggtgggtcacttgggctcaagagttcgagaccagcctgcgcaacatggtgaaaccccatctctacaaaaaagtataaaaattagccaagtgttgtggtgtgactgtaatcccagttactcaggagatggtgatgagaggatcactggagcctgggatgtggaggttacagtgagccgtgatcataccactgcactccagcttgggcaacagagtgagaccttgtttaaaaaataaataaataaatagaagttgtggttggaattgtgtataaggatgagatacacaagaggcaggtctgagtggtaaatatttccatatgaatgttctgtaagcaccacaaatccaatatgtccaaaactgaatttatttttccctcaaagaatgctttctcccttcttcgaattccatatcatgaataatctcttaccagccagggcaggcatttgagggggtcatatttgttctccacatttacctttatccagtgtatacttacattcttttggttttaacttgttctcatctccctaaaccaaccttttctccattgacactgttactgttttaattgagaaagtcattaactgtctcttaactggactctcagcttgtcttctaccaatacagacctttgtctttctgatgcacaaatttggtcatactttcctattagcattaaagttcttagcatgaacactttagcatggcaatcaagaccttccctgaagaggctcttgtatgttttcagtttcatcttggactactttgctttgtgcctgacatttcagtgatatgagaccaccaattctcatattgtcatcttgtttcatacttctttgctttttcatactttctctgtttcatacttctttgctttttctctgccttggatctccttactctgctttgctaattcttgctctttttgcaaaaccaagttcactgtagtatcttcattgcttccttgcctctttccctttcatagtggcttaggtctctgaacaaagatgtcttttctaaaccttttcataatgtaaacatttgcttcattgtgttttcttcacagtgaactccttgagaggagagacagtcttttttaactttggactggaacacttagtacaatccctgaaatatgtacaacctggtaaatgttttgctcaggcatcctttccacatataaatatattgataattctcagaacaaatgatcagaaatggtagagtagatgttttactgttatgtcttagtctgatgattactatattaaatttagtccctgaatgtctcagtgaatggtctttttattttattttgctgttttttgtttgtttttttgagacagggtcttgctgttttgctcaagccagagggctggattgcagtgtgcagtcatggctcactgcagcctcaaagtcctgggctcaagcaattctcctgcctcagcctcctgagactgagctgggactcaggtat

SEQ ID NO: 79580 - DNA, 1030 bp, Homo sapiens
gattttgttattcctggtggaggtttggggaggtaggggcgacctgtggggtgggggcaggttctgtaaccaatcccctaccaataccagggaatgactgtactgctttgtggtcttacatagactttttttttatagtatgtatcaaattcattttcttaaagtatgaattcttaaagttctttcccagtaaattcatttttaaaaaaaggttcaaataaaacacttggcagtcagtacaaagtttgcttattgtaagcaattagttgaattttcagtttagtgctaatgagttttagtttgagtctaatccctccttaccatcattttattctagtttattcatctggtcagatagccatttcatgcatatgtgctttttggttactgttgaataaaatatgtgattggttcagtttgagtccatcatcattcttagaaaaataattattaaactacagaggctcagattcttgccctgtttttgtcacattttggcaaaacactttgcctctttgggcatcatgtatttattcagcgaatatttattgagcatctactttgtgcctggcattgtcctagtttctagaaatatagactaatctctgctcttatggaacttacattatatttgtgaaagacaataaaagtaaataaaacatataatatgttagatgatgatcaatactatggagaaatatgaatcagagaagggtgataaaggagtatggggtaggtgttggaaggctgccatttttaatttagtgaggcctcactgagagatgacatttgagtgaagacatgaaacaggcaaagtcaaactcagtcatgaaattgttcttttctgtttctcccttacctccatttctcccctcctctgttttcttgtatatctacctggatggatgaattataacaaaatagaagtaaaggtttgagttttgtaagtttctttttcttgacaaaaagttgagaatagaatgataatttcctctaacagatcttgagagtgtaagaatctgtggtaaat

SEQ ID NO: 79581 - DNA, 1846 bp, Homo sapiens
cgcctgtaatcccagcactgggaggccgaggtggggctgatcacaaggtcaggagttcgagaccagcctgaccaacatggtgaaaccccgtctctagtaaaaatacaaaaattagccaggtgtggtagcatgagcctgtagtcccagctactcaggggcctgaggcaggagaatcgcttgaacccaggaggtggaggttgcagtgagctgagatcacgccactgcactcccgcctgggtgacagagtgagactccctagttcacagtgctgagatgatgaggaactcaagtttgcagattttagtattttattaactactttagctagttcagtgttaagtaagaataataccaaccttgatggttgtagtgagaatcagatgaaataataaatgggaaaactcttgacacataatgtacaatcgatggtggctaaaacgtgatctgtttttaaagccttcccatttttcttctgattttatctccaactgaataaaacaccagattctaagtaagctccattcgagcatagacagtactatttcttgttcaccattatattcacaatacctagtagtacagtatatataaaaatagctccagtaaatatcaagtgaatgaatacgctatgttcactttgcagatgcgtgggaggacaaatagaatgtgacttgcctaagttacacaagttggttgtggagccaagactgactctaggtcttctgactcctaacttttaacaattggtatgacaggtaaaagtgtaaaataaatactttctgtaaataaatggtagcataatttggacatggctatgtcatttaccagagaataatgtcagtttatgtcaaatttatataacaaaaatgggaagttatagttatgtatggcacaaaaagcaaattatggaaaaataatcatcaaacttataagtggattttcataaaagataaaaatctttttttaatgcttttttttttaggggcattactctagtgtgccttaattgtgatttcctaagtgatgtttctggcttagataatatggctacacacttaagtcaacataaaactcatacttgccaagttgtaatgcagaaaggtacgtatatgtaactgtgctactttagatttttgacttttattccagtatttttggtcatccacaatatggtctctttactaaatcattattctcactcatcatatttcatatgctgttgtaaatgtaaaacttttcttctaatttcagtttctgtttgtatcccaacttctgagcacctttctgagtaagtttaatttttattcagtgcattttactttgatggattttagcactattgcatttttaaatgtatcattaatacgaatgaaaagtattaaagtatgttgttgtttttttgttttttttttaaagctgcttgttgaaataggttcctgctctatggagctcgtgacctggtgcaagacaagttggaatttcctaagttcaaagttctgagatgttttcttacacaaaggcagttgagcagccaagttcatgacactagctctcattattcagctcttttcagctttcaaatgggactagattcttattccaccttatctttgtgtcaggttgacatatcttaacatatttttttttctccagtttgcgctgtctaaaaataacatttgttgctatggtcttttctttgcttacaataatttttgtttttctctgctgtacttgccttcagaataatagattccaaattatatggctgtttgtcttttgtctgtttgtctgctttcttaatttcttatacgtcttaagttttaggccagataattgtctttttctc

SEQ ID NO: 79582 - DNA, 1047 bp, Homo sapiens
agacaccattccaccatgatgccacttttggaattctttttcattaattcattcaacttagattatttgagtacttactatttacactatgttaggaaaagccttcagagtctgcattattttcatttttagatctcattaggggaatactttattccttcagaatgggtttgtattttttttaagtaggcaaaagttgtttagatataaacctgagagtttgctttttcaaagtaagtttgttcagtttttgtttaaaattagaattaatgtattataagtgactttcttgcagattacacatgacttctctgttacttgctggtcattatcaactactgctttcaaggattcttctaccttttttggtggcttcagcacttctctcggttttcccatgtcttcatggttggcctgacctcatggtatcttgcttctttagtgccagcatttcacatcaacttttaagttcatatattgtctttttttttcttgaaactacagtactatttaaatctcttcctataaactgttcattccttttggatttccattaccccatgatgttcagagctttgactcctttttccagcctagtagcacccatcttaattttgtagtcaaccttactctcaggatcatctgttttgattgtggctttttgtcctagaatcctttacatctttagtcatgctcactggcataaaggccaaggtaagatttgaacctcttctcttttgaacttcctctgtgctcacttctagactatcaaatggtccttgatttagtcaactctgatttcaaaaactttaattctgattaggtcttatttttttaaaaaagatctctttatttttacctgcaacatttgtttaatccttcttcagtaccctaaagattttattttagtttctcagttgttaacttggcctattaattagtcaattgtaggtcatcctttttatttttcctaaaattaactcttttcaaccccacgtatttttcctgttaccttcaatcagacattaatcttaaaaatctaacatg

SEQ ID NO: 79583 - DNA, 3276 bp, Homo sapiens
tattggacagcattggtttatgtaaccacttctataaaataaccttctttgaaatgtctggttagatttatttggttttagagagtttaatttattttaccaacttttcaaccaactagaaatagcaaaaattagaaataatttcctttttctaggataaaaacgtagtacatctcattttcaaagtatgtgtttacttcaagtttataatcgaaagagatttctcaccacaattaatagaagttttattagaacctattgatagaactttcatgtacagttcttacatagtagcgaacacttttgaaacccaaatactaatgtaatgacttttaaaaaatgaggcattttatattattatgataggagatgttaaaccgcaagtttttacattatttaggtatcattaaaattaagtcagcagtttcaggacacaggatttgtagtttttgaaattatttttccccctttttctgtttttttctaaacagaaaaaaggaatacatcgttgtacaaaatgcaggctgcagtttttgacatgcaaggagaaaatggatcataagactcaacaccatcgaacatttataaaacctaaacaactagaaggattgcctcctggaacaaaagtgagttaaaatatattgtattttaacattttgtatgataatagaaattaactcctgcccggctttatatattgaatgtatttttaaatgacttcagatttttgctcagactctaattttaggttttaattttatgtgtagaaggaaaaacttctaaccattgttttgagttcagtgatagctgttaggttagagtagtagtcctttttaaaaagtacaactcaattaacttttcctgggtcaatgggttgtttcaatattttataggctatttttgagctttcagttgaaagtgtatatgttgactttagttgctaaactataagatgcttgagatcaggaatcatgttttatttatctttgtgtccccagcatctggtacagtgccttgagttccataagttctcagatgtttgttgcagttgttattactgagtttactctgagaagcaagttctactgctggatagcattgtgttttaagtgagcaaacacatgtctgactgcatactgatgattgtaatttacttttccctttttgccttatgtacatctgttttctctgacttctttatatacagtcagctcttgaatatttgctccagtggagggaaacagaggcatggataatccaaagtgaataatccccaaaacatttatttttggctttgggtactttcctttgaatgtgggtatgtctgttatttgaattaactaaaacaatataaagccatgctctgaagacatgatagcaagagaagctatccagcatccttccctgcaatccattcattccatgttgggactagacatgcagaacactaatgtaagcagtgcagtcctctctcattttttcccttattaataataataatattaatgataatgatactaaatgtttttatagcaccttagaattagactttcagtgtactttttcatacattctgttgtctaattcataccacaatccactgaggttaataaggcaggtattgccccatgttatagatgtgaagaagcatagagaggataagttccttgttcaaggtcacatggctaggaaggccttttgattcctggtccagtgccattgtatgttacccaagcacatgtatgtcataggacttccttattgactgttcctcaaataccggaggagggtatagtcaaatgattaaccagaatgttggtaggcacttgtgtttttcattgtcaaccaacagatgaaattaaacattttctcattctgaatactaaatgatgaactttgtattagtttactttaagaaatttctgaatattatttagccctctatgcagtataataaattgatgtaactcctcccataacatttgtaagcataaatcttgggcactgagcccctggaaagaggagatcacatttactgtagatctgtttcttttatagttgttaaagggtaatttaggcctttctagaattatttttcaggcttgagatttaaattttgagctctatgcttgtgaatttcttaaagttaagtcagggcataaaaatagctatggaatgtgctctttgtatattcatataatttgtattaactcctaattattcactgataactgtgttaacatataactgatatcaatacaaaaatgtaatattacaacttaatatcaagtttaatatcatttaatagtttgaacatttagaataaatgggagacttacctgattgtagtttatatgtgcttttttcaaaattcttgatttttaactatttttgtaccatgatattttaatattaatgtactgattaatctcttaaagcaaatcttctctttatttttgtaggttactattcgagcttcagttggacctctgcaatcaggagcttcacctacaccttccattagtgcaagtgcttctacccttcagctctcacctccaaggactaaaaatataactgctaaaaatcctgcaaaatctaatacaagtaaacctaatacagtcaaatccaacgcaagtaaacctaatacaagtaagcctaatggaagtaaatctaaatacaaaccaaaaatctctaatatgcaaaagaaacaaagcacattggctagtagcaataaaaaaagtaaagtcaatacagcattgaggaatttaaggtaatcttttattcctgatatacaatataatttaaacttaagtataaaaacttatactttagttaagagaacattattaaggctcttccttattatttttgttttaaaatatatttttatcatttttttaatgtctccctaaggtatcgtcggggcattcacaaatgcattgagtgttgttccgaaataaaagattttgcaaaccactttcctacgtacgtccactgtagtttttgcagatacaacactagctgtagcaaagcctatgtaaatcatatgatgaggtaagatgaattaaatgtgtaaattgccaattaaaattatagttcagcaagtttctgtttcaaaaacaaagttatcctattagaagccagtttttctcttcaaggagctaaaaggatctaacaataaggaacttttaggatattgcctggtcctatttctcagcatagtaactagaaattatgggactaaaattgtaagaaaaattaagctaatgaaattag

SEQ ID NO: 79584 - DNA, 2250 bp, Homo sapiens
tgcctgtaatcccagctccttgggaagctgaggcaggagaatcacttgaacccaggaaacggaggttgcagtaagccgagattgcgccattgcactccagcctgggtgacagagcaagatactgtctccaaaaaaaaaaaaaaaaagaaagaaaattacagatgttggagcaagatagcttggttttaaatctcagatctgcctcttaatatagctacaagattttagccacgttacttaatacttgaataatgcggataacagaaatacctttcttatagggttgttaataggagttgagttaatgtaggtgaggtaatgtgagtgcttagaactgttctttgcacatagttaacaagctgtttaactcttcacaactgtccctactgctactgttattgttgttgatatagatgtataaaattaatttttatattaatatcttaaatattattatactgtttctctcccacatttagctatttgtaaaatctgtgaattgtcatttgaaacagaacatgttcttttacaacatatgaaggacaatcataaacctggtgaaatgccatatgtctgccaggtacacatacattttattgtttttttaagtgtttggtttgtttgttgttttggttataaaatttaagcctattagaccagcggtcagcaaacttatgcataacttggcataacttatgcattatatgagggataggcagcaagctgggtttggtccacaggcttttgtttgcttatctctgtactggacaaagatgagtcctgttgtatgtagaaaaacaaacatatggacttactgtgctacatagggaagaatgtagtcatacaagggaaatacaaagtgctgttagatacaaagaaccctaccaaatgctttggcaaaagtatttttccaaagaagaagaatttgaaggaagaggaaagcaaggaaaagataaattgccattgccataaacctggaggccattaacaatctaaaggagaatgctgtttcatgtagcagaaaaacattttatagagcaagaggtgctaaagcttgaaacttcaagtcaagacagaaggtgatagataaaaagatctgataaagagaaggagatctagttttgttttgggatgtatcccttaactttgaaagctacgtttaatgtctcaaagatggtcttttggtgttgccttagtgagattcttggttgcaaaggcatcagagctagattagtagtacataatgttctcctgacaaattatccatcattgttcctttgtaattgcatatcagttttaaattttcaagttaaactaagccttctttctttttttaggtttgtaattatagatcatcatcattttctgatgtagaaactcattttagaacatcccatgaaaacactaagaacttgctatgcccgttttgcctcaaagttattaaaattgcaacaccatatatgcatcattatatgaagcatcaggtgagatttaccagttcttatttgtttattatgttgtcttagtgaaaaaactgattatgacttggagaatctttagatttgttctgcaagagaagcagagttgttccaaatgacactattaatttacacttcaagttgaattgcttgtgaaaattccacttcttttccttacttcctttctggtgatggtgtgggtcataaataatgaaaattctgaaagatagctagaaataggaagctgaggattgacagaaaaagaaaaagttgagtggaatatccaaaagattgaatatttcagggtctaaaggtagatatgagaatgattttgaagggagttatcaggacaaagggaataatgagtttgaactgaggaagaaaagactgaggatttataatcttatttttcgttttgctcttcaaactttatttcaactttctaaccccttatcattatgagaagacatgttgtcattgacctggagttgtcttttatagttgtgtgaccatgggaatagtaatgacacttactgatcagtatatgaactctggcagagaactatatttagatcatcacttgttccctggatggcttccaccagttttgctatataattttggaactcaatattagtgcttgtacccctcccttgaattctgatattatgcttattggctcttttcctgaagcaattaaaccatcttttatttgggctaaaaattttgatgcaatactaatcctgttcttgcgtgcttgaaagaacaacag

SEQ ID NO: 79585 - DNA, 1035 bp, Homo sapiens
acctaaatttttagggcactaacaaagcaacagaacatggtctgtgtactgggaggagtaaagataagaatgatagatagatggtgcctgatatttgtcaaactatagtatatggcattaaagtacatatttaatatttgcagaatctttaacccacaaaaataagggataaataaggagttgcagtgaagatctattaataaaactaaaaggtaccagggctgaataaaagatgaccagttgatattgtaccacagctcagctatgcccctccgtagcttgctctatcctcctataaaaccttaaatctaagcttggttctcatctcttaaggtgcttatttgtttttttggataagcaaggatactttgccgttctcaatgactaaatccttcaccctaattcactacaagttgttgtccatttttggttgtcaatggtttattattcagctcttttatagagatatgaaacattgtttaaaaggtactctgtgaacaaagtttatatgtttatttaaaaaatctgatcctatcctacttttctgttaaaaaaatagaaaaacagcaagtaatttatcatctattatgggtatcataatttatagctattttagggtaatctttaatgttcatagactaactttgcaatgttatttgataattttacatttgggacagaagattatccacatttctaattaaggagcctattctatattatataatttttgtatattttaatttttcctcaaccaggctttatgaaattttatatatcacttgataattaaatatatacatcaaggcatataaacatttcctttctatacatcttgacgtggacatgagatgaatgatttttagttaaggaacagattattattaaatatttacatctaaaaaggcaaattgcaagggtaaagctgttagagctatggccatgtcttggttttagggtttctcaaatctttttgaatttttacatgaagataataggtgtttattatttgaatttttagactatgtacatgca

SEQ ID NO: 79586 - DNA, 1622 bp, Homo sapiens
tagtgtgaaaatcattatacttactacttccattatgtgtgaaaatcattatactcactacttccattatgtgtcctttgtttttttattttttttgagacagagtcttgctctgttgcccaggctggagtgcagtggcgcgatctcggctcactgcaagcaccgcctcccaggttcatgccattctcctgcctcagcctcccgagtagctgggactacaggtgcccgtcaccacgccaggctaattttttgtatttttagtagagatggggtttcaccatgtttgccaggctggtctctatctcctgacctcgtgatctgtctgcctcagcctcccaaagtgctgggattacaggcgtgagccaccgtgcctggcctatgtgtcctttcatataaatgaatgaagtgttatcattcaagattagttatttccactttctgcgtagcgatgaatgggtaataccactcaaagccatgagtagaccgctcttacctactcttcagtttgttaggtaggaaagaactaaatttccattagacattttaagttgttaaattgaaaaaagcatcttaagagtatctctaaatttttgaaacaggtaattgttgtttttttacaaactctagtgtactcaatgcacttaagcatctaaagataattcatttgtcagaacttattcatagtatacttttttttttggcttggaatattggtctggctccctttgtgatagctatttatatatttctttatttgaagccatatttagaattttctttcatagagggattatttttttaattatttaaatgtatgtagtccatgataaatatatgtgcaatttctttacacccttgagtttggatcatatcaagttttatcattattgtcatgatatgataattcaattatattacctttaatttagctccaaaatatttttactcagatgtaaataatattctaattttaaaaaatatttttctcactatttaaattattgtaggtatgagtgaaagttcatttttatcaaaacgtccttctacttctgaagtaaataatgttaatccaaagaagcctaaacccagcgaaagtgtttctggagcaaattcctcagctgtattaccttcagttaaatctccttcagtgacttcttcccaggctatgctagcaaaaggtaaatatgaaatgtggtacataaaaagaagttatagtatttatacatacatttttgaagtggctataaattttaaaagtattattagtggttatttaaggttaaaaagtgatgaattttgagtcataaatgttctgaatttattttaggtacaaatacctcatcaaatcagtctaaaaatggaacaccttttccaagagcttgtccaaagtgcaacattcatttcaatcttttggatcctttgaaaaatcacatgaaggtaaaactctttcaaaatttaatttgtaaaaagtttgcacatttctaaaaatactgatgattacagtaattaatggtttgtccagaaataatctcattggtatttccatttaatttaaataaaaatttacattcataatgattatatagattctcaaattccttctaaatcctcaaattttaaaa

SEQ ID NO: 79587 - DNA, 1206 bp, Homo sapiens
tttggaatttttagatttactagcaaatcagtgcggagaatttaccaaaccctctcccagtttttttttaatagtaatacttttattataaacttaaactgtttttccaattttttaatacttgatttgatattcacctctctgggtgtcacttacgtatttagtaacaatctggtttgtgaaataggtaagaaccaaaagaaacagggagaaaaaaatagttgtcttaagtctggtttcataaagcatgtagatttattcatagaaaaagtctaaattcttgaaacttcttgggaataaagagaaataatgactcctattctttctgtataagtgttctacttcagtgagtgggactttagcctgagcagtaagtgggatgatttgatcctctattcttaagatttttgtagtctctattaagttacctaaccactttggttttctcatattgttaaaagggagattttaattttttttgtagaatgcattcattcttcacatctggaaccattcatttggacatgtaactttaattcttgctctacttagggattttttatgtccaaatccaagtgaaatgtgagaatacattataagctttaaaagacttgacaatacagttattctgaatgataattatgaatgatatgtgccacatgttcagtaacatgattaacacactaccatctagggagattatgggggtttggagaaaactggatttgagctaaatcttgaatgagaataggatttttaccagcagagagagagctgttgagggtagggagcaacacaagccaaacacagcagagaaataagttaaagcatcaaaatttaaaacaaatacagagtgattttatttaatcttgagatttcttgttttaaaaattcttaaagcagtctgtttctactgtccagcctcctatataatcagatgcttaattcagaattccagcattcattggtttttcaggtaacttaaacatctcacaagaatgtgaatgtgattatacagaatttttccaatgtacctacagtatatctatcagtaatcgagtattttgaagatggaaaaaaatcatttttatgttatctgaaaaggatgaaagagagaagccaagtagtataatactcttattttgctgtaatgtttgcccttattaaaaagctgacaggttaatctattattatatttttcccctc

SEQ ID NO: 79588 - DNA, 1251 bp, Homo sapiens
caaactaatattagacacagaaaaaatagtacaaacagttcccatataccccttacccagtttccctttattttaacatcttatcacaactgggtaattaacattaacccaactatagactttactggaatttcatcagttttcccattaatgttctttttcctgcccagtatcctattcaggatacttgcagttacttctttttaatttcctcgtattttctagttattcattctttctttgtcttccatgaacttgacacttttaagagtagtggctaattaatttattttgtagtagatattatggtaacatgccaattcattagttaaatgttgctgttgtttttatttgcatttctttggctggtaatttggaaaaaaggtatttcgtatatgttgttcattagtatttgacttctgaattctctcagtttatgtcctttgcccatatttttcctaaagtgatagccttttttcctttaatttttaatcattgttaatccgcttgttatgtattatgacatgtagaatggtccaaaagtcactctgagagcttaccgtccacaatgagtatcttttagaagtattaatggtattggagtatacttgtgtgtgtgtgtgtgtgtgtgtgtgtgtgtgtgtgtgtgtgtgtatgtgtcattatatttaatgtataataatatcggagtgtatgtccctaaattatattgaccatatttttcataattatgtacaccatgtatgtatgctcatatataactttatactgctttatacttgagcccattatcattcatctcatacttttcactcctctcttcttaagatcttccttttagtttggaccaccctttctcctgatggaagggctaaaacttcctttgagtcccgaggcctccaggagcaggacagctggccccaattattcccataaacaacttctgttctaaaccctgtctgcctggcattcttatttgttcactctactgaccggtttgctttcatatttgcctgataagacagaagattcctggcctagcgtggctttctatgggatgatggaaagtgtgtggggcccattttttctctttctgacacatagcttatacatttctccaataaagatgatttcaaaattcacattatgtgatatattcatccttaacactgatgcacaatactgcagattgattccgtttgtttgccctgatatctcagatgtgaggtttttagaagcatagaagctttt

SEQ ID NO: 79589 - DNA, 1041 bp, Homo sapiens
ccagcaattttaggcaaatcctcatgcttccaaactataatttgataagctagaagttacagagtttacatgcatgcaagaatgaggaactttaaattgatcctcaaagtcatggcaggctcagattgacttctggtgtagtggtaaatttgaaacctcttaactaataaaatgctatgatgaactattggttcactttagtctgcaatctctgatagtttttcttttttaactcaaaactaatagtagataatccgatgagattttctgtaatgcaacttcaaggcttttagacgagtgaatgcagtgtagaggttgggcaaggatttgattttgaatcataggaacctgactgtatgtaacagccctgtcatcatgcaaagaaagatatacatttaaattataggttatatataaatatgtttttggaaaatttttatcaagtatgtgatgtttctttgcaagcacaatgttttgactcacctgtagtcagatttgtcatttccttctgaattttggattttgagttacaatgagaaagattgttcttagtctgtaaaacaaaacctagttatcttgtttcttttgtttctttagtaggtaaagatgtatgtgtttaaaatgaactatattcttaaatcagtgattagttatatactccttccataaatctgtttaaatgttttcaattcatgatttctattatcttaatatgtatttcattcaaacaatgtattttaaaataaatataatcttttatagatattttgaacagagttaaccccagctcatattcaaggggactaaagaatggtgcactcagtcgaggtacagtattattatactattttaattttaaagtgaagtattttgacaaaattgattatgtacaaataatttccatatattgtgttactttaaaatacaggtattactgctgcattcaagcctacaagtcaacactacacgaatccaacatcaaatccagtgcctgcctcaccaataaattttcatcctgagtctagatcttcagatagttct

SEQ ID NO: 79590 - DNA, 1053 bp, Homo sapiens
ctctggcctgtgtaccaatagaagctgcagcttctgaccatatccgtcttccagcaactcctttttatattcatgaaagagaatggcgctgtctacagccactgtacttggatgatgtagcatttagtacatttaaatccttaaggcttttgggcagaacaacttggtacctttgtggcttattagctttgaattagagaattgggcttgacattgttataatattaacgtgcagatactgatgacatttgttaaaatgtccactcaaaaatgtatgacagtgcagagaaacaatgtacaaatttcagggagaaagagaaaatagatccttttccatttcatttacttgtttgtttgaagccaggagaatttaccaaagaattttatgtacccagtttaccagcgtgtgtgtgtgtgtgtgtgtgtgtgtgtgtgtgtgtgtgtgtgtgtgtgtttacttaccatggtagtgcttaaaagtgtgattaagagaccaaaattttttgaaagcctagttcttgcttcacttacctctaaacttggattggcacctttattcagttttatcagagagagagtaatttcaccaatcgaattttcaatactgtttcctggggcacattggtcatctctcatggaatgctaagtggagtgccacttggattataaaatgaattaggcatgatggcatcgtcggtgatagtgggacataatattctattggttattgttttatactgaaatattatattgcaaaattcaaactcttattgaaaacatgacagttaagattcaaggtgaatttatactgattgtagatgactcttcatggtattcgggtagaacactgtacattagttttaaaataattccatcaagaaggggattaaccccaacagaatttcttttctacagtgttaaggtgaataatttaaatggttttattgttgttttatttgtaagccataaaatatgttaacatatggaacatgagttaaatgtttatataaaactgcaagaaaggagggcaaaaacttgtgatccatagactac

SEQ ID NO: 79591 - DNA, 1491 bp, Homo sapiens
cttttttttggtagatggactatactataacattagagtgggaaatgatttgtgacattcttcctgtgagaaatatctactttgcctttaattgaataagcctaattagttttccatattctattctagcatctcttccctgctgtgttctgtgcctggcatttttttttttaaagacatactctcaatctgtcacccctggctggaatgcagtggcatgatctcagctcactgcaacctccacctcctagattcaagcgattctcctgactcagcctcccaaggagctgggattacagatgtgggccaccatgcccggctaatttttttctatttttaatagagatggggtttcaccatgttggccaggctggtctcaaactcctgacctcaagcaatctgtctgtctcggcttcccaaagtgctgggattacaagtgtgagccactgctcccatcctgcctggcattcttgaatctggtttagtttatccagtttatctcccacctgttgcctattattcttagtttatctgccttttgtgaatacatttttaaaaagacagtgggtataatcctttttgtagagataatcatattctatgtatacgactaaaactcactttcactgaatttgacttccaaattttctgtctacggtaaataactactgtcattgattatctgtttatctaaattttactatttaatattttagatagtaagctctgtatttctcactgttgttaccacatactgactacaaatatcaattcagaaattgctattaagattattaaagtacaccttaaaattaatgctatgtattacaaaaatgtttttatttttattttcaaaaatgaggtttacttctctccttttgaaaattaggtaattcaaaaatggcagaactgtttatggaatgtgaagaagaggagctggaaccatggcagaagaaagtaaaagaagttgaggatgacgatgatgatgagccaatctttgttggcgagatatcaagttcaaaaccagcaatttcaagtaagcatttacttttagtgaaaccaagctttataaggtattatttctagtagaaaaacttgtgaactgtttaataggtagttgatgttcatgttccactgtaaagaggaacatgattggggacttgaggaaggaggtaagagattaaatatcagatgtcagaaaagagaaatggactgagattagctggtgaccctggaggtcttctgagattagaaatcataatttttaatggagttaagtaattatttatttatttatttattttgagacagggtctcactctgtcgctagtctggagtgcagtgatgcagtcacagctcactgtagcctcaacctccttggctcaagcgatcctcccacctcagcttcccaagtagctggcactacaggcatgtgttaccatgcctggctaatttttgtattttttgtagagacagggtctcaccatgctg

SEQ ID NO: 79592 - DNA, 1904 bp, Homo sapiens
tgcctgtaatcccagcactttgggaggccaaggcaggattgcttgagcctaggagtttgagactagcctgggcaacataagaagaccttgtctctacaaaaaataaaaaattagccgggtgtagtggcatgtgcctgtggtcccaggtacttgggaggctgaggtgggaggatcgcttcaggtctgggttgcagtgagctgcaattgtgtcactgcactccagcctgggtgacagagtgagaccctgtctcttaaaaaaaaaaaaatgtattaagtaaaattttagcacacacttgtaaaggatgaaagactgtcacattttctttgagcagaacagcatggtccatattcttaatgtaaaaatattgtgtgatgaagttcttcccactggatgagaatgccgtatttcctttttgtttttagaaatacgttattctctcattgattaagtttgagggaatttatctaaagtaactcatccaaggactcagtctgagatttcccttataaagtcattttcactaccatcattaagagtctaaagtgctgctgtctatctttgtgttaatcttctggttcgtctaatagttgtgaaatgccttcctctgttaattttcttctcttccattttgggcagaaaatgaagtctgagttcttaattgtattcagtgaaaactagaaacagatgaaggggatcagaatctgccacttacgcatgaggattattttgagttgaaggcaattgagagtcagtagatgctggaagagttctgtgccctccccttatttgcctagtagtagcagggcattaatttctatcttttttcttttttttctttttgagaccgtgtcttgctcttgttgtccaggctggaatgcaatggcgtgatctcagctcactgcagcctccacttcccgggttcaagtgattctcctgcctcagcctcccgagtagctggaactacaggcgtgcgccaccatgcctgactaattttgtatttttagtagagacggggttttgccatgttggccaggctggtctcgaactcctgacctcaggtgacccacctcccaaagtgctgggattacaggcatgagccaccacgcccagccagtttccttcttataacagggagggaagagcaactcttttcccttgagattgagagtcaaggcagagatgagtttgtataaacaaattttactaaaataaccgttattttccattagttctcccattttttctagtcactttcccatggtttattgtccctgaaattccaagttcccttttttgggggggttaaaatagtataaaagcctctacgtctaaccacttgtttgagtttcacttcttttctgtgaactcctgtgcatgtcaatattaataaaaattgtatgcttcttctcttgtgaatctgtcttttcatagtttaattcacaggccatgagatactgaaccaaaggtgatagaggaattgttttccctctctgacatagactacaaaaatgtcttcagttttccatatgtctttgaaaattgatgcaatatttttgcaaaactataagaaaactggaaaataaatgagaacaattaaggctaatgcattagtcatgatttatttcactgttgtattattcttttaggcagtcctattatttttttagcatagttgggattaattgatgaacaatggtgaaataatacctagaatgatggagttagcaaaatatttcaagatgtaggaaaaataaagccactaacatcccataatgtattttagattgataaaaggattctgttatagacccacataataattataagatataatgagttttaatctattttaaagtagtaagtaaattttcccttctttgtttaaagatctctaggaaacaat

SEQ ID NO: 79593 - DNA, 1025 bp, Homo sapiens
ctttagggaacttggaatgcttctatgtgttggcatcagagcctagggagactaggagagaggaggcagaaagtagatgtcagaaagctttgccttctttgaaagtttgcttaggaccattttagccatagtaagctatggtaaatagaaaagttctgaagtagtttgatgttggaggattgcaagtgcttcaactggaacatctgtccagttaggctactaatccagtcctttttcattccagtgttctattaatcagcattggctcactgaaatagcagttttcacaaatgaaaagtcaactgtagttttaggtgacaggaaattggatatttctattgacaacatactttgttattccaaaagcaagttttggaagatgaggaatacttacgacatattcactaattaaatatataaatcctgaatagtttttttcttgctttagaaaggaattaaaaactttgaattttcagattgctttaaatagtgatttaaataatgacttgatttaatcagtgccttatatcaaaaattgtatgtttagaattttgatttatttctccagagcaattttaaggattctcttaaccctcagtatacgaggaaaagtgtacaattatcactatcatctgggtcaaaagggactggttttttttgcattttacgttattatgtataatttataggagtaaaaataaagcataatgtaaaacaacttattggagcttttaataagaatttcaatacagcagatatctttgtatgtacttagaaaaataaaaaataaaaaatctatttcatgcatttaattacataacactcctacaacaaatatacatcacatttgaacgctttgcataaacattctcattgtaacacacatttttttctttttgagtttctgtatctgtacaaagaacatctttctttcttcccattttcagatctgtgcagaaatcattgtggttagagggtaagacaacattcccttcctattttctgcaagttattttcctagttgc

SEQ ID NO: 79594 - DNA, 1557 bp, Homo sapiens
gggccgcgcaggccttcgccttctgctcctccgccacctcctctcccaggcgtgtgcgcctgtttgtccccagcctggttttggcttttctctctggaggcaactccctttggtacattttgtgccgatgtttggccaagacccatggtcctcacaccacagcccacccccgtgtctcttcagtcgtaggaaaggagaccaaaggggattcgggatttgcaggcacagggcccctcattttgcccagatgaccggtcgttccacgtttgcaccctcatttttgtcaaagagacctcccctcctctgccatagaattcccgttattgtctacagaagaagggccctgaggagaaacgtggagttggagacaaaattttctgagctttgcaaggttcacttactgagacggaaagaatgatctcactctgaggttttagcctgctccagcgatggaaggaattcctcccaacttatcgcaagttttaacgcttttaaggagaaatctgctggagaggaaaaacgtcaaggtgaacccgcttctgcaagcacgggagacctttggccaaaggcctttgtttgcgaagatttgttaaaaaaaaaaaaatctgtcatcttaaatatttggctttattttcaggtttggacagaatttgtcttttttagtgccatgaaacataaaatggaacgctagaaggacagttttaaagcacaaaagctgcctcttagcatctgtaaggtgtcctgctttgggggactgctgtgccaactccagctgtctccacgcagaaacttaaccagggaaggcactggtttgcttataccattgttagggctgtgtgcctctgatgttttaacatcactacaaatactgttgtaattgtgtcttgcttttgtgcctttcattgataacccctgatttgtatctcttagccccttttgaagtggtctgggttgctggaatcattttgcaggcgaggaaacagagcctcagggagaggactttaatgaggtcactgactaggaagagccaaggccaattatattaatagaaccttaggtcttctgactccttctccggtgctcaactctagtatataccatttttgtgggaatgaggtagatgagaataggcaaggaggctcacttaaagattttaagaaacattactcagttgccctttcgttgatatttttatactttacttttgaaatgcggttgttatgttgcccaggctggtctcagactcctgggctcaagctgacctctcacctcagcctccgtagctgggattacaggtgtgcaccatctagcctggcttttatatttttattctcgagttaatttcttaactttgcaacttgctatttttttcgaaaatattggaaagttaaatagcccatttgaacacttagttttaacgctacctttttgccatatttgcatttttccacttatctcacattctgttttctgaacgtttcaaagtgcattacggatatgacagttcagccctaaatgctgtatgtgtgtcagtatgtattttgtaagagatcaagg

SEQ ID NO: 79595 - DNA, 1031 bp, Homo sapiens
gaactgattgtccatgtatttagacataaaataatagattgtaaacttctgcattacacagataaatatctgagtttgacagtgttgtaggcattatatttattcatatttctcaagctcatgcagaaatctattcatatacttctcaacaaggcaggattacacagatctgccaatccctaaaattagtttttaaaaataccttgtacaagtcaaaaacatggctcatctctcagaaggttgaagacaggctaatattttacttttcttaaaaaaaaaaaagataaggacctactatcaggcaaaatttgtgaaaatgtagcagtaatacttagaggttgctttctgcagtgaattattagactttgaaagactctcatatactgcagaggctcatttctgacatcaagttgaaatcactttagcatgaataatttttaaaatgaaatgctttttgaggatggaaaagagccatactggattttatctggttattaaattcaaaaacggccttgtatcaagaaagtggatgttgtgccaagcattattaacatattctatttagaaaaatgacattgttactcatatgaaaacagatgttgctctagataaagttaaatgccttcacaggtctcaagcatgtgtacatgaaattacagaaattaatcatagttcaagcaaggacttgactccacttctgctgtaaagaaagtgtttgggttatctatggctgcatgacaaaccatcccaacacttaatggcttaaaataaaggttgggaaactttttctgcaaaaggccaaatagtaggtatgttaaaatttggtgcaccatgcaatctctgttacaactactcaactccagtgtaactcaaatgcagccatagacaatatgtaaacaaatggatgtggctatgttccgataaaattatatttacaaaaagaggcagtatggtcaagtgcagtgcctcacacctataatcccagtgctttgggatgccgggtgttcaagaccagccttggcaatatagca

SEQ ID NO: 79596 - DNA, 1199 bp, Homo sapiens
ggtcctggaagtcatcccggcgcccccagcgctcttgcgtaatcttccccagtacctctctctgttccctcacacactttgggcctcggtggtctctcgctgagcccgtttcctctgccctaggacctgctagaagtggccgaagatgaatccccagcaacaacgcatggccgctatagggaccgacaaggagctgagcgacctactggacttcagtgcggtatgagagctttccatggcatcttggggttctgctgaggtttttgtttgtttgtttgtttgtttcttttaaataaagggtgaggggaagcaacgtggagactaggcagcgtgaactccatctgctttctgcttaagcagtagttctcagggctggagtccagctcccccaagttggacacctgaactttgatgtaatgtctagacttgcacatttaaaactttaatgccagaggggtcatttgatttaaccagttaaaaggagaacaatgtaattatgacctttggttgagtcaccctcccaccgcgatgattattggggatcttgtactttatatgaaaaagtgttgtttttttcttcagtactcctcaccattttcctctccagtatcagatgtagtttatggtacctgaaagatgtcagcgacaagaaaagtagtccagagctagaatttcgagccttctgaaacagagtacttttattttatacacacacacacgtgtgtgtgtgtgtgtgtgtgtattatgttcttaacatgggaaatgacttaaaaacatcaactgaaacctaagggcccactgcttttatttttaatgggtttaattcctttattaactgctgttaggaggcagcacctatacctgctttatacaattcagttataatccttactgtatgtagtaatttaatgggccataattctgactgtgtatattgagatataatgtaaatgtaatgaaattcacttagttctgcagtaaagatcatgtgtaatactatactgtttaaacttaataatcttggactcttccatgtaaatgatcgggtcttcagaacaaaatgtaaccattatttccaattaattaggaaatagtatcattcagtgtatttgcctctctggatctgaatgtatctccaattttattttaacttccctctgaaatttaataactgatggatgacttttggtggacttttg

SEQ ID NO: 79597 - DNA, 1766 bp, Homo sapiens
tcataaccacctaaacactttataccactttacattctaaaaagtttgtttttaaaaattgtatactaatttattaaaattcatttttaattatgaaattagagcttatggggaaagtatagcatgtccttaatcatcttaagtaagtgaaatgaaggcattttttggattttaagtagggtaaagactagtattattcttgatcaaaaggacatcatgaaacgataggcaagtcccaactcttctctcacctccttccttttactggtaatcatttgaaaattgttactttttggggaggggggagaaaatttaataatcttaaagttgtagaagatggctgtatttctttactggtgttgatacatctcatttttgcaactaataattcattctcaggaaccttcagatttactttgactaatacatagtagatgatgcttagtattttttaaaaatgagtcttgatattactgttgcctactgttccagcttaagttatggtaaatatatataactggacagtcactgatacaataacatgaactccaggaacttgctgttagaagtgcattctatttttagaataaaggcaattacatttatttcactttttaaacttaagaaggatttatgtagtctgtgaaattaaaaagtatgtgaactgggatatagattataagcatggcattggagcaatttttggacttcagtacgttgcattgcacaaagaaaaaattatttttctacattgcgaatggtcaccatatttgattatttggagtaggaacttttagttttaaaagttagatttgttatccattgaaaggtttgaacttacacacctgtagtcagtggacttagcaatatttatctgtgtgttttgttttaaatgctacaaaaaattgtaataaaaaagctgtgacttttaattagtgaatggatttgaatttggggaagagaaaatgccatgtgattttttttcaaatcaagatgtactggtagatataatttttctgtggccagttcttaaagggaatgtctaaaagaaattggtatagtaacattattttacttatatattttatatttatataccttattgacatttgaataaccttctgccctgatttcaaaggatattatgtaatacactctaatgcctatgtatttgcagctattaaggagctaaagatctgactttccttttgaagagctgctgtagtaaagattagggttttttgtttgttttctgttttgtctttggagtaacatttataaaaactacatgccatttgacttatgaaaactagagtttatagtcaggtattgtaatttcctttcttatttgtcctttttgaggaagactcaatttcacagtgggctgtttttgagaaacgatatataatactttcagaagcttttttagctgaaagaatatatactatagcatgtgatgttatctttaatcttattcctgaagcaaaacaaataactcatcatggctgagttatttatgagtgtcggaagtcactctggaaaagataaaggtgtgtttactactactaatttgtcttgaggatctgttatgttattccttcatcagggtgttaaaattttcttcacgttatggtgagagtgaatttgttcacttggtatgataggctctgtgaagtgttcctaaagtgaccttgagagaaacttttctttctgtaggagtgaaaggtcaggcactctaattagggcagtgtatagaaacaaagggc

SEQ ID NO: 79598 - DNA, 1388 bp, Homo sapiens
tgaaaaacaaggtcgggtgtggtggctcatgcctgtaatcccagcactttgggaggccgaggtgggtggatcacatgaggtcaggagtttgagaccagcctggccaacatggtgaaaccctatttctactaataatacaaaaacttgctgggtgtgatggtgggcacctgtaatcccagctactcaggaggctggggtgggagaattgcttgaacctgggaggcagaggttgcagtgacctgagatggcgcagccagtgtactccagtcttggcaacagaatgagactctgtctccaaaaacaaaaaaaaaccacaaacaaatggtgtccaccgcccccccacccccccgccccaaccccgtagtcattgcttataatggatttgaaaaacaatttgattagatcacaacattttaggggcttgtttattatatatagtgaggcatacctacaattactgtttttgttttcattagccatttaaacacaaattcaagtttctgtcttcaaggtatcctttgctatatctttgagtttttaaacaagccttttgaaatgagaagataaagatgaagatatccaaccttgactataaacaactttcaaattttatacttaattgggcaataaacaatgctgtcttattaaagccatatagtcttttctgctcttaaacaattggtagtcttttcctggaatgtcattgtctgcctagtgttgtcaaagacttgggtaatcttgctgaaagaaagtaaaagtagcactattagaaaggctctcctgaaaaagaaaaagaagtgctatttgtggacaatgtgtggaatgcctttttaaaagatcatttaataagactgcttttgggtatcacttgaaagtatgtttatggatgggaatgttgaaattgcaaatctaaattgtttgtgtttagggaagataatgagaagacaaacacttaaatatattcaaaagactaatgaatgacagtctgctttgttaaatagttgtgccataagtatctcatttttatcagttaactatttagtatttacctatgcattcttctagcagtttttgggaagatgggaaatggagaaggtcattgctcagaaaaagtggagacatttcgttggcgtggtggctcacgcctgtaatcacagcgttttgggaggctgaggcaggcagatcacttgaggccaggagttggagaccagcctggccaacgtagcaaaaccctgtctctaccaaaaatacacagaattagccaggtgttgtggctcatgcctgtagtcccagctactggggaggctgaggcaggagaattgcttgaacccaggaggcagaggttacagtgagccgagattgtgccacggcactccagcctgggtgac

SEQ ID NO: 79599 - DNA, 1182 bp, Homo sapiens
gaattgttttttgcattttatatttcacatgacctgggactcttctggctaatttggagatgtatgagggaagcatgctcggtaaagatgttggttaaaaagaagaccgtcttttttctgcatataaagttaatacatagtcataattgaaaagaaaattagagaacagaaaaagcaaaaggggaaaaattagctttatttcagtatccagagaaaattgatttatttcctttttgtctttttttcttatagttccgtttgcaaagctggtaacttaatgttagttcatttatgtcctgttttttgtttcacttaatcttctaccattaacattttctcctgttattaacttggcttaaaatagttgcatgctcttaaatggaatgaatatagcataacttaacaaatccattcttttattacttgacctttatggatttttgttaatttgctttttgatatgataaataatgtggtactgaccacctttttgtgtatgtatatgtttttgcccacattctgatttcttttggttaggagatgcaaattttgttttttgtgcctacaagttaataattaaaactaatgaattcccttagggaaatgaacacagagggagataaattatcaggccagggattgatgttaatggtggagttacatgtataaaattagtgactttggttgattatttaatgtaataatacaaaattttattagtatgtgaatggaatgcattatgacatttggagcacatttgtgcttgtatacaaatgtgttgtgtggtgactggagggaattcctgtcattctttgacctgtgcttatagaaatggagtggagtctaattggagtcttgtcagtgagagagcccttgaattcctgactttttgtgagagagacaatatagtgtattggaaagaattgggctcaggagccagacaactggattggaatcgatgacttgcagcttactagctggatggccttaggtgagatatttaaataatcagagctatacttttttcatttgtgaaaagtgggtaataatgcccacctacagaatccttgtgaagattaaataaggttatctatatatttttttcctataaagctgcttaaaaaatggtagctgctattattgtggtaccttctaactagcattctcggtaatactagtgat

SEQ ID NO: 79600 - DNA, 1728 bp, Homo sapiens
tcctgagtagctagcacctgaaaatgctttttaaatgatggtgcagtgtacaatgtgaagtattatttattgctaaagtccatgctttgagtctttacagaaaagcctgcataaggttgctctgatgtcataatgatcggaaaaaatgatctaaaatcaccgtaacttcagaacatcagagttcatatttagggaaaagttttcttttctttctttgaagaatttagtatgtaaaggttacttagcctcagggaaatctttgtataaaacagtcctttaaaaacaataccttgactgtagaagagaatgtttaaactggagtgaataccagtgaagtaacaaatatcagtaaagtttcgagtgagttgaagaaaacaaaccagtgatctcaatggcgcaatcacctcagaatgaagctggggcctgaagtttataatggaataagcttagaggttacagccagaagtacagaggtaccaaaagtttttagacctctgtaggaacatcaaaatgtattgcaagcattacttgcctattcaccttccgacatcttccactttcactcatcttgctgtatcactagagggaagaaaatgcttactgttttccctggtaaggacactaaaagtcacactctttccccagagaaattatagcctagaagaaatagacaaggccacatatcagattacctttaagttaactgagtttctggcatgatttctcttgattccaggcagatttttttgggtgactatgcatgagggaaaatatccaatttcatgacttccaagaaaggtcactttcatagacctctgaaaaggcaaaacagttgttaactataaaaaatacattgaaattttggattttgtcttgattacattaaattgttttaaatgtttatgtttttaggtgttctgagctatttattgcattgacttgttgcattactctgtacgctaattaagcacaatttgtatatttctgcatttgctggtatttttaggaatatgtcttaatgtgcagttttatcccagtaattaaaaaaagttaccaaaagcatgacagtccactgaatgtaaactcctttttaaaaaaactttgttttatttaatatttattctgagcacacagagcattgttacacacattcagtaattttattatatgaaaattatagatgtaaaactcagtctgcaaaaaggaaaaaggcttgaaactcagttatgtatgaattaaaagcatttcctttaggcaaggatgatttagtagttttcttatatacatgtagttaattgtcatggtgtttcttggaagagaaaaacagtgtaagaagaccggcttttgaaaaacttgtttaaaagagttgagctgtaagctttatttaaccaacatttacttaacatatacttaacatataatttgtgccaggctctgtgcttggtttcagggatggaagggtgacatagatatggcccttctggaagagctaatttgtttgggaaggcagtcatgtgaacagataaatactaatacaacctggaaagttctttaatagaaatggttaaagtgtcatggggttatagaggttaaagcagctacttgtgtctagagaattggtgcatgttttgctagtgtgctagacaaaggcatgtttagtggggaagacaggaaaagggaaaggctctagatttactttacagtaggcctgtgctagtaagtacagta

SEQ ID NO: 79601 - DNA, 1002 bp, Homo sapiens
ttcctttgaagagagaaaacagctttattggcagtggggacagtcaacattactatccatgttaaagaaaagatcccagaaacatgaagaaaaagactagaatgtaattatgtaaaaagcaaatcaacaaaaagcgaacccagaccaccacagttcaaataagagaaaatgcttccaattagtgatgtaacctacttaggcctcagttttctcattgaacagaaagaaaaggttgttactagatcatctcttaagttactttctgatacagaattgcaactcctgagacatctttatgtctctttaagctgtggaatcctaccagatatttagaatgataatgtgaacagctcgactttcaagaattcagttcggtgagaacacctaatgaagtggaaattagtgtgttatgtgtgcatttaatgactttattgtagcctgtgtctagactgttgatttgatgaagtttatacagaagaattaaatgctcatgatttatatatttaaaaaatctatgagttttcctggaagtgagtgtttctttgaagcagatttaatgtgttaaggtcttttttttttttttttttttttaccttctgtacaatcattttctgaaattgtaataaaaatcaagtacaaaagataatccagcatttaaatactctttattctagccttttctattatagtacttgtttttgtttttttattgtcgtggtattttgtgttaacttgaagactaattgagcatacagaaaattttttcaacttgggaatgtggggcaatataacttgaaaagagatgaaaaaacaatttctttgggtcagaagtattttacatctggaaacacacccttgaactctggctgtggtttttccacatgtgccatttattagcagatacgttctttatgaaattttgacagtatatgctgctttttgtctgaggaaagcttagttctaggcagaatttagctttgttgtttttgattcaggagttaa

SEQ ID NO: 79602 - DNA, 1180 bp, Homo sapiens
actatttgataccctgtgttataacgagtagaaattggtagttgtgctaggctatgccctgtgtctcaaggaggaattggggagattgggcagcgttcatgtatgtatcgtaacttggttcctgggagaacatgagattgctatggcaacaaaggttctttgaaggcaaaaattttggcagagtggttgggtcttttgaagtgctgggtgtgttgacaggaaaggaataagcatacatctgtagactagcagtcaaggaaaataagcatttagtattagctttaacttgaggtcaaatatattttgagctgtaacttgagcgcaaatatgttttgagttccacctcagtgctaattttccttcagaacttttatttgtatgaggttttctcttctcaagtctgctgtttcaagaacaagtttcgaagaatgtaccatgtaatgttttagctggcctaaaattgtctaaagttttggtagaatcagtgtggtgtaatgcattctgatatgagttgcttctaattttaagagtagataaaaatcattacaaattactcagcttagaatttggtatcgcttaaaaactggtgacaaaaataaattcccagactctgtgatctgcctgctgttttcaagatccttatcttacctcaccaactttctctctctcttttccattctcaatctcaactttcactcctggttttgctctgtggctgttcatgcttgcttcccagccattgctcaagatgtatctcctgcctggcatgtcttttcatttttcagcctctctaaacactactcaagttttacttttgtcatgaagtttccctgacttttataaccaacagggatttcttccttctctaactcttgattaacatttatgtattaaatcatttggagcttaataagattttacacatttttgtttatgtgttgtgtgttgaacttattgccttagtaataagtttgtggtcagaatttttgtactcttgtgccttataataaaggaccaggcacatagttaatacctggtaacaactagttgattgatggttttaattttaaatggatcagtggtaaaaatcatattcaaataatagatcatttatttagctttttaataagttgtataagtagtcaccatagataatgtcctgtatcagggatactcttat

SEQ ID NO: 79603 - DNA, 1053 bp, Homo sapiens
ggttagaggctctgactccccacacagcaaaatctctgtatataacttttgactcctccaaaacttaactacgaatagccttttgttgaccagaagtcttactgataacataaacaattaatacatatttttcatgttatatgttttatatgctgtattcttacaataaaataagctagacaagtgcaaacattaagagaatcattgggaaagaaaatatatttactaagtgtaagtggattctcataaagatcttcatcattgtcttcatgctgaggaagaggagaggttggtgtggctgtctcgcagaggtggaaggggcagaagaggtggggagatagaatgggaggcaggataggcaggtacacttggtgtagcttttattgggggaaaaaaacacatgtgagtggacccatgcagttcaaacttgtgttgttcaagggtcaactgcagcttttcttgattctaaatttagatataatttaccaattcattcatttaacatttattgactgtctacaaagctccagagactcaggtaggctttagagataatagtggggagcaagaaacacataagctcttggggcttattttaaaaaagaataaagtaggtaaagagtgactgtgatgaataattcaaaactctaaagtttctttagttgatatgactgaatttaattttagacaatcacattttatgtgtttaattaaggtaattaaaatgctccaaacaaggttgagaattcttacgctttttaaaaatataggtaaattcaaaatcttttaattttgatggtgattacatgtaatacagatttgcagaaaaatccataattatagaattggtgctgactcactttccagtgacctgataactgtctgcatcatttaccattgtgaatgaattacccaagtcagttttcagacaaatttgcagaattaaccttagtaactgttgaacacattgctgctttaaacaacatattgttacattttttaaaagaaaaaaattaaatttgtaccttgattctgtaaaccatactttaatct

SEQ ID NO: 79604 - DNA, 1050 bp, Homo sapiens
actttttcataccaaagagcaaaataagtgtgcttataaccgtagttcctgtctttataaaaatgtatgaataaatttgagccatgtaaattaaggttacagaacagatagcatttagtgaagaaaagctggtccttagagtatatcattatttaccccatagtacctacctaatgaaatctagttttaatgattctttttaggacaccaaagctcatgaagcctattacaataacgtgtttaattctgagtaattgtttttcctatttaaatgaagaactcagtgactaaaaatttatttcctgcaaattttcttagatgatagaagttatacgtagtaaaaccaacaggaccaactgtgaggctgaaggaatttcagttaagaggttttaatttttatcaatttaaactgtgttttgaggagtggacagaaagggaagagggatattttgagatcacccagcagtttttgatcttttgtcagttcttttgtaatgctatagatgactacaatttgaaacttgaaataagaaattttttgtattgggtgattcacaaactgttgggttttctgaatggcttaaatcctttaaagaaacagttttaaaaagacatagcatgagaacaggatcataattattctgtaaccagcagtctgtgttggttacagaaagtatgcttttgtttaacattataaataaattaccttatattgctgcttacgtttctggtttttggtgtgtatgttatcaatgttgaccaaaattaactgaatatggtgacaaaaccagagaaaaaatttgagcttctgttgataaataaaatgtaaatgctactttttgaaataaaactttacacttataggcttttatgtatgatctgtgttttcttgaggaaatgttgattaagtagtttccattttggtattacagtatgtcctgttgtaagtagctgactgtgtaaaaatcttttaagtcaaaaaagcagctcagcttaaacccctactatttattatggcagaaaccagaaatagaaatcttccagaagttt

SEQ ID NO: 79605 - DNA, 1402 bp, Homo sapiens
taaaagaatcttggtctataatattactaattaataaataagtttttgaggataacgccaatacttgaattttgatatctacttgcaacatgcagtaatgcaatatttagtgagcttaattagttgctttttttttttccaccctgagacaagagtttcgctcttgttgcccaggcctggagttcagtggcgcaatctgggctcactgcaacctccacctcctgggttcaagcgattctcctgcctcagccccttctgagtagctgggattacaggtgcccgccaccacgcccggctaattttttgtatttttagtaaagagagggtttcatcatgttggccaggctggtttcgaacttctgacctcaggtgatccacctgccttggcctcccaaagtgcagggattacaggcttgagccaccgtgcctggcctaattagttacttttaaatgttactaacagaatctgaggagcgtggtttgtgtcctcagaataaatgtttaagctttgagtgtctgcctgtgtcatgaggaaaacagggagaggagaaaatttcttgttgctgctattttatttgcatttaagactagtcattgttaggtaactatggaatcttcactgctttacagttttggtgcatgtcaggttcaataatttttactttaaaaagttatttttacattttaatgagattaaattgtttaccaattaacattgtactataaaaggaacagaaatgtgactggcacttggaaagaaaagctgtcatctgtagactgatgtgtggtattctaatttaaattcgtggtttggcagaattaaatttggattttaacatcatccagaagtaaaagttatgtgcattttcaagataaactcaggaaataaaccatataggaaagactcatttttgcttcagaacacagtaaagatgaaactttgaaaatgctttctaatcattcagtgtaaacctatttaccaagttaaactggtcatgtgatatttcatatatcacttgtattagtatgtggtcttatgcttataaagttaatgtgcttaaaaataacagctaaaacatataggcagtgattattaaacaagaacattaaaatacgattcaaaattgtttaattgtaccttttagcagaaataccattttaaaagatagtaacattttattttctgtcagtaaaaatatagtcatgtgtcacttgacagggataagttgtaagcaattagttattaggtgatttggtcatatgaacttcatagattgtacttacataaacctagggggtatatagcctactatacactagactatgtggtatagcctgttgctcctaggctacaaacctgtacagcatgttactcatcttagtatacagaatactgcagaca

SEQ ID NO: 79606 - DNA, 1015 bp, Homo sapiens
agtcttattgctgtaggaatcagtttgctggtttctagagggtgggctgaccttgacttagtaaagtatagtactttttgtctccctagtagaagtattaactgacctttaaagtgaacttgatgcaccctcttcaggaaacaggaaactgttacatttgggtgtgatattaggagatgaggatactgtgtaggaggtgttggacctgcctaaagtgtttggccttgaaatgtcaaggttgctctcccaaacctagttttccttgacctggctgtttttctaacttcagagacggacttaaacaatagagtttattagattatatgtctgtgtaaacaaatgaagattaaaagacaaaaaataaagtagttaaaaatgaaatgtcttactttttcttgttttaggataaaaattgtattaataccttaaaatgtattcagcaggcaaaaacttcggtagtttcggtattacagtgacaccatttatttttaggcatagtcttgtctttttttttttttttttttggtaaatattataccattttcaacttaatgtgaaaagcttttccagttaatctttatcgtgtgtgtgtgtctgtgtgtgcgtgtgcgtgtgtgtgtgtgtgtgaaagaaaatgtgttttaggcagcatcagtagagcaaaataagatttaatgttgttacttcaaaactgtatccctaacaagacgatacaaaattcagagtgttttggccccttttctaggacagatttagaaacttatagacttgtagttataggataaatgtatgccaaagctttcttcaaagaaagctccatcataaggtggtttttcttcgtggtgcttatattttacaggaacatttagagggatgtggtgtttctatttttctttgcccttctaatcagcaattaaaaaaatattggatctacaggtttggggggtaaattctattgcagatttgttattaacactactctacatatctgttggcctgtagcatacttactgca

SEQ ID NO: 79607 - DNA, 1045 bp, Homo sapiens
tactgctgagctttaaaaactttagcagctttgaccagaacacctacgttaaaatttctttataactcttcagaatttttttctttttctttttttttttgagacagggttttgctctatcacctaggctggagagtgaagtggcataatcatggctcactggagcctctaccttccaggctcaagcaatgctcctacctcagcctccacagtagctggggccacagatgtgcaccactgcacttggctaatccttaaatttttttgtagagatggggtctcaccatgttgcccaggctgctgtcaaactcctgggcttaatcagtcctcccacctcagcctcccaaagtgctgacattacagacgcgagccactgtgcctggccagtcttcagatttgttaacaaatctcaggggtttgctttagtctcccaagctcgccttacgtaaatgtgtcatgtaatgaaagatgatattcccaacccaccatctcacatattcagttgattttcactaaccgtgaaggatttgcactgatttatgcatccaattctctcctgatttctttacttttcctcctcttttctctttcctcaccagtcttccgtttccatctaatgactagtgtcccacattggacaagataaaatggttgaccagttagagacataggaaaaagtggaatattgaatttgcattgaaagggctgaacttgtgaccttatgttatcttccatataattctaatttctacaatataaggttttaatttactcagttcagaaaatctaattgtttgacagtaaagtttggacctatttatataaagtttggaggaaatatgatcttatcaatatgcactatggaaaatgtcctttttagtctgtgaatttagagctatacctactgcttgaatgaagatggtctaaagatttaaaagacatttagggttaataagttttcatggcaaaacatttaacatttttaaactaaattcagatgagttactcattttttgtgtaccttaattccttccaaatactcttc

SEQ ID NO: 79608 - DNA, 1045 bp, Homo sapiens
gtgtccccgctacctttttttttttgagaccaaggctcagctcgctctgtcgcccaggctggagtgcagtggcacgatcgcagctcattgcagcctctgcctcctgggttaaagctgttcttttgcctcagcctccctagtaactgggactacaggcgcctgctaccatgtgcggctaatttttgtattttcagtagagaggaggtttcaccatgttggccacgctggtctcgaattcctgacctcaagtgatcgcctgcctcagccttgcaaaagtgctgggattacaggcatgagccaccgcccccagcctgtgcccttttcactaaaatcacatttattgaggtttctttggggcactcctgcttgcgttttcacatttcttatctatgcacctgaattttccctttggaattttgaccacagaacctgttttgtttcagttagaataatcctcagtctggaaatcatgtattaaatgacacaatgggatggaattgtagcctataataagtgaagagaaagagaagattaccacctaagagctttaaatacttgaaatgcgcctggtctccagatgcagagaagttgtgttgaaagaatttgtatgatagctcctcatacagtgtttttatttataaaagtaattcatgtacatcagtttacaaaataaaagttcttacgtaagaaatgttagtcaccagtgtgatgaaacgtagaatgaaaccttaaactgtgttaatagaaatgtggtgtcagaatcatagatggtagtggttcctttgtaatcttcgctgagatgatgaattcattttcatactttaagagggtcactcgtcaactgtagtgacttagaaaggcatgtttaggatttgagctactgaaaatgttcttgtaggaacagttaaaaaactgggaatgggaagactgagaatgtacaggaataatactctccagagttttaaatgctgtcatgtagaagataatatagatttctctggtgttcctctagaacagagataggaaaattctttttggaaaggac

SEQ ID NO: 79609 - DNA, 1050 bp, Homo sapiens
gtgagtagtggtggcaagatactgactttttttttagagcaattcttggtatgtacaacagtttggcttattatggctcttattttctaagctgtagaaatgttctacttgtgaggtactgcagggacatgaacagccctgagaaagaaagtaggttcttacttatttttctacgtatagaattttatgatatattagtaaaaattattagctttcttgcttatttaattctaaagatgtaccattaactaaaacccttcaatttcacagctccgtagacatttggtagggattatacaggtccaaaaggaaagtaaacaccagagtagctattacaagggaacacaaataagaatggtttagaaatggatatgatgaattgacatgtaagggtccatgtaaatgctgtttgctctctaaaagaatgtttacctaaagctattcatcctgcagacttgtttaatggtatcctggtgatgaaattgagacataagtaatatacagttcagtttagttttgttagtgagctactttaaatctttgatcaccacattggtttttatagtacctgtttggatttggatacagtttaacacttcattaagcaaatggcttctctttccttaggtgtgcttggataacctaattgatgtatataggactgatcacattttcagattttacttgagtcactgagattatttttgttgttgtttttgggttaaataaactattatattgtgaatggaagaatctttaggttcttgcttttcttgttgatgacttttttttcttccttttgccctatgttttttcactacgcttgaccacttctgggtgggcaagaagagcttgccctttatttagtcgagtttgtagctgtactcaataaaatttgccacctgtgaaagggattgcagtgttggagaaacaaaggaaattaataatgtttgattttaagatcatttatggtttcatatgttcagccttgtgtcttatggttgtgaacaggttcataaattatgacaatgaatttaacatttaatagaa

SEQ ID NO: 79610 - DNA, 1049 bp, Homo sapiens
taagtggaaaaattcctgttctaattttattagaaaggaattaatagctatttattcacaacatctgattaggaagctgggatagggcaagctctcaataatagaaaagtgtggggcaggcgtggcggctcatgcctagcacattgggaggctgaggtaggaggattacttgaggccaggagtttgagaccaacctgggcaacatagtgagatcccatctctgttaaaaaaaaaattgctggacatgagggtgcctgcctgtggtccaagctactcagggggctgagacagggggattgcttgagcccaggagttggaggttgcagtgagccatgaccataccacttgcactccagctgggtgacagagagcccatctcaaaaagaaagaaggtgggggtggtggagagaaggaagagagggagggagggagggagggaaagaaaagaaaaaaatatctgggtactatttcgtgatatcacagattgagtctttggcttcagagttctagaggtgattcaccagcctgaaaatacgcttttcataccttcgcattcttgccaaagcatgtccttcatttaattaggagaggataataaaatgtaacttgtaaggtgaaaaaaaaagaagcgacaagccatagagtttatctaaaaattttttgtcctaagcatttttgttatatttagtaggaaactgctactttgggaacaggagaagggaatattggggagatctgcatttttctttagctagtccttgttccaagtatattgtagacatagaggtaaacattagcgttgtattgaagtgcagtggttctttgggtatatgcaaatatatgtacattatttgtactgtagttagctgaggggacacgggatagatagatgactaggcctttgatgtttttttccttgtgtgaatgaggaaaaatgaaaaggtactccaaatgctgtgatttttgtggtatgtgcctagctcttaattgtcaaatgatactttccccttaactgtataggccagactgcttggtgtatctccattccg

SEQ ID NO: 79611 - DNA, 1030 bp, Homo sapiens
tatgttttttgtttaatgtgtaagtccatttgtaatgttttcatcttccttttctaaccaccaaacccaaatataattgtcttgttcaagaagggcagcaacatgaactttatgagctcacagagcaatggggtgtgttcgcactgaaaagaggagtatctgtttgattgcttccctgtcttctttcccagacagaagtggaatattttattgtatggttggatttaggtctactaatttgtttgttttctgtgtattccaacagtattttgttttactgtatctccattcttttggggtgggattttcttaggactccttttattagctggcttttttgcaatgcctctgctttttttttttttttttttttttttttttggtagcgtctctagggatgttaacatacatcattaacttctcaaaggctatttagagttaatattgtgccacttcacataaaaggcagaactcttgaccttattataggtctatttactgccttcctttatgctatagttatcatgtgtattacatctgaatgcattgtaactcttaggagagaaaattattttttctttcctaagctctatgtgttttgaagacattaaaggaaaaattagtctttttatttattatatatgatactattccctaggatgcaggtcttcctctgataacattatccttcaacctgggccaggtgcgttggatcacacctgtaatcccagcactttgggaggccgaagcaggcgaatcaagccggggtcaggagttcgagaccagcctggccaacatagtgaaaccctatctctactgaaaacacaaaaattagccgagtgtggtggcgcacgccggtaatcccagctacttgggaggctgaggcaggagaatcgcttgaacctggaggcggcggttgcagtgagctcagatcgcgccactgcactctggcctgggtgacgagcaaaaactctgtctcaaaaaataataataataatgattatccttcagcctgaagaacttcttttaa

SEQ ID NO: 79612 - DNA, 1041 bp, Homo sapiens
atcctccaatgttaacctcccacgtagctgggactacaggagcacactgccgtgcctggctaattttaatttttttgtagacatagagttttgccatgttgctcaggctggtctcaaactcctggactcaagcaatccacctgccttggcctcccaaagtgctgggattacgggaaagagacaccacacctggcttaattttagttttttttaatgttttctttttcttcgtgagattttcacttttttttttttttcattaaaagcatgtatctttcactttattgagcatagttacagcatctgctttaatgtccttgtctgaaaattttactttgggtcatcttgctgttggcctctggtgattatcttttcccttgagattgggttacatattactgtcaaagaattttggatattatgagtgttatttgtggaaattgtggcttattttcatgttcttccaaagagttttgatttatttgttttagtgagccatttgcttttggttagactcatagcaaaaattatctcttgcctgaagttggtagctgctcagatctcaattcggttcttttagtctctgctacaaactgccttgtgcctgccctgtgaatggtgttccaggactcagccaaagatgtgggcagagataaaccaaaaatttgggacctctcttttctggccttctcccttttgggattctatcctcactttctagtgactgtggttgtcctgtctctgtcctcttttccttcaggccaaaaagacaatggggtttctgttggaattttagttactagaggttattgctgcttgcctgcaggagaaagctttcagaatgggaaactcacctgtgctggtccctgaaagctgattaaaagagaaactcacccattctggtctcttctttcaagtttatattttcatcccaatcagcctgtttttgtttactccccagagcctttatgtagttgatagcaagctagctagatattttctttccgccagccctaggatttatagtaactattagaagag

SEQ ID NO: 79613 - DNA, 1038 bp, Homo sapiens
ggaatatccttactctacaaatagaattgaataaagacactattaaaaatagacacattcatagctttgattatctgatatagctatctctagtcagaattctttcatcaaatcatttattggatccccctacagcagatggcaatcctgcaaaatatgttatgtttcccttatttatgacagtgctgagatttgatatttttggagtacattttactttctagaataaaaatttgatttcagtgctactaaaggcagagtgcacatgtgcaccagcgggtggggggagaaaaagagagaaatgtgtatgtgattttccctgtgcccttgctcccaactgtatgtgtgtctctttcccacagggatgggctctcatttatgataccctagcagtatggccagattgaattgcttttcttactgcttttgctgcagggacatcctaaccatttctctcattcttgtatgctgtctccctgtttcatcctttcattctttcttgggtcatcagactcaccactactaactgaaaatattttcccatttcctgtcttatttctcactttaccctagtcttggttcagggtggcggagtctttagtgataggtctggtagtggcaaatgggcagagaaggaactggtgttcatgtcagcaggtttgttcctaattcttcccttttactttcaggcaggtcttgcctaagtctcaccaattctttaatgatggtttacttactcaaactctgcagtgttaacaataatttgtttacagggctcatatgtggtggggggctggggggagggtggagggaaacacaataggtgcttagggcatagaaaagcatctcctcccaccaaaaaaaaaaaaaaaaaaaattccagtttccagtttttgctagtggatcaaaacctagagatgcccataggactctggtggcttgatgaaagggaagaagtaggagagaggctgtgggatagtttttgattgacactagaaagaaaatactgttattcaaatactaagatgggagtagagc

SEQ ID NO: 79614 - DNA, 1137 bp, Homo sapiens
gaaaggtgaaaatagaagagggtctgcagctgataaaagaggacatgggacatgatatgatagaacagtttagcaagtatagtgtattgggtagaatagcatagaatttaagagcttgagcattaaaatcaagctgtcttgggttctatttctggcacttctgcctcattgctctgtgactctgagcaagttatgtgtttttactttaatctttttttcttttttcattgattaaaagggggtgggtactaataataacttcctcactaaagtttggggcttatacctgtcagtggaaaggggaaaaccagttgtgtggtgatgatttagctttaaaatacttgatttagctgctgtatatgattcagcacaagatgatatccgggattttttttttattaagggatagtaataggtatgttctgaggctttttgtttcaatacatgctatgatttctgatacctatagcaataaagggatatgaggattcagttcatttaaaaagcatcagcagtggtttttttcacagaccagttgttaaaaacaaaaacggaccatagacccaactaggttgaaaatgaaaatatgtgggtacaaggatttaagtatttctccagtcttctaaagttcatagacaaagccatagattggggccttgggataagggaaacaaaaataaataaaaactcagtgaaagtaaacataagctttcagattctatgggaaagtaaaatcagcctataagattatctggatgagattaatgtcatttttcttgcaaatcctggaccattcctgccagatatggctaaagggaactttaattttgtttagcgctctctccattcttaacaggagttcagtattttttcgttaatgtggaagagtttggctaagaacctctctatagtttgtaggtagtgagttagaaataggataatagaaccttggtttttctaatgtgctatctatacaaaaaacacaggtcattctgacctcagcagggtcatactggctggaggtgtagaaggaactggtgggtagttcatttacatttgacagcagatgccttaagagtgtatctatgggcagaggcaacctgtagtttccttcctccaacagagtccagtggcata

SEQ ID NO: 79615 - DNA, 1979 bp, Homo sapiens
tttatccctttgtccaggagggacaggtaagtatctagaagaaagttcttgagtttctaggggcatctagggcttttcttgttcagcacagcttgaggatcaaatgtccagaaaatttggggtctactcttaaagcattattgttttggtgtcaaaaaaagaagtggcagtgttttgattgtcagttttggcaatgtctttgtgacctcaagcattacatgttttctggggcagagaagtattgttttaggggcatttgtgatgttactatttctcttaacagttgtattatgttgtaattaaaaatgtgacatagcagtgattttaggcagactttacttgcattggacaatatttctcctggcacaatttgattaaaacatagtatatttagatattgcagcattgttttaagcacttggcttcatactaggacttttttgaagttttggtttgaagaagtgaagttgcactttcaagaagggtatgcactaccatctaaacttgatttttatgtttaggcaaaacctttgtggttaatcatgctctgcaaaacacccctcctttcctttctccttctctgtctcaaatgaaagtttaaagttgttcagtctaaaattataaacccaagcttgtttttttcagtttgaataccatttttttttgtgtaaatattttacccttttgcaaaacctgattgaaaataatctgtatgttttatgattttttttcttgcttatgctggggctgaaaatattacaaaaacttttatctgttttaccagttataactgtttttaccagttatggcatcatataaatatggaaagtttgtgtaattgacattgatttcattacttactttatttcttaaggacatgacctatattgtgatcttagaatcgtccttttaagacacagccatactaatctgagtagattacccaaatcccaaatcctggtggtctgcaatttatttaaaatgatttgctttgcacagtctttgtttcccttattctctatagtgtcgaggagacagaatctgatagtctagtgtggattttgccgaaggcggttgacagtttgaagccagaagaaccattagagtatgacagaagagtgaaaaaactgacacaagcaataaaacttgtgtttaaaatcacaatttgtttcagcgtaaataaatgcacatagaaaatcatggtattatatgtattatcattccagataaaaaaatcagagttaggtttacaataaattatttggctagggaaaactttctaatttattttttaaattttcaattgagcttgccatcaaagtaaaatcgatataacactccaaattatttcctttcggagtacaacttttccccaagtaggatttaatttatattaagtgtagtagggcaagtaaaagtccgtgtttttgtaattttggattaaactaagctttcttaattgagaatataactctgaactgtgaaaaatcagaaattgctctttttgtatttatgttcttacctttattcttcactcatagagatgacttttaggcccaatggaatttcatcattagtacagctttgtaccaaggtgacgattaaaattttgtacgggacaagtgtggaaattaaatgaatcctaagaggtatgcatgtcagtcagttgctctgagcagatgttgactaacaatatatctgtaattcactttgaggtaacattttctcagttggagcaattacgagcatgtgcttgttggtttctttagttttcagataattattagaatacgttcaatagtcatccataccctatgtataaaatcaacatctaaaaaaagtcttgaagtaaataaatatttgtaagtagattgatctcttaattcaaatgaaaaaaatctgcattcatgtgaactacgttgtttaggtactactttgtatcagatgcagatatacaaaccatacattttcttttctta

SEQ ID NO: 79616 - DNA, 1052 bp, Homo sapiens
agaatcaccattttcagactatcaaagggtaatacaaccctgccctcaaaagttaactcttttggcttagtggggtggctcacattcccagcactttgggaggtaggaggattgcttgagcccaggagtttaagaccagcctgagcaatatggtgaaaccctgtctctacaaaaaataaaaaaaattagccaggcatggtggcacatgcctatggtcccacctacctgggaggctgagagggaggattccttgagctggggaggtggagattgcagtgagccagatcacttcactgtattccagcctgggcaacagatccaaccctgtcttaaaaaaaataataaaaaataaaaaaagatatgtagtttgatatacttgaaatttcttcactagatgagatactgaaaatgattataaagtgtcgaagggaaatagtatctgatttgacagtgtttcataaggatgaggccttttactttttccagtgttttaataaccctaaatttcatgaaagaatatgattgtatattcattgatctacattctctgacctttggctgtgctgacaaacacaaaatgttggcaccaagagaaacttgagagaaaggagcctagatacagttgaaggcactaaagccaagaaaaatgaaattacttgttagtttgaaacatggccctggccaggcacaatggctcacccctgtaatcccagcactttgagaggctgaggcaggtggatcacctgagttcaggagttcgagaccagcctgaccaacatggtgaaaccccatctctactaaaaatacaaaaatacaaaaaaaaaaaaaaaaaaaaaaaaaaccagtcaggcatgatggcacatgcttgtaatcccagctgtgtgggaggctgaggcaggagaattgcttgaacgcaggagacagaggttgcagtgagcccagattgcgccactgcactccagcctggatgacagagcaagactccatctcaaaaaaacaaaacaaacaaacaaaaaaacagaaaaagaaacatggcattgaccctcttgatt

SEQ ID NO: 79617 - DNA, 1035 bp, Homo sapiens
atgagacatccggtctttaaaaaaaatgcatatttcttatttcccataaggcagttagaagtctgcacaataatgataatacttaatattgtaaataggatatcaatttatgtggcatttaaagaattttgaaattcattgtattttgtttatcctttttctatgagtattcgaatttctattctcgtcttaatatcagagattttaatttgttcttatagttagttaacttaaacctgtggcctaggttagccattaactgaattagttcagattatttatcttaacctattgttgcgtatagtattttaggtttttgttgagatggatactattgtatatttaaaaatgcatagaacttgtcaaagatagcttaatttgcctttctacattcataaaaatgttaaaagttaagggatttttaaaatgtcattagatattcttatctgaatcatttatatattaccataaatcacagttgtattaagtcagccatgaagatttcctccttaatgcaaatgaacgcataaggtatctagaaagcgttaatttgtgagggaacaaattaaagcggttagaattgctgtggagctgtatatgatagatgaaatattttaattgaagacacaaatagttctaatatttctaatgagaaagtgtgtagatcatttaatgtcgtaggagaccaaagtagaaatttggaaaaagtaaaaatgactcctaaattacccagcaagttgtaaagatacacctttctcagcatgcattctcatgatagcataacaatgtataatatatctgattactgtcataattgactaccttgaaagataatggttctaagggtcaataaaatacacaataagaaagatttaattaatgtgatcaaggtaggctaaaaataatatttgttcatctgagtattaagattttttagttttaggagttctattttaaatataccatagttgggggaaaaatgatgcttttgccttgaaagcactagcagaatagattagtgtcacagatagtgtg

SEQ ID NO: 79618 - DNA, 1035 bp, Homo sapiens
tataaaaattgtttttattttgtgaagagtttatatttcaatagtctgtccatagaaatataaggggggggaaggcatattaaattaagttttgttgttgataatttcattgagtcatttttgtctgttatctttgttctatcagttcttgcattgcagaaagcttatcttgtattcagtacaatgatcaatttaattggctctgcagtgtctaggatgaggttgcttggccaggatatatttggcagtgtgaggaaggcaagcttctatgttgattataacactgccttgtcaccattgtgttctttctaagcacagacacagcttggtcccctggcagtgatatacagcaaacgtcaataacaacctttgtaaatgttaaataaaagagcaaattgaagggcagtgattcattaggaaagaattttgtctgagcaaattaactcttatttctgttaacccatgttaaagaatcactgactgtctcttgagactttggatgcagttgaactagaaactatacagatgaaggtcctcttttccctttagtgggtgctttggatcagcagtatgtgctcttcatttgaaatatctttttttttctttttttgatatactttgacatcttaccaatttgattaagcttcagacagtgctgttacccttaacttgcctcccagttaacagaaaccttctgaacttgcctgtggaaaaatttttaccatttttcagttagtggttgcgttttcagttttagatttttcagttagtggttgcattgtgcatatatgtgttacttcttcagacctacttgtctaaagtagccagtatattttcagatttttatgtctaatgtgattttcttttccagtttttcttgtcttgtttaaccagtgtaaaggcaatctaagtgtctttagagttagctagaattccagaaactgatttttaattctttcactagccatacttgaatttccatatctgtgtatgtacacacttgcctgaagatattttattttttccttaagatag

SEQ ID NO: 79619 - DNA, 3032 bp, Homo sapiens
tcaggaggagaaaattgcactgagctaagattgcgccactacattccagcttggttgacagagtgagaccccatctcaaaaaaaacaaagcatctgattttttaaattgagacctcaacagtccatagtaatttgtcataagtacagtgtttttcttccagaggtgcttctttgttgaatcatccttataaagttattagcaaaaatttggttgagccttctacttgcattataaaaccaaaaaggtaactgaatttttcagatttcataatctctactctccatcctctccagtataacatgctctgtgtcagtcctattggagaatcatttctcatgcatattgctttaagaaacaaaaaactaaaacccttcctttaatctacatattggaaaaacctcagttgctgaagttaaatatgtttctctgataatgtcagtctttggctccttagttagattccatctttctgtcattgatgtgccctaaaccagcctgcatctaccaatcttggtttactaccaatcttgctttattatctgatctcccttaatatctggtctccccagtgattctcaaaaggtcacagtgaggatctctatgctacatgttaatgtttaatggaaattttctatgacaaggcagtacacagaaactataagattatcaagattctttgtaattggccataattttatctgtccaatgtggctattttgtgtcttgggaacatgggtagggtcctttcttaatggaaacaaatcaaaacaataaatatatattctttcttactcttcacttgtactttttttttcttttctttttttttttttggagagagagagtcttgctctgttgcccaggctgaagtgcagtggcgtgatctcagctcactgcaacctccacctcctggattcaagaaattctcctcccttagcctcctgagtagctgggattacacgcacccaccaccacacctggctaatttttgtatgtttagtagagacagggtttcaccacgttggccaggctggtctcgaactcctgaccttaggtgatccattcatcttggcctcccaaagtgctgggattacaggtgtgagccaccttgcctggcccgcttgtactctttcttctttttttttattcatacatccagtaaatatttataaaacaattacaatatacaagaagttctgctaaactttgaggagacaaaaatggttaatattttcatcattaatagtttttggtcattcatagttcacacaagtaaaggcaacctataatagagtagcgtttatcatataaataccatcaccgtttatatagaaaattttttcatctccttacatttcaggattctgagtatcttcccagtgcttcctgcaccgatttaaacaaagtgagtcctgttactgagtttgagaatgagttgaccatttgtgaaatgttgagtgaatgagtgtgagtatatagtaatcaatagtaaaaactatttacctaataattcaaattagtcactcccagtgaaagtgtaagaatagatacagagaactctttctagaggttatggtgccccataggaagagctgtccctacttattcttcactattacgtcggttgatgagttaattggcatgtagggtcctgttttgatcactgttagaattctcgggcgagccatctaatgggatgaaacacacattttttgcttgtttgttttaacatttaaatactgtccctggacatcggaatatctaattctgaaatgagaacaattttatgagcttaccaaattcatttaacagtaatgttcttttttaaaaagggggatataatgttcatggatgcaactccattgttcctgagatgatccatgactgactcatttggaggggatcccttggagttctgtgcagttgtacataactcatttggctgtcttcagtatattttcattatatgtatgtccgcttcaagtgtgggctgttagtaagtccattttcttttatactaatgataggtatatactgattttcctactgtacatctataaacatgtaattgtactcctttttcgctaatcagatgacgagaaacaggtagctttattaagctctcaagttagaatcaagatcatgtttaacttctaccgcatttgacaaaggaaaaaggaggtcccatttcgttaagaaccttcatttatcctaggcaccacgcaaagtgcttttgctctgttcatttaatcttcataacactatgtgagaagtttgccattttttaaaatatttagaattcagtggggttttttggttccttctcagtaaccacaattctgctctgtacttcagtgtttttaataatagttttattgaaatatatcacatataataaaatcacccttttaaagtatacaattcaagggtttttagtatatttagagttgtgcaaccatcaccactaatttctgaacattttggttaccccatgaggaaaccccgtacctattagaagtcaattcctatttcctccttcacccatctcctagcaacagtttgtctttctctctgtatagatttgcctattctggatattgcatataaatagaaacacataatatgtggtcttttgtgactgactctttttacttagcgtattttcaggattcatctgtgttatgttacataatcaatatttcatttctttttatagctgaataatattccattgtatggatataccattttttatttatctgttcatcagttgactgagatttggagtacttctactctttggctattatgaataatattgctgtgtatttgctgtacaagtttttgtatggacgtattttcagttctcttgggtgtatacctaggagtggagttaccaggtaatataactctggtgtttaaccatttgaggaactgccaggctttttcccaaagtggctctgcaccattttacaatcccatcagcaacttatgaaggttccagtttcttcacatctttgccaacatgcgt

SEQ ID NO: 79620 - DNA, 1034 bp, Homo sapiens
ttttatttgcaattcagttttagctaggttattttagaaggatgcaaagcctttttatccttcatacaagattaccaactaccatttttactttcatcctcctttgtttcatactattgtttaacagttgttttgtgtaggatacaagccttgcatgccaactttgatgtggcagaatgaatcatgttaccattgatctgagcctgaacagaatagccatcttcaaataggaagaagtttctagcttcaggttgttttagcactgcgtgccttgcttagcctgccgtgtaaagtcagttgcctcactcgaaacaaccctgtattaatatgcacaacatgaccattttcagtagaaggttattagaatgctagtttgtatcctctagtgaatgaaatgatgtgtgattatgaagtcatcaggcatggaccagtaagactccagagagcctgccccctccgaggtcctcagggtgccattgattggtggccatgtgtttgtgcccgatagactgtgaaatggtgtgttgctacacggctgtgttgcacctgcgccccaccgaggtgattgattggtttggtcatgtggaatgttcccatctggtctgcagtaatgtgtttttttttttttttcccatctgtgaatagcaagtgctggctgaatagttacagcaaacagtttcagaagctaaataatccttttcctctaagaacaaattgggatatgaaggagtttgtttttgcttaccttgccttttgtaaaggtagtcattctccatcaggttcctactccttctgtctaggatgttatgtgcttttctctttttacctatttttacctcctcttcataatagattacgctttctgtatttctaatttgtgcaagtttaaagcaaaatctgttcttttttgctgtttgttgttttgatatgccacttgaagtgatttgcaattttttaaaagatagtttctgtgatcataattggattatcagagtactgatgtatttttaagctttcacttaacctcacaagag

SEQ ID NO: 79621 - DNA, 1403 bp, Homo sapiens
tgccttatttttttaatgaagcaccattagattttagcaattatgagacaactgtagaaagaaaacaaacatgaaaattcaaatcattcattattttgccagaaatggcttatatgaatcagatacaattaagacttcaagatttaaatttgctcataccatggaaaactgatgccattaattttttttttcctctctcttaaatcttgcccagtggatcactgtcaagaggttggagcttactgtaattgaaaatcacttgcttagggaaaaaaatctaattataaaatgtacagtttgagggtttttgtgtttttttttttttgaatagctgtgcacccccacattcctcctccttttcctgtactgtttcctgtttttgtcatggatattaactgaaatgctctaaacacaataaagctgtttatgtcagttttttggatgactgcaagtgctgattataacaagtttaaggaatttcctttgttgaatgtgtacccatgccatatggctcaacatggaacattaacttgacagggataatggattgtggtatatggagacaattttgcctgcagctttactataactcattctggttggggatcacaggtttgtagtatgggatgcaacaaacatccagatggatttactttacataaaagagttgcatttatttttatttccttcctgtaattggaaaaagaactttttttaaaagaatcaaaatattaaaaagtaaacgaagggaaaattgttcaaatgaaaacatgtattctgagcagtttttttggtaaaatgctatgaaagagactatttttgtatatttagcacattaaagtcatggtgtatataagctgatactgcttttgtctttacggtagtatccaaaatgaattttcctctcaagattagaaagttgtctgtatcaaccttaaaggtgtttcaggtttgtagacataaatgatcaagcagtgtcaattatgaaattattttagtaatgcttattaaatagtagccctctctgagatgaattggatttgtaagatttgagatagaaaagctttttaaaaaagtatccagtttttctttaactgcagtatatcacatataatagaagaaaaggtttgttatttcgccaagcagtaataaagttgctgactgttggcttcttggttttatatgtatccctgtgaaagttactcttaatttatctggtgggaataagaaaactaaaagccactttggcagaatgatcatgtaaccaaaggctagttacctagaatgcttaaatacattgttgttaagaactgacatctattctagctgtgttagagggggaaaaaatctggattttttttttttcatgaaatgggcttgtaatgctaaaaaaaactagctga

SEQ ID NO: 79622 - DNA, 1066 bp, Homo sapiens
actaaaagagtatatttggactgattatatgtaacataaagtataaatgcttgaggtgatggataccgcatttaccctgacatcattattatgcattgcctacctttaccaaaatacttgatgtatcccataaatatatacacctattacgtgcccccccccaccaaaaaaaaaaaaaaaagaagtaaagctaatgcatgattctgaacttggtccttttgttaaaggacattattgagacatttggtaaaattcaaacagggtctgaagatagtaatgtataaatgttaattagatgattctgatggttctgtcatgcttatttgtacagtacacatcagcacatacacaccgaagtattttgtgggtggtagagcatcgtgtctgctgcttattctcaaaaataactaaggggaggaagtttcatttactaacaacttttatgtaagcttgggacattttaaaaattaaaccgaaacagcaacaaaaaaggattgttttgaacctgaatgtggaaatctcaatgtcagaatatttaaaaaatggattttgtgttccatgtatagagaaggaaaaaaatcttttaggttttaagctgggttgtaggttttctgactggggccctgtacatttgtgtggcaataggttaacaagagaaaggcagacagaggtttattcacatgtgcattgcctatacacatgagtgtacccagagacgagttactcaaaagactgtttaaaatttggagtttgtatacctaacttggtagaagaaagagagggaaaagtcagggcacttatggtaagcaaatgactttttgtaaaaataaatgggtctttaggataatagattggagataggctactttgtgacagtgtctctctgggtgtggtgcttacttctgtctccagtaagagagattagagttgctcctggggagggtttttttgacaattgagttcttttaggaggctctgcttttaggcagataaggatttcagaaactgaaatgccttcagcacaaaataattcttatgccaaagtgtaatattttaggatagcata

SEQ ID NO: 79623 - DNA, 1070 bp, Homo sapiens
gacaaaatacaagtttacaaaaattgttttttcaaaaaatgctcaaatggccaggcacagtggctcatgcctgtattcccaacacttgggaggctgaggtgggtggatcacttgagtctaggagttcgagaccagcctgggtgacgtggcaaaaaaaaaaaaaaaaaatacaaaatttagctgggcatggtggtgtgcacctgtggtcccagctactcaggaggttgaggtgagaggatagcttgagcctggaggtagaggttgcagtgagccaggactgtgccactgcactgcagcctggttaacagaatgagacctcatctcaacaacaacagaaagctcaaatgtacttacaagcattataactaacaacaacgtgaccagttttcccacgtgagacgggtctaggtgtagtcttaaatctatgtttacattgccaggatatacaaatccctcggagaaagaacaggagtgctttaagatttttcagtataaattttactgttagttagcatatagtttgtcaaaatattttaatgaaatcagtgactttttaaattgaatataaaagtgtcaaaataaatgtaaatatgacgtagcttgcatagtgagagacagacctctaagaagcagtaaaatttaataatagcaattttcaccagtgtttttcatgccctgtggttatctgtagcatatatttagagtatatgtatgtgggcaagggttggggccaggaattaaagacctacacaacaaaatacatgatactgaatttggagaactggtcacaacatgccaaagaaaatagaagagaactaggaactggacattgtatttcataactgaaatgatgagaaagaactggaaaattgccagccttttaaccttttagaaatagctatgtgtgtagttagtacaggagatcattttcttagagcagtttgttctaaattcaaatatgtcagcagacttagtggaattcaaagtattttagaaataaaacatctaatgttggaaataagagagcacaatatcataaaaacagaggtagtttaacaaagtttttagat

SEQ ID NO: 79624 - DNA, 1033 bp, Homo sapiens
accacaacctctgcctcctgggttcaaatgattctcttgcctcagcttctcgagtagctgggctaacaggcgtgtgccaccacacttggctaatttttgtatttatagtagagatgaggtttcaccattttggccacgctggtcttgaactcctgacctcaggttatccgcccgcctcggcctcccaaagtgctgggattgcaggcgtgagccactgccccccaccacagcaagaattcttacatgttgctgggaagaatataaatgggcgtggtgacttctgagaataataaggcaatcaatgcctataaagctgaaagttcgcatcctttaatctaccagtttcccttctttgtgtctatcctgaaggaatgtatgtctgtgtgtgtgtgtgtgtgtgtgtgtgtgtgcgtacacgagatgtgcaaggatatttgtttcaatattgctcatgacaaaaaaatataaaaactatctttccgtagggaaatatataaactggttttatttgtataatggaatattgtatagcagtaaagatgctcaaactagggatctgttatcaacacacagctcaaaaacataatatatggaaatacaggtttcaagataaaaaccatgtaattccatctgtttaaatatattaaatgcaaacagtaatgtatattgttcgagaacatgaatatatatttaagagtataaaacatacatggtaatcatgcacatcattattatgataatggttatccagaggtgtggtttgagctatgtctatactgtattaatttttttttttttttgaggcggagtcttgttctgtcacccaggctagagtgcagtgttgtgatcttggctcactgcaacctccgcctcctgggttcaagtgattctcctgcctcagcctcctgagtagctgggactacaggcgcataccaccatgcctggctaattttttgtatttttagtagagacagggtttcaccttgttagccaggattgtcttgatctccttacctcgtgatccgcccgcctt

SEQ ID NO: 79625 - DNA, 1009 bp, Homo sapiens
ccctgggcaacatagcaagaccctgtctctttaggggaagaaaacaaaacaaaaactaaaagacttctgcttatcaaaagacataggttaaaaaaaaaataaatcggtaagccacagtctagaagtccagtatttgcaaaacatatttaacaaaggactgatatacaggatatataaagcattccaggctgaggcaggaggattgtttgaggccaggagttcaaattgcctgggcaacttagcaagattcccatctctacaaaaaaatttaaaaattaactgcaggtggtggtgtgcccctgtagtcctagctactcaggaagctgatcactcaagtgattgaggggtatcacttgagcccaggagtttgaggttacagtgagctgtgatcatgctgcttcactccagcctgggtgacagagcgagatcttgtgtcttaaaaaaaagaattcctacaactctgtaaggttagctaaggcttctacagtttttctctttgtaacaggaggtttaagtacagtgaattagcaagtttccagtcccttctagacttatgttgtatggtaatgtcaagaacaagatcatttccactttgtaacaagattacactggcctgctgtttcgccaacaggattaattaaaactagttgtcttaaacagcaattttgatctttgtttatgtaacaacaaacctaatagtagcctcagtcttgggcagaattattagaaatgtaatatttagaacaagaaagttgatactgtattgtattctgagcaaacctgtttcagaacaggcataagtaaaccaactcattcagagaactaagaagttagttactcaaataacatgaagagcatcttttaagtgtttgaagcataattcgacttttctataactttgaaggttaaaaagttggacaataggtagaaattaagcattccagatttcagcttaattttaaaaagaaatgttgtcatgtgttgagctgttaatggcgtagaacattaa

SEQ ID NO: 79626 - DNA, 1010 bp, Homo sapiens
tttgtttttctgtttccccccttcttcctcccccaaattaatatattgtccaaagtgttcataatgacttggaactattcaggttgcacaaagcatttaatgaaatcttgtcttagacaaaacactagagaggatcataattaatgtctcattttctgccagttgctattgattactcattcaagatccctttgttctcagaatgataactgtagtttgcatcactatctaatgagattctcaggatagaattctttaacaacatgctgataattgctaacatatccctgaaatttcaatgtaaatgaatttgcatcataatacaattattttacaaatggcgatattttccaaatttgaaatgtgttagtttttttaatcatttgtagaaaattaacagaagactgacatattattaaagcccaacatttattttttgccctgagttgccctcacccttcgattttgatttgattatgacttggggtgagagacttctttatcattcttgggttactctgtcataatctctgaaacttcaaatggatttacagctaaaacacaatgatttttcgaaattagaacaacaactgcaaatatggtaatactataataattctccttttagaacaattttgtttcttgatccctcagtgacaaaagaaacacgtggtactatagcataaagaatctgcgaaatcataacagtttatgtattctgttataattgtgttttatacctttctattcctttaatttccacatactccctcccccaaaaaataaatcttttgaacagctgcttgcctttatgtatttaaaactgcataccacttcaggggtgtaagataggcttgaaattaaggaattctgtagaataataacacagcagaggttccatgaattcatatcagtattttaaatttttggagatatgtgactataacatatgaggtactctccatctaattttcttaaataaattaataggtagtacttccaaattttaa

SEQ ID NO: 79627 - DNA, 1069 bp, Homo sapiens
tcctgcctcagcctcctgagtggctgggactacaggcacccgccaccacgcccgcctaattttttgtatttttagtggagacagggtttcactgtgttagccaggatagtctcaatctcctgacctcgtgatccgcccgcctcggtctcccaaagtgctgggattacaggcgtgagccaccacgcctggccgatgctaataatttttgacctacggttaattaggcccttatttgatgtgaagttatgagtggcttggcgtttaagccaagccacttaataaaacccagttccgacaaagtaagcctgtttttcaacacttaattttccctttctgttttttttattttttattttttggtctcactgtgttcccccgactgacctcaaactccgaggcttaagcagtcctcctgcctcaccctaccaagtagctgtaactacaggtgcacatcactgtgcctagtttattttcccttttgagaataaagaatatccaaattatagcagtatgattctgaatcgcctcctagcttactgagcagcaccattttacataggatattcttctgcctccctacaaaatcatatttagagtaccttctaatataattaacaagagttcccattaaaaaaaggatgttggccaagtctacctactactttattcctttcatttactttttgtttattatcaccaccaaagcttacactcatcaagttcacatctggaaattaagctgtttcttacagatgaagagggagaaaaaacttaaaatacatgtatcacataggctgttaaagttccttatttttaaaaattggaaattttgttcacaggctagaggtttgtcatatgtaattcaaaatataacttacttattgtagattttatcccataacctagggcagtcatctaggctgcgttagtgttttgggggataaccctttattaattattctctagtattagatatatttttcacagagaaaaatgtctggatgactgtatctatattttagatatatgtatttctataaaagatagtctagatgactataaaaaagat

SEQ ID NO: 79628 - DNA, 1031 bp, Homo sapiens
caggagtttgagtccagtctggcccacatggtgaaaccccgtctctactaaacatacaaaaattaggcatggtggtgcgcgcctgtaatcccagctactcaggaggctgaggcatgagaatcgcttgaacacgggaggcagaggtcgcagtgagctgagatcttaccactacactccagcctgggcaaataagtgagactccatctcagaaaaaaaaaagaaaaaaaggccgacaatgtgagggtggagaaaaaaagagaaagtaggtatgggctgaaagcagtggtctaattgaattcaaaacgtacttaatgggtgcgttctaagttaagacattgctgaagttgtaaataattcagaagtgatgaaattttcaggtttgggtcagtatcagcaggaaaataacttgtttccttggccttattttatagtctagtctcctgagacaagatctggggcttgggagcccagcacagctatcttcttcaggaaaacctgggacagcatactattcattctctgctacaagttccaggaggagaccactccatgactctgcagcgcttggtgagtgtatcacacaacaaatcccatcccacatatgttgttgttgttttttcctcccataatctgtacttctggctatgcttttttttttttttctttccgtttctttgtttaagacagcgtctcactctgttacccatgcaggaatgcaacagcacaatcttggcttaccgcagtctcaacctcctgtgctcaagccgtcctcccacctcagcctcgcaagtagctgagactataggcatgtgccactgtgcctggctagttttttattttttgtagagacagggttttgccatgttgtccaggctgctctcgaactcctgatctcaagtgatctgcccacctcagcctcccagagtgctgggattacaggtgtgaaccaccgtgcccagccctgtctgtgcttttaattagaagagagttggattcgtgggtatcacattgatgtcagggcttatttgcac

SEQ ID NO: 79629 - DNA, 1090 bp, Homo sapiens
gttgttttctttcttgtattggttcatttgctgtcatcttcccaaatttatgggatatgtattttcagaatgtatcacttttttaggagaacctgtttttcactgggactagttaaaaggaatgaagccctcattactgtattttgctgcttactcccaaatattggaaaacaagaaagacgctaggggaaaagttattctgttaatttgaagtcttgatttttttctggtatattatgctgaagaaatgtattgttttccatctgcagatcccttgcaagcaaaaaaagtcagaaaggtgcctcctggtttgccttcttctgtaagtacctatctttttttaacttgatggtaaacaaactgatttcaagtgttccgtattaccttgctacaagggtacattcgattgatgcgagtgggcatactttacatagtaattgttcagtgcttaacaaaatcattgattgaggtaaatccacatttaatgtttggtttttagatttctctgcaatgatttgtagcttactcatatgctcttactccttgtccctgtcatttgaattcccctcttgggaagaggactaggccagtagctgtcaaagatgatctcctatgcaggtcttttgatgtttaattagtcattatgttgctgaacaggaggacagacagagattaatagctgaaaatcttagaaatttacatttgtaataatcccaatggagctaaagacattaagattcggagtacatgtttggctcagcttgcctcagtaggactgaggttattaatatgcataaatcaccaagtcagatgttcattgtgaagcccttgtgggttttaaagccttcattaagcctttcctaacttcagcctagcatcaggaaagctttcaagcaactagtttgttgatccctctttgctcaaaaatgtatcctttgagaataaagggctttgatgaagaaggttggaaaggtttggtggaacaatcattaatggccatgataatctaatactgtaggggcgactgtgctattaaatatactttattctttaaaggagtaaaagtacttgtaaaggaacctgcatcgta

SEQ ID NO: 79630 - DNA, 1078 bp, Homo sapiens
gtgctaaaattataacaaagccatccctggaggagattgtatattatttgaagggcatagccataaatgttttgttttccaggtgatgctgtattcaccatgaaatatctgacttgtagattaacttgcacattattgagaaaccaaaattgttattgagtaaattaaacaatgacaaagttaggtaagagttgttatctatcggtaggatgtcactgcttttctttattttgttttactattttgttcaagataaagttgatagggcagggagcagggagcagtggcccacgcttctaatactagcactttgggaggctgaggtgggaggattgcttgagcccaagagttcaagaccaggctgggcaacaaagtgagaccttgtgtcaattatactttaaaaataaaaagaaaaaagaaagattatggttttaaatgaacatattactaggcaatggagttatatataactagccttttagatacttcatttgctggcataaatgttattagaatacaaagcttttggactcttgtcttagaactgagaagttgtaattatgttttcaaattccttttttggttcagcctttcatttcctgtgagggtttagacttttaattatgcctcttgcaggtatgattataaaaatacaatttaaggctgggcatggtggcccatgcctgtaatctcagcactttgggaagtcgaggctggcagatcgcttgaggccaggagttcaagaccagcctggccaacatggcgaaaccctgtctctactaaaaatacaaaacttagcagggtgtggtagcacacgcctgtaatcccagctactctggaggcttaggcatgagaatggcttgagcccgggaggtggaggttgcagtgagccaagattgcaccagtgcactccagcctgggcaacaaagcaggactttgagacatacacacacacgcacacacacacaccacacacacacacacacacacacacacactttaagattggtgtggacacctggtatcatctatgccagtggatcacagcttgaatcttgaatcttgaatacaacaagat

SEQ ID NO: 79631 - DNA, 1044 bp, Homo sapiens
ggggaaggttcttttgctttgaatttgttcagttgcagattctctcactatcctcttaaatctatcctcacccctacctcccttgcagccaataatttattacttaccgagttcatcctttaggaaaatatagtgttcattcgtggagttattcatgtgtcagcttttaagtttggcttcatttattactctgaaagtctgttttccaagatttgattcacttagaaataatgttgaaacttttcgtgaggaatattatgagtgggttttaggtttacttttccagccagatcttctggcttttgggacagtggaatgttgcctgtttgttttagaagaatatacagtaagattaaccactaactggcctatgttaactaattcaagatacataattcacttcaattaaaaattttctttccaaaactatttagaattttgtgttacctttagaaacattcttgcttacggatcatttaaaaatagctataactgttgtagtgatccaaatatcaggataaaaatgagctaataaagtagataaaaatactgcgtggataactctaagaaattttatatagctctccaaggaagatctgtttcccaatcaacagaaaagtaagatggaagagggaaattttgcctggaagcctggaatttaaactgaagtttccagagagctcttacttggtagactttttgaaaacatcttttcctatatcgtcagtaaagaagtaacttgtttaggcaaagcacgttatggctttttcttgcctagtttaggtctgtgcttaatgactactggaatagcagcaaacataacatcctgataacatttgggaggaaaagccatatttgaaaattggtgaaatgcaataatctttaaaccaggaatcatcagtttgctaataaaaggtatatggctccaagttacgtattttgtcagggtcctctggcattttcactagtcattttgctagtgtgtacaatgattcctatcttgctgtaaaacttggtgatttttttatattgttgaactaggtg

SEQ ID NO: 79632 - DNA, 1025 bp, Homo sapiens
gcaaccttcgcctcccgggttcaagcgattctcccgcctcagcctcccgagtagctgggattacaggcacccgccaccatgcccagctaatttttgtatttttagtagagacgcggttttatcatgttggccaggctggtctcgaactcctgacctcaggtgatccacccgcctcggcctcccaaaatgctggaattacaggcatgagccaccgcgcccagcctagattgtagatttctttagaagtagtgtcagtaaagtcctgtctgctacatagctactcaatagttgttggctttcattttatttttaagatagtgtagaaaataaacttgagtttctgagttgttattagcctgatatctttactagcaatgagcttgaaagtacatttgtttttatgttttcgtatattgtgaacaaatccttacataaaatatgtatatacacacatatgtattgagaattatttgatgctttgtagatggaaggaaaagatgaaagtcatctaggatattcataaaaataacaagtatgaagctctggtaatgattagggaagcagtcagctagtaagggccgtatttcctgtttagagtttcaggtccagagcctgacttctctgggataccatctgtttccaatcaaactagaattttgaccttgtgtggattcatgaaataaatcactattttttaaaagaatgcatttatacattttccaaagaatgcactgtacttctggttgatttatagcaagcacatgactaggtgttttaaaataatacttttttgttttgctaaacaagagttctattctttaaattaattacctaatgttaataatttactgtgtttctacaaaaaaatctataagccagaggattttatatattctaaaaaaaaaagagtaaactcggaaagtttcaataggagctatctttgtaagatacttgataaatattattaaaaggtacactaatgaataacagtgttggtttatgtcagaaactcagtgttttccttc

SEQ ID NO: 79633 - DNA, 1665 bp, Homo sapiens
atttttaaagtatggataatcacaccatgctttaactttgtcttatctgaatgtgactagataaaaagaaaaactatcttctttagcaaaacctctgcttctttgcattttttctcaataacagaaagtcattacgcctccctgcctcacaagaatgtttccagtgttaattacaggaaagatgtattgaaatcgagagcacagtgcacagctccagcctctagagctgaacagagtgtatgccttgaatttggggttatccatatgactaaactgaatcatctgagcaggaaaaaagggatctgtctttgccagtttgactcaaatttgttgtatgaactaaaacattttaaggataattatgtaatcactgtgaagagtaactgtaaatattcatcccaaagtatactatccctttttaaaagttgctttacggtgagtgtgatgaggacatgcaagatatgatttatgtgattgcgttgttttcaacagacttaatagtgaaggggaggtatctgttagattttctattttattcttccaagttagaactgtctgttcaccacacattcaaaatttttcttaacaccattcttagaggggaaagtataagtgcttgggaaaagagttggtcccatggtagctactgtgagcttggcattctgaaaaggaggatagaattctaaagaaaatatctaccacattttaatagaacatcttaaattacttaattttaccctttttctattctctttaaaatagtttgactcctggtagattttaattatcttaaagcatatatattcctttctcttaattttaagatcgactgtcatgatacaaaatcatccttcagatttaaaccaatgattagatcattaactaggggaaaaaaactggcatctatgttcaggtgatcagatgacataagcagtctgattttaatttgtggccagtactgattgtaaccaagagagacttgctctttttgtggaattggctgactatttccctacatctggagttaataaagcctttgagaccacatcagttgtgctttgccgcaagaagtctttgatctgaaaaatcaagactggcacaactgctgcttcataacattgcatctatgtttttgcaagctatagttaagataccaaaagtaaagttatttagcttatttagcctgtgttagaaatgctggtaaatgtacctctttgaaagccatatatttcaaaacattcttatgatgaaaattttgaactcgtgttaatacaaaaatgatatagtaggatttttttttgccattttcatttataaggtctgtcctttaaaagtccattgttttcaaaatctgtttgaaagaaatagcattaaaaacaaactttacctctaaaatgtgccattttctccatacaacttcaaaatttttgcgtaagggaaggcaagtctctttctgtgctttgtgtggtttatcttagttttcttgctctccatgacaaccgtgaataaaccattttctgatcagcatattctcttttatttagcagcgatttgtaaatcaggaaagtttatcctttgacttccttctgtaattgtaaccattttcaaaatttaaaaatgtaagtatattagtgtgtgaaatacagcgaattgaatgggaataag

SEQ ID NO: 79634 - DNA, 1026 bp, Homo sapiens
gtgcctttgatagttaccccttaatagtaacaaagatagcaatgtttaatcaaactcatgttgattttatttggtgaatcttgtaacactgaaaagaatgaattttatgaacccagattttatgttatgctatattgaaaggacatttgtttgctcgatcagattttgaatcctgagcctatgtgaggtttgtgtttggtaagccagctcaatgcttattcagtcacttggtgtaactgtcataccaagatgcattacagagatatttagagtagtagttttccctaataaccagcttaaaaaaaaaaaacatgtggatggtaattaagtttgacattatttatgtggatttaggcagtattcttttcatttgtggtagccctttataaaaattagataggcctttttaagccccttacagaatatagaactcattttacataagtaatatgatagtcatttacattttaattaaatgtgctgtttaattttaaggtatatgcaccatccccaaattcagatgatttcaaccgtgaatctcctagttatccatctcctaagccaccaaccagtatgttcgctagcactttctttatgcaaggtaagtactaccaaacaattgccaaatactactgcagtcatctgtatatcagccagtattttaaagtattaggaaagagaatacctatattcaggccttatttaggcattttttttggctaaattaaaatttagctttataattttccagtggtgtttattgctgactgcaatttaattgaattatctagcaaaccattggagtgctggtccagtattgattgaatttataaaggtcttaaattgagaaaaattaatagagctgttcttgctcattttagaattgaaatgtatgaaaactgttaactctagtttcttgtttaatttatggattcatatcatgcctagaattaccaatataaagaaagagtgaatatcatagaacagagtaagacttgttaagagagaaaaagtgttgcatttcct

SEQ ID NO: 79635 - DNA, 1029 bp, Homo sapiens
gatgaggagaaggaaattaatgaggattacttttgagagtctgacatgcatatcataattttatgtcaggtattatagatattttgaaatggtgactgactcttttgaaattttaagttctttagaatgtgacgcttttaatatagcctctggttttagatggagaaacactatgctattgtcattaaaaattaattctatttccccaattgtctaatatatgtcttaaaagatctttcatattgtgaaacatcagagggtacaacctttgttcttcagtttaggtattaaagagcacacagaatactgtgtgattaaacatgtaaggccagataatgcatttgcaaaggttcctttattttaggtttaagcctgcataattgtggtcttaatctcaggatagcaagaaagagaattgtacatgaaagtatttacacaaagttcccaaagccctgtggattatgcattagtttagataaaaaaaaagaaaaaaaaaaaacctagggtagatagaaggaaaggaaaatctgggtattcgtgccatttctaatgtgtttccctgaacatttgccagacaataaccctttaagattgtgcccgtggagagttatatagaggaagaaacatctggtttctttcggtgcctaataccatatcaaaacacttggtctttaatttagaggagatcaaacaagaagactgtttaactttgttgattatatcagacttctttgtgataatttatgttttgatttctacctcagagcaagggaaaaagagagagagagagtgtgtgtgtgtgtgtgtgtgtgtatatgtatgtgtgtattaatctggataaatggtcagtagtctctaacaaaagaaaagaaaattcagggaagttgatgtttaaaagtaattcatgaaataactttctttgttccttagactcaataacattagcataataaagattaactgaaatgtgcactgtagtgtttaaaaaattgggctcacagttccggggttgggcttgggagcagtcca

SEQ ID NO: 79636 - DNA, 1037 bp, Homo sapiens
tctcatatattttgcaagcaattataagcaatgtgtgctgtttagatgctaaccttgtaacttccctgttgaatcccagccttttcatatcttaataaaatagatctcgcaagtcttggcgttaactttactaacatgttatgctgacatgcatatcagctatttcctcatctcttttggagttaatcttaacctgtgctttgcctcctgttctgtcttgactttgccagaaaaatcgagttgagcagcaacttcacgagcatttgcaagatgcaatgtccttcttaaaggatgtctgtgaggtactatttcttttagatggtgccttttttgtgtttcaattaattatacttcccactattcatttaaaatctttaagctgtacagactcccatctttaaaaatcaaacagttgactgtttcagtttttatcacagtatataggaataattttgtctcttatgttgttgaaagtgatcctttttaaaacagctctactggcatgtgcttttgatttttttaattctaatatgtttgtgtatggggcatgtgtgtatccacagacagacaataccatttatttagttttgtcaaagaacatatctggatatgttcaccatataagttacatgtgctttatatacttaagacaaaattaaaacttaaacttactggatttgaggtcccttccccaaattgccatcattcaaagatcagtattaaagtataggttgtactttttttttttttttttttttggcagctcttattgagaaatgacatagtatccttcattttttgtagaagctaaaagaaataacctcatggtagtttggtaaattcgttttataaagcagtgatttgtttctgaagctttgaaaatttagcataatctacatacatacagcctttttttgttgttgatttatagttcaggtggttgcttttgaagctacttgatactgcatttcacttgctatcttccacatatcacatagtaggaaacgtagcagttaatgaatctaacagatgccagc

SEQ ID NO: 79637 - DNA, 1573 bp, Homo sapiens
atacagcagtctcgaatggaggatcgtttagacagactggatgatgcaatccatgtgctgcggaaccatgctgtgggaccttccaccagtttgcctgctggtcacagtgatatacatagtttattgggaccatcccataatgcaccaattggaagcctcaattcaaactatggaggatcaagccttgttgcaagcagtcgatcagcttcaatggtaaaatcatgctcatcttttttgtagtaaaccctaaagattcttgtcctaaatgtctttaatgaaatctttgggaagaggatctttctgaaaggaaggcaaagactgacttttcagaattttctttactgtctttggcagtaaagtattggctaagtattagtccataaaatcttcttgtgaccttgtgcaaaaagcataagctttctacagagatcatttttagctaaaacttggatttttttccagatgtgtaataattggcacagcagtttttgccttgaaatagtgcataagaaatctgaatagcaagagttctgatctagaaaagttgtttattgtaatttagaaccagccttcagtggtagaaagaatgtgaaactgtaatttatacagatccaaatttaaactttattcccgaactgcgggggaggtagttttaagaatggctgtaatttcagtaataaataaaggaaacaattttagattaatccacaaagagaatttttaagaactcagtccatcttttaaaaaagtatgataatttttaaagggggtgttcgttctacagccatacacatcaaaaattctgtgtttaccatcttacattattttttatccaaattatcttttaaagaaatgaagttctttttgaacctgctattttaaacttataccatgtgttggcatgtttatggcatggtttttaaggttcattgcatgctgtgaaatgttcttctacgaagcagatttttagctataagccatgtgatgaaggctaaaaacttacctatcatcaaaataattaattgccctaaatgctgaaggcttgtattctgtaagatagggttggttccagattttcacactcacatatcttacacatacatacactcatttttgagcctctgaagtaaacgtcacacaaggctgcttgttttctgagaactgtattttcagcagcatgggtaacattagatacctgttttgtgtttgtttttttaatgtcaggaaatcttgaaaatcagtctccttttaaagtactttttattgctattgataagctaataagtgtcaaaacatatgtaagttattaaactagtaaaatggggaagtgtcagatggctcacacctgtaatctcagcactttgggaggccaaggcgggaggattggttggagttccaagactagtctgggcaacaaagtgagaccctcatctctacaaaaaataaaaaaaaattagtctggcacagtggcatgcgcctgtggtcccagctacatggaaggtttaggtgggaggatctcttgatcccaggaggtcaaggctgcagtgagccatgttcatgctactgcactcca

SEQ ID NO: 79638 - DNA, 1176 bp, Homo sapiens
attggccaggctggtctcaaactcctgaccttgtgatccgcccacctcggcctcccaaagtgctgggattacaggtgtgagccactgcacccggccagagatattcgtaaaaagaaaaaaaaaatctcaaattagtctagaaaaaatggtcttctgagacatgaagtgagtctggcttagtctgagctgcaacattagtgccacagcaactagcccaagctgttgttcagtgtgtctgtcacagccttctcttcagtccttatcaccttctcagcgggtacagagctgtggaaaatctgccagaaatcatctgctatcttcatctcatccagacacaatcactagtacttttagtagtggagataagatgtatctggcaggcttagcctcaaaatataaagttactagctgacaaaatctgacactgttaggtgagtcagtattcatctcctgtccttctgaagtaagccttttagctgttgagtcctcagttctcagcttcagcaaaaagaccaaaggatggaatgaaatgaagattagtctgccactgactatccccgcagagtcttaggcatgttattgaggaagactgtcttatcgtggtggttcttttccgtgtctgagggcttccattagtactgctgggatcactttatttacatgctcagcacccacctatatggaatcaactcttcatattctttcagagtgtgtgattttgggggcatgtttttgtaactcttgccaactggctccaagagttaatctccagcttttattgtccccttgtcacaacaatacatcctcctaactaatcatgactaagaaataatgtggttttacattctggaatcgattccccacccccacccccaccccgccccaccttgtttttggtctcttataactttccagaagtttgtcgattttttccggaattaacataagttagtatttgttttgggctcctaataatggaggctatatggccagacttacaaagtgatcacagaaatacttgttgatcagcaatttggtaccaccatatagaattcatgaggtcagcttctttcaaagacatttgcctttcattattccatttgtttattgcagagaatagaagtattctgataaacgtagatattttcaggacctccacagagcattcagatgaca

SEQ ID NO: 79639 - DNA, 1070 bp, Homo sapiens
ctgactttctggtctgttatgggtactgactgtttcatacagttctgtaaagctctgtctaaggactctttgactgatgagagtttgaacagatttcaaatacactgaactgtaacttcgttagggattgctttgatattcagaaaagcctacttctccccggccttcagactgggcttgaagccttatcttaggactttacataaaagcccagggatctttgtaaggtaggggtgtgtgtgtgtgtgtgtgtgtgtgtgtgtgtgtgtacgtatgtagagatggtctcactgtgttgcccaggctggtcttgaaatcctggcctcaagcgtctataggcctgagccaccatgcctgggctcagactccttgaaggacactcttatggctgtcagatagggtttagaacccttcatacaggccacaatacctgtgccttgtctttggcaacaccttcagagttttgtatagccactgtcttttcctcgatttacctacagttttgagttattttggtgacttgatcacttttgagagcctcttcatcctgtacagagaccctccttagcagtccctgatccaacactttctataaaaacagcttttgtttacatgacctatttgggcatcctctgcactctggctccccttctgatttgggatgatgctgcaagactgtatctgattgtgacccaacctgtcacaatcactggatgcttatttttaccaggaggcaagcagacccaggtctagcagttcatcccagagaagagtggcttctcttctaagcctcagattttgccagagcattttttgtgccttgttgccccacctgtcaaaccctaagtccccactgccagtttaagcttttccattatcatgactacaacgttatttgtacctttgccatttttattccccagcagataaaacaaatgaccttcaagtttgtactctcagcgttactcaagactcagtggttaaacatttcctcctctcaagctctttcacaggtcagcttagtcaggtcactgttcttttgataatttagtgatgagagaactattaga

SEQ ID NO: 79640 - DNA, 1035 bp, Homo sapiens
tcttccacctcagcctcctgagtagctgggattacagacatacaccaccacgcccagctaatttttttgtatttttagtagagacagcgtttcgccaggctgcccagcctggtctcaaactcctgacctcaagcgatccgaccacctcggcttccccaagtgctggcgttacaggcgtgagccgctgagcccggccaaaaaattaactttgaagttttaaaataaaaccatgccactatttctcagtgcaaaagagactttctaaactgatagattatttcaaagaagagtgatgggagaggtaacttatgctcaggtcccagataaccaccaagctgtgaaaaagagcactaggcattctgccctaacacttctcttggagcctgtgtcttatttttcttgtctcgctctagttagttctacccatttcctcttgttttcttctcagtctctcttactcgttcaactttgtcttcttattctcatctcgtttccttctgtttacttcctgtgcttttactacttctctatttcatactgctctcatagctctacctttatctctttataatgtggaaattttcccacttaggttaaaattaaactttgggcattcccacctatcaaaaaaggatcaagaattcttttaagtttaaaaaggcatcaagatatgagacatgtagtgaatgcactttgttccatagattgtataggctagtgtttgtcatcttagaatatgtgttaaggttgctaatttcataaagatagttatctggtttcataaattggatagcagattaaaagtagcaagagacagggcagcaggaacaatgctactagaatcaaaatggctaagacatgaccacagaatgactggttataaacgtacaaaaatttgccatcctgtaatgtaggccaagtagctttgaatatcttagttttccgtccctaagagcattgctgtgtacctaaacaatactgtggttattgtttaataaggaagtaaaagttatgattctatctaaaactatttta

SEQ ID NO: 79641 - DNA, 1023 bp, Homo sapiens
tcagaagtgaagataggaagctcatcagatagaacatcagcccatgagatgtttgcaacaaatcttttgttgcaagcagtgtgtcgcttctgcacaatcagagactgtctcgatctctccactcaccgtggaagttgccttgtgcctaaactgaattgacaaatgcattgtaactacaaattttatttattgttatgaaactgtaaggtctacatataaagggaaaaagttaatgtggaaagctgatctacactcagctgatgccagcatacattaaagcggttcacgtgcagagaacaaagcagtgacaaccattggcccttagcattcccggcatacctattagtgtcttaaaaaggaagggaaaagtcttttgttgccctctcctatcctcttgccatatgaatagcgttttccatgaaataggaaaatattacttggtatagcatttctcttgctctcattttttgatttatttttattttctctttgtgggtgttatatttgatctctaaatctgaacagtttatggtcacagtccagcctcctccgtgcagccctgtgtgctttgcacatttaccttacagtggtaagcagagaccatctgtgaccatagcctagctagcattttaaaaggggaaattttgttctctaggttttcccccaaataaacattgctttatttctaataataaccaagacttttcaagcttctagatctcataggaaagcttgtaatagcaaaattgtaaattacaagggaagaatctactttttagaaatcgctttgttttccaagcagtaagtactacatacagtacttgtaaagtgttagctgtaagtaagcacaaaatacatttaaaatacaaagacgattttttcaggctgtgattatggtgaacataacaaaacccagtagtcaccaaggcaggtagtgtgataaatgaacacaccactctgaggctaattacctaatggaatacaagagcaatggtcacccgtatttccttatcctagccttta

SEQ ID NO: 79642 - DNA, 1077 bp, Homo sapiens
aatgtatacgtatttcaaaacactacgttgtacacaataaatacatacaacattttttgtcaattaaaaaaacgtttaggccgagcaccccagcattttgggaggctgaggcagaagaatcacttgaggtcaggagttcgagaccagcgtggccaacctggtgaaaccctgtctctaataaaaaatacaaaaattagctgggtatagcagcgtgcacctgtaatgccagctacttgggaggctgagacatgagaatcacctggactccagaggcagaggttgcagtgaacctggtccacagagcaagactgcactccagcctggcctacagagtgagactcagtctcaaaaaataaaaaacaacaacaaaaaaaaaacttttaaatctatttgatacaacataggctgggacttccaaaattttaaaaaccatcctaagttccttcagtcctagagttctttttcagttatcactgtttttggttctctggcttcttgatagtctccttggaagaaaaacaactgcatctttccctctaaaggcaagggccatctctatatctctgaagatctaaccttctgccacagttcgaatatgttggaaacgtaatcccccatgcaacagtgttgaggggggttgcctaataagaggtcatgagggctctcctcccaggctgttttgccctgccgccttccaccacggatgatgtagcacaagggccctcaacagatgccagcccctccgtcttgcactttccagcctctagaattataagaaataaatttctgttattcttttttaattactcagtctcaggtattctgtcatagcatcagaatacacactaagatacctgcctaggccatgaggaccccaagacacagcacaaattttgtacaaactctaaccagaccacctttttcctactcccagggtgaggtccttccttcccctgtcccttgcagccctatgggcttttttgctttctctcattctccgggccttctgcagctctatttcctgcaagattgcatcttttctcctggatatttggtcgtcgctgggctgaggtggca

SEQ ID NO: 79643 - DNA, 1039 bp, Homo sapiens
tgaagtatgaatgaatgtttaggtcaagacctaacacaactttatgaggggctgaaacccaaccaagcagctcaagtcagcaagaaagtacattctgctggaaatttatcttgcaaagaagtatgactgtcatttcctaccttttccttgagctcccagaatctaattcattgctaaggaaacagtgtaagtatgagaccttctgttcatcatctgtctcctactgaaggctattgtcccaggatctggataataaagctgtataaggtttttacaactgagggtagagcaaaggcaagaaaccaccatctcatgttaactgtgttaatagtctgtggcttgaatggagtctagatgtttaaagtctactaagtgtagaatgaacagtcatttttttttaaaggaaaaataaagttctttgataccctggactaatacataaaaaattgttatcttaatgatgtgacacagataacagttgtgagatagggattttcaacctgattggccagtattagtagaagagtgtgaatatgcctgttggtgagatgaaagaattatatgtagtggtattttcaagtctaattctcttccatatacaaaaataaaatgggtattgaaggcctttttaatggcaagggtggaaggaggggaggtagagtactacccttacattgtgccatagtcttaattcccttgctccagggttctaagtttgatgctcataaatcaaaagaaagaatgttgtaactgacatttctattgagttacttttaacttttgtacccttgggttttagcattgaggccttctgcaatggccaccggatacccactttattcagacaatgataatatcgttgagctatggtaagatcatttcctttggaacaaaatgaaaagctttcagtgttcacaattggaggaaaatgtaaaagcttagtaggcctcctctgctgcagggtgaagagtttgtgtttgaacaccatccactttgctcctcaaatgtgcagtggaatgattccagtgtgcttttgaaa

SEQ ID NO: 79644 - DNA, 1010 bp, Homo sapiens
gtgtgacagctattcgtttatgcagctccgtggtcatagaggaccccaaaaagcagacctcagtgtgtgtaaacgttcagagctgcaccaaggagagggtgggagaggaggcccttttcactagcgggaggcccctgactgcccacagcccacatgcccaccctgaaaccaagaaaaccaggccagatgttcttcccttccggcgacaggattcagcgggacccgtcctggatggagctcggtcccggaggtcctcctcgtcatccacaactcccacgtcagccaactctttgtacaggtttttactggatgatcaggaatgtgccatccatgccgacaacgtcaatcgtcatgaaaacagaaggtatattcccttcctgccaggaactggacgggatattgatacaggatcaattcctggtgtggatcagttaattgaaaaatttgatcaaaaacctgggcttcagagaagaggaaggtctgggaagcgaaacagaattaatacagatgacaggaaaagatccagaagcgtggatagcgcctttccttttggcctccaagggaactcggagtacctgattgaattcagtaggaacttgggcaagtcaagcgaacacctcctccggccttcccaggtgtgcccgcagcggccactgtctcaggagcgccgtgggaaacagagcgtgggccgcacctttgcaaagctgcagggagcagcgcacggggcttcatgtgcccactccaggcctccccagccgaacatagatgggaaagttctggaaaccgaaggtagtcaggaaagtacagtgatccgtgcgccctcccttggtgcacagagtaaaaaggaggaggaggtgaaaacagccaccgctacgctgatgttacagaaccgggcaacagcaacttcgcctgattctggtgccaagaaaatttccgtgaagacatttccttcggcctcaaatactcaggtaacactagtgcgattcctgtttggttttttttctcttcct

SEQ ID NO: 79645 - DNA, 1003 bp, Homo sapiens
aattaagatcattgtagatcattcttagtgtaagattcagatgtacagcatgtttgtgtgtgtgagagagatatacacatacgcacttcaaagaaaaggagaattctttttggaatggacatgagcatttgaatcaaacaacaaattactaaatgttcactgggtgtcttctccaagcttactgaggatgtgtttatgtgcctctcacatatttgcaagtgggaaccctgtcccaaattgagtggtaacacatcatttatttgaaaaaaaaaaaaaaaaaaaaagacaccatccatcctactctcacactgattttgtctgaggctttaattaattcacagctcctgcaaattatctccttaaaggacctgttgggtgtgtgtcatgacatataaattgttctgagaccagtggttgtgtccctcattgttttctctgctgtccctttttcagaagcactgataatgacgatgctactaaaaggaaagtcaacttggtctttgagaaaatccagaccttaaagtctcgagcagctgggagcgcccaaggaaataaccaagtaaatggaagttttgtattttgtagagtgcatttagcatggaatgtggtaaacaacttgctgtttcttcagtctgtatgtttgtttatagcagtaagtgggaagttgcctgagtagtgaggagtactcttcatgttttacatgttgcagcaacattttattgagacagagtctctgtcaccctggctggagtgtagtggtatgatcttggctcactgcaacctctgcctcctgagctcaagccatcctcctacctcagcctcccaagcagctggaactacaggcatgtgccaccacacccggctaatttttgtgtttttagtagggtgagggtttcaccatgttgctcaggctggtctcgaacgtctgggctcaagcaatccactcacgttggcctcccaaagtgctaggattacaggcgtaagccaccatgcttggcctttc

SEQ ID NO: 79646 - DNA, 1025 bp, Homo sapiens
aaagccaattttttttcccccaaaagaaacattcctctaatcactgaataaattcctgtgtatttggctgctgctgtccaaagaatttttttttttaatgtaaccaaagcctatagagactgtttgcttagacagagtaaaagaaaccctgttggatttaggcaggccaatgggaaactaaatgtatataaaacatctgaactaaatcatagaaatagcagaatgaggtttggctgtgtttgtgttttcttttacaagtattacagttcattaaatataaatgtttgatgttctttctagttaagaactcctgtgccttaattatatagtttgattaagttgtttaataatgtaagtgcaaagatatggagtctgcttgttgagaagtaggcttctgtggggttacgttaatgtacagtggaggctctttaaaatcacactgattcctgttagaatcaacagaacattaaagaagagagagagaggatgagagcaaacctagaagagctccgaagccaacacaacgaaaaggtggaggagaactccacattgcagcaacgactggaagaaagtgaaggggagctccggaagaatctggaggagtaagttctgggctgagagcctgttgcccttcccaggttctctatgacatgtagctagaaactttctgtccatttaatactacccagccttccaaatatttataaaggcagctggcttttccttttcttcctcttatctttgtaaaattatgaagctggcgacacatgtagactgataaacaaaaaggttagtaattcttaacattctttgtgcaccttgaagtatacgttacaaagtttcagtccttaaagtggacctcctagcaggtaagtgggaagcagggagcactgagcgctgatactgaaagacagagttcaaggagcctgggcccagcttctaaaaagcatgtgttacgtggcccccgtgagctctcagcctgtgcattttatcctcgatggtgctggtgtttgtgatgggtgctt

SEQ ID NO: 79647 - DNA, 1027 bp, Homo sapiens
tcaacaatctgaagaccaaccattagactgttttggcttttaatttataaattcaaattacttctcatgaaaatgaacaaatcttgtttgttaggagcagtatcatgatgttaatgttaatcttcgaaggagtaattttgcatctaagagttgcaagtattttgatgctgataaaacagccacttttatttttgtgccagataatatgacttttgggccattaggcactttcagagtgtccaacatacagcagttatgcaacaaatatctcccaagggaatggatgagggagaagaggagggaggttgaagacatgtgagatactcttgccatccttcatttctccgtttgcattatttttaaatacagcaccttacaaactgatttactgagcaactgccaagtacagggcatcgtgctaagttcgtgaggactatacatataaatcaggtggaatttacccttccaggagattgaaggggagatatgtaactctcaagctgattatagacaagagtaaatgacccaggtgaagtggagataaaatcatataggaatccctataggagaccccatggctgtgcttaggaggaggactgctggcaatcacgaaagattttagggaggggacagtatttgagttggattttgagtgatgtttgggcatgcgggctgaggacattttgggtactgagtacagcatgagcaataccttgtaggtgggaaagtgagatgtctgggctgggctttgtggagaaaatgaagttaaggtggctacagattcagagacttaaggggcgggtgcagagatccaatgagtggaccgtgctcggatcccaactgaaacaaactgactgtaaaaaacaaaaatagctaaaatcattgggaacgttttaacactctatattaatgatattaagaaactaaacaatttttaaggggtgataatagtgctattgtttttaagagtctctgtcttttttttttttttttttttgagatggagtctgactcttgttgcccaggc

SEQ ID NO: 79648 - DNA, 1048 bp, Homo sapiens
tcttggctcactgcaacctctggcttccaggttcaagtgattctcctgccttgagtagctgggattacatgcttgtgccaccacacctggctaatttttgtatttttagtagaggcggggtttcaccatattggccaagctggtctgaaactcctgacctcaagtgatctgcctgtcttggcctcccaaagtgctgggattacaggcgtgagccaccgtacctggcctacatggcttttcttattatgtaacttctcagagtctttaatatgtgggttaatgtaaattgtgattctctgagaaaggactcgaccacaagaattttccacagtgtgaccgggccgcaaatcttttttcaaagaatcttccacaatatttcattccatagcatacttctggggaaatactgcattacataattgattcttttttgggtactttccacagatagttgtagatattataccaaggtctgtaattgggaatgggcctgacccagtacaaagaggaatgtgtttgacacagggtttgaattgaagccttgggcagatcagatggaataggtagactgaattcaatttaggaaggttttggaggccaggctgaggggagtttggatgcattttgttgtgtgttgggagtcgttctgggctctgagctgtgtcatggtggaagtaccatcttggctaggtcattctggaagatacctggtaaatgggttgggtggtgaggtgtgtattggagttgggcagccttgctttctagcagtgactggatgagaacctgggtgtggggagtgggaatggggagtgaatctttggggttgagaaggaagtgtgagatgttttccttcatacccttttcctttggtgggtggccactgtcaacagctgaaaacaagagaggctcttctgtgtttttctgaggccagataagcataaggagacccttgcggcccgtgggttcctgtgcagcactggcagagaggccgtgtgttgggaatggtgctgccattgtcagggagtgggagaggaattacttacgttaa

SEQ ID NO: 79649 - DNA, 1033 bp, Homo sapiens
ttgtggttcaggagaaagagccaggcagccctgcctgagccaagagtggagcagaaatgcatgcacgaaccacatggaggctgagtagagctgggttggcttgtctgctgcctggagcccttgggattggggtctaagaggaggagaaaggctgggggattcctttggggagggggttgagttggatcctgaaggttctacaggaagccattgggggccctctgtatttgttgttttcacagattgacgttttttgggacatgtgttttgagggttttgtcccataccatacctcactggttctataactcctcctcaccctttgccccaacactgctaaatcatcgatcaacagaaaccccaggtttgaccctgcttctggtgggtgcccagcagcagctgtgctggagcacactactgctaattcccccccacactgaacttctgattacctttctttttgccaccatcttttccccagcagcttttgttaaccttggttctctgcagcaattaacttcagcaggtcggccacgttggctgcttctcaaagtgcagccagcccaacagagcccagggaccggaaggccgctatgggtcgtgttttagccccacatcacatggttggcagagcagatctgttcctatgctctgcaaaccaggagagtccgaagtgatttggaatgttttcaagatcctgagttactgcctgtggcagcagcttgtaaactgttaagcactgtacaaatataaaccattgttcttgtgcagtcactgcagggacacaagactgggtaggccctgagctgtttctgtagtggcccagtcagccctcggtgcctgacaacgttttcgagatgatccagtctgtgtttgagtcaggttgctctgttccgagttgtgcgtcttcttattatccttgtacctatggccctaatgcttagccatttaaagaagccaccataactttcctataatattttaggattttattctggagttgcatgttgtttacataaagaacataagtctg

SEQ ID NO: 79650 - DNA, 1003 bp, Homo sapiens
ttcactctgatttattttacatttccattttaatagccatcttttaaggggctatggtgggggataaataattcctttttttgcccccctttggagagtcaccattatcctggggctctccaggggccctccagggaggtcttgaacctgtggggacccttggggatgctgccatgctaagtgctgctctgcacagggaagtctgtttcctggtgggatccagatttttcagacattggcactgagggtgcaagactgtggccagtggctgctgctttatgtggcaggatttgtcctgaacccccaggctgggcccagggctgcgtgaccacttggccatcctggaatccctccatgcgctctctgcactctgcctcactccaccatagacacgttctccttctgggctccacagtcccggtctaaactctccttgtgggtcttcttcctttattgagagtcctaggtcctacaggtttgcgaagacacaacggggaggggaaaaaagagtgtatgagtttttgtcagaaaacctaggttggaatcccaaagctgcttccacctaactctgactcagaagctgtttctggacctcccacctggaaactcagggtgataacatctgcctcggagagttcccgcccagcgcccagcttgaggggctcttgattcttggtgtttcccctctgggtctcctggccgggagcacagctgcagagcgatgcctgcctctgctctgctggccgtttattgtcttctggtatttttcaggcgcacactccacagcaactagatttctttgtctctctacaagccttcagtttttctttatcccttcacttttcggaaaataatctaccttccgtccctttcttgcctctaccttccctttgagctacaggctcctgccttccaccaagccctggaggatcctcttcctctccccacccacattctgaccccaagacagggctggatcctgtccctccacttgctgggtggc

SEQ ID NO: 79651 - DNA, 1588 bp, Homo sapiens
aaataataaaagtaagggtgtagttgctctgccttcctcacaggctacgaggatcaggacagatcccaaatgtgacaacacattgcgatgggactgtcactgcccactggggcctccgcactgcagtgggtgggcccggctcacctctcctcactctccaggcggtcctccagctccgcgatcctggcctccatctgcacaaccagcccctctttgctggacctgtaggaaccttccaggtggataatccggctctttaagtccttgttctggaacaacacagggagactgtgaggggctatgtgtctgccacgctctgtgcagagcagcgaagaatatggggcagaacctggtgtttggtcgctgcatgcgatgaggctgctttccacaccagggcctgtggcctggagacctggggaacacagagatgtttccaaggaaaacccctgaactcagctgcaggccagaagaagaagttctatcacactccctcataagcctgaatgaaacctttgccatgtcctaagactcccggatgtcaaacgggctttgccttgccctataaacctacagggggacaggagaaataggctcctttgccagtcctgtgcagtgaagaacatgaacagaaatcatgaaaaagaaataatgacccgatgaagttttctgagccactcatgtgtttgatgacgtggattctttttcattctctttacattagaatttagccctcttcaggatctagaaaataacacatgcaattcctcctccctcagctgccaagcttccatgcagatttcatatgaccgggaaaaacaactctggaaaaggactgttaccccccagagttcttgggatgccaagtaaaggagggacctccaagggcttctagttcaaagcagtgaagtgggggagggttagcggatggacgggggggcagctcacaggctggctgccctcacctgcctctccagggaaatcttgtcgcactccaagtcttgtctcgcagctctctcctgaagtagctcattcctcaactgctccatctacagcaagcagaacaaaagcccagaggttagaaggactgttcctgtatcttttgtactgaaatggtggcaaggaactgaatgtcaacctccactttatgaagggggttgccctacccagcccctcgtgccatctgctctggggtacgggatctgtttcttagttctttcttggtttcttgatgattgcaatactggtaatacaaataacagtaagagtcaaagctagccctgctgttaggggttgaactgtgtcccctcaaaaagatatgttgacgccctaatccccagtacctctgccgtgaccttatttggagatggggactttagagaggtaatcaagttaaaaatgagattattaaggtgggccctaatccagtatggctggtgtcctttaaaagggggaaatttggatgcagagacaaacacgtacacagggaagacggccacgtgaagatggacacagggaagtggagatggaggattggggtgatgggtatacaagccagtgattaccaaagattgccagaaaccaccagaag

SEQ ID NO: 79652 - DNA, 1050 bp, Homo sapiens
gggctaaattctaatgtaaagagaatgaaaaagaatccacgtcatcaaacacatgagtggctcagaaaacttcatcgggtcattatttctttttcatgatttctgttcatgttcttcactgcacaggactggcaaaggagcctatttctcctgtccccctgtaggtttatagggcaaggcaaagcccgtttgacatccgggagtcttaggacatggcaaaggtttcattcaggcttatgagggagtgtgatagaacttcttcttctggcctgcagctgagttcaggggttttccttggaaacatctctgtgttccccaggtctccaggccacaggccctggtgtggaaagcagcctcatcgcatgcagcgaccaaacaccaggttctgccccatattcttcgctgctctgcacagagcgtggcagacacatagcccctcacagtctccctgtgttgttccagaacaaggacttaaagagccggattatccacctggaaggttcctacaggtccagcaaagaggggctggttgtgcagatggaggccaggatcgcggagctggaggaccgcctggagagtgaggagaggtgagccgggcccacccactgcagtgcggaggccccagtgggcagtgacagtcccatcgcaatgtgttgtcacatttgggatctgtcctgatcctcgtagcctgtgaggaaggcagagcaactacacccttacttttattatttccattttataggtgggaaaacagagacccatcaaaataagtgacttgagtaaggtagcctggctggatactggtgtagctgggtaaaagtttaggacccccacttctcagtctatggtggtgccactgtacttgctgtcccttttcccgttctctaaataggacaggctgccttggaagctacagagtttgagccacgttagaggccagaaggctgactctgccctggcggccaggtgtatttaagcagaggctgactagccaccagtcagagatggggcaggtcctcccgcagtgtgtgggagggacatgggatcaag

SEQ ID NO: 79653 - DNA, 1035 bp, Homo sapiens
actttttctcacctcctaagccaggcctgcttcagtactaggggtgccagcttagtgttccccatgctaggttggaatgtttccaaaagcaacatttaggaaagcacaagggtatggaaagggtgagtccagatttctcctttgagcttagctggtcttacctagaaactggcttggccaatgcaactgatgagattgcgtagagaaataagtttctaccttttgaaaaagtcactcatgtggagcatacctttgtcctgagaatgcccccaaaattcgtgtgaaatgccacttttatttttctgtggctctgctcacccctcttcctccctttccctgttaggtcttgctgtgtctctctgctgcagaacccagtggatgggctcactacctctgtgagtccccacatgaaatgtgcagtggaagctgccaattcctctgggccctgcaaaagctgtcgttctgaaatgagtctcgttgtaggtggaatcgtcccaagaagccaatgctgaggtgatgcgagagatgaccaagaagctgtacagccagtatgaggagaagctgcaggaagaacagaggaagcacagtgctgagaaggaggctcttttggtgtgtgtgttgtagctgccgatgtaaacttaccgggaattgttggttcattattgttggtgatgtatacgtagtagtgtttattcttagaggtgggtcagtagactcagccatgggtaagggatcaaggaattattcatctgctcattcactcccctcccctcttcccctctgcctttattcatccccgtctctactcagaatagccccttgtctctgtctctaaatacacacctttttctagctcatctgacaatttgccagcatctaagcaaaccctgggcttgcccgcagctgtgccctccctccctccatttggttctctctacctgaaatttcctccttccctatctttgatcttgcctaagctccctaaaagccttaaatgccactctctccatgcctggagtctcttccagtcatgga

SEQ ID NO: 79654 - DNA, 1062 bp, Homo sapiens
ggatccggcgctagtagcggggcctgccgaggaagccgagtgcccgccgccgcgccagcctcagcccgcgcagaatgtgctcgctgccccgcggcttcgagccccaagctcccgaggacttggcgcagcggagtttggtggagctgcgggaaatgttgaagcgccaggagagacttttgcgcaacgagtaagctggggtcccgcggagtctccgccaggctccttcagctcgagctccctgggcgctcccctcccctcccgcactctgttcccttccctggaaggtgactttgactcagtcacattcgcttcagtcctacgggcgagtggacggagggcttgctgcggcagagccgtgcctcttcctggccaggcacgtatgcctgcgaggatagctcggattgaacggctacctggcgttgcagggagttagtagcccctggtcggttttatttacccggggactgtggtggttccatgagtctgctttctaaacccttttgtcgcccgcacccctaacccataacagattgtcagcttcatctctggattctaagcttacaggaaccgtaggaaatgggaagagtgggatatgaagaggggtttattaggccgggaaagttcgaccctcattcagctggctggttgaacggattttagcaagggagccacgtaataaaagtgattttgttttttaggcagctttgttcagcagcttgttgcaaaagatggtttgaaggaataaaaagcagaagacagtagaaggatattttcagagagacttcccacgagacacttgtaagaaagtgagctaggaagggattgggagaacttttaagcatggactaatttaaatgcagttgacagagatggctgaagtttccaatctatatggaagaccactagcaaaaataggaaaattcagggagaggaatagatccaaggttgattttacttagggtgtgcagagttgagaggagagcaggacagacatttggttaatcgaaaaccaaacacttaaaagctggagaagtagtcatgaggctcaagaaagagagaacc

SEQ ID NO: 79655 - DNA, 2495 bp, Homo sapiens
atgatgtcatcacatgccatgtagcctctggaaaactccactgtacccatgcgagaaaatgagagggaaataatatcttagtattattatgaaagtagttttgacctaataggcccatccccacactccaccccatccccaaattttggagattgcactttaatgactgctggttcttggaatgtcttatgtgattattatatgcttaaaatacttttgctgaaattctaatttgctgagacaaatgaggcatatattccctattcttcctgcattcccttgttttttgggctatttggataatgaccattttaattgttttattcttgttttggggcagttagaaatcagatatttgacttaaaaatcagcttttctttctttgaagataatgccttgcctttttaatgttatatctcaagttaaaaaaatggctgtaatgtaatagtattcttttccatttgacagaaaattcatttgcaaattgcccgacaaaggtaaaaagatctttgactcttttgccaaactgaaagctgccattgcagaatgtgaagaagttagaagaaaaagtgaactgtttaaccctgttagtttagactgtaagctaaggcaaaaagcaattgcagaagttgatgtgggtacagataaggcccagaattctgacccgatacttgatacttcatcactagttcctggatgttcctctgtagataacatcaagtcatctcaaacctcacaaaaccagggacttggacgtcctactcttgaaggtgatgaagagacttcagaggttgagtacacagtgaataagggcccagcttccagcaatagagacagggtaccaccttcatctgaagctagtgagcatcacccgcggcatcgtgtttcaagtcaagcggaagatacttccagcagctttgacaacctgtttattgacaggttacagaggatcaccattgcggaccaaggtgaacaacagtcagaagaaaacgcaagtactaagaacttgacaggcctttccagtgggactgagaagaaacctcattacatggaagtgctagaaatgcgagccaaaaacccagtgccccagctgcgtaaatttaaaaccaatgtgtaagtaccctcggaaacaggcctgtaacaggaacgtgatatttgttaaactcaaaaatttacgagaaactgggtgtggtggtgcttgcctgtagtcccaggctactcaggaggctgaggtgggaagacagctttgagtccaggagttgtagaccagcttgggcaatataataagaccttttctcttaaataagtcaggagaatgctctaagttccgtgggctttgtatgagaactacttgtagttaggaaataacatgttgtggcaacactgagaccagcctggccggagtagaagattcatgttgaaaaatatttagttttgaaaccaaataatcgacaaggtcttttaaagcacatgggggagtgttaaattttaggatgcttagccagtatttcataataaacacagagttggagagaatttattatgacttctttttttcagaaccattttttagtgtacagctttgattagtgtactatcaaagtgtactctctttgattagtctgtgaactaagggtaaagcaattgcaggagctgatgggctttccagcagaaattatttgcatgctcactgtatgtaagcaagcagcaggtgttgtggggacacaattaagtcaagattcttaaaactcctttgccttttttgatgttaaatctcaagtttaaaaacatggctgtaatgtatacatgtgtaatgtaatacaataccatgttcttcaaggagtttaagagctacatgaggacccaaggtttacacacttggaaaagagttaagctacataataataacagtttcagggggaaggaagctgagaagaggtttgaaaaactgtgaaaatagattcaggcaggataggcaaaaactctgcttatcagttccttgccataaatttgtttctgaaatttcaggaaaagtaaaatctttttgaaaataattgctatttacttgcagcaaatgtaacattcaactcaggtaactggtaccttcttcctatattgtatttacaagtatgtaacatcaaagttaaatcactactacctttctttgaaaaacagaaaacctctagtgaaaagtatctaaaacatgcttcttttttgttagactttaattctaccccagcattcattttaacctcaaaacattttatttctgctgtatagaaaatcaggattatactacattaacgtgatcaagtactctcttgtgtacagtggggtatctttcttcacttccaggatgacattttagaaaactagaaccatcatctagtcaataaataaaacaaagaatacattaatcccagttctgtattatggtcatttagctgggagtgggagagaggtaagggaatagtgaagagggctaccaagaattc

SEQ ID NO: 79656 - DNA, 1166 bp, Homo sapiens
tgcaagctccgcctcccgggttcacgccattcttgttcattcttgtgaacccgggaacacgccgggttcacaggcacccgccaccacgcccggctaattttttgtatatttagtagagacggggattcatcgtgttagccaggatggtctcgatctcctgacctcgtgatccgcctgcctcagcttcccaaagtgctgggattacaggcgtgagccactgcaccgggccccagcattagtcatttttgacatttgataggtcaaattgttatgtgagtgtgtatacatgtgcatgtgcccccatatttaacgcatctgtatttataagtattgtagtgctaagctcattactcagtttcttatatagaggagtgtatttcagtgcaatgttgtatattaatggaggtcagtaacttcaactgtagcaggctggtggctgtcagaagcattacccagttgtgtctgatagggcacagccatcaggcttgtattgcccaagggagcactcagtgaggtgtcagtgtccctcttattgctgattctaggtaacttcccattgaaaaattgtaaggaagagatgtgaacgtgtaactttgtgctttgctctttgttttaaaggagatgcaagcaaagctcgcagcgcaaaaattagctgaaagactgaatattaaaatgcggagttataatccagaaggggagtcttcagggagataccgagaagtaagggatgaagatgacgattggtcctctgatgaattctgaagataatctcctaaatcactgacgttgagatgtcatcatcttacatcagactttctaactagtatcaagatcagtgtcagatattgttgagggaagtaattttataaagttacacaaaggtagttataaaaaaagcccagtttgtctttcagaaggtgactttcatgtgcttgaaaagtttaatatttgaatattgtgtttaaccacatggtattaaaattttgcaatatattgtgtattggtctgatattttagtatatagtagaacatactttttttttctttaagccaaatgaaaagaggtaactttgcttttttcctttttcttacctatcaaatagcatttattacatgtctttcagtgaaatacttagttgttccaggcacctaaaatcaattaggaa

SEQ ID NO: 79657 - DNA, 1430 bp, Homo sapiens
aatgctcttctcctttttctgtcttcccttaggaagaacgttatctctcttctgattaggaaggacttcccttttgagtagatgctggaaagtggaggttttttttgttggtttgtttgtttggttttgtgtttttttttgagatggggtcttgctctgtcgcccaggctggagtgcagtggcaggatctcggctcactgcaatctaggtggaggtctttttaaataacctcatgttacttcaggcaaatctggtacaggagaagcccaagctaactgagctgggtgaaggcttgtgcatcacctggcttgagttccttgctgtcacagatgataggttcatgtacacaacattaatgtttgataaggaaagcattttttttttgttaaaattgaattgtcagtactttacttttttccccccaaataggtatatatagactgcagaagcttcagtcccatatataaacgttcatgtcattttagaggattatatggttgtctccagagaaattaacttacattatcaaaaaattctttgtctaatatattggagtctttaaaagtgttgaagaataaaatattaattagaacaacttcaaatgctaaggtgatgttttaccgggacttaattaaatacaactttttcctttcgaaaaagactgttcacatttgcttccaggtgtaattattgctttcattccttacccccctcaagcaaatgtgaaaagtatactgacctaagattctcattagttttagttcttaaaacgaatagtaaatgatttcacagcgtaaaatttgatgttatttctggaagctggatgatatggaagagttcatgtgcctggacacacagttccctgtaatcctgccatctagggagataaactctgttaacattttgatgttgtgtttttgcttatttttctatgcatagttatgcatttatattctcaaaaatgaaatcataatgtacattgctttgtagtctgctctatatattgtcaatatgttcccatattaaatattttgctttttagacagctgtaggatattttatttcatgggtataccataactttaagatttatttcctattcagcaatttgattatgtattataatgtaatctgtaaatagtgatatgattaacatcttaatcacatccatagaaaatgacttatttccagaagataccgctctaaaaatgaaattgttaggtgaaagtgtttttgagaatttttatatatattactcactgcagagatcatgttcatttacattcccattagcaatatatccaatgctcagaattgaaaattactacttaaaatctttgcaaattgaataattacagaaaagggctacatttaaaatttgtatttgtttttcttacttagtgaaggttgtgttttttttcatattcatt

SEQ ID NO: 79658 - DNA, 1029 bp, Homo sapiens
ccaaagtgttgttgggattacaggcatgagccactgcacctggctgtttttctctaagttttctacaatgttttattttgctttttaagacagaaagtccacgcaaatcagtcaggaatagatgtgaaaaatggggatggggcctttgaaccaggagcaatatgagaaggtgagaaggatggcctgggccggctgggtctgcgagactacctggaaaagccacgggaatcacagcccacagggtgacatctccagatccagcagtcttttaggaaggcagatggagtctcagacctgtcccacccatcttaaagtggcctggtcacagggtcagagcttcagcagacagaggcgccctgggataagttgccaaatatgggttgagcaacagtggcactggaacgaggtaggaggcggggaaaggggatggaaggtaaaatcctgcccctgtcctcaaggtacttacagtcaatgtgaggaaggctgacagccataaaatgatgacctatgacaacgagggtcgttccacacacatcctccagaccccggcacaagacctccgcctttcatctccattatattgggcaaaacacaaagcatcaacgaaaaaaaaaaaaaagtaaaagtacatagaaaaggagacacagaggaatacagaaaagcaaaaacctccttcaaactggtggatgtttcatcccaaaggacgctcgacctttctcaggcatcctgccactgaagaagtcaattactcacggcccacagtccctaggttccgctcagcacagtctggaatcaagggttcatttaatggaagcttaacagattcagatttctctaatattccacatccccttctgccaagaagctgctttgaaagatgacactcccttgatgtgaatttgcagcctgccccattaacaaggcttcagtcagaaaacatttttaaatcaaccctgttccagacacttgctcccaaggacaaactagaagaaactctgcaccagctcaaaccttccaagcactttgatg

SEQ ID NO: 79659 - DNA, 1045 bp, Homo sapiens
ccatcctgggctatcgctgccacaaaggacgctctcctgtcccctaaacgtctggcccctgagccggggaaaatgtttcatgcccttgtcttggcgatacactttttcttccctttttcttaaattgtgagtaggaggagattgatttctgcatttgagatgctatggttccacgattttaggagaaagtgcttgtgtaaaacccaggagtcagctttagaggatgcaaaggcccctttagcttgcacatcctatgaatgagaattgcctatttctacaacatgtgtccctagagtagcatctctgcaggaggatggaacgtgccaaggtgtgtgggctgtgaagagccaagccagcatgctttctgaggctcaccagggaacgggctggggacggaacctgcgctgatggctgaggcacccttgagtttgcaggagcactcctgagaaactccatgtctgcacggagaatcttgcatgactgcccttttttggagaaatctttaaatgaaattaactttaaatataaatgagtctttcaggctgagaactggttcctgctgagaactagttcctcctcctcctccttcttcttcttcctcctcctcttttgtagagatgaggtctgtatgttgctcaggctggtctcaaaatcctgggctcacacaatcctcctgcattggcctcccaaagtgttaggattacaggtgtgagccgccacacccagtcctaattatttactcttatttggatttttgtaagtgtttttctttaaaaaaaaaaaaaaggaagaaaagaaaagacaatttgcctatcattctaccctgccacccccagcacaatgatgctattacaaagattaaggaaaaaagtgtgagtgattttgcccactttaccttatgacatgtttaataaggacgttaaaaaatgatttggggaaaacgcttttaatcctgtgactgcaaagagaccagtacaacatactcccaagttctggcaggagaaattatttcaggtcttaaagatgaaaggcatgaaatagtcca

SEQ ID NO: 79660 - DNA, 1013 bp, Homo sapiens
agagttgggaaggatcagaatataaaatcttagaataatagtaaaggggatcatcacccaagtcaaaatgtattaccagctcctggacactaaagcccacagaagctcatccctcggattgtgaatgttactgggtcctccactctgtaaaagtctattcttttcctgagttgatcacatcaccatctgccttgacgactcttctaaaaacagtctggtgctaaaaataataagtgaatctcagcaaatctgggcatcggaggtgggtgggaaggagggaaatgttccaaagttctcatctgggtagtagctgtgcaactggtaggggaagtgaaagtattctaaagtttggaatggggagtggaagcagtggacaaacagtatttggtgggagaagtatgtgtctggttttatataatggtaaagaaatatgtatctgattatgagcaacaggaaagggaaactagctggaagtagaatgaaaatctacaagaaaagttgtatcaacaagatggaaaggggaactatcaatttgatcaatctgcaaaaataagagtacataaaaggagaaaataattagtaaagtaaggcaataaataagatagtaagagtccaatcatttcactaaatgtaaatggaatagattttcttattagaagtcagagacacttagattgagttaaaaatataaataagccagctatactttatctagaagaaaaatatctaaaatttttaaagaaacaaagtataaagaaaagttgaaaataaagaaatgaacaaagatatcaagaaaatattgtgaaaaagaaaataggattagcaaaattaattgtcagacaaggaggaattaaagattgggggcactaaaggaggaatgttatctaacaatgtaaggcacattttgtgaggcagaattaacattagtaaacttatgtgtaccaaacaatgtaaatacaaatataatttgatcaaaatagagattttaaaacacttttaagaatcacatctaa

SEQ ID NO: 79661 - DNA, 1287 bp, Homo sapiens
gaaggtgaaacagcacaatgtcccattccaaatttatttttgaaacagatgtaaataattggcattttaaagagaaagcaaaaacatttaatgtattaacaggcttattgctatgcaggaaatagaaggggcattacaaaaattgaagcttgtgacatatttattgcttctgttttccaactacatcacttcaactagaagtaaagctatgattttcctgacttcacataggaggcaaatttagagaaagttgtaaagatttctatgttttgggtttttttttttcctttttttttttaagagtataaggtttacacaatcattctcataatgtgacgcaagccagcaaggccaaaaatgctagagaaaataacgggatctcttccttgtaaacttgtacagtatgtggtgactttttcaaaatacagctttttgtacatgatttagagacaaattttgtacatgaaaccccagatagactataaataattctaaacaaacaagtaggtagatatgtatgtaattgcttttaaatcatttaaatgcctttgtttttggactgtgcaaaggttggaagtgggtttgcatttctaaaatggtgacttttattctgcaagagttcttagtaacttcttgagtgtggtagactttggaacatgtaaattttttgcttgtaatgttatcctgtggtaggattttggcaggtacacacactgccctattttattttgagtctaagttaaatgttttctgaaaagagatacatgcactgaactctttccactgcgaatcaagatgtggtaatataaaaggatcaagacaaatgagatctaatactactgtcagttttaatgtccactgtgttttatacagtatctttttttgttcactttggaaatttttactaaaaattgcaaaaaataaagtattgtgcaaagatgtaaggttttttgaaacttgaaatgcattaataaatagacgattaaatcaacttgaaggttctatactctttgaactctgagaactatcacaagaagcttcccacaaggcagtgttttcttacagttgtctcttcctacaaaagtatagattatctttattcttaatactttggaatccatgtagaaaatttccagttagatactctgcgtacacacaataaacctttttaaaacacccaactaatctcaactgcattacattgtttctaatcaatattcagtgcttgtcttggtggaagaggtgagtcattttgaaaacttatggtcttgtttttatgtgtttttc

SEQ ID NO: 79662 - DNA, 1150 bp, Homo sapiens
gagagttatcaaatgggacacatgagacgctaactgcagcttttgccttggttcttcctagtgcctacaatgggaaaacttcactccaaagagaaacctattaagtcatcatctccaaactaaaccctcacaagtaacagttgaagaaaaaatggcaagagatcatatcctcagaccaggtggaattacttaaattttaaagcctgaaaattccaatttgggggtgggaggtggaaaaggaacccaattttcttatgaacagatatttttaacttaatggcacaaagtcttagaatattattatgtgccccgtgttccctgttcttcgttgctgcattttcttcacttgcaggcaaacttggctctcaataaacttttaccacaaattgaaataaatatatttttttcaactgccaatcaaggctaggaggctcgaccacctcaacattggagacatcacttgccaatgtacataccttgttatatgcagacatgtatttcttacgtacactgtacttctgtgtgcaattgtaaacagaaattgcaatatggatgtttctttgtattataaaatttttccgctcttaattaaaaattactgtttaattgacatactcaggataacagagaatggtggtattcagtggtccaggattctgtaatgctttacacaggcagttttgaaatgaaaatcaatttacctttctgttacgatggagttggttttgatactcattttttctttatcacatggctgctacgggcacaagtgactatactgaagaacacagttaagtgttgtgcaaactggacatagcagcacatactacttcagagttcatgatgtagatgtctggtttctgcttacgtcttttaaactttctaattcaattccatttttcaattaataggtgaaattttattcatgctttgatagaaattatgtcaatgaaatgattctttttatttgtagcctacttatttgtgtttttcatatatctgaaatatgctaattatgttttctgtctgatatggaaaagaaaagctgtgtctttatcaaaatatttaaacggttttttcagcatatcatcactgatcattggtaaccactaaagatgagtaatttgcttaagtagtagttaaaattgta

SEQ ID NO: 79663 - DNA, 1034 bp, Homo sapiens
ttatatttaaataatatatatgtgcaaatatctaacatatgtatacaactcctaaacaaatgttctttaaaaattacaatatactgtgttctattctatgttttatatactgtaaaagatactctaaaatattttgtagttttttttttttcagtggaaaaatctgtttatttctaggctcattggtgggcagtattacttatgggaattgctctgatcatgctaatggctggatttattaagatatgcagtgttcatactccaagtagtaatccaaagttgcctcctcctaaaccacttccaggtaagaatatttgagcaagatacatatttatgtaactcagaattgtttagcaggtagaattgaattataaatgagtctgtagtaactaatgttacagtactttctccgtaagaatgggattattggatgaatgatttagttgatatttgtgtgctttttgtcaatccaatctggccagtgactgctaagttaatgctaatttatctgagtgtctgaaaatatttagaactagaaattttaaattttgcttggtatttgttttcttgtttttttttttttaaatatattctaacatattcccttgccatgattatggtgaactactttaaaattgttgatctttctattctaatagttgtgcttctcatattgttgtccttcattcctccttccttcccttccatcttccctccctcccgccctcccttccttctttttcttttttctttctctcactgtgttgcccaggctggacttactcctgagctcaagcaatcctccccactttagcctcctaagtagctgggactataggcgcgtgcactgcacccagctctcttatcgtttttagtgtttgtgctcttgaaatattttctggcacataagcttattttcccccagggtgatgcttgtggggacatacagatcccagtctgtgggaaagtcttagagtagaggattcattcatcaaataagcacagtcaagtattctccattcctgaaaacaact

SEQ ID NO: 79664 - DNA, 1110 bp, Homo sapiens
taaaatttgcctcaaactattattttctcctaaattttaagtgtaaaactttgacctacagtttggccagataatttccagctaaatctgtcctcttgaggagattataaatgtaacgtagcattgtgtctctattattatggtctctacaatgttttaaaaatgataaactagacaaaacgttgccagctttacagcagtaatttacataaacactgttagactttaagtcatcgtggacactgagtcaagacttgctggttgcttgtttacattgtaacatttaatatgaattactgatggcgttacccagcctaactagagaaggtctgtataacatgttatggtaatgatttcagttttttttccctctttgtatttgcacaactggaaatctgatcttcaacttatatttgaatctgaccttcagcttatatttggcatttcttttccagtggacccatcaacttgtgccagtacagggtctgtgcagtggagtaggcacttcagtggtcgaaccatcaccctgcaacctggatccccttgcaacgattttagaggttactgtgatgttttcatgcggtgcagattagtagatgctgatggtcctctagctaggcttaaaaaagcaatttttagtccagagctctatgaaaacattgctgaatggattgtggtaagtatgttttttatttacaaagaaaacttaaagtggtttgatcttaattttacttggccagaagtcatcaaagttacgagaaaacaacttaactatttatattagaattactttatatgaagatttttaaagttctaatatttctggttattatttccttctgaagtgatcagaatcatgtgtatcattcatagattgcttagtaggtgatgggagtcattctgttttaccgtgctccttagttcatctcctggatgggttacttcttttggtgcatattattagggcattttcatgggacttaaaaaacatttttttttgttgtttttcaagacaacttatttgcccaaatcgtggactaattggtgatttttcctgatctttcagtataatctctgggtctttatcttgtttgtaataggaaatgttga

SEQ ID NO: 79665 - DNA, 2086 bp, Homo sapiens
atattgttgttgatagttgttaaagatgagtgattggtacatgggaattcattgtacatattcttttattacttttaggtgtgtttgaaattttctgttgcaaaaaaaggcttaatttttttttttcctggttagtgaagcactaacttggtttgtatttgtgtgatatgaatagaacagtcaataaagctcaatgtagcatggcctaagttgcaagttacagcttctagaagggaccctctgtcaaatcctctcactgtacagattgagaaactgaagaccccaagattgcattgctagttagtagcagaccccctgttagaattaggtctcgtaatttccagattcctagtttgttctacttattcatcaaagttttcctttatccctttgttatgatgatctaaagaatttgtgaattttaaataaaattaatgtgtgcacacaatgcttactttgtcttgtttattttcctcagaatctggccaacctatttgtggaaatggaatggtagaacaaggtgaagaatgtgattgtggctatagtgaccagtgtaaagatgaatgctgcttcgatgcaaatcaaccagagggaagaaaatgcaaactgaaacctgggaaacagtgcaggtaccttgctaatttcagtgatgttaacattcttgtaaagttacctcaatgcagttatgacaaatttaaaactgagattaagagatgcatatggttttgaaactttgcttttatctgttgtttgttttctttttctgaagtagtgttggttactgctctgttattggcagattgaactacttttttttttttttttttttttttttttgagacagggtctcgctctgttgcccaggctggagtgcagtggcatgatctcggctcactgcaacttccacctcccgggctcaattgatcctcccacctcagccccctgagtagctgggactataggcatgtgctaccacacccagctaatttttgtatttttttttagagacagagttacgccatttgcccaggcttgtttggactacttttaatagtaatttgtgtggtgaatgttaacaaaaggacatactcaaaggacatactaaaaagaatcctaaaaaatacatattcttggccgggcgcggtggctcacgcctgtaatcccagcactttgggaggccgaggcgggtggatcatgaggtcaggagatcgagaccatcctggctaacaaggtgaaaccccgtctctactaaaaatacaaaaaattagccgggcgcggtggcgggcgcctgtagtcccagctactcgggaggctgaggcaggagaatggcgtgaacccgggaagcggagcttgcagtgagccgagattgcgccactgcagtccgcagtccggcctgggcgacagagcgagactccgtctcaaaaaaaaaaaaaaaaaaatacatattctttagttacttattgtgaaaatgtaactatcttccatattttaaaaatcttaactttaaatatttagttaatgtggaatccatttacttttctaacttggcaagttataactatttcacttgtcaaatttactttggtagcagtgtaagcaattgtttgcacaatactttttttttttttgagatggagtctcagaaaaacctgtcacccaggctggagtgcagtggcatgatttcagctcactgcaacctctgcctcccaggttcaagcaattatcctgcctcagcctcctgaatagctgggactacaggtgtgtgcctccatgcctggctagttttttgtatttttagtagagttggggtttcactatgttggccaagttggtcttggactcctgatctcaagtgatctgcccaccttcgcctcccgaagtgctaggattacaggcatgagccaccgcacccggccagttcaatatgttttaaacggctggtctgtatatcctagtttgattttagtatgaaaatgggagagaaagcgataaattaactaatgtgtgatgtaactgaaaaaatactgataaattgcctaatattaaatccattttccattgtagccttttcctaaaggtgaacagg

SEQ ID NO: 79666 - DNA, 1085 bp, Homo sapiens
tttcctatatattggctattaagttagctgtcttagattcctgttctgtgtgtatttagccccatgtcagtctcttgattcttttgtctttccccacctctgtcttctctgaactattcataacatgtaatttaacatatgtgttagagactatttagtagttttaaagtagtttattttactgttactagttttaaaagtatgtgagcttatttttaatagacttttatgacagtctgtcctcaattctagtccctgcttacaaagctataaattgttatggctagacctccactgattttcctccttttctaagacagtgacccctaaaagagcaaattcttttcctactcaaggtgtaaaacaattgtaagatcctttttaaaggagagtccacaagcttccattgttttcctgatgagaacattacgtttaatcagttgacctgaaaaccttattttacttcctgtttatgtaactttatattctttttgacagcatgattctggaacagagtgcacaccaggagaatctaagaatttgggtcaaaaagaaaatggcaattacatcatgtatgcaagagcaacatctggggacaaacttaacaacaataaattctcactctgtagtattagaaatataagccaagttcttgagaagaagagaaacaactgttttgttggtatgtatattttcctaacgttttgttatgaacattttcaaacattcagacaacttgaaagaattctatagtgattactgacatacccaccacctgcattttactattgctaacactttgctgtattccctttatctcgttatttcttaatcttgccatctctcaattcatgttttattgcaatttaaagtaagttgcagccatcagtatacttcacacctaaacattttagtctgcaaatcattaactagagttcaatattgtttatagttctttttctgttttctgcataagtgaaatgcacaaattttaagtgcatcatttgatgagttttgacagatgcatttacctttgtaaactacctatcaagatacaggacatttctgtcaccccggaactttct

SEQ ID NO: 79667 - DNA, 1001 bp, Homo sapiens
aacattttctgtaaagggcctactagtaaacattttaggcttcaggggcagtgtttggtttctgttgtacagtctttgttgcttttacaatttgttaaatatggaaaagccattcttagttaagccatataaaaacaggctgctggctactttgtcaacccctaattcagagccaataattgtgaagattttgacatatcttctatctgtatttctttttctttgctaaggtatttaaaggaactctatctatccttacgtatttcagtacacattcctgaaaaaatagacattttctaatacaactacaatgtggttattacacctaacaaaattaacagcgatctttgatattatctaatatccagtccattatattgatcttttaagtgaccttaaagatcagtacaacacagaaatatgaaatactgaatgatactctgtctttgtgattttggtagagcttattaaagataacattttgaaaatgtacacttgaaaactgtatgtaaattcattttactttcaccttatcacttgcaaaagtgcaaatttttatgattttaaaaataagttgtctacttgtagcttaaaatccccaaatgcacttctctaatttttcccatgtttgtaaaataggtgccatctcactaagttgcaagtctttcttcttctacatcccaatcagaaattgatagattattattaatgttcttggataaggtatttaaaatgtgcttaatctctgtaactcttgactgcttttgtgatcttctcttaaaagagtacttggaattttagagatgagcagagaattattgttcatagttgatttgcattttcaagagcagataagtgtcctctcttctccccaagtcatcttggttccaggccttaccaggggaattttagtactcctccagctacttgtctggcctttagtcccaggtcactcatttttatgtgcatatacatcacctgagaatcttaaaacacagatt

SEQ ID NO: 79668 - DNA, 1037 bp, Homo sapiens
ggtgaatgcagtggtgtaattataataataattgactgtgggatttaaactgaataaggaagagaaagaatatctggtgatagacaataaggtggtagcattggtggattaaagggtctcactgatgttaaagggttgatggaacctagagggaatgtgctgaaaagataagtggtggaaagaaagtagaatactagaagttgagattatgaagtgctttcagttatcaatagtgacaagttcagaagagtaactatggaaatgagaaactgaggtaggaaaaaatcattggagaaaagaactgagtgtagtggaaggatcatcgtcatgaatgatgaatgatgatgaatgaatgatgaatgatgtcatcagtcatgatgatgaggtggtgtcagagagactgacagtaagtcaggatctaaaaataaggaaataagggcagtaatgacttgggtgacaacaaatgcctgtaataagttggggtagtcagtgatacagtcacgtaactgtaaaactgagctactatgagaatagtcttaatggtcctaagggagaaagtggtagatagttgtgttttgtgaaatgaggggtggggagtatcttcccaagagtaggaagagttttggggttctcttttatatttgctagagtcctcctgatggagctcaggaatactgcagaaggattctcttgacccctgccagatgatggtccagaaacatagatattctcttggtgacagccgaatgcaatatattggtgatagggtcagaataatgagtggttattgcccttttttagaattcacaaatcatctatatgacaaaaagctaaagaccagtggtttttattgagggagagcttaggaacctgctaggttttagcattaaaatgcctagcataatgccttttccataggtgcttaataagcatttatggttttcattagttaagacagttaaatttttacttgtaattctcatttataattggttatacctaaatgtgtgatagtaatgacgtttcttctttgtatt

SEQ ID NO: 79669 - DNA, 1071 bp, Homo sapiens
tgagggagctttagggagatttaggaagacttccctggggaggtggaatttgacttgaaccttgaagataaggggtagacttttgattgctagaggagagaatctgtgatcacaggagaagcctcagccctattactctggctgcaacaatatttcttttcagttgtcacagcttgggaactaaagaaaggaaaagagattcgcatgttctttggcctagtcacccattcacccctgtgtatagctgtatagtcccaagtcaaatacacgtaaataatggtcacttaaagttagtatgttacaagttttcattccaagtgtcagttgtaagttttacaggtttaacaactgattaatttgttaataaacattttttgagtgcctaatctgtacaagacacttttagaaactatccatacaataatgaatagggcaaaggttctgccttaaacactttagagtctagtaattctgtttgtcattgatcagaataataaagcaacatttctctggttgacctgactcccattatcctttggctgccaatagtaaccctttctttctaaaacccatggggtgagaagggacatgtctggccctcttcctcatctctgtttccagagagatcagtgttgtgagtgcttgtggaaagtggggtcattttcaacttcctcctctttctagggacaatcactctgtgcttttcttatgcccacttaccctcccaaaacagaaattagacatggggattgggaagacatgagaattggtacccgggagaaacggcctcccatccactggaattaggaggaagaacatttggagttctttcctgtctccaaacttttcatttcttctcaaaagaaaaaaaaaaaagcctatcctttcttctactctccatcagtgaatccttgttgatgtaggcaactttgggaataaatgacgattttcatggacaaggcccccacctcatgatactctggatactaacaaaaataatttttatgcataataatattattctatagaagtcattctattttaaattcaattaatgcagatttttaaaaa

SEQ ID NO: 79670 - DNA, 1054 bp, Homo sapiens
gggacagagagtaaatatttttggctttgagagctgtatgttttattgcagctactcagctctgccattgtagcacgagaacagccaaagaaacacataaataaataagcatgggtgctttttttaaagaaattattatttatttatctatttttttggagacagagccttgccctgttgcccagtctggagttcagtggtgtgatcatacctcactacagcctcaacctcctgggctcaagtgaacctcctacctcagctctgtgagtagctgggactccaggtataagccactgctcccagctagcatggctgtttttaataaaacttcatagacacttaaatattaatttcatatatatttcatatgacataaaatatcattcttttgattttttctttaaccatttaaaaatgtggaagctacccttagttttcatgtcaaacaaaaacagatgggagggctcactaaatttaataattactttaattggttctttaaattctctgtgtagaatatgacaggttctagaagtagtagtagtagcagcagtagtaagaataattattatggcttaatatatacctgacagtgtataaaaatctttacttgcattattgaattgaattctcaaaataacgttatgagatactggcacacctattattcccactttataggtgaaggcttaaactgaggcttagaaaacttatgtcacttgattgtggacctcctgttctttaccctgtgctcttctgcttcactcatggaagaaagctgtaaattctcactgcctttacttcaaggatttctggggcttttctgaaatctgtaagcctctctaaaatcatacatttgcatctattgctgttttaagccaaactctctccttaatatatttagcagtgtttattttataactaaatggcaaaggatgccctttaatgtgtattattatttttatataattggtttaagtactaataatttattttcagaagtaaagtactgcattattgtatcactgtgaatgttcttaattggatttggtat

SEQ ID NO: 79671 - DNA, 1046 bp, Homo sapiens
gagcatcattactacttacataaatttcagtgtggatatttgtgtagtgtttaaggaatattttaggtatttttgtaatttttaagtccattgagtatttctttttagaatcttaaggtaatgacttgacttcaagagtccacgtttatcatggattttgttctctaccatctttatatgatgatatttttctaagaatagaaaatgtatttagactttaccttttaattctattgtccgtatatccacagttatccagttattgggaatgcttctttgaagtaccacagaaataaatttctctaatttatatagctcttgaatacccatttattattttttgactgtaattagactagtctctcaatttttgcctgctttcctaacttggcagcttcttcctacatacgttttcctttgtatagacagaaatttattgtcaatgattttattcttacccctagtaatacactgacaagcattaaccattttgactttttgctccatcagctctgacagtttttgtacttcatctgtccaactgcttgttatctctgctgctagattgctatagaaaataacatatgtatactaggtaggatgcatttatgatttttagctacttgttaaatcataagctcattaatgctacttccctgtattttcattcaccactatttgattccttttccagttttaactcctggtatttcaaactctacctttcttttcaagctctaagctatcatcctccttcataagtaggaatatgaattcctttgctttcgtttctttctgctgacaaaattattatttacctggtttgtgtcttgctttgtagctttcttagtaatttaacctttttttgcagggttacctcccctatcagggtatgtaagttcttcaggtatagtttctgtttcttttgctcctgtaatattgcaagtatcatttgtctgtgcagcaggcttttcataaatacttaatgaaatactggaatatttttctagaatgttttatcaaaatcaaagaaaaccttttgagga

SEQ ID NO: 79672 - DNA, 1172 bp, Homo sapiens
gtcgtgaagccacagtattaagtgagaagaaaagtaaaaaatactgagtttgttggagtaaatgaaatgccaaaatataaaaatatacttccaattatatattgtagttgcacctgaaatgaggatttgttaagcttgagggacatcagcaagcggggaaggctttctgaggtggaagagaatgacacataagatgcttgtaggtttacttgcctggaatcgatagtctgtgtcaggaaataaggagaattgctaactgggccatgataatcaggactgattattctaggccatgataactatgagatagaatattatggactgttgggtggagtccctgttgaggagttaggttatgattgacaaattgggtgattgagtcttggattagaatgatcgtagaaataagtaaggatagaacaagaaatgacatggaagaaaaactgataaaactgggcaaatgtttaacgtgaaagtaacaaaacttatagagggctcactctgttgaatttaaatattaggctgtttcattggagtgagtgtggttttataaaactttgaagacctcagtcgttgaagttgaaaatgtcttaagattttgagtctggatagaagcttataggttgggatgggtgtcagcgtctgggattttattttatttgcatgctaatacttgggaactggataaaactttgcatagatctttaatctctggctagttatttgggaagcagtgctttaggtagctggattatagaagtttagtgaatttggagtggagatagagattagtttaaagatatactaacacttttttttcttacttaagttggaattaggctattcagttcaaaaatatgattgacactcttgatttcatgtgaactatgaacttctgtttccaagacaaataggggaaaataatgcgatctttgcattttaggcaaatttgcatatgtgatttgtggagcagaatttgcttaccatctgtttttgcttgtattgatgatggcaggacacacgtgtgcatacatttgaactttgaatttagctttcaaaagaacacatagaattctctatgatttgatggggtattaatttactaccccttttcctaggaattaagtgggataatttgtaaaagtgctaaagactttaaagtactatataaa

SEQ ID NO: 79673 - DNA, 1020 bp, Homo sapiens
caggggaagcttcacagttggaaccctcctagattctgccgtatgtgtctctttcctttgctaatattaacctgtatctttgccctgtaatgaactgtaatggtgagtataataggtttcagggagtcctgttagtcactctggtgaattactgaacctgagggtagttttgggaaacctctgaacttgtgattggtgtgagaagtacgggtggtcttctatgagctcttccctctaaccttgtagttgggccctagctccttagagttggggtcagaagccttgggcagacttagtagtctggaggactctgttcttaacctcatagtttggctaattccaggcaaaagtacaaaaaaagtaagtaacaaaaaatataaattgagattaatttgccaaattaatacatttttcctgtatttgtgtttacataatttaaattcttcgacttacctgagggtctactaaccacccatggtacaaaggaatatcaagaagatcaaatactatgcattctggtgtatattcaaacactcgaacaccagtgaatcttacatttacatccaggcctgtctgtagtttgtgcaaaattgccatggcatcactcatattctgaaaatagaaaaggggaaagttctaattcagaaacatcaaaacgagaacaaaaaagatattcaagtacaagcacatttacttttaattttccattttatccaataaattcaattcaacatatttttattattgagtatctactatgtgtcagaagctagttggagtttgaaagatacaacaatgaataaaacagacactgaggtgggcggatcacttgaggtcaggagtttgagaccagcctggccaacatggtgaaaccctgtctctgaaaatacaaaaattagctgggcatggtggcatgcgcctgtagtcccagctacttgggaggctgaggtgggaggatcacttgaacccagtaggtgtaggttgcagtgagctgagattctgccactgcattccagcctg

SEQ ID NO: 79674 - DNA, 1097 bp, Homo sapiens
aaccatagcttccttgctcatggctgtattcctactactagtgagcacccagacatgatacatgctcaataaatatttgttaaataaatgaataaatcctagacttgagaggtcaggttaagtaagaaataaaatgatttagcagtattcaccatgtatcaataaatctgatccttatgtcctttggccttagatttctgaggagtatggatgactctgggcccacatctgacatacatctagctaaaatgttgaagttatacaaatgagctgttgctataactaagataggaatgggagagcaacggctttaagggtattcttacataagcaaacaagtcattattttatactactttgtgtaattcattgactaaagtgttgaagaaaatatgaagatgtaattcacgactttaataagccactttcatttagaaaaaaatgacatatttacatggaaagaaaactggtaattaggtattaaccaataagggctaaaaaaagatgatgtagccaataacagctagatgatggttagagaattgtactctgccttagctgcacattaaaataacctgaaaagcactcaaaattaatgatgctcagatcccacctccggagattctcatttaatggagttggtggtaggttctgaggattggcagttttaaaaaagcctcccatacagttttagcatacaatttgggttgagaaccactggtttgaggagagtagaagtagctttactaaagagttagtatttaaaagcttcttaaaggatgggtaaaattgggacaggcaaaaaggaatgagaagacctttccaaacagggattaaggagtgagatattgtggggaaaagagagagagatcagattgttactgtgtctgtgcagaaagtagacataggagactcccattttgttctgtattaagaaaaattcttctgccttgagatgctgttaatctgtaaccctacccccaaccctgtgctccctgaaacgtgtgctgtgtcaactaagggttaaatggattaagggctgtgcagggtgtgctttgttaaacaaatgcttgaaggcagcatgctagttaagagtc

SEQ ID NO: 79675 - DNA, 1007 bp, Homo sapiens
atttttcaggaatttgtatggtatttttctattttgtgaaatgagattataaacccccccaaaggtgtttataagtcatacattagctgaacatgccaagagctcttatttcttgttatagtgtagtgtgccaattataaactatattcaaagccgagtggatttgaggaagtaaaatatctacttggtctatttattgtgttgtacagatctaaacagtaggaatgtttaatatattctgaagatacagattgtaaaactttccttaaatattatattactagttttgatcaatttaacagtcctttttcttttgttacttcttattaagggtcaactgtatttgttggtaacggaccaggggtttcttactgaagagaaagttgtttgggaaagcctacacaacgtagatggtgatggaaatttctgtgactcagaatttcatcttcgacctccttcagatcctgaaactgtatacaaaggacaacaagatcagatagatcaggtaaatttgtattgtcgtctttatagtggttaaaatgctgatttttttcaaatgtgaattcatgtatccaaaatttttcaactaaagattaattcatcaatatgcttgtgaaattttcctgacacttcctgaatagttggtgatcattctacatgtacattaattatgtactttggtgcagaaggccagatcatattgaactgtgaaggtcatggtgagaagtttgaattttattctaattgcagtaggaaagctatgtcaagtattaaacacagaagtgatgggatcttctttacctttttaaaagactgttatttggagaatacataagaaggaaacaggtctaagcagagacaaatagtccaagcaagagctgatgatggcttagccttgggtggtagagatgaagagatgagcacatatctgagctatattttgactagttagaaaaagtagaggagagagaatctggaaggtagcatatagtgtataaagaatgggt

SEQ ID NO: 79676 - DNA, 1024 bp, Homo sapiens
gcctccaaaaatatttagaacaatgacagaatcactgaaataagttcatagctccccaagggaaatacttaggaagataactgtcattttaatgtttaaaataaaatgttttttattttattttaattattttgttattttatattgttttctttttcttttttgtttttattttattcatatttatagacagggtctctctctgtcacccatgctggggtgcagtgaggagatcataactcactgtaacctcaaactcctgggctgaagcaatcctcctgcctcagcctcccaagtagctaggactataggtgcacaccaccacacctggctggtttttaaactttttttgtagagacagggtcttgctatattgcccaggcctggtgtattttttaatagccattcttacagctttatagatataacgtttgtatttgcagtcattcattcttgggtaaaatctcatagctaatgatggttataatttaatttattaggattatcttatggcattatctctacaacaagaacagcagagccaagagatcaattgggaacaaatcccggaaggaatcagtgatttggaactagcaaagaaactccaagaggaagaggacagacgggcttctcaatactatcaggaacaggaacaagcagcagctgctgctgctgctgcttctacacaggctcaggtaaaaactagtgttttgagtcttaaatgtgatgatcatggctgggtgtagtggctcacacctgtattcccagccctttgggaggctgaggcaggcagattgcttgagcccaggagttcgagaccagcctggccaacatggcaaaaccctatctctattaaaaatacaaaattagccgggcgtggtggtggtgaacacttgtaatcccagctactgggaggctgaggcaggagaattgcttgaacctgggaggcagaggttgcagcgagctgagattgtgccactacactccagtcaggatgatagagcaagactccttctcaaaaaaa

SEQ ID NO: 79677 - DNA, 1100 bp, Homo sapiens
taaagacacaatagctctaattttttttttttttttttttttgagacggagtctcgctctattgcccaggcttgcatgcagtggtgctatctcagctcactgcaatcactgcctcctgggttcaagcgattctcctgcctcagcctcccaagtagctgggatgacaggtgcccgccaccatgcctggctaattattgtatttttagtagagacagggttttgccatgttggccaggctggtctcgaactcctgatctcaggtgatccacctgcctcggcctcccaaagtactgggattacaggcatgatctaaattctttatacccttcaagggcaggaaaccagtatctctgaaaagcttgtttgttttaatacaattgaacatttcatctttccccccacagtaatcaaagcaaacattttatcattattattcttggtatatcaaagtaaattccaggaatgtaagaaagtctgacttggaaatattacatagaaaaaggctgaattaacacattacattttttagtttttccttgtaagtatacattgacatctacttatctgatagcagcactgctggttttgagtgagttttgttttgttttgtttccttccagagggaatgcagtatggcagcattttctttggaacaaattaagaagatagtaacaaataacagaagaaatacttctacacatatattttccatgggcaataaacagataagtatataattatgaaaaaatatgcctcaactatgctttttaaaatttctcaaggtatactggtttgtttttcttattcaaatataatgcactatcactactatctgtcccgggaaaaacaaaccctgaggtttgagttacctccttcagccaacagagtgatatcaagagtaaacttggattgaggtcaacctgtttgagccaatagagagttctgtagtatatctggttattttactaacgtatacatattctaggttataatcaagatactcattaaatattttctatcagagttttatatcccaaacaggttctttgatgatttatcatgctaccataggaaatttgaagaaataacaaattgtgtaa

SEQ ID NO: 79678 - DNA, 1079 bp, Homo sapiens
actacagaactctctattggctcaaacaggttgacctcaatccaagtttactcttgatatcactctgttggctgaaggaggtaactcaaacctcagggtttgtttttcccgggacagatagtagtgatagtgcattatatttgaataagaaaaacaaaccagtataccttgagaaattttaaaaagcatagttgaggcatattttttcataattatatacttatctgtttattgcccatggaaaatatatgtgtagaagtatttcttctgttatttgttactatcttcttaatttgttccaaagaaaatgctgccatactgcattccctctggaaggaaacaaaacaaaacaaaactcactcaaaaccagcagtgctgctatcagataagtagatgtcaatgtatacttacaaggaaaaactaaaaaatgtaatgtgttaattcagcctttttctatgtaatatttccaagtcagactttcttacattcctggaatttactttgatataccaagaataataatgataaaatgtttgctttgattactgtggggggaaagatgaaatgttcaattgtattaaaacaaacaagcttttcagagatactggtttcctgcccttgaagggtataaagaatttagatcatgcctgtaatcccagtactttgggaggccgaggcaggtggatcacctgagatcaggagttcgagaccagcctggccaacatggcaaaaccctgtctctactaaaaatacaataattagccaggcatggtggcgggcacctgtcatcccagctacttgggaggctgaggcaggagaatcgcttgaacccaggaggcagtgattgcagtgagctgagatagcaccactgcatgcaagcctgggcaatagagcgagactccgtctcaaaaaaaaaaaaaaaaaaaaaattagagctattgtgtctttattttcttaaattttgcccaaggtaacgttatatatcccaccacttcattgctggtttgggtacataggattttgaaagtggtatattaaagtctttccttccaagtattttgtaatacttgaaaattctt

SEQ ID NO: 79679 - DNA, 1483 bp, Homo sapiens
aaaaacaccaggattaagtaagaacatgcatgaactaaaatttagatagatattcaaagtaagttaaatttaccagagtcctgcatctggcctctcccatgccattatcgctattttgcaatttgttttgttcaggaagcctctgattttaatatttaaagtgtcacctgagaagagtaacctcaattcttcatgttttctcaacaatcttagaggtgttggacatcattaataaaatatactaaattatcagagaacttaagaacgctaagattctgatgagttcctttaccattttcagtcactttctaaaagggatttaacttcacattatcaaataacattttacactaaaaacacaatttatatagccctaaaataatattacttgagagatctaaatgaattccaccaatgcaaacgaagtttatatactgtattagtaatttgataccaccgtattccatggagaaaaaggcaaagagaatctaaatatttagatctgtgaaagatactagaaaaaaatagatttttaaatgcttctgatcctctcaaaatactcttgattttgactctatagtctatagaacacacaaaaaactgtaaaatgcatttgggaagagatcacgccatactcaaagaaaattctacaaattttgacagcattaaaaaaactgacttaagatatattttgttattgagaaaaaagtgtgcacattcaagaacataggatgtgtaatatttgtgataaattaagtcatactttgtgcttatactatgccctttattcaggagtgcaaaacacttaatcaaaaagagcatccttcacatatttaaagagtacattgaggcacagaaagtttgcccaaggcaagatagaaagtcgggtttatagacacaaaatgatctagaattcttcatgtccaattccttaaaatacaaactgtagactatttgtaatgcctccatcttattttatcaaacattagtaattttactattataagtttatgcataagtactgtgtgataggtaatgcccataaggtttttatcatgttttaaggtaacttgtgcatggaataggaaaagttaatcaaatgtaatcaattcgcttttgctttttaacaaaacttaaataaatgagctatttgaggacagttctggaaattcttgccttgatttttctccaagattttagatatgtagttcacatgtgaacattaatatatgaacaattattttatttattggcctctagttctctttcctctcatgatctgtctcttagtgaattgactttctgattcattgaaagcaaaatgctaagaaggttttgtgcaagtgcaaaatgtttaatcttgggttcagtcaactagtctctgatactaacttgcttagttaagccaagatcaagaagtatgagaaagaacttgaaatatgataaagaatttgaaacagaatatgggataagtagtcaatat

SEQ ID NO: 79680 - DNA, 1047 bp, Homo sapiens
tcaatgtactctttaaatatgtgaaggatgctctttttgattaagtgttttgcactcctgaataaagggcatagtataagcacaaagtatgacttaatttatcacaaatattacacatcctatgttcttgaatgtgcacacttttttctcaataacaaaatatatcttaagtcagtttttttaatgctgtcaaaatttgtagaattttctttgagtatggcgtgatctcttcccaaatgcattttacagttttttgtgtgttctatagactatagagtcaaaatcaagagtattttgagaggatcagaagcatttaaaaatctatttttttctagtatctttcacagatctaaatatttagattctctttgcctttttctccatggaatacggtggtatcaaattactaatacagtatataaacttcgtttgcattggtggaattcatttagatctctcaagtaatattattttagggctatataaattgtgtttttagtgtaaaatgttatttgataatgtgaagttaaatcccttttagaaagtgactgaaaatggtaaaggaactcatcagaatcttagcgttcttaagttctctgataatttagtatattttattaatgatgtccaacacctctaagattgttgagaaaacatgaagaattgaggttactcttctcaggtgacactttaaatattaaaatcagaggcttcctgaacaaaacaaattgcaaaatagcgataatggcatgggagaggccagatgcaggactctggtaaatttaacttactttgaatatctatctaaattttagttcatgcatgttcttacttaatcctggtgtttttgctcttagatgttagagtttaataaattgtgatacgcatatatttttttacatgaaggattctactttctaattttacttttctgatctcaagaaaattaaacttgaaaaacggggtaaaattcttcaactattgcctcaagttcagttttgtcctattgtcctgagaaaggagatttagacttgtctgcctaacaca

SEQ ID NO: 79681 - DNA, 1106 bp, Homo sapiens
aaattagagaaggacaaaacaaaatgttttggaaggtgatcctggctcctttggctctcataattgttttatagctgaaaataaaaagtcaggaaactggcccggtgcggtggctcatgcctgtaatcccagcactttgggaggctgaggtgggtggatcacctgaagtcaggagttcgagaccagcctggccaacatggtgaaaccctgtctctactaaaaatacaaaaaaaattagctgggtgtggtggcacatgcctgtaatcccagccactggggaggttgaggcgcaagaatcgcttgaacccggaaggcagaggttgcagtgagccaagattgccccactgcactccagcctgggcgactgagcgagactcttatatctcaaaaaaaaaaaaaaaaaaaagtcaagaaactgaaattcccatttaagttctcaaatcagtgatctgtcaaaataggccttgtaactgaaataccttacaaagcagttctaactaatgcaatgtgttttttaaaaatttttaatgaaccttacattgtgaacataattgcaacatgttttaagacaaacagtatttaatccttgaagacctgtcttgtatgtctctcaattttgtcagaatttttattattgtttttcacatatgtgaaataagcagttttttcagggtacatagggtatctttgttttacagatttttaaagatgaggttttgaaaagccctcagaggtttttgttaaaagactatcttgcttaataaatgacagcttgttacagattcacacattacaagtaggacagtataacaggagattggtgtgtgaatgctacaaaacagtcagcaaaaggaatcatgtttgcttgtgaaacttcagaggtaccctgaaagtcatttcctaaagctagtgcgtgtgaatcttttccttgaattgtgcagaataattggattgaggcacatattttgaggagtagcaagtggaatggtataatgactacagagaaaattatcttgaaatatagcaaggaagagaaacaagttttctttctccactttattgttggactaattgggtcaatttgctgtgacatatcaaagatctct

SEQ ID NO: 79682 - DNA, 1081 bp, Homo sapiens
ttggtctaaatatcaaagtttattgaaataaaatataatctataataaaaaatactacaggtgttattcactggttacagttttaagtatattaacaaaaacagccaacattttaacccaacaatgacactatctttgtggtacaataacaaacatgaaagtaaatgttgaataatactgaataattctgtcagaaatattttatactttaccatctatgtatgccttttaaggaatatcctcccaaagtgaaagttttgaaactgatgacattgtttttaagaattaagtagttttaaaataattagtatttaaaacaaatttatttcacagaaattcagttcaaccctaagctgggtagatggttttaggtatctttatgcaaaaaatgtatttcaatgctctttcctatgaatctctagggttgttattattcctcaattgaaattaaagctggtcataaagcaaaacagatgaattatttcagaagtaaaatgggtattaagataaaaaatgaaaggaggaggaaaaaataggcactcatacgtaatctatatattaaaacgctttgagaactcagtagccagtcttggcctggcacaaagagatctttgatatgtcacagcaaattgacccaattagtccaacaataaagtggagaaagaaaacttgtttctcttccttgctatatttcaagataattttctctgtagtcattataccattccacttgctactcctcaaaatatgtgcctcaatccaattattctgcacaattcaaggaaaagattcacacgcactagctttaggaaatgactttcagggtacctctgaagtttcacaagcaaacatgattccttttgctgactgttttgtagcattcacacaccaatctcctgttatactgtcctacttgtaatgtgtgaatctgtaacaagctgtcatttattaagcaagatagtcttttaacaaaaacctctgagggcttttcaaaacctcatctttaaaaatctgtaaaacaaagataccctatgtaccctgaaaaaactgcttatttcacatatgtgaaaaacaataataa

SEQ ID NO: 79683 - DNA, 2692 bp, Homo sapiens
gctttagcaaacaacagaatcacctggagggcttgttaaaacacaggttggccgggcgtggtggctcctgcctgtaatttcagtactttgggaggccaaggctggcagatcttttgagcccaggagttcaagaccagcctggccaacatggcgcaaccctgtctctaagaaaaataaaaaaaattagctgagcatggcggcacttgcctgtagtcctagctactctggtggctggctgaagtgggagaatcacctgagcccaggaagtcaaggctgctgcagtgagccatgaatgtgccactgcactccagcctcggtgaagtgagtgaggccctgtctaaaaatatatatatttaaaagaacaaacaaagaaaagcacaggttgctgggagtcccaccctcagtttctttctctgtggtctgagatgggggtgagaatttgcatttctaacaggcacccagctggtgctgctgctgctggtttggggtccacacttaagagatctgctgctgtagtccacgtgcagatccacaactggcttctgaagtaatggggcttcaaagtgagattgcccaagttcaaatctctgcttcaccattttattagctctgtgaccttggaagagttcctcaacctccagatctgtttcttcagtaaagtggggttagcaatggttcagacctcacgggactgttgaaaagagtaaatgatttattttggataaagtaccaagaacagtgcctggtatttgcagtgatgatttgttctttgttctctgatgtttttttcttttaaacctttttcagtaacgcatccccaattaatagaattgtacaaatcagtggcaattccatgccaagaggaagtggctccggatttaagccatttaagggtggacctccgcgacgattctgaaaatgagctctctgccaaggttttaagataatttattgaaatctcctgtaaactttacttgactacttatgaagaggacctctgacttgcttgagagttctgtcagacttttctttttaaaaatttaacatgattgcttttctcaattttggagaagatgtttaaatagttctgttgtaacttttaatagttttgtgtatcattcaactttttttcttgcagcaccgaggcacatttgaaaagatggaattgaagtcgttttgtttaacgctgtgtgaatataaagagtagtttgcagctgtgtggtagtggtttaatttgcagccttagctctgtggtgtctggctctagagttacttctttttaccaagcattttcagcctccattttgaaggctgtctacacttaagaagtcttagctgtctaatttttagagaataagattgttcattgcatttctgagtattatgtaacctatttttgcagaaggtactgttacattaagtgcatctgtgtatcctggtttaaaaaaatgtaatcttttttgaaataaaccttcatattctgtatagttgctaaagtgttgagaacctttttaattgtaaaatgagaaccgattttcagtttagtgtagcagcacacttgttcaggtttgcatggtatgaaaccaaatagattcatgaaaccttggccatgaggtttgtttcacaaggttcttagaccgagttgtgcaggtaagtgcacttttaggtaatctgcactgtttgtttgatggataaattccatctctgggaattgtgtgggtattaatgtttccatgttcccaactatgttgagaagtggaaaaaaacccaggttctagatgggtgaatcagttgggttttgtaaatacttgtatgtggggaagacattgttgtctttttgtgaaaataaaaatccacacctggaagtgtatgtgtctttgttttcagcgttttaggtgttagtcgtccagttctttctgtagttcagcccaaggtgactgactagatatagagctataaaggcattcttttggtctttgttcttcagaaataaatctagcttagactcttcacctcagtagctgggcagcacatgctgttcacatgttagagacttaaccactaatcctatggcttttttaaaggcatctcttttaggaaagcccttcaaggtaaatgctgctctttcaaaaaagcttcccacatccctttatataaatcagtgaagaaaaatccaaatggtctagattttggtaaattcagcactctctatgctcaatacggtcatgcccatgagatggctcacacttctgagtgccgtggggcaaccaaggttctgtggtctctggtcctttggggaacttctctggatttcttacgttttctgccattcccagtcctacagctgtgggagcaggttgggtgtctgcgttggtgtaggggaggtctacctcatttttgatcactacgtgttgtagagtggcacaggagaagcctcagtatccattggagtgaatgttggtgactttgggttagaatgtcacttctcgttgtttcctcatttgtagagtgggactgtgcttcttagaagggattatcatacagctgcaaacactggctaagcgctttacgtgctgggcaatgtgctaagcgtttgacatatgttcccttgcctaatactcagaagaatcctcctagccacaggtagaattactgacctgaccagttttcagatgggaatctggatagtaac

SEQ ID NO: 79684 - DNA, 1552 bp, Homo sapiens
caccatgcccggctaatttttgtatttgtagtagagacggggttttgccatgttggccaggctggtctagcacttctgacctgaagtgatccacccacctcagccttccaaagtgctgagattacaggcctgagccaccactccccgcctcttcttatctttaaaactgtggaagcactgattgctttggatatgcctcaactgttaagaacagtaaaacattcttcagcttggtagtgacttttgagtgttcggtatcatttctcctgaatgctaaaaaaccaacctttaggctagacacttagttcagtttaaaagaaaatgagttgtaataatcaataactagcttttttccatggctttgccttaagttcattttttggtttcattattgtaggttatgcagacaaagttaagaagaattaagcactcaagtaagcacttcttggacctatattctttgtttctaatcaataggcgggatcgctttgttggtcaaagtgaggggaaaaaagcacgacctactgcacgaagggaagatccaagcttcgaaagatatcccaaaaatttcagtgactccagaagaaatgagcctccaccaccaagaaatgaacttagagaatcagacaggcgagaagtacgaggggagcgagacgaaaggagaacggtgattattcatgacaggcctgatatcactcatcctagacatcctcgagaggcagggcccaatccttccagacccaccagctggaaaagtgaaggaagcatgtccactgacaaacgggaaacaaggtagctgtgtactatgtaatgctttcctagtggtctcatgcattggggttaaaaaaagttaagattacagttttgatcatgtatgtttttatgttttgtttaacagagttgaaaggccagaacgatctgggagagaagtatcagggcacagtgtgagaggcgctccccctgggaatcgtagcagcgcttcggggtacgggagcagagagggagacagaggagtcatcacagaccgaggaggtggatcacaggtaagtgctgcgggaggcttgccgcgagcctgcacacatacatttagaggattcatgagctactctggatatacagtagcattttgatgtggcttagattagctagattggaatgattcagaggcattaattttttatttaaatttttaaaatctgaatttttctcatactttactgtcagtagttgaccatcagtagtccaaagagttaaggtactagccttgaaatactccatttcgattaaacttcccagtgaaatttaagaattgttaatttggtaagtgagcctatctaatgataactttggttttatttctttttaagaaattgaggctttcaaactgcatctgaaatctttggcccctacttgtgtttccttttcaataaaatattcttggccgggcatggtggctcatgccaacactttgggaggtaatcccaacactgtgggaggccgaggtgggcagatcgcctgagctcaggaatttcagactagcctgggcaacatg

SEQ ID NO: 79685 - DNA, 1020 bp, Homo sapiens
aagtatgcccatttaatcttcttaacataaattctatgaaactgagttgattgtgtagagaaataggtggaatgaatgaactgtgcttctgacttaccactctaacgtttccaaagttaaggataactgaagaggttgtgtgaactggttagaattttattataaagtggtttcaggtattttatttgtcttttccatttaatggtatcatttctcctgaatgctaaatgtcttttccatttaatggaaaagacaggcagtttttcaactattttctctcctgttaaattcctctcacactatttgactttatgtaattcaacaattaagtctttgctagtttgtactcctgatgtgttatgtcttgagtttactagccctgttatgtccacagttctaacatgtggtatgtatgactccaagtaaatgtcgtttgattactgtagaactaatttatgtaaataagcaaatatttctcttcaaggcgagatgatccttactggagcgagaataaaaagttgtctctagatacagatgcacgatttggccatggatccgactactctcgccaacagaacagatttaatgactttgatcaccgagagaggggcaggtttcctgagagttcagcagtacagtcttcatcttttgaaaggtagatatgttgaaaattgttatatttattttatgagccttgctagtgataactctgtttctcctaaaatcttaactggaagtaccaggtcagaactgaatgctcagaacaatttacgtggtttttgtttctgttaatgggaatgtgattcagtattccaaattaattaactagaacaccattaagcaggttggctttatcttcttatctttattctattttaattttttttgagacagggtctcattctgattcccaggctagaacgcagtggtgcaatcttggcatactgtacctctgcctcgtgggttcaaacgattcttgtgcctcagccacccaagtagctgagattatagacatgcacc

SEQ ID NO: 79686 - DNA, 1564 bp, Homo sapiens
atcaaagcaaacagtatttattaaaaatggggttgagttctagactgacatattatttttgcttaaggtgtttggttgtttttaatggtgtgcatgtccgttgtggcatctgaaaggtatgagaggtgttggatggttcttgttgtgtacgactatcctcactattccatgcatcaataagatacttagataccttcatcctcatacactaaacactagtatctgccccatggtcattgtgataattaaaaatatcccattgatttctgtagaaatagtactgacccattgagaaccactgggttactagagaaagacatgctgatgacagaaaaggatgctgactaccttacagtaagaaaataacattaaaagtctaatacaataacaattcagttcagtgaacaattgaactacctctgactcagaaaagcatgttacctggagccatctattataggatagtaaacattccaaaatagcccttaaggacaccattttgttatatgtagtatttgctattattgatgttcattgttatgatcccaaatcatcaaagtatgtacttgtttaaggagatacaatagaatatataatagggattagagctttttccatcaaaaacaagtgttggaagttgtagttttgtaaatttacatatgcagattacatccttctaaaatgtcaattaattaatggactattatagtaatttttatttaaacaggaatcatctaagaggcaactactctatattataaaatttagctgctcagttgacagtcttatttatagataagtgaaaatattgggatctgtttaaagttttactttgaattctctttccaattacattaaaactacttagattgagttgaaatttaaaattgccaacctcaaggaaaaattcaaattcaaagctattctctttcacacagtgctagcataatttaagtatttctaaatactgatttttggtagacgaagagagattgcagagagagagcgtcgagagcgagaacgcattagaataattcgtgaacgggaagaacgggaacgcttacagagagagagagagcgcctagaaattgaaaggcaaaaactagagagagagagaatggaacgcgaacgcttggaaagggaacgcattcgtattgaacaggtgcagtcagaaaatcttttcatcttaaataactcacctttttcagactctgtgattttagccctaaaacttgctttacttgttgtaaagcgtctatagaatgagtttagctaaggagcttttaagtgtccctgaaagataacagtgaattaggtactagttaaaaatagaattagtagtgactttgttctagataactggtaataattctagctctgcaatatcatggcagcctaatagtctgagcataggactatgagtccagagtagttgtaatccaggctctgtcactatcccagtcttagaaaataataacgatttccttacatattatagtgggaatgatttcccaaggctggaaggaaataatgcctctctttgcagaattgcacctcagggttt

SEQ ID NO: 79687 - DNA, 3689 bp, Homo sapiens
aagagaaggagtagtcaaagaatactcaattaataacaaatgctttgaattgtgagccgcatccctgacggctctcaatactgtctacttacattatagtttttcatatacatcaaatagttaatgtactccagtgtaagctttttgaggtcagggaccttatttagtgtacttcatgtgcacatgataggctttcagatattgaaattactgaattagtgaccattattggtaaatagccattaatattaccaaaacctgtcctcttgatttttggagggtttttttcctgcttcaattagtgagttgcctgagtgtaaaggaggttcttgtaggtgtcagaaatagaacactgagaattgtagtcccatgataggctgtgttatattttttcttctgttttcaataatgtattgttagagatgtgaaaacaatattttaatgttggtatttattagtagtaaaactatatgaggataccatttatttggtaagaagacccgtggagttaaaaaataaatggctatggagcaaatcagcctttcctagggttgaggtaaaagttgatttgttccagccacccataccataaaactcctgattttcctgtttacttcttcccagctttatgtctttactcttctttgttcagcaccgaatcgttctctctcttttcttctcactcatccatccctgctttgtctctcttaactaaccatcttacacaattgcaattatttgtcatgttcatatacgttttaaaagcacatagattgaaagtgttgtctttcaagctttagggtgtttttcgggggatgcatttttaagtccgcttttttatatgtgattggttctttactcattatagaaaagtgttaacactcatcaataaaatactagaaactttctctaaagacattcagggtgggcctatgatagggatattttggttcaaatccaatttatttgcttttattaattgtgccattacttcattgatgagattgtgttttggctacatatttgaggggaggaaataaatataaaaaggttaaattgctttttggcactttaaattgttcccctgaatatttactaagatgggtaacgtagatggtgatcacaagaatatgaaataggctggctgcagtggctcatgcttgtaatcccagcactgtgggaggccgaggtaggccgatcacctgaggtcaggcctttgagaccagcctggccaacatggcaaaaccctatctgtactaaaaatacaaaacttagcagggcatggtggtgcatgcctgtaatcccagctacttgagaggctgaaggaggggaattgcttgaacccagaaggcagaggttgcagtgagctgagatcacaccactgcactccagcctgcgtgacagagtgtgactccatctcaaaaaaaaaaaaaaaaacatgagacagaataagatacaccctgaattaatatatagtttcagttgtgaagtttcatgtatttagaagtctgtgtacttggaacgttgtaaaactctctaaagtacagtctgattttataggttctgagtgcaaaagtagttacaaatgctcgaagtcctggggcaaaatgctatggcattgtaactatgtcttcaagcacagaggtgtccaggtgtattgcacatcttcatcgcactgagctgcatggacagctgatttctgttgaaaaagtaagcttccctaactgtttatcaaagcaagtctaatttgatggctagttctcaactcatagctgttaacagtagcagggagtagaatttgcagtgatttttaatttttatgtatttgtagtttttactctccttatatttttcctatcgtttccaaattttctgccattagcacacttcttataatcacaaaaatgtaaccatatgtacaaattgtttttctggttcgaacctttcaggtaaaaggtgatccctctaagaaagaaatgaagaaagaaaatgatgaaaagagtagttcaagaagttctggagataaaaaaaatacgagtgatagaagtagcaagtaaggatttatttttatttatttattttgataagcagatagacttttttggtacattatgaagtactcattctgtttttttgtctggggcggtatggtcaggacacaagcctctgtcaaaaaagaagagaaaagatcgtctgagaaatctgaaaaaaaagaaagcaaggatactaagaaaatagaaggtaaagatgagaagaatgataatggagcaagtggccaaacatcagaatcgattaaaaaaagtgaagaaaagaagcgaataagtatgctatacatcttttcaatccctttctaatgcattctactacttaatttttacagtggaagggaaaacctgaaattctaatccagatataagctttgttgttaggtgtcattgtggtaggaaaggaggtctagtaggagtaattgtcttcttttctactctggggaaacaaacaaatgtattcttccagctaagctcctttgctattctgggctgacttaaaatggtcattgattagtactattgaattaggatcttttggtatcactgaaagtatttatgttagcagactgaactgtttaaaaaactctttgcattgaagttcttgtagaataagtagtttttttatttcatgtattggtgtgtgactatcagaatttagcatttttacatacatattttctttctcaatgaaaaattttagacattgttttatataatttttttcccttaggttccaagagtccaggacatatggtaatactagaccaaactaaaggagatcattgtagaccatcaagaagaggaagatatgagaaagtaagtctctgatcaggatggttgtatactacttcagctgtttacaaaagaagataattctgtttttccataaccatctttgcgtacttgcatgctagcaaacccaagaaaaaggaaatgttactagtcatttgaactttttaaatgacctactaaacttgaaaaataaagccccaaaatattttaatttctagtgttcttctaatttttttctacagattcatggaagaagtaaggaaaaggagagagctagtctagataaaaaaagagataaagactacagaaggaaagagatcttgccttttgaaaagatgaaggaacaaaggttgagagaacatttagttcgttttgaaaggctgcgacgagcaatggaacttcgaaggtaggaagagagtctgttttatacctgtctttaaatataggtaaatatttaacactagttgtaagccatatttctggaaattgtattcccacagaaaactgtttgccaccttaaagaagttacggtagcatctaatgatttcttaagtttgcatagcactttacaatttacaaagtgcttttccatctgttgtctccaactcaacagttctgtaaggctagttatgcccattatacaattgaaaaaaatggaggcccagagaggctaaatgactcttccaatggccacatggctaacaagtggcagagtcgggactcagacccaagtcttctgactccaagtccaatgctctttcctcaacaccaaagctgctgccataaaaaacatgacttcaaaggaaaaatttgagataagatagtttcaaagtagctacagtgttcaaa

SEQ ID NO: 79688 - DNA, 3926 bp, Homo sapiens
agtcccagctactcaggaggctgtggcaggaggatcacttgagcccaggggttgaggctgcagtgagctatgattatgctgctgcactctagcctggacgacagagtaaggaacctgtttaaaaaaaaaaaaaaacaatcaaaacatttcttaagccaagcgtagtggtttgcatctgtaatcccagctacttgggaggataaggtgggagaatcagcttgaggccaggagttcgagaccgcctgagcatcaatagcaagacttgtctctaaaaaataaaatgattctttaattttttcagttattgagattataatgcatattactttattctttatagtcttatatttgggaaaatgttggttctatgttggtttgattacttcagtgatgtttgcattatttgcttggtagaacaaattaagcttctcccttccctttatgactcttctgtttttaagctagcacattcttaattttaattttagccaaactgtcaaatatgttaaaattaaagtcatattttaaaaatgtgagggttaacttgttttaattacttgtcacacaaataccattttaaaattggctttgccatcggtatatgtgtgacaactatgaacttttttttttttttgagacagggatttactctgtcacccagctggagtgcagtggttgatatgaactcacttttaacacattaaaagaatgaataatttgaaactgacctagtaactgttcttctaatgtctgatatacttaaaggggagtattgtttgtttgtttggtttattactgtgtattcaagcacttgaaagttacgtctacagattatactttctggtactgttttgaatagtatatcttagctaagagtacctgtgaactgagtgacgtaaaatacgtcatcaggtcagccttcttattgacagctctttgatatgaggaagaattggattatataaactagttttgaatagtgaaactaatccagtttgttatttatgtactcattgatagatatacctgttttctaaaatgtaccaaacttgtgccacatatctctctacatggactctggttctgattggaatagcctatttatttgttagtgttaggtatccctaaataatatcattaaattatccaccaattttaacttggctgattttgtactattactaaaatctagttttatgtgaattcattttacatttgattattctttgaatttcaggatggtgaggaagaagaaaatgagaaaggtatgtttgatgctagagcttaaaaattgctaaaatttagaaaaacagtaaattatgtaaaaagcactccttatttgaaatcttatttttgaaattagtttattttcaaatttatccatttagtgaattaagttagcatcttgattttattttccaattggttttaattttcttttgaacactaaagatatattgcaacttaatagtacatatcagttactgtagtgaacaatgctattttttatttaacccaattttaattttatttttaaaataacttctggtatacggtaagttgattaaattcttaagactgacactgcagtaactcatgtgtgcttattggagtcctagtgcataactcacagtgaattttacaactagtcctaaaaatgatgaatgaccaggagactgactttgtgtttgctgcttagagaaacttccatacagtcgtctgacaattttagtttagacgagctgtctcattcaatacaattacaggggcaacagtagcaatacatgtggtcagtaggaggttatggaagagtccttggacagaagtcaaaggatcctactttggactagaaaggacatggagcagggttaagcaaggcaaataaaaagcctagaagcagtgatgaaatgaagctactgactgaaaatctcacatgcccgaagcctttctgttttgggggaatgcaagacatctttgaaaacggtaattgcagactgactggacaggatgaagactggaaataaccaatttcctgaacgtcacggagcaggagcatctttggagccttctgtaccagttttccctacgaatccggactactcaagcattgaagagtggaaaagatggggctctgaaatactctgaagactgattgatatcctcagactgttacctgtcaagaagtcaccatgggagttctgaaggtcactagggttcaatcccaggataattccagcattgaacaacaatctgcacttttgtcactgtcacatggaggaacaaaatcttccatatgccattaacttataaccagaaatgaagagctggtatcttcaggatggaaccattttctcactattgttgtttggtgtttgtatgtagagatcattttttccatgaagaataagtgatcctgggtaaaggatggtttatgttagttaatacccttgtgttttttttttttttccctaacttccatcagtgctaataactggctttatattttctaggtcctattctagcttatgaatatgaaattgtttaaacttcttgttttgccatatttattcctgttaaatcctcttagatatagcaggttctggtgatggtacacaagaagtatctaaacctcttccttcagaagggagcctagctgaggctgatcacacagctcatgaagagatggaagctcatacgactgtgaaagaagctgaggatgacaacatctcggtcacaatccaggctgaagatgccatcactctggattttgatggtgatgacctcctagaaacaggtaaaaatgtgaaaattacagattctgaagcaagtaagccaaaagatgggcaggacgccattgcacagagcccggagaaggaaagcaaggattatgagatgaatgcgaaccataaagatggtaagaaggaagactgcgtgaagggtgaccctgtcgagaaggaagccagagaaagttctaagaaagcagaatctggagacaaagaaaaggatactttgaagaaagggccctcgtctactggggcctctggtcaagcaaagaggtttgtttttctatgtcagttctttacgatactgaattccagcattcaataagatcactctacattaagggggtggcttcaagaacatgtacagtaattagtgtcttatgatcctgcctataatatttttgaccgtcataagttacttttaaaaattttcaagatcttcataataatgcagtgtgttctactgattgcattgtcgaatgtcagcatatatttggtttttttgttgttttttgttttttgtttttttttttcaaattgacaatttttttgtgttttattttttaaaatccttgtgatgatggttaatgaacaactatcagttctaagaacacaaaatgaagtcaagtcccagtcctgaaatctggagaagatggccatatttccactgaatagaattgtcagaaaatctagatcttcaggcatcttggggaaaatcagtgcaagaatcctcagggagtcatttgttcaaataacctaatctaggcctttggaattgttaatttgtatgaatagcactagtttgaaatatagtaaatatcaagctgttctgttttgggtttgtttttgtttttgttttcaattttcttctggtgatttgcctctttagctcttcaaaggaatctaaagacagcaagacatcatctaaagatgacaaaggtaaagaatttttttccctatttatttcagtgttgacattgtgtattttcattaaaaagtagtagttgcgcggtgttttctttgacatttagtccttaaaaattttattgacagactagaaacttgagatggtctttatataaactgtggaattatatatattacagaaaactgattgatgtgttactgtttactttgtaaact

SEQ ID NO: 79689 - DNA, 1872 bp, Homo sapiens
taatcatagattctgatgtagtatatgtgcaattagtagtcatttgtagtgttgttttactagcttgaatatactgcttacttgagaagtttctggagctttttctctaaaatcttgtttgctaatactttaattttgttgttgttgttgttgttgagacctggtcttgctctgtcgtccaggctggagtgtggcgacgcgatctcccctgactgcagccttgacctcctgggctcaagtgatcaccgcacctcagtctcctggtagctgggactacaggcgtgcgccaccacacccgtctgacttttgtattttttgtagagatgggggttcgccttgttgcccagtctggtctcaaactcctgagcccaagcagtccacccatctcggcctcccaaagtatttggattacaggtgtgagccatcatgcctggctttaatatgcttttattcttaaaaatttcctctagtttcaagaacctcttcagtctataacatcatgtatattcctttttctatttgcctttgcacctaatgtttcactaacatgaaaaatcttactttttgttatataaaaatctgtatacctctcacagccagattcacctcttatctcctccacaaagctttctttcatctctctcttttatgtagtgctttactattcacagagagctttttatatccattaccttactcaatccttgatatatcttatatggttcacatgtgaactccattttataggtaaattcatctagatagatgacatatcacagagtaaaactatttcagtgataacgacagggtaaatacctaggtgtgatgatgcctagtctgatattcttttcactaaataactccacactaggaaatgttttctgagttctatcgtacttaacatagtgccaaagttaagtgcttcagatacatgaaaatcaagcagttagttcagtctttccagctaaaaacagcagtcttacactacatttatttagtaaattcattcaacaagtattttttgagtacttatgtgccaagcattttgtatttcccatgatgtttagcatattccccgataggtaagtagtggtttaaaagttattttgaaagtttgttttaaatgtcagtctgaatacagtgtttacatttcaagccaggggaaaggaggtcttcttgcttagcctatacatgtacagatatcataagataacctatggggagtagtagaattggatatgtagtaaatacttggttcactgaaaaataagtcctaggcttgtctttgtctcttagtagtcattgctgcttctaggatgaaatgaaagtaaataaaggagctttatgtattttagcatttgactaaggattgcacatcccactgtgaagataaacaacatgagtacttaccttgtagacatttgcttcatcttcatatgtgaaatttttttttcaagacaaacttgagtggttaatttaaaaagatgctttacatttgacaaataaatgttttacatttacttgctatattcctcatttggaaaaaaaatctgttttcagtgggagaaattgttttcaaatagttgcatatcatgtctgtgcatatataccatttagacagggaaagtttcccattgtatttcttggtttgtttccttattgcaagtattttggattcttatttaggacttatggttagtgctatgcttgctgcacatactgcacagtaaaatcaataggcatttacgtgtggttcatcttttctactttacccaagttgtttttgtgctccaaccacattgtaatcagttttgttttctagaagctgggtcagaccatttcctaccggcatataaatgtatgtcataaagt

SEQ ID NO: 79690 - DNA, 1244 bp, Homo sapiens
tttaaacagatggaaatatatctgaaggaagaacagttatgtatttcttatcagggagcaagattttgccatattgtatcaaaagatgaggttacatttttagagaagttttctttaaaatgacctttttcctctttctaaataatgtctagtggaacatctagaaacataaatgtatctaggttccattatgatctaatgcttctaaacatgcttactgagtatattactatgtgcattcagggatactgcatagtgtaacaatcacctcgcttcagctgttttcaaataatggccagtcttattttcccctatgcctctgtttactttctcccttctgcattattttgaaacaaatccaaacatatttcccttgaaaattttcaatatgtatctctaaaagagaactcttattttttatattagcactcctaaaataaaaattttaatattatgaaacatacagttaggattcaaatgttcaattttctgtagatttttctctattatatgctgtttaaatccagataccagtaagatctgtatgttgtgattgattgaaatgttttaggaggttttcccttccatctgttttcctcttactattttatttgttgaaaaaagcaacttgcttatcccatagagcaagggttggcaaaaacaggcatctcatgtagtttgccagttgctgctatagagcttccaaggcctggattttgctgattacattcctgtggtggtgttcaacatattcctttgtttattgtattttttgtaaattgttaaggtggttgtagcatctagaggcttgctctcagattcagcgttaacaccccactccagcacacacacagccacctcataggtgtagtactgtattcttctatttggatgcacataatatctggttgtctttttgtgatggtaccagtcattgatgattcatacccaattaggggttgcagagggatgctattctaattctatcattcttctttattggttggactgtttctagaaagagaaactttcccttatttactatttggttacccagtggtatcatttacacaggaaagccaggatatatgtttgattctttcctttttatttaccaattttcagaatattgagctgcttcactggcatctctgacagtggccagttagttcttaatttttccttttttcccctttagattcattttgaactcatggatttgaatatatgtaatgtattttggt

SEQ ID NO: 79691 - DNA, 1648 bp, Homo sapiens
tacatttctttggttatatcaagggtggggaattacttatgaaagtttaattttaaagcagataatatttcaaatattttctttgaaatagaccatttgtcctgccttgaagtatgttagtacattttaagaaagtcagtgggttaaggagtcagtgctgttagtattcatgcttaaaacacttcccttctacctaccctaataaatgaggggctcaagagaaatatttctaattctctagcgacatggctaattttttttggcataaaaaatatagtctgaatattaagcattgatttagtacccatggtatcgcagatattatacagaacacaaggcaaatgataatcaggtgtaagcataaaagcattctcacgttaccccgatattttataaagcaaagctattgtatacccttttacttaggaaattgaagctcaagaaggtgaagatgatacctttctaacagcccaagtaagtttacatttagtcctatgaattcgatattgtgggtggacgggcttggaaaaggaatcttattttgacttcataattctttaattcatataactgtcttaaatttaatactgagttatttacgtgatgtacacaaagtacttaaaactattggcaaggtcgggcgcgctaggtagctcacgcctgtaatcccagcactttgggaggccgaggcgggcggttcacgaggtcaggagatcgagaccatcctggctaagatggcgaaaccccgtctctactgaaaatacaaaaaattagctaggcgtggtggcgggcacctgtaatcacagctactcaggaggctgaggcaggagaatggcatgaacgcaggaggtggagcttgcagtgagccgagattgcaccactgcactccagcctgggcgacagagtgagactctgtctcaaaaaaaaaaaaaaaaactattggcagctgaaatttttgttgccagaaaaataattggagttactatgagtttcctgtcattttcagagttttagaaaaaagtccatcctttctgtaaaacctaactctggttactagtcttttgagaagtctacattcttcttgatttttttcttgtcacttgatataaaataagtcatttaaaagtactaatatccttttcaaagctttatttgaaattttgttaatgtaacactcctacaacaggcatagtctaaaaatgattaaaaatttctagaaatttacttggggtgtgtgtgtattgaaaatgactgcacttcactgtgtaacaacgtgttgctgctatatgtgatacacatagtgtacattttaaagtgacttacagatgctgtaagcagacatctatagatcagtttctacataaaaattatccattgtctttttctcatatctgtgactaaagaaccctttgtttttgtgtccttaattttttatttttatttttaatcttataaaaaccagagagggtttggtggttttgatctgagttggttttcatctgataaatgcatgcatcccccgtgaagggagtcagcgcccattggtatgtgttagctctagaattagcacagttacccaagtaggacaggattatgtcctctttaaatggtgtactttcaaatagagatatgggttcctttgtttact

SEQ ID NO: 79692 - DNA, 1089 bp, Homo sapiens
ctcttcctaattgacatttggcacagtggtagatttcaaaacaaatacatttcaattagttatttgcatatttttcaagaacagacattgatgcagcagttgggagttctttattattagaaataaactttgttttaatgtataagacttccgaagtctttgaagttaaatcaacatatggcacatggaaaaatgaagccgtattttttggacagcttctagaagctggcttggtaaatattaaataactggaatttagagcatctctagcagcaatttgattagtgtgcattttagtgtgagaaatttgagaactcagattcgtgtttgatgatcttggtattagacctatttttaaagacacagtaaatatataaggtaaaatgaatgaactttgggaatattaaaatatgatcaaatttgacacatttaaaggtgtaaattaccaaaaacgtttggtggatagcccacactactttgcctctagttgtaccaaattttcttaccattaaaaggactgtgaattggagaatcaagaggcacatgagcaagatggaaatgatgaactaaaggactctgaagaatttggtgaaaatgaagaagaaaatgtgcattccaaggagttactctctgcagaagaaaacaagagagctcatgaattaatagaggcagaaggaatagaagatatagaaaaagaggacatcgaaagtcaggtctttagccagttttttttaaaacatgacacagataaattaagttttaaataataaaaagtatttttttctagttcaatttggaagtctcagaatttttaaaagatgtgttactaaagctacttataagtcatctaaaatcctaccaccttaggcaaccttttaaatttttgcttatttcatataatatatatttatacatagttgttatagagtaagttcctatttattctgtattttcacatgacgtataatttcataatttccccataatttattagactgctttctacatatctaatagacactcctttaattttggacattttaagttttaaggcttttttcctactccacgatgaatgaatgtaccaat

SEQ ID NO: 79693 - DNA, 1025 bp, Homo sapiens
ttcatttacccacccatctctcctgcctcctagctctcttcactctccacgctgcacacacacacacagacacaaccccacccccaaaagatgttttgttgaggagttagccctgaaatcagttaattttaggaactgtttgcccagggatccgttaaaattgatgattgcatgcctgtaatcagcttgtgtttgagcctttaagttttggtattctgttacccttactatatatcttccatcaggtttgttcctttgttcctattttctccagttgtcttcaccagtaagtgtatgattaagcaaagattatccataagctgtaaaaacattgtgactcagtaaaaaatcttttacttttcaaatttgtttctttcagctcttcagtttataaaaatgttacagtcatttgaaatggcctaaggagatatatacgtctattgagacgaacaatagtactgtctcttatatgtgccacaaaggatgcttttgtgttatgattaaataaacctggtcataatgtctaaaagaacaagggaactttttttttgtttttgtttttgtttttgtttttgtttttgttttttgagatggagtctcgccctgttgcccaggctggagtgcagtggtgcgatgtcagctcgctgcaacctccacctcccaggttcaagagagtctcctgcctcagcctcccaagtagctgggattaccggcttaccgcaccaggcccggctaattttcgtattttagtagagacggggtttcaccatgttggccaggctggcctcgaactcctgacctcatgatccacccgtcggcctcctaagatgctaggaatacaggtgtgagccaccatgcccagccctaggagctttttaaaaattctgtgtaaagatatcttcagtttatttttggaagtatcaacatatgtgatgtatttgatagaaattaagtgaatatattttctcatctcccacagttgataattttggaatttatacagtaatggttggtaaatatcacct

SEQ ID NO: 79694 - DNA, 1619 bp, Homo sapiens
gtaatttctgcatgccttaaatcagttattatgttaagtggccagcactctttatatttaggcttttggagaaataaataattagcataaaagtagtcactgtatttaaagaatttcttctctatgaagaggcaaggtgtactagagacagagtacaaggcaatatgtaatcaaccacctgatggattgtaagatgaagattaaagtgtgaggatttttatttcagagaatgcttgttgaagagaagaacataggaaaggctttgtgggaggtacagatcttgtacttagctatcaggtgtctatatatatagttagtagaatgccattgaaaggtatcacagcttctcagataactgaggatagaaaattcaactggtgtaaagaaaaatgcaccatatatgtcaagtcagttaagctgatgggttcatatgtaggattctgtgcacggtgtatttcaatgaagcagcatgacataggaaagctttttttgtttgggacagctctgagcaggtggtttagaagcagttgacattagctttgtcagatagtttgggagtggagagtgctattgcagggtaaactctgaatattttttgttcttaaagtaataaaatattggttgttagcccattttccttctttcgcaggtaaaaaacatgaagcagatgagttgagtggagatgcttctgtggaagatgatgcttttatcaaggtaaagtgttaattactcaggttaagatgcttattttaagcctagtattttgcatcatgaattttgtgctttttgttgaacaatggtcactgaagtatgtaggttaaagataaagacctatgtaatattgacaacgtttaatattgtcaatctcattaactctcataattgagaaatatagtaaataactttttctttagttaaatgagatacaaaagctaaaattaataatctctccaggcctttaggtagaaagctggccaggggaatagctacgagacaattgatatacatgttagttcctggatgagatatcacagggaaggatattggtaatttgttttttatctgccattgcatttagcttttgtatataatatacagaacttagattaatgtagaccttaaaatacacagagaaaattgctgatgtgttactacttggtaaagatcaaattaagggccaggcgccgtggcttacgcctgtaatcccagcactttgggaggtctaggcgggcggatcacttgaggtcaggagtttgagaccagcctggccaacatagtaaaaccccatctctactaaaaatacaaaaattagccaggtgtggtggcgcatgcctgtaatcccaactacttgagaggctgaggcaggagaatcgcttgaactcgggaggtggagggtgcagtgagccgaaattgtgccagtgcattccagcctgggtaacagcaagactccgtctcaaaaaaaaaaaaaaagagagagagagagatcaaattaagaaatttattttgccctttaaagataaataagctaggccttttggggccgaaaatgagtgtatttcaaaactggctggccagaaaaattatggatgtaattttaattggggttgtggcagttctat

SEQ ID NO: 79695 - DNA, 1032 bp, Homo sapiens
actaggtcccctgtaaggctcttttagttctgaaatttaataattatatagacaaaaatgagaagaaaatgctttctgtttaactaaaatgatgtttaaggaagcaacaggtaagctcataggaaatcagtatcgtttttcttcagcacaaattattagaaaacgaaaagtgccaagaaggggattacgtagaggtaattatgtagacatcagcgagacataatatataatagctggtcaggaaaagaaatgattcttatgacaatattaaggtagtgaataaaagttaaatgacgagaagcttcataggtatggaaaaaatactttggtgaaacattgagcttattcttttataaaataactatagggtaactttcttttaaaaatgtatgttaaaatgattctatttagagaggttagagggaaaggaacctacatttttaagtttctcctagaatattttttaaatgcagctattacaagcacaaacaatgttgataatgttatagtgggctctgacatttatatcaacatatttataaaattcctttacatgtagttaatagagtagatgtttgtatcttagaatggctttcctgagtcttcacactctctttgttatgaacttttaaataagtaacttaggagaaagcttcacccattgaagtttacggttatattaattgggtgtgtgtttaaaaagtagttaaacaggtagagctaacttctcattaggttgttttagagattatagatttaaagacttttggtttacctgatgctggcatatccttttcttttaaaatttcaacctttaaagtcaccaattaacttcagcaaaagtgatgtggttaatcagtacagtatttagaactatatgtaatgcaatacttaccgacattaaaactaatttgcaatacctggcagctttaaaaagactaaaaatgatgtgtacaatctgatttttcttctatagaaacaaatatattttgaggttataggtttggccaaacatctaatgtataatttttt

SEQ ID NO: 79696 - DNA, 1003 bp, Homo sapiens
atattaacttctctttctaatgtaggctattgaagaggaaggaggcgatccagataatattgaattaactgtttcaactgatactccaaacaagaaaccaactaaaggcaaaggttgttacgagttatgaacatgttttaaaatatattttggttatataacttgcctctgctcttgtgcctcttgccctgtttatatagtgctactctttgctatttccctctggcagtctgccttcttgggtcaaggaagaaaagttactgttgccaggctttgggtgacttgtagcccttaagattcggctgaagctgattagaaagtgagaacagttctttattgcttccggaaaaaattacaaagtcaagttgtgtaatgatgcttcatagtgtgaagacctgaataaaatacagtttaacacatgtctaccttgccccacaattggcagagttttgatggaattcctaccaaatcttttaccttgcctccttgctgttttctttagtatattaaaattctataacctttatgtttagtactttgtttgacttggtgaacttaatttgcatttatgccattatacctcctaatttttagtgaaattcaaaaagacctcaccaatcatactaacaaggtagagggaaaaatccatgattaattagcttaaaaaagttttaaattatagggatgttaaagattcttatttttaacttttaagctagagcaaaatatatttatttctaggatataatgatttagtgactagctaaaagtggttttaaatgaacgttttgcagtatgaatggaacttaggtattttttaaagcttcttggtaaatgaaacctttatttgaataactgcaaatttctccctcctataaggacagtggcagagggtggacatgatatatctggattctggtctttacctacaattttcatgcagagtttgtcatgaacagctgctgcattttttgtaatctaattttctttactgctttaagtg

SEQ ID NO: 79697 - DNA, 1347 bp, Homo sapiens
cggacccggggagttggagggcgctaagtcagccctgacggctagggagtcgcctgctgctgctgtgatcaaggaaacgtagtccgcggaacagctgaaatacagacgcgtcagattttgtatggagttggcttgttggtcatttaaaaagaaactgatgtttttactattgtccttcgataatttatcagagtcagtgtcagtgctatagtgggaatatctgttcagtgcagcagaaatagatttgttacaacagttcttaaataggttatagtagatagatctttacagatgggtatttctcaacctaagttttgattattcaaaaaataccagaaagtatgaggtattcatttaatttgttcgtgtgtgtgttgtggggtgactccattgtgttgttgtaagctttcctgtttcttgatttatgtgcggcattaatttagaattctcttgaatggtaagatgccagctgacatagactacgttttgtaggatttcctgtagcttttgaatgtgacttaatctaaactttatttcatttggtattttatctataattttcttgttttaggggcctcttgaactaaaaagaacaaactgggaaaaacataagctaaggttccatttcctttcccatttttgttgtgtgtgtgtgtgatggttgtaaatgcttgaatgtgattttgagattaccatacacaacttctgtaacgctggacttagctttattacagtaaagatacatcttttgatagtttattactatatgtatttttgtaaaaatcttcatgtcagtataagccacattgtttcaccctagtctggttatatttgtgaggtgaaacagatggataagaaggaagcccttttacttttacaatcattttaaattgattgtttctaaagccttgatttatcttattttggacactttcttgccatttaaccttggacaaatgactttatcatctctctcctgctcatttgtttgtgaccaaagattcacaacagtattctaagaattggtgagggtgtttataaatctaaataatattttaggaaaaagtaggaagaatgagtctccttgtttatcacgggtgctatatcatgtgcagatccttctgtcacttcttaacttttgtttggtgtctgttggccacttgtttgctagttatttcaccagacatagaactggtttttaaagaaaggtataaacaaagtgacttcattttggtgaaaaatgcattacagcagaggttacatcttaacgaatttcactttggtactccatttctacagattattgagagagagctgttgtgatgtttaagagaaaagcaccttgct

SEQ ID NO: 79698 - DNA, 1066 bp, Homo sapiens
gtggtggctcacccctgtaatcccagcactttgggaggccaaggcgggcgaatcacttgaggtgaccagtctggccaaaatggtgaaaccccatctctactgaaaatacaaaaaattagccgagcttagtggtgtgcgcctgtagtcccagctgcctgggaagctgaggcaggagaatggcttgaacctcggaggcggaggttgcagtaagcggagatcgtgccactcactgcactccagcttgggcgacagagcgagactgtttctcaaaacaaacaaacaaaaaaactatgattgttgttccacatattattgctattgttgtcccattgtagatattaattactgaagctttaatagctttcagatggtactaaaaatgaaattttttattactcctggtaacattttaaaaatcatctggaataatttgtttttctttcagaaacctgtaattattgttcagtaaaagtccacaattacatttgaatgtcttatacctctgtttgtttctttcctacatcctacagattcttggtaacagctggcccaggtttctacaggtactcaatttatatcattacatgaggagtgaattacaaatatttaaagacaaatacttagctgaggctgggtgcgcttgctcatacctgtaatcccagcactttgggaagccgaggcgggtagatcatgaggtcgggttcgagagcagccaggccaacatggtgaaaccccgtctgtactaaaaaaaaaatacaaaaattagctgggcatggtggtggcatgcgcctgtaatcctggctgctcaagagggtaaggcagaattgcttgaacccgggaggtggaggttccactgagctgagatctgcactccagcctgggtgacagagcaagactccatcttgaaaaaaaacaaaacaacaaaaaagcctccaaatacttagctgagcttacattttaaagagcggtactgcattattacgtagatacatttattgaatgtctcatgttctaggcacagtcactggtcttcagtgaaggcactctgccttcatggagctgacat

SEQ ID NO: 79699 - DNA, 1069 bp, Homo sapiens
gtttgaggtgggtgtagctagaggattgaagtcgtaccaaaaaaaaaatgtatgtatatgtatatgtggtgatcgtgggtagggggaagaattcagagggaagaagcttgtggacgtctttgcctggacgatttctaaaaactagctgactcgtcatctttaaaacaacaacaataaaagctatcatatgcatatgttactttgtttaatatttacaacaaccctttgtggtaaatattttcatttttcagatgaggaaattcaggcacagaatgattaataatttgctaatgagtcacagcagtgatggggatgtggagatttaaatcaatgcattttgagttgcctgagcaaagaattccaaaatttaggaagtcactatttctgtatttccttctaaggaaaaccatctaaagtatatttttatctccagtaggcgtggtcattgtcaagagaaggaaaggttggtgattttattagggtgatgggattgggacttaatttctctttgctttttctgtgtattccagattttatatagtgaacttattttaaaaaccaaccaagttgatgtttgatgtataatttatatacaatatgaggcacacgttttatgtatagttggatgaattttggcaaatgtgtctgtccatgcagttagcaccccaatcaggacataaaacattccatcactctagaaagttcctttgtgctcttttgccatcagccacccacatctcctgcctcaggcaactactcatctgatttttgacatcatagatgagttttctttgttttagaatttcatgtaagtagtagtattattactcttgtgtttgatactctgctcatcaaatgttttccctttagcattttattatgcaaaattgcaaacagaaaagatgaaagaattgtacagtgaacgcccatctccctgccacctagattctatgattaacaatttgctatttttttgctttacatttctagccatctatttgttcctccaaccgtccatcaaccaaacctgttgctttttatgcattttaaagttacaaaaataaaaaaa

SEQ ID NO: 79700 - DNA, 1073 bp, Homo sapiens
tggttaatagaagtttttaagtaggcttatgctctatatctactgtatttctaaaaattggatgcatgagtagagtgaccagagaaaaacgttttataagaatagtaaaataattcataacagacattttgtgtactgatgaggaaaagacagttctgcctttataagggatcttcttggtggaatttgagaactcttcaattaaatagtataataaaacacattaaaaatcttttaaatatctaattttgtcttctaggctttccttaaagtttcccatgtctcaatggactcctgaatataacgagctctacaccttaaaagtggatatgaagagtgagattccttctgatgcaccaaagacacaggagagtctgaaagggatccttttgcatccagagcccattggggcagccaaaagttttcctgcaggagttgagatgattaatagtaaagtggggaatgaattctctcacctgtgtgatgattctcaaaagcaagagaaggaaatgaatggtaaccagcaagaacaagaaaaaagtctcgttgtgaggaaaaaacgcaaaagccagcaggctggcccttcgtatgtgcagaattgtgttaaagaaaaccagggaatattaggactgaggcaacacctagggacaccaagtgatgaagataatgattcctcttttagtgattgtctttcttctccttcatctagtctgcattttggagattctgatactgtgacttcagatgaggataaagaagtctctgtaagacattcccagaccattttgaatgctaaaagtagaagccatagtgcacggtctcataagtggcctcggactgagacagaatctgtatcgggattgttaatgaaaagaccctgtttacatggcagttcgttacggagacttccatgcagaaagagatttgtaaaaaataattcctcacagaggacacagaaacaaaaagagaggatattaatgcagaggaagaaacgagaagtgttagctcgaagaaaatatgccttgctacctagttctagtagttccagtgagaatgacctcagcagtgaatcc

SEQ ID NO: 79701 - DNA, 1348 bp, Homo sapiens
taatgatatggagaattgatctgctttgaaatttagatgtgaataatacataaatattggggatggtaccaaattaaaaatgaaaaaatattaaggggtattgatgttgaaatagccctttctgttagaatctacttgtttcaatatgttactcattgataccagtgaaacttgtgctgttactgtgttagggcaccctaattcaaaacatatgttttgattctttttccttcactcagtaattttatcggtgctctgaactaacacattaatgaaacatccttatctgtttttataaataactggaaaagacattgccctattgcggaatcactttgactctccctccaaaatatcaactcctaacattgcattcatcttatactttagatgattataagtattggtaataatagcaataaagagttgctttgttacatttgatacacccaactaataatctaacggatgaatcttaatttttgtgttggaacgaatttagaagtgcatttgcttattgcatgttaatatgttactgattttaaaagtatatattcatatttctgacatctgttacaaacacttagaacatgcttttccacttgccattttagcatcgaagtgctacttctaaaggcatggaagtgagcattctataacatatacttgtttgttttaattttatattattttccccaactctgagtaaaactgaaaaccagtgttatgtaccacacctatcctctgaccgtgcatagtgcttggtacaacattgactcaatttttatgagctgtaaggactactgaaattacagacctatttttccttgtaggactagagatcttgttttggacatggttgatgtcaagcagatgcatttacctgagttaataggcagtgatcttgaaaaagacccacagtgtacatgacccattgttatatctcttattgttattaagagatattaattttgttactgtttagctggctttttgccctttagtttattttacttaattatttattttttgagacagagtctccctctgtcacccaggctggagggcagtggcgccatcttggctcaccgcagcctccatctcctgggttcaagcaatcctcctccctcagccttgtgagtagctgggattacaggcatgagccaccacacctggctaattttttttgtatttttagtagagacggggtttcagcatattagccaggctggtctcgaactcctgaccttgtgatccacccgcctcggcctcccaaagtgctaggattacaggcgtgagccaccacgcctggcctggccctttcatttaagagagtatttctttgttt

SEQ ID NO: 79702 - DNA, 1025 bp, Homo sapiens
tcttaccctagaatccatattgtgtcagacagtgtggtttgtaacactgttctggcagctcgtgaccatgtgtacgtgcatagtaaggaacttttatttccttttactgttttcttctttgtgatagatcagacaacttatttagaagctacctgaaaaactgttaaatcacctaaattattggaataagcatatcggtgttggatttttttaaaatgcagtaatattttggtaacacgtctgttcgatattgcagtttagctttgtgaacgctttctttaccaaatgttattagagagcttgtatttttaaagtttttttatttattaattataaacacattagcttacattaaaatataaccctttatctaatttgttttgaaatgctaagttgacattttgtattttgtagaacctactgtagtaccaaccacttctgcaagaatggaatcacaagctactagcgcttccattaacaattcaaatccatctacctctgagcaggcctctgatactgcttcagctgtcaccagtagccaaccttccacagtgtcagagacttcagctactcttacaagcaatagtaccactggcacttctataggaggtatgtaaaaaagtgggggaggggagactttttgtcattactttcgttaggaaaagtattattgtttttaagtctaagattttagctatgttaataagcgggtattcttacattataataaacttcatatgttatcaaggtagtctttattataattaggctgatttcatatttgagtttgtgtgctatatgtaaccagagtattatagctcaaataagagagcttggggagaagcaaatggctgacaccaaaagcatgagcaacaaaagcaaaagtagataagttggacttcatcaaaatttagaactttcgtgcattaaaggatattatcaagacagtgaaagacagcctacagaatggggggaagaaaaatattgcaaatcctttatctgataagcactttagaatccagaat

SEQ ID NO: 79703 - DNA, 1041 bp, Homo sapiens
tagtagagatggggttttgccatgttgccgtgttgcccacactggcctcagtctcctgggctcgagcgatccacctgcctcagcctccagaagtgctgggattacaggtgtgaactaccaccctcggcctatgtgtagcattattcttacgtacattttatgtgatacagtcccaactttatttcagaatattccaaaaacttttatatataaatctttgttcattcacaaatcagatttaatttctgagcatcttggctacagtcctaaatgggcctctcttaaggtcaatttccttccaggaccctatggaacattagttcaactatgttctccacaacccgtccttatcttgtacctttttgaatatttccaaccctcacattcaagccatctagcttcacacttatccaagttcctccgtaaatttatggtttcgaatcctgggctttctgtaggaaatcaccattgtcttgatcagttccctttcgttcctctaagtgcctatttcaaaacactctccttttcctcaaggttttcattccccaggggaaattttaaaaaaatgaataaatgaaagttcttaagcatgaactcctgcaacttccaatgcctccatataaacttttgtggctctctacctgtcctcctctactaattcctagtctcctaactccttcctttcccttccagttcctttatctgtgctctacctcttatcctttcctttgtccttaaccttgctttaactgttatcttccttgtgtcttcggcatcttctctggtttcatttccttagtacatgcacatgtacacttgtttttgtctgtgtacatttaagtgtatttttgtcacactaaactctttcctctaatgggcttctgactcctttcataatgaataaacatgatcttttaaaatctgacaattgtctccttttcataattcattttcttcccaggactgtgttctcatcccccctttcactagcccatttcataactgtaagtgttgtcacctatcactagtatgctgatgact

SEQ ID NO: 79704 - DNA, 1037 bp, Homo sapiens
taaatagtagggaaaggatttgaaccataaacataaattcagtcttaaaacattattcttaaaccgtatttacctgcattgaagacatacattgtatttgccaactcaatagaagaacagacatatacttgattgtacagctcaacagaaggagaacagacatatacttgattgtagataaataatacaaaagaaaggagctcctccttttctctttcccaacttgagtatcatcacacccctttcctttcagcacccagagttccttttgtttctattattccccctaaacctagagctcactgaaattaaaaagaatgctgtggttcctctcgggactgttgggtgacttgagcctttgacaaatgcattaccctaggttttttcatctccagcccctcagcttccagtattgcacagttgctgtatataattccatatataacatcagatctttatgatctttcatcacattttgaaaagtatggttccactgaacctaagcagtaggtttgtattcaagaatacgaagaagtggccgggcgcggtggctcacgcctgtcatcccagcactttgggaggctgaggcaggcggatcatgaagtcaggagattgagaccatcctggctaacatggtgaaaccctgtctctactaagtatacaaaaaaagtagccgggcgtggtggtgggtgcctgtagtcccagctactcgggaggctgaggcaggagaatgggcctgaacccgggaggcggagcttgcagtgagccgagattgcaccactgcactccagcctgggcaacagagcgagactccatctcaaaaaaaaaaaaaaaaaaagaatacgaagaagtgattcttgcctttgctatagagtagaggtgaaagtgttttgcttaggatttttccagatgcttttggaaggcagtgcatagtggcttacgcctgaaatcctagcaccttgggaggctgagacgggtggatcgcttgaccgcaagagttcgagaccaccctgtgcaacatggtgaaaccccgtttc

SEQ ID NO: 79705 - DNA, 1122 bp, Homo sapiens
taggcaacatagtgagaccccgtttctataaaaataaaatagaaccagccatgccttttctaaagaaattgaaattcgttagatatcacaagaaatgataaatactctaaggctatgtaacatatttactattttgttagatcataagctaataatgaaatgaaagcttaataaacacttggctgataaacaccaaaaattcatgctggaaatgaaccaggaagtcagcaaggaaatttgtgttttgttttgattacatggcaagtggtaattttcacttacatatcttcttggattttttcttctactccagtcatttaaaaaaatctgcatcgtgcagacgcagctggaatcaacccagaatctgtacagtgaaactggtgatatattatttaccttctcagtaatgcaacttaaaatttaaagtataaattggaaaacatttagcaagtttttacaaagcattgaccaatgggccaattctttgtatgagcaccagtgtgatgcatggcctattttgtaatacttgatggtattcatttttgattgatcatcttttatttgaaattcaatatgcttaattttctgcccctcccctttaaaaataatatactgaagcagtttatgagtaagttcattcctttcaaaatgtcctaataaatacatgttttagattcatttgttatattctaaaacattcagactgtgcagtcatataaaatgagaatttaaaagcttcctcgcacagcttactaatcttaatatatcagaggtagtaactgttctataaaaacttttagaaattttctttgtacacatagataggtatatgtcttaccttttaaaaatgggaaatcaaacatattctacttcttgttttttgtttttaaatttaacagtatattttgatttttgcatattagcacataaaaatctagctcattggtttttaatacccccataatatccattgtatattaaatcagtcttctgttgatggacattaaagttgtttatggttgagtttatgtatagtttaacttcctagaaatgtgattgctatgtcagagggctaaactttcagataaatactgttaagttttctctccaaggggctgcatc

SEQ ID NO: 79706 - DNA, 1041 bp, Homo sapiens
ttgagaaaggatagttaacaatcataaaacatagtggattcattttttatgattaagagctagctactgagctttgtgccttcttgaagagtaaagcattgatttgaaaacagaacttttagaaaattggtttaaaaatttgtcttgcaacttttaaaaattagatttgttgaaagtttcctttaagtacatgctaacaaggcatactttgaaaatatagttgagttattgttacctaacttctgcccttgctgaatgaatcaaaagcattaaaaattgaaaacttctgtaatgaaactagagaatggctgttggtctatatcagacttccaagaacatcttccaataaaatgaaatttgtattgaaatctaagacaaactttttttttttttttacatgtcaagtagatgcacatctctaagagtaaggaagatgtgtattcctcagagagatttttcagcagtcactttgaaacataaagatgtagaatgaagaaatggtaggagccatcttattaaggactttacgtccatatttgatgggaaacaaataggtctccttcaccttaatgtagcacaggaataatgacatggggtagggagagagagagacagtttggaaaaatgtttacaccctattatgacagagcttccatatatgcaaataatacttacaagtcaataagaaaaaggtgagtaatacaataggctaagcatgtaaatagataattctgagaacacatacaagcggtcaagaaataaaagatttttctcagattggcatttattttaaaaatttagtggtaatgtgggggtaatcaggccttcttgtgtgctccttttttttttttttttttttttttgaggtggagtctcactctgtcgcccaggctggggtgcagtggcatgatctcagctcactgcatcctccacctcccaggttcaagcgattctcctgcctcagcctccctagtagctgggattacaggtgtgcatcaccatgcctggataatttttgtatttttagtggagacggggctt

SEQ ID NO: 79707 - DNA, 1007 bp, Homo sapiens
gtgtgttaacttgtattacatgtgttttgaaaaaaaatgcacagggttaacattgttttctcttaaactttcatccattaaaatggttgaatgtctttacagtataagagtaaatgaagcaaaattaaggtttcaatgtgtcctgctttaatgtttatatacaataatttatttgtgcctgcaacatttgcctggggtatttaatttttaaaaattttatttttatttaattcctattattctcctatttaaaatatcacttgtaaagaaggtgtacaagataatgttaaaattactttttccttgggtgatatttgaattggaagcattggaataaatgagcaattagaatttatggagaaggtgatggtttcttgatttattaacaaataattttatatgtttttataatttattataaaatttattttatgactaatctatagatgtttatagtattaatactagggatttttttctacattaagaaaagaaataaccaattattcaattatttccagtggtctttttgtgttctgtgtttccaggcgggcacatgaacgccccccaccccatccacataggatgcacccaaactatggtcatgggcatcatattcatgtgcctcagactatgtcctcacatcctcgacaggctccagagaggtctgcctggtcagtatcttctttaatttcaaaacagtgcttcacagcttgtggtaaaactattggaagagatgccttgtgattgattgctttgcagaaggatgatgtggagaaacctaatccccagtttaactgagacactgcctctgggcagatagaggtttggagaggaaagaataggagctggggcagggaaccatatcaagcaggagtagtactttttttaggtgttattttatgtttaattgaaaaataataattgtatatatttggaggtacagcatagtatttcaatacatacatacattgtgaaatgattaaatcaggctaatggcacattta

SEQ ID NO: 79708 - DNA, 1133 bp, Homo sapiens
gcacaagcactgggaactccaagtaagctggtgtttctaattttaggagtgagggtcaggcagcagtgagaaataaaactgttctaccaagaaactggaactcaggaaccattgaaggggaaatgtcctgatcaaatttatgattttagagttatttaatcagattatagttagatcacctcctcagttatgtggaaaaatagatgtaaatgtgggaaaccagttaggacattatagtagaagaggtaaatattgatgaatgcctgaatgaaggcaattgtagttggcataaaaatgatgatacacatttgagagatatttagggtttgggtgaaggggttaggtgagttaggtcttggatgtactgaatctctatgaaagttgaatgtccaataggaagttaagcctgtggtctggatttccaaagatatttgggttaaagatatgttttgatctgtcagtatatggaggtaatgaatccatggaagaggattaggttttcaggaaaaatgtgcagagtgacaagagggtgaaaaaaccttagagaatgacaatactgtatttaaatgataatactatgctttgaacaaaggattctgagaactggcttgaaaagttgagaaacacagttaaaataatatcagaaaatacagttaccacttgaacaatgcagaggttaggggtgttgaccctcctcacagtcgaaaatcagagtataacttttgagttcctaaaatcttaactactaatagtctattgttgatcggaagccttactgctaaaataaacagttgatcaacacatattctgtatgttataagtacgtgataatgatagtctacaatagataatgatagtttacaataaagtagaaaaaaatgttaagaaaattataaggaagggaaaatacatttactattcgttaagtgaaagtgtatcattataaaggtctctttccttattgtcttcacattgagtaagctgaagagtaggaaaaggagggattcatcttgctgtctctggggtggcagaggtggcagaaaatctacatgtaagcagacccatgcagttcaaacccattttatgttgttcaagggtgaactgtaatatggtcagtatggtgtcatcacaaa

SEQ ID NO: 79709 - DNA, 1068 bp, Homo sapiens
cacagaggaaactgcactgcaaacaagatggggaagaagggactgaggaagacacagaggaaaaatgtactatctgtttgtctattttagaggaaggtgaagatgtgaggtaactagatattaattatctaaaatccattgtcaaaactgtacatgggattttatttgaaaagtaaattacaccgggcatgatggctcacacgtgtaattccagcactttttgaggccaaggccagaggctctcttgaggccaggagtttgaggccaacctgggcaacataacaagactctgtttctacaaaaaagaaaaatagtacaattatttgcatgtgatggtgtgcacctgcagtgccagctactcaggagactaaggcaggaggatggctcaagcccaggagtttgagactgcagtgagctttgagcacaccacactgcactccagcctgggcaatagagtgagaccctgtctctgaaaaaaaagagtaaaagtaaactggaaaccaaataaagattacttttggcatatactgttaccaatttctggcacgtagaactggcttcatctggcgagtgaaacaataaaagattaaagtatctatgttaccaacatgggagtgggaaatatactgcctattgtagggccacacaaggtttggccagggaaatttcgtagtcaaaattgtcttctgtaaatcttgcagaaatgagaatttgagaggctttggaggtcctagaaagttataatgtgttcttcaaaacttaaacagggatccagattagtcctatgcagtctgttttacagcatcttttttttttttttttttttttttccttttctgggagatggtctccttctgttgcccaggctcagggcagcagtctcagctcactgcaacctccacctcctgggctgaagcgatccacctacctcagcctcccaaaatgctgggattacaggcgtaagccactgcactcggctatagcatcttttataaactggttttgtcataaaatttcctctaaactagtaggactattcccttcttgcacctttgttgtttagaaaat

SEQ ID NO: 79710 - DNA, 1836 bp, Homo sapiens
tgctaactccagggcattggcagctcctgtaccaaaacaaaactggaataattggcagtgtaatttgtgttcttacagtttttaagattttatataatttggtcctgtagctttgaaagttaattatcttgatcatttatatattatattgcccagagtgctaatttaatcgatgtgttttttatagaagaggaagatgcttagtaccttcaaaacattattgaattattacatatataatttgttaactacgtacaattatcataaaattaatttttgctttttgttttcttgccaataatagacgtcttccatgtatgcaccttttccaccaagtgtgtgttgaccaatggttgattaccaataagaagtgccccatatgcagagtggacattgaggcccagctgccaagtgaaagttgacaccatgtttcagaactcttgccctccctctcattcccatccttcctggtactgcagtcaaccaaagatggcatgacttacctgcgcagatttggaagcattgaacttagagtgctggctctgctatatggtacaactaatgctagacctacagtttatgtatacagttgattttgatgtatttataaaagcttttttttctagatttgacatttttctgtatcattttactgtatttttgcatggttccttgtattgcatttctttgcacatattatgggcttgtgaccctaaacttgcaggcaaggttagctgctttagtaagtagaattttgtggtctttttgttttttacatagtaccaagccttgataattatgaattttttatccattactaacctttaatttaatcaatcatgtactttagtttaatgtataaagatcctctagaaaatgataatattgtgtattaagacattccttaattaggacaaaatggctgctgtatatttactatatggagttctgagttaaataccatccttaatactgggaacagaatacaacccatataaatcagatgcaggtggtagtcacatcaccagagtgatcagtataaattttcttggtgtatccttttcctttcaacacagtgcagataagagttgaatattgatatcatacatttagactgctgttctgattgcatttatctttttcctacatcatttagaattttatttccctgattcagtttttgctgctgtgaaacagctctgatgaacactaaatattaatttcaattagctagattgtacatacttgcagatttaacaaaattttagggaaattgaaaaagacatgtagaatttgttgtcttctgctaagcacgaaaagttaagatatctgcttacattgattttgtagacacattaagtcaagatttggaatttaagtcactggcaggtatctgtgcattcatagaacttataaaggtcccaggatcacttttaagggatttttattagtttaaaggtaaataaagtcagctgaatctacatgtctcttgttttatttctctctaaacttgaaaacagtaaatctgcagatactgtgaggcacaaattatactgtcaacctactgttgctatggttatatactcccacttcatacattaccaagagtcgatcactgatttaaaatttttaatttctatagttaagatttactgcataatatagaatataaagttaagttaacatactaacatttctcctttggaggaagttttaatctacttcaggatgcatattattatcaagatactttcatatacaggatagcctaattttatttgtttaaatatgcttaatatgccccagattgcaaatgcatccagtcagtaatatcac

SEQ ID NO: 79711 - DNA, 1026 bp, Homo sapiens
tcttttgagaaatatctattcatgtcctttgcccattttttgatggcattattttctttcttgctgatttgagttccttctagattctggacactaggcctttttccgatgcatagtttgcaaatattttctcttaatctgtggttgtctattatttcttttgatgtgcagaagctttttagtttaattaggtcccatttatgtatttttgtttttgttgcatttgcttttggggtcttagacatgaattctttgcttgggctgattattagacgaacatttattgagcaccaaccatatacgacaaacgatgtactaggtgttgggaatacaatggagaacttacatgaatcaccagtcacacaaatctcttttatctttttttttttttttttgccttacttgagaatttgggtttttgagtaaacgccattattctctctttttttaagcacacttttgcatctcaaccacctaacacactgcatccctgagcaacccggaggggccggttcctgcacccaggccaacacaacttaaaccccaacacaccagaagaggaataaaggccaaccaacttccgcccacccactacaaacgtcgagagaaattcgtagatgaggccttgtcaaaattcagaggcgtcctacgtctgctttcccaatgagacagttcctttttgtttgtctcagagactggggtttttttttttttaaaagactgtaggcagaaaaaacaccccaaccggctgttgtgacaatcaaacgtgtctaagaaaattcagccaatgagagtgcgagagtgcatcttgtgttggccaatgagaacagcgacccgtgcgcagggccgcccaatggggcgcaagcgacgcggtatttgaatcctggaacaaggctacagcgtcgaagatccccagcgctgcgggctcggagagcagtcctaacggcgcctcgtacgctagtgtcctcccttttcagtccgcgtccctccctgggccgggctggcactcttgccttccccgtccct

SEQ ID NO: 79712 - DNA, 1072 bp, Homo sapiens
ttattaactattaatattatagctttattatttttcatcttaatttactttttaccaagctctgtaaaggaaggtttttaaatatatgcctttaacttgcagggatctctaacaagtgatatgggtactatatgagaaataatcattaaatactaataagctttgaagttctcttacaggcccacttgaatactcagaatagctttgcaaggttagtgggaggatctttattacggataaagtagatgggtgatttgcctaatttagagtgatgttattaatcacaaatagcatttttagacttcctgaaatgtaccttttccatcttgcaaatagatcttgacgtattgtcctttcccaaagcaattctaaatttgagtatctaacattagcaaagtatttcaaattctttcaaggtttcattacttttttttttttttttcaggtgtccagtgatttggagaatattgacacaggagttaattctaaagttaagagtcatgtgactattaggcgaactgttttagaagaaattggaaatagagttacaaccagagcagcacaagtagctaaggtaacaatgatgaagactgaatgtgaatacagaggccgattctgtatagtgctgagtcccacaacgctggctgtcttgcgctattcatgtttctttttccttatagaaagctcagaacaccaaagttccagttcaacccaccaaaacaacaaatgtcaacaaacaactgaaacctactgcttctgtcaaaccagtacagatggaaaagttggctccaaaggtaggaagttctgaatttacaaacgtatttaatgaggtagcctgtttttagccagactacaagggtgcctttatcattgctgtaccttctaacgaacattcatagctggagctctgctttgaagcaatagtgtaggaaatgagtatatacaccttttaacttaataacattatgaccttgaagctgggcatggtggcttatgcctgtaatctcagcactttgagaggctgaggcaggaggatcgcctgaggccaggaattcaaggctgcaatgtgcta

SEQ ID NO: 79713 - DNA, 1381 bp, Homo sapiens
ggcatgcatgcctgcatagttcttgctcacctggttcttcctcagtttaagacctttgatttaagaggggaggacatgttttaaactgtttttttgttttgttattgttgttattgatgcatcctcgaagactggaaattataatcattgagctttactgtaaattaaaattgtctttttttttttgagacagagtctcgctctgtcacccaggctggagtgcagtggtgtgatctccgctcactgcaacctctgcctcccaggttcaaacgattctcctgcctcagcctcctgagtagctgggattacaggtgtgtgacaccacaggcccagctaatttttgtatttttagtagagatggggtttcaccatgttggttaggctgatttcaaacttctgacctcgtgatccacccaccttggcctcccaaagtgctgggattataggcgtgagccaccaggcctggccgcctcctctttttaaaaaatattttattaccttaatatatatttgtatagcttagcatcttgttaggttttacttggagaagtactttttttttgaaagcattgatttggctgggtgcagtggctcaagcctgtaatcccaacactttgggaggccgaggtgggcggatcacaaggtcaggagatcgagaccatcctggctaacacggtgaaaccccgtctctactaaaaatacaaaaaattaggcgagtgtggtggaaggcgcctgtagtcccagctactccagaagctgaggcaggagaatggcgtgaacccgggaggcggagcttgcagtgagccaaggtcgtgccactgcactccagcctgggcgacagagcgagactccatctcaaaaaaaaaaacatttaaaaaagcaaagatttttttatctttcattaataaatacttgttttaactgctttataaatttttaatttgcataatttttataaataattacccagtcagcataggaaagtgaaatactgagttgtgaacttgctcagtcttcgctcccttctcctattttatttatagactgcaatatgcttttctcctttttagttgccagtttttcaatttagaataaattagttaaagagaagaaaacattatactgcagaagaggctgctactaaagtagaatgatcagctccagtaatctttgaacccaggtggtcaagtttcttccatttattgagcacctactacgtatcagggattatatagatgtttgaggtgccttagtgggcaaaaccaattaaataaacgtaagcttttagagcttacattctggcagaggtagacagaaaataatacacatactatataaactatagaattttagaagtataggtattatgagaaaaaacaga

SEQ ID NO: 79714 - DNA, 1023 bp, Homo sapiens
gtaacatttaagtaaaacttgaagtaagggaattacccatatggacataggggcaagagcattctgggtaagaagaacctggcttgagtgaagcagtcaagggagagaagcaggagatgggtcagcgagggaactggggagggccagattatataaggtctgtaggccattgggaggacttaagttttcagtttgagtgaaattagagagttttaaacagagaagtgtctcttgaagaacttcacatactatatcttgaattattcacctcttggtatgaaatttgttgtgtctttaacatatttcagatgtgcgtatgatattgatatttaagccagttggctctgcatgtatttatggttaaggctgctcctacatgtgcctaaatttgttggtgtagggtccttctcccacacctgaggatgtctccatgaaggaagagaatctctgccaagctttttctgatgccttgctctgcaaaatcgaggacattgataacgaagattgggagaaccctcagctctgcagtgactacgttaaggatatctatcagtatctcaggcagctggaggtaggtgggcctttgtgttttggttgtataagcaatgtggaatttaccacacagctgggaagcaaacaaggtcagctttttaaacttttgattctacccacaggttttgcagtccataaacccacatttcttagatggaagagatataaatggacgcatgcgtgccatcctagtggattggctggtacaagtccactccaagtttaggcttctgcaggagactctgtacatgtgcgttggcattatggatcgatttttacaggtaggtgtggcttcagggacttcacgccagtggctcattgaacattgcatttatgcttgggggatagaaaactaaagtgggtacttctgaaaaaaagaccaaaaatcaaattgtgagaagccaaagaactttggggactaaaaagggaagtaatccaagtgtgtcaagcctttgatgatgcggaccaata

SEQ ID NO: 79715 - DNA, 1011 bp, Homo sapiens
gggcctgcttgcacaatttccatagtttggtgctctggtgttaagtttcctcatctgaaaaacgatgagtttggctggagaacctccacatttccagccaactatgtcattgaatcactgtagaagaagaaggtggcagtatttgttttttttaaaggagcaggggttgtgtgtggagtggactgagaatgtagtgtaataaagagtaatataagaaaataagaggcaaacataatcttcagcatatttatgagtgggtaatgcacagcccctgacctgttagaagagacagcagatataaattgccagtgtgttatctaccaaacaatagccctgcagataaggttttatttatttaaagtcaacattcaggataggggtttaggtcaggcacaaattctgtccaaacaatgtaataaaaattactttacaataatgaccctgagatactacaaaatcccaggtagcatgcattcctctttgggcaggaaagcacaacagtattttaggtaggtttctttattttttatttttttgagacagggttttattctgttgttgcccacgctggagtgcagtgacacaatctgggctcactgtagcctcaatttcctgggttcaatcaatccttctacctcagcttcccaagtagctgggactataggcatatgctaccacgcccagctaagtttttgatttttttatagagatggggttttgccatgttgctcaggctggtctcgaactccttagctcaagtgatctgcccacctcggcctcccaaagtgttgggattataggcatgagccactgtgcccatccgtggtagatttttaataatgagagttgaagcaagaaaagtacagagtttgggaggaaaaaaaaaaagcaattaagggaaacgctttaccctagcctgagagtctgcctgactccaaagcattagcgaaagattttctaagctgaataatgggtatgcttttggtaaggattaaggaaatgagccatcca

SEQ ID NO: 79716 - DNA, 1049 bp, Homo sapiens
aaaacaagggttcagagattcctgtgggctgtcaatacacaggattctaaggtttagttttccacctcagtgctatatgccaggacccaaggctgtggggctgtggctggttatttgtaaaggtacagtcacattaatagcacacaattcatttcattctccagagagggcttatcttggaaacatcagaagacgggttccccttggccccagatatggttactctgtgacctctttgtgctttcttgcatggttgaggaataatggatcttttgatttgtgtctgtgcctgcagttgcataaatacaacagctttaagagtcttcagcaacattaagcataacatcccagcattctatatgatatttgttgaagaatatgggtctttgtggctttatagtgagagcctctctgcctttctagaatataaataaagagtggtgaagagaacccagcctttttagccggaggaagtgaagattcctgaaactctgtgtagatattaaaagagctatcagttttaaaagggggttaagacatgtcctgtggagtcgtagggatggaactagcgccaactgaaagccagttggtgaactctgccaggaggtagattttggctccagtaaaaggaagaacgtagcaacccaaatatgagttgccctcgtatgtaaacagcattttgttcctgggagcatccaggcaccaggtggatggggatcaccaggcaggagtgttcagagtagtgttgtcaaatggtagataaggggaaagagaggcctctctaacactggacctgctgtttgctctctctgagcttcagtttccttgtctaagcactaatgtaatgccatcaaacttgcagcaaacttgttgggaggactagaaattatatacataaaatctctagcatggtacttggcatgcaggcgtctgctcacttaactctagcttgagggtggtaatgacggtgacagggtgatgatcataaggacccccgtcacttcatggaggttgaactagagacttgtaaggaatcttccagctctgca

SEQ ID NO: 79717 - DNA, 1047 bp, Homo sapiens
cccatgccaagaactcccagactaggagtcctcccatgctaagtcctcccgaagtcctcccatggtaagaactcctagactaagttccgctgacacaggaaatcctcgcaatccatgaagactaagaatggaagaaaggcctccttgagccccatagcttcctccaagaatcgtgtccctgggcctctgaggctaacactactttaatcaggaaaagctttgggcctttgcattaaagatgttctgctctcacatgaacatggaattgggacgcctgtcaaactcttactccacacagaaggcaaaactggtgcgctcaggaaaaagcaggggttttatgtgctcaggcgtctgatgtaccaagctggaaatcctagttccagtctgataatccaaaacagatttctagttgcatccattcttgcctgtgtctctgtggtttctgattctatctgttcctaatttccctggataaaggaccaggcagtgcagtgcagtgaagtatttaaaacgtgccaactcaggatgtggtaaagttgctaagcagatgagtccgcagtgtccattttgcagccccacctcaggtaggtttcaaggctattgttttttttgttttttttttaaagctctaggcgctgactgattttctgaaggccttcctaaacattcagctcactggctgggtcccaacctgagcggggcagtgcctgctggccacactcttcctggctagctgggccctgaggctgccgtggaaacccaacaggaagctcctgctttgtttgtcattgcatggggccctgccatgcctggactaagccaggttggccacagcgtgcttggcaggcacagcaggtgaaagtcagggaaccacagctctagggtgtgtgtagtcgctgtgccgagagtgacttgttctttctgttattgcccaggtatgtcttcagtccctcagacccctggtggagtgctcatgactgggaccataaattatcctaattgagctacatttgtgtggttgttttgttttgttttgttttgttttgt

SEQ ID NO: 79718 - DNA, 1048 bp, Homo sapiens
gcttgcagtgggccgagatcgcgccactgcactccagcctgggtgacagagcaagactctgcctcggaaaacaacaacaacaacaacaaaacccacatcagacaccatagggtttgtttttgttttgttaaatgtatccatgtcttttggcttttctcatttaaggttgttttgtgtgttttcctgttgttgttttttggtttggtttggtttttattctctccttatctgtgttatcaaggttttttcttgaacctccctaatttctaaccccctgggcttttaaaaagaaatctaaaatccagcgaatctttgagatagtctctaggaagttgggaatcgtttgcctgttcatcctttctctgagtcacaagtgtattttctgtgatacgcccaaaatagttctgggaaagaagaaggaaacaagacttactcagaaacccaatacacaagataagaaatatcaatggatattcttacaacaggcaactgcagggctcagattttaaacattctgtccagttgctaatctgtgcattccacttggggtttagaaatctgtccttatgcctattgtttacagcactgaagccaggggaattacgtggtccctcccctggtgtttggagtttgagttgttgtttctgcacagatggatctgtgaggagagaagttgagtggcaggagaggataggtctgtctcccaagcatgcacccggataaacagagacaacaaatcaagcccagctgccttcaaaccacattggcttgtttacttctggaacatttttgcaatgactgttcatcatctttactttggatttttattggttgattttatttttttcctagagagtcatgtaagccactctcaaggtaaatgagaaggtttcctactattttacaagtggatcaagtgcagatttacagagaaagctttgcgtgtctaaatgaggaggagcctggcagagcctgaaagacctaggttcactttctagccccacccagtcttagttccaatgttctcatctgtaaaatagagatgaca

SEQ ID NO: 79719 - DNA, 1028 bp, Homo sapiens
ctttcgggtatatgcttcaaagtgcaattgcttggtcatatggtaactctgcatttaacctttgagaggaactgcctgattgttttctgaagtggctgcaccacttcacattttgtaccaccagcagtatttgaggcttccaatttatctaaatccttgccaacataagttattttctaaccatcctagtgagtgtggagtggtatttcatgatggttttgatttgcatttcccagatggcaaattatattgaggattttttcatgtgcctgttagccatttgtatttcctctttggagaaatgtctgtgaggccctttgccattttttaattgggtgttttgtctttttatcattgcattgtaataataattcttttactgttatttattgtagaataaatcagtagccataagtattcattaggctgtctgtttagtgtaacacataagtgcaagaattcttgataattgtgccacaggaagagcggaggtttaacttgactgaataaattaacagtatgaagacaatttcaggaaaatgtttaacccacttaagacaataagcttaaaatatttaacctcaaaaattttgtacaatccatgtataaatttaaacttatttttatatatcccttaacatgtatttggcaggacctatacttaaattgttcttattttgtgttgtttgtaaaaggataaaatgtggtacccttaaaatgttacatcactctaacttctctaatgattctgtggcgttccactgtatttctacatctatttaatttccttgaaggaatagggaaacaaaaaagaagtaagccaaatgtagtgttttatttatttatttagagacaaagtcttgctctattactcaggagtgcagtggtgcaatcataactcactgcatctttgaactcctgggctcaagccattctctcccacctcagtctgcaagtagctagtactacaggcatgcatcaccatgcccagatgactttttacttttcgtagagacagggtctcgcta

SEQ ID NO: 79720 - DNA, 1059 bp, Homo sapiens
ggatttaggcactgaaaaatagccatgcaagggttccgccagagtggtgaggggagaagctagaatgcaagtggttatgtcatggcaaggaagtagatcctgcagcttggagaagttcacagtcaaggaaaagcttctaaagaaggcaaagagtaccagagagcaggaagctgcatggcagttttttaacatgcaccctgcagtgagaaacatggaaaagccagcttaaaaagccatagcaagttgggcaggaactaagtaattaaaatctgttttgctttccactcttccgagggtggcagtccagttcctttcagtggacaatggaaaatcctcagctcttgcaggtctttccagagttaggaatcaaaatttgcagagatgacctggggctactacaagtacatatttgggggccaggactgcctgtaattttagaaagcagagatagaaagtccttagggatggtggctgcaggatgcaggagtgacttcgggtgccttgtggtccacatcatggctcaacctgtgttctcttgctccagctcatcgagggcgcctctgcagagcagaaacacagccttggcatcaccagcatggactattattactacctgagcctctcgggctcatacaaggttgatgacattgacgacaggcgggagtttcaggaaactctggtaagtgctggcgcagggccaggcaggatctgctctcccaactggccatttcctgtggccaaaagggcagtgaaggttaataaagcaaagagctgcatgaaatgtccgcctctttctctgtgagcactctgtatgctcatacatgtttcagtatccttaaacagccatgtgccagttgcctgaggaccacttaatgatttgagatgggtaaaaagaaatgaattcatcattatcaccctgcaggagctctgataaataggcaaaaatgattcatacgttgagcatacctgtttgctgatggcctactctattcgtgagctatttccttagaaaagctaagcaaaccgcacgtctatggactgaataggtttagacatttt

SEQ ID NO: 79721 - DNA, 1037 bp, Homo sapiens
gcctgcccaccgcagccctctggctttgtgcatctgtcttatgccctactcatgtaacctaacgacatcccaaagtgactggacctggcctcacaggttgcctcttaactggcttacctaactggtaatgaaaatgtcaaccaagtgcattgttatgaatgctcatttagtcatgtttctgtctgggtgtctccagagggggtaaataggaaagctggcaaggctgaatatgaatatgttccccttgacaaaagccacatttacaaagaaacaaatgtttatccagtaaccttgatttatatagattttgcatcttatttcaaccatagatcatgtctggcactaaagcattcacggagccatctgtgaggctgattctggaacgttttaaaataaataagtgggaattttggagaaaaacaattttcttttccactgtctattttggaaagaagcttctatttccaagagaatttttactatgtgctcatataataactgtcaagttccctggtgggttctatctgttagacttgcccttactttctttgctttccaatattattcaaactactcatttgtttgtctctcatatttgggcccaatgcctgagttgtgttatcctgaagaagttttccagataataaaataggaaagaagaattaaacaaattttccacttgaattaattttcaatctaaatcttataaaaatggacttgaccaaatttaactctttatttaccttttcccctgtcttggattccttggagaccagaaaaaaaaaacaattaaattgatattttcattgatttttgcaatataaattattcattatatttggaggatatatcagtttctgtaaataacaaaaacactcaacatttattatttttctaattgcaaaattttatacaaccctgatagaaagattggaagagacaattcagacacacattcacctgcacacacacacacacacacacacacacacaaacacacactgtctctctctctctcactattcaccatcatggat

SEQ ID NO: 79722 - DNA, 1099 bp, Homo sapiens
cccctgacatgtatacacacaagtacacatacacacacgcaacacacctggctgatttgattgtccttattgagatgtaactagttgtgacttcgtttagtaatcttctgatcagggatagctgccacccccaaatccctaaagccatacccacatctccactgtgttattaatagcctttgtatactcgacttccctgtaagacagtgagtgagctcttctctgacaggagccacatctcattctggccttcggcttaacacactggggcagagggggttgttagacagtgtgtgttgcatgaacaaaagtagacatcatttttgttttaagtgtttgtcctttttaaaccacaaacaaaaagttggaaaagtgatatttcaattacgttgattcagccagttacaagggaacaccagttcctgtggtacagagccaggagagagatttttagatcagaaatgggggatgggggtgcattggtgagtcgtccaacagtggtaacagcggatcctacttattttagggaatatctcaaaaaatcaaaataaaaaagaactgaaatatttttacatttgctgaataagttgaagtgaatagaaaatactattgacttttaagtgaggaataacctttctcagaaaaataattatggtccttggattataccattgtaaatggctttttttccccagaacattctttccatttcgttgatattttaccgtatgtttccatttctatagttagtacacagaccccccccacacacagacacacactctacaatacttcctatttgaattaatatttcctataaagtctgttatgactttgatttaaaattgcttggcttgttcccagctggctatacaagaactagggagtttgttagaaattcctattcctagactctgtccctggagactgggatccagcaggtcagaagacgggcccagacatgggcaattaaaaagtactctgacgattctgatagactgccagatttgggaaccactgggatattttcctaatttctagagtatttgtgtgtgtgtgtccattttataagtcaattaaattaggacgggctgcctgg

SEQ ID NO: 79723 - DNA, 1060 bp, Homo sapiens
ggagatcagcccggacaacatagcaaaccctgtctccataaaaaagtttttttaattagctgggtgtggtggtgcacacctgtagccctagctactagggaggctgaggcagggagatcgcttgagctcaggagtttgagattacagtgagctgtgcttgaaccactgcactctagccaggcgacagagatggtgttttgttttgttttgtttttttaataaagcaaacccaaagatcccctttattcctcaataattagtatgtgcctctaagaaatcattcttatcacaccttaaacaggaagaattcttttatagtatctaatatcagtattccaattccatgattttcctataaattcttttttatagttggtttatttttatttaggatccaaacaaggcctacacaccgcacctggttgctgtgtctcttaggtgtctcggtctttaacaattttcccttcccctttttgttttcttggctttgttaaaaaaaaaaaaaaaaggttgtttgtcctgtagatcttactatacagtctggcattgcctaattgtatcctatgatgttgcttaagtattccattgtcccctacattttctgtaaattaatagttatatctaaaaacttcattagacgccgggagtggtggttcacacctgtgatcccagcactcttgggtgggcagattacgaggtcaggagatcaagaccatcctggccaacatggtgaaaccccatctctactaaaatacaaaaaattagccgggcatggcggcgcatgcctgtagtcccagctacttgggaggctgaggcagggaaatcgcttgaacccaggaagcagagttttcagtgagctgagattgcgccactgcactcaagcctggcgacagagtgagactctgtctcaaaaaaaaaaaaaaaaaaactcgatcagactcagattccgtttttggcaaaggaaacttcatcagtgatgctgtgcacttcatgcctgttgctctctcttcgtgtgtccagattgtcagtgaacccgtctgttataaatcatttcagagcc

SEQ ID NO: 79724 - DNA, 1089 bp, Homo sapiens
ttttctttaaatcaattaaattctccttagtttttctgtagaaacagccattttattttttgagacttttttttaaattttttattttattttatttgctctgtcacctaagctggagagcaatggtgtgatcacagttcgctgcagccttgccttcccaggcctaagtgatcctcccacctcagcctcccaagtagctgggactacatgtgaagaccaccatgcctggcaattttttttttttttttttttttttttaaggagatggggtctcagtatattgcccaggctggtctcgaactcctggactcaagcaatcatcccacttgtcctcccacagtgttgtgattatagcacccaaccagaaacagccattttaaaccaaactttattttttaggtgtcttcccaaatagtattatccccaagaaccctactgataaatttagggagcaggtacaaatttccctcttcatttcattctgacctgagtcattgattcacgattggcctagaatagtccaaaataaatttttgtttttgttttttttcctgaatatctccttaaccaggccctaatcagaatttatgtaatctacttggtgaaaaatcaagacttaatgagatatctctttatatagcaaattaacagtttttaaaatgttggtcactttaggagctcatatgcaactgaattcatatttattgagtaaccaagggattggtggggaggtggtacctttgtctgttgtcctgagggcagccctttattctttgtgtgcagtgatcaatttgtctaggacaaggcggcagtaaccacattccctttacaactaagggaacaagtaccctcctccatggaaggagcttatttgcctgtttgtttttccctggggatagatgtagacatgaaataaacatcttcctcttctgaagtgaagatggttctagcagtgctgtgtttctttaaaattgggtttaccataagaatcattattacttcattcattaattgtttgtttgttttcttttttgggagccagggtctggctctgttgcccaggctggagtgcagtggcatgatcatggc

SEQ ID NO: 79725 - DNA, 1088 bp, Homo sapiens
cagactctctgcaaagtctcaaatatttactttctggccctttgcagaaaaaaatttgctgacttctgctccagatacctgtgcagggcttccttttttttttttgagatggagtcttgctctctcgccaggctgaagtgcagttggcgaaatcttggctcactgcaaccttcgcctcccagattcactccttcctcagcctcccgagtagctgggactacaggtgtgcaccaccacgcccagctaatttttgtatttttagtagaggtggggtttcattcaccatgttggccgggatggtctcaatctcttcacctcatgatctgtccacctcagcctcccaaagtgctgggattacaggcgtgagccactgcgcccagcagcttcatttaattgaattgtacaaaaacagttatgttcagttgcaggtttttattttatttggtcaaaatactgaaatatgcttactttatccggacttaacaccgtcaaaaaatgttaatcacttttacgtgcagcacccacagcacatgaaaactggcagttaattgattagaaggagctgggtggcaggatgtggatctggactgtctggcttcaaaccttgctctgcatagatttggtgaccgaaacgttttgtgacctctgtgccttgctttccgtacctgtaaaatgggagtaataataaaatctcccacataaggctgttgtagggtgaaaccaaataaagaatgcagcaagtaaacagtaagtatgagtcattattaccatgcaggtgtgtaagtgcttcccatatttccgagttattttccaaaaattccactgtaaacttgtttattggaaattaaaatgcattttgccacagaaaccgttataaatggagtattgacaagcccatagaagtcttcatttccgctgaatgtagtagttgtacaaattatattttgaaatgttcttggaatgtgggctggacttactgcattataaagatggaaatacggttttttggtaagctgagtataaaaacaaacaaatgatgtccgtagtcagtccttcataactccaggcggcctcactcctcccaatca

SEQ ID NO: 79726 - DNA, 1051 bp, Homo sapiens
tttttatggggctttaaaaaatgcagaatggaaatttgattcaaatatgggttgacttcattatcaacagggaactgtgatatttgcttaagttctataggaattttgtttgatgcaactatgtaaagatatcctggtggaactattgtgagagttagtcatggacatgcaaaactctgtgtcaaatctatataatagtaccaaaaagtttaactttgatgccaatagtgccttctgaaagtatggtatcatggatgacttattaaaaagtggagtctttgcttctgatgtaatatacatcttagatttttacccaaaaagcttggggaagaatagttttcacatcagtggcttattatgattacttaaactggttttttgactattagctaaaagcacgggaacctttgcagtaataacttttgcagcggctgcctatcccatcactggtaagtcgtggggggtcgggttcaacttatcaggtatttaacaaacaatactgttaaataattaacagcattattccaaggcatttggaccattctgaccagtactctgctgtttcttatttactataagggaattttaccaatatctgtagttaaacctctgaacctctgttttcaaggattaacagatatagttggatttattggctacattataattgcatcatttaaaacatttattttctttttatagcactttgggaggcagaggcgggtggatcacttgaggtcaggagtttgagaccaggctggccaacatggtgaaaccctacctctactaaaaatgcaaaattagcggggtatggtggcatatgccttgtaatcccagttacaaggcataacttgtaacttgggaggttgaggcaggagaattgcttaagtttgggaggcagagattgcagcaagccaaaatcgcaccactgcacttcagcctgggtgacagagcaagactctgtctccaaaaaaaaaaagtgaatttattgtatttttaaatgacaaatagtaattgtatatagttgtgggatataatgtgattttttttt

SEQ ID NO: 79727 - DNA, 1169 bp, Homo sapiens
ctctgttgccaggctggagtgcagtggcccgatctcagctcactgcaacctccgcctcctgggttcaagcaattctcctgcctcagcctcccgagtagccgggactacaagctcatgccaccatgcccagctaaattttgtatttttagtagaaacagggtttcactatgttggctgggatggtcttgatctcttgagcttgtgatccgcccaccttggcctcccaaagttctggaattacaggtatgagccaccgcgcctggcccagactttgatttttatttagttaactatgtttatatattggtctgtgtgtctaaaatttcaataccgatttctaaattgctacctaaaaatactgtgcagtttactctttgtagaagtttgtaagagtattgatggtcacctcctccccactgccctgtacggggtgggggaccttgttgtatttacacaacacacttaattgtctcccttttctgggcatttgaaggcatttgaagatagtggttaccaagtatatgggtaactcctcctttctcccagatgcatcaaagaacagtgctccctgggacactaatgaagtgtttgcagaaccgctgccgcgtggggccaggcctaccctggggctgtctcctgggcaatgaaggtggactttcaggagagaataatccttcctgtgtatgctgactcacctttgctcttcctggtccccaccctggtaaacagacaccagtcagtgaggttccacctttgaaaaaatcagtcagggaatcacccatctgaggttcccagcctcaaggccgagttcttcctgtgtgtgagggactctggtgtttgggttccacctcttaaatgttagcaacaaaccaggctattatgtggataggggcgtaccctactttccagaacttgcacatgaatcaactgctttttaataaactacgtcatccttagaaacggaatgtggatctgagagtgtctgcactcaatctctatctaatggaaatttctccgtcataatttgtaggaagtgtcagggataagagtaacttttcattattgttattattacgttcatgtcgtagctggcacgcccgccactgccctcctccctttgtacagtgtgctgcgctcaccaggagctgctgtaaaatgcaataccttgc

SEQ ID NO: 79728 - DNA, 1003 bp, Homo sapiens
ccgtgtgtgtgtgcctgtgtgcaccagaaatgaccgtgcgtgtgtgtgtgtgtctgtgtgtgtgtgtgtgtgcgcgtgctgggcaggcagagccatgggaacaggaaaacccagcacccccttcagccttttcctagggactggcattcattgccaggcatgctggttgggaagaactgcccaagattttcatctagaagagattcaagaggacccaaagcccaggctcttaggatttcaccagatgataaattataaagtagctgactggtttgtggtgaacagttgctcaaatgcccttttagcttctcagtggtgacaaagtatatctcacggagatcttacattacattaaagatttaggggttccagttaggatatttaaaacctttgccagataggagatggtatcacatacctcacaccaaatttgtgcgtctcacagctgggcattgagatttttaaaatagcaacttctgagtggaaaattgttagggaaaatctaatcaacttaatttaaatggcataaatgatgattagagctaattatcgtcagaatttgggctggtgtttctaaaatgaaactacagagtttctttaaatggggtcatcaggttaggattcagttgtcaagaaagatcaatgatttgtgtgaactcacagtcttctcagcttacctggtagccaggggtaatatttcacacttcggagtgaattgcatttatattctttttcttcatagctcactcaggatttttagaagatgaaagaattgaatcttatggcaacaaagcccatttcttcacagtggaactataaatgcagacttaagtaattaatttgtaaacctttgtatctttttaaaacatcatcctatccccaaggcctaacataagttttgttgactaggtgaaatgattgaatcagtgaatgattgaataaatgaaaaatataggatgcagttcaggaaagaaaaccacaagagtgcggcggctatttaaaa

SEQ ID NO: 79729 - DNA, 1050 bp, Homo sapiens
cactttgaagtccatcccacagaagtattagctcaaggctgcaaagatacaggaatgagaacgcttgctgcaacgctgctcataacagggagaccaggaaaataacccaaagggccattcacacaccaggtttttgagatgaatgacatcatgagcaactcatgagcatgagcaccaggcgtgcctcaccatcttggctccttgttgataacgtgtcagtccctaatatccagcctgactccaaggactgagatgatgagtgtgaaagtactttgtaaattgcaaatggttttgcaaacctaagggatatgatgaatcaacaatgagcaaagtcctttgagacctttcacaaataaaggcattttatatatttaaatccttggcactcacaaatttagcatttgaggttttgccaacctgtggagcaaccccatggcaatttgccatttagctgaggcatatattttcctccatccacaacctgagtatctcagacgaggatgaggagtgagtgaatgaaggagaaatgttaaaatatgattacattatagagtctttaaatgctcattaaaacatatattcgttcagtatcttttatgctttcattaatgtgccctaggctattgagaaagaaagagtaagacaaaaaggtgaaaactagaaatattctatgtaatggaaaagaccataaatatactcataaaacaattagtgagcacagaaatatacaatcaggtaatctataataatgtacatgtaataatctacaacagattttttcccttattttggattctgagaagtgagcactaacatattgcaaagggatttaattgcaaatgatttgtgtaaacctggtgccatagaaaaacttctggggttgaatttaattttatcgcatttaaatagaaaaatgcccacctgagaatatgcagctgtaattacgagggagttttattggttgttactgtggcatgtgtttatttctctcccacttaacattctggatggagggagttcaaggctgctgtgtagctctgcagttgtctg

SEQ ID NO: 79730 - DNA, 1099 bp, Homo sapiens
tagagtcggggtttcattgtgttagccagatggtctcgatctccagacctcatgatctacctgcctcggcttcccaaagtgctgggattacaaggcatgagccactgcgcccagccaagactttgtatttctaacaagtttcctggtgttgctgatgctgctggtttgggggccccattttgtgaactagcatgatcaaggatggtgttctcgcctaatcccagcactttgggaggctgaggcaggaggatcgcttgagcccaggagtttgaagctgcagggagctatgatgccattgtaacagccagggtgacggagcaagattctgtctcttaaaaaacaaagaatggtgctctaaacgcaaggtttttcacagcagtagtgacagctgctcctttatgcttctgtttcttcatttgtgttgtccctggaaagtccccctcgtcccagtggctgagtcctctgcttcctccaggctcggcccaagttcctgttcctccacggaacctttcctgattagtgcacacgatcttttctcttctctgaactctttcagttgtaaaaatgaaaccctaaaatttcttttgttgccttgtagtatgctcagattgatgcatgataattgttttcccaactagactgaactgatttgatttgtgaacacgatcatcccttagatgctcttatgtgtgttcttgaacttagcacagagccaagcacaggactcaattatttattttgtgatgaaagttcaaagtgaattaagagagaaaatatattgctgagtgttgtagtccatttggtttgctatagctgaataccacagactgggtaatttataatgaaaaggaattttatttctcctggtcctggaggctgggaagttcatgatcgaggggctgcatctagtgagggccttcttgctgcttcaacacggcagaaagcaacatatggcaagtgcgtgcacgagaaagagtgagaaagtgtgtgagagatagcaagacagggccacactcacttttaaaacaaacccactcccacaataacagcatccatttatttatgagggcagagtcctcatgacctagtcacttcttaa

SEQ ID NO: 79731 - DNA, 1046 bp, Homo sapiens
ttttggttgccattgatatttcaaaaggcaccttttttttttttttttttttttgtgatggggtcttgctctgtcgcccaggctggagtgcagtggtgcgatctcggctcactgcaagctctgcctcctgggttcacaccattctcctgcctcagcctcctgagtagctgggactacaggtgcccaccaccataccaggctatttttttttttttttgtatttttagtagagacggagtttcaccgtgttagccaggatggtcttgatctcctgacctcgtgatccgcccacctcgtcctcccaaagtgctggaattgtaggcgtaagccaccgtgcccggccagaaagcaccatttcttatatacctttaaaaaagaaaaatattgctaactaaattaagacatgtcttctgttgtaagacatattctggtttaagatatgttaaatggaaaaaaaacaaacaaactcaaaacccatgtacctttttctttttcccaatgtgctttttagaatcaatacaatctgtgtcaggactctattagatttcactttccctctgacagagccacttatgcttttaaaatagccaggtaagcaggacaatttcctttcagcccatctctggctctcatggcttccttcttacacatgctaggtaagcactttgaacttgaaaaacacttgactaaacactcatatgatctggattgtttaaccacaaaagatttggtcttctctagtgaaaaatgctgtgggtttcttttttacctttaattttacttttcaagttaaaaaatagcttttaaggtcaaaattttcagagcaatttgtaagtatagatacagtttcatggtgacagtttcttatgttgaaaaggtgacacaaaacacattatcttttactttagattcaaggggtacatgtgcagatttgttacttgggtatattgcgtgatgctgaggtttggggtactgtcatccaggtactgagcataatacccaatagttagtttttcttttctttctattttttttttttttaattt

SEQ ID NO: 79732 - DNA, 1054 bp, Homo sapiens
cacatgtccaaaattcaagtactattaaaaacacataattttaaaaataaaagttacttatgaaagcctgactgctagttttaaagggacataaataaaccttatttaccttatttatgtatgtccctttgaatctagggttttttcttttcttttttttgagacagcgtttcactcccatcaccgagactggagtgcagtggcatgatctcggctcactgcaacctccatctcctgggctcaagcaattctcctgcctcagcctctgagtagctgggactacagggccacgccatcgcacccagctaatttttgtattttttttagacatggcgttttggcatgttgtccaggctggtctcaaactcctagcctcaagtgatctgcccgcttcagcctcccaaaatgttgggattacaggcctgagctactgcactcggcctagtttttttttaattccagaaaaagtttcaagatttttttttttttttgcttttgtgttaatattttgggtgtagtgggagagggggtagcacacttgagttgctgcaggacttgtttttttgtgtgaccagagagagcccacagcacacagccgggttctcattggaaaggcatcagaacaagtgtgtgcagacagcaccgcttatagtccgtgacactcattcctccgcatgaatcagggccacacatggcttcagatgatacaggttctttcctgacatctcaaggggagtcatttgaatgcgtccgtgtctctcccactacctctcaaaatgccggactaagttaattggtaaataaatgctcaggctgcttagcagtggcctatctctgaggcatgaggtctaatatagtttaaatgtaagtccatcgtggcctccaagtagctaggaaaacaggtgggggacttcaaagagatctgagagcaagcctggccgggtctcttgtacttttccagccctggcttatgtgtgggacaatggtgaaaagcagcccttgaggtagaaccaagtgggttttttttttattcatattcggcacagatttattg

SEQ ID NO: 79733 - DNA, 1041 bp, Homo sapiens
tagagacagtcctggctcagcactgaggacatcttgcaggcagggttggctgagtgttttatggagcgagcttaagaggagatgttctaaaaccagagaggaaacatttttctctgttctctgcaattcagcaggtgatatcccttcatggatttataataaacacagtcctctcattgaccaaggttgaaaaactcagaaagtttgctcagcacagatctgggagtcaggaacgtactatgtgctgtggaagacatttcaactcctctttcaagcaaaaaaaaaaaaaaaaagtcaatactgatctagtttatatagctattataaaaaattatattaatgaaaatagaaattcatttgtaagtagagacagctaccaaattcctaagcaatctattcatttttgtttttttttttagacttgaacactttttcttgccttgcctcacaatgcagttgtcaatatagggccactttagttacacctattacctgactctgcaaagaccacagagcttatttcctttagaaggattttgtttgattaatttacactcttcgctgacatttctcagttgagtaggaggaaaaaaaggagtttaatttaaccatattagccacatcatggacagggaaatgtatggaggatgtttaagtgatttgccttattgagtaaagatatatctaagcttagattttactttgtcctataagaactctgtgagcgagatttttttttcttttttgagatggagtcttgctctgttgcctaggctggagtgcagtggcacgatcccagctcactgcaacctccacctcctgggttcaagcgattctcctgcctcagcctcccgagtagctgggattacaggagcaaaccaccacgcccggctaattttttatacttttagtagagacggggtttctccatgttggtcaggctggtttcgaactcttgacctcaagtgatttgtctgccttggctgcccaaagtgctgggattacaggcgtgagccactgtgcccagccgagcgaaatatt

SEQ ID NO: 79734 - DNA, 1019 bp, Homo sapiens
cgtcaagacgtgaatcgagtaggattagtttagcttcgtgcccaggacttgtacaggacgtgaaaaattccttgacctcctgatctttcactttgactttctgttctgtctttcaatcaaaaatgtaaaaataagtaagttggagagaaaacaaatccctcaacttcagccgttgacaactcatgaccaatcttgatttcactgttcttatcttcccctggtttctttagaagcaaatcctagatagcataccatttcatccataaatatctccatattatattggctttcacatagagcaaagctagacactaactgctcattggactgaaagaagagatatactcagagaaccaaagcaaatagcttccctttaagttttaataggagtggctttgttttatagaacgctgtaggcatctccagccactgaggggacttcttcaagcttggcccagcctcatccacagaaggatctggcagtgatatcttggcattcatagtctcagtgtgcaggacagcattggttccccaccctacagtcccagctctacctaggcagtatcatatgtatcatggtaatggctatggaaaataatatccctccctccctgcctcccttcccctcttcctctttttagagatgaggtcttgctgtgttgcccaggctggtctcaaactcctggcctcaagtgatcctcctatctcagcctcccaaagtgctgggattacaggtgtgagccaccgcatgcagcctctttcttttttgacagggtcttgctctgccatccaggctgaagtgcagtggtgtgatcttgtctcactgtagcctcaacctcctaggctcaagagagcctcccatctcagcctcttgagtatctgggactacaggcatgagctgccatgcctagctaattaaaaaaaaaaatatatatatatattatatatatatacacatacatatatatatatatgtatgtaaaatatatatatattttacagggtctcactttgttgct

SEQ ID NO: 79735 - DNA, 1301 bp, Homo sapiens
gccctgtggttcacgcctgtaatcccagcactttggggggccgaggtgggcagatcacctgaggtcaggagtttgagaccagcttggccaacctggtgaaaccccgtctctactaaaaatacaaaagtagccaggtgtggtggtgcatgcctgtaatcgcagctacttgggaggctgaggcagagagaatcacttgaacttgggaggcggaggttgcagtgagcctagatcacgccattgcactccagcctgggcaacaagagtgaaactctgtctcaaaagagagaaagaagggaagaagagggaaggagggagggccttattttttattttttaactccttagtgcccagtgtgatcattcctattactcaccagactttgtattacatccctctcaggtgtttccagaagttacattgtgcctcaaaggcggaacaattagccccactaaagatatgcagtatccagcaggtccctttttcctggaataagtataagaactgctctgaaggaggcacactctcttgggtcttttgagctctgataatgtttgttacaaattcatttatagcactttatggtcatacgttacattatagaaagtaaaacataggctacattgtagaaagcccagaagagagcttaaaaattctatcctaaatccatttgttaacttcacagagagatctagagaggttaaattacttccaaagtctcatagctagtttttagctgagctggtgccagaatccaagttagatctgatccagtgcagatctaaccttattagatcccagtctaataaggtttttcttaccaaacagtggtgggaataattctttaagagtctggacgtgaccagatagttttctttctgggacttttcaagaaagtctgcttgtaggtggaaggttactgtactaacttcattataagaaatttagaagaattcagccgggcgcggtggctaacgcccgtaatcccagcactttggaaggctgaggtggagggatcacctgaggtcagaagtccgagaccagcctggccaacatggtgaaaccctgtctctactaaaaataaaaaattagccgagtgtggtggcaggcacctgtaatctcagctacttgggaggctgaggcaggagaactgcttgaacctgggaggccgaggttgcagtgagccgagatcacaccattgcactacagcctggggcacatctcaaaaaagaaaaaaaaaaagaaaaagaaatttagaataattcacccaaagtacccccacaccctaacacagtaattattt

SEQ ID NO: 79736 - DNA, 1051 bp, Homo sapiens
gaaccacagtgattcttctcattcactcaccaggaagaatgtctaaacgttcactgcatacccagtagtggcattcagtatttatccatacatccacaccttcctactgggtctccctaaagagagggaatagcctggtattttcagcctatgcattctctaagctattataacagggaaaatctgcatccagctgctactgtttggcgctatctcaacacctgtgtaggatggttccacgagtggtgaggctgcaaattgagcttttctcttcaacccttcaactccttcctccactgaaaatgccatggcctccaatgtcacatgatggacttcttgtttttcactcctttttcagttgaatctcatgaattggcggtctgtctcaggcgttttcctgagggttagataatgagcagcggcgtgcattctgataacttagaatacaacattttgcctctgtgcctagtgtgggcatgtgatgagcccctgtgagactcagtgaaagaacatatagtaccttgcgtttcctcatgagccaagtgtggggccttattattcattaggaatttgagaaatctctttttatctgcttcaacaagcagaaatattttaaatcttctgtgtaagtgcaaggtattataagcttcatggtaggatatataggaattatgtacagtcatggttttccaagtttgagtcatctctttttttttttttttttttttttttgcgaaaatgcagcaacttgtgtttttaccaatctgtgattaaaatgtttcttaatggtgagtttttaaaaactttttttttctttttctcaccatgctgaaatatttacaaagtaaataagaggttaaaggttaaatgccaaaggtattaaaataaacatctcagccttataagcacattctgtaatagtggtaaacaaattgtgttttgaatttcagtttcagaatttatgttggcagagacaaaaggttttggggcatcctagcaaagtatttttttcatatatctttgggacagccacacttaagagaagtacaac

SEQ ID NO: 79737 - DNA, 1077 bp, Homo sapiens
tggctgggctatagggagaacacctataccgtggacttcttctgtgtgagtgtgtgtgtgtgcgtgtgtcttttaggaagtctggtagcatagtaggagggctctccatctgtacctgaggccctactaagactcattcagttgtgactcataaggaaaatagccattttcattttctgactcatgaacacagtgtacagcttgtagttcaccttctatcttcctcctgaaaactcactttgggacacttttctatcttgagaaaactaggaacactaccaggcaatagttacttgtgtctttttcctaaggagacttgaagaagttaaaaaaaaccctgcacatctttataatttagtggaggttgtttagcagagtacaaaaaaatctctgttgactttaaccgtaatacccatctaaggcttccttcgtagaatctgggcttatcatcatctgcaaaggaagttctgcttttgtggccatgaccagtttggactctctgatagactgaaacccatggctgtaggtccgctatgtgctttggatccagaaattgtgattgatttttatgcaaggtttctgtgcattaaatatacagaaatatttgagcaaatctgaattgaccatcacctcaaaacatgttcaagagctgttcccttttccttacttgcatatacttgtgaggaaattatagatatgacacataagaatacccaggaatagatttacaacctagaaatctgatggatagctgatgataaggtaggtaagttcctttaggtgatggcatggcatgtatttagaaagtctggaatacatttcaaatgtttcctgggaaggtaacctacttgatttccacagattagtttatcagattgctagtagtctcctagtcaaaacaacacaatacaacaaaacaaaaccagaaaggaatgggatcaagcacaaaaaaagttttgatggaggcaaagcgttggggaaatacctagagtccgggacattatctagggacaagtgtgagtgggccatcctagtgggaaatatttgacagcccaggcatctccttggagagaaaat

SEQ ID NO: 79738 - DNA, 1063 bp, Homo sapiens
gatatcccggtgagcagcctgagggaagtgcagcagaggcccatcgaaacctgcacacaaagctcagaagcccccttgccccgtgctgtttattccaaagaatgattacaaacaaacatcaacgagaaacctttcaaggcatcctcggccaaagccttttctttttacatagtccaaaattaagtcacttttgccccatctaagagaacactttgtctatacatttcctcttctagttttaaggtttaagaagtcagtctactctacgttacttttggaccccttccctcaccccagcagagaaccattcccattgggcatgtgtttgggtgaagctacctcactgggcacctggtcccttgaagcagtgtgatagtcctggtacttgagaattgctgtaatcattttccgtgggtcaatatttcttaaaaaaatcaatgtgtttatgtcaagaacttaaagaatcttactgaatttaagtacttgagtggtaccttgaggaaattaacttcccctcagttaaactcatttttcatgctgaatggactgaaatatactctaggttgccttttccgaaacctgtgataccatgcttaattcagccccattgcagatgaagtagagggttggtcaaatgcatgcgaagaaggcatgctgtagggaagaggtggttctatctgaggacagtgtgtgacttccctattgatgggctccctgccatcagcacagatgggcatgttgtgtgcccccaggcgactatctgtgcatcagatatggttgctgaagtcacaattcactgatggaaaagttgaaacagctggctgtcctgaaacaggagatgtgccattgatagatctactggatccagagtgatttggccaaagttaatcatttctttcctgacttgaaaaattgttcattatgtatgtgaagttgccttagaatagagcatcatcttaaataatcagaaacccaagttacaatatttaatgtttatgtcagactctgtcaagccaaatgatacttcattttgtgttccacatctgcccaggcctgcccaagt

SEQ ID NO: 79739 - DNA, 1262 bp, Homo sapiens
ccaccacaaccaacctttactgagcactgttgtaggtgctggagaagtagaagacaagttcccagtcctcataggattcacatgtttacatgtacatccaaaacatacaacaatgcaagagagttctaccttcatatagaacacgttcccaaaacacacaccaatgtcagatatataaagttcaaagacaaatccgtgtgctttaagcacaggtttctattttcagagatctaaaatgtagcataaaatccctgattgtgtgctgtcccctagacatagtcttaagctataattccagcatgcatagatgtttttaaaatctgagcatctccatcctagctgagcaaagttgaccacctgaagtccaataggcagctttaagatttgggtcaggctatttacctttataaatcatgaatttttttttatctgtaaagacagagataataatagtaccttcatcatttatttctcacatagtgttgtaagaatatgaattaaatcatataaagtaatagcaatgatgagtgatgcgtagcaacgtctcggtatgagttgtcattattgaggctaaatattcactaccttctccacacctaatgattcccttctttgtctcaattgttttatgtttatgagaacaacactcccttttactagtgtttgcacttatattttctccatatttcactaattttgaaaaagcgacaaggctaaatggaacccagtatgaatgtaattgagtaaatactgtagtttgacaatgctggtagcgcaggtggacctgagctatggactggcaggcagcaccgccaagagatagctcaaaaggttcctttgttgcctggcccattgtcctgatgccatgtaggaaacatggctcaggtgcatttctatacaatgtctgtatctgtggaaaggtgaatgtacaaaggtcaacggcacaaggagatggcccctctcttttattatattgaattcctggaaatcccgaaatagagccaaacatgataaagttgatgacagtttcccataggaggaatgcttcaataaggacttgataacaaatggattataagttggaccaagaatgtgattctaaaaacagctatgacaattataagcttccataatttaaagtagtacagttttgctccaaattttataaagtaaatataaatatgcatttttattataaaagagacctcagtgaattgaaaagtgcatgacaccacataaccacataaaaaaatcacacaact

SEQ ID NO: 79740 - DNA, 1033 bp, Homo sapiens
gccactgcacctggcctcaagttgattcttttcttttttttgagacagggtctcactttgtcacccaggctggaatgcagtggcacgaacacagctcactgcagcctggaatgcccaggctcaagtgatcctcctgccccagccccacaagtagctgggactgcaggtgtgtgccaccatgtcctgctaatttttttttttttttgtagagacagggtctcactatgttgcccaggctggtcttgaactcctggactcaagcgatctgcccactttggcctcccaaagtgctgggattgcaggcgtgagccaccatgcccagcctttcaacttgattcttgaattctttgacttcaacttgattttttacctctttaaccttagtgcaaagtgggactattctgactaaaagactcaggtgtaaaaatctgtttaagtcttcaagtcaatagcaagtgccttagttatattccttacttttacatctctgatttgaatcttgctatccttcttgctgagcatggaccatgagaaaagcagctggatattagagtaggtaattcctaatgacaaaatgaaggaaagtcaaccttgtttttaccaaatctcatgaagttgctcaataattctaagatgactcatcttagtactttaagatcacattaaccctgctgccttgaaaacagtgcttaaaggaagaggatccaattatgttaaaatatctatcttttactctccctgacacacacacacacacacgcatgcacacgcacacacacacacacaccctatctatgtagagaggaagataagccttgagggaaatatgacgaatgtttacttggttatactggatggtaacactatagagatttttatttttgcttttaactttttctacatttctcatttttaaaaaaataatgagcctgggcacgttggctcgcctatgtaatcccagcacttggaaggccaagacgagcaggtcacctgaggtcaggagttcgagaccagcctggccaacatggtgaaa

SEQ ID NO: 79741 - DNA, 1140 bp, Homo sapiens
tattgcgcacctgtatttttattgcaaaatttggcaacctcacatccatgtccccaaatcttcaatcctctctgatttcttcagtaatgaaaactacttaatgtgtgggactgtaaactcaaggacatctgaggtcttagggagatgtccgatgggaccacacaaaaaaatgaaaataagaactctcatcaaaaacatgagagtctcttccactgagtaaacttttcccatcacagggactttgttgtcttccttcctctggtattcgttcttccaaaatacctgttttgactatcaatcaataaaggaaagccgtggaaaccaacaggaaataacgcccactcaatgagcgcctactatttgccaagcatcatgttagatgctttatgtgcctcatttcatttcatcctcgctatattcttgaagataattacgttttttctttaatgtaaagatgaggaatccaaggtttagaaatgttacacaacttgccccaggtcacaacccgcatcagtggaagagccaggatgatggtgatgaagatggtgataataatggtggtgacgatgaacacagctcacattgcttgagaatacattatgagtcaaccagtgtgctgagcgtgctacatgctttaactcattcaattaccacaactgccttttggggctggtactctcattaactccattttaaagatgagaaaacacattcactcttggtctgctcactccaaaccgctgactctactattagccatactccttggattgtacctctccacccactgggtcttgacatcccactaccacccctcttattgcaggttgctgaagctgtctgtagactcagcttcttcctaaaaccttaacctcgcgactggctgattgctcttgggaagcagtgcatggtaaagcttggcaggcagatgtcaggttgaccaaggttcctatcttaaatgttgaaaatttagtgtttcccaccttgaaaatacactctgacaagttttatgcaaattactcccaagagctgacacatagccaaccaataaaacagcctcagcaaaaaccttctcaatcttacctctaggaagctcttggctttcgctaaccacaatcttagagaagcttccaactagtc

SEQ ID NO: 79742 - DNA, 1091 bp, Homo sapiens
atggagtccctctttagggagggaaagcccactgtataataggtaaaatctattgatagcagctgtgtgctttatatacgctacctcatttaatcttcagccctggcagggtccagtggcttacacctgtaatcccagcactttgggaggctaaggcgggcggatcacttgaggtcaggagtttgaaaccagccaggccaacaggctgtgaaacttcaaaaatccagcataattggaacctcaaacctatgagattatcagatttgtccagatatttggacagtattatattgataatgtttgaattttttaaaatttctgacttttaagatattgtccaggttatgtgcttctatctcttggccattattattttggctcatacttgaagactatcaattacagatgagtcaattaaggcagaaacgcttggtataaaaatataaaacaccatcataaacaatatttgaccttggaaaggttctggggaaaaaagtgaattaatcagcacagattcattggcagagtctgttcaagggtgtatcaccaacctcaataatggtgctaggtgtgagccaatccaccggatacactcactcctctgatcctactgaaattcatcttgaccatttgcttcttcagctaatgatagagacacaaatggactattgggattttccagattgctttcaacattccaaatgccaaaccatccgagtttttaaaattacttatggttttccaaatcctacaacacaggatgtgttgactaggagatacaatttttaagatgtttgttgtacgtgctttttttttgtcttcctgttttctgcgggtttattggtggtatcaactgactattccatccaagagacagaacttgcactggaggagaaatgggcacaatcctaaccatagcatcacctagcgactatcaagcccgagaccagaaagcaacatttgaagtggtttgacagcattgcctttggataactggctttctggttccttactgaacacttgcagatatgagttatgttaggtgaggacatctttggagccatctgcataagaagaagagtgtcaactct

SEQ ID NO: 79743 - DNA, 1054 bp, Homo sapiens
gaataacctcaagatcagatcacttgctatactgttcaaaactcttccaatggcttttcaacacatctgaaatgaaatccatgtgtttctcatggccagtaaagctagtaggtctgggccctaaccatcaccctgaaataatctcctaccaccctgcttccatctcactctgtcccagctacactggcttctttgtgctctttgaacacacagagctgacaccaaacccagggcctttgcatgctctcttctgtctgccaagagtgctctttcttccaagctttgtttcttttgctccctcaaagccctgctaacatgtaacttcctcagagaggtcttccctgaccactcagtctaagccatctcgcctcctgcacatcctttccttgttagcagttaggttatagagtcatttgattatttctttatgatctgtcttccactacaatataaggtctgtgagagcaggaatttggtaatgtatgtgggatgaatgaatgaacaggcctgccaagaacagagtgggaggggtttgggagggtacaaagaatacaaccgtatgcctctttccgctaagaattagaccgggctctgtggctcacacctggaatcccagcactttaggaggctgaggcgggtggatctcttaaggtcaggagttcgagaccagccaggacaacatggcaaaaccccgtctgtactaaaaagatgaaaattagctgagcatggtggtgcatgcctgtaatcccagctacttgggaggctgatgggggaggatcgcttgaaccctggaggcaggggctgcagtgagccgagatcacgccactgcacaccagcctgggcgacagagtgagacttcatctcaaaaaaaaagaataatgataataattgctactacttcatcctgtccatcccatgtccctaaaaacttcagcataagtgcactccacacacaaggagagaacaaaccctcttactggccttgggcccatccctctttctcccacactgctacttttgagttatctcattttgctcccaatagtcagccttg

SEQ ID NO: 79744 - DNA, 1049 bp, Homo sapiens
ctgccactcgctccttctgcctgataacaaatactattccttttatccttgcaactcgacccagaaagaggtggctgtcaatgtccaaggcccctggaaacgaagactggaaatgtgaaaccactgggcacaggggaatgggtgggtctgagagtctgaaagacagtgctagagcatgtgccttccagatcattctcattgaaaaattcagaatgacctcccctccccaagccaagaaaggataaacactgacacctgcctaccttctcacattctaatttctaaggtaaaataaaatgcattaagaatctgtaagttatctcatttaactggcactctgctttatgagatacgcactatcatcacccacttacagatgaggagattgaggctgggggatgtgaaatcatttatttcagttcacatggtttgcgagcagtggagtcaggatcctaaagtagatactaaccagtgctatttggcataccaatttaaatcagttacctacactaactttaaaacaacatcagctttattaaggcaaatttatatatcataaagttcacccactttaagtgtacaatttgataattttagtaagtttgcagagttgtgcaaccatcaccacaatccagttttagaacatttccactaccccaaaatgtttcctcatgtccattttcggttcatacccactcctacccccagctctaggcaaccgctgatctactttctgtctctataaatttgctgtttatagagaaatgaaatcatcctgcacgatcttttactacaagctgcatttgttttgtgaagactgttcagctcagttctcaacattcagttcagaggtgtgcactggcttagcacaagaaggaaggtattgtaactccacttttgcaagacgtctggagggaaagttttttttttttttttttaaggagaatttgtattattttaattatttttatgtgcagaaaactcaacagcgtacatttaacccagtttggtggcaagttctttagccttggcttttccagcttggcaat

SEQ ID NO: 79745 - DNA, 1040 bp, Homo sapiens
cgtgctttcccctgctagtttagtaggtagagagtttacatgggcttttaataatattttttctcttctagctgttgcacttggcaggttccttttttaacatttggtaatgtatcttttctaatgctagaaagaaaagttgccaaatattgctgttgatcataataaaacaccctaaaagtaatgacttctttttgggtgtgagtgcccgggcccactgcagggtgacctccagccttccgccgagctcacagctggaagggcaccttcagtcagcaatcgatatgtcatttgggtagagcaactcaacaatgaaaacagtgggtcttcccaaattagaaaaacaaaaaggtgaatgaacaaatatgtatgagtgtccgtgaagaggcgtcgtgttaggcttcgtggagattacaggttcatgtaggatgtggtttccgctgccctacggcagctcagctggggagacataatccagaaaggttcaaataacaatagaagatttaaatagcatttcaaaatagctgttattaatagaggagaacaaaaaccaatctgtttttgcaagggttctcctaaaaatgttaacatcattctaagctgtggagagtggattgaacatcagagaccagtcattgggttctagaggtctgtctgtaaatctgtctggatctgacagaggccatgtgtgtattgcagattggccgcctcccttcagttatgcagaaatctctgcactggctggaagagcactgtcaaatgttgtaagcattctaaagttcacctttgtgggtcagaaacacatcacccctcacccttctacctccaacagaattccctttatgaatgtgatagaatggaggggaaagaatgcaagtcttgctaagtggactcaaggccattttcacaaagagcactgaaaatatctgctctgggaccccatggagggacttgcagttttcctggaacctcgagtttttggaatactgtgctggcatcactccagaatcactggacctgtacaacatgctgattccctg

SEQ ID NO: 79746 - DNA, 1073 bp, Homo sapiens
aattgaatatatcatacgtagtttgctagtttaataatttgcaaaaggactactggagtttttgaacttgagcgatgagtgcagcattgggctttactaacatgggaaagcaggggcgtagacagtgatgttaacatgtagtcggactaacatacaggaccttggttcagtgtgcttccagtactgccaatgaggaaagagttttggctactggacttcatgcattttactgaaaaagggaatttcagcctgcagctctgtgatctggttctattgaaacaggtatatcagcggaggggttttggtgattatcatccaaattcattttgttttcattctacccactagatgtggcgtgttgtatgccttgacttcgggggagaagacagtaaattgaatggaattcgaatatttattcagttctgttgacagaggtttttcaatgtaaatgaataaattagtgttctggtgtctgctctgtctccagtacattttagcttgtctgagtcctctttgaggacctgatcatgtctgggaaccagagattgataacagctcaaatcaaagggattgataacagcttaaaccaaagacaggatggacagctagagatagtctctaagccttcaactcagaagaccagatcctagaacatggagctaaattaattgataaatcactcactaatccactaacccactaacagccaggcattgttagaggcactggagctgcagtaatggcccaagcacacaggcctctgatcttcgccctgctgcacactttagtggggtgtacaggcagtcaatgctaagtaaccaaggtgatgttagctgatgtcaagtgctctgatgagaggatgtgatggagagtgactgtgtggctgtcttagaaaggatggtggccgggcgcggtggctcatgcctgtaatcccagcacttttgggaggccgaggcgtgcagatcacgaggtcaggagttcaagaccagactgaccaatatggtgataccctgtctctactaaaaatacaaaaattagccgggtgtggtggcacgtgcctgtactcccagctg

SEQ ID NO: 79747 - DNA, 1056 bp, Homo sapiens
tcccaggggattggttgtcatcacctttgcataaactgcattatacagcacattgaggctcccacagaagtccctattccaagccgttttgggaagggaggttttttaaagataggccgtatctttgaaaaaataaatgaggacttgggacatcactttttcaaggtggctagcttctgctccgtgcttgtgtgaagcatgtttattgtgtgcacctggacaatgcactttccaccctttagtttttcttgctgcaagaaaagcaagaaagctccctgagggtatgcctgatgctcagcacacagtaggtgtgcaaaaacaagtttcttgaattgaattgaaaataatggagaagcaatgccatatataacgatataatctttttaaaaataaatgcatcatgatgatatattgttccaaaatgacaaattcaggaacattattgactttacaaaggaattacttttctaagttttcattctagaatgtatttaagtaataagccgtctaacaccttctgttttcatattactttctagtaacatgaatactttgttaatgtcaggtaggattctttcctgtattcttcaaagcacttctttcttaaatttttattcatttgttttttgagacagggtcttgctctgttgctcaggctggagtgcagttgtgggaacatggctcactgcagcctctgcctcccaggttcaagcaatcctcttgcctcagcctcccgaatagctaggaccaggggtgtgcaccacaactcttggctaattaaaaaaaaaatgtgtgtagagacagggtttcaccatgttgcccaggctagtctcaaactcctgggctcaggcaatcctcctgcctcggtctcccagagtgctgggattacaggagtgagccatcgcacccgaccccagagcggttctaatacaataccttattaatctgcataagaatttggagagttaaatgggcttttttaaatttctaagcattttttaaagcacatttttttttctggctataaaagtaatgtatgtccattgttggacatac

SEQ ID NO: 79748 - DNA, 1051 bp, Homo sapiens
atcttgatataatttaggttgtgtattttggtattctttaaaaatgtcaagaagtgatgttgtgccctgctcagggtatcttttcagaagttacgtgatgttgtttctcccagtatgggtgacgtgagatttgatcacttggttaaaggggtatatgacagtcttctccattgtaatagttcctttttcctttttgtaattaaaaagtaatctctagggagaaactagaaactcacctgttccccatcatactttcatcccagaggttttagcatctattaataatttttgcctgaatcaaccattactagatactatagaatttgatacagcattttaaaaaaattgttaactgttgtgaaatttacctctccttcaagggtttacagccgtctatgaaagcataggatccctcaggcaagttctcgaggccaagatgaagctggacagggaccagctacagaagcaaatccagctgatgcagaagccagagacccccatgtgaagggagctgggacaaggtcctaaaagacagttttgccagtggggctaggagccggatacctctgtagccaggccatcgctgcattcaggattgttccatccatggcgtgcatgtgccaagaaatgtgtttttatgggtctaaatgtttaccttgagtcttgaaaatactcttttgttaaaagtatgaaatacagtttttaccagtttatttcacttctctaaattcaatggaaatcccccgccctggattttgaaaggcttttatcttcttcattttacgaatggaaagacgacaatttttcttcaatgcttgatgcactaatgaagactgtttactattttgaaaaatgtcatggggatttttttttaattaagaaactaatgaatcatcacaggaatgtgttgctcctcaccctaaattaagagaatgtcccagtagattagacttcaacctttgagtccaatttggattttattatcgttgtctatgcacttcttatattggttatcttcttgtaaatcttctgtcttttgtaaggggaaagg

SEQ ID NO: 79749 - DNA, 1022 bp, Homo sapiens
ctgacggattatcatactttctattttgtctgcaaaacttttacagagtacagtgcattgacatgataaaaccaaggcacaaaaatacagttacgataagtgtatataaaccctagcactttgtgccaattttggaaacagatcataaagtctgaaaaattaccacattctatttgattagtgaacaattaattgtgcagtaaatagactgttaaccaccattccattattaaatatatggctatcactatacaggttgtggataattcaaaaatagttttaaatattaaaacctgtaatatctaggtggtcaacgcagatattgagccttacgttatctaaataagtttccatttaatttgcaatccacatggcagttagcaatttttaaactatttccattacataaatggtggggtttattctaaatgttaaatcctttccccttacaaaagacagaagatttacaagaagataaccaatataagaagtgcatagacaacgataataaaatccaaattggactcaaaggttgaagtctaatctactgggacattctcttaatttagggtgaggagcaacacattcctgtgatgattcattagtttcttaattaaaaaaaaatccccatgacatttttcaaaatagtaaacagtcttcattagtgcatcaagcattgaagaaaaattgtcgtctttccattcgtaaaatgaagaagataaaagcctttcaaaatccagggcgggggatttccattgaatttagagaagtgaaataaactggtaaaaactgtatttcatacttttaacaaaagagtattttcaagactcaaggtaaacatttagacccataaaaacacatttcttggcacatgcacgccatggatggaacaatcctgaatgcagcgatggcctggctacagaggtatccggctcctagccccactggcaaaactgtcttttaggaccttgtcccagctcccttcacatgggggtctctggcttctgcatcagctggatttg

SEQ ID NO: 79750 - DNA, 1064 bp, Homo sapiens
gcattttctatttttaggacaaatcacaaatgaagtgtctaactggctattactgtttacccatataaaatatgctgctaaagtacatattttgctgtcaatggcttgacaattttttttttcaaatttggacatgagaggttatatagggactatattatccaacacatattttcttattttgccacaaatttccacttaacaaataaaaaaaggcgaatgctgttttgcaatcagaaagtgaatttcttttgtggtagcgtacacgtggttcatgtggttctccacgtttaagcacaaaccacagcacaggaagccacaccccctccagcatctctgtcttgtggggtctttgaggagaaggaatcagaacatcgacacctgggaagagggaggcggggaacaccagctggactctggccaaggagtgatgtaagcaggtgacacttggctgtcagctgagcttctcaggtgcttctgacattgccagccccttgagatgagccaccgcaggtgtgctcaccttggctacatgttgaaatcatccagaggagttgggaaatctactgatgccccgctgtgcctcccagaccgattaagtcagaacctctgggaggtgggtcgcaggcatcagtgcgtgcccgaggcctccgcgtgtttgggtgtgcagccgaggtggtgagctgtcgagccacagtgcagttctcttctcaccaaagctcaaatgagaatcagcttccatgttctttcctttaccagaaatttgcaataaaaagaaaaataaaattttcacataaatgtggtgtatgatttttaaattgaaaagtctttcagtgttgagctgaagacttaattaggtaaaatgccataggaaatatttctgtttgctctctgtggaaacgctttgatggttgaaataaagtgctcaagtcctggcagctcctctgacgactggaatgtcattgggagctgctggtctgtgggcttcggggctgtagggccttctctgcagccttcttgtctcttggcagttctcgggtgtgtgctgtgtgcctgtgctgtgt

SEQ ID NO: 79751 - DNA, 1008 bp, Homo sapiens
actggtaatcccagcactttgggaggctgaggtgggtggatcacctgaggtcagagttcgagaccatcctggccaacatggtgaaacaccatctctgctaaaaataaaaaaactagctgggcgtggtggcaggcacctgtagtcccagctacttgggaggctgaggtaggagaatctcttgaacctgggaggtggaggttgcagtgagccaagatcgcaccactgcactccagcgtggcaacagagcaagactccatctcaaaaaaataaaatgaaaacgtataaaaaattataagttgcacaagacaatgaatgttgtagtcttagtgaccgatgcagtaatgcatctgagccaagtcacaggattaaaatttagtgtttctaagaaatccctgcttttgtacatttggagaattaacatacacaataaaatatgtaacttttaacaaatatttccataatttgaatgaactttcataacttagccacatgagggcaatagaaatacaaacgcaagtttttattttttcttcatatttcaggtaagtaatttgcaatgcagactaaaaatacagtctgccaactaaaatatttttgaaatcttcccttagcaaatttgtctggtggttgtttttttaatagctaggattaaagttaaggaaaatcttaagctaagcattaaacttattatgttcttggtagctaagatctcttaaattgctttggagaaaaatgtgaggggaaaaaacgtttcacggtatttctaaatgttttgttttaaagggctctctaaatacgtacagattctgcgataatgtgtggacttttgtactgaatgatgttgaattcagagaggtgacagaacttattaaagtggataaagtgaaaattgtagcctgtgatggtaaaagtaagtgcttgccttatttctgtgaaagctacttgaaaccttgtttttatgagcctttagaagatctgcatccatatgaaaagcctaacgggtaaaat

SEQ ID NO: 79752 - DNA, 1937 bp, Homo sapiens
tgactgtaatcccagcactttgggaggccgaggcaggcggatcacccaaggtcaagagttagagaccagcctgaccaacatggagaaaccctgtctctactaaaaatataaaattagctgggtgtggtggcacacatctgtaatcccagctacttgggaggctgaggcaggagaatcgcttgaatgcgggaggcagaggttgtggtgagctaagattgcgccattgcactccagcctggggaacaagagcgaaactccgtctcacaaaaaaggaaaaaaaaaaaaaacatattaagtatttccatttgttggtatattttatgagattcaataaaatttaataggttttttgtttgttaatataggccctgtgtatttaaaagaaacacctctttgtctatcttctcctttccagccactgtaagggaaaattgacaaagttttgttctggctttgtaacatcactgcatgttttctcttcaagattgtttgtgtcaagatagtacaaaagatgtcttcaagcttggtgcttcatcatcagttatggcaaaggagataaaggaattctagtttagaggctttggttaacctcagttaaattttagatgataatttgtatatttttatttactttgtctttaatgttcttccttaacgggatttatgacctttaccttttctcagtctcaacagatcaccccccaacttgcccttcaagttctacttcagtttgataaggctataaatgcagcactggctcagagggtcaggaacagagtcaatttcagggtaaggatattttcctgaatctagaagcctgtaccaatggttgttaaaacactgatttttttttaggacccctacatatttattaatcataagaggaagaggtggcttagtcaatttttggaacttgttttatagtaactaaattatacttttcaatcaactataaactaagttgatccacttaatgtgagatacagagatgtttttagatttttatttcattgtttcacaaatcagcctttgtatgtttggctaccttccctgaagagttactgagattccaaacacctgaaatattatctgcaggattaaaggtaagtggcggagtaatccccaaggttctgttatggttttcaaagtctggcctttccccgttccagggaagtagagttatttctagaaacttcatgttgcctccctccgactcttaggtaacttggctgataaaaacctgatctctaatggtagataacagtctattctggtagcttggtctcacttcagtcacttatactttgaacagtagtcatccaaagctgaataaaattatctctctcaatttcctgataacttcagattaagtgcccattgaaagagtcatggtgcaacagaaataattttaccacattatggtattgatggagtcatataatatatgatgatgtttgcttattatttatctaactttatgtttatattgtattataaggcataacctgtagaaatatagtcaaaagaaggttaaaatatggttacaaccaaaatttgatcattagttaacatctgcctacttcatttggtacttaaacattcagtaaacaatttgagtgtctgttaacataccaggcatgctctagatacacagagatgaaaagataacataccaggcatgttctagatactcagagatgaacaagatagacaaagccccatttgacttaaattttagtgaaggataaaatctccatgtattttatattaatataaataagtctcatatatcagtttcatgtgccaaaaaattatctggagtaaaatatgccttcaagactgtataatttgaccagtggatccatgaatttttaacagtaatgattctgccaaaattagtttgtgtttttttatatacccatatgcagaagtctgcc

SEQ ID NO: 79753 - DNA, 1344 bp, Homo sapiens
caggaagactatgtttactgttaccgaggtgggtaagactgaggacagagcatatttgcaagagtagcatcagaaacatggtttttgacaaattgaatttgagctacctacttgatatttttatccagtgtcaagcaggcagttttatatatgggtacaaagggagaattgagggctggagatacaaatttgagagtcatcaccagatagtagatggtatttaaagccgtaagtctggatgaggtaactaagagagtaaagtatgtggaaaatagaggacccaagaaaacttagggcagttcaacagttacaagtcagggagctgaggaggaaccagcaaaagaaaataaaaaatacaatggtatccagtgacatgagaactgagaatgctgtctcaaagccaaagaaatgtttcaagaaggcagaaatgatctgttgaatccagtgctagcaaggtgtgaaatgtaaggactgatggctggccattatttttgctgagttttatctgatgattgctcctcaaatgtattttcccccatccatctccagactgaaagggccatgaggtcaagatcttacacctgacgtgtagtggaagctcagtaaatatttattgactgtgtactgctgccacccttttcgagcccccatccctcatctgtttctaaatcacgcactgaagcccagctgtctgacctttcctgcctaaaattcttcagtgactccccactgcttgcacctatcctgccaaacaactccatctatgctgtctctttcagcttcatctcctgccactccctattcgtacttatgccctgataatgtagaacagtttatgtttttccccacaaacatttcatccttccatggctttacttattctattctgtcagcctctggaatgacttccctcctctgcttggctaaagtctagcttaaagaacctggaagcttttctgagccagctcacttctacaggcagcctccatggtatgctttgtatctttatcccagttcttatctttttgtatgtttgttacattctctagagtataaatttttaggattgggagcatgcctttaatcatcatcttctctctggaacctgtcacagtgccattctcttggtaggcactctgtaaatactgaatttagagagaacaggaaaataaaggggcagacatgcaaacatgagctgaagattttaccagtgacttgacagcaggtagaaaggacagtacatggaaaattctagactaagtcagaaggcagacatttgaaggaaatggtaaagacattttaataaatataacagctatactgcataaaggagtataaatgccc

SEQ ID NO: 79754 - DNA, 2618 bp, Homo sapiens
aattttttgtatttagtagagacaggatttcaccatattatgctggtcgcgaactcctgacctccggtgatcgacccgcctcagcctcccaaagtgctgggattaaggcgtgcgccaccgcgcccggcccctgctataatcttttcagaattcgtctgcaaggtcttcaacactgttaccctgaacacacttccggcatgaaatatgaatgccctacatttcttaaattgtgcatctaacaatggagaagattagtctctaaaaattataattcccttaggaacgatttagtaaacctggtgaattactcgagcagagcgcctgtccaccactttaaggcttcaagctccagcccgacgcccctccttccctctccacgcccttccctgacaaggcttgagtggcgggcgagagcagggctgggcggggcctcccgtccctcgggcggggtgtcacttccaggttccgcgagcacttccgggtcgtcagctcagttctgcggtttctgcggcggctggagaggtggtcggagaagtaggaacctcctgccgggctcgtggcggcttctgtccgctccgcggagggaagcgccttccccacaggtagtgggttagggagggcagggttagggagggaagcagggccgcgctccctgccgcccccccggagtcggagtgcgttggtggggtagtctctgagggcccttcgctcctgggatctgcccgttaccgaccgttgccggcaaggccccgcggccggcaccggagaagggcggcgaggcggcggtgatggtcgcgtcccgtggcgggaggctcgtcgttcacggggcgcccacagaacccacctaggggaggtcttcagcccaccaccgtattttcagccaggtgaatgtcttaaagcatccactagcgccctgtgagttttgccgaatttcggagagcattttttaaatgtctcattcctgtgctttgtagcttgttgtttgaagtctgccttccaactttcttcgtgcgaactccgacaaaaggaacgaattttaaacttggtggtttaatcaaaaaatgctaggacgagttacttccgaatttgacttctaattttctgaactgcaaaacaagaagggaacaataaatttctgtggctgataccacatctaaaagattagaacacttaacaaggaatttttaaagaatgtaagaacattgaaatcagcacttttaacaaacgtttaacgcagggctattttctagataaactcaaaaatttgtcaaatgggacacgatgcacgattctgtattcctactctgtggagtttttatctacctattgggacttcttgccctttttaaccccctctcccctcccacacgcatattatacttactgatatttgccttcgtttactgaacagatttttttttggctcctattgtgtgccaggtactgttctagacgcctattttacttaagtgaacaaaataaaaagctttgccctcatggagcttacattctattagaggatgcagaaaataaaatatataatggtgttagaaagtgatggtgccatcaaaaaaaaaaagagaaatataaaggagtacgggaaagttccagagtggaggtgggaactggtattttaaagatgacggtggtcagtttgagcctcatttagtaggtgttatttgagcaaagacttgaaggaattaagaaaatttgctaagtaaatatcaggaagagcattcaggcagataggaaagccaatacaaatgcttttaggcctgtcatgtttgaggaatagcaaggaagccagtgtatctggagagggatgagcaagagttttgggggtggagggacaagaagataaagtcaaagagatcatggtagccggatcattgtaaaggctgatagaagccatgggagattttgaatagaggagaggtatgttgtaactgaagttttagaagatcaccctggctgtgagttgtgattagagtgtaggggtgagtgtagaagcagggaaatcatttaggagatttttgcagtaatccagatgacgagagtggcccaggtcagggtgataaccgtagggatggtgagaagtggttggattctgaatgcattttgaaggtaggccttacagtatttgctaggaattggatatggagagtgagatagagggagtggaggatgaaatcaaaggttttgcccaagctcgtagaagtatggagttctttaagccacgatgcaaaagataacaaatagagatgttgagtaggcagctagattcaggagtgagaagttctatgctatatgaatttggggatcatcagcagtggtacttaaaccatgagaataaatgttatccgtaaggaatgggtgtagacggaaagcagcagaggcctaaggactgtgtcctgtgatattaagagtttagcgaaaacgggatcaaccagcaaacagtattaagaaggatgaacttgtgagttaggacaatccgaaaagggcagtgtcccagaagccaaggtaagatcctgtacgaaagaggagggagtaatcagctgtgtccaatattctgagtgaggctagagaattagctttagcattgccattgatgaccttca

SEQ ID NO: 79755 - DNA, 2988 bp, Homo sapiens
attttagttaacagaatcatttttgagggagttgtttttcctgccattttcgtaccacctggatccctaccacagccaagttacaggtcaagattttaatatgccatgtaatttgaacttttaagaaagtttatggctgggcacggtggctcacgcctgtaatcccagcactttgggaggctgaggcaggcagatcacgaggtcaggagatcgagaccatcctggctaacatggtgaaaccccacctctactaaaaatacgaaaaattagccgggcatggtggcgggcgcctgtagtcccagcaactcgggaggctgaggcaggacaatggtgtgaacccaggaggcggagattgcagcgagctgagattgtgccactgcactccagcctgggtgacagagcaagactccgtctcaaaaataagaaaaaaaaaaagtttatatgcatttgtatgtaaagtattttataatctttaaagaaacaacggtcacatttcttgccagtgtcctcctgcctttaaaaattctcttttctggttggggaaatgatgtttggtaactgtttttactatgtctgcttctttgcaaagctttgtctttaacagagtaatattctatgctaaaatagtcattatttttagaaagaaaattgttcagttgctggtttcttattttatatattcttcattaaacagagttgatcaagaacttaatggaaaacaagatgaaccgaaaaatgaacagtaagtttggcatctagtccaaacaagactgaagaatgtgctgatggagcagtgctgtttctgcattcataatgcatttattggcccatatttttatgtaacctgttacaaaatagacttgactttttcataatggacttttgtattatacaagggactgttcactgctgtactggtttgcaaatttcttgaatttagctctttaatagctaactgtattattatcgttttatattttatattgctaaatagagaaccacactttatataaagtagtttttgcatttgtttattgaatgatgcatcttcttcggtgaaatatttatatgcataaatggcaaaggaaagaaataatatatatttttatgtcattgagcaatattttttaatgtgtacctgtcttatggaagaaatatgcaggtatataagaccacgattttctaaagtgcatattagaatttttgtttttgtaaatggttaaatacatttcctgggtaacttaggaaattaagtttttcataaggcaacagatggttaaactgattgtcatgaatacccaaagatcatgtatataatcgaagtgtattagtaccatcccaaggtttttttctcatttaacatatttgtttcataattcagcaagtacagatgcaagcgcattgcacactttttcctttctaaacttaaagacaagtcaaaaagccattcttagaactagaggatttaagagggtaggaattagggtttgtatatatgtatatatgggacattttatcttctggcccaaagtcagaactttataaaaatcttgagtttgttcactaatgtgaaataagctatgtgtccagggtattgctcccctgagtgtatatgagtgctgagtagtattgcagagaatgtgatgagttattcactgtcacaactttttctatagaaaacaggggctgctttttaaactctcactatgggcactttaccaaaatacttccatatcaattatttgaactcggtagttgtttgacctagttagatgtggtgtttattcaagtttgtatgaaatcatgtttgacaatactgtaaattaggttaattttgtaagtcttagcatcatcatattgtgctgttttggataacacgtttgttacaagcatttaaactgtttcatttggtagtacctttacattgaaataaattgtgtttgtgcctccaaacaaaaagtttaattaccgacaaaattatttctaaaacaacagattgatctgatattgtgtcatatacttgaaaggctcatacacagctggtaagcataataccttccaaatttgaaggtcatggctactcttcaacccttcctgtaaggtattttacaaaacagtggcctagagtagcaaaattgaagtggatgtgagctaacctttcaagatttagtctatcctagattgaacacacatgtggctgtgaccattctcatgtacttacaaaccttctgttacaaaagggaactttcctatattttttgtcctcctcagtcctaaacttggcatgctaacttaaaaccagttataggagagagatgctggaggattcccaggatgaaacattcctcagcagcctcctgacttaactcagatccagcagctcttggcagatcctgaactaatgtcattacagtgaattgagccaaaacgattattgcttgctcacattttaggaacacttgttgttgaagaagcaaactaacaataacaagttaggcattccttctgaatttaccatataaggattatgtataaacaattatattgaatttgtcattagattctatatttgtagacgatttaacgtagtctttcatctgtacatctttatcttgctcaaaatgggctgaggtttttaataggtggttttctaccacattaagtacttggttcttcagtttaaaaaatatgaagaataacttcaactcttttttgcattattttgatttttgattttgcagtcattgctcctaactgtagatacatgttgcaaaagtgatgtttttctgaattttttttaaaagtagaagactattctgttaaacattaaaattcagagacaacagtgataacacctgggatataatgaaaatgaggtgctgtgaatcagtaaactaaagggatacctgctttaacctgcaccttaatggaatctggtatagagatgtacccacaataaatgttttataagatttaagatcataatag

SEQ ID NO: 79756 - DNA, 1424 bp, Homo sapiens
aaaatgacatgatttttgtatcttgtaaacattgtatccattgtatttgtcagaaatatggaagtaattatttttattttcttccatagctcgaaattcagccaaaaaattagatacgtgtttaatttggcagaactagcagaacttgtccccatggaatacgttggcataccagaatgcataaaacagtatgttttgttttatttccttaattgtattggatcttaacattttgatgtgcaatggataatacttttcaatactcattctttatgtattatattttataactgtgcgcgcgcgcgcgtgtgtgtgtgtgtgtaacaaagaaaaagaggaagaagccattttcccacaccatccccctaagttagcattttcttcaggctgtcagttgaagaactaggataaattatttccggttgtgattcatgttatacttttatagactacttataatctaagagatgatttctctaattgatcagtactaaagagcattctccaaacttgaacatagtgctcaacaaatttgagtaaactgatcatcaatattattattgaataatcatattgctaaataaataaaaatatttaaatcatcataaccttaatgttttccagtgactgaaattctgttctgattatcagattcacattcttccatgtaacttcttggacttggtagaaggctgttaacataaataactgagtattacaatgcatgtggaaaagtttctttgttctgctcacctgaggttttagtctatttaatgtatgaaagtcagatttattaagtaaatttttactttctacatcatgtagtaaatatttttggttttgctggaaaatttaaatgagtttatttttagtagcttttttcaagtttttattcattttcataacatgtatatttactgaaataactcttccctacaaaggtatgaagaagaaaagtttaaaaagaaacaaaaaaggtatatgcacaccttgactgggttgcatctagactagtccatttgcattgcagactaactcttccttattggttggttagcttgtagacaaagataatagcatttgcaaatataaatgtaccccaacttccaaatacagggtgaacccagagttcctaaggctgaatatgacttggattcaccatgttttattgccatatatgatgccaattagcaattaaaaaccacagacccttctctctccttcttagtctaagtactaatggtgaaaccagagaaattactaaaaatggtatttggaacaccaaataattttaagactttatctgtttcaccattttctttaaatcgctaacttgtgcttttgaaatatttttgcagactttttaaaagttctcaatttatttccctggggttgattattatatttgcaatgcatatatactt

SEQ ID NO: 79757 - DNA, 1110 bp, Homo sapiens
ggccaatataattgagccaaatcagttctttttccacaaggtcattctatttctcaggttagtgcagtttttaaaaaccgtattgtggaaagtttcagacatacacaggggtaaagagaagtatatcaaatcttcatgtatcagtcacttcaacaattaccaatttatactttgttcccacttctaacccccagtttacaagtttgaagcaaatcccaggagcaaatcatttcacctagaaacatttcaaaatatatctctaaaaaataagataatcgtaatactagctaatgcggtttgagcattttcattgttgctctcattgtaggagagaggaaggaattgtataatggtacaatttagagaacctagttcagttatgcacagtgatttttaaggcttaaacttaatttgttttttacagatatgttattggcactttggagctattagtagcagaaaactacatgatagtttatttaaatggtgcaacaactcgaagaaaaatgcccagtctgggatggctcaggaaatgttatcagcaaattgatagaaggtaatacaaatacaagttgaaagctagtctgaaaaaattttataatggctttaggaaatcaaactttgtttttcgttgctattttttttttttaactttttttttttttgagacggagtttcactcttgttgcccaggctggagtgcaatggcacaatctcggttcaccgcaacctccacctcccaggttcaagcgattctcctgcctcagcctcccaagtagctgggattacaggcatgcgccaccacgcccagctaatgttgtattttttgtagagacggggtttctccatgttggtcaggctggtctcgaactcctgaccttaggtgatccacccgcctcggcctcctgaagtgctgggattacaggcgtgagccaccgcgcccagccttctgttgctattttaaaacaccatttattttttaaattttatttatttatttcatggcaggtttctgttttctaaagatagcattttagaatattgtgagggaaatcaattttgatttttctataaagaataaccttaattcttcaaacttacaaagtagct

SEQ ID NO: 79758 - DNA, 1148 bp, Homo sapiens
gtattacagttaatttatgtgctcaacaacaacaaaattggctcccagatagctacttgaagtaacctatagtcataactgccagggagaatattgtcacaagttgaatctggaaaggcattgtaaggccagtgtactaagattttgatgactctacaaattatattttctgaacttgtggatacacgtttcactatgattaggtggtttttgctaaattgggcaataaaagttaaagaaccatgatttccaaagacataaaacagcctcatgttaagaataagccttttcctcctttatggaagagagattgaaaattgtgcagatggtataatgaaaattctctgtaaaatctaggtagtaaagtggttaacgtataatttgatttttgttgtgtaacaatttgtgattcaaaaactttgtattttgacagatgatcttccaaaacccaagactactgaagtaattaggaaaggctcaattactgaatacacagcagcagaggaaaaagaagatggacgacgctggcgtatgttcaggattggagaacaggaccacagggttgatatgaaggcaattgaaccctataaaaaagttatcagccatgggggtaagagttactgaggatttttcagattgtttaatgcaatatcagaattcttttttttttggaaggatatctgtttattaagagtaaataagccctgtacagaacacaggcgctaggttgagagactcgtcttttgtaggacatttcttcctgctaaccagttcctggagggcttgttttttttgtaactttacacaaggggcactaatggaaaatatagctttctcaagacatctgatgtcagtttcccattgttttgcttcacaaacatcaacaaagtaaacctgaacatgcttagcaatttcccaatgttctttgctgacattacttttgacatactgtgtcaaaattcttaaggtctcccctcctttggtaaagtaggcaaaaccttacaaggaaaacactataatacgtggaaatatactgagttagatttccagtcacctgctctatggctctgagatgcactatatccataatggttcctaggactgtgtccacctgatggtttggagtacggaaaaccaacccttatggc

SEQ ID NO: 79759 - DNA, 1062 bp, Homo sapiens
atgaagttgcatttagaaaattcaagctgattactgaagatgttcagggtaaaaactgcctgactaacttccatggcatggatcttacccgtgacaaaatgtgttccatggtcaaaaaatggcagacaatgattgaagctcacgttgatgtcaagactaccgatggttacttgcttcgtctgttctgtgttggttttactaaaaaacgcaaaaatcagatacggaagacctcttatgctcagcaccaacaggtccgccaaatccggaagaagatgatggaaatcatgatccgagaggtgcagacaaatgacttgaaagaagtggtcaataaattgattccagacagcattggaaaagacatagaaaaggcttgccaatctatttatcctctccatgatgtcttcgttagaaaagtaaaaatgctgaagaagcccaagtttgaattgggaaagctcatggagcttcatggtgaaggcagtagttctggaaaagccactggggacgagacaggtgctaaagttgaacgagctgatggatatgaaccaccagtccaagaatctgtttaaagttcagacttcaaatagtggcaaataaaacgtgctatttgtaaaaaaaaaaaaaaaaaaaaatcccagcatttcggcataagaattctgcctgtttagttttgtctaatttataaaacagaagcgaataaaagtttgtaaataaataattagttaattaaattataacttgtccatgcactagaacacaatgcagcctttaaaatattacagaaaattatataatttcattaaaaatttcacaaattttataatgaaaaaacaggctttaaaataatataattttatttaaaaaattaataatgcctttactttaggtggttgaatagaatttctttgtactgtacttatttttattttttaaatattattttttaaagcaatgaataatcattactgagattctgaaaataatttagtactatatatgaatataaaaatatgaaaatattttaatatttaacattttaattagttgatcttgcagcaacctggc

SEQ ID NO: 79760 - DNA, 1264 bp, Homo sapiens
tgtttaaagtcaaaggaccagttagactcttagtaattgttcctcacctcaccagcttatttccacttgaccttaataatgcaggaaataggagagtgagctaggaaagtaccctgttttctgtggaaagacgaggacgagagaggaaagttagggtgtttgtaggaccttgctgcagtaagaacagccctggtcactaacctatgtcaatcctcagcaccttgcactccctccaccccacagtcctaaggagccttgagtgtcttccccagcacctcctccgaccacactcctggaggcttccctggcaatggtttgggtgtggccttccaggcctttgtatcagggcaggtctcctgcagagtcttctctttgtcatgggagaagcttcattgtgcgttgaggctacttctgtgttattgaggagtctgggcttttttctgataccacgtttcttttctttcctgggccattgtagcaagacactaagggcgactaccagaaagcgctgctgtacctgtgtggtggagatgactgaagcccgacacggcctgagcgtccagaaatggtgctcaccatgcttccagctaacaggtctagaaaaccagcttgcgaataacagtccccgtggccatccctgtgagggtgacgttagcattacccccaacctcattttagttgcctaagcattgcctggccttcctgtctagtctctcctgtaagccaaagaaatgaacattccaaggagttggaagtgaagtctatgatgtgaaacactttgcctcctgtgtactgtgtcataaacagatgaataaactgaatttgtactttagaaacacgtactttgtggccctgctttcaactgaattgtttgaaaattaaacgtgcttggggttcagctggtgaggctgtccctgtaggaagaaagctctgggactgagctgtacagtatggttgcccctatccaagtgtcgctatttaagttaaatttaaatgaaataaaataaaataaaatcagttcctgagtcacacaatccacatttcgaatgctcagctttcacatgtggtcagcagctagtatatctggacagcgcaggcagggaacatttcgatagaaagttctgttgggcagcagtacatgcccagggcatgagaggacctatgggggagaaaaagggtcccagagggaccccttatctgcttatctttctacaggttaattaggtgaaaataagcatcaggggcagccacaaactggagagag

SEQ ID NO: 79761 - DNA, 1050 bp, Homo sapiens
ttcttgtatttcctttcgctccctccctattactccttcctttttcttgtccttcagtttaattatttcaaacacatcacacataaggcctgtcattcccttgatttctaatttatcttttcaacctctaataaatttaacacagagaatagtttccccattcactttgctccccatctactcagatctatcaacttctctgatggttatttgaaagtttagtacttaaaaatgtgtcagattaaaacttgtttagaaacagccagctagctggagatgaaaaatatataagagcttatttgcaaggtggttaatacatgtataaatactacagagttgactgtatataggtatgttgtagatacattaagctattctgttctctgcttcatctcttagattggtggaacgagaatgcctacacgcagccacaggaatccagtttccatggaaaccaaaagcagttgcttgcctgctcagcaagttgaaactgaaggagtggctccacataaaagaaaaataacttgaggactgtaccatggaaaactaaatttaaaaaaacagttataacagtgtttaatttagataagtttgagggaaaataatcagtaggcaagaggaacatttttcctgtagtagctagagtgccttgaaaaaatgtgttggctatgtgaaggaatatttcaactaaaatggaatggtatgcttttcacccttgaagtttgaggaggatcttgatatgttttaacattatcatggcagggaaatatataaagaagaaaaatatttttacattaaaccttttctaaaaattgtaaatagaaaaataatttggttttttatcaagaacaacacttatcgttatgtattgtgttagttatattgccagtctgttgcgactgactcaaaaagttaaatgttgccactgctgaagatgattatgagcatcgcaaactttgtttctgacccattttgacagtttttatatactcctttaaaatgatgaatgttacaggttaataaagttaatacctttaaaaacttggtgaa

SEQ ID NO: 79762 - DNA, 1051 bp, Homo sapiens
gcatctccctttgagtctcttctgccttcttcttctgtatttaagggctcttgtgattagtaaaatttgatcattttaaaatcagttgattagcaaccttaattccatctgctaccttaattccctttggccatgtaacatattcataggttccaggtttggaacataaacatttctaggaggccactattctgtctaccatagcttatattcatctatgtacattagacatgtacagcacttgtaagatactcctccttagagtatctctcattctccatgaattaaatattaatatattcttctgtaaatgaaagctttctccatttttagtggaagtagttaagatatatgattttcattgattaaaactcaatctttgaaatgttatttattcctactatcataataattcatttctttatatggaaatatgaaaatgattgggaaaaaaaatttccagaggataagagcaattgtcaacacctattttcagtttaaaaattgatgaaaatgtaaccgattaggtttataggcaaatctgtatagctaaagtatgataaatctttattttttcataatatattgtaaagaaccgatgttctccttaacatctttgatccagaggactgtgtaatcctaagaaagcacaatatatttattcatatccctttagttctttaagatgatacattgaattatttaaaactttataaggagaaaggaaaaatgtggatttgatgttcaacatagtttgttattgctacagtagaggatcgtgattaagggtatggcctgtggagttcaaatgcctgggtttatatctaagcctacactcacaactttgggcaaattgcttagcatctctaatttgtttatttatcaccctaaattaatatgccttgaaggtttattgtggaagatctaatagaaaataaatttgaagccataatacagtagttagctcataataaacatttaatacctgctagctgctattgtttctgttatcctcatagcacctcatgttgtactgtgattgttccattga

SEQ ID NO: 79763 - DNA, 1013 bp, Homo sapiens
attattctctgtgaatcctatcctcttgtgagcctttcatttcattgtactgggatagtatttttggcttctgtgacaagtgtttggtgaaaagcatatattgtatggttgtgggattttggtttgttcggggttttttggtggggtgtaggtatggggggataacatctgagtttttgagtttttaaaaatgttataatactcttttaatttaaggaagatgttcaagaaaatcacttgaagtgcttttaaaagtggagattgctggccccaccctggagtgtctgattcactaggtctgtattgggacctaagactttctcaggtcgtactgatgctgctagtttagggaccacactttgagaatcaattctatagcttatagtctcttttttcagtagaatcaacacacttgtgatttgtttgtttgctctgctttgctataaacatgttccccactttccctagttgcagtactctttttatcttttccccataaaaacttgaagatttactcctttaagacagtttcccacatagtctcattgcaacttccgtattcaccctccaaccctataatatttatcaattctatatagttgatatataggcagtcctcacttagcacacagtttcaataagcacaagttttagttatgaccgtgtattaacagtgagtaattgtataaagtataagcttcactgctggctcttcagtccacagatcactacataagtaacaggcaaatcatgatcagtgaccagtcatgtcacttctttcaaagtctgtttataattgtttattgtgtacccattgagttcatgcacagaaagcagagtgtgcagttgtgttgactctttgtctcccggtgataaacccatgtgatattttaccaaagtagataatcaaaagaattgaccaaaaaatattaaagcaaagcaaagaaacaaaaggtgatactgccagaagtgaaatttgaatggaacataaatggaattacagaggaaatagc

SEQ ID NO: 79764 - DNA, 1044 bp, Homo sapiens
tgaaacttttggagtaaccaccaccaaagtatcaaaatcaccaagtccagcaagtacttccacagtacctaacatgacagatgctcctacagcccccaaagcaggaactacaactgtggcaccaagtgcaccagacatttctgctaattctagaagtttatctcagattctgatggaacaattgcaaaaggagaaacagctggtcactggtatggatggtggccctgaggaatgcaaaaataaagatgatcagggatttgaatcatgtgaaaaggtatcaaattctgacaagcctttgatacaagatagtgacttgaaaacatctgatgccttacagttagaaaattctcaggaaattgaaacttctaataaaaatgatatgactatagatatattacatgctgatggtgaaagacctaatgttctagaaaacctagacaactcaaaggaaaagactgttggatcagaagcagcaaaaactgaagatacagttctctgcagcagtgatacagatgaggagtgtttaatcattgatacagaatgtaaaaataatagtgatggaaagacagctgttgtgggttctaacttaagttccagaccagctagtccaaattcttcctcaggacaggcttctgtaggaaaccagactaatactgcttgtagtcctgaagagtcatgtgttttaaaaaaacctatcaaacgagtatataaaaaatttgatccagttggagagattttaaaaatgcaggatgagctcttaaagccaatttccagaaaagtaccagaattgcccttaatgaatttagaaaattctaaacagccttctgtttctgagcaattgtctggtccttcagactcctctagttggccgaaatctggatggccttctgcatttcagaagccaaaaggacgtaagtaaatatttacaaagagcttacagtgttttacttgttctttttccttaggtttttctccctcgttcctttactttgtcataacctgttttgtaattgtcatatagtcactgatatttcattttttcga

SEQ ID NO: 79765 - DNA, 1047 bp, Homo sapiens
aagagaagttggactgcatgttctcactcataaataggagttgaacaatgagaacacatggacccagagagtgaaacaacacacaccggggcctgtcagggggtggggggcaaggtgagagagagcattaggacaaatacctaattcgtgcagggcttaaaacctagatgacaggttgatacgtgcagcaaaccaccatggcacatgtatagctatgtaacaaacctgcccattctccacatgtatccccgaacttaaagtaaaatttaaaaaaaagaaaaaagaggttggaaccatttcatttcagctgtctaaatataggtggtcagttgtcagatatcaaagtactgatttaaggaggatgtaagtttgacacattcagtgaaacttttttatgtgtaaagctactttaggctcagcactactaaatgaattaattaggtctatagcacctgtagtcatgtttaagggtgagagttagagacaaaatgatggcatagggtggccaagaaatacatgaaatggtcaggttgttctgtctttcactgaaatgaaaggaacgtagtactttagtagacaacctcaaatgggtgagtttttatgacttatttacttgttcgttactggaatttggaataacagtaagtctatacatataagcaatagggtagtctttcttttgacaataaaattaatatttgcatattcctgtatataagaaattatgtccatactgttttgatatttaattttttaaacatctttcagagttaatatatgtcacagcataaatacaataaatgaaagactatgtctattgaaacaaaactacaaattagagttaaatgtaatatattctatgtggtaaatatttcatcactttttgcaagttcctataagaaactgagtaataatgacagtaagaatataatagtaaaaaccagaaaatcctttttaaacattgctagaaagacatttttctcctgccagttggattttcttgcccttagatttctaaaggactttaatatctgctagtctaagggt

SEQ ID NO: 79766 - DNA, 1813 bp, Homo sapiens
accttcacacattccataaacacatatggtaacaggttctgaagctactcactactttctcttctggtacatttcattaacgatacgccaggatttttctttggcatccatgaaaagcataaagtcatttccatgaactcagccatgtaccagagtgatagaggattgtacaacttttccaaaaccaatactgctttcaaaaaatatggtgcataatgttagaattttcttaatttttgagataagcagaggaaatcagaacatttagaatctcagtgaattttgttaatctcaaatttgtgattcctttacattctgttcttagtagcttttattcaccatattaactgataaatcttagtgatgaatttaagtattaaaaactcaaatttaataaaatgtaaacataaagtacctgcatgtgtaattggcaagaacgattttcccctctttattaatgggaaaaaaacttctaaattgaataagtatacctcttcctctccatcaggtaattgaaggtaagtttgcattgtgatcatatgccacagaatacttaatctactttaaatggctaaacatcaaaatgcaggtggcagagttagataataatccagagtttactctgttaatcacgctatattctccctggtgattgagaatcatgaagttccatgatagtaatcttcatgtgaaaagcacatatttgtaaattatattttgttttccagacgtataggagaaaatttgaatgcctcagcaagttctgtagaaaatgagccggcagttagttcagcaactcaagcaaaggaaaaagttaaaaccacaattggaatggttcttcttccaaaaccaagagttccttatcctcgtttctctcgtttctcacagagagagcagaggagttatgtggacttgttggttaaatacgcaaagattcctgcaaattccaaagctgttggaataaataaaaatgactacttgcagtacttggtatgtattgtgttcttcagtttcaggaaaaaataataaaaattaggaaatatttttatcttaaatttacatttatgtttttaggtcccgtcattttttttaaaatggaaaacgtaaggagattgagagagcaatggtgctttaattcttttgttggttccattgtagttcaagcattttgctctacttctgagcatgactcactccagttcatcttaagtactagcagtagaattttacatagattataccaattttaaattattgcttaattatttcaattaagacatttccaaattctcaattatataaatgatgctatgctgaacatctttgtagcaaaatctttgttcatatcaatgatagtttccataagataaattcttaaaactgccagatcaaaacctatgcatgttttcaaagctttgatctgcagttacacatgcataaattgttctgcaaaaagtttaaaccagtttgtttgtacctctgttgtatgacaggttttgaaaaaactatcttctctaatcctacaggggtaaggtaaaagaaaatcgaaatcaaatttaaaaaaagaaaaaactatcttcactaatattggacattaccttttttgcctttaatttaaaatgggaaaaatgatctcttgctttacattaatttaatttatgattactaatgacagtaagcattttccatatgtgtataagccatttttattttttctttggtaacttgcctatttatattatttgctcgtttttctattcggatgtatgtctttttaaaaaaaattgaggccaggcccagtggctcatgcctg

SEQ ID NO: 79767 - DNA, 2094 bp, Homo sapiens
caggtattaatcttcatcttgccactgcttctcattttatttttaattttagagttggtgtcttgccatgttgcccaggctagactcaaattcctgggctcaggtgatcctcctacctcagccacctgaatagacgggattataggtgcacgccagtgtgccaagtttatttttacggttcttttcaagtccacttctgttcagcatatcccaggtgtgggttatagcctggctttgtacaaggaaaaaggcattttgctggaagttgggcatacctaactcctaaaatatttttttcttagaatatccttgttttctttagatttctatagagcacaaaataatctattagtataatttactttgtactatagaaaaaatacacaagttattgatatgatgtttctagtcttttttcctaactttgttttattaagaattattacaatcattgttacagtaattactgtaataattcttaattgctgtaataattattacagttatttcaggctttattgtttacaactgttttcttgttgaaaaacaaggccttttattctgttaatttcaagataaaaaaaattttccttttactctctgtgctccataagtgtttgtaaaatgaaagaacaactcgaatagtgtttttacaaatgaataatataaaaagttaatattgtgttacttttctttgaagcatgaaaaaaaattatagaatatttggaaagtcccccaagaaaataaaagaggatattaaaatgacccatgagccgttcatgtagaaatagccactgtaaacgattaccttttttttttaattaaagtttctgtttgcagatactcgtaactgagttttaagcaaacaagcggggaaatagctttaaatggaaatatatatatataaagctctaacacgtttaacttaggaaaataaatcaaactcagaagatactagtagacttgaaatggagactagaagcaccatttccaaatgctacttttaaataagctaccaaaccagtacttaaagtataggaaacttaaagttttggattctaccctgtttgttttttgttttttgtttttccatagaaactttgagaaaggagaatgggtagttgacaaaatgcaggggcaaaacttcaaaccatcaaccaaaataaaatataatgctgtatacgtgaatagagaaaccctgtcagatgcttttggtttacaccctgatgaagttcttgacagcactgcacaaggaaatgatcttgatgtgctaccatttcattctttgctgaatgtagccaatttaaactgctagaatttcttgacattcctagtctggcgtatctgagtcagcatcttgttgctgcagcagcttaattaaatttgccagtttgtggcacaaggacggacatgttctcatattcagagtgacagctgtgaagcagtactgttaagagtgaagacacaatactgttaggtttgaagagctctcaagacgttttctagtgagaagtcaatttgctgtaatacatttctcccaagatcagcagttaatgttcattttgtttacctaaaatatgcttatttttatacaattatttgagaaactttagtagctgtgtcttttttttacctgtgttattttcagagccaacctaagcatcctaattttaatttccaaaattcttctctcatccccttatcagctctttgagtagttttttatccattgtttagctctgagagagtggtcttaaatatttttgctttatttggggacctacatatttctaaaatagtgttgtcatcttttggaatttttgccgtatttattctagtattataaagttaatttaaaactaatcagtagtagttttggatggaatgtaactcaccctttgtccagatgcagatctaaattagtagttctcagccgtatcagactgataccctcccactttttatgacgggtatttataagaaataagatacctcctttactagcttaaaatgaaattaatagatataatttttaaaaacaataaatatatcctatacctataagtgtgaaataatttattttttaatatttaa

SEQ ID NO: 79768 - DNA, 1050 bp, Homo sapiens
ttttttttaaagcacgatttagcatcctaagcttcctgagggtagagattgtatctttttgcgtctgcacaatggctagcacatgtcagcatttgacaattgttaaatgataacaagtgtgccccaattaaaacgtttttcctgggttgttttgttaaatttacaaagtaagccaagccttacggttaacattctcctctacaaccaagtattaaagccacatttaaaaagaccacatgaaatgctgattctaattgtgtgtaggtcttgaggattaagcacacaaatttcacaaacttctgtttgagtaaacaaactcagccttctgtaaatatacatgcaagtttggaaacagtaatactgtacctataaatatatgctgtctgttttgtgtacagtatgtaaaaactccttttctgccacactaaaaatgcaagccatttatgggaatcctaaaactagtattgaactaaaactttgctaatgatctttattagaggatcgtccaacttttcacttaccttgggttttcttttcaattcactcttacactagtctgcttatttccagctgtttattttattgagtcctgaatttaaaaaaaaaatattttgattcattttgtaaatacaagctgtacaaaaaagagagatttaatgttgtcttttaaatactccaattttcattctaatatgaatgttgttatattgtacttagaaactgtacctttaatattacattacctttattaaaagtgcattgaacacatcaattttagatgtgctttatgtactgttatcctataataaaacttcagcttctaatggaacacttgccttgtttttcttcttttttcttggttattgaattggactgtacatagtttcctagcttacatcctgtctctagtgaagggtctaggagagagtaggtaagtgtggtccagactagcagcacggcatctcctgcgactttgttggaactggataatcccagcactacccagacctactaaatcaatctgcctttttataggatcccaggtgatcc

SEQ ID NO: 79769 - DNA, 1247 bp, Homo sapiens
gagtctatgatacaggtcttcattctatccctaaacataatgttagtaaagaggttccatcagattgtattatagagaccttcctattgctatttatttttaagagatgagaagactgactagcaatgtctccacagtgcaattggtttcacttctgggtctgtctgtctgtttgtgtaggtgagatcagtgttgtcaggctctcagaataatttttaaaagaatccagaagcctgacttcacaccaagtagccatcctagatgggcgggggggatctccatgttcaaccaaaccctcagaacttagagcaataaatacattcagtcatttatttataaatgaatgacagaatattcaatccaaatagaaacaaccttttgtcagtgatgcaacataacatggagtcttatattgagaaagtgaatatgaatattttaaatagatgcctaggaaatctgtgtttgctgtttacatttaatgtactttgccacattagcagtaccacacttcttttactttcatccttctaagaactaatgaaagatagcttgctattagctttgacatgttgcacatgccattatgttgttctctaagaacaactaaattctctccagtgttcatgtgtgattcctttttcatcattattactttaatgtggatgaatactatttctaggaacttgattatcactgaacagattgcatatgtaaatgcagataattcttgagcaatatagtgaaaatgatttcacaaaaaaaatccatatgtactgtatacatcttcctgaatccaaaattctcctgttatccacacagtttgaaatctcatattaaacagtggtaaatttttaaacattaggacattagctggctgcttctataaatgtacctgtattgtctgcctgctccttttgtggagatgtgtttttgtattggatgtttgggccaatgggaggcttcaagctacaacatattttcccactttaaataatatttaacatatgacaaaccccagacaaggcttttaatatgtataaagaactgcagtgttaggtggtttatttgcaaactgttttcagtgttgtccatttttatggcacctttaacaatattcttgtttccaaagtacaaaaaaaataggttaaataatctagccataactgaatgtcaagcaataaaacaaatgacttttgtgcatagacttaaaaaatacaaattttagacatctgcatgtaaatgcaatc

SEQ ID NO: 79770 - DNA, 1309 bp, Homo sapiens
acccttctataaatatttgatggcacttgaaatattcctgcaataaaatgtgatttgtgtaaagaaaaaaagattttgtaatgtgaaacaaagaaagaaagtaatgtaattttctaaaaaaaaaaatacaaacaaacaaactttgtattattttcttgatggaatttgtctatctgtctttggaaaactttttatttcattgaatgtgccatagtagaaatgtgtgtttttagttttagactaaggaatagctagttgttgtgttccgacattccaaaatgcaaaacaacctagtagtatctttcatgaaaaggtttaagtagtatgtaagcttctctcattgttgcttttttgcacatgttcttcattcctctctagtgcaatatgtacatagagcacttgcgggtgtaccttgatccctcagggaaaaatacatatttgtacagttttttggggtttttttgttttttggttttttttgttttgccttttgtttttggctaaggaatgtcgatcgaatcacttgttattgttgaggggcagccagataataatcctaaagccactgtttccaacattgattgtttaaatcatatgtccttccaatgctattattttaagataataataaaaagttattttctgacagttctttgtgctgactggtgaaaaacaagggtaaataagcaccttataattgacttactgtgaatgacaatccatcttggtatcaacgatagaagccctatcattttggagttggggttaagagtcagaaacaatgtgctcagggatctcctaaaactcttaaaacagggtggccagtactactgggacaaattgtgttttttattattaataataatgataataatactatccctccaaggcacaagtgaactatatagaactgcgtgtgtgtaaactctttactctcgtctcattttgttgagtttagaacttgatgtgctcgtcagtcttgtgtttcaaaacactgaataacttccaaagcaaagttatgccagtgtgttcaaaagataaattaataatgtaccagcaaagagcatcattcaaagtatagtccttgcatattccagttaccatttctctaataattaaaatattcatgataaatatatatatagcatcatatgttaaaaactatttcaaattctacatattaaggatgaaaattttaaaatccagtaataagaggagagacctgcctatcagtacagtgatataggtaaaagatgaaatatgtttttaaaataccagcaattaactattgttttcatgggttctcctc

SEQ ID NO: 79771 - DNA, 1131 bp, Homo sapiens
ctcccatagagctgagattataggagtgagccactgtgcccagcctataatctttgaatttaggaagaagttataaaggactaaaagacttaatcaggatgaccatatatactaatattagttctacttccattaaattcactagtcatcaacagtaaatgacttttgcatttttgtcaatttcccatcactactctgtattcaaagcataaggtttcatttttaccaatcattatctttcacaataaatatgattataatgtcaattttttaaatgtgctaatatccttcagtgccattgctagtagtatgtatttggtcttagaacaatcagccctgttctttcttattttatgtattttattgtgtgagatgatgtgagaagtttttggttttgttttcttgtttatttgtttgcttgttttttttttttttctcctttatagctatgttagaccagaaaggggtaactgggggttaattgctgttttgctttttgattttgcacctgttaaatgagcaaacgggcaggaatgggaagtggaagggaggagccctgtcaggagcttcactctccatctctttgcccaaatgcaagagtaccattaggatctctgattataaacagcacttaacatgtggacaagatctggtgaaaacatttcctagagaaggttattctgggttaaaataataagcagtttgcctttgtgaggtgctttggaatctaaaagtaattttgcaaattgtgtcattaccctcagctggtaaatggtcaatgctagggcctccatccaggccttctgactctattattttgctcagacccagcattgctttattacaggcaaaactccttatcgaaaagaaacgtgtagttatcggagttgactagtgccagttctggataaaatgtgtagaggatgccatcacttccagttgcagtgccttcactacccacccaccactgcccctcacccgcttctccatcactagacatctttttgcacagtggtagaaggcaggattccaggaagtagagcagaaggcatcttggagtagaagaagtcaagagccttgggttctgtatgagtctgctgctgacaagctgtgccaacttttgcttatgaa

SEQ ID NO: 79772 - DNA, 1074 bp, Homo sapiens
ggttttaagatatattcaggaaacattccccccacttttcttctcttctgggtgaaaagattaatttgaaggtcacctacattcccaaattttcccatcacgtgtgttttgtttctacactccaagtcctccgagtttatgatgttaggaagaagaaagtagaactcagaaagatatacttgtttttgattcttggttttagtacatatgaataaatgctttcctagcaactctgagactctgcattgcgaggtagaagagtgctaaggaagtaatttataaatcaaccctcacttcagttaaacagggcttagcttcagcacaacagtcttttaattacatagaaaactctgcccttttggatagacagctgatgtgactgagaacccgctagctaaactgcacacgacacccaccatgctgttgcagaaggagtctctacatgagcagcttagaaacaaactcactaacatcagatgacccaaatgacccaaaccatttctgcctctgcttaggttctctagaggtggtgtttatcagaatgtgccgtgcctttgactctcagaacaacaccgtgtactttgatgggaagtatgccagccccgacgtcttcaaatccttaggtaaggggatatcaaggtgccttttcttcaaatcagggctataggaaaagatgcgggttgagtgaaagctctgcttggacaaaatgaaaactttatttagaaacaaaaattaaggggttttatacctattttactttctagttagtcactgtagaaaagtcatatagctcaaaagttttttgtctacattacttgtaaagatgtagagtttcattttatctagttggtaatcaaagggatttatatgacgtgtccttccagttcccttccagattttaagaaaccagatttgctggtgatatattattcggatgacctttaggatgtgagctgatacataaaattaagcaaagggcaaaagctttgcccttccatccccctcaaacagtaaccattaatgagactgaaatgcagatatcaaagaaataaaagttacagttaagtgaaacca

SEQ ID NO: 79773 - DNA, 1050 bp, Homo sapiens
ctgcaatttgcaggaaaaacaaaagaaatacctagttgtcaccataaaagaatatcattttctagtttttcaagaataagaataatccttcccaggtcaatgttatgtggcagatgtgtcttcataaaaatgccaagaagaagcaccacgtcaatcatttcctatgtctatctaggtcaatattttttcattcctagacattggtataaaggcacagaacaagggcaaagtcaggagggtctttgaagtcagcaggtcttatcttcaaatgctggctttgcaaagtccctgtcctccttcacgttcccaaatacaaaacagttccaaattacttgtttaaatgtgtaaagacagtcaaaactcgcacagcacattgttttctacttgttatttcttaaagcaaatattaaatcaccaattattcaaagaacttcgcttttcgtgtttgtgatctcccgttttctccttagaacaccttgcacagaatatatctaaatcgcatctggaaacctgccaatacttgagagaagagctccagcagataacgtggcagacctttttacaggaagaaattgagaactatcaaaacaaggtatgatctgaggaatttttcctcctaggattgaggcaatattgggaagggtgttggtataggaaagttggtcaagagttcacacagactaaagaatgaatgtcatcaggtttctgtttaaatatcttttttctgaagctactaatgtacttgaggctttgccatttaactcagatgcaaaatttcagcaatagcaaataatttctattgtgctttctaggtatacacatacctccttccatttgtcaacaggagaatagattaagcagcttccaaaagtctaaatgaattgagaattgtctcaatatcacaatcaagattttaaggtctggaagtttatgtaaaataatctcagcctaatgtttctggaagttgacaaggaagcctcatgtttctggaagttgtattagggagtatatacaaaaaaaatttagaagctgtgatcataactccagtct

SEQ ID NO: 79774 - DNA, 1096 bp, Homo sapiens
tgctttatacctaaggtgacaaaaaaaaaaatggcagtccacaaactgaacttggcccacagacatatttttttgcccagggcagagttttaaaatttttgaatcagttgctaatatttaaatttggataattatacccaaaagttcagcttttttagcttcttgtgggaggggaaaaaatgatctatttacactgagccaacatttgtgaatgtcaacagccaactggcaacagccaggggattacacctttcaatgggcccacctgactcccgccatttatatcatatgcacagcccctgtaggcatctcatttttgcaactctgatatatagtataaatgttcaacagaaatcagcttctttacttaccaaaatgttctgatgatggatattggtgacaaaattgatgtaattcatataaggctcaccatgcaaaagacaaaaaactgtccttttcttattgctggaacattactgcttcttgggagatgtgacctagaaatgttgataacacagacaatgggcaactttccatttcgaggaagttgtgttaacatccgctgctatatttaatcgatttttaagtacagcactattattagaaaaactttgataagaacctttgtagtttttaaatttgatctgctcctcctggtggttcctcacacaaggttataatcctttgggatatgtcaattagttgctgtggagatgactaagttaatacaaggagagaatgaagacttcagacggaaaagaaacagcaggttcagacttgagcacagaaatcctcagttcacagaaataatggctgtgttctttagacggtttctctacctctgcaccccataaaacatcttttaagtgaaaatttatatttccagtaaaatctttctccaaatagaacaaattgaatgttctttacggtttttacacaagcatctctttatgggtctaaatttaaatcctcaagagcagggacattttaagcctggtctttaaccactgaacagcattaaaaggtgtattgcagctcttttgattaacagagaaacctctgaactagaagccaagctgagcagaggtaggtttga

SEQ ID NO: 79775 - DNA, 1044 bp, Homo sapiens
caaaaattagctcggtgtggtggtgcacgcctgtagtcccagctactcgggaggctgaggcaggagaatcacttgaacccaggaggcagaggttgcagtgacccgaggtaatgccactgcactccagcctggtgacggaccaagactccgtctcaaaaaaaaaaaaatgacaatttttttcttttttgacttataaaaatgggaatttctcattgttcaaactactatgtatgcctggacgacatcgccaaaagtttctggtttgatatatagttctggtttgatatatctaaggtgtatcttttaaaagctctgtgggtgtttctgatgcatcacctatatgtcaactgctgtacctgataatctctcaaagtctttcagcaccaaaggcctgtttgttttattctaattttctatttgcaatagctgcatggtaatctgctgccactaggtggtggtagtgcgccacagtcacactaaacgtatactacctgaaatgtatcatggtggctctctggctcaagctcaccatgtttgtaaatgaacatctccatgtattttaacatccataaaaagtgaacttttatgacagccaagtaatttgttagcttatcttttagaaataacaaaattgccaaattatgtacttgatacctttcccagctcacaacttcagcactttttttttacgcctcctcagttccacccaaaactccatgccctagttttgtgcttcccctgctctctgtatgacctccaatccctggaattcatctctcagctcactcacttcctaatccttttgcaggatttctccccaatcagacaaaatctatctctgtacttagaaacacactacttctaccttgaggtaggaaggtacctaccacactttctacttttcttcttcctctttctaatccttcttcctcttatgtgttatttaactcttagtatcttatctgtttaattttccaaacccttaatcctctgagaaccccgccccccaaggaatactgaaaagaagaggtttttaaaaagaaa

SEQ ID NO: 79776 - DNA, 1070 bp, Homo sapiens
ctgaaaataaaatcaaatgccttagggtttttctttttaatctttattggtttttctgcttagaaaagtaatacatgctggttgtaaaaaattcaaacattagagaaatatctaacatagcaagtgaaaagtcctccatattctctgcactccagaaaaaaacaccatcaacagatctgtgtaaaagatagataggctttttaaagcactagtttttgaccgtttttgcaagacacacaaaattggttgacattcataagtatgacagacatgttctcataggtgtacccaaggttcggccattggccgtttcctggcaagccagcagtaaccccaccccattcagtccaattcaagaaaatatttggttgtgcaattgagctagagtgaacgatattattggggtaaccttgggtctatattagtttagtttttatgtgaaccaataaaaaactttaattttgtaaaacttttattagtaaccaattccctgtgacactcctgcaacttattgcaacataccactgtgttgtggcaaacagttaagcagcaatgttgtgaaggattgctgtggtagctggtaggaactgcctgtcatgttatttggaggataagcagcttttctctatccccacctcggaaagagcttaaagtctggaggaaagaatttcatttcactataaggcaggatttcttatcaacaacaacaataataataactactatttactgagtgccagctatttctaagaactatgtgatgggcatatatagagaatacatatataaaatgctcatacagatatcatatatatggtatgtcatttatgtatcacatccttgaatcttcaagtatgaaactgaggctcagagaggttaagtaatctgcccggccttaagaactgtcaaacgttgacattggtcattttagggttaaaattctaaccagaattttgtgaaactgagatcagtggcctagaaggttgatggttatttttagttataaactacggggataactcccagcaagagatgttgacatcaattcctgagtagtgtgttaagtttaa

SEQ ID NO: 79777 - DNA, 1757 bp, Homo sapiens
cgcaagcagtgagtgtgggaagctgaagggagggacaacacgagggaaaatcctgctcaaaagaacacagaatggtgactttcattgtcataatctgatagtaatcacggacaattctgacttcagccaccagttcagaaatcactaagaggcaggagagtttgatcatgaggccgcttggtgcttttactgcagtcacacagaattccctgtttccaggctcagcaaacctctgttacgcaaactcgggttgaggacaagggtgtgctggggaattggatgtaaattttagttgtgacattgaagctttccccacaggaagtcctttggaactatcattttattccattttatgtttaaaaatataaaaatgggctttattaaaatcccatttttttaaggtttatgagctgttagtgaagactatacagaactgctacctattttcctgtctctatctgtttctcctgggaactgttttggcttaccgcagatggaggaaaagagccacactggagtgaaatgaatgacaacattcccggagaagtctctcacgatctcaaaatccttggcccactggtcatttatagccactgctaaagtatttgtgaccagtttcctttagtttaacaattactctctcaatagacaagcatccatccaaataacaatttgtcctaaatcaaatccctggaatattaaaatacatcattagtttaggaaatctgttagttggccctcaaagtttttcattttttcttacataatcccttcttgctccccatttttcagttagagttgaataaggtagggcctagcaatgtcaaccatgatggagatgccacatagtatttgtcaggttagaagaagggtgagaaagcatgtagcaggtggaacggatggttccacagccccttgactccctgacgtagaagagactgaaggcaacctgatcaccacgttcaaaagttggctttctccattttaagttcttccttaaagcctctttaagcaaagtccctgaaatgatacagtagaaaaatcacacagacttatttaaaatgaattctatcactattcctgagatctcgcctgccccactgaggacattttgttttcgcaaagtgctttgaaatgtgataaaggatcttaaagaatatttgtaaaattatgcccaaagaagacattctttgaggttaacttgcagtgtctaaaagtcaagaatgaggaaggaaaggaaaataacagattcactttaaaatggaccacgctaattgggcagtgaaacatccttgtgtcacaccatttaccgtagcagaccagaagagggaaaaggcttgatttttctctcatagataccacagttcactctcaaaaacattcctaaaatggattgatatttctctgatagagcacctgttttgctactgacagtgttaagttccatactaatcagctcatctagcctaactgacaactcaaaaagctgattccaagaacaagaaactggcttcaatagaaatattatggtttattttgaagcgtggggacaggtaaggactaaacaaatttatctttgtgacatagtttaaagggtattttaaatgaataataattcctcataagtgctagccattcgtctcattgttggtgggtgtgtttgaggtgcggctggtttttaaaacaaatataccaaaggttatgaaccccccaaatattctgttccattcagaatttatttgtaagtctacgcactt

SEQ ID NO: 79778 - DNA, 1055 bp, Homo sapiens
cacaacatgattttaaactaatgctattggccaggcgcggtggctcatgcctgtaatcccagcactttgggaggccaaggcgggcggatcatgaggtcaggagatcgagaccacggtgaaaccctgtctctactaaaaatacaaaaaattagccaggcatggtggtgggcgcctgtagtcccagctactcgggaggctgaggcaggagaatggtgtgaacctgggaggtggaggttgcagtgagccgagatcgcgccactgcactccagcctggggaacagagcgagactctgtctcaaataaataaataaataaatacactaatgctatttaccgtgaagtgtagtagttatacttcgtgcctcccagcacttgagggtttcatcattgccttacagtatttctcagaaaataacacattctcccctggaaattgttggctgactttagcaaattcaggccacctattcatttaagactgttgtgtgtgtttgattatctagaatgaattgccttaagagtctcttttggaaaagtactagcacagtgcccgaaatgccagggagtggaaagtcatggtctcggcggggaaatgactgcagtgttcatggagacagtgttttcgcttggctgacattaatgacaacccaatgctatgtgctcactgagtgttttcatttcagaagagcatcaaaaccactgagtcctttcaagtcgtcttcttttactgtgaaaccagaaaccatgccgacgactactttcagtaataacctgtgtcccaactgcaggctgaagtaaacttcttctcatataattttctaatttctgtgtaggggtagttgtagcaaacaacttagtttctttcagagcgtgacttcagaaagcgtattttcatgcagcagtgatgggtaatgaaatcagaatttccacaaagtctgccctaattgaacagcattatcaggaaaaataaaacatgagactcagagttttctcccaaagtcatttatgttattaggtaatgaagctgattttattttagcaaacatactaggagg

SEQ ID NO: 79779 - DNA, 1060 bp, Homo sapiens
ggcaaagtgaaagccgcatgcaggtctgtggaattgtatggggatgtttcatacaacactgaatgccatgtctgctggaaaacattgcttgaaaataaatatgtaggccatcgctacctgtgtgtgtacttgctgtaatggagcaaacttccaatgaccaccaagaatgaaccacagtgaactagaagatgtgtcctctgataaacaatgtctgtgatgtagccacacaggaaaagccatggtttgaagctctggggagcccgtttcctaagagactctctggggcacaacaataagagctgctgtttactgagagtctcctgtcccccaagcactgtgctgtctcagtttggttttaggtgggtaagatccccatgctacaaatgaagaaactgaggctcaaagaaatttccctaagattgaccacatccgtggcagaattggaacagtaagtgttcttgatgactaaaatagttggaaatatacataaggggtaaaatctcatgaaggttccctaattaaattcacaaggtagactttgctttgaagtgaagtgagataccttctaaagcaaaagtctgtttaatattttccaccattagaaaaaatgcgtgcttaggccaaagtgcaagaagaggaattccatgtggaaaactgcaggtgtgtctagttaggccaagaggtataaaaggctgagcagttgtctggcacacctggtatttgcaccatcagcatcttgcacttagtggatgctaagcaaatatttgtgatttttttcaatagcagggatgtttgtctgaatatttaaatattcaccttagtttgattttactttggtagactgactccgtgttcactttgggagaatttcaacttatacgtgtccgccttaagtaacaagattcagaaaatatgattaagtatagcatttatttgagcccaaacttgaggatagccacctgggagaatagattgaagttgccttgtacactcggattaacagcagttacaagtgaatttttaaaggaagaaataagaggcagtttctaaattgtttacc

SEQ ID NO: 79780 - DNA, 1052 bp, Homo sapiens
gtcaaatacctggccttgcatccaaggactattcattttccttaagtgtttaagtggttctttgagaggatgtgttgactttatcaattcaggccacatcataattagctaatttaaagaaaaaacaggggtggtatctatatatgtttgtaccaaattgagttttaatataatcctggttctctgagggtgatatggctaataattaagttatccccattaggttatactttcggaagctgctgttgcctgctgcctattccattaaaaactaactttatcactaattttaacatgaaacagatccatttggagaaaaatccattatgaatgagacagagttggctgttgaataacattggtgtaggctcaagtctggaataaatgtgatatagatgggacgatattggacaaatgcaatttatttcattattcagcaacaaggtattccaaatgtctctgctaatgaatacatgaaaacagattacatataatgtgcacactgtgagtcgcatttgcagaattatttttgccacctctagcactatctgaaaccaacactgaatagcaatggtacttgagcttctagttgcaagaaaaagcaactttaaaaattaaaaccaaaaaatgtaaaaagaaaaaagtaaatgtcttatctgtggaatttacctttatgggagaattcttgggaatatagcagttttatctcaatccaattgtgttgtcctctgttaaacctctattgtcccttaaaatcagcccacatgaaaagaagacagtgttcttcttcaaagctctgatggacgactttagagactgtttcaggaacactctgtctttttgctgagatattggtagaatacaatagataacatttaccgagctcacaagggggtcactgcttgtccacagcagtttgtaagctgttggttctggcattaaatttaaagtcccacaaagtgaagcaaaaatgtataataatgctattattgtactggttgcagggttttcgttcgggtgccattggggtattgagatatttaaatatcaat

SEQ ID NO: 79781 - DNA, 1004 bp, Homo sapiens
acattagcctttcatcctcctttttacagaggaggaagcggagactcagagacgcagagcaacctgtctaggatcacagggctagcacatagctccaattgggggctgagtctgccagactcgcagggctgggctaaccctgctctgttctgacccaacagccccagcaccaccggagtctcagaaactcacattgttccagattccgagattaggtcatcatgcaaattgaggttaggggctttttctgaacactgcagtagaatggaagtagacaaaatacacatagaaatggattgagcatctgatgtgtgccaggcactataaaaagtgctggaaccagaaagatgaaaagaagtggtccctgccttcaaggagctcacaggccagggagggcccaaggtggaaataaaatcatgacatagtgtaaatgctagagcagaggaatgcaggagacgataggagcacagaggaggagcacaaatcagactgaggggttaggaacagctttttggaagaagtgaaggcttagctgagctttgaagcaaaggaaggttattgccaacaaatggtagtttgtgaaaatccttgaaagctagacagtgagcaaggcaagtcggggactgcaggagacaaggcatgtagaggagaccggtggggtctgaactatgacaggctctcaccctcattctacgggagttgttctttctactgaaggtgccgggaggccacggagggaggctgccagatatttttaaggcacatgaagaaacacgagaaacaatcagatattctcagtatcttcctttcccttaattatttcaagagataaaaaagctttttggatgcggcaaaggtctcttctgtgttatgatttgggtttctgtgcggccgctctgcctcttgtatggtgttgagagatgtatgaaaggcatccgccacgagtcttcaatggatttctgcactttgcttgatataaattgattcagggacttcattatgat

SEQ ID NO: 79782 - DNA, 2117 bp, Homo sapiens
gcttccaaaagcctaggaggggaggccaaggaatcttcttttgtaaaagatcctcttgtgaggataagacaggtttgggaaccactgctcggggctaaccctttcctcttactcacgaggaaagggaatctcagaaaggtaaattatattaaggtaaccattcacttctctttagttcactcccttcagcatggaagaggtgccagatgtgagcaatttctggcattgttattaacacacttgaaatatttttctgttaactttggccttgctatcaaccagcatgcagaagcaagtgggcagactgttccctcaaatctcttaccccaagtggcccaaacaggagagaaccctgaggctgttttggtgctggaggctgctgtgagacttttcaaatactgtactccttttcgtcataaagccttgtccagaagccccagcctctgcatgtgacatagacacaatgtattttagccttcactgtgtgcctgggctgggtcttgccaatactgtgaccacttagcaggagcaggctaagagtcttactgcagaagtcaaggccaactcagtggaaacagtgatgtcttttcaaggttgctttattcagcgacaaagtaaaggtttcagtgccctggaagctgatcagtgcttcctgtttagcacatggcctttctcaggcactgagcatctggtgtgtatctgccagtgtccaggctctggaggtgacatccaaacaggggagaccaaatgctgccttcgtgcagcttagattctagtctggtgggatagatgaaagtagacttcctctggctggtgtggagaaggactacctgcctgcttccacactgcgacaccagccccctttttcttttgaaaatgctggtgtagtatctatctcattattgtggcagatgtgatgctggcggccgaggggacagcagtgatcatgtcagtctctggtctctgtgagtgtacattctggtgggagaggtaggtaatacttaagtaaacatatcaatgaactagataaatgcagataataacaacagctaggccaatgtaaaaacagtataatggtttagaaatgcttatggcctcatgggtcaacatcagggaactgaatcaaaaaattttcccaactgatggtgaacattttgcaatagacctcacaggtcatctgctcccaacctggtctgcgtattaatctatctaaagagtttttaaaagatatataagcccaggctgtgctcttacagatttctgattttactggtcccaaggtgtagagctcaagtattgctacatttttaaagataactcagataattctggttgagaaacctctgaagcccaacaccctcactttgtacatgagtcaccctgtccgcagtgtagcaaaacaatgttgagtagtggaaacccccctacatagggtgggggaagatgaagatatgggttattgtcccagatctgcgatgcaataattgtcaggttaaacctcagttgttcactttccctgtttttaaagttaaagggttggacttggtagtcaccaagatcttttccatctctaccgttctatgaaagtgtttctattaaaacagaaacatgctctagtttcttgtttgagacttgggagaggcaaacaaatgcctcctactttccttattccctgtctctacccttaattgctataggtccttctatcagctaatcagttccttttggaagtgaaaatttaagacagaaagaggtaattactttatgctatttaaataaatttaagaacaagcaagttttcattaatattaataataaatatgcccagatttagttctagtaaattacagtcataccttatttatcaaattgtagcctaaagctttttccgtttttgatggttgatttaaaaccaaggggcgggggcagttgtttaaaaatggaaaccatggagtagccttaaccattgcgtaccacagtaattttattctttaccaaatattccaagccaggaacccaaagaaattgagtctctcccaatgtatcgtctgcagtttattagcaagcagaaacaatgtatctcttgtgatgccatcttattttataaaaaagaaaaa

SEQ ID NO: 79783 - DNA, 1125 bp, Homo sapiens
gtgctgctgtggcatgacctggtctgcatattctcagatctcagagccagcaccagattgtgatgaagtttccacaaaaatgagggcaatccattgtaaagctgccaactttatttaagaaataaagaagagagtgtccttcctacttttggggtattgaaatgttgctttcttttatgaattaatggtaattgaagatggtagctgtggggtttttttaaacacccttttttgatcaaatttaaacttggcaacagtatattgatcttctcacaatttcccaatttccttttcttttcttttctttttggattttactggcctgcaaaatccagtctctggaaaatatcagtctatggctaattctgtccatatggtaatagagagaatgcagataatcaccatttttagctcaaagtagcaaatccctcccctcccaaaacttgtgcctcagctaatgataagtaggacacccgatgcgtgtgagttgtatttctccctccaccctctaataggagtcctaaaattaagccacagaaggtcagaaaagaatgaagcaaggggaaaaataataataaataaataaaccagctggttaatggactcagtgtcgatgaacaatgaataaaagtatgccctatcattatttggaatatactaaaaaattattcattgtgtatttgaaattcaaatttaactgggaaccctgcattttctcgggccaacctacacctaagtctatctgaccctttagaaaatacataggtagtgaggccgggcgcagtggctcatgcatgtaatcccagcactttgggaggccgaggcgggcagatcacgaggtcaggagatcgagaccatcctggctaacacggtgaaacccccgtctctactaaaaatagaaaaaaattacctgggtgtagtggcaggttcctgtagtcccagctacttgggaggctgaggcaggagaatggcgtgaatccgggaggtggagcttgcagtgagccaggatgcgccactgcactccagcctggacaacagagtgagactccgtctaaaaaaaaaaaaaataggtagtgaaacatgaatttaagtagctactacacataaatagttattaataaaata

SEQ ID NO: 79784 - DNA, 1033 bp, Homo sapiens
gcccttgagctgaaggtaggaccaaaagagacagaaggttagaaaactgaaggatagatgcaatcgaatttattagccaccattaggggtgcttctgacaagacagaggaaggagaccctcagcctagcctcctcttcaaccatagaatagcactctaaaggtaaacccttctggttcacagtgtgagtgcgaggaaggaaggatgcaaaaatggggaagaagagccaccttttattaccccttactgaagttgtcttctaatcaactgctgcctgaaactgtccatcttcttgagtactgtaggcaactttttgatatttattcattatacattcatttatttaataaatatgtattgattacctgttctatgctggcagctacttggacaaaaagaagttggcagctaagaaagaaagatatgtaggcctgggcctgcagaagtatgcagtttagaagtaggagtgcagagtgtccatgagtgactagttccagggaaagtgagaaatacacatagccttgagggcacggagactgtgttgggagttactcaaagcagggacaggagtgacccgtccttatgaggccgtacagaggcaaaacctcttttgggataaatgtgcccaaattgggctgcaggggcagagcaaggctggagaagctctgatgatgtggagtttaaaaagcccagaattctagtctcagcacaccacttcccagcagtgttaagcatggagcttcctttctcattgccttgtctgcccacctctaagtgctggagttggagggatcatctctgaggccccttctgctgaaagacctacaggtcctgattgtttgtgtgctctggagcatagaggattggaggtttgcctgggattcttcatgcggggccctccctccctcttctgtgccctgggaccagtgtagtaagcagagccctgcttttcagaggcaccacaggagctgtccagaaagcccaccaacatcatcccactgctcaggaaggaaattgggttgcagccatgagaa

SEQ ID NO: 79785 - DNA, 1014 bp, Homo sapiens
taaatatcccgcctatggatataacaacgtattagctctgtgttcagatgggataactcaaggggagacctctaccagatgcaattaataatatcttacatttatattataattttattattgtataaagtttttaaaaatctgcacctttcttatagtacttttcgcactctgacttacagttgaattatatgtaaatgtgagttacctcccctactacactttaagttttttttagggcaggatctgtgcctggctcacctttaggtgttgagaaatgaatagcacttggcatatacttgttgcattaatgaatggagcagggatgtttctgcagatccttttagtgtgttttactggtaaatgcattttacttataatattttttaaatgggagacataatcttttcttcatttttaatcccctcattcaactttataagtgaattgtgtgtctctgtaggtattttggatgaaacgaatgatgatttacttagtagggatatttttaagtggaaatgaactaatgtcctatgtttttctgtgttaatgagctgtaacttgctattcaactgaataggtaactgaagaggagcaacctagtccctacacaagcagggtcaatataattcctatcctgtattgtctaggtccaagggtgagttgggaggatgggtatattgcagatacttaatattgttgaacggtaagagaatatttgtctcttggttatggattctgtttacaaagcaaaaaagtattttagcctgggtgacataatgagacctgattctaaaaaggtaaataaataaaaaagcaaaaaggaagcatcttcttatcttgttaaattctacatgaagaatagtcacccggatgggaagtagaagtaaggttttcagttccaataacatgcaaggaaaaatggaaaaaatcctttggcattcgttcttttgatacagaggaaaaatactaggctcagtgtttcacaaaccttggtgtcccagtctccgagtt

SEQ ID NO: 79786 - DNA, 1033 bp, Homo sapiens
gagggaaggctgaaatctgagtgtctccacccttcgagttgaggcaaacctccttggtgcatatgagccacaaagatcattcctcccaggcctcagttgactgatcatgatgttttagtcaatggaaagaatatcagtgcttatcagtttacagcaattcctggggaaatgtagaaccatgttaagtttgttggaagcttcattgctaggactgtcttgagaaaaaccttgtagagtttcctgcaaagtgaccaccagcttgacttttgtagaagaagtgtggattactaacattagccaacaggttcatatagtgaaaggctgcaagatgtgttggcctgttaacctatctgtttacttacttgtgccaaacagcatttccccttctatggtgcttcctgctcctattacatcttccacagcagcaggtgcagtgagcagcctggattgcaaatgacttcgatggcagggctgggccggtaaaacccaagcctccattcagggagtcttatggagagatgcattagactgccctgggcatttaaatggaccattggtgagcctttgatctgaactccttgtggttgtgttggaggaaggcaattctttctggccagaaaactgaggatgcaaaaagataagagttgggccaacctgggagaggccactcggatcactccagggagacaacgagccttgggttcctaggacgggttttcattaatttttgtgaatgagaaaagtctgatgagccttcactttgcacagcaatccaaattgcttgtgccttactgactagaagtccaatttaggcttgaaacgagttatttatgctcgctacctaaacattctcgtctataaaatgggagtaattcatacctcacacagtgttgggaggaggaattgattaattaatgtttacaatccactttgaacttgaaaaggcttcttgggaagttattattaagcctatatcatttttactttgagttctggggtgtgtctaaacctgaaactcaaaggaaacctcaca

SEQ ID NO: 79787 - DNA, 1051 bp, Homo sapiens
tttcacttggggtattgcttctttttctcttgggtcataggttctcagatggaggaaggtgagtcttggaaatcaattctggcttcaacacttatcggttgtatcatctataggctgctgtgctgcttagaggagaatatccttcccaaagttatttggctgtgcctatcacagactgggcaccccaaagtagttcctttttctttattcatttaattcatgctgcctatatttattgaatgcttgttacaagcaaggaattgcactcaagagaccagaagtagacccacttcaaagctgataaaacttaaacttcaggacccttcatttgcaccggcctctcctaaagccctgagaatgcccctagtaatttattttcatggttataggtttctgtaatatttgcaaaagttagatattttacaattctttcttcttaaagaaaatcccctaacttgcttaaacttcagctgccccaaacctagatctgtccctgaaagagctcacaacaagtgggataaagaaacatacatatagattatcaagaaacggtatggatagtcggtgcaatgcagacccagtgctgggaattctggcaacacatttgtaaggaagcagggtgtccagggaagtcttcctggaagaggtggtgcttgagtttggccatggaatagaaggaagactcttctagagaaacagcttgagcaaagttacagaagcaagatatattaagtgtttgtgtatgtgattaaaatactttgctgtttgagggcattttccttcgggctgggatggcctctgatgccaggatgaagagagtccttttccagggagcagtatggactgtggggctgtgttccttgggaacacctgatccttgggatcctggcctcagctggctcctctgtttggcctttgggaggcctactggtgacaacatcaataattgttcttcaaggaaaaatcactcttctattccttgcttcttctcccatagccctccaacccttctttactgtcagccttgcaaatcaatatttcattttgaaga

SEQ ID NO: 79788 - DNA, 1061 bp, Homo sapiens
tggaaggacagagaggccactattttcaggagcttcctcttctgatggcaggagtttgaagcccagcaattcctcagcatccactggtgcagcccctttcctctcttccatccattttcttcggcttggattcaagcttggaaaaaatatcccggggactatgttgggcatcttaggaagctgtgctctctcttcatttattattttattccatgaatatttaactcatattaggaactgcactagacactggagatacagtagaataaggcttaattcctaccctcaggaagctccatctggaaagagaaaaagataccatagatccccttcgcctctcccacttccacccaaaatcagcatccttagcatatgattcatgcttcagtacaggagagtcacatgcagaacgccttgaagaacgctggctaattctgcctggggagttggagaaagttttggggaggagccaaggttggtctgagaactaagagaaagtccttctgggcaaaaggaacagcctgagtaagggcatggagacatgacactgtaggaggcttggaagccatataaaaagttaagtcttcattatgtgacattgttcctttggactagaagagctaaattagtccctaataatatattctctcataatcttcatagattgttttatgatatgtagtatgcctttttatccaaatagattatatgttattcaagttctaagaccttgttctcccccataacatggaactaagcaggactgagtatccgacatttacctaaaagacaaagaaaaaggtgaaattaacacaagttttgatcttaaatgtgatgcttcagttctctgagccttgattttctattatataaaattatgataattatgctatttctcaggattatttcaaagataaaataaggcaacacaggtaaaagtactttgtaaactatactgtaatattgctcttattacatttgatctgataggtaattataataaagatatagtattctgtagtagtttttactccctcaactgtggccagttagactctaag

SEQ ID NO: 79789 - DNA, 1140 bp, Homo sapiens
gactgtctgtacctgacctgggaagctgggatgggagagtggtggggaatgggctggctcatgggtctgtgttagtgtagctggagttaggagagccaggttcatttccagttctgctctggtgaagtagagaccttggcaagtcatagcactccttgggctacaacttcttcctttgcaaaatgaggctcttgaactaggagataactatgcttcttttaaacgatcaaattctggcaatttcagttgtggaagtaagagtgaaattgaaccccaattttccctttgataaaataagagttttaccatttaccaccaaaccttgtttcattgctctcaccctcagtttctctagcaatacaatcagggtttggactacacagtgtatatattttttttagttctaaaattccgtgcttctgtgaatactgctactcattgctttattcagatttcctttatttattcagcaaactttgagtttttagtatgaggctcaggagtcagactgcctggattccaatcctcagctgaccacatgctagctgtgtgactttgatcgaattacctaaaccctttggcctcattgctctcacttattcacatgggattaataaaactggggctcttgtagagtgattgtgaggatagagtagcatagcaagtattgcacaaaggagtatcttgcacctagtgcaatgcctgccacatagtaagcactcagtaaatgtttttatcagtaccatcaggccccacactagttgctacggatgcaaagatgagtaagacacagtccttggcatcatagagcttacaacctaggcagggaggagaaagagatacaaatcactagaatatgatgtgaaatgacaaaagtgtgttcccagcctttgaggaatacagaggagagataggggataaaagtggtgagttactagtcacgtggaagcctttgagccactttgggtggtgaaaggaagaaggagcaggctcttaatgcgagccctaccttctggaggacttaaggggaccacaggcgccaggacacgggcagcagatggagcggacccagtgcagagcgtaggggctagaagccccggatccaaacagccaaggggacaagagtcagcactgaaaggg
